United States Patent Application Publication US 2007/0067865 A1 - sequence listing, part 24

SEQ ID NO: 147398 - DNA, 445 bp, Arabidopsis thaliana
agaaaaatgggtcgagtctcatctattatctctttctctttgacactcttgatcctctgcaatggctacactgccggagaggggcccaacgagtgccagctcgatcaactcaatgcgctcgaaccatcccaaatcatcaagagcgagggtggtcgcatcgaggtctgggaccaccatgcaccccagctccgttgctccggctttgcctttgagcgtttcgtcattgagcctcagggtcttttcttgcccactttcttgaacgccggcaaactcacgtttgttgttcacggaaggggtctaatgggaagagttattccgggatgcgccgagacgttcatggagtcaccggtatttggagaaggtcaaggtcagggtcagagtcaagggttccgtgaccatgcaccagaaagtagagcacctacggtgcggtgacaccattgcaaca

SEQ ID NO: 147399 - DNA, 428 bp, Arabidopsis thaliana
aagaggaagaaaaatgggtcgagtctcatctattatctctttctctttgacactcttgagcctgttcaatggctacgctggcgcggcagtggcccaacgagtgccagctcgatcaactcaatgcgctcgaaccatcccaaatcatcaagagcgagggtggtcgcatcgaggtctgggaccaccatgcaccccagctccgttgctccggctttgcctttgagcgtttcgtcattgagcctcagggtcttttcttgcccactttcttgaacgccggcaaactcacgtttgttgttcacggaaggggtctaatgggaagagttattccgggatgcgccgagacgttcatggagtcaccggtatttggagaaggtcaaggtcagggtcagagtcaagggttccgtgacatgcaccagaaagtagagcaccta

SEQ ID NO: 147400 - DNA, 467 bp, Arabidopsis thaliana
gcgtccgaacaaaaagaaaatggttaagctcagcaatctcctcgttgtaaccttcggggttctactcgggcgttaacggctgccttgcgagggaggcgacttggggttcctcctcagctacagaacgagtgtaacctcgacaacctagatgttctccaagccaccgaaactatcaagagtgaagccggtcagatcgagtactgggaccacaaccaccctcagctccgatgtgttggtgtttccgttgctcgttatgtaattgaacaaggcggtctttacttgcccaccttcttcacttccccaaaaatttcctacgtcgttcaaggaacgggtatcagcggaagagtggtccctggatgtgccgagaccttcatggactcgcagccgatgcaaggacaacaacaaggccaaccatggcaaggacgacagggacaacaaggccaaccatgggaaggacagggacaaca

SEQ ID NO: 147401 - DNA, 466 bp, Arabidopsis thaliana
aaaaccggttcggcccgcgcgtccgagccagtcaccaaaaccagcttgaccgcaacccattgcctttttacttagccggaaacaaccggcagggtcaagtatgggtgcggggccgagagcaaaagccacaaaaaaacattttcaatggatttggacccgaggttattgctcaagctttgaagattgatcttcagacagcgcagcaacttcagaaccaagatgacaaccgtggaaacattgtccgagtccaaggcccgttcggtgtcattaggccgcctttgaggggccagagacctcaagaggaggaagaagaagaagaaggacgacacggacgacacggtaatggcttataggagaccatctgcagcgccaggtgcaccgataacctcgatgatccgtctcgtgctgacgtgtacaagccacagctcggttacatcagcacttctcaacagttacgatctcccca

SEQ ID NO: 147402 - DNA, 453 bp, Arabidopsis thaliana
  unsure (1)..(453): unsure at all n locations
cctagaattcgaaatctcccaagaacccgaaaaagcgccatgtcgctcactatcccnacnaaggtcggtctcaacccgaggtcgagcaggtctctcactcaatccgtacctaaatcctccgcaagattcgtctgctccgatgacaaatcctcctcctccgcacctcaatccatgaaagctttctccgccgccgtcgccctctcttccatcctcctctctgctcctatgccagctgtcgctgatatctcaggtttgactccttgcaaggactcaaaacagttcgctaaaagagagaagcaacagatcaagaagcttgaatcttctctcaagctctacgctcctgaatctgctcctgctcttgctctcaatgctcagatcgagaaaaccaaacgcaagttcgacaactactggaagtacggattgttatgcgggtcaaacgggttaccgcacttg

SEQ ID NO: 147403 - DNA, 396 bp, Arabidopsis thaliana
gtccgctcaagtctcttctcttctttctttctccttaacacttttgatccttttccatggctacccggctcaacagggtcagcagggtgagcagtttccaaacaagtgccagctcgaccagttcaatgcgctcgagccttcacacgtactgaagagcgaggctggtcgcatcgaggtgtgggaccaccacgctcctcagctccgttgctcaggtgtctcctttgcacgttacatcatcgagtctaagggtctctacttgccctctttctttaacaccgcgaagctctccttcgtggctaaaggacgaggtcttatgggaaaagtgatccctggatgcgccgaaacattccaagactcatcagagttccaaccacgcttcgaaggtcaaggtcaaag

SEQ ID NO: 147404 - DNA, 460 bp, Arabidopsis thaliana
gcgtccgaaagaaaatggttaagctcagcaatctcctcgttgcaaccttcggggttctcctcgtacttagcgggtgccttgcgaggcgaggggttggggttcctcctcagctacagaacgagtgtaacctcgacaacctagatgttctccaagccaccgaaactatcaagagtgaagccggtcagatcgagtactgggaccacaaccaccctcagctccgatgtgttggtgtttccgttgctcgttatgtaattgaacaaggcggtctttacttgcccaccttcttcacttccccaaaaatttcctacgtcgttcaaggaacgggtatcagcggaagagtggtccctggatgtgccgagaccttcatggactcgcagccgatgcaaggacaacaacaaggccaaccatggcaaggacgacagggacaacaaggccaaccatgggaaggacagggacaaca

SEQ ID NO: 147405 - DNA, 376 bp, Arabidopsis thaliana
  unsure (1)..(376): unsure at all n locations
aactcaacaatctcctcgatgcaaccttctttttttttctacaccttaacaactaccttgcggggcaaacacttggggtgcgtggtcanatacaaaactagtgtaacctaaacaacctaaatgttctccaagccaccaaaactatcaagagtgaatccggtcatatctactacttgcaccacaaccaccctcatctccgatgtgttggtatttccgctgctcggatatgtaattgaacaaagccgtctatactttcccaccttcttcacttcaccaaaaatttactacgtacttcaatgaactgttatcatcggaagagtatgccctcgatattcctagaccttcatggacttgcaaacaattcaaggacaacaac

SEQ ID NO: 147406 - DNA, 449 bp, Arabidopsis thaliana
gtcatcccacaagggttcgcatacgttgtccagtcccacggaaacaagttcgagtggggctgtgtcaaaactaatgggggcgcggggatcagcactttggcgggtagaacctcgctcttgagggcattgccattggaggtcatatcaaatggtttccagatctctcccgaggaagctaggaagatcaagttcaacacacttgagaccactttgacccgcgctgccggtaggcaacaacaacagttgatcgaggagattgtcgaggcttaaatcaaaacgtttttctttttcttaataaagtatggtcagtttgtaatcacgtccctttacctttaacgtacgtgtaaaatatgtgtctgcggcacctcacttgtaataacactttcttctcataaataaaaaggaagtttcgagtttaaaaaaacaaaattatactttatttttttatt

SEQ ID NO: 147407 - DNA, 421 bp, Arabidopsis thaliana
  unsure (1)..(421): unsure at all n locations
acggttattccgggatgcgccgagacgttcatgtagttaccggtatttggagaaggtcaaggtcggggtcaaagtcaagggtggcggggcatgcaccanaaagtagagcacctacggtgcggtgacaccattgcaacaccatctggtgtagctcaatggttctacaacaatggaaatgagcctctcattcttgttgcagccgcggatctcgccagcaaccagaaccagcttgaccgcaaccttagaccatttttgatagccggaaacaacccacaagggcaggaatggctacaaggccgaaagcaacagaagcaaaacaacatcttcaatggcttcgcacctgagatcttggctcaagccttcaagatcaatgtcgagacggctcagcagctccagaaccagcaagataaccgtggcaaca

SEQ ID NO: 147408 - DNA, 447 bp, Arabidopsis thaliana
aaagaaaatggttaagctcagcaatctcctcgttgtaaccttcggggttctcctcgggcttaacggctgacttgcgagggggggacttggcattcctcctcagctacagaacgagtgtaacctcgacaacctagatgttctccaagccaccgaaactatcaagagtgaagccggtcagatcgagtactgggaccacaaccaccctcagctccgatgtgttggtgtttccgttgctcgttatgtaattgaacaaggcggtctttacttgcccaccttcttcacttccccaaaaatttcctacgtcgttcaaggaacgggtatcagcggaagagtggtccctggatgtgccgagaccttcatggactcgcagccgatgcaaggacaacaacaaggccaaccatggcaaggacgacagggacaacaaggccaaccatgggaaggacaggg

SEQ ID NO: 147409 - DNA, 403 bp, Arabidopsis thaliana
  unsure (1)..(403): unsure at all n locations
caaaaagaaaatggttaacctcaacaatctcctctttgcaaccttccgggttctcctaatccttaacggctaacttacgaggcagtcacggganattcctcctcaactacagaacgagtgtaacctccacaacctagatgttctccaagccaccgaaactatcaacagtgaatccgttcagatccagtactgggaccacaaccaccctcagctccgatgtgtttatgtttcccatgctcgttatgtaattgaacaagacggactttacttgcccaccttattcacttccccaaaaatttcctacttacatcaaggaacgggtatcaacttaagactacaaccttgatatgcccagaccttcattgactcacagactattcaaggacaacaacaatgccaacca

SEQ ID NO: 147410 - DNA, 428 bp, Arabidopsis thaliana
  unsure (1)..(428): unsure at all n locations
cttactctatagtttatatatataatcgacatggcaattnaccgggtgggaaatacatgtggggcgcgctgacaaacatnttcatcaaccaaactacnaanatgatgtcngttttggtggctatggcggttatggtgctggttctgattatatgagtcgcggcccctccactaaccaaatcttggcacttatagcaggagttcccattggtggcacactgctaaccctagctggactcactctagccggttcggtgatcggcttgctagtctccatacccctcttcctcctcttcagtccggtgatagtcccggcggctctcactattgggcttgctgtgacgggaatcttggcttctggtttgtttgggttgacgggtctgagctcggtctcgtgggtcctcaactacctccgtgggacgagtgata

SEQ ID NO: 147411 - DNA, 462 bp, Arabidopsis thaliana
  unsure (1)..(462): unsure at all n locations
cgtccgtcacaaacgagtaagaatacaaatacaaatagcaattaaattggcaaacaagctcttcctcgggtgcgcaactttcgccctcttgttgctcctcaccaacgcttncatctaccgcactgttgtcgagttcgacgaagatgacgccagcaaccccatgggcccaagacagaaatgtcagaaggagtttcagcaatcacagcacctaagagcttgccagaaattgatgcgcatgcaaatgaggcaaggccgtggtggtggtccctccctcgacgatgagttcgatttggaagacgacatcgagaacccacaaggcccccagcagggacaccagatcctccagcagtgctgcagcgagcttcgccaggaagagccagtttgtgtttgccccaccttgagacaagctgccagggccgttagccttcaaggacaacacggaccattccaatccaggaaaat

SEQ ID NO: 147412 - DNA, 453 bp, Arabidopsis thaliana
acgaaacaaaaagaaaatggttaagctcaacaatctcctctttgcaaccttcggggttctgctcgtgcttaacagatggctggggaggcagtcacttggggttcctcctcaactacagaacgagtgtaacctcgacaacctagatgttctccaagccaccgaaactatcaagagtgaagccggtcagatcgagtactgggaccacaaccaccctcagctccgatgtgttggtgtttccgttgctcgttatgtaattgaacaaggcggtctttacttgcccaccttcttcacttccccaaaaatttcctacgtcgttcaaggaacgggtatcagcggaagagtggtccctggatgtgccgagaccttcatggactcgcagtcgatgcaaggacaacaacaaggccaaccattgcaaggacgacagggacaacaaggccaaccatggtaaggaca

SEQ ID NO: 147413 - DNA, 449 bp, Arabidopsis thaliana
caacatgaacgctaacgagatcttgtactgcactgtaggacaaggaaggatccaagtggtcggcgacaacggacagggcgtgtgggaccaacaggtgcagaagggacagctcgtggtcatcccacaagggttcgcatacgttgtccagtcccacggaaacaagttcgagtggatctctttcaaaactaatgaaaacgcaatgatcagcactttggcgggtagaacctcgctcttgagggcattgccattggaggtcatatcaaatggtttccagatctctcccgaggaagctaggaagatcaagttcaacacacttgagaccactttgacccgcgctgccggtaggcaacaacaacagttgatcgaggagattgtcgaggcttaaatcaaaacgtttttctttttcttaataaagtatggtcaggttgtaatcacgtccctttaccttt

SEQ ID NO: 147414 - DNA, 451 bp, Arabidopsis thaliana
caaaaagaaaatggttaagctcagcaatctcctcgttgcaaccttcggggttctcctcggccttaacggctgccttgcggggcaggcacttggggttcctcctcagctacagaacgagtgtaacctcgacaacctagatgttctccaagccaccgaaactatcaagagtgaagccggtcagatcgagtactgggaccacaaccaccctcagctccgatgtgttggtgtttccgttgctcgctatgtaattgaacaaggcggtctttacttgcccaccttcttcacttacccaaaaatttcctacgtcgttcaaggaacgggtatcagcggaagagtggtccctggatgtgccgagaccttcatggactcgcagccgatgcaaggacaacaacaaggccaaccatggcaaggacgacagggacaacaaggccaaccatgggaaggacaggga

SEQ ID NO: 147415 - DNA, 455 bp, Arabidopsis thaliana
attttgcatataatagaagtagtaattataaaaatattatatattaattatcaattgcgtttgtgctaaacggagcctggatgctgcatgttattagtccgatcacgtaaaccataaaaaaattttgataatctaatatcaatctaaatactccctgcatttaattccactttattttttgcgcttcgcgttacaaatttttgataattcaatcaatctttttgagcgaaacagaggatatctcgatcgagggagaaaatggggaaatcccatatagcccgatatatctgacaagtcgcactatatgtcaacccaagatgtatctccttctccaggacttcgaaaaggtacttttggaacgccaataggcatgaaatgaaaaaaaaagagaatgaagttctctatttcactttgatgtggaaacgtaaaattggggtttcgttttttaatactat

SEQ ID NO: 147416 - DNA, 406 bp, Arabidopsis thaliana
  unsure (1)..(406): unsure at all n locations
cgtccaacaacaaaaaaaaatgttaactcacaatttttttttcaaccttcaaattctccggtggttaaaaatggcttgcgggcgancacttnngttcctcctaactacaaacgagtgtaacctcgacaacctagatgttctccaagccaccgaaactatcaatagtgaagccggtcagatcgagtactgtgaccacaaccaccctcagctccgatgtgttggtgtttccgttgctcgntatgtaattgaacaaggccgtctttacttgcccaccttcttcacttccccaaaaatttcctacgtcgttcaaagaacgggtatcatccaaaaagtggtcccttgatttgccgagaccttcatggactctcaaccgatgcaaggacaacaacaaggccaaccatgtcaa

SEQ ID NO: 147417 - DNA, 451 bp, Arabidopsis thaliana
  unsure (1)..(451): unsure at all n locations
aagaaaatggttaagctcaacaatctcctcgttgtaaccttctgggttctcctcaaacttagcgggtgacttacgaggcaggcgcttggggntcctcctcaactacagaacgagtgtaacctcgacaacctagatgttctccaagccaccgaaactatcaagagtgaagccggtcagatcgagtactgggaccacaaccaccctcagctccgatgtgttggtgtttccgttgctcgttatgtaattgaacaaggcggtctttacttgcccaccttcttcacttccccaaaaatttcctacctcgttcaaggaacgggtatcaacggaagagtggtccctggatgtgccgagaccttcatggactcgcaaccgatgcaaggacaacaacaaggccaaccatggcaaggacgacagggacaacaaggccaaccatgtgaaggacaaggacaac

SEQ ID NO: 147418 - DNA, 317 bp, Arabidopsis thaliana
  unsure (1)..(317): unsure at all n locations
tttaaaagtggggagccgttggtcgggtaatttacgggaatgtcctttgaaatgaaagcaaaagacttggtttttgcttaataaacggggaaacgaaaagattcccttttttctgttcgttgntgnttcagatattacggagctttgctttgcctttttttctaatctgttgtttttggggaaacttgcatgtgaagggatttgcgtttaactaatcatcgtgactccgattttcttcttgcaacactgtgttgttgttgctggtgtcgcctctcacttatcttctctcttaacactttactttatatttcttttat

SEQ ID NO: 147419 - DNA, 459 bp, Arabidopsis thaliana
cgtgcgcagggacaacagggacaacaaggaagacaaggccaaccatttgaaggacagggacaacaggggcggcggggacaacaggggcgtgtggggcaaccatgggaaggacagggacagcagggacaacaagggttccgtgacatgcaccagaaggtggaacatgtgagacgcggagacgtctttgccaacactccaggctctgcccactggatctacaactcaggagaacagccacttgtcatcatcgctcttctcgacatcgccaactaccaaaaccaactcgaccgcaaccctagagtgttccatttggccggaaacaaccagcagggaggctttggcggttcacagcaacaacaagaacagaaaaacttgtggagcgggttcgacgcacaggtcatagctcaagcattgaaaattgacgttcagttggctcagcagcttcagaaccaacaagac

SEQ ID NO: 147420 - DNA, 381 bp, Arabidopsis thaliana
actaaagcgcattttcatcaattttcaagctttttttaaaaaagcaatggcttcagacagacggaatgctgagagggccgagggtgcctaaaaattagctgtttaggacttgcatgacattaacaaatccggtcgtgctgatctcacaatgtataatgcgacagagagaacaactgaacatccaccgacacaagatatgccctgtgtgataagatcagcgttcacagctgtccaaagaacgtattagcatgccagagacgctctatttggaaaaacccacgaaccgcctgattctaccaaagaaagagctgatatagctttatagaaagcgtttgctgcaaaagacgcaacctacatgaaagctaacgaaacctcttatta

SEQ ID NO: 147421 - DNA, 334 bp, Arabidopsis thaliana
cccaaacatcgaaagagagacacttttctctctctctttctctatctccttccaatcggtctggggttttcggtgcggcgtcgggaagatgttcggtagaggaccctcgaagaagagcgacaacactaagttctacgagatcttaggtgttcctaagagcgcatcaccagaagatctcaagaaagcttacaaaaaagccgctatcaagaatcatcctgataagggtggagatcccgagaagtttaaggagttagcacaagcttatgaagtgcttagtgacccggagaagcgttagatttatgaccagtgtggagaggatgcactcaaggaatga

SEQ ID NO: 147422 - DNA, 445 bp, Arabidopsis thaliana
  unsure (1)..(445): unsure at all n locations
agtaattaactaacaacaaatggcgaacaagttctttctcgtctacgcaactatcaccgtgtgtgttaatactaacacagcgggtccggctatcacacnnttntcnanttcnaccaaaattactccagtaaccccatatgcccaatacataaatgtcagaaggagttttatcaataacatcacctaagatctttccagagatggattcgcaagcaaatgtgtcaaggacgttgtggtggtccttccctcgacgattagttctatatttaagactacatctataaccctcaaatactacatctactccagaagtgctgcggcgagcttctccaataatatccaattttcgttttccccacctttaaacaagcttccaatgctctttaaattccatttacagcaacaccaaccatagcatttcatgaaaatttaccatccacctaaa

SEQ ID NO: 147423 - DNA, 396 bp, Arabidopsis thaliana
  unsure (1)..(396): unsure at all n locations
cttcagacagcgcancaacttcagaaccattattttaaccgtggaaacattntccaagtccggggcccattcggagtgtgggggggcctttgangggccagaaacctcangaggaggaagaagaagaagaaggacgacatggacgacacggtaatggcttaaaggagaccatctgcagcgccaggtgcaccgataacctcgatgacccgtctcgtgctgacgtgtacaagccacagctcggttacatcagcactctcaacagttacgatctccccatccttcgcttcatccgtctctcaaccctccgtggatctatccgtcaaaacgcaatggtgctttcacagtggaacgcaaacgcgaacgctattttttacgtgacagacggggaagcccaaa

SEQ ID NO: 147424 - DNA, 385 bp, Arabidopsis thaliana
agaaatataagaaataacaaaatggctcgagtctcttctcttctttctttcttcttaacactgtggatccttttacgtcgctgcgcggctcaacagggtcagcagggtcagcagtttccgaacgagtgccagctcgaccagctcaatgcgctcgagccgtcacacgtactgaagagcgaggctggtcgcatcgaggtgtgggaccaccacgctcctcagctccgttgctcaagtgtctcctttgcacgttacatcatcgagtctaagggtctctacttgccctctttctttaacaccgcgaagctctctttcgtggctaaaggacgaggtcttatgggaaaagtgatccctggatgcgccgaaacattccaagactcatcaaagt

SEQ ID NO: 147425 - DNA, 448 bp, Arabidopsis thaliana
aagaaaatggttaagctcagcaatctcctcgttgctaccttcggggttctcctcgtccttaacggctgccttgcgaggcggtcggttggggttcctcctcagctacagaacgagtgtaacctcgacaacctagatgttctccaagccaccgaaactatcaagagtgaagccggtcagatcgagtactgggaccacaaccaccctcagctccgatgtgttggtgtttccgttgctcgttatgtaattgaacaaggcggtctttacttgcccaccttcttcacttccccaaaaatttcctacgtcgttcaaggaacgggtatcagcggaagagtggtccctggatgtgccgagaccttcatggactcgcagccgatgcaaggacaacaacaaggccaaccatggcaaggacgacagggacaacaaggccaaccatgggaaggacagggac

SEQ ID NO: 147426 - DNA, 460 bp, Arabidopsis thaliana
  unsure (1)..(460): unsure at all n locations
cgtccgcttttgagtgtgttgaagaagaagaagaagattaatttttactaaaaacccgagaaaagtgggcgacgaatgaatgaagaggacggcccgagagcattctgattcatgtgactctggtttcgtttctttctgtgtctctgctgtgtcgttttctcggcatatttctgatctttcgttctcggttggtttttggtttctgggtattgattgattgattcaaaagtcttcaactttcctggaaactggatctgggtttatccgtttttactcgtctgagaagagaaaaaaggatgaatccttatgatgcgaaagacagaagatggattctctctatgttcttcttcgtcgntttgttctgcaacaacgtttcgacttcgtcttcttcatctgaagttatcaccattaagccaagacatttatccttgctaaagagtgctttacaacggtcaagtgg

SEQ ID NO: 147427 - DNA, 394 bp, Arabidopsis thaliana
  unsure (1)..(394): unsure at all n locations
gcgtccggnttgaagagttaccaaaaaaaagatagcgctactttctctttctctctggcaccattatcgcggctgctccaattattaattctgtccgcgccaatnaaacttttgcttgccggcgtcgggattccaccttcctttcaccgctgcttcacatcttttctttctttgtttgttctcctttgaaatcattctccatcatttttcctctgtttaacctctatcaaacctctttaaacgttttgtaccacctcacttcgcttctcggcccatcttcatcatcaagtgaagaagaaaagatgagttatctggcaaatccttatctccatttcttcctcgtagccctcgcttcagatctgaacccttggagctttgtctcagtttctgatca

SEQ ID NO: 147428 - DNA, 476 bp, Arabidopsis thaliana
cggggcggaaaagggcaaacaagttgttcctcgtctgcgcagctctcgctctcttctttctcctcaccaacgcttacatctacgcggccgtcaatgagttcgcgggaggtgacaccactaaccccataggcccaaaaatgaggaaatgccgcaaggagtttcagaaagaacaacacctaagagcttgccagcaattgatgctccagcaagcaaggcaaggccgtagcgatgagtttgatttcgaagacgacatggagaacccacagggacaacagcaggaacaacagctattccagcagtgctgcaacgagcttcgccaggaagagccagattgtgtttgccccaccttgaaacaagctgccaaggccgttagactccaaggacagcaccaaccaatgcaagtcaggaaaatttaccagacagccaagcacttgcccaacgtttgcgacatcccgcaagttgatgtttgtcccttc

SEQ ID NO: 147429 - DNA, 439 bp, Arabidopsis thaliana
  unsure (1)..(439): unsure at all n locations
cgtccgaagaaataacaaaatggctcgagtctcttctcttttttctttcttcttaacacttttnatcctgtttggatggatacacggctcggcgagggtcaacangttcagcattttccgaacgagtgccagctcgaccagctcaatgcgctcgagccgtcacacgtactgaagagcgaggctggtcgcatcgaggtgtgggaccaccacgctcctcacctccgttgctcaagtgtctcctttgcacgttacatcatcgagtctaagggtctctacttgccctctttctttaacaccgcgaaactctctttcgtggctaagggacgaggtcttatgggaaaagtgatccctggatgcgccgaaacattccaagactcatcagagttccaaccacgcttccaaggtcaaggtcaaagccagaagttccgtgacatgcacc

SEQ ID NO: 147430 - DNA, 435 bp, Arabidopsis thaliana
aaaggctcagtctctctctttcttctttctttcttaacacttttgatccttttccgtggctgcgcaaatcaacaggcgcagcggggtcaacagtttccgaacgagtgccagctcgaccagctcaatgcgctcgagccgtcacacgtactgaagagcgaggctggtcgcatcgaggtgtgggaccaccacactcctcagctccgttgctcaggtgtctcctttgcacgttacatcatcgagtctaagggtctctacttgccctctttctttaacaccgcgaagctctctttcgtggctaacggacgaggtcttatgggaaaagtgatccctggatgcgccgaaacattccaagactcatcagagttccaaccacgcttcgaaggtcaaggtcaaagccagaggttccgtgacatgcaccagaaagtggagcacatt

SEQ ID NO: 147431 - DNA, 373 bp, Arabidopsis thaliana
  unsure (1)..(373): unsure at all n locations
acacaaacacaatctaattcaaataattaatatatttattccacaaactaacactatgcttctcgtgataatcgatactgtgtgtcggcgncaccaaaaagcaaatcaaatatttatccactgacaccaaaataagctcctttctttcaaaaactactaccaactgcattataactcatctttcttcaactggcacaacttacaccaccatcagtttcgttagctatgctaatgcttttaacaataccaaatgtccactaaccaattcattctaaagtgccaacacatttaccagctgacaattcacttccaatggtcgcaaggcaatagtttattatgcaattccttcttccgcttaaacctatcctgcatc

SEQ ID NO: 147432 - DNA, 428 bp, Arabidopsis thaliana
cctcctccaactcacatttacactcccaccttaggtcttctaaccagcctcaacaactctacggtgaccatataacagggtggcgggccaacaacaacataaaaacttctccagcgtaatgccacacagcttactaaatacaacatgaacactaaccagaacttgtactacactctacaacaccaacagatccaaatggtcaacaacaaccgacataacgtactttaccaacatgtgcagacaccacaaatacaggccatcccacacgagtactcataccatccacatacccaccaaaacaacttccagtggatctctatcaaaactaattaaaactcaatgatcatcactttccctgctagaacctacctcttcaagccattaccatttcaggtcatctcaaatagcttccatatctctcccaatta

SEQ ID NO: 147433 - DNA, 445 bp, Arabidopsis thaliana
acgaaaacaagaaaacatacacaaatagcaaaacatgtttaacaagctcttcctcatctgcgcagcgctcaccctatgcttccgcctcgccaacacttacatctaccgcaccgttgtcgaattcgaagaagatgacgccagcaaccccgtaggtccaagacagagatgccagaatgagtttcagcaatcacaacacctaagagcttgccagagatggatgagcaagcaaatgaggcaaggacgtggtggtggtccttccctcgacgatgagttcgatttcgagggcccccagcagggataccagctactccagcagtgctgcaacgagcttcgccaggaagagccagtttgcgtttgccccaccttgaaacaagctgccagggcagttagcctccatggacagcacggaccattccaatccaagaaaaattaccagtcagctaag

SEQ ID NO: 147434 - DNA, 385 bp, Arabidopsis thaliana
  unsure (1)..(385): unsure at all n locations
gtccgcgaaaacaagttcaagtgaatctctttcaaaactattgaaaacccattgatcagcactttgggggggggaacctaattctggggggctgggccattgaaggtcatatcaaatggtttccaaatctttcccaaggaagctagaaaaatcaagttcaacacacttgagaccactttgacccccgctgccggtaggcaacaacaacagttgatcgaggagattgtcgaggcttaaatcaaaacgtttttctttttcttaataaagtatggtcagtttgtaatcacgtccctttacctntaacgtacgtgtaaaatatgtgtctgcggcacctcacttgtaataacactntcttctcataaataaaagggaagtttcgagttac

SEQ ID NO: 147435 - DNA, 447 bp, Arabidopsis thaliana
ctgaaaacaagaaaaccttaatcaatcgaaatctcattgtaactaatcaatggagatcaaggcgggtatccgtctcggactggcggcgcctctgggatcggtcgagctctctgcttagctcttgcagagaaaggagtttttgtaacagtcgctgatttttcggaggagaaaggacaagagactacttcgcttgttcgagaagcgaatgccaagtttcatcagggcttaagctttccttctgctatctttgtgaaatgtgatgtgactaatagaggagatctcctcgctgctttcgataagcatttagccacatttggaacacttgacatctgtatcaacaatgctgggattagcactcctttaagatttgataaagatgacactgatggatctaaatcatggaaacacaccattaatgtcgatctgattgcagtagttgaaggcaca

SEQ ID NO: 147436 - DNA, 435 bp, Arabidopsis thaliana
atctcagtgagttctcataaaatgagagggatgtttatttttgccgtttgaactctctttggtgctttactataacaggggctgtgtgcttctattgcttccctaaggttttaggattccaaaacatactacttatcttctcccttttgcttacattgaacttcttcattacacacaccttcttcttctaactgtggaagtccaccttacgacccttctccttcaactccttctcacccttcacctccattacatacttcaactcctttcacttcattacacactccaacttcacacacttcattacacacgccaacttcacacaccccttcttttaacttttgaaatccaccttaccaccctttcacgcctttacaccctttcactccttttgacccaacgccattacaccctccttgttgtggatattactta

SEQ ID NO: 147437 - DNA, 315 bp, Arabidopsis thaliana
acccgtcccaaaaaagaaaattggttaagctcagcaatttcctttttgcaaccttcggggttctcgtcgggcttaacggctgcgcttgcgaggcggacacttggggttcctcctcagctacagaacgagtgtaacctcgacaacctagatgttctccaagccaccgaaactatcaagagtgaagccggtcagatcgagtactgccaccacaaccaccctcagctccgatgtgttggtgtttccgttgctcgttatgtaaacaaacaaggcggtctttacttgcccaccttcttcacttacaaaaaaatttcctac

SEQ ID NO: 147438 - DNA, 442 bp, Arabidopsis thaliana
cgggccggcgccacgcgtccgatcgaattcaagacaaacgaaaacgcacaggtcaactcactcgcgggccgtacctcaatcatgagagggttgccgcttgaggttgtgacgcaatgggtaccagatctctcccgaagaagctaaacgagtaaagtttagcacgattgagaccacactgacccatagcagtccaatgagctacggaaggcctagggcttgaggcttgatgagcgcgtggtggaatagcgtttgaatctaaagttcggtttggtacgacttgtaatatgaaataataatgtacaaagaagttctacgcttaacggaactgttttgttttgagctttgtattatgacgtctagtgtacaacaacgaacgtcgtgtataagcgatcgttgactctgcacatgtaactctttcctgaataaaaaatctttaagtctt

SEQ ID NO: 147439 - DNA, 438 bp, Arabidopsis thaliana
  unsure (1)..(438): unsure at all n locations
cgtccgacgacagggacaacaaggccaaccatgggaaggacatggacaacagggacaacaaggaanacaaggggaaccatgggaaggactgggacagcagggacaacaaggacgacagggacaacaaggccaaccatgggaaggacagggacagcagggacaacaagggttccgtgacatgcaccagaaggtggaacatgtgagacgcggagacgtctttgccaacactccaggctctgcccactggatctacaactcacgagaacagccacttgtcatcatcgctcttctcgacatcgccaactaccaaaaccaactcgaccgcaaccctagagtgttccatttggccggaaacaaccagcaaggaggctttggcggttcacagcaacaacaagaacagaaaaacttgtggagcgggttcgacgcacaagtcatagc

SEQ ID NO: 147440 - DNA, 389 bp, Arabidopsis thaliana
agcaaattacatttccttctttataaataaacaggaacgtgataacacgatgttgacatggacaaactgcaagcaaacacaactaaaatttagtaaacttcactagacatatatattgattcttcataagccctaatgaaattcgtgcaaacgatttattcatgtaacaaagacgtcatatgattggtgttcatgggtggttgtggttatggtggcctggaagcttgtccttgatcttctcgagaatgcccttcttttcgtgaggttggtcactagtggcaggtcctgttgttgtggccatcacttgtgtttgttcgtccttgtgtttgccgctaccgaacttctctttaattttctcctttatgctcttattactcctcccttcttgc

SEQ ID NO: 147441 - DNA, 447 bp, Arabidopsis thaliana
gccacagctcggatacatcaacactctcaacagttacgatctccccatccttcacttcatccggctctcaaacctccgtgggtgtgtccgtcaaaacgcaatggtgcttccacagtggaacgcaaacgcgaacgctattctttacgtgacagacggggaagcccaaatccagatcgtaaacgacaatggtaacagagtgtttgacggacaagtctctcaaggacagctcatagccgtaccacaaggtttctcggtggtgaaacgcgcaacaagcaaccgattccagtgggttgagttcaaaacaaacgctaacgcgcaaatcaacactctggcgggacgaacctcagtcttgagaggtttaccacttgaagtcataaccaatgggttccaaatctcacccgaagaagcaaggagggttaagttcaacacgctcgagaccactttgac

SEQ ID NO: 147442 - DNA, 434 bp, Arabidopsis thaliana
  unsure (1)..(434): unsure at all n locations
aacaaacaaaaagaaaatggttaagctcaacaatctctctcgttgcaaccttcggggttctccgggtccttaacggctgggtgtgcggggcaancacttggggttcctcctcagctacagaacgagtgtaacctcgacaacctagatgttctccaagccaccgaaactatcaagagtgaagccggtcagatcgagtactgggaccacaaccaccctcagctccgatgtgttggtgtttccgctgctcgttatgtaattgaacaaggcggtctttacttgcccaccttcttcacttccccaaaaatttcctacgtcgttcaaggaacgggtatcagcggaagagtggaccctggatgtgccgagaccttcatggactcgcaaccgatgcaaggacaacaacaaggccaaccatggcaaggcgacagggacaacaa

SEQ ID NO: 147443 - DNA, 195 bp, Arabidopsis thaliana
cttagaagcggtaaagaattacccacaaattatagttcgaaccagaacactgaggacagtgtggatcaagatggggaggggttgtggcaaaatggaaattccgctgaaaaagcaatagaagagcctatactccaccaacctactcgaccactagctcctgcagcatctcctcttgttgaaaaaccagttgccgcc

SEQ ID NO: 147444 - DNA, 396 bp, Arabidopsis thaliana
acggaaggcccgggccggcccacgcgtccgagaaaacatacacaaatagcaaaacatggctaacatgctcttcctcgtctgcgcaactgtcgggctctgcttcctgctgggcgacgcttccatctaccgcaccgttgtcgaattcgaagaagatgacgccagcaaccccgtaggtccaagacagagatgccagaaggagtttcagcaatcacaacacctaagagcttgccagagatggatgagcaagcaaatgaggcaaggacgtggtggtggtccttccctcgacgatgagttcgatttcgagggcccccagcagggataccacctactccagcagtgctgcaacgagcttcgccaggaagagccagtttgcgtttgccccaccttgaaacaagc

SEQ ID NO: 147445 - DNA, 457 bp, Arabidopsis thaliana
cgcgtccgtaagaatcagacagaagttgcagagaaaagagaattaattgattggtgtaatggagaaggcaggtcatttatccaccaggggtggacccaaggttccaggagagccaacgaagaccggaacctccatggttgacacggcagcttcagccgtacaaagcttcgctccgattaaccaaatccaccaacatctctgcgcgtttcatttctatgcatatgacatgacccgacaagtggaggcacaccatttctgtggtcacatcaacgaagacatgcgccagtgtctgatctacgacggtcctgatgccaacgctcgtctgatcggtctggagtacattgtgacagagaagctctttatgacattgcctgacgatgagaagaagctttggcacactcacgagtgggaagttaaaggaggcttcttgttcatgcccggtgttcccgaagctatt

SEQ ID NO: 147446 - DNA, 426 bp, Arabidopsis thaliana
gcgtccgtggcatttgcataaacactttcaaaaacaagtaatttaatttattttagaagcttcatcatggcgacgtcaggtacatacgtggcgagaagttcctctgaaagggtcagcgaagaaccactacaagaggtggaagagcgaaaaccaactcttccctgacgccattggccatcatatccaaggtgtcaccgttcacgagggcgactgggactcccacggggccatcaagtcctggaactacacatgcgatgggaagcaagaggtgttcaaggagaagagggagttagacgaccagaaaatggcggtgacgtttagagggctggatggtcatgtgatggagcaacttaaggtgtatgacgtcatcttccagttcgtccctaagtctcaagaagggtgccgctgcaaagtcactatgttttg

SEQ ID NO: 147447 - DNA, 450 bp, Arabidopsis thaliana
aagaaaaatgggtcgagtctcatctattatctctttctctttgacactcttgatcctcttcagtggcgacactgcccaacagtgggccggcgagtgccaactcgatcaactcaatgcgctcgaaccatcccaaatcatcaagagcgagggtggtcgcatcgaggtctgggaccaccatgcaccccagctccgttgctccggctttgcctttgagcgtttcgtcattgagcctcacggtcttttcttgcccactttcttgaacgccggcaaactcacgtttgttgttcacggaaggggtctaatgggaagagttattccgggatgcgccgagacgttcatggagtcaccggtatttggagaaggtcaaggtcagggtcagagtcaaggggtccgtgacatgcaccagaaagtagagcacctacggtgcggtgacaccattgcaacaccatc

SEQ ID NO: 147448 - DNA, 466 bp, Arabidopsis thaliana
  unsure (1)..(466): unsure at all n locations
ccggaacggaaggtccggcgccacgcgtccgggtacattctcctattaaataaatatggtgcactcttatgttattagctaaaatgttcagatgatagtgcacagtcatatcatgggtaggattantattaataaaataaatggctttttggcaaaacggatttggagagacgggtttttgaatcaacattaataaaaaatatatataattaatccaccgtttgaatacgggttaaatctttaattaattattttttaagaccactaatattaaacatatcaaatcatcctaatttagaaaagattatataaaaccaaaaatgttatgtggtatgtataatgttactatatataaaattaaactataaaatataaatgtgttagagaatgatacaatatgcaaaacttttatatataataaataattcttaaattttaaaaattactacgttaaaaaaaaaaatac

SEQ ID NO: 147449 - DNA, 427 bp, Arabidopsis thaliana
ggttcataacgaaaacggagtgggcaacagaatgggtgtggtgctaaatccaaagagaatcgagcgccggtcaagagtcttccttgcgattgctgcgcgcttacgtttttgccattcgaagatcctgtgtgtacaatcgacgggagtgttttcgagataacaacaatagtgccttacattaggaaatttggaaaacatcctgttactggagctccattgaaaggagaagatctaattcctctcatctttcacaagaactctgaaggagagtatcattgtcctgttctaaacaaagtcttcactgaatttacacatattgttgctgtcaagactactggaaatgtattctgctacgaggcaatcaaagagttgaatatcaaaaccaagaattggaaggagcttttaactgaagaaccatttacaagag

SEQ ID NO: 147450 - DNA, 391 bp, Arabidopsis thaliana
  unsure (1)..(391): unsure at all n locations
gcaatcctcaaaacagagtaacccaaaaaacagagctttctctaaaaaatctcaagaaacctcactaaggtgggttcaacggcggcggcgcggttaactccngtgcaagtcaccgacgacgaagctgccctcttcgccatgcaactagccagtgcttccgttcttccgatggctttaaaatccgccttagagcttgaccttcttgagattatggccaagaatggttctcccatgtctcctaccgagatcgcttctaaacttccgaccaaaaatactgaagctccggtcatgctcgaccgtatcctccgtcttcttacgtcttactccgtcttaacctgctccaaccgtaaactttccggtgatggcgttgaacggatttacgggcttggtc

SEQ ID NO: 147451 - DNA, 428 bp, Arabidopsis thaliana
aagaggaagaaaaatgggtcgagtctcatctattatctctttctctttgacactcttgatccgcttcaatggctacactggccggcagtggcccaacgagtgccagctcgatcaactcaatgcgctcgaaccatcccaaatcatcaagagcgagggtggtcgcatcgaggtctgggaccaccatgcaccccagctccgttgctccggctttgcctttgagcgtttcgtcattgagcctcagggtcttttcttgcccactttcttgaacgccggcaaactcacgtttgttgttcacggaaggggtctaatgggaagagttattccgggatgcgccgagacgttcatggagtcaccggtatttggagaaggtcaaggtcagggtcagagtcaagggtttccgtgacatgcaccagaaagtagagcaccta

SEQ ID NO: 147452 - DNA, 372 bp, Arabidopsis thaliana
tcacaaacgagtaagaatacaaatacaaatatgcaaaaaaaatggcaaacaagctcttgctcgggtgcgcaactttcggcctgtggggcctcctcaccaacgcttccatctaccgcactgttgtcgagttcgacgaagatgacgccagcaaccccatgggcccaagacagaaatgtcagaaggagtttcagcaatcacagcacctaagagcttgccagaaattgatgcgcatgcaaatgaggcaaggccgtggtggtggtccctccctcgacgatgagttcgatttggaagacgacatcgagaacccacaaggcccccagcagggacaccagatcctccagcagtgctgcagcgagcttcgccaggaagagc

SEQ ID NO: 147453 - DNA, 448 bp, Arabidopsis thaliana
gagagatggggtcaaagacggagatgatggagagagacgcaatggctacggtggctccctatgcgccggtcacttaccaggggcgtgctcgtgttgacttggatgatagacttcctaaaccttatatgccaagagcattgcaagcaccagacagagaacacccgtacggaactccaggccataagaattacggacttagtgttcttcaacagcatgtctccttcttcgatatcgatgataatggcatcatttacccttgggagacctactctggactgcgaatgcttggtttcaatatcattgggtcgcttataatagccgctgttatcaacctgacccttagctatgccactcttccggggtggttaccttcacctttcttccctatatacattccacaacatacacaagtcaaagcaatggaagtgattcaaaaacatatgacaat

SEQ ID NO: 147454 - DNA, 439 bp, Arabidopsis thaliana
atcggaatttgggtgctccatcaatggctcgattttggctcgcaggtcactgaatactctccgtgctcgacatctcggtttgtcagggcaagctttacagggatctcatctgtctagactgcagtcccgtggtatatcttatggcagcaacaaagatgatgaagaagcagagcaactttctaaggaaatctccaaggactggaatactgtctttgaacggagcataaacaccctgttcctcacagaaatggtccgcggtttgtcgctgaccctcaagtacttctttgatccaaaagttactatcaattatccatttgagaagggtcctctgagccctcgcttccgtggtgaacatgctcttcgaagatatcctaccggggaagaacgctgcattgcctgcaaactctgtgaagctgtatgtccagctcaagcaatcaca

SEQ ID NO: 147455 - DNA, 226 bp, Arabidopsis thaliana
  unsure (1)..(226): unsure at all n locations
agaagaagacgccacnaaccccanaggcccaaaaacgaggaaaagccgcaaggagccgcagaaagaacaacaccnaagagcnagccagcaanngangcaccagcaagcaaggcaaggccgaagcgaagagnaagacnacgaagacgacacggagaacccacagggacaacagcaggaacaacagcganaccagcagngcggcaacgagccccgccaggaagagcca

SEQ ID NO: 147456 - DNA, 442 bp, Arabidopsis thaliana
gtagtgtttcactcttttgagtaaatagtatagtatttaatttatacgaatttgtaagttctgtgaggaataaataaaaatcgtaaacatctctaaaaatagaagagtaaagtcttgagaaaaccttttgtttttgttaattgcatgagaaaataacttaggatttaggaaactacctgacggattcttttcaaatttttaatctttttgaataacagtatcgtgagtaaattcgaactaacagattcctttgaagtaggttaagcttttatacttcaaataaaatataaatatataaaaatcaatcaaatcattcggccggcaattttttttattttattaatatattattcttcttgaagacgaaaagaaaaatagagatagcgaatggtgacaagcacaactggaaccctaatttgcatagctcacagtctatcaattt

SEQ ID NO: 147457 - DNA, 312 bp, Arabidopsis thaliana
  unsure (1)..(312): unsure at all n locations
gcttattctattttgcaattggacctcctcataattttcanncannncagatngnaaagagnnggtattggattggatctaacaaaggagactaattggaccttcacggccttcctaagaagtaagaacggtgatacaaaatttcaccatgcttgaagacatgacaacaaaaagtccaaaagacaagttatccaaatcagaaaaacaaaacccaaaagacatgacaaccctttaattattttaaatcacaaatgtttgtggaataaaatcaatcatatgtaaaaacatacaaaattagctaattactgtttt

SEQ ID NO: 147458 - DNA, 426 bp, Arabidopsis thaliana
caacaaacaaaaagaaaatggttaagcctagcattttcctcgttgcaaccttcggggtgtctcctcgtccttaacggctgccttgcgaggcagtcacttggggttcctcctcagctacagaacgagtgtaacctcgacaacctagatgttctccaagccaccgaaactatcaagagtgaagccggtcagatcgagtactgggaccacaaccaccctaagctccgatgtgtgggtgtttccgttgctcgttatgtaattgaacaaggcggtctttacttgcccaccttcttcacttccccaaaaatttcctacgtcgttcaaggaacgggtttcagcggaagagtggtccctggatgtgccgagacctttatggactcgcagccgatgcagggacaacaacaaggccaaccatggcaaggacgacag

SEQ ID NO: 147459 - DNA, 365 bp, Arabidopsis thaliana
tacacacatagcaaaaaagggcaaactatttgttctttgtctgcgcagctctcgctctctgctttctcctcaccaacgcttccatctaccgcaccgtcgttgagttcgaagaagatgacgccactaaccccataggcccaaaaatgaggaaatgccgcaaggagtttcagaaagaacaacacctaagagcttgccagcaattgatgctccagcaagcaaggcaaggccgtagcgatgagtttgatttcgaagacgacatggagaacccacagggacaacagcaggaacaacagctattccagcagtgctgcaacgagcttcggcaggaagagccagattgtgtttgccccaccttgaaacaagct

SEQ ID NO: 147460 - DNA, 437 bp, Arabidopsis thaliana
  unsure (1)..(437): unsure at all n locations
caaacgcgaacgccanncnttatgtgactgattgggaagcccaaanccagatcgtaaacgacaatggtaacagagtgtttgacggacaagtctctcaaggacagctcatagccgtaccacaaggtttctcggtggtgaaacgcgcaacaagcaaccgattccagtgggttgagttcaaaacaaacgcaaacgcgcaaatcaacactcttgcgggacgaacctcagtcttgagaggtttaccacttgaagttataaccaatgggttccaaatctcacctgaagaagcaaggagggtcaagttcaacacgctcgagaccactttgactcacagcagtggcccagctagctacggaaggccaagggtggctgcagcttaagagcttaaaaccgcggctcaacaatgaacctctagtactgtaaaaagaaagttaatagta

SEQ ID NO: 147461 - DNA, 432 bp, Arabidopsis thaliana
  unsure (1)..(432): unsure at all n locations
acccagagagaaaccaanccttttttgtgtgttagaaatcttagagctgagctaagaaaagggtcaaatgaagtgagtgaagaaggaagacatggcaaagactacgtggatccacctccagctccacttctagacatggctgagcttaagctctggtctttttacagagctatcatcgcagagttcatcgccactctcctcttcctctatgtaaccgtagctacagtcattggccacaagaaccaaaccggtccttgtggcggtgttggtttactcggcattgcgtgggcctttggtggcatgatctttgtcctcgtctattgcaccgccggtatctccggaggtcacattaacccagctgtgacatttggtctgttcttggctcgtaaagtgtcgctccctagagcagttgcttacatggtggctcagtgt

SEQ ID NO: 147462 - DNA, 247 bp, Arabidopsis thaliana
  unsure (1)..(247): unsure at all n locations
aggacagctggagcccggaccttttnccttttttgnaaaggcaaanannagaggcattgggggcgcaacgcgcccgagccacccccaaacnnnaaaaaggnaggacgcggcggccgcccngaagagccggcacacggaancgagagccccaagggggccacccccgggaagcagaaccggcgaagcgggaagaaccggaaagccggnnacggggcccaaccgcgcgccaacccaaaacccacaaagg

SEQ ID NO: 147463 - DNA, 439 bp, Arabidopsis thaliana
  unsure (1)..(439): unsure at all n locations
ctaaattcgaatnnnctntatttccacatagattntcagaaacagntttatagttatagtatgttcgaacgtggaattcatcatccttattaattttgtcttttccattcactcggatttcttccatttcatcgattttgtccagatcttccccttcttccgaaaaaagagaaggaaaaggagcttcttcggtggatacctcttggtcctgtttagtcccacccgtttctgaggttcctttaagtttcttagtaaaaatgggtgatggtattctgcctaaatagtagacacaggtaataaataagagaatactaaagattcgagccatagaatttctcaattctgacacaaggaacttatacttattagatctaataactacattagacctaatagaattattttgctgtatccagactaataccaatccaacccattt

SEQ ID NO: 147464 - DNA, 447 bp, Arabidopsis thaliana
  unsure (1)..(447): unsure at all n locations
gggaatttgcaaagattaggggtattggtcnggtttttgctggngngancnggctatgcagttttgtcacatacttgccattggacgttttcaagtttgccattcgatacatcttgagcggaaaggcgtggctcaacttgtttgagaacaagacggctttcacgatgaagaaagattacggaaaagaagagagagaggctcaatgggcacttgctcaaaggacacttcacggtttacagccaaaagaagctgttaacatcttccctgagaaaggaagttacagagaattgtctgagatcgctgagcaagctaagagaagagctgagatcgctaggcttagggagctgcacacactcaagggacatgtggaatcagtcgtgaagctaaagggcttggacattgaaactcccagtcactacactgtgtagtaaaaccaaacatatgact

SEQ ID NO: 147465 - DNA, 427 bp, Arabidopsis thaliana
  unsure (1)..(427): unsure at all n locations
ataagtcgnctctggaatcgttatatctcatncnnnnnntttcgatttttcgatagattagaaatcgacaaatccaaaagaaaaagtaagtggacctaacccatcgaatcatgactatatccactattctgatattcaaattcgatagagattaaatcgaaacagtagattttttttatttcatattggtgtattaggaaatccgtcgatatctcttattgaatcttcttgtttctatatatgacataggaaatatattgcgttcctgcctagagaaagagagtctttttgcaaagtaataactaaaagggcgtttcaatattttttttgattcgagaacataacaagatcctacattctctttgtattaagaatcaatttgtattaaaaataaacaaaaatcgaatcataatcatggcttcagata

SEQ ID NO: 147466 - DNA, 429 bp, Arabidopsis thaliana
  unsure (1)..(429): unsure at all n locations
accgagaacgcctccagatattcttcnctgattcgggnatnctagccgnctgttttggtctttaccgttacgctgctggacaagggatggcctcgatgatctgcctctacggagtaccgcttctgatagtgaatgcgttcctcgtcttgatcacttacttgcagcacactcatccctcgttgcctcactacgattcatcagagtgggactggctcaggggagctttggctaccgtagacagagactacggaatcttgaacaaggtgttccacaacattacagacacacgtggctcatcacctgttctcgacaatgccgcattataacgcaatggaagctacaaaggcgataaagccaattctgggagactattaccagttcgatggaacaccgtggtatgtagcgatgtatagggaggcaaaggagtgt

SEQ ID NO: 147467 - DNA, 428 bp, Arabidopsis thaliana
aacaaaaagaaaatggttaagctcagcatcctcctctttgcaaccttcggggttctcctcgtccttaacggctgccttgcgaggcagtcacttggggttcctcctcagctacagaacgagtgtaacctcgacaacctagatgttctccaagccaccgaaactatcaagagtgaagccggtcagatcgagtactgggaccacaaccaccctcagctccgatgtgttggtgtttccgttgctcgttatgtaattgaacaaggcggtctttacttgcccaccttcttcacttccccaaaaatttcctacgtcgttcaaggaacgggtatcagcggaagagtggtccctggatgtgccgagaccttcatggactcgcagccgatgcaaggacaacaacaaggccaaccatggcaaggacgacagggacaaca

SEQ ID NO: 147468 - DNA, 301 bp, Arabidopsis thaliana
  unsure (1)..(301): unsure at all n locations
gaaaaacttgnggagcgggtttatgnctagttcatagcncaagcatngaaaatgggcgtncagttggctgagcagctgcagaaccaacaagacagcagaggaaacatcgttcgtgttaagggacctttccaggtcgtgaggccacctctaagacagccctacgagagcgaggagtggagacacccacgtagcccacagggcaacggccttgaggagactatttgcagcatgaggtccaacgggaccatggacacccctgctggtgctgacgtgaacaagcccagcctaggtcgcgtgacca

SEQ ID NO: 147469 - DNA, 256 bp, Arabidopsis thaliana
  unsure (1)..(256): unsure at all n locations
cgaagaagcaaggagggncagagggcaacacgcgggagaccaggccgacccacagcagnggcccagcnagcnacggaaggccaagagnggcngcagcnnaagagccnaaaaccgcggcnnaacaangaaccgcnacccgaaaaggaaaggaaanagnacgnagnaannanaanaagggacgaaaangngacaagggnnggggagggggaccnngaaaangccacnccnnnncngaanaaaancnnnccnnccgaac

SEQ ID NO: 147470 - DNA, 434 bp, Arabidopsis thaliana
  unsure (1)..(434): unsure at all n locations
caacacaccatctcaatcatgacttctttgtttctcncctccactgctttcttcctcctcctgtgtctaggattctgccacgtgtcctcttcctcctccgaccaaggaacttacatcgttcacatggctaaatctcagatgccgtcgtctttcgacctccactctaactggtacgattcatctctcagatctatctccgactcagccgaattgctctacacttacgagaacgcgattcatggattctcaacacggctaactcaagaagaagccgactcgctcatgactcaacctggtgttatctccgttttaccggagcaccgttacgagctacacaccactcgtactcctctcttnctcggtctcgacgaacacaccgcagatctgttccctgaagccggctcttacagcgacgtcgtcgtcggagttctcga

SEQ ID NO: 147471 - DNA, 414 bp, Arabidopsis thaliana
gaaatataagaaataacaaaatggctcgtgtctcttctcttctttctttcttcttaacacttttgatccttttccatggctacgcggctcaacagggtcagcagggtcagcagtttccgaacgagtgccagctcgaccagctcaatgcgctcgagccgtcacacgtactgaagagcgaggctggtcgcatcgaggtgtgggaccaccacgctcctcagctccgttgctcaggtgtctcctttgcacgttacatcatcgagtctaagggtctctacttgccctctttctttaacaccgcgaagctctctttcgtggctaagggacgaggtcttatgggaaaagtgatccctggatgcgccgaaacattccaagactcatcagagttccaaccacgcttcgaaggtcaaggtcaaa

SEQ ID NO: 147472 - DNA, 436 bp, Arabidopsis thaliana
  unsure (1)..(436): unsure at all n locations
ancaatttctattagctacaaaggttattctttcttttcgaccnactgaagacactttcaatttcagtcggcctatgaaggcggccgaggtcaaggtncagatgaaggtgaccgggttacggtggtggcggttacaagagcatgatgcctgaaagtggcccatctagtacccaagtattgtccctgttgattggagtccctgtcgtcggttcgctacttgccttggctggattacttctagctggttcggtgatcggcttaatggttgctttaccactatttctcctcttcagcccggttatagtcccagcggctctaactatcgggcttgcaatgacaggctttttagcctcggggatgttcggtctaaccgggcttagctcaatctcatgggtcatgaactatcttcgtgggacaaggaggactgtgcctgagc

SEQ ID NO: 147473 - DNA, 434 bp, Arabidopsis thaliana
  unsure (1)..(434): unsure at all n locations
cacacaccttcttcttcttctgcttctctctctttttcaagagagncaaacccatgggtnctagcttttgcctcggtgtctctcaagctctcctagctcgtgcaatctctcaaccatggttctgaccaacggggaccttaaccagctttctctggactcaaatccaccggttcacgcgcctaagcttcgtctggcggccgtttggttaaatccaggaccaaaacccgatctttccgtcctttggttcgggctgcagttgtggaaacggtggagccacccacggattcgcggatggtggacaaatcggccaactcgatgaggttttgggctatcgaggcggtggagaaggccaaaccaggacatccgggtctccctatgggtggcgctccgatggctcacattttgtatgatgaggtcatgaggtataaccccaa

SEQ ID NO: 147474 - DNA, 211 bp, Arabidopsis thaliana
  unsure (1)..(211): unsure at all n locations
acacnaggagcggnganacctttgccctcactaccggngnagcacaaaggggccgcgaccacttacaggggccaccggccacccacagcgncnncnancaagccaggcaccagaaccagccagaccgcaacccaaggccaagaaacacagccggaaacaacccacaaggacaagaaaggcaacaaggccgagagcaacagccacagaagaa

SEQ ID NO: 147475 - DNA, 236 bp, Arabidopsis thaliana
  unsure (1)..(236): unsure at all n locations
gccacttgncaacancgcncttttcgctccgttaacnaccaaaaccaactggaccggaaccttagagagggggatggggccgcaaacaaccagcagggaggctnnggcggnncacagcaacaacaagaacagaaaaaccngnggagcgggngcgacgcacaggacaaagcgcaagcaaagaaaaaagacgnacagcaggcacagcagccccagaaccaacaagacagcagaggaaa

SEQ ID NO: 147476 - DNA, 435 bp, Arabidopsis thaliana
catcacaaacgagtaagaatccaaatttttatgtcttaaaaaatggcaaacaagctcttcctggtctgcgcaactttcgccctctgcttcctcctcaccaacgcttccatctaccgcactgttgtcgagttcgacgaagatgacgccagcaaccccatgggcccaagacagaaatgtcagaaggagtttcagcaatcacagcacctaagagcttgccagaaattgatgcgcatgcaaatgaggcaaggccgtggtggtggtccctccctcgacgatgagttcgatttggaagacgacatcgagaacccacaaggcccccagcagggacaccagatcctccagcagtgctgcagcgaggctcgccaggaagagccagtttgtgtttgccccaccttgagacaagctgccagggccgttagcctccagggacaacac

SEQ ID NO: 147477 - DNA, 341 bp, Arabidopsis thaliana
  unsure (1)..(341): unsure at all n locations
ccgtgatcggcgtgngcattgtgtccgttctgacaaacgngnncatcagccaaactacgaagatgatgtcggttttggtggctatggcggttatggtgctggttctgattataagagtcgcggcccctccactaaccaaatcttggcacttatagcaggagttcccattggtggcacactgctaaccctagctggactcactctagccggttcggtgatcggcttgctagtctccatacccctcttccttctcttcagtccggtgatagtcccggcggcttttactattgggcttgctgtgacgggaatcttggcttctggtttgtttgggttgacgggtc

SEQ ID NO: 147478 - DNA, 156 bp, Arabidopsis thaliana
gttctcaaaatattagcattacttatctcatactctcggagagattattatgattcaaatatccaacgtaaggtttggggcacacgtttcgttgtttggtctcaactggcaatgcgaaaagctcttccatggttttcataattgattcctggaagc

SEQ ID NO: 147479 - DNA, 391 bp, Arabidopsis thaliana
  unsure (1)..(391): unsure at all n locations
caaaaagaaaatggttaagctcagcatctccttcttttcaacctncggggntctccgcgnccttaacggctgccttgcgaggcagtcacttggggttcctcctcagctacagaacgagtgtaacctcgacaacctagatgttctccaagccaccgaaactatcaagagtgaagccggtcagatcgagtactgggaccacaaccaccctcagctccgatgtgttggtgtttccgttgctcgttatgtaattgaacaaggcggtctttacttgcccaccttcttcacttccccaaaaatttcctacgtcgttcaaggaacgggtatcagcggaagagtggtccctggatgtgccgagaccttcatggactcgcagccgatgccaggacaacaa

SEQ ID NO: 147480 - DNA, 414 bp, Arabidopsis thaliana
  unsure (1)..(414): unsure at all n locations
agattattataacatataactggngtgctctatttttacacatatgctnagttctacttatacaactaacacacacatacacagttattgctcatttgagagtatctattggaaatttgagtttattatgcataagagagaaatcagaaatagatcataagactggcttttagtaattaatgtttctagggatgatgattcaatatttattacaatattagctgaatacagaacaacaacaacaacacacccaattgatacaagatgttccaaattaatcataagaaattaacaaaagtctgcataaccgtaaccataaagttcattctgcatcaactgattcaaccaggggttattcacagattcttctacctccgagtaatgttgtgtgcttgagacgcaaggatgttcaca

SEQ ID NO: 147481 - DNA, 343 bp, Arabidopsis thaliana
  unsure (1)..(343): unsure at all n locations
caaaaagaaaatggttaagctcagcatctccctcttttttacctncggggnnctcctggnccttaacggctgccttgcgaggcagtcacttggggttcctcctcagctacagaacgagtgtaacctcgacaacctagatgttctccaagccaccgaaactatcaagagtgaagccggtcagatcgagtactgggaccacaaccaccctcagctccgatgtgttggtgtttccgttgctcgttatgtaattgaacaaggcggtctttacttgcccaccttcttcactttcccaaaaattttctacgtcgttcaaggaacgggtattatcggatgagtggtccct

SEQ ID NO: 147482 - DNA, 428 bp, Arabidopsis thaliana
  unsure (1)..(428): unsure at all n locations
ctcctctccctttgagaaatcctctacttcttgctctnctcttcccggcgagctatgtctccgatttgggtattgaaatggcaactcctatggttgaagatacgtcaagcttcgaagaggatcagcttgcttccatgtccaccgaagatatcactagagctactcgtcttctcgacaacgagattcgaattctcaaggaagacgcgcaaagaacaaatctagaatgtgattcttacaaggagaagattaaggagaatcaggagaagattaaactcaacaagcagctgccttacttggttggcaacattgtcgagattttggagatgaatccagaagatgatgctgaggaagatggtgcaaatattgatcttgactcgcaacggaaaggaaaatgtgttgtgttgaaaacgtctacacggcagaccatc

SEQ ID NO: 147483 - DNA, 413 bp, Arabidopsis thaliana
  unsure (1)..(413): unsure at all n locations
aaactatcaagagagaagccgtttgactgagtactgggaccacaaccacgggcaggtccgaagtgangggggccccggcgctcccaangnaanngaacaaggcggncnnnacnngcccaccnncnncactnccccaaaaannncccacgncgnncaaggaacgggnancagcggaagagnggncccnggangngccgagaccnncanggacncgcagccgangcaaggacaacaacaaggccaaccanggcaaggacgacagggacaacaaggccaaccangggaaggacagggacaacagggacaacaaggaagacaaggccaaccangggaaggacagggacaacagggacaacaaggacgacagggacaacaaggccaaccaagggaaggacagggacagcagggacaac

SEQ ID NO: 147484 - DNA, 420 bp, Arabidopsis thaliana
  unsure (1)..(420): unsure at all n locations
gtcttatcgctctatctttctttttcgtcccactcgcggntcttaaagtctacggtgtaccgtacattatctttgtgatgtggttggatgctgtcacgtatttgcatcatcatggtcacgatgagaagttgccttggtatagaggcaaggaatggagttatctacgtggaggattaacaacaattgatagagattacggaatctttaacaacattcatcacgacattggaactcacgtgatccatcatctcttcccacaaatccctcactatcacttggtcgacgccacgaaagcagctaaacattgtgtgggaagatactacagagaaccaaagacgtcaggagcaataccgatccacttggtggagagtttggtcgcaaggtttaagaaagatcattacgtcagcgacactggtgata

SEQ ID NO: 147485 - DNA, 437 bp, Arabidopsis thaliana
aacacacacgtgcactcctttttgctctgttttcacgtgtgatcttgaccttctagaatgctatatcattgactaaataagaaaccaacacaaaaagagttttcgaagcggaatacactctcttgttacacagattggactcggatacgaggatacgacaaaaaacaagaaaccctacaaattactattgatgaggttctttgtacatatagtggttgttgcatatcatcatctccttttcgttttctttgctttttgtcattcgtttctatatatcataaactttctttatgtctcaaataaaagctctgtggtattggtcttcttgagcaagtcatttataaatgacaaaatattcatggctttcttcttaagcggttcggtatcgatcgcttcaattttacctatgaaaatggttatacaagtttttttttttt

SEQ ID NO: 147486 - DNA, 407 bp, Arabidopsis thaliana
  unsure (1)..(407): unsure at all n locations
agaaaacatacacaaatagcaaaacatgttttttttgctctncctcgnctgcgcaacggtcgccctctgcttcctcctcaccaacgcttccatctaccgcaccgttgtcgaattcgaagaagatgacgccagcaaccccgtaggtccaagacagagatgccagaaggagtttcagcaatcacaacacctaagagcttgccagagatggatgagcaagcaaatgaggcaaggacgtggtggtggtccttccctcgacgatgagttcgatttcgagggcccccagcagggataccagctactccagcagtgctgcaacgagcttcgccaggaagagccagtttgcgtttgccccaccttgaaacaagctgccagggcatgtagcctccacggacagcacgggccatgcc

SEQ ID NO: 147487 - DNA, 363 bp, Arabidopsis thaliana
  unsure (1)..(363): unsure at all n locations
ggtctgaccattttagcacacgagccttttgatttatttctctnaacagccttaatgtccctgttctacgtctagtgggacttaacgcccttagaggttatctctacagcggaggaatggtgttgccacaatggacggcaaacgcgcacacggtgctatacgtcacaggaggtcaagccaagatacaagtggtggacgacaatggtcagtcggtgttcaatgagcaagtgggacaaggccaaatcattgtgattccacaaggctttgcagtttcaaaaacggctggtgaaacgggtttcgagtgggatttattcaagacaaacgataacgcttacatttacacactgagcgggcaaacattgt

SEQ ID NO: 147488 - DNA, 383 bp, Arabidopsis thaliana
aaacttcagaaaactagattttggaaattctatttcttcagaagaagaagaagaagaagaaattgtttttgtgattgagtaatatggcggctatgcagttaacgagaacggttttcttcgggatctcgaaggctttccctaaaagccaagctcctagaactcttgcggtagcgattggtcggaaaagctctcgtgtcttttttgcatcgtcggttaaccattctaagggaagatatgatccagtagagaaagcgagagactcgagggccgatttggcatatgattcgaaaaaatggagagaagaatcaggagaatacgcagaagcaggtaaagagaaagcccacaagacaaaagagggagctaaggacaaagcttacgatttg

SEQ ID NO: 147489 - DNA, 423 bp, Arabidopsis thaliana
  unsure (1)..(423): unsure at all n locations
ggtgatttgacggcaaaagtcattatgattcccaatataaaanagnattncaagggtgtctggattggatttattagctgccagttctaaatttaatgttggttcgttcgaaccatataaacttatacctaaaactcctattaataaaaaaatagaacttcctgccgtgtacaaaataaattttgtagccgaatacagacgtttctttccaccccacatggataaaagtagataaacgggaattaattctaattcccacatgatgaaaaaaagtagaagatcccgagaagaaaatgatcctatttgaccgctgtacattgctaacatcaggaaatgaaaaaatcgggaattccgagtaactggaaaagccgctaaagtggctaaagtagtaataaaatcccgtcagttaaatagttcctatag

SEQ ID NO: 147490 - DNA, 154 bp, Arabidopsis thaliana
  unsure (1)..(154): unsure at all n locations
cacaaaactaacaaaagancataagctttgnctncacngnnganaangnctaccacgcggacagatnatgcgaggcagagccgccgnggcangggaagccggaaagccacnggggancgaggaaagggagggggcnccaccgcagaaacacgaa

SEQ ID NO: 147491 - DNA, 426 bp, Arabidopsis thaliana
  unsure (1)..(426): unsure at all n locations
aaaaaatggcaaacaaggggtccttcgtttagttcagctctcgctctctgctgcctcctcaccaacgcttccatgtaccgcaccgtcgttgagttcgaagaagatgacgccactaaccccataggcccaaaaatgaggaaatgccgcaaggagtttcagaaagaacaacacctaagagcttgccagcaattgatgctccagcaagcaaggcaaggccgtagcgatgagtttgatttcgaagacgacatggagaacccacagggacaacagcaggaacaacagctattccagcagtgctgcaacgagcttcgccaggaagagccagattgtgtttgccccaccttgaaacaagctgccaaggccgttagactccagggacagcaccaaccaatgcaagtcaggaaaatntaccagacagccaagcac

SEQ ID NO: 147492 - DNA, 407 bp, Arabidopsis thaliana
gccacagaagaacatttgcaatggattgtgacttttttttattgctcaagctttgaagatcgatcttcagacagggcagcaacttcagaaccaagatgacaaccgtggaaacattgtccgagtccaaggcccgttcggtgtcattaggccgcctttgaggggccagagacctcaggaggaggaagaagaagaagaaggacgacatggacgacacggtaatggcttagaggagaccatctgcagcgccaggtgcaccgataacctcgatgacccgtctcgtgctgacgtgtacaagccacagctcggttacatcagcactctcaacagttacgatctcccatccttcgcttatccgtcctcagccttcgtggactatcgtcaaacgcatgtgcttcaagtggacgcaa

SEQ ID NO: 147493 - DNA, 430 bp, Arabidopsis thaliana
  unsure (1)..(430): unsure at all n locations
tattaattaaaaactnnngtagtttattgtaaaanaacataagnaatatcttcaatatataaagatgtttctaataaattaaatatactcattcgatttgagaataatattttcaaaagagaaattatatagattcttataaatatataaattatatatttatgaaagttttgtaaaagtaaaagtaaatatgggttaatttgcaaacttttataaataaaaggtggtaatgcaaaaataaaaatcgaatctattaatatttatttttagaggaaaacatagagaaataaattgaaataaaaacaacttatttataaagttcctctatgtagaagcaaaaatacatatgaacctgcatattttatatttttatctcattgacatcgggcatggcatcttaacctaatatgagtcagtgtaagggaatttt

SEQ ID NO: 147494 - DNA, 425 bp, Arabidopsis thaliana
ctctccctttccccaactgtacccatcatttccctcgtccattcctctcccttgcacataagctttgctctgtctatttaatttaactcttcttctgcatgaaagttttatgctttcgatgattcccaaaatctttctcatgcgttttttactttcttgatttggcaacatgagctgattttgatttcttctttatggttgccgacacgaaagaagaagctaggacacaaaacaactcaaattttgtttggtgagaaaaatcaaccaagaaaatattgattcttttggagcaaggagttggtttgattgaaggaatggtgggaagcattgaggcaaagagtctgcaatcaaacgggtctgttcatcatattggtcttatattggaggagaaacttgatgaatttcgtcgccttttgggaaatcag

SEQ ID NO: 147495 - DNA, 317 bp, Arabidopsis thaliana
  unsure (1)..(317): unsure at all n locations
cggacgcttgggcaaaaagaaaaagggtcgctcatttttcnccncgnagcaacctggggggttgtcctcgtccttagacggctgccttgcgaggcantcacttggggttcctcctcagctacagaacgagtgtaacctcgacaacctagatgttctccaagccaccgaaactatcaagagtgaagccggtcagatcgagtactgggaccacaaccaccctcagctccgatgtgttggtgtttccgttgctcgttatgtaattgaacaaggcggtctttacttgcccacctttttcactttcccaaaaattttctacg

SEQ ID NO: 147496 - DNA, 423 bp, Arabidopsis thaliana
  unsure (1)..(423): unsure at all n locations
aaagaaaatggttaagctcagcaatnctttcgttgtatccttcggggttctcctcggccttaacggctgccttgcgaggcagtcacttggggttcctcctcagctacagaacgagtgtaacctcgacaacctagatgttctccaagccaccgaaactatcaagagtgaagccggtcagatcgagtactgggaccacaaccaccctcagctccgatgtgttggtgtttccgttgctcgttatgtaattgaacaaggcggtctttacttgcccacctttttcacttccccaaaaatttcctacgtcgttcaaggaacgggtatcaacggaagagtggtccctggatgtgcccagaccttcatggactcgcaaccgatgcaaggacaacaacaaggccaaccatggcaaggacgacagggacaaca

SEQ ID NO: 147497 - DNA, 411 bp, Arabidopsis thaliana
  unsure (1)..(411): unsure at all n locations
ctctgatcgaatcaaaaagnttttaacctcctaaatnntnnnagntctaaggaaaaaacctcttcgagaatggttttatcggtgaagcaaacactctctccgaaaatcggacttttccgacgaaacccttcatcctcactaggaagatctcctgtttctctctcgtttccatcgacggagcttccaaaacgcaccgttttagccgtgtcaaagccgcttcatctctcttcttctctgagagctaagtctccggtagtgagatgtgaagcttatgaagctgaccgatcagagcctcatccgatcggtgatgatgctgcggcggcggaaacgaaatcagaggcggctaagaaattgaagatcgggatttactttgctacttggtgggctttgaacgttgtgttcaatatctac

SEQ ID NO: 147498 - DNA, 388 bp, Arabidopsis thaliana
attaggccgcctttgaggggctttaacttcaggaggaggaagaagaagaagaaggacgacacggacgacacggtaatggcttataggagaccatctgcagcgccaggtgcaccgataacctcgatgatccgtctcgtgctgacgtgtacaagccacagctcggttacatcagcactctcaacagttacgatctccccatccttcgcttcatccgtctctcagccctccgtggatctatccgtcaaaacgcaatggtgcttccacagtggaacgcaaacgcgaacgccattctttacgtgacagacggggaagcccaaatccagatcgtaaacgacaatggtaacagagtgtttgacggacaagtctttcaaggacagctcatagccgt

SEQ ID NO: 147499 - DNA, 438 bp, Arabidopsis thaliana
agctgtcgtgttgagtcctaattcgccgtcgtttttctcagagaaggagtggtgagagatgtctagtctcgaagatatcaagaacgagactgttgatctggaaaaaattccgattgaggaagttttccagcagctaaaatgttcaagggaaggattgacaacgcaggaaggggaggacaggattcagatctttggccccaacaagctcgaagagaaaaaggaaagcaaacttctgaagtttttggggtttatgtggaatccactttcatgggtcatggaaatggctgcaatcatggccattgctttggccaacggtgatggtaggccttcggattggcaggattttgttggtattatctgtctggtggttatcaactctaccatcagttttatcgaagaaaacaatgctggtaatgctgctgctgctcttatggctgg

SEQ ID NO: 147500 - DNA, 439 bp, Arabidopsis thaliana
gtcatgaactccattgctcgtggacagatgattcttcttttctctgctgctggtctacctcataatgagattgctgctcaaatttgtcgtcaggctggacttgtgaagcggttggaaaagactgagaacttaattcaggaggtaaatcatttgccccattaccaccaccactaaagtacttttgttttccaagtatcaaagtgtaagtgcctgtttctgcacattcactttctaactgatgtagaaagatttaactatctctaaggataggtacatttaaagggttataatttgtgatgccattgacttttcataatactcaacttctatgaagattgatatagcagtcagtctctcaattcctgtgtagttttgtttgctttgtaaactccattattaacattgtgcttttccaggatcatggagaggacaattttgt

SEQ ID NO: 147501 - DNA, 439 bp, Arabidopsis thaliana
aactcaccacaaacagacaatttaattttctaatttaaaacacaaaatcaaaagatatgaatgccacaaagtttgctgtgcttctcgtgattagcgttttgtgtgccattgtcaccgcaaggcatgtcgaagaagtgtctaaagagaccaaattaggcacctctcttccaaaaactactaccaaaggcattggagctcagctttctgctgctggtattacttccagcagtagtgatgtctatagctctgctactggtttcaacaatcccaaaggtccagacgctaatggatacgaaagtggctacacaagtaccatcggacaagtcattgcaaagggtcgcaaggcaagagtttcttctgcaagtgcttctaccgccaaaggtgacgctgcagctgcagtgactcgcaaagctgctgctgcacgtgcaaacggtaaggt

SEQ ID NO: 147502 - DNA, 368 bp, Arabidopsis thaliana
  unsure (1)..(368): unsure at all n locations
gagagatcgaaatttcctctncncaaaatactctatatttgaagangaaggacagagaggaatcatcatcgtcttcgggttcaatgacaacaaaaaaccctaatggaataatcaacaacggcgaacacgaacctcgagatatcaacatccgatcattctcttctgttccttcttctcctcgtaacgcttcttccaaatacgatttcgtcaaggtcaaagtatggcttggagacaacgcagatcactactatgttctgtctcgattcttagtctgtagaatgttaactgttactaagatcccaaatcatgaagctataaagatttctcttgaactcaagaagcttctaattgacaacagccttcttgat

SEQ ID NO: 147503 - DNA, 274 bp, Arabidopsis thaliana
  unsure (1)..(274): unsure at all n locations
ccacgcgtcggatatttggacatgacaggtcttantcttttctgtgaancanncnngcatggaggagagctaccaactctgattattcaatctacaggccatgccgtgcatatatttgtcaatggacagctttcaggttctgcctttggaacaaggcaaaacaggagatttacttatcagggaaagatcaatctgcattctggaactaacagaattgcgttgctgagtgttgctgttggattaccaaatgtgggtggacaccttgagtcatgga

SEQ ID NO: 147504 - DNA, 406 bp, Arabidopsis thaliana
  unsure (1)..(406): unsure at all n locations
cccatgatggctggttactaccccacatcgtttcttcttatcatatccaacagnacttggacgaaaacatatcgttgattctgaagattgttgagtctcaaaactctggaaagcttagcgaatgcgccgagaatcaagcaaggcttcaacgcaacctaatgtacctagctgcaatagcagattctcagcctcagccaccaagtgtgcatagccagtatggatctgctggtggtgggatgattcagggagaaggagggtcacactatttgcagcagcaacaagcgactcaacagcaacagatgactcaacagtctctaatggcggctcgatcttcaatgttgtatgctcagcaacagcagcagcagcagcagccttacgcgacgcttcagtatcagcaattgcacca

SEQ ID NO: 147505 - DNA, 432 bp, Arabidopsis thaliana
  unsure (1)..(432): unsure at all n locations
gcggtgacaccattgcaacacctcctgttgtagctcaatggntctacaacaggggaaatgagcctgtcattgtgggtgcaaccgcggatctcgccagcaaccagaaccagcttgaccgcaaccttagaccatttttgatagccggaaacaacccacaagggcaggaatggctacaaggccgaaagcaacagaagcaaaacaacatcttcaatggcttcgcacctgagatcttggctcaagccttcaagatcaatgtcgagacggctcagcagctccagaaccagcaagataaccgtggcaacatcgtcaaggtcaacggacctttcggcgtcattaggccacccttgagacgcggcgaaggcggccaacaaccacatgaaatagctaatggtttagaggagactttgtgcaccatgcgatgcactgaaaacc

SEQ ID NO: 147506 - DNA, 431 bp, Arabidopsis thaliana
  unsure (1)..(431): unsure at all n locations
cacgtactgaagagcgaggcttgntcgctcgaggngngggaccaccacgctcctcaggtccgttgctcaggtgtctgcttcgcacgttacatcatcgagtctaagggtctctacttgccctctttctttaacaccgcgaagctctccttcgtggctaaaggacgaggtcttatgggaaaagtgatccctggatgcgccgaaacattccaagactcatcagagttccaaccacgcttcgaaggtcaaggtcaaagccagaggttccgtgacatgcaccagaaagtggagcacattaggagcggtgataccattgccacaacacccggtgtagcccagtggttctacaacgacggacagcaaccacctgtcatcgtcagcatcttcgatctagccagtcaccagaaccagcttgaccgcaacccaaggccatt

SEQ ID NO: 147507 - DNA, 303 bp, Arabidopsis thaliana
  unsure (1)..(303): unsure at all n locations
caaaaagaaaaaggntaagctttttatctccctcggngcaaccttcggggttctcctcgtccttaacggctggcttgcgaggcagtcacttggggttcctcctcagctacagaacgagtgtaacctcgacaacctagatgttctccaagccaccgaaactatcaagagtgaagccggtcagatcgagtactgggaccacaaccaccctcagctccgatgtgttggtgtttccgttgctcgctatgtaattgaacatggcggtctttacttgcccacctaattaacttccccaaaattttccta

SEQ ID NO: 147508 - DNA, 434 bp, Arabidopsis thaliana
  unsure (1)..(434): unsure at all n locations
gaaaatggttaagctcagcaatctcttttttgcatccttcggggntctccncgccctgaacggctgccttgcgagggagtcacttggggttcctcctcagctacagaacgagtgtaacctcgacaacctagatgttctccaagccaccgaaactatcaagagtgaagccggtcagatcgagtactgggaccacaaccaccctcagctccgatgtgttggtgtttccgttgctcgttatgtaattgaacaaggcggtctttacttgcccaccttcttcacttccccaaaaatttcctacgtcgttcaaggaacggttttcagcggaagagtggtccctggatgtgccgagaccttcatggcctcgcagccgttgcaaggacaacatcaaggccaaccttggcaaggacgacagggacaacaaggccaaccatggg

SEQ ID NO: 147509 - DNA, 348 bp, Arabidopsis thaliana
  unsure (1)..(348): unsure at all n locations
gcgctcgccctctgctaccncctttcaacgtctccatcnaccgcaccgatggcgaattcgaagaagatgacgcgcagcagcggcctatgtccaagacagagatgccagaaggagtttcagcaatcacaacacctaagagcttgccagagatggatgagcaagcaaatgaagcaaggacgtggtggtggtcctttcctcgacgatgagttcgatttcgagggcccccagcagggataccagctactccagcatggctgcaacgagcttgccaggaagagccagtttgcgtttgccccaccttgaaacaagctgtcagggcagttagccttcaaggacagcacggaccat

SEQ ID NO: 147510 - DNA, 410 bp, Arabidopsis thaliana
  unsure (1)..(410): unsure at all n locations
aagaggaagaaaaatgggtcgagtctcatttattttctctttctctnngacactcttgatcctcttcaatggctacactgcccaacagtggcccaacgagtgccagctcgatcaactcaatgcgctcgaaccatcccaaatcatcaagagcgagggtggtcgcatcgaggtctgggaccaccatgcaccccagctccgttgctccggctttgcctttgagcgtttcgtcattgagcctcagggtcttttcttgcccactttcttgaacgccggcaaactcacgtttgttgttcacggaaggggtctaatgggaagagttattccgggatgcgccgagacgttcatggagtcaccggtatttggagaaggtcaaggtcagggtcagagtcaagggtttcgtgacatgcacc

SEQ ID NO: 147511 - DNA, 421 bp, Arabidopsis thaliana
  unsure (1)..(421): unsure at all n locations
ggttgggtgatggctgaactgctgcnnggattgntgtttcactatannngcannagcnatgtgcttgttattctattncttgaccctcttactcatttntgctctcgcggacttgttttacagcctctgtttcctggcgaaagtggagtcgatcaacttgttgaaatcataaaggtagtatttttgctatcaattcttttagggttagttgtatttacaaagaaaatgacatctttagagctggcactgactaatagtttctcactgctgattatatttttttcataaaactttaccaccatttttgtagtaggactcgtacattctctcttcatggttttttaattgtcatgcaggttttgggtacaccaacaagggaggagatcaaatgcatgaatccaaactacacaaaatttaaatt

SEQ ID NO: 147512 - DNA, 474 bp, Arabidopsis thaliana
  unsure (1)..(474): unsure at all n locations
gggaaggacagggacagcagggacaacaagggttcctttttttgcaccagaaggnggaacatgggagacgcggagacgacnggggcaacactccacgcacngcccacngganctacaacncaggagaacagccactnggcancancgctcttctcgacatcgccaactaccaaaaccaactcgaccgcaaccctagagtgttccatttggccggaaacaaccagcagggaggctttggcggttcacagcaacaacaagaacagaaaaacttgtggagcgggttcgacgcacaggtcatagctcaagcattgaaaattgacgttcagttggctcagcagcttcagaaccaacaagacagcagaggaaacatcgttcgggttaagggacctttccaggtcgtgaggccacctctaagacagccctacgagagcgaggagtggagacacccacgtagcccacagggcaacggccttg

SEQ ID NO: 147513 - DNA, 448 bp, Arabidopsis thaliana
  unsure (1)..(448): unsure at all n locations
nacacacatagcaaaaaatggcaaactaggtgtacctcgtctgcgcagctcncgctggctgggttctcctcaccaacgcgttccagtctaccgcaccgtcgttgagttcgaagaagatgacgccactaaccccataggcccaaaaatgaggaaatgccgcaaggagtttcagaaagaacaacacctaagagcttgccagcaattgatgctccagcaagcaaggcaaggccgtagcgatgagtttgatttcgaagacgacatggagaacccacagggacaacagcaggaacaacagctattccagcagtgctgcaacgagcttcgccaggaagagccagattgtgtttgccccaccttgaaacaagctgccaaggccgttagactccagggacagcaccaaccaatgcaagtcaggaaaatttaccagacagccaagcacttgcccaac

SEQ ID NO: 147514 - DNA, 278 bp, Arabidopsis thaliana
  unsure (1)..(278): unsure at all n locations
accaacgcnnncancnaccgcaccgnngncgagnncgacgaagangacgccagcaaccccangggcccaagacagaaangncagaaggaggggcagcaancacagcaccnaagagcnngccagaaanngacgcgcangcaaaagaggcaaggccgnggaggnnggcccacccacgacgaagagnncgacccggaagacgacancgagaacccacaaggcccccagcagggacaccagancccccagcagggcngcagcgagcnncgccaggaagagcc

SEQ ID NO: 147515 - DNA, 203 bp, Arabidopsis thaliana
  unsure (1)..(203): unsure at all n locations
aaagaaaacggnnaagcncagcaacctttaaattgctttcttcggggnncaccacgnccggagcggctgccgagcgaggcgggcgacccgcgaaccnccncagcnacagaacgagnngaaccncgacaaccnagangngcnccaagccaccgaaacgancaagagagaagccggacagaacgagaaccgggaccacaaccacc

SEQ ID NO: 147516 - DNA, 526 bp, Arabidopsis thaliana
  unsure (1)..(526): unsure at all n locations
ggaannnncngggtccgacccacgccgtccgtcacanaacgagtgaagaataccaaatacanaatagttanaaataatgtgcaaacnnaagctcttcctcgtgctgcggcgaactttcgccactctgcgttcctgccctcacacaacgcttccatctaccgcnnactgttgtcgagttcgaccgaagatgaccgccagcaactcccatgggtccctaagacagaaatgtcagaaggagtttcagcaatcacagcacctaagagcttgccagaaattgatgcgcatgcaaatgaggcaaggccgtggtggtggtccctccctcgacgatgagttcgatttggaagacgacatcgagaacccacaaggcccccagcagggacaccagatcctccagcagtgctgcagcgagcttcgccaggaagagccagtttgtgtttgccccaccttgagacaagctgccagggccgttagcctccagggacaacacggaccattccaatccaggaaaatttacaagacagcttag

SEQ ID NO: 147517 - DNA, 473 bp, Arabidopsis thaliana
  unsure (1)..(473): unsure at all n locations
atttgcactcagtctagagacaaagagagagatagattgggtcaaagacggagatgatggagagagacgcaatggctacggnggctccctatgcgccggtcacttaccatcgccgtgctcgtgttgacttggatgatagacttcctaaaccttatatgccaagagcattgcaagcaccagacagagaacacccgtacggaactccaggccataagaattacggacttagtgttcttcaacagcatgtctccttcttcgatatcgatgataatggcatcatttacccttgggagacctactctggactgcgaatgcttggtttcaatatcattgggtcgcttataatagccgctgttatcaacctgacccttagctatgccactcttccggggtggttaccttcacctttcttccctatatacatacacaacatacacaagtcaaagcatggaagtgattcaaaaacatatgac

SEQ ID NO: 147518 - DNA, 473 bp, Arabidopsis thaliana
  unsure (1)..(473): unsure at all n locations
acaaggccgaaagcaacagaagcaaaacaacattttctanggcttcgcacctgagatcttggctcaagccttcaagatcaatgtcgagacggctcagcagctccagaaccagcaagataaccgtggcaacatcgtcaaggtcaacggacctttcggcgtcattaggccacccttgagacgcggcgaaggcggccaacaaccacatgaaatagctaatggtttagaggagactttgtgcaccatgcgatgcactgaaaacctcgatgacccgtcggatgctgacgtgtacaagccatcactcggatacattagcacacttaacagctacaatcttcctatcctcagacttctccgccttagcgctcttcgtggctccatccgtaaaaacgctatggtgctaccgcaatggaacgtaaacgcaaacgcggcactctacgtgacaaacggaaaggctcatatacaaatggtgaacg

SEQ ID NO: 147519 - DNA, 414 bp, Arabidopsis thaliana
  unsure (1)..(414): unsure at all n locations
aaagaaaatggttaagctcagcaancncctcgttgctatcatttgggnncnccncgnccttaacggctgtcttgcgaggcagncacttggggttcctcctcagctacagaacgagtgtaacctcgacaacctagatgttctccaagccaccgaaactatcaagagtgaagccggtcagatcgagtactgggaccacaaccaccctcagctccgatgtgttggtgtttccgttgctcgttatgtaattgaacaaggcggtctttacttgcccaccttcttcacttccccaaaaatttcctacgtcgttcaaggaacgggtatcagcggaagagtggtccctggatgtgccgagacctttatggactcgcagccgatgcaaggacaacaacaaggccaaccatggctaggacgaca

SEQ ID NO: 147520 - DNA, 345 bp, Arabidopsis thaliana
  unsure (1)..(345): unsure at all n locations
ctttctctctctttggggactcgcttttaagtaattntctngcnannncagaccagctcttcgttcttctgttaggtcttttgggtcatgccaagtcacgcggtcggttcgagccaaagattcttatgccgacagaggaagctaacccggctgaccaagacgaagatggtgtcggtacaagatgggcgggtctcgtcgctggttcttctggatatggaaactacagacaccaggctgacgtgtgtcacgcatatcaaatactaagaaaaggaggtttaaaggaagagaacatagtcgttttgatgtatgatgatatcgcataccacccacttaatccttgttcgg

SEQ ID NO: 147521 - DNA, 349 bp, Arabidopsis thaliana
  unsure (1)..(349): unsure at all n locations
ccgnccgaatcccggtcgcccacgcgtcgattgtttcaacattnngccggaatttatggtttttttgggcaggacaanacccggggatggatnctatttgggtcgataggctcaagcataatcaagattcatgttaaacaaataaaaaaaattgtcgtcttctatttaaattacgatcgccattatttattactttcattcatcatattataataaagctgaatatatttttaatggttaatttttttgtttttagcaaaggattgtatatcaatcttttgccaacatgtaatatgcgagtatgttttcttatggttacaaattaacaatgctgatacaaatttcaaat

SEQ ID NO: 147522 - DNA, 380 bp, Arabidopsis thaliana
  unsure (1)..(380): unsure at all n locations
cctatcctnnttcgtcttnntttttttttttatttggtgagaaactacaaatgcanaaaaccaaaactgcatattaatanagaaatgttttggatattcatgattctctaaaaacatgaattactccatataactgataataaatttaatcatcgccttcacatctctatttgactatcaaccatataattcgctctcattttctttagtgaaatgttttggtgggtgaatatgcatgaaattcatatggatagactttaatggaacataaaataaataaataacgaagtggggattagtagtagtatgtggagaaaagttggacaactcatttggttttgcaaactttgcaagtgtcccatttatttctcgtctcttat

SEQ ID NO: 147523 - DNA, 461 bp, Arabidopsis thaliana
  unsure (1)..(461): unsure at all n locations
cgacaacctagatgttctccaagccaccgaatttactagagtgaagccggncagatcgagtactgggaccacaaccaccctcagctccgatgtgttggtgtttccgttgctcgttatgtaattgaacaaggcggtctttacttgcccaccttcttcacttccccaaaaatttcctacgtcgttcaaggaacgggtatcagcggaagagtggtccctggatgtgccgagaccttcatggactcgcagccgatgcaaggacaacaacaaggccaaccatggcaaggacgacagggacaacaaggccaaccatgggaaggacagggacaacagggacaacaaggaagacaaggccaaccatgggaaggacagggacaacagggacaacaaggacgacagggacaacatggccaaccatgggaaggacagggacagcagggacaacaagggttccgtgacatgca

SEQ ID NO: 147524 - DNA, 282 bp, Arabidopsis thaliana
aaaatgacgggtaaaggagaaggaccagctatcggtatcgatcttggtaccacttactcttgcgtcggagtatggcaacacgaccgtgttgagaacattgctaatgaacaaggaaacagaaccacgccatcttacgttgctttcaccgactccgagagggtgaacggggacgcaactaagaatcaggtcgccatgaaccccgttaacacacggtttcgacgctaagaggatgatcgggcgtcgtttctctgacagctctgttcagagtgacatgaaattgtg

SEQ ID NO: 147525 - DNA, 452 bp, Arabidopsis thaliana
  unsure (1)..(452): unsure at all n locations
ctttattggagaaaccctaatcggcgacaattgattacttgtgactctatccacaagaggcgtgccactggaggcaagcagaagcaatggaggaagaagcgaaagtatgagatgggaaggcagccagccaacaccaagctctcaagcaacaagacggtcagaagaataagagttcgtggtggaaatgttaagtggcgtgcgttgaggctcgatactggtaactactcgtggggaagtgaagcaactacccgcaagaccagagtccttgatgtggtctacaatgcctccaacaatgagcttgtacgtactaagacacttgtcaagagtgctattgttcaggttgatgctgctccgttcaagcaggggtacctctcgcactatggtgttgagctngggcgcaagaagaagagtgcttctttcaccaagaaggactgagaggaaggtgaagaggc

SEQ ID NO: 147526 - DNA, 465 bp, Arabidopsis thaliana
tcacaaacgagtaagaatacaaatacaaatagtaaaatattggcaaacaagctcttcctcgtctgcgcaactttcgccctctggttcctcctcaccaacgcttccatctaccgcactgttgtcgagttcgacgaagatgacgccagcaaccccatgggcccaagacagaaatgtcagaaggagtttcagcaatcacagcacctaagagcttgccagaaattgatgcgcatgcaaatgaggcaaggccgtggtggtggtccctccctcgacgatgagttcgatttggaagacgacatcgagaacccacaaggcccccagcagggacaccagatcctccagcagtgctgcagcgagcttcgccaggaagagccagtttgtgtttgccccaccttgagacaagctgccagggccgttagcctccagggacaacacggaccattccaatccaggaaaatttacaagaca

SEQ ID NO: 147527 - DNA, 388 bp, Arabidopsis thaliana
  unsure (1)..(388): unsure at all n locations
ggttaagctcagcaatctcctcgnngcaaccnactgggntcttctcgnccnnaacggctgccttgcgaggcagtcacttggggtgcctcctcagctacagaacgagtgtaacctcgacaacctagatgttctccaagccaccgaaactatcaagagtgaagccggtcagatcgagtactgggaccacaaccaccctcagctccgatgtgttggtgtttccgttgctcgttatgtaattgaacaaggcggtctttacttgcccaccttcttcacttccccaaaaatttcctacgccgttcaaggaacgggtttcagcgtgagagtggttcctggatgtgccgagacctttttggacttgtagtccatgcatggtctacatcatggtcaa

SEQ ID NO: 147528 - DNA, 182 bp, Arabidopsis thaliana
  unsure (1)..(182): unsure at all n locations
aaaanggggcgagcctcaacaacaagcacgtttagatgacactctggagccccancaaggggtacactgcccaacagaggcccaacgagcgccaccccgaccaacncaangcgctcgaaccatcccaaancatcaagagcgagggcggncgcaacgaggaccgggaccaccangcaccccag

SEQ ID NO: 147529 - DNA, 463 bp, Arabidopsis thaliana
  unsure (1)..(463): unsure at all n locations
cgcatgtacttagcacttttgacatgttacatttttgttgttnggnctactttagttgcctggcgatttcttgtaatatatcgcaaagtctaattttgtgtgatgacattgatccaattgtgaaagtgttacatgttatggtacattcatgagaaatgctcaatacaatcaaaaccagggttgttttctactaagtgagaatctggtttttaaactcaagtataatgatcaaatcaggaacaaaatttgttgccaatgacaggttttgctacaattgcttcttctgccacttgaataagtacgacgtcctttaacacagggaatgcattcgtgctggccaagacactgcaaaaactttcaagcttgaacctgattatatttgaatctcattattcgagtctgcattgctactattacttcaccctcaaaccatatttattacatgtgagagacatcacgctca

SEQ ID NO: 147530 - DNA, 444 bp, Arabidopsis thaliana
  unsure (1)..(444): unsure at all n locations
ttcctctctctgttgnncncggggcctaaggtaattagaaaaaanggagnncgagaaccggggcggacttgcaacgtcgcagaggtactactgtctcttgttcgatttggacgatactctttatcctcttagctccggaatcgcaagagaatgtgggaacaacatcaaagattacatgaccgagaaactcggtataccgaaggacaaaatcgtcgaattgtctgatcttctatacaagaactatggaacaacaatggctggtcttagggcgatcggatatgaatttgactacaatgagtaccacagcttcgtccacggccgtttaccctatgacaacataaaaacccgccttgttcttcgcagccttttgcttagccttcctctccgaaaagcaattttaccaacgcggacagagttcacgcggccaaagcgttgaaaaagttg

SEQ ID NO: 147531 - DNA, 466 bp, Arabidopsis thaliana
  unsure (1)..(466): unsure at all n locations
ggtgcttccacagtggaacgcaaacgcgatctttattcnnttcgtgacagacggggaagcccaaatccagatcgtaaacgacaatggtaacagagtgtttgacggacaagtctctcaaggacagctcatagccgtaccacaaggtttctcggtggtgaaacgcgcaacaagcaaccgattccagtgggttgagttcaaaacaaacgctaacgcgcaaatcaacactctggcgggacgaacctcagtcttgagaggtttaccacttgaagtcataaccaatgggttccaaatctcacccgaagaagcaaggagggtcaagttcaacacgctcgagaccactttgactcacagcagtggcccagctagctacngaaggccaagagtggctgcagcttaagagcttaaaaccgcggcttaacaatgaaccgctactgtaaaaggaaagtaaatagtacgtagtaattat

SEQ ID NO: 147532 - DNA, 255 bp, Arabidopsis thaliana
  unsure (1)..(255): unsure at all n locations
aaagaccgaaagcgaacaagaaccgagagggaaaggagaaaagaaccccacgacgggagggcaanacagaaccagagagcccacgcgaacaaacagaccaaggaagaggcaagcgcacacaccccaacggagaacccgaaagcaagacgggacaacgaggaaacgggaagagcgagccaagccaccaagagaaagcgcaaaccaaaagaggaaacaaccagcccccgcaaaccgacccgaaaccgagcaaacaaa

SEQ ID NO: 147533 - DNA, 103 bp, Arabidopsis thaliana
  unsure (1)..(103): unsure at all n locations
gcctaacgagggccaggtcccccaacacaangcgcncgaaccancccaaancaacaagagcgagggnggncgcaacgaggaccgggaccaccangcaccccag

SEQ ID NO: 147534 - DNA, 476 bp, Arabidopsis thaliana
  unsure (1)..(476): unsure at all n locations
cgcaatggtgcttccacaggggaacgcaaattttacttctattctttacgngacagacggggaagcccaaatccagatcgtaaacgacaatggtaacagagtgtttgacggacaagtctctcaaggacagctcatagccgtaccacaaggtttctcggtggtgaaacgcgcaacaagcaaccgattccagtgggttgagttcaaaacaaacgctaacgcgcaaatcaacactctggcgggacgaacctcagtcttgagaggtttaccacttgaagtcataaccaatgggttccaaatctcacccgaagaagcaaggagggtcaagttcaacacgctcgagaccactttgactcacagcagtggcccagctagctacggaaggccaagagtggctgcagcttaagagcttaaaaccgcggcttaacaatgaaccgctactgtaaaaggaagttaaatagtacgtagtaattataata

SEQ ID NO: 147535 - DNA, 455 bp, Arabidopsis thaliana
ctccttcactcttcatcttcaaagactgcgcttttatctctttgaaaaaggttcgagcttcggaaactatggcagcattccctaaccttaactctgatgctggattgaagaagctcgacgagcatcttctcactcgcagttacattactggataccaggcttcaaaggatgatatcaccgtctttgcagctcttgcaaagcccccaacttcacagtatgtgaacgcttctcgttggtacaatcacattgatgccctcttgaggatctctggtgtctctgctgaaggaagcggtgtcattgttgagggatcagctcctatcactgaggaggctgttgctactccccctgcagctgattctaaggatgctgcggctgatgaagaagatgatgatgatgttgaccctttcggagaggagaccgaagaggaaaagatagctgcttgagagagagcagct

SEQ ID NO: 147536 - DNA, 393 bp, Arabidopsis thaliana
  unsure (1)..(393): unsure at all n locations
acaccaagcgcaaaccacagctctaaaaacagcngaganctgggctaaatacagacccattgcaccaaagcccgggacgcctcgagtgaacgacgatgatccttcttcctctatgtctcacaaaatcagccaatctccttaccttcgtaacctctggcctcagcttcaagcgcgacctacaagaacccgcaagcgaggccgaggcgggatgggtccctcttctcttgctatgaagagaccaaagtcgtcatgcggttcttctagtacttctactatttctacacaacgtgttcttggacctattaaaacactgtcggttcaagctttcactcatcataggttacctaacctacctcaagttggctacggttttgagaatggtgtcctttctac

SEQ ID NO: 147537 - DNA, 438 bp, Arabidopsis thaliana
  unsure (1)..(438): unsure at all n locations
gaaagaaagaaaaaaatggagaagagnggatgttgattgntttggangaganaagaagcncggagagggcacactggnncgagcgcgggcatcctccacgcaaccgcatcgcagatnccnnccggaaagccgccggagagggagctacacaagccgnggcaagggaagcttactttaccgtggttgacggtaagaaactccggcgggtttcttcttacttatgatttatatgtataagaaatgagcatgtaatgtaagagtgacaatgaataaatagagaacgtactttagtttgattatacattttaggggcaggttttgactcgaacaacgggggttcaccgtcggagactacagggaacaagacacatatgtaccctaatctcagagggggaagcagcaaatctcttgtagcatccgtgaagaacacaggaaaag

SEQ ID NO: 147538 - DNA, 352 bp, Arabidopsis thaliana
  unsure (1)..(352): unsure at all n locations
gacccacgcgnccgggaagaaaaaggggncgagncncaacnannnatttttttatctttgacacncannganccacnngaaggggtacactgcccaacaggggcgccaaccagagccagctcgancaacncaangcgcncgaaccancccaaancancaagagcgagggnggncgcancgaggncngggaccaccangcaccccagcnnccgagcnccggcnnngcccccgagcgnnncgacanagagccacagggncnanacnggcccacnnncnngaacgccggcaaacacacganggaagnncacggaaggggaccaacgggaagagcnannccgggangcgccgagac

SEQ ID NO: 147539 - DNA, 461 bp, Arabidopsis thaliana
  unsure (1)..(461): unsure at all n locations
gtctcttgaagcatataaggctgctgttgaatcnttatagaatggnnnggcacccacacatggagttagacttggcttggcgttgaacttttcagttttctactatgagatcttgaactctcccgaaagcgcatgccaattggctaagcaagcattcgatgatgcaattgctgaacttgacagcctcaacgaggaatcatacaaagacagcactcttattatgcagctacttagagacaatctcaccttgtggacttcagaccttaatgaggaaggagatgagagaaccaaaggtgctgatgagcctcaagatgagaactaaatcctctgtgagaagagaaacgactcttgctgcatcctgaatcttgaagtgaagacaagtagtgtcgtttgttgttactcgaatgtgtaatttttaaacaatgtctttcttgatgggggtttccagatttttgaccttt

SEQ ID NO: 147540 - DNA, 427 bp, Arabidopsis thaliana
  unsure (1)..(427): unsure at all n locations
ctgcgttaggaaatcagaccgagcggtccagtanttattttgancggncaaccatnagggaccggctgttgaaagccaaaatggatcatcaccctctactggaccgattggtctacacagtcttctccctgcttcagattttctcgccctttctctactccaaaaagctcaaaaccatccagtcccgtcacaattacctaaaacaggcaaaatacagaaggcacaacccaaaagacgcaaaacacggactacgacatgttaaatgactcaaaacgaagagacctaagacattaaaaacgcaacatatcaactcctccctacttagctctttgattattcttaaggaaaacaaaaatcttgatctggaggagagatttgaaaacaaaagaacccacattttactttgggatcatgcttttatcaattg

SEQ ID NO: 147541 - DNA, 419 bp, Arabidopsis thaliana
  unsure (1)..(419): unsure at all n locations
caaaaaatggcaaacaaggggnncctctacagtgctttttctcgctcncngctacctccgcacggaacgcttccatctaccgcaccgtcgttgagttcgaagaagatgacgccactaaccccataggcccaaaaatgaggaaatgccgcaaggagtttcagaaagaacaacacctaagagcttgccagcaattgatgctccagcaagcaaggcaaggccgtagcgatgagtttgatttcgaagacgacatggagaacccacagggacaacagcaggaacaacagctattccagcagtgctgcaacgagcttcgccaggaagagccagattgtgtttgccccacctttgaacaagctggcaaggccgttagactccagggacagcaccaaccaatgcaagtcaggaaaatttaccagaca

SEQ ID NO: 147542 - DNA, 462 bp, Arabidopsis thaliana
  unsure (1)..(462): unsure at all n locations
aaaacatacacacatagcaaaaaagggcaattttgntttttttcgtctgcgcagctctcgctctctggttcctcctcaccaacgcttccatctaccgcaccgtcgttgagttcgaagaagatgacgccactaaccccataggcccaaaaatgaggaaatgccgcaaggagtttcagaaagaacaacacctaagagcttgccagcaattgatgctccagcaagcaaggcaaggccgtagcgatgagtttgatttcgaagacgacatggagaacccacagggacaacagcaggaacaacagctattccagcagtgctgcaacgagcttcgccaggaagagccagattgtgtttgccccaccttgaaacaagctgccaaggccgttagactccagggacagcaccaaccaatgcaagtcaggaaaatttaccagacagccaagcacttgcccaacgtttgcgaca

SEQ ID NO: 147543 - DNA, 359 bp, Arabidopsis thaliana
  unsure (1)..(359): unsure at all n locations
ggggcgagccacgcgnacggacgcggcgaaggcggccaacaaccattngattaagttaangggnnagaggaaacngggggcgccaagctangcacgggaaagggcccccaccagccggacgcngacgngnacaagccancacacggaaacaanagcacacnnaacagcnacaagcgnccgagccgcagacnaccccgccaaagcgcacaacgaggcgccacccgaaaaaacgcgagggggcgaccgaaanggaacgnaaacgcaaacgcggcacncgacgagacaaacggaaaggcgcaaaaacaaaaggagaacgacaacggagaaagagagancgaccaagagaacaccagcggaca

SEQ ID NO: 147544 - DNA, 471 bp, Arabidopsis thaliana
  unsure (1)..(471): unsure at all n locations
caagagaacatacacaanaagcaatttttggttaataagctctnccncgncngcgcaactctggccctctgcttcctgctcacgagacgcttccatctaccgcaccgttgtcgaattcgaagaagatgacgccagcaaccccgtaggtccaagacagagatgccagaaggagtttcagcaatcacaacacctaagagcttgccagagatggatgagcaagcaaatgaggcaaggacgtggtggtggtccttccctcgacgatgagttcgatttcgagggcccccagcagggataccagctactccagcagtgctgcaacgagcttcgccaggaagagccagtttgcgtttgccccaccttgaaacaagctgccagggcagttagccttcagggacagcacggaccatttcaatccaggaaaatataccagtcagctaagtacttgcctaacatttgcaagatccagcaagt

SEQ ID NO: 147545 - DNA, 423 bp, Arabidopsis thaliana
  unsure (1)..(423): unsure at all n locations
ggaagaaaaatgggtcgagtctcaacnantnatgctttcnctttgacactcnngancctcttgaatggctacactgcccaacagtggcccaacgagtgccagctcgatcaactcaatgcgctcgaaccatcccaaatcatcaagagcgagggtggtcgcatcgaggtctgggaccaccatgcaccccagctccgttgctccggctttgcctttgagcgtttcgtcattgagcctcagggtcttttcttgcccactttcttgaacgccggcaaactcacgtttgttgttcacggaaggggtctaatgggaagagttattccgggatgcgccgagacgttcatggagtcaccggtatttggagaaggtcaaggtcagggtcagagtcaagggttccgtgacatgcatccagaagtagagcaccta

SEQ ID NO: 147546 - DNA, 428 bp, Arabidopsis thaliana
cattgcttcatcattaccaaatcatcaacttattcgtttctctcaaatttagggttttctctgttctcgaaagtcttgcggttttctgaatcatctctatctggtttgagggtttcgtttgatatctggagaaaggggtttctggaaacaaggagttcataattcgcgatcttgatctatcgatcttcatttatatataaaagcgtgaatgagattatgatggagtcgaaaggtggtaaaaagaagtccagcagtagtagttccttattttacgaagctcccctcggttacagcattgaagacgttcgtccaaacggtggaatcaagaaattcaaatcttctgtctactcaaactgctccaagaggccatcctgggtaccagcgtgcaccgatcttcataatatagttatagctttctttactttcca

SEQ ID NO: 147547 - DNA, 468 bp, Arabidopsis thaliana
  unsure (1)..(468): unsure at all n locations
atcacaaacgagtaagaatacaaanacaaatatcaaataattggcaaacaagcgctncctcggctgcgcaactttcgccctctgcttcctcctcaccaacgcttccatctaccgcactgttgtcgagttcgacgaagatgacgccagcaaccccatgggcccaagacagaaatgtcagaaggagtttcagcaatcacagcacctaagagcttgccagaaattgatgcgcatgcaaatgaggcaaggccgtggtggtggtccctccctcgacgatgagttcgatttggaagacgacatcgagaacccacaaggcccccagcagggacaccagatcctccagcagtgctgcagcgagcttcgccaggaagagccagtttgtgtttgccccaccttgagacaagctgccagggccgttagccttcaaggacaacacggaccattccaatccaggaaaatttacaagacagc

SEQ ID NO: 147548 - DNA, 467 bp, Arabidopsis thaliana
aaacatacacacatagcaaaaaagggcaaatattttgttccttgtctgcgcagctctcgctcggtgctggctcctcaccaacgcggccatctaccgcaccgtcgttgagttcgaagaagatgacgccactaaccccataggcccaaaaatgaggaaatgccgcaaggagtttcagaaagaacaacacctaagagcttgccagcaattgatgctccagcaagcaaggcaaggccgtagcgatgagtttgatttcgaagacgacatggagaacccacagggacaacagcaggaacaacagctattccagcagtgctgcaacgagcttcgccaggaagagccagattgtgtttgccccaccttgaaacaagctgccaaggccggtagactccagggacagcaccaaccaatgcaagtcaggaaaatttaccagacagccaagcacttgcccaacgtttgcgacatcccgc

SEQ ID NO: 147549 - DNA, 448 bp, Arabidopsis thaliana
  unsure (1)..(448): unsure at all n locations
gaaagtctctcccagactagagncnnnccnaattttntctatctcatcctcacangcacctcaatggctgggtcttcttcttcctgttttgtcttctttttactaaaattttataaaatagcatttcttcttagatagtgcgtttcccaacataagaccctacaaaaatttatgggatgaaaattataataataatttctatgtactttttttttttttttttttttaaacttcgttttcatctaatactatgcagcccatatactaaatgcctaaatctatacatatttagattgatctttaaatatcaataaaaaatttagctaaattttgactggtttagaggatttttccgatgtgtcattaggattatacaactatggtttaaatatcaataaaaaatatagctggttttacaatgcaatatgattggagtgtaatttttatt

SEQ ID NO: 147550 - DNA, 446 bp, Arabidopsis thaliana
  unsure (1)..(446): unsure at all n locations
cggacgcgtgggcggacgcgngggtgttcagtgattatcaaacctnggngttagtctaccggggaacagtagtgaacaggatttcactggctttggcatgtcttcaatgcctacagttcctttcggtgggagtagaggattacaatcagtaaggcctgaaccttttgctgagcagggtaggatacataaccacgagagtcacaatcagaatcagttcatagatggtgggagatatcatatcgacttggataggattgctagtggagatgaaatccgaactacattaatcatcaaaaacatcccaaacaagtacacttacaagatgctggtggctgaaatcgacgaaaagcacaagggagactatgactttctatgcttgccgacagactttaagaataaatgcaacatgggtcacgcttttatcaacatggtctctccattgcaca

SEQ ID NO: 147551 - DNA, 417 bp, Arabidopsis thaliana
  unsure (1)..(417): unsure at all n locations
actgcccaacagtggcccaacgagtgtcgcttgatcttctcaangcgctcgaaccatcccagatcatcaagagcgagggtggtcgcatccaggtctgggaccaccatgcaccccagctccgttgctccggctttgcctttgagcgtttcgtcattgagcctcagggtcttttcttgcccactttcttgaacgccggcaaactcacgtttgttgttcacggaaggggtctaatgggaagagttattccgggatgcgccgagacgttcatggagtcaccggtatttggagaaggtcaaggtcagggtcagagtcaagggttccgtgacatgcaccagaaagtagagcacctacggtgcggtgacaccattgcaacaccatctggtgtagctcaatggttctacaacaatggaaatgagc

SEQ ID NO: 147552 - DNA, 454 bp, Arabidopsis thaliana
  unsure (1)..(454): unsure at all n locations
gaaaccaacctgtaagcgagggnaagtacatgatttattactccccagngnccatactatggagatactcaacagtagcaggtccaacatagttaacactcttagccaaccttctagcagcttgttcaagtttcttgacagtttctggcggagccacagtaattggaccctcctctatgatctacgatccaaacgataaagtaagagctcatgcaataatttgcaatcgctaaaagggactataactcagttggagaataaaaattgatgtatataactatataagaataaatggacagaatgtttttctatataaccactaaccagacaattaaaaatccagaatcaactactaacaaaccttttgatgtcttctctggacgctacaatcacggctatgcagagctgaaacatttccatgcttgtcacagagcagctggacctctagatgccg

SEQ ID NO: 147553 - DNA, 464 bp, Arabidopsis thaliana
  unsure (1)..(464): unsure at all n locations
gccgtttnctctggtgatcgtctcagacgctttggnatancttctcacccaggnacctgaacaaaactgtgcctgaacttactcgcgtcgcttcagatggtgtcgntcttttagcaggtaaccctggtcaacaaaaggctaaaggtgcggaattgtcgaaatttggacggcctgctaaaatgcgtagctcgtcgtggtggatccgtttcttctcacagacgaacttagaggaaaacgaagcagcaagcaagaaattcgaacaagcagcttccaagagttcatacaaaccagcttgtcaagttttccacctcaagccattacattagtacacactattattactggtcttaagacatcaaaccagatatctctcctctctgtttaatacccttttttccgctatagaaagaaactaaactcccacaaattgtaattcattcttcacgatttgattataatttaac

SEQ ID NO: 147554 - DNA, 291 bp, Arabidopsis thaliana
  unsure (1)..(291): unsure at all n locations
agggacccatccagattgtgaggccaccacnaaaacaaccggacgggagcnaggagaggagagaccgacccaccccacacggcaacggccnagaagagacaaacagcagcaagagggcccacgagaacaaagacgacccagcacgagcagacgngaacaagcccagccaaggacgagggaccagaggcaacaaaaaaacacagcccaacaaggagaacgacaggcacagagccacacgaggcgggcacaaaggaaaggcgaaggagcagaccaaacacaacaagaacgcaa

SEQ ID NO: 147555 - DNA, 363 bp, Arabidopsis thaliana
  unsure (1)..(363): unsure at all n locations
agaaaaangggtcgagncncaacnattttcaatatctctnngacacncnanganccncggcaggggctacactgcccaacaggggcgccaaccagagccagcncgaccaacncaangcgctcgaaccancccaaancancaagagcgagggnggncgcancgaggncngggaccaccangcaccccagcnccgnngcnccggcanngcccccgagcganncgncanngagccccagggncnnnncnggcccacanncnngaacgccggcaaacacacgnnngnngnncacggaaggggncnaangggaagangaaanccgggaagcgccgagacgcncanggagncaccggnaannggagaag

SEQ ID NO: 147556 - DNA, 474 bp, Arabidopsis thaliana
gtaattaactaacaacaaatggcgaacaagcttttcctcgtctgcgcagctctcgccctgtgtttcatgctcaccaacgcttccgtctatcgcacggttgtcgagttcgacgaagatgacgccagtaaccccataggcccaatacagaaatgtcagaaggagtttcagcaagaacagcacctaagagcttgccagagatggatgcgcaagcaaatgtggcaaggacgtggtggtggtccttccctcgacgatgagttcgatatggaagacgacatcgagaacccgcagagacgacagctactccagaagtgctgcagcgagcttcgccaagaagagccagtttgcgtttgccccaccttgagacaagctgccaaggccgttagattccagggacagcaacaccaaccagagcaagtcaggaaaatttaccaggcagctaagtacttgcctaacatttgcaaaatccagcaagtt

SEQ ID NO: 147557 - DNA, 470 bp, Arabidopsis thaliana
  unsure (1)..(470): unsure at all n locations
cttccatctaccgcaccgtcgnngagnncgaataagatgacgccactaaccccataggcccaaaaatgaggaaatgccgcaaggagtttcagaaagaacaacacctaagagcttgccagcaattgatgctccagcaagcaaggcaaggccgtagcgatgagtttgatttcgaagacgacatggagaacccacagggacaacagcaggaacaacagctattccagcagtgctgcaacgagcttcgccaggaagagccagattgtgtttgccccaccttgaaacaagctgccaaggccgttagactccagggacagcaccaaccaatgcaagtcaggaaaatttaccagacagccaagcacttgcccaacgtttgcgacatcccgcaagttgatgtttgtccctttaacatcccttcattcccttctttctactaaatctcaaacaaaccctcaaagcgtatgagagtgtgg

SEQ ID NO: 147558 - DNA, 434 bp, Arabidopsis thaliana
  unsure (1)..(434): unsure at all n locations
cacacatagcaaaaaatggcaaacaaggggnttctcgtatgctcagcncncgcncncngcnggctcctggcaacgcttacatgtaccgcggcgccgttgagttcgaagaagatgacgccactaaccccataggcccaaaaatgaggaaatgccgcaaggagtttcagaaagaacaacacctaagagcttgccagcaattgatgctccagcaagcaaggcaaggccgtagcgatgagtttgatttcgaagacgacatggagaacccacagggacaacagcaggaacaacagctattccagcagtgctgcaacgagcttcgccaggaagagccagattgtgtttgccccaccttgaaacaagctgccaaggccgttagacttcagggacagcaccaaccaatgcaagtcaggaaaatttaccagacagcccagtac

SEQ ID NO: 147559 - DNA, 246 bp, Arabidopsis thaliana
  unsure (1)..(246): unsure at all n locations
aagagaagggggaccggacacccacaacaccggccacgacgacacaggaaagccgacaaccacgggacacangaacgacaaggggggggggaacgacaagcgagcgagcgagaggaccgagaaggaggccgccgagacgaacaagagggcccncaagaacgcaagggagaaggacaaacaaaaggccgaacgngagcgaggcaaaaccaacgacacagcccgcnggaaggacgagaccaccaagga

SEQ ID NO: 147560 - DNA, 445 bp, Arabidopsis thaliana
  unsure (1)..(445): unsure at all n locations
aaacaacaagaaaaaatggcaataaccaacatttttatattcactncgncnccncanctccataggtggcgaccactgcttatccttccgcgtggagatcgacgagttcgagccaccacagcaaggagaacaagaaggtccccgtcgccgtcctggtggtggctctggcgagggatgggaggaagagtcgacgaatcatccataccacttcaggaagcggagtttcagtgattggttccagtcaaaggaaggttttgtgagagtgctgcctaagttcacaaaacatgcaccggctctctttcgaggaatcgagaactacagattctcgttggtggagatggagccaacaactttctttgtgccttaccatttggatgccgatgctgtttttatagtcctacaaggtaaaggagtgaacgagtttgtgacggattaaacaaaagaa

SEQ ID NO: 147561 - DNA, 317 bp, Arabidopsis thaliana
  unsure (1)..(317): unsure at all n locations
agccgatgcaaggacaacaacaaggtctatcnatggtatggacgacagggacaacaaggccaacgcatgggaaggacagggacaacaggcacaacaaggaagacaaggccaaccatgggaaggacagggacaacagggacaacaaggacgacagggacaacaaggccaaccatgggaaggacagggacagcagggacaacaagggttccgggacatgcaccagaaggtggaacatgtgagacgcggagacgtctttgccaacactccaagctctgcccactggatctacaactcaagagaacagccacttgtcatca

SEQ ID NO: 147562 - DNA, 383 bp, Arabidopsis thaliana
  unsure (1)..(383): unsure at all n locations
caaaaagaaaatggntaagctcagcattttaattgttttaacctncggggnncncctcgaccgtaacggttgccttgcgaggcagtcacttggggttcctcctcagctacagaacgagtgtaacctcgacaacctagatgttctccaagccaccgaaactatcaagagtgaagccggtcagatcgagtactgggaccacaaccaccctcagctccgatgtgttggtgtttccgttgctcgttatgtaattgaacaaggcggtctttacttgcccaccttcttcacttccccaaaaatttcctacgtcgttcaaggaacgggtatcagcggaagagtggtccctggatgtgccgagaccttcatggactcgcagccgatgcaag

SEQ ID NO: 147563 - DNA, 451 bp, Arabidopsis thaliana
  unsure (1)..(451): unsure at all n locations
cgcacaggtcatagctagcangtttaagtcgttcagnngggncagcagctncagaaccgacaagatagcagaggagacagggctcgtgttaagggacctttccaggtcgtgaggccacctctaagacagccctacgagagcgaggagtggagacacccacgtagcccacagggcaacggccttgaggagactatctgcagcatgaggtcccacgagaacattgacgaccctgctcgtgctgacgtgtacaagcccagcctaggtcgcgtgaccagcgtcaacagctataccttgcccatcttggagtatgtcaggctcagtgccactcgtggcgttctccagggtaatgcgatggtgcttcctaaatacaacatgaacgctaacgagatcttgtactgcactggtggacaaggaaggatccaagtggtcaacgacaacggacagaacgtgt

SEQ ID NO: 147564 - DNA, 446 bp, Arabidopsis thaliana
  unsure (1)..(446): unsure at all n locations
cttctttctttctccttaacactttgganctttttcttgggttacgcggctcaacagggtcagcagggtcagcagtttccgaacgagtgccagctcgaccagctcaatgcgctcgagccttcacacgtactgaagagcgaggctggtcgcatcgaggtgtgggaccaccacgctcctcagctccgttgctcaggtgtctcctttgcacgttacatcatcgagtctaagggtctctacttgccctctttctttaacaccgcgaagctctccttcgtggctaaaggacgaggtcttatgggaaaagtgatccctggatgcgccgaaacattccaagactcatcagagttccaaccacgcttcgaaggtcaaggtcaaagccagaggttccgtgacatgcaccagaaagtggagcacattaagagcggtgataccattgccacaacacc

SEQ ID NO: 147565 - DNA, 302 bp, Arabidopsis thaliana
  unsure (1)..(302): unsure at all n locations
accgcaccgnngnncgaaanncgaaagaagaagagcgcnncagcaaccccgnaggggccaaagacaagagaggcgcagaaggaggggnacagcaancacaaacaccnaagagacncgccaganganggaacgagcaagcaaacgaggcaacggacagnggaggaggaacccaccccacgacgacgagacccgagaacgagggcccccagcaggganaccagcnacnccagcagagcagcaacgagcancaccaggaagagccagncagcgnnggccccacccagaaacaagcagccagggca

SEQ ID NO: 147566 - DNA, 425 bp, Arabidopsis thaliana
  unsure (1)..(425): unsure at all n locations
ctcttagcctttacncnanagnnttttttcaattctatcgacanggcnaangnggaccggggtcggcgtttgcatggagaccggactgacaaacgngnncancagccaaactacgaagatgatgtcggttttggtggctatggcggttatggtgctggttctgattataagagtcgcggtccctccactaaccaaatcttggcacttatagcaggagttcccattggtggcacactgctaaccctagctggactcactctagccggttcggtgatcggcttgctagtctccataccccttttcctcctcttcagtccggtgatagtcccggcggctctcactattgggcttgctgtgacgggaatcttggcttctggtttggctgggttgacaggtctgagctcggtcttgtgggtcctcaacta

SEQ ID NO: 147567 - DNA, 363 bp, Arabidopsis thaliana
  unsure (1)..(363): unsure at all n locations
atcataatctatatgggannnccntattttattattgaagataaaccccgaagaggcgaagggttacagatgaatgttcaaaaggaactaaattgtgtcaatagaaaactcaacattgctattaccagaatttccaatccgtatggggatcctaatattcttgcagaatttatcgctggacaattaaaaaatcgcgtttcttttcgaaaagcaatgaaaaaagctattgaattaactgaacaggcgaatacaaaaggaattcaagtacaaattgcaggacgtatcgacggaaaagaaattgcacgtgttgaatggatcagagaaggcagagttcctttacaaacaattgaagctaaaattgat

SEQ ID NO: 147568 - DNA, 356 bp, Arabidopsis thaliana
  unsure (1)..(356): unsure at all n locations
tcacaaacgagtaagaatacaaanacaaatagtaaaatattggcaaacaagctcttcctcgtgtgcgcaactttcgccctctgcttcctcctcaccaacgcttccatctaccgcactgttgtcgagttcgacgaagatgacgccagcaaccccatgggcccaagacagaaatgtcagaaggagtttcagcaatcacagcacctaagagcttgccagaaattgatgcgcatgcaaatgaggcaaggccgtggtggtggtccctccctcgacgatgagttcgatttggaagacgacatcgagaacccacaaggcccccagcagggacaccagatcctccagcagtgctgcagcgagct

SEQ ID NO: 147569 - DNA, 301 bp, Arabidopsis thaliana
  unsure (1)..(301): unsure at all n locations
aacaaacaaaaagaaaatggnnaagcccagcattcgctacgttgcaacctncggggnnctccgcggccgtaacggcggccttgcgaggcagccactaggggtgccaactcagctacagaacgagagtaacctcgacaacctacatgttctccaagccaccgaaaccatcaagagtgaagccggtcagatcgagtactgggaccacaaccaccctcagctccgatgtgcagcgcgatccggcgctcgccacgtaatggaacaaggcgggacatacatgcccacctgctacacgaccacaaaa

SEQ ID NO: 147570 - DNA, 469 bp, Arabidopsis thaliana
  unsure (1)..(469): unsure at all n locations
aagaaaatggttaagctcagcaancnccncgttgcaatcntttgggttctccncgnccttaacggctgccttgcgaggcagtcacttggggttcctcctcagctacagaacgagtgtaacctcgacaacctagatgttctccaagccaccgaaactatcaagagtgaagccggtcagatcgagtactgggaccacaaccaccctcagctccgatgtgttggtgtttccgttgctcgttatgtaattgaacaaggcggtctttacttgcccaccttcttcacttccccaaaaatttcctacgtcgttcaaggaacgggtatcagcggaagagtggtccctggatgtgccgagaccttcatggactcgcagccgatgcaaggacaacaacaaggccaaccatggcaaggacgacagggacaacaaggccaaccatgggaaggacagggacaacagggacaacaaggaagac

SEQ ID NO: 147571 - DNA, 494 bp, Arabidopsis thaliana
  unsure (1)..(494): unsure at all n locations
cggaancccggncgaccacgcgtccggtgctcttagcctttactctatagnnnnatatttatattatttacatggcgaangnggaccgggatcggcgtgtgcatgtagaccgtactgacaaacgtgttcatcagccaaactacgaagatgatgtcggttttggtggctatggcggttatggtgctggttctgattataagagtcgcggcccctccactaaccaaatcttggcacttatagcaggagttcccattggtggcacactgctaaccctagctggactcactctagccggttcggtgatcggcttgctagtctccatacccctcttactcctcttcagtccggtgatagtcccggcggctctcactattgggcttgctgtgacgggaatcttggcttctggtttgtttgggttgacgggtctgagctcggtctcgtgggtcctcaactacctccgtgggacgagtgatacagtgccagagcaattggac

SEQ ID NO: 147572 - DNA, 452 bp, Arabidopsis thaliana
  unsure (1)..(452): unsure at all n locations
agaaaacatacacaaatagcaaaacatggctattaagctcnttctcgnctgcgcaactctcgccctctgcttcctcctcaccaacgcttccatctaccgcaccgttgtcgaattcgaagaagatgacgccagcaaccccgtaggtccaagacagagatgccagaaggagtttcagcaatcacaacacctaagagcttgccagagatggatgagcaagcaaatgaggcaaggacgtggtggtggtccttccctcgacgatgagttcgatttcgagggcccccagcagggataccagctactccagcagtgctgcaacgagcttcgccaggaagagccagtttgcgtttgccccaccttgaaacaagctgccagggcaagtagccttcagggacagcacggaccattccaatccaggaaaatttaccagtcagcttagtacttgcctaacattt

SEQ ID NO: 147573 - DNA, 461 bp, Arabidopsis thaliana
  unsure (1)..(461): unsure at all n locations
cttgaccgcaacccaaggccannnttcttagctggntaacaacccacaaggncaagtatggctacaaggacgagagcaacagccacagaagaacatcttcaatggatttggacccgaggttattgctcaagctttgaagattgatcttcagacagcgcagcaacttcagaaccaagatgacaaccgtggaaacattgtccgagtccaaggcccgttcggtgtcattaggccgcctttgaggggccagagacctcaggaggaggaagaagaagaagaaggacgacacggacgacacggtaatggcttagaggagaccatctgcagcgccaggtgcaccgataacctcgatgatccgtctcgtgctgacgtgtacaagccacagctcggttacatcagcactctcaacagttacgatcttcccatccttcgcttcatccgtctcttagccctccgtggatcta

SEQ ID NO: 147574 - DNA, 279 bp, Arabidopsis thaliana
  unsure (1)..(279): unsure at all n locations
aggcgacagccagaggcgcccngacatttaatgaatattgacgcacacnaggaacggcgaggcgacngacacaacaaccggcgcgggcacacacaancnacaccaacggacagcaaccacaggcaagcgaaagccccnaccaacgagccaggcaccagaaccagctngaccgcaacccaaggccanaccacacagccggaaacaacccacacggacccggagaccgacaacgccgagagcaacagccacagaagaacacgcgcaacggaagaggacccc

SEQ ID NO: 147575 - DNA, 434 bp, Arabidopsis thaliana
  unsure (1)..(434): unsure at all n locations
caattgcattgcgcatcactatacatttacggtaaggtttgnnccanatacgaaactgggggggacgaaggcgaggnnaagccggcctagccagannccnggaccgannataaaggnncacaaaggagacactatttatgttaacgttcaaaaccgagctagtgaaaacatcacaatgcattggcatggtgtagagcagccgagaaatccgtggtcagatggtcctgaatacatcacacaatgcccgattcgacccgggtcagattttttgtacaaagtcatattttccatcgaagacacgactgtttggtggcacgcgcatagcttttggacacgtgcaactgtacacggtcttattttcgaatattcttcgcccctcgaaatccttcctttttcaaaggcagaccatgaagtcccataattttgggtgagtg

SEQ ID NO: 147576 - DNA, 481 bp, Arabidopsis thaliana
  unsure (1)..(481): unsure at all n locations
gggcgccccgcgtccggctattatatctctnctcttggacacataggtaccttttcaatggctacactgcccagcaggggcccaacgagtgccagctcgatcaactcaatgcgctcgaaccatcccaaatcatcaagagcgagggtggtcgcatcgaggtctgggaccaccatgcaccccagctccgttgctccggctttgcctttgagcgtttcgtcattgagcctcagggtcttttcttgcccactttcttgaacgccggcaaactcacgtttgttgttcacggaaggggtctaatgggaagagttattccgggatgcgccgagacgttcatggagtcaccggtatttggagaaggtcaaggtcagggtcagagtcaagggttccgtgacatgcaccagaaagtagagcacctacggtgcggtgacaccattgcaacaccatctggtgtagctcaatggtctacaacaatggaaatgag

SEQ ID NO: 147577 - DNA, 258 bp, Arabidopsis thaliana
  unsure (1)..(258): unsure at all n locations
cagaacnagtgtaaccttgacaacctagatgatctccaagccaccgaaactatcaagagtgaaacctgtcagatcgagtactgggaccacaaccaccctcagctcctatgtgttggtgtatccgttgctcgcaatgtaattgaacaaggcggtcttaaattgcccaccttgttcacttccctaaaaatcaactacctcatctaaggaacggtttattacttaagagtggaaccttgattttccgagacctttattgac

SEQ ID NO: 147578 - DNA, 401 bp, Arabidopsis thaliana
  unsure (1)..(401): unsure at all n locations
gggcggggacgcgnacgggaagagaaggccaaccangggaatttttggtacacttnggacaacaaggacnacagggacagcanggttaccatgggaggggcacctacagcagggacaacaagggttccgtgacatgcaccagaaggtggaacatgtgagacgcggagacgtctttgccaacactccaggctctgcccactggatctacaactcaggagaacagccacttgtcatcatcgctcttctcgacatcgccaactaccaaaaccaactcgaccgcaaccctagagtgttccatttggccggaaacaaccagcagggaggctttggcggttcacagcaacaacatgaacagaaaaacttgtggagtgggtttgacgcacaagatatagttcaagcat

SEQ ID NO: 147579 - DNA, 460 bp, Arabidopsis thaliana
  unsure (1)..(460): unsure at all n locations
agaaaaatgggtcgagtctcatctannanctatatcataanttacactcgnganccncaacaatggctgcactgcccaacagnggcccaacgagtgccaactcgatcaactcaatgcgctcgaaccatcccaaatcatcaagagcgagggtggtcgcatcgaggtctgggaccaccatgcaccccagctccgttgctccggctttgcctttgagcgtttcgtcattgagcctcagggtcttttcttgcccactttcttgaacgccggcaaactcacgtttgttgttcacggaaggggtctaatgggaagagttattccgggatgcgccgagacgttcatggagtcaccggtatttggagaaggtcaaggtcagggtcagagtcaagggtttcgtgacatgcaccagaaagtagagcacctacggtgcggtgacaccattgcaacaccatctggtgtgctc

SEQ ID NO: 147580 - DNA, 469 bp, Arabidopsis thaliana
  unsure (1)..(469): unsure at all n locations
ctctgcttcctcctcaccaacgcnnccanctatcgattcgtctttgagnncgaagaagaagacgccactaaccccataggcccaaaaatgaggaaatgccgcaaggagtttcagaaagaacaacacctaagagcttgccagcaattgatgctccagcaagcaaggcaaggccgtagcgatgagtttgatttcgaagacgacatggagaacccacagggacaacagcaggaacaacagctattccagcagtgctgcaacgagcttcgccaggaagagccagattgtgtttgccccaccttgaaacaagctgccaaggccgttagactccagggacagcaccaaccaatgcaagtcaggaaaatttaccagacagccaagcacttgcccaacgtttgcgacatcccgcaagttgatgtttgtcccttcaacatcccttcattcccttctttctactaaatctcaaacaaac

SEQ ID NO: 147581 - DNA, 449 bp, Arabidopsis thaliana
agaaaacatacacaaatagcaaaacatggctatcatgttctttctcgactgcgcaactctcgcgctctgtttccttctcaccaacgctggcatctaccgcaccgttgtcgaattcgaagaagatgacgccagcaaccccgtaggtccaagacagagatgccagaaggagtttcagcaatcacaacacctaagagcttgccagagatggatgagcaagcaaatgaggcaaggacgtggtggtggtccttccctcgacgatgagttcgatttcgagggcccccagcagggataccagctactccagcagtgctgcaacgagcttcgccaggaagagccagtttgcgtttgccccaccttgaaacaagctgccagggcaagtagcctccagggacagcacggaccattccaatccagggaaaattaccagtcagctaagtacttgcctaaca

SEQ ID NO: 147582 - DNA, 452 bp, Arabidopsis thaliana
  unsure (1)..(452): unsure at all n locations
agaaaacatacacaaatagcaaaacanggctatcatggtcattctcgncngcgcaacnctcggcctctggttccttctcaccaacgcttgcatctaccgcaccgttgtcgaattcgaagaagatgacgccagcaaccccgtaggtccaagacagagatgccagaaggagtttcagcaatcacaacacctaagagcttgccagagatggatgagcaagcaaatgaggcaaggacgtggtggtggtccttccctcgacgatgagttcgatttcgagggcccccagcagggataccagctactccagcagtgctgcaacgagcttcgccaggaagagccagtttgcgtttgccccaccttgaaacaagctgccagggcagttagccttcagggacagcacggaccattccaatccaggaaaaattaccagtcagctaagtacttgcctaacattt

SEQ ID NO: 147583 - DNA, 277 bp, Arabidopsis thaliana
gaggctttgcggtcacagcaacaacaagaacagaaaaacttgtggagcgggttcgacgcacaggtcatagctcaagcattgaaaattgacgttcagttggctcagcagcttcagaaccaacaagacagcagaggaaacatcgttcgtgttaagggacctttccaggtcgtgaggccacctctaagacagccctacgagagcgaggagtggagacacccacgtagcccacagggcaacggccttgaggagactatctgcagcatgaggtcccacgaga

SEQ ID NO: 147584 - DNA, 442 bp, Arabidopsis thaliana
  unsure (1)..(442): unsure at all n locations
caaaaagaaaatggntaagcncagcattttcatcgtttcaaccnncggggnncncctgggccgtaacgtttgccttgcgaggcagtcacttggggttcctcctcagctacagaacgagtgtaacctcgacaacctagatgttctccaagccaccgaaactatcaagagtgaagccggtcagatcgagtactgggaccacaaccaccctcagctccgatgtgttggtgtttccgttgctcgttatgtaattgaacaaggcggtctttacttgcccaccttcttcacttccccaaaaatttcctacgttgttcaaggaacgggtatcagctgaagagtggtccctggatgtgccgagaccttcatggacttccagccgatgcaaggacaacaacaaggtcaaccatggcaaggacgacagggacaacaaggtcaaccatgggaa

SEQ ID NO: 147585 - DNA, 470 bp, Arabidopsis thaliana
  unsure (1)..(470): unsure at all n locations
ataagaaataacaaaanggctcgagtttaanatattctttctnncnncnnaacactttggaggcttttctatgggtacgcgggtgaacagggtcagcagggtcagcagtttccgaacgagtgccagctcgaccagctcaatgcgctcgagccgtcacacgtactgaagagcgaggctggtcgcatcgaggtgtgggaccaccacgctcctcagctccgttgctcaggtgtctcctttgcacgttacatcatcgagtctaagggtctctacttgccctctttctttaacaccgcgaagctctctttcgtggctaagggacgaggtcttatgggaaaagtgatccctggatgcgccgaaacattccaagactcatcagagttccaaccacgctttgaaggtcaaggtcaaagccagagggttcgtgacatgcacccaaaagtggagcacattaggagcggggataccattgg

SEQ ID NO: 147586 - DNA, 414 bp, Arabidopsis thaliana
  unsure (1)..(414): unsure at all n locations
caaaaagtaagaagataaaaanggctcttgactcntctcttctnnctnncnccttaacgcttgggatccttttccatggctacgcggctcaacagggtcagcagggtcagcagtttccgaacgagtgccagctcgaccagctcaatgcgctcgagccttcacacgtactgaagagcgaggctggtcgcatcgaggtgtgggaccaccacgctcctcagctccgttgctcaggtgtctcctttgcacgttacatcatcgagtctaagggtctctacttgccctctttctttaacaccgcgaagctctccttcgtggctaaaggacgaggtcttatgggaaaagtgatccctggatgcgccgaaacattccaagactcatcagagttccaaccacgcttcgaaagtcaaggtcaaa

SEQ ID NO: 147587 - DNA, 254 bp, Arabidopsis thaliana
  unsure (1)..(254): unsure at all n locations
ccatgatccatctagagctctcggtgacttaaccggaatcaagaagcatttctgtggaaaacatggtgagaagaagtggaaatgtgataagtgttcaaagaaatatgctgttcaatcagattgcaaggctcattctaagacttgtggcaccaaagaatacagatgtgactgtggcactctcttttctaggagggatagtttcataactcatagagcattttgtgaagcattggctgaagagactgcangagaag

SEQ ID NO: 147588 - DNA, 490 bp, Arabidopsis thaliana
gcaagtagagacccttagactctatgatttaacgtgcaaaggagacacctgagcaggggagcttatgagcgtggtggtcctacacctttatgctactagtctcactttttattacatgtgatatattttagtttttatatttttatttatttaaattttttttgttatttattttattattttattatttctttttttttatctttttatattttattttttttatattataaggattttttttttttttttttttttttttatatttatatatattatattatttttattattttttcattttattattagttttttttttatttttttatttttttctttaaataattttattattaataatatttttaatgtattattataattcataattattattttttattattatatatatatttatatttatattatttaaatatttttcaataatacattaatattattttactatatttttttctcttta

SEQ ID NO: 147589 - DNA, 395 bp, Arabidopsis thaliana
aaacaaaaagaaaatggttaagctcagcaatctcctcgttgcaaccttcggggttcgcctcgtccttaacggctgccttgcgaggcagtcacttggggttcctcctcagctacagaacgagtgtaacctcgacaacctagatgttctccaagccaccgaaactatcaagagtgaagccggtcagatcgagtactgggaccacaaccaccctcagctccgatgtgttggtgtttccgttgctcgttatgtaattgaacaaggcggtctttacttgcccaccttcttcacttgcccaaaaatttcctacgtcgttcaaggaacgggtatcagcggaagagtggtccctggatgtgccgagacctatatggactcgcagccgatgcaaggacaacaac

SEQ ID NO: 147590 - DNA, 71 bp, Arabidopsis thaliana
acgctggagcatatccaaagaaagaattatgctaaagaagaaatcaaagttattcaagagaataggttttt

SEQ ID NO: 147591 - DNA, 411 bp, Arabidopsis thaliana
gaacgctaacgagatcttgtactgcactggaggacaaggaaggatccaagtggtcaacggcggcggacagaacgtgttggaccaacaggtgcagaagggacagctcgtggtcatcccacaagggttcgcatacgttgtccagtcccacggaaacaagttcgagtggatctctttcaaaactaatgataacgcaatgatcagcactttggcgggtagaacctcgctcttgagggcattgccattggaggtcatatcaaatggttttcagatctcttccgaggaagctaggaagatcaagttcaacacacttgagaccactttgacccgcgctgtcggtaggcaacaacaacagttgatcgaggagattgtcgaggcttaaatcaaaaccgtttttttttttttataaagtat

SEQ ID NO: 147592 - DNA, 382 bp, Arabidopsis thaliana
cgatgatccgtctggggctgacgtgtccaagccacagctcggttacatcagcactcgtgaacggttacgatctccccatccttcgcttcatccgtctctcagccctccgtggatctatccgtcaaaacgcaatggtgcttccacagtggaacgcaaacgcgaacgccattctttacgtgacagacggggaagcccaaatccagatcgtaaacgacaatggtaacagagtgtttgacggacaagtctctcaaggacagctcatagccgtaccacaaggtttctcggtggtgaaacgcgcaacaagcaaccgattccagtgggttgagttcaaaacaaacgcaaacgcgcaaatcaacactcttgcgggacgaacctcagtctt

SEQ ID NO: 147593 - DNA, 428 bp, Arabidopsis thaliana
atcagcggaagagtggtccctggatgtgccgagaccttcatggactcgcagccgatgcaaggacaacaacaaggccaaccatggcaaggacgacagggacaacaaggccaaccatgggaaggacagggacaacagggacaacaaggaagacaaggccaaccatgggaaggacagggacaacagggacaacaaggacgacagggacaacaaggccaaccatgggaaggacagggacagcagggacaacaagggttccgtgacatgcaccagaaggtggaacatgtgagacgcggagacgtctttgccaacactccaggctctgcccactggatctacaactcaggagaacagccacttgtcatcatcgctcttctcgacatcgccaactaccaaaaccaactcgaccgcaaccctagagtgtttcattt

SEQ ID NO: 147594 - DNA, 242 bp, Arabidopsis thaliana
cgcacattgaaaacggaaggaagagagatatttggcagagagagaaaacgttggaggaaggattgatatttgttggacttttggatcgaaaaattgaaaggtaaaagaggtagagaagctctggattccgtctcttcccgtcgtcggcgacggtggttttgcccgttggctctgaggttatatcaggcttcaatttaagtggattgtcatcttctgagatatggaacaagtttttgtctggc

SEQ ID NO: 147595 - DNA, 258 bp, Arabidopsis thaliana
cgaaaatggcaaaccatggttaccaggtttttctttgtttgcgcaactttcgccctttggttgggcctaaccaacgcttccatttaccgcaccgttgtcgaattcgaagaagatgacgccagcaaccccgtaggtccaagacagagatgccagaaggagtttcagcaatcacaacacctaagagcttgccagagatggatgagcaagcaaatgaggcaaggacgtggtggtggtcctttcctcgacgatgagttcgat

SEQ ID NO: 147596 - DNA, 405 bp, Arabidopsis thaliana
cagttttcaacaatctctctctatccattctctatcaaattctaaaatcaaaagatggctctgcattcgagatcttctttttcatcaaaatcgactttactcaatattctcagacacaacctcggtttcggttctaggagccacgtgactcggcatatccgccaaatcctaccacatgaccccccgcttcgaggttcacagaatccaattagccgtctctgtaataccatggcggagccagagacactctctagttttgttcagcacgaatacgccaacaatcatcaggtaatggactttccaggaggaaaggtagctttcacacctgagattcaattcatatcagaatctgataaagagcgtgttccttgctaccgtgttcttgatgacaatggccaacttatc

SEQ ID NO: 147597 - DNA, 400 bp, Arabidopsis thaliana
gagacaacaaaaagagagaacaatgtcttcgtcgagggagctacaatacttggagggcgacatacagaaacaaccgtcccacgacgggtctcctcaactccatcttcatgaccaccgtcaacacggccgctcgttctctcgtctccgtcgcttccaccgcctctacaccagagattccttctaggcgatggtcggcttcggaccacctcaggttcatgtctatgatgatgacgtggcttaccctttggatccttagagttttcttggactatcttcctcttcctctcatctcttcttcttcttctgcttattcttattcttatcctccctttagtttcgcttcgggtcttcttaccacggctgcggagaacgcgttggtccctgctaaggctttctcgtt

SEQ ID NO: 147598 - DNA, 173 bp, Arabidopsis thaliana
tattctgattatttttaactacatttacattatcctcaaaacaagaccttaaggctatggttgtattataaaagacatgtacacaataatatagagactaattgagcttaatagtgtagaccctcttattttaaatcttattaattcaaaaaatagttttatatgttcttctt

SEQ ID NO: 147599 - DNA, 227 bp, Arabidopsis thaliana
ctgatccttctgtcttggagacgtttctaggaaggattcctatggtgttcaatgtggtgaggttgtatccgcatgggtactttccccaagccaatgtcttgggtctgcctgatactggtggacaggttgtctacatttttgatcaagtacgtgcattggaaaatgagatgctccttaggatacagaagcaaggactggaagttattccaatagaatttcattttaac

SEQ ID NO: 147600 - DNA, 416 bp, Arabidopsis thaliana
ggttaagctcaccaatctcctcgttgcaaccttcggggttctcctcgtccttaacggctgcgttgcaaggcagtcacttggggttcctcctcagctacagaacgagtgtaacctcgacaacctagatgttctccaagccaccgaaactatcaagagtgaagccggtcagatcgagtactgggaccacaaccaccctcagcttcgatgtgttggtgtttccgttgctcgttatgtaattgaacaaggcggtctttacttgcccaccttcttcactttcccaaaaatttcctacgtcgttcaaggaacgggtatcagcggaagagtggtccctggatgtgccgagaccttcatggactcgcagccgatgcaaggacaacaacaaagcccaccatggcaaggacgacagggacaacaag

SEQ ID NO: 147601 - DNA, 365 bp, Arabidopsis thaliana
cacgcgtccgcacacatagcaaaaattggcaaacatttttttttttgtttgcccagttctcgctctggggtgcctcctaaccaacgcttccatttaccgcaccgtctttgagttcgaagaagatgacgccactaaccccataggcccaaaaatgaggaaatcccgcaaggagtttcagaaagaacaacacctaagagcttgccagcaattgatgctcccagcaagcaaggcaaaggccgtagccgattagtttgaatttccaagacgacatggagaacccacagggacaacagcaggaacaacagctatttcagcagtgctgcaacgagcttcgccaggaagagccagattgtgtttgccccacc

SEQ ID NO: 147602 - DNA, 379 bp, Arabidopsis thaliana
gtcccacggaaacaagttcgagtggatttttttcaaaactaatgaaaacgcaatgagcagggctttggcgggtagaacctcgctcttgagggcattgccattggaggtcatatcaaatggtttccagatctctcccgaggaagctaggaagatcaagttcaacacacttgagaccactttgacccgcgctgccggtaggcaacaacaacagttgatcgaggagattgtcgaggcttaaatcaaaacgtttttctttttcttaataaagtatggtcagtttgtaatcacgtccctttacctttaacgtacgtgtaaaatatgtgtctgcggcacctcacttgtaataacactttcttctcataaataaaagggaagtttc

SEQ ID NO: 147603 - DNA, 373 bp, Arabidopsis thaliana
gaatctttaagcctctcaacgtgttttttatatatattttgaaaatcttttacgccttaaaaggatctacgataattaaaaaaaaaatggcaacggaatgcattgcaacggtccctcaaatattcagtgaaaacaaaaccaaagaggattcttcgatcttcgatgcaaagctccttaatcagcactcacaccacatacctcaacagttcgtatggcccgaccacgagaaaccttctacggatgttcaacctctccaagtcccactcatagacctagccggtttcctctccggcgactcgtgcttggcatcggaggctactagactcgtctcaaaggctgcaacgaaacatggcttctttctaatcactaacca

SEQ ID NO: 147604 - DNA, 412 bp, Arabidopsis thaliana
  unsure (1)..(412): unsure at all n locations
aaaagtcactgtggttggaacaatcccttcttctagcatcctcttaaacgggtctgaagcttcttttatctgaccggacttaccatacgtatcaatcatcgtgttgtaagtataagagctcaagcaaacatgtgaatccgccttgttttcgtcacacgaccatttcttgaaaaactcctctgctttttgaaactctcttgccttcttatacatttgaagaacaatccctgttgttacttcatcaggctgcatcccaatcttactcatcttccctaaccaacaaagcgcatgtactttaagcccgcctttgctataaacatcgatgagagtcccatacgtcgaattaatcggcttgatacctttcctaatcatttcatcccataaacttttgacatacctncacttacaagct

SEQ ID NO: 147605 - DNA, 225 bp, Arabidopsis thaliana
gggggagggagggatcctggccttttggtttaaacaaaattcaattgttgtttttattgctaattttaacggagacttgagtgtctttgctggtgccacacaacttgaaaaagaatttgagacccaagggtccagcaaaaaggagtgtactgagaggagcggtgatttagagttaaaggcctatggttggtgtgcacgtgcaaactactttttttattaaggtcc

SEQ ID NO: 147606 - DNA, 421 bp, Arabidopsis thaliana
gtctctcttccctgaaactttcccgagaaaattctcaatcctctattttctcgagggagattctcattctcattttctttcagggaaaagttttgttgttgaatacagatttggaaacttcatttgtttttttccgtttttaaccaaaatttttaaaaaagctttcttctgaacgttaatcgtggagagtttcgggtcgggtcgggtcgtaaaaggcgggtttcacggtggtgatagattcacctcctgctttcttctgagggggttagccccgaggctcttcgcctcggcgggtttcaaattcccccaaatctaacaaactcacagattcattttctccaatttttttgtttgttgaaaatttgaatccacaaaatttgaattcatttgtaaccgttcgttgaggaagaagaagatgcct

SEQ ID NO: 147607 - DNA, 381 bp, Arabidopsis thaliana
cggaaacaagttcgagtggatctctttcaaaactaatgaaaacgcaatgatcagcactttggcgggtagaacctcgctcttgagggcattgccattggaggtcatatcaaatgggttccagaatctctcccgaggaagctaggaagatcaagttcaacacacttgagaccactttgacccgcgctggccgtagggaacaaccaccggtgatccaagggaatggtcaggcttaaattaaaaccgtttttttttttttaataaaagattggccagttggtaatacgttcctttacctttaaccgacctggaaaatatgtgtctggcgcaccttacttggtaatacaacttctttttaataaataaaagggaggtttcaggtcc

SEQ ID NO: 147608 - DNA, 358 bp, Arabidopsis thaliana
gagagattcattcagtaatggcagcctcaggcacctctgctactttcagagcctccggttgttcagctccttcctcttcttcccaattgacccatttgaaatcacccttcaaagctgtcaaatatacgcctctgccatcgtctcgctccaagtcatcatccttctccgtctcctgcaccatcgccaaggacccgcctgttctcatggccgccggatctgacccggccctgtggcaacgacccgattcgttcggtcggtttgggaagtttggtgggaagtatgtacctgaaacccttatgcacgctctatctgagcttgaatccgttttctatgctcttgccaccgaccatgttttcca

SEQ ID NO: 147609 - DNA, 322 bp, Arabidopsis thaliana
  unsure (1)..(322): unsure at all n locations
ttcgatcaactaaatgcgctcgaaccatcccaaataatcaagagcgagggtggtcgcatcgaggtctgggaccaccatgcaccccagctccgttgctccggctttgcctttgagcgtttcgtcattgagcctcanggtcttttcttgcccactttcttgaacgccggcaaactcacgtttgttgttcacggaaggtgtctaatgggaagagttattccgggatgcgccgagacgttcatggagtcaccggtatttggagaaggtcaaggtcagggtcagagtcaagggttccgtgacatgcaccaaaaagtagagcacctac

SEQ ID NO: 147610 - DNA, 419 bp, Arabidopsis thaliana
agtgaaaatcgaaatactcatgttaacaagccattacaaacaaaagacctttatgagaaggcaacttttataggattttttagttaggaagtcttaagagtgtagcaagaatgacaagagactacacgtctacacttacaaaacattaaagttttaaaaccaaagcagatcactaggaaaaaagaaaatctacttggttctaagaccaggaacgtttttgagacccatcttgccaagaacatttttggggatagctggtgggctgtcaagtcccatgctgcggctaaactcattggccagctccaccagtctggtcgtgtctcttgcaatcatcttctgagatttgtagtaacccaaccacgcctgatacgccgccttcttgttcttcattttcacttggctcaaccctttctgcacct

SEQ ID NO: 147611 - DNA, 299 bp, Arabidopsis thaliana
aaaaaattacagaacgggttttattttggaattgcgttatatggcggacggatggggatcattatttatcaaattttaaaatattattaatatgctaggtcaatagagattaaaactacagacttgttaacacacatctcactctatccgtgcattaagattacctaaccacaattattcactgggaaataagaaaatctacttgaatataagaccagcagcgttaatatgtcctcacttgtcaaaaacatatctgcagatagctgttttacctttaaatccacatgctgttgaatacc

SEQ ID NO: 147612 - DNA, 425 bp, Arabidopsis thaliana
cacatagcaaaaaatggcaaacaagttgttcctcgtctgcgcagctctcgctctctgcttcctcctcaccaacgcttccatctaccgcaccgtcgttgagttcgaagaagatgacgccactaaccccataggcccaaaaatgaggaaatgccgcaaggagtttcagaaagaacaacacctaagagcttgccagcaattgatgctccagcaagcaaggcaaggccgtagcgatgagtttgatttcgaagacgacatggagaacccacagggacaacagcaggaacaacagctattccagcagtgctgcaacgagcttcgccaggaagagccagattgtgtttgccccaccttgaaacaagctgccaaggcccgtagacttcagggacagcaccaaccaatgcaagtcaggaaaaattaccagacag

SEQ ID NO: 147613 - DNA, 377 bp, Arabidopsis thaliana
gtccgttaacgttaagctcctttaccgttacgtcttaaccaactttttcaacctctgtttgttcccgttaacggcgttcctcgccggaaaagcctctcggcttaccataaacgatctccacaacttcctttcctatctccaacacaaccttataacagtaactttactctttgctttcactgttttcggtttggttctctacatcgtaacccgacccaatccggtttatctcgttgactactcgtgttaccttccaccaccgcatctcaaagttagtgtctctaaagtcatggatattttctaccaaataagaaaagctgatacttcttcacggaacgtggcatgtgatgatcccgcctcgcttcgatttcctgagg

SEQ ID NO: 147614 - DNA, 408 bp, Arabidopsis thaliana
accacacatagaaaaaaatggcaaacaggttgttcctggtttgcgcagctttcggtgtggggttcctcctaaccaacgcttccatctaccgcaccgtcgttgagttcgaagaagatgacgccactaaccccataggcccaaaaatgaggaaatgccgcaaggagtttcagaaagaacaacacctaagagcttgccagcaattgatgctccagcaagcaaggcaaggccgtagcgatgagtttgatttcgaagacgacatggagaacccacagggacaacagcaggaacaacagctattccagcagtgctgcaacgagcttcgccaggaagagccagattgtgtttgccccaccttgaaacaagctgccaaggccgttagactccagggacagcaccaaccaatgcaag

SEQ ID NO: 147615 - DNA, 413 bp, Arabidopsis thaliana
gagaatggagagagactcaatgtagactgtggctccatatgctccggtgactgatgagcgccgtgttcgtggtgacttggatgacacacttcctaaaccttatttgccgagagcactacaagcacctgacatggaacacccacaaggaacaccagatcatagacataatggccttagtgttcttcagcaacatgtcgctttcttcgatttggacaataatggcatcatttatccctttgaaaccttctctgggttccggttactcggtttcaatttactcgcgtcgcttatcttggctgctggtatcaacataactcttagctatgctactcttccgggaaggttaccgtctccgttctttcctatatatattcacaacatttacaaggcaaagcacggaagccactcttaaa

SEQ ID NO: 147616 - DNA, 422 bp, Arabidopsis thaliana
gaaaacatacacaaatagcagaacatggctaacaagctcttcctcgtctgcgcaactctcggcctctgcttcctcctcaccaacgcttccatctaccgcaccgttgtcgaattcgaagaagatgacgccagcaaccccgtcggtccaagacagagatgccagaaggagtttcagcaatcacaacacctaagagcttgccagagatggatgagcaagcaaatgaggcaaggacgtggtggtggtccttccctcgacgatgagttcgatttcgagggcccccagcagggataccagctactccagcagtgctgcaacgagcttcgccaggaagagccagtttgcgtttgccccaccttgaaacaagctgccagggcagttagccttcagggacagcacggaccattccaatccaggaaaattta

SEQ ID NO: 147617 - DNA, 428 bp, Arabidopsis thaliana
acgggttcacagcaacaacaagaacagaaaatcttgtggagcgggttccacgcacaggggggagctcaagcatggaaaatagacgatcaattggctcagcagcttcagaaccaacaagacagcagaggaaacatcgttcgtgttaagggacctttccaggtcgtgaggccacctctaagacagccctacgagagcgaggagtggagacacccacgtagcccacagggcaacggccttgaggagactatctgcagcatgaggtcccacgagaacattgacgaccctgctcgtgctgacgtgtacaagcccagcctaggtcgcgtgaccagcgtcaacagctataccttgcccatcttggagtatgtcaggctcagtgccactcgtggcgttctccagggtaatgcgatggtgctttctaaatacaacat

SEQ ID NO: 147618 - DNA, 418 bp, Arabidopsis thaliana
  unsure (1)..(418): unsure at all n locations
cggacccgtgggtcggcctttgccactttttttaagcaaaggatgagcaacccgaggaggggcaagtttatgggatgtgttaaaggagctagaggagcttcggggctctgcattggccatggaggtggccagagatgccaaaagctaggttgcaacaaaggtgctgagagcaaaactactttctgcaaagcccatggcggaggaaagagatgccaacacttgggatgcacaaagagtgctgaaggcaaaaccgatctctgcatatcacatggtggtggaagacggtgtggattccctgagggatgtgctaaggctgcacgtggcaaatctgggctctgcatcaagcacggtggtggtaaaaggtgtaggatngaaagctgtacaccaagtgctgagggacaagctggactttgtattt

SEQ ID NO: 147619 - DNA, 426 bp, Arabidopsis thaliana
caaaaaagggcaaacaggtggttcttgttttgcgcagttttggttttttgtttcctgctaagcaacgcttccatttaccgaaccgtcgttgagttcgaagaagatgacgccactaaccccataggcccaaaaatgaggaaatgccgcaaggagtttcagaaagaacaacacctaagagcttgccagcaattgatgctccagcaagcaaggcaaggccgtagcgatgagtttgatttcgaagacgacatggagaacccacagggacaacagcaggaacaacagctattccagcagtgctgcaacgagcttcgccaggaagagccagattgtgtttgccccaccttgaaacaagctgtcaaggccgttagacttcagggacagcaccaaccaatgcaagtcaggaaaatttaccagacagccaagcac

SEQ ID NO: 147620 - DNA, 373 bp, Arabidopsis thaliana
aaagggatggttttttttattgtggtccaccaccacttttctttctccaccatttttcttttcttattaaaatactccatcaaccccctatgtccaagacagaattttttccattatgttttttaattacaacacctaataactttccacatatggatgatcaagcaaatgaggcaaggacgttgtggtggtccttccctcgacgattagttctatttctagggcccccagcatggataccagctactccagcagtgcttcaacgagcttcgccaggaagagccagtttgcgtttgccccaccttgaaacaagcttccaaggcagttagcctccattgacagcacggaccattccaatccaagaaaatttacc

SEQ ID NO: 147621 - DNA, 410 bp, Arabidopsis thaliana
agcatcttgatattgctgatactctgcaacaagatcattcatgttactctgtgcgtggagtgaactccatctcgtccattccttctcctgtgtaccaatgaaggaaagcctttctcctgaacatggcagtgaactgttcactcacacgcctgaacatttcctggattgaagttgagtttccaatgaaagttgatgccattttcaaaccagtgggagctatatcgcagacgcttgatttcacgttatttggaatccattcaacaaagtatgaggagtttttgttctggacgttcatcatctgttcatcaacctctttggtactcatctttccacggaagacagcagaagctgtcaagtaacgaccatgacgaggatcaactgcacacatcatgcttttggcatcccacatc

SEQ ID NO: 147622 - DNA, 418 bp, Arabidopsis thaliana
caaaaagaaaatggttaagctcagcaatctcctcgttgcaaccttcggggttctccgcgtccttaacggctgccttgcgaggcagtcacttggggttcctcctcagctacagaacgagtgtaacctcgacaacctagatgttctccaagccaccgaaactatcaagagtgaagccggtcagatcgagtactgggaccacaaccaccctcagctccgatgtgttggtgtttccgttgctcgttatgtaattgaacaaggcggtctttacttgcccaccttcttcacttccccaaaaatttcctacgtcgttcaaggaacgggtatcagcggaagagtggtccctggatgtgccgagaccttcatggactcgcagccgatgcaaggacaacaacaaggccaaccatggcaaggacgacag

SEQ ID NO: 147623 - DNA, 425 bp, Arabidopsis thaliana
gaaatataagaaataacaaaatggctcgagtctcttctcttctttctttcttcttagcacttttgatccttttccatggctacgcggctcaacagggtcagcagggtcagcagtttccgaacgagtgccagctcgaccagctcaatgcgctcgagccgtcacacgtactgaagagcgaggctggtcgcatcgaggtgtgggaccaccacgctcctcagctccgttgctcaggtgtctcctttgcacgttacatcatcgagtctaagggtctctacttgccctctttctttaacaccgcgaagctctctttcgtggctaagggacgaggtcttatgggaaaagtgatccctggatgcgccgaaacattccaagactcatcagagttccaaccacgcttcgaaggtcaaggtcaaagccagaggttt

SEQ ID NO: 147624 - DNA, 439 bp, Arabidopsis thaliana
  unsure (1)..(439): unsure at all n locations
gaaggggcggggcaggcgacccgaaaaatttcatacgtccatcaaggaacgggtatcatctgaagagtggtccctggagggggggagactcttgatggactcgcagacgatgcaaggacaacaacaaggccaaccatggcaaggacgacagggacaacaaggccaaccatgggaaggacagggacaacagggacaacaaggaagacaaggccaaccatgggaaggacagggacaacagggacaacaaggacgacagggacaacaaggccaaccatgggaaggacagggacagcagggacaacaagggttccgtgacatgcaccagtgggcatattctgtattgttttcaaatactntttttacattatattttatttttattattattatatataatttatatatatttttatttatttcttttatttgttttttattt

SEQ ID NO: 147625 - DNA, 439 bp, Arabidopsis thaliana
gggggaccacgcgtccgccccttttaatttgtgtgctctaagcctttactttatagtttaatatcatataaagggacggggcgaatgtggaccgtgatcggcgtgtgcatgtagaccgtactgacaaacgtgttcatcagccaaactacgaagatgatgtcggttttggtggctatggcggttatggtgctggttctgattataagagtcgcggcccctccactaaccaaatcttggcacttatagcaggagttcccattggtggcacactgttaaccctagctggactcactctagccggttcggtgatcggcttgctagtctccatacccctcttcctcctcttcagtccggtgatagtcccggcggctctcactattgggcttgctgtgacgggaatcttggcttctggtttgtttgggttgacgggtctgagctc

SEQ ID NO: 147626 - DNA, 428 bp, Arabidopsis thaliana
gaaggacatggtcagtacgtacaacattgttttttttacattcaccatattgtggagcatgtgagactcttaaacatgtctgccaacactacatgctctgcccactggatctacacctcatgagaacagccacttgtcatcatcgctcttatcgacatcgacaactaccaaaaccaactcgaccgcaaccctagagtgttccatttggccggaaacaaccagcaaggaggctttggcggttcacagtaacaacaataacagaaaaacttgtggagcgtgttcgacgcacaggtcatagctcaagcattgaaaattgacgttcagttggctcagcagcttcagaaccaacatgacagcataggaaacattgtttgtgttaagggaccttttcaggttcggaggccacctctaatacagccctacgagag

SEQ ID NO: 147627 - DNA, 415 bp, Arabidopsis thaliana
aaacatcgttcgtgttaagggacctttccaggtcgtgaggccacctctaagacagccctacgagagcgaggagtggagacacccacgtagcccacagggcaacggccttgaggagactatctgcagcatgaggtcccacgagaacattgacgaccctgctcgtgctgacgtgtacaagcccagcctaggtcgcgtgaccagcgtcaacagctataccttgcccatcttggagtatgtcaagctcaatgccactcgtggcgttcttcaggggaattgcgatggtgcttcctaaatacaacatgaacgctaacgagatcttgtactgcactggaggacaaggaaggatccaagtggtcaacgacaacggacagaacgtgttggaccaacaggtgcagaagggacagctcgtggtcat

SEQ ID NO: 147628 - DNA, 413 bp, Arabidopsis thaliana
actgagtgaaaaaagcttatcgcggctattagttcccggcgaagaagaagaagagggataagaaaatggcgactaatggatctgctagctcagcgcagctctctcagaaggaagctgatgtcaggatgatgtgtgccgctgaggctcatcttggaaccaagaattgcaattaccagatggagcgttacgtcttcaagagacgcaacgatggtatttacatcttcaaccttggcaaaacatgggaaaagctccagatggctgctagagttattgttgccattgagaacccacaggacatcatgcgccagtcagctaggccctatggacagagagctgtgttgaagtttgctcagtacactggagccaatgccattgctggaagacacactcctggtaccttcaccaatcagatg

SEQ ID NO: 147629 - DNA, 364 bp, Arabidopsis thaliana
agaggaagaaaaatgggtcgagtctcatctattatctctttctctttgacactcttgatcctcttcaatggctacactgcccaacagtggcccaacgagtgccagctcgatcaactcaatgcgctcgaaccatcccaaatcatcaagagcgagggtggtcgcatcgaggtctgggaccaccatgcaccccagctccgttgctccggctttgcctttgagcgtttcgtcattgagcctcagggtcttttcttgcccactttcttgaacgccggcaaactcacgtttgttgttcacggaaggggtctaatgggaagagttattccgggatgcgccgagacgttcatggagtcacccggttttggag

SEQ ID NO: 147630 - DNA, 249 bp, Arabidopsis thaliana
gaaaaacttgtgaagcggtttcgacccacaggtcatagctcaagcattgaaaattggcgttgagttggttcagcagcttcagaaccaacaagacagcagaggaaacatcgttcgtgttaagggacctttccaggtcgtgaggccacctctaagacagccctacgagagcgaggagtggagacacccacgtagcccacagggcaacggcctttaggagactatctgcagcatgaggtcccacgagaacat

SEQ ID NO: 147631 - DNA, 425 bp, Arabidopsis thaliana
aacaaacaaaaagaaaatggtttagctcagcaatctcctcgttgcaaccttcgggggtgctcctcgtccttaacggctgccttgcgaggcagtcacttggggttcctcctcagctacagaacgagtgtaacctcgacaacctagatgttctccaagccaccgaaactatcaagagtgaagccggtcagatcgagtactgggaccacaaccaccctcagctccgatgtgttggtgtttccgttgctcgttatgtaattgaacaaggcggtctttacttgcccaccttcttcacttccccaaaaatttcctacgtcgttcaaggaacgggtatcagcggaagagtggtccctggatgtgccgagaccttcatggactcgcagccgatgcaaggacaacaacaaggccaaccatggcaaggacgacag

SEQ ID NO: 147632 - DNA, 398 bp, Arabidopsis thaliana
  unsure (1)..(398): unsure at all n locations
cggaanncaggggggaccgacgcgtccgttgaacttcgccgtcaagagcatccatgggttttgtcatcagagctcaacttaggggggggggttccgttttcaaatcccacactcaccaccgcaaaggtccggctaagttccgtagcctcgatttcggcgagagaaatggttacctcaagggcgtcgtgacggagatcatccacgatcctggtcgtggtgctcctcttgctcgcgtcactttccgtcatccttttcgtttcaagaaacaaaaggagctttttgtcgtcgccgaaggtatgtacaccggtcagtttctgtactgcggtaagaaagctactctcgtcgttggaaatgttctcccttttaagatctaattctgaaggagctgttgtctgcaa

SEQ ID NO: 147633 - DNA, 422 bp, Arabidopsis thaliana
gctttatgttccatccattagtgagcagagctcagactcgtcagtctcatttctgtggttgttaaccttttttttttgcttgcgcagaggtagcttgtataggttaattcacaggcctaataaccaattagatgagcgaaagcgtctgaggatggctcttgatgctgtactattactcttttctctttcgctccttctttacctctactacgtatttgtatcttctagattggttcttacaaaaaaaaattcaaccgttgtaggctcgtggaatgaattatttacacagctgtaatccggtaattgtccatcgtgatcttaaatctccaaaccttttagttgacaaaaattgggttgtcaaggtcagtaattcttccactcgggtttcaattctctcttctatgatatctctaatggcttac

SEQ ID NO: 147634 - DNA, 429 bp, Arabidopsis thaliana
catcaacaaaacaacaagaaaaaatggtaataaccaacaaattaatcataacacttgttctgcttatctccatagctgtcgtccactgcttatccttccgtgtggagatcgacgagttcgagccaccacagcaaggagaacaagaaggtccccgtcgccgtcctggtggtggctctggcgagggatgggaggaagagtcgacgaatcatccataccacttcaggaagcggagtttcagtgattggttccagtcaaaggaaggttttgtgagagtgctgcctaagttcacaaaacatgcaccggctctcttccgaggaatcgagaactacagattctcgttggtggagatggagccaacaactttctttgtgcctcaccatttggatgccgatgctgtttttatagtcctacaaggtaaaggagtgatcg

SEQ ID NO: 147635 - DNA, 388 bp, Arabidopsis thaliana
atttttaacatttttttagccccaaattttttttaaaattcttacttgcacctttgggtagggagaattttcacattaacattgtggtcattggtcatgttgattctggaaaatcgaccacaactggtcacttgatctataagcttggtggtattgacaagcgtgtcatctagaggttcgagaaggaggctgcttaaattaacaagaggtccttcaagtacgcatgggtgttggacaaacttaatgccgagcgtgagcgtggtattaccatccatattgctctatggaagttcgagaccaccaagtactactgcacagtcattgatgccccaagacatcgttatttcatcaagaacatgattactggttccttccaagctgattgtgc

SEQ ID NO: 147636 - DNA, 420 bp, Arabidopsis thaliana
caaaaagaaaatggttaagctcagcaatctcctcgttgcaaccttcgggggtctccgcgtccttaacggctgccttgcgaggcagtcacttggggttcctcctcagctacagaacgagtgtaacctcgacaacctagatgttctccaagccaccgaaactatcaagagtgaagccggtcagatcgagtactgggaccacaaccaccctcagctccgatgtgttggtgtttccggtgctcgttatgtaattgaacaaggcggtctttacttgcccaccttcttcacttccccaaaaagttcctacgtcgctcaaggaacgggtatcagcggaagagtggtccctggatgtgccgagaccttcatggactcgcagccgatgcaaggacaacaacaaggccaaccatggcaaggacgacaggg

SEQ ID NO: 147637 - DNA, 413 bp, Arabidopsis thaliana
aacccacaagggcaggaatggctacaaggccgaaagcaacagaagcaaaacaacatggtcaatggcttcgcacctgagatcttggctcaagccttcaagatcaatgtcgagacggctcagcagctccagaaccagcaagataaccgtggcaacatcgtcaaggtcaacggacctttcggcgtcattaggccacccttgagacgcggcgaaggcggccaacaaccacatgaaatagctaatggtttagaggagactttgtgcaccatgcgatgcactgaaaacctcgatgacccgtcggatgctgacgtgtacaagccatcactcggatacattagcacacttaacagctacaatcttcctatcctcagacttcttcgccttagcgctcttcgtggctccatccgtaaaaacgc

SEQ ID NO: 147638 - DNA, 448 bp, Arabidopsis thaliana
ggaaaggaagggggggaccgacgcgtccgtaaagactacaaaggtttaacattaattcaattggagcgcgattaatcccaagtcgccggagtaatggctaagatccttttatccttccaaggagtttatagatccaatttcaaacccgtttacaacgaaaatacacgataccaaaccgaggatctaacgacacctgtcgttttcggagcctttcaaggaagcggcgagtatttctcaagaatcggtgtcggaactccggcgaaagagatgtacttggttctcgacaccggaagcgacgtaaattggatccagtgtgaaccttgcgccgactgttaccaacagtccgacccggtttttaacccgactttgtcttcacatacaaatctttcacttgctttgatccacagtgctctcttcttgaaaccttcgcttgttggtcaaacaaatg

SEQ ID NO: 147639 - DNA, 420 bp, Arabidopsis thaliana
atcacaaacgagtaagaatacaaatacaaatagcaaaaaaaatggcaaacaagctcgtgctcgtctgcgcaactttcgccctctgcttcctcctcaccaacgcttccatctaccgcactgttgtcgagttcgacgaagatgacgccagcaaccccatgggcccaagacagaaatgtcagaaggagtttcagcaatcacagcacctaagagcttgccagaaattgatgcgcatgcaaatgaggcaaggccgtggtggtggtccctccctcgacgatgagttcgatttggaagacgacatcgagaacccacaaggcccccagcagggacaccagatcctccagcagtgctgcagcgagcttcgccaggaagagccagtttgtgtttgccccaccttgagacaagctgccagggccgttagcc

SEQ ID NO: 147640 - DNA, 409 bp, Arabidopsis thaliana
ccccttttaatttgtgtgctcttagcctttactctatagttttatatcatatcaatggacatggcgaatgtggaccgtgatcggcgtgtgcatgtagaccgtactgacaaacgtgttcatcagccaaactacgaagatgatgtcggttttggtggctatggcggttatggtgctggttctgattataagagtcgcggcccctccactaaccaaatcttggcacttatagcaggagttcccattggtggcacactgctaaccctagctggactcactctagccggttcggtgatcggcttgctagtctccatacccctcttcctcctcttcagtccggtgatagttccggcggctctcactattgggcttgctgtgacgggaatcttggcttctggttgtttgggttgac

SEQ ID NO: 147641 - DNA, 426 bp, Arabidopsis thaliana
ttctgtatcaccagtttctggtcatagtacaaaatgggaatcaggttcgtagaccgggtgtgaaattcaaacctgtcgatgatcatgatcgaattgaaggtagagaagctgcagaggaggaggataacaatgtggaggcagagacagagagggagaggaaggttcatgagtgtactgcaagtacgaagagacgcaagaagaagaagaaaagtgagtgttatcgatgcggaaaagcgaaatgggaaaataaggagacttgcattgtgtgtgatgaaaagtattgtggaaactgtgtgcttagagcaatgggttcgatgcctgaaggaagaaagtgtgtgagttgcatcggtcaagctattgacgaatcgaaacggtctaaattagggaagcattctcgggtattgtcgcggttgcttagtccattgg

SEQ ID NO: 147642 - DNA, 382 bp, Arabidopsis thaliana
gcacaggtcatagttaaagcattgaaaattgactttcagttggctcagcagtttcggaaccagcaagacagcagaggaaacatctttcgtgttaagggacctttccaggtcgtgaggccacctctaagacagccctacgagagcgaggagtggagacacccacgtagcccacagggcaacggccttgaggagactatctgcagcatgaggttccacgagaacattgacgaccctgctcgtgctgacgtgtacaagcccagcctaggtcgcgtgaccagtgttaacagctataccttgcccatcttggagtatgtcaggctcagtgcccacttgtggcgttctccagggtaatgcgatggtgctttctaaattcaacatgaac

SEQ ID NO: 147643 - DNA, 424 bp, Arabidopsis thaliana
gattttctatgtgctgcgttttcagaactgcttcgaatcctcacaaataatgctactattgcgcaagggacaatctgctgcgaaagtggtggagccacttttccatttgctgacgaggttggagtttggagctgatggacagcacagtgctctgcaagttctggtaaatatcttagaacatccacaatgccgcgctgattatacacttacaccgcaccaagtaattgagcctctaattccgctactggaatctccatccccagcagtccagcagttggcagctgagcttctatctcatcttctctacgaggagcatctgcagaaagatccattaactcaacttgcgattggtcctctaatccatgtgctgggatccggcatacaccttttacagcagagagctgtgaaagctctcgtcagcatt

SEQ ID NO: 147644 - DNA, 416 bp, Arabidopsis thaliana
ccgcaacccaaggccattttacttagccggaaacaacccacaaggtcaagtatggcgacaaggacgagagcaacagccacagaagaacatcttcaatggatttggacccgaggttattgctcaagctttgaagattgatcttcagacagcgcagcaacttcagaaccaagatgacaaccgtggaaacattgtccgagtccaaggcccgttcggtgtcattaggccgcctttgaggggccagagacctcaggaggaggaagaagaagaagaaggacgacacggacgacacggtaatggcttagaggagaccatctgcagcgccaggtgcaccgataacctcgatgatccgtctcgtgctgacgtgtacaagccacagctcggttacatcagcactctcaacagttacgatctcccca

SEQ ID NO: 147645 - DNA, 389 bp, Arabidopsis thaliana
gagagaggagaagtactttttaggtcttaagatagtgtgcgtataagcactgtccgccagacatatatcttcatcctcaatctcgtattttgacataggctatccatatgtcataacatattttctggaataaaatatttattcatgaaactctgacatagactatccatatgtcataatatataacattattccagaattacaaaagcatctataatgcttgtcatgcatagcatgataatacatatggctataatatattacattgatttctcgttgtcatgattaatcgagaaaatctgccatatcaagatgactatcatcatcttggccattaaaggaagggtccgacttatcacagatgagattagtttcaacatccctttttt

SEQ ID NO: 147646 - DNA, 387 bp, Arabidopsis thaliana
aatatctcataaagatcaaataaacactaaacctgaaagcaaaaaaatggcagcacgagcaacattcatattctatgctctcttcctaaccacactccaattccttctaacacaccatgtgtcatccgccgcccgaggattatggaaatacatcgcccccaacgtcggaatctccgcgatgcatatgcaacttctccataacgaccgtgtcgtaatgtacgaccgaaccaacttcggaccatcaaacatctctctacctaacggtaactgccgtgacaacccccaagacgccgtctccaaaatcgactgcacagctcactcgatcgaatacgacgtcgcaacgaacaccatccgaccttaacggtacaatccaacacatggtgctca

SEQ ID NO: 147647 - DNA, 362 bp, Arabidopsis thaliana
tcctctctcgctagggtttctcattcctatccataattctagatgtcgaggtattcttttgattgagctccgcttttaaccaaaccatcttagattttgttttcatgattggatcactgaattgaaattcttctcttctgtctttagatttcttctcaggtttttaactgagacctgtcaaataagctaaagcttcttctaagagcttcaaggaaagcattgcattgttgtggtcttgtttgtgtccacagaaggaaagaagagtgagaagctcaggatgtcaagcaatcgaaatacccactggtgtcacagatgtcagcgtgctgtccgccttcacggccaagagcctgtatgcttttatt

SEQ ID NO: 147648 - DNA, 420 bp, Arabidopsis thaliana
ttacaatgcagtgggtctaatcgtgacaacctcggatgagaaacctcctctagacaggatccgttgtgtccgttccgacctgaccgatcaatccgagcctgacgctctgatatgggaaactaatgggtttagcgtttcgagttctaaacctgttaacagaggaacacaagcctctggagtctgcgttggcacgtacttctcaaactctccaaatccggccttaccttgtctgaaaaacaacaacttcgatttttcttgtatgccaggcaagccccagatcgacgctctgtttcaaacttacgccccttggatctatttccacaaagatgagaagtatctcccatcatctgtcaactggttcttcagcaacggtgccttgctttacaagaaaggtgatgaatcaaacccagttccagttga

SEQ ID NO: 147649 - DNA, 423 bp, Arabidopsis thaliana
ggaaagctcactcttgcaaggcttttgtatggctcgtgaagctatggtatcggatgatgctgtcaagggtgttcactatgaagaaatccttcagctgtataacgatttgatggcgctggattcttcacactaccagtactacaaggatgagcacagcaaagcttttctccacaaggtgacttcaagcagtgaatctttgtcaagacaccttttgcgatatagggatatgaacaatcttgtatgtctacggctaaataacttatcactatctcggatagcctttgttgagaagttgctgtttgtccaaatgttagaccttagtcacaatgagcttcattccactgaaggattggaggcaatgcaacttctctcttgtctaaatctgagtcacaacagaatccggagtttttcagcgctggactc

SEQ ID NO: 147650 - DNA, 320 bp, Arabidopsis thaliana
aatccgatctatatctatgtttcttttttcttcatatggtacgtcatccgggacggcaattggctcgattagattgacctgtacctatcaatcaatccctgatctgtttaagtttgatctcctgtgttatctcctaggcctagatattgttcgattctcgaaaaacaagaagaagcgatggtattgggattttagggattaccgcagcctgccgtatatatatatatagaagctgagcgatgctgtgttgtgaaaaacacaagagatcctgtttactttccgcacgaaagttacttagcacaaatacaagcgacagaaga

SEQ ID NO: 147651 - DNA, 420 bp, Arabidopsis thaliana
gggggaccgacgcgtccgaagaaaaatgggtcgagtctcatctattatctctttctctttgacactcttgatcgggttgaatggctacactgcccaacagtggcccaacgagtgccagctcgatcaactcaatgcgctcgaaccatcccaaatcatcaagagcgagggtggtcgcatcgaggtctgggaccaccatgcaccccagctccgttgctccggctttgcctttgagcgtttcgtcattgagcctcagggtcttttcttgcccactttcttgaacgccggcaaactcacgtttgttgtacacggaaggggtctaatgtgaagagttattcctggattgcgccgagacagtcatggagtcaccggtttttggagaaagtcaaggtcagggttagaatcaagggtttcttgacatgc

SEQ ID NO: 147652 - DNA, 432 bp, Arabidopsis thaliana
  unsure (1)..(432): unsure at all n locations
gagccacgactcacgcacatcgncaactaccaaaaccaacttgaccgcaaccctagagtgttccatttgggcggaagcaaccagcagggaggctttggcggttcacagcaacaacaagaacagaaaaacttgtggagcgggttcgacgcacaggtcatagctcaagcattgaaaattgacgttcagttggctcagcagcttcagaaccaacaagacagcagaggaaacatcgttcgtgttaagggacctttccaggtcgtgaggccacctctaagacagccctacgagagcgaggagtggagacacccacgtagcccacagggcaacggccttgaggagactatctgcagcatgaggtcccacgagaacattgacgaccctgcttgtgctgacgtgtacaagcccagcctaggtcgcgtgaccagcgtcaac

SEQ ID NO: 147653 - DNA, 411 bp, Arabidopsis thaliana
  unsure (1)..(411): unsure at all n locations
caccacattattttcactgagcgcataacatttttgagacaagagactctctctcgctctcttctctctttctctccccctctctccggcgatggttgttgctatggaccaacgcaccaatgtgaacggagatcccggcgccggagaccggaagaaagaagaaaggtttgatccgagtgcacaaccaccgttcaagatcggagatataagggcggcgattcctaagcactgttgggttaagagtcctttgagatcaatgagttacgtcgtcagagacattatcgccgtcgcggctttggccatcgctgccgggtatgttgatagctggttcctttggcctctttattgggccgaccaaggaacactnttctgggccatctttgttctcggccacgactgtggacatgggag

SEQ ID NO: 147654 - DNA, 407 bp, Arabidopsis thaliana
gtcgagcgacaccaaacaaatgcaccaaattgatcaatttcttaggagttggtttgtgaaacacccggagtttatatcgaatcctttttacgttggtggagattcatattccgggaaaattgttccaggagctgtgcaacaaatttcacttggaaatgagaagggcctcacaccactcataaatattcagggttatgttcttggaaaccctgtgacagataaaaacattgaaactaactatagagttccatttgctcatgggatgggacttatttcagatgagctctttgagtcacttgaaagaagttgtggaggcaaattcttcaacgtagacccaagtaatgcaagatgctcaaataatcttcaagcttatgatcattgtatgtcagagatatactcagagcata

SEQ ID NO: 147655 - DNA, 296 bp, Arabidopsis thaliana
ggctgccttgcgaggcagtcacttggggttcctcctcagctacagaacgagtgtaggctcgacaacctagatgttctccaagccaccgaaactatcaagagtgaagccggtcagatcgagtactgggaccacaaccaccctcagctccgatgtgttggtgtttccgttgctcgttatgtaattgaacaaggcggtctttacttgcccaccttcttcacttccccaaaaatttcctacgtcgttcaaggaacgggtatcagctgaagagtgggtcctggatgtgccgagaccttcat

SEQ ID NO: 147656 - DNA, 254 bp, Arabidopsis thaliana
  unsure (1)..(254): unsure at all n locations
ccggnacggaannggagaggcggcccagacgtacgcaaaaagggacgcatgaagccagactcggtttttctgcccaacaaccacatgaagtggctggtggtttagaggagactttgtgcaccatgcgatgcactgaaaacctcgatgacccgtcagatgctgacgtgtacaagccatcactcgaatacattagtacacttaacagctacaatcttcctatactgagactactaccacttagcgctcttcggggc

SEQ ID NO: 147657 - DNA, 386 bp, Arabidopsis thaliana
caaaaagaaaatggttaagctcagcaatctcctcgttgcaaccttcggggttctcgtcgtccttaacggctgccttgcgaggcagtcacttggggttcctcctcagctacagaacgagtgtaacctcgacaacctagatgttctccaagccaccgaaactatcaagagtgaagccggtcagatcgagtactgggaccacaaccaccctcagctccgatgtgttggtgtttccgttgctcgttatgtaattgaacaaggcggtctttacttgcccaccttcttcacttccccaaaaatttcctacgtcgttcaaggaacgggtatcagcggaagagtggtccctggatgtgccgagaccttcatggactcgcagccgatgcaaggac

SEQ ID NO: 147658 - DNA, 348 bp, Arabidopsis thaliana
aacaagggttccgtgacatgcaccagaaggtggaacatgtgagacgcggagacgtggttgccaacactccaggctctgcccactggatctacaactcaggagaacagccacttgtcatcatcgctcttctcgacatcgccaactaccaaaaccaactcgaccgcaaccctagagtgttccatttggccggaaacaaccagcaaggaggctttggcggttcacagcaacaacaagaacagaaaaacttgtggagcgggttcgacgcacaggtcatagctcaagcattgaaaattgacgttcagttggctcagcagcttcagaaccaaccaggccagcaggggaaacatc

SEQ ID NO: 147659 - DNA, 412 bp, Arabidopsis thaliana
cttcttcctttgctccgtcgtcgagatctcgtcgatcctcaaatctcaaatctcctgtaaccagatcgtctaattatccgatctgcgtttcgaatctcagatcgaagatgccggtggctgcttccgccatctattttctgaatctccgtggcgatgtactcataaatcgcacctaccgagatgacgtcgggggaaacatggtggatgcatttcgtacgcatataatgcagacgaaagagttagggaattgtcctgtgcgtcagattggtggctgctcctttgtttatatgcgaatcagcaatgtctacattgtcattgttgtcagtagcaatgctaacgttgcttgtggattcaaattcgttgttgaggctgttgctttgttcaaatcatactttggtggagcttttgatga

SEQ ID NO: 147660 - DNA, 396 bp, Arabidopsis thaliana
  unsure (1)..(396): unsure at all n locations
gtacggaannggagtgtcggcccacggcgtacgcagaaaatggctcagctcatcaatctcctcgttgcaaccttcggggttctcctcggactgggcggctgcattgcgcggcaagcacttggcgttcctcctcagctacagaaccagtgtaactctggcaacctagatgttctccaagccaccgcaactatcaagagtgaagccgctcagatcgagtactgggaccacaaccactctcagctccgatgtgttggtgtttccgaagctcgttatgtaattgaacaaggagggctttacttgcccaccttctttacttncccaaaaatttgctacgttgttcaaggaacgggtatcaacggaagaagggtccctggatgtgccgagaccttcatggac

SEQ ID NO: 147661 - DNA, 402 bp, Arabidopsis thaliana
cgacattccaaactaccaataccaacttgaccgcaactctaacatgcatgatttgggcgtaaacaaccagctggcacgctttggcggttcacactcaacaacatgaacagaaaaacttgtggaatatgtatatatcgttagaacgagaaaagattaaactatgctgattcgttagcacaaacttcaatgattttacaatatacgaatttgaatcaagaaggtgttacaattgcattacttaaacaaaccactatattaattgttttactcggatgaacacatcttaatacaatggggatttattattacttaacaagaacatttaaagcaggtagatcaatgagtttccatcaattttgtccaaagagaaaagggttgagtgaaatattgttttttttttta

SEQ ID NO: 147662 - DNA, 421 bp, Arabidopsis thaliana
cgaccctgctcgtgctgacgtgtacaagcccagcctaggtcgcgtgaccagcgtcgacaggtataccttgcccatcttggagtatgtcaggctcagtgccactcgtggcgttctccagggtaatgcgatggtgcttcctaaatacaacatgaacgctaacgagatcttgtactgcactggaggacaaggaaggatccaagtggtcaacgacaacggacagaacgtgttggaccaacaggtgcagaagggacagctcgtggtcatcccacaagggttcgcatacgttgtccagtcccacggaaacaagttcgagtggatctctttcaaaactaatgaaaacgcaatgatcagcactttggcgggtagaacctcgctcttgagggcattgccattggaggtcatatcaaatggtttccagatc

SEQ ID NO: 147663 - DNA, 419 bp, Arabidopsis thaliana
caacaaagaaaaaatggcaaaccagcattctcctcgttgcaaccttcggggttctgcgcgtccttaacggctgcctttccatgtaccgaacacgggtaggagaacaagaaattgacaccattaaccccataggcccaaaaatgaggaaaagccgaatggagtttcagaaagaacaacacctaaaagcttgccagcaattgatgctccagcatgcacggcaaggccgacaccatgagcttgatttacaagacgacatggagaacccacaaggacaacagtaagaacaacagctatgtcagcagtgctgcaacgagctttgccaggaaaagccagattgtgtttgccccaccttgaaacaagctgccaaggccgttagactccagggacagcaccaaccaatgcaagtcaggaaaatttac

SEQ ID NO: 147664 - DNA, 383 bp, Arabidopsis thaliana
aaaaatgatacgagtctcatctattatttctttctctttgacactcaagatcctttgtaggtgttactctacccaacagtggaccaaccagtgccagctcgatcaactcaatgcgctcgaaccatcccaaatcatcaagagcgagggtggacgcatcaaggagtgtgaccaccatccacacctactacgttgctaccacttgatctttgagcatgcaaggattgagcctaacgatcagttttagtccacatacttgatcgccaacacaactcaccttcgtcgataacaacaggtgtttaatcagaactgtaattagcttatgcagcaagacgtagattgtgtttgccccaccttgtaacaagctatcaaggccgttagactcc

SEQ ID NO: 147665 - DNA, 210 bp, Arabidopsis thaliana
atacacggacgcatgggttgagactcggcgaaggcggccaacaaccacatgaagtagctggtggtttagaggagactttgtgcaccatgcgatgcactgaaaacctagatgacccgtcagatgctgacgtgtacaagccatcactcggatacattagcacactgaacagctacaatcttcctatactgagacttctacgacttagcgctc

SEQ ID NO: 147666 - DNA, 350 bp, Arabidopsis thaliana
cgacatcgccaactaccaaaaccaactcgaccgcaaccctagagtgttccatttggccggaaacaaccagcagggaggctttggcggttcacagcaacaacaagaacagaaaaacttgtggaagcgtatatgttctccaagccaccgaaactatcaagagtgaagccggtcagatcgagtactgggaccacaaccaccctcagctccgatgtgttggtgtttccgatgctcgttatgtaattgaacaaggcggtctttacttgcccaccttcttcactttcccaaaaatttgctacgtcgttcaaagaacgggtatcaacgggagagtggtccctggatgtgccgagacc

SEQ ID NO: 147667 - DNA, 419 bp, Arabidopsis thaliana
  unsure (1)..(419): unsure at all n locations
gggaacttataagaaatccactggtttctgctgcttcggttattgctgctgggttggctggtgggcttgcttctattggacctggantcggtcaaggtacagctgcgggtcaagctgtcgaaggtatcgcgagacaacctgaggcagaaggaaaaatacgaggtactttattgcttagtttggcttttatggaagctttaacaatttatggcctggttgtagcattagcgcttttatttgcgaatccttttgtttaagcccagaaatcacaaaattctggattgtttgtgtagtttttttaattctatcaagatttaactcctacaattattcattgagacaacaatccttgggaaggactaatttgaggatggggaattagcacatcgattcgctttcttccttccccttattctttt

SEQ ID NO: 147668 - DNA, 299 bp, Arabidopsis thaliana
gtacggaatcggagagtcggcgcagacgtacgcctctaaaacagccctacgagagcgaggagtgtagacacccacgtagcccacaggggatcgggctcgaggagactatctgcacaatgagttcccacgagaacattgacgaccctgctagggctgacatgtacaagaccagactaggtcgagtgaccagcgtgaacagctgtaccttgcccatatcggcatatgacaggctgacagccactgatggtgcagtacacaaggataggacggagctttctaaatgcaacatgaaccctaac

SEQ ID NO: 147669 - DNA, 402 bp, Arabidopsis thaliana
gcgaatttcaaacggagatgtcagaatcagtgattcagggatcgaatccggatcgggttgtatctccgacgagctcgaaatcagtgacgcagacggtgaacgggtcgcatcaattcgtgattcaaggatacagcttagcgaaagggatgggtatagggaagcacatagcgagtgataatttctccgtcggaggttatcagtgggggatcttcttctacccggacggtaagaatccggaggataattcgtcgtacgtctctgtttttatcgcattggccagtgaaggaaccgaagttagggcgcttttcgagctagctcttgttgaccaaagtggaaaggggaaacataaggttcatagccattttgagcggtcactcgatggtggcccttatacactcaaat

SEQ ID NO: 147670 - DNA, 415 bp, Arabidopsis thaliana
cttctttctctctctaaattcgaaaaaatggcgaaactggtgatgttgttggttgggtgtgtcttaccggcgatagccatggcggcaaggaggggaaatattggaaagaatacaatggtggttcaaggtagcacctactgtgacatttgcaaattcggcttcgagactcctgaatcctcctacttcatccccggtgcaacggtgaagctatcatgcaaagacaggaagacaatggaagaggtttacacagacaaagctgtatcagacaaagaaggaaagtataagttcattgtccacgacgatcacagagaccagatgtgcgatgttttgcttgtgaaaagctcggataaaacctgctctaaaatctccgttggacgtgagaagtctcgtgtgatcttgaaccattacagtggca

SEQ ID NO: 147671 - DNA, 415 bp, Arabidopsis thaliana
gaataacaggggcgaccgacgcgtccggtggatttattctttaaaacgcaaaatttctttcacaggggaacgcaaacgctaacgcgtgtgtttacgtgacaggcggtgaagcccaaaaccagaacgataacgacatattacactggtgtgttcagggtagcacctactgagacatttgcaaattcggctccaaaactcctgaatgctcctacttgatccccggtgcaacggtgaaactatcatgcaaagacaggaagacaatggaagaggtttacacatacaaagctgtatcagacaaagaatgaaagtataagttcatgtggcacgacgatcacagataccatatttacgatgtttagcttgtgaaaagcttggataaaacttgctctaaaatctactttggacgtgagatgac

SEQ ID NO: 147672 - DNA, 417 bp, Arabidopsis thaliana
aaacaaaaagaaaatggttaagctcagcaatctcctcgttgcaaccttcggggttgtcctcgtccttaacggctgccttgcgaggcagtcacttggggttcctcctcagctacagaacgagtgtaacctcgacaacctagatgttctccaagccaccgaaactatcaagagtgaagccggtcagatcgagtactgggaccacaaccaccctcagctccgatgtgttggtgtttccgttgctcgttatgtaattgaacaaggcggtctttacttgcccaccttcttcacttccccaaaaatttcctacgtcgttcaaggaacgggtatcagcggaagagtggtccctggatgtgccgagaccttcatggactcgcagccgatgcaaggacaacaacaaggccaaccatggcaaggacg

SEQ ID NO: 147673 - DNA, 238 bp, Arabidopsis thaliana
gaaaatggttaagctcagcaatctcctcgttgcaaccttcggggttctcctcggggttaacggctgccttgcgaggcaatcacttggggttcctcctcagctacagaacgagtgtaacctcgacaacctagatgttctccaagccaccgaaactatcaagagtgaagccggtcagatcgagtactgggaccacaaccaccctcagctccgatgtgttggtgtttacggtgctcgctat

SEQ ID NO: 147674 - DNA, 300 bp, Arabidopsis thaliana
aacatacacacatagcaaaaaatggcaaacacgttgatcctggtctgcgcagatcgggctctctgcttccttctcaccaacgctttcatataccgcaccggcgttgagttcgaagaagatgacgccactaaccccataggcccaaaaatgaggaaatgccgcatggagtttcagaaagaacaacacctaagagcttgccagcaattgatgctccagcaagcaaggcaaggccggagcgatgagtttgatttcggagacgacatggagaacccacatggacaacagcacgaacaacagcta

SEQ ID NO: 147675 - DNA, 398 bp, Arabidopsis thaliana
atttgggcaaccaacctaatcttacctcataaactgataatcttaatcgtatacagattgggtacaatagagctatacgatctaatgatctatatttttatcaccgatcgtctagatccggtatttgatatttatgccaatggagttaatttgtaaaagaaaaaaaaaacaaattctatatattataattcagcagctaaatttctcatacaagttgaagatttacttttcaaattatcaaggcaaaagttttgtacagttacgcctaaaatttgacaatattatttgatctccaagcttggaaaacccaaaagagaagtggtctctttctttgccaaccctaaaaaatcaaatccattgctcatgtcactccccttgctgctacctccgactacatc

SEQ ID NO: 147676 - DNA, 419 bp, Arabidopsis thaliana
aacaaacaaaaagaaaatggttaagctcagcaatctcctcgttgcaaccttcgggggtctgctcgtccttaacggctgccttgcgaggcagtcacttggggttcctcctcagctacagaacgagtgtaacctcgacaacctagatgttctccaagccaccgaaactatcaagagtgaagccggtcagatcgagtactgggaccacaaccaccctcagctccgatgtgttggtgtttccgttgctcgttatgtaattgaacaaggcggtctttacttgcccaccttcttcacttccccaaaaatttcctacgtcgttcaaggaacgggtatcagcggaagagtggtccctggatgtgccgagaccttcatggactcgcagccgatgcaaggacaacaacaaggccaaccatggcaaggac

SEQ ID NO: 147677 - DNA, 419 bp, Arabidopsis thaliana
gaaaatggttaagctcagcaatctcctcgttgcaaccttcggggttctcctcgtgcgtaacggctgccttgcgaggcagtcacttggggttcctcctcagctacagaacgagtgtaacctcgacaacctagatgttctccaagccaccgaaactatcaagagtgaagccggtcagatcgagtactgggaccacaaccaccctcagctccgatgtgttggtgtttccgttgctcgttatgtaattgaacaaggcggtctttacttgcccaccttcttcacttccccaaaaatttcctacgtcgttcaaggaacgggtatcagcggaagagtggtccctggatgtgccgagaccttcatggactcgcagccgatgcaaggacaacaacaaggccaaccatggcaaggacgacagggacaac

SEQ ID NO: 147678 - DNA, 408 bp, Arabidopsis thaliana
  unsure (1)..(408): unsure at all n locations
aacaaaacaacaagaaaaattggcaatacccaacaaattaatcataacacttcttggcctgatcttacatagctgtcggccactgcttatccttccgtgtggagatcgacgagttcgagccaccacagcaaggagaacaagaaggtccccgtcgccgtcctggtggtggctctggcgagggatgggaggaagagtcgacgaatcatccataccacttcaggaagcggagtttcagtgatttggttccagtcaaaggaaggttttgtgagagtgctgcctaagttcacaaaacatgcaccggctctcttncgaggaatcgagaactacagattctcgttggtggagatggagccaacaactttctttgtgcctcaccatttggatgccgatgctgtttttatagtccta

SEQ ID NO: 147679 - DNA, 447 bp, Arabidopsis thaliana
  unsure (1)..(447): unsure at all n locations
gggggggggggcggccgcgaaaaatggcaaacaagttgttccttgtctgcgcagctctcgctctctgattcctgctgggcaacgcttccatctaccgcaccgtcnttgagttcgaagaagatgacgccactaaccccataggcccaaaaatgaggaaatgccgcaaggagtttcagaaagaacaacacctaagagcttgccagcaattgatgctccagcaagcaaggcaaggccgtagcgatgagtttgatttcgaagacgacatggagaacccacagggacaacagcaggaacaacagctattccagcagtgctgcaacgagcttcgccaggaagagccagattgtgtttgccccaccttgaaacaagctgccaaggccgttagactccaaggacagcaccaaccaatgcaagtcaggaaaatttaccagacagccaaacacttgc

SEQ ID NO: 147680 - DNA, 418 bp, Arabidopsis thaliana
gaaatagctaatggtttagaggagactttgtgcaccatgcgatgcactgaaaacggggatgacccgtcggatgctgacgtgtacaagccatcactcggatacattagcacacttaacagctacaatcttcctatcctcagacttctccgccttagcgctcttcgtggctccatccgtaaaaacgctatggtgctaccgcaatggaacgtaaacgcaaacgcggcactctacgtgacaaacggaaaggctcatatacaaatggtgaacgacaacggagaaagagtgttcgaccaagagatctccagcggacagttactagtcgtgccacaaggcttttcggtcatgaaacatgccataggcgaacagttcgagtggatcgaattcaagacaaacgaaaacgcacaggtcaacacactcg

SEQ ID NO: 147681 - DNA, 415 bp, Arabidopsis thaliana
ctcactctcatttctcctcttcttccatggcgccgaggcacgccagcgagaggcgccgtttccaaacgcctgccatttcagccaaatcaacagcctcgcgcccgctcaggcgacgaagttcgaagccggtcagatggaagtatgggaccacatgagccctgagctccgatgcgccggtgtaacggtggctcgcatcacccttcagcccaattccattttcttgcccgctttctttagcccacctgcccttgcttacgttgtccaaggagaaggagttatggggacgattgcttctggttgtcctgagacttttgcagaagttgaaggatcatcaggaagaggaggaggaggagacccgggtcgacgttttgaggacatgcaccagaagttggagaatttccggcgaggggatgtg

SEQ ID NO: 147682 - DNA, 412 bp, Arabidopsis thaliana
ctcttagacttatctctatatacccccttttaatttgtgtgctcttagcctgtacgctatagttttatatcatatcaatcgacatggcgaatgtggaccgtgatcggcgtgtgcatgtagaccgtactgacaaacgtgttcatcagccaaactacgaagatgatgtcggttttggtggctatggcggttatggtgctggttctgattataagagtcgcggcccctccactaaccaaatcttggcacttatagcaggagttcccattggtggcacactgctaaccctagctggactcactctagccggttcggtgatcggcttgctagtctccatacccctcttcctcctcttcagtccggtgatagtcccggcggctctcactattgggcttgctgtgacgggaatcttggc

SEQ ID NO: 147683 - DNA, 331 bp, Arabidopsis thaliana
cggacgcgtggggaaaacatacacaaatagcaaaacatggctaacaagctcttccgggaatgcgcaactctcgccctctgcttcctcctcaccaacgcttccatctaccgcaccggtgccgaattcgaagaagatgacgccagcaaccccgtaggtgcaagacagagatgccagaaggagtttcagcaatcacaacacctaacagcttgccagagatggatgagcaagcaaatgaggcaaggacgtggtggaggtccttccctcgacgatgagttcgatttcgagggcccccagcggggataccagctactccagcagtgcttgaacgagc

SEQ ID NO: 147684 - DNA, 274 bp, Arabidopsis thaliana
aacaaacaaaaagaaaatggtttagcttagcaatctcctcgttgcaaccttcgggggtcttcttgtccttaaccgctgccttgccaggcaaacactttggggttctcctcaactacagaacgagtgtaacctcgacaacctagatgttcttcaagccaccgaaactattaagagtgaagccggtcagatcgagtactgggaccacaaccaccctcaacttcgatgtgttggtgtttccggtgctcgttatgtaattgaacaaagcggtctttac

SEQ ID NO: 147685 - DNA, 424 bp, Arabidopsis thaliana
caaaaagaaaatggttaagctcagcaatctcctcgttgcaaccttcggggttctcgtcgtccttaacggctgccttgcgaggcagtcacttggggttcctcctcagctacagaacgagtgtaacctcgacaacctagatgttctccaagccaccgaaactatcaagagtgaagccggtcagatcgagtactgggaccacaaccaccctcagctccgatgtgttggtgtttccgttgctcgttatgtaattgaacaaggcggtctttacttgcccaccttcttcacttccccaaaaatttcctacgtcgttcaaggaacgggtatcagcggaagagtggtccctggatgtgccgagaccttcatggactcgcagccgatgcaaggacaacaacaaggccaaccatggcaaggacgacagggacaa

SEQ ID NO: 147686 - DNA, 423 bp, Arabidopsis thaliana
cacaaagaaaatggttaagctcagcaatctcctcgttgcaaccttcggggttctccgcgtgcttaacggctgccttgcgaggcagtcacttggggttcctcctcagctacagaacgagtgtaacctcgacaacctagatgttctccaagccaccgaaactatcaagagtgaagccggtcagatcgagtactgggaccacaaccaccctcagctccgatgtgttggtgtttccagtgctcgttatgtaattgaacaaggcggtctttacttgcccaccttcttcacttccccaaaaatttcctacgtcgttcaaggaacgggtatcagcggaagagtggtccctggatgtgccgagaccttcatggactcgcagacgatgcaaggacaacaacaaggccaaccatggcaaggacgacagggaca

SEQ ID NO: 147687 - DNA, 415 bp, Arabidopsis thaliana
cgtgaatccagccatgaaactctttttagaaaatccttttttataacaaataattcctctgcttcttcttcttcttcgtttatttcaccttttttggtttctttagctcagaaaaagcccattctttttttctattcttgtttattttaatcatactgtgcgtttctacaaagtttgttcctttcttcttcaactctctcactcacggtcacagactcacagagatctgtttctttcttttatttttgctttcactcttctcttccagtgagagagagtgagagaaaacaaaatggtgaagcttttgttagtagcgtttgttgtggctggtataatactgggaactcaagcaaatgaatatttagatttcaatgtgacagaaatagatcgcattgaggaattagagtttggattt

SEQ ID NO: 147688 - DNA, 424 bp, Arabidopsis thaliana
aaggagaggaaaaaaaaaatacaagctcttttgttataaacacacactctcaggagagaaggtgtattgatcgtcttctctttccctaaacacactgattattttctctccgacgccgccatgtctctgctctcagatctcgttaacctcaacctcaccgatgccaccgggaaaatcatcgccgaatacatatggatcggtggatctggaatggatatcagaagcaaagccaggacactaccaggaccagtgactgatccatcaaagcttcccaagtggaactacgacggatccagcaccggtcaggctgctggagaagacagtgaagtcattctataccctcaggcaatattcaaggatcccttcaggaaaggcaacaacatcctggtgatgtgtgatgcttacacaccagctggtgatccta

SEQ ID NO: 147689 - DNA, 434 bp, Arabidopsis thaliana
  unsure (1)..(434): unsure at all n locations
cacgcgnccgggccaaccatgggaaggacagggactttattttcaacaaggacgacagggacaacaaggcggaccatgggaaggacagggacagcagggacaacaagggttccgtgacatgcaccagaaggtggaacatgtgagacgcggagacgtctttgccaacactccaggctctgcccactggatctacaactcacgagaacagccacttgtcatcatcgctcttctcgacatcgccaactaccaaaaccaactcgaccgcaaccctagagtgttccatttggccggaaacaaccagcagggaggctttggcggttcacagcaacaacaagaacagaaaaacttgtggagcgggttcgacgcacaggtcatagctcaagcattgaaaattgacgttcagttggctcaacagcttcagaaccaacatgaca

SEQ ID NO: 147690 - DNA, 227 bp, Arabidopsis thaliana
  unsure (1)..(227): unsure at all n locations
gctcttaacctttactctataattttatttcttatcaatatacatggcaaatggggtcgttgatctgaaggtgcgtgtaaaccntactgacaaacgtgttcattaatcaaactacgaagatgatgtctgttttggtggcatattgctgttatcattctggtttttattataataatcgagaacccttcactaaccaaatttttgcacatatagcatgagctcccatt

SEQ ID NO: 147691 - DNA, 401 bp, Arabidopsis thaliana
ataaaaatggctcgagtctcttctcttctttctttctccttaacacttttgatccttttccatggctacgcggctcaacagggtcagcagggtcagcagtttccgaacgagtgccagctcgaccagctcaatgcgctcgagccttcacacgtactgaagagcgaggctggtcgcatcgaggtgtgggaccaccacgctcctcagctccgttgctcaggtgtctcctttgcacgttacatcatcgagtctaagggtctctacttgccctctttctttaacaccgcgaagctctccttcgtggctaaaggacgaggtcttatgggaaaagtgatccctggatgcgccgaaacattccaagactcatcagagttccaaccacgcttcgaaggtcaaggtcaaag

SEQ ID NO: 147692 - DNA, 404 bp, Arabidopsis thaliana
gcgaatgtggaccgtgatcggcgtgtgcatgtagaccgtactgacaaacgtgttgatgagccaaactacgaagatgatgtcggttttggtggctatggcggttatggtgctggttctgattataagagtcgcggcccctccactaaccaaatcttggcacttatagcaggagttcccattggtggcacactgctaaccctagctggactcactctagccggttcggtgatcggcttgctagtctccatacccctcttcctcctcttcagtccggtgatagtcccggcggctctcactattgggcttgctgtgacgggaatcttggcttctggtttgtttgggttgacgggtctgagctcggtctcgtgggtcctcaactacctccgtgggacgagtgatacagt

SEQ ID NO: 147693 - DNA, 411 bp, Arabidopsis thaliana
ctcaaggtatcttccagaagcaacgttaagacctgcaagagaaaattttcagattgagctattgcggacgaagcaaaagctaaaggaaacgcagctttctcctccggtgacttcaattccgccgttaatcacttcaccgacgcaatcaacctaacaccaaccaatcacgttctcttctcaaaccgttccgctgctcacgcatcgcttaatcactacgacgaagctctctcagacgcgaagaagactgttgaacttaaaccagattggggaaaaggttatagccgtctcggtgctgctcacttaggtctaaatcagttcgatgaagccgtggaggcgtattcgaaagggcttgagattgatccaagtaacgaaggtttgaaatcaggtttagctgatgcgaaagcttctgcg

SEQ ID NO: 147694 - DNA, 402 bp, Arabidopsis thaliana
cattaccatttcttaaatttctctctttttatattccgagttcttgatttgggatgtcttcatgtcaaaatgggagtatactccagagcggttgcgttttcggtctttgtgtcgattctgctgtttttcactgcttattctaagagaaatgatggaacattcagagttggcctgaaaaaactgaagttggatcctaacaaccgactcgcaacacgctttggttccaagcaagaagaggccttgagatcttctttgcgttcgtacaacaacaatctcggtggtgattctggagatgctgatattgtcccgctcaagaattccttggatgctcagtactatggtgagattgctattggtactccaccgcagaaagtcactgtcatttttgataccggacgctct

SEQ ID NO: 147695 - DNA, 407 bp, Arabidopsis thaliana
aatacttttacgaaaaaagcttttaaaacttatctagtttcgtttgatacacattggaagaaagaaatggcatccaaccaacagagctacaaagctggtgagaccagaggcaaggcccaggagaagactggacaagctatgggaacgatgagggacaaggctgaggagggccgggacaagacttctcaaacggcccaaacagcccaacagaaggcccatgagacagcccagtcagctaaagataagacatctcaaactgcccaagcggctcagcagaaggcccatgaaacggcccagtcagcaaaagagaagacatctcaaactgcccaaacggcacagcaaaaggcccatgagacgacgcaagcagcaaaagaaaagacatctcaagctggcgacaaagctcgcga

SEQ ID NO: 147696 - DNA, 426 bp, Arabidopsis thaliana
cccacgcgtccggtaattaactaacaacaaatggcgaacaagctcttcctcgtctgcgcagctctcgccctgtgtttcatcctcaccaacgcttccgtctatcgcacggttgtcgagttcgacgaagatgacgccagtaaccccataggcccaatacagaaatgtcagaaggagtttcagcaagaacagcacctaagagcttgccagagatggatgcgcaagcaaatgtggcaaggacgtggtggtggtccttccctcgacgatgagttcgatatggaagacgacatcgagaacccgcagagacgacagctactccagaagtgctgcagcgagcttcgccaagaagagccagtttgcgtttgccccaccttgagacaagctgccaaggccgttagattccagggacagcaacaccaaccagagcaa

SEQ ID NO: 147697 - DNA, 421 bp, Arabidopsis thaliana
  unsure (1)..(421): unsure at all n locations
cttcgatctagccagtcaccagaatcgtgntgaccgcaacccaaggccattttacggagccggaaacaacccacaaggccacgtatggctacaaggccgagagcaacagccacagaagaacattttcaatggatttggacccgaggttattgctcaagctttgaagatcgatcttcagacagcgcagcaacttcagaaccaagatgacaaccgtggaaacattgtccgagtccaaggcccgttcggtgtcattaggccgtctttgaggggccagagacctcangaggaggaagaagaagaagaaggacgacatggacgacacggtaatggcttagaggagaccatctgcagcgccaggtgcaccgataacctcgatgacccgtctcgtgctgacgtgtacaagccacaagctcgttacatt

SEQ ID NO: 147698 - DNA, 473 bp, Arabidopsis thaliana
  unsure (1)..(473): unsure at all n locations
gaacggaagggggcggcccagcgcgctccgaagacaaatggttaagactcagcaantcttctcgtttttataccttcggggttctcactcgtggcttgagacggctgcacttgacgagggcagtcacattgggcgttccgtcctcaagctactagaacgacgtgtaacactcgacaaccctagatgttctccaagccaccgaaactatcaagagtgaagccggtcagatcgagtactgggaccacaaccaccctcagctccgatgtgttggtgtttccgttgctcgttatgtaattgaacaaggcggtctttacttgcccaccttcttcacttccccaaaaatttcctacgtcgttcaaggaacgggtatcagcggaagagtggtccctggatgtgccgagaccttcatggactcgcagccgatgcaaggacaacaacaaggccaaccatggcaaggacgacaggggacaaca

SEQ ID NO: 147699 - DNA, 416 bp, Arabidopsis thaliana
cacagagttaaattgagtttgtgtctcgtaacttatcctgtgagcgaaaatggtgaaagcgactaaggcagagaagaagatcgcctacgataccaagctatgtcagcttatcgatgagtacacccagatcttggtcgttgcggccgataacgtcggatcaactcagcttcagaacatcagaaagggtcttcgtggagactccgtcgtgcttatggggaagaacactatgatgaagcgttccgttaggattcactctgagaacaccggaaacactgcaatcctgaatctgcttcctctccttcagggaaacgttggtttgatctttaccaaaggtgacctcaaggaagtgagcgaggaggttgctaagtacaaggtcggtgcccctgctcgtgtgggtttggtggctccaattgatg

SEQ ID NO: 147700 - DNA, 423 bp, Arabidopsis thaliana
aaacatacacacatagcaaaaaatggcaaacaagttgttcctcgtctgcgcagctgtcgctctctgcttcctcctcaccaacgcttccatctaccgcaccgtcgttgagttcgaagaagatgacgccactaaccccataggcccaaaaatgaggaaatgccgcaaggagtttcagaaagaacaacacctaagagcttgccagcaattgatgctccagcaagcaaggcaaggccgtagcgatgagtttgatttcgaagacgacatggagaacccacagggacaacagcaggaacaacagctattccagcagtgctgcaacgagcttcgccaggaagagccagattgtgtttgccccaccttgaaacaagctgccaaggccgttagactccagggacagcaccaaccaatgcaagtcaggaaaat

SEQ ID NO: 147701 - DNA, 424 bp, Arabidopsis thaliana
catagctcaagcattgaaaattgacgttcagttggctcagcagcttcagaaccagcgagacagcagaggaaacatcgttcgtgttaagggacctttccaggtcgtgaggccacctctaagacagccctacgagagcgaggagtggagacacccacgtagcccacagggcaacggccttgaggagactatctgcagcatgaggtcccacgagaacattgacgaccctgctcgtgctgacgtgtacaagcccagcctaggtcgcgtgaccagcgtcaacagctataccttgcccatcttggagtatgtcaggctcagtgccactcgtggcgttctccagggtaatgcgatggtgcttcctaaatacaacatgaacgctaacgagatcttgtactgcactggaggacaaggaaggatccaagtggtt

SEQ ID NO: 147702 - DNA, 415 bp, Arabidopsis thaliana
cggacgcgtgggacaaggccaaccatgggaaggacagggacagcagggacaacaagggttccgtgacatgcaccagaaggtggaacatgtgagacgcggagacgtctttgccaacactccaggctctgcccactggatctacaactcaggagaacagccacttgtcatcatcgctcttctcgacatcgccaactaccaaaaccaactcgaccgcaaccctagagtgttccatttggccggaaacaaccagcagggaggctttggcggttcacagcaacaacaagaacagaaaaacttgtggagcgggttcgacgcacaggtcatagctcaagcattgaaaattgacgttcagttggctcagcagcttcagaaccaacaagacagcagaggaaacatcgttcgtgttaagggacct

SEQ ID NO: 147703 - DNA, 432 bp, Arabidopsis thaliana
gggcgacgccacgcgtccgccaccacgctcctcaactccgttgctcacgtgtttcctttgcacgttacatcatcgggtctgagggtctctacttgccctctttctttaacaccgcgaagctctctttcgtggctaagggacgaggtcttatgggaaaagtgatccctggatgcgccgaaacattccaagactcatcagagttccaaccacgcttcgaaggtcaaggtcaaagccagaggttccgtgacatgcaccagaaagtggagcacattaggagcggtgataccattgccacaacacccggtgtagcacagtggttctacaacgacggacaggaaccacttgtcatcgtcagcgtcctcgatctatccagtcaccagaaccagcttgaccgcaacccaaggccattttacttagccggaaacaacccac

SEQ ID NO: 147704 - DNA, 417 bp, Arabidopsis thaliana
aaaaaaaaaaaagtcttttattgcatatatttcgatcgtttttgttgtgtgtacagagagattatcgtgttttgttggcaatcgccattaaaccttcttccctctaacccaatcaaatttgcggctctttcttttatcttctcgcctcggttttagcaaaccctttagttatcttcttcctcaagcatttttcttttggattagattggtgttttcttttggtttgtgtggtgatgatgagaaggcaacgagatgaacaacaatctagggttttctacgatctatcatctcttgttttgaatcttctccgttctcctcctatgccgatttctttacctgatcattttcccgatcccgccgctagaattcgtactccctcttcttcgcatcgtttttcgccttcttcgccttcttttg

SEQ ID NO: 147705 - DNA, 421 bp, Arabidopsis thaliana
ctccactgtcttaaatttcactatcttcttcttcattttccttccttctcacttgaaatcgataatcgctctacttctctctctctctagattcgaaaaaatggcgaaactggtgatgttgttggttctctgtatcttaccggcgatagccatggcggcaaggaggggaaatattggaaagaatacaatggtggttcaaggtagcacctactgtgacatttgcaaattcggcttcgagactcctgaatcctcctacttcatccccggtgcaacggtgaagctatcatgcaaagacaggaagacaatggaagaggtttacacagacaaagctgtatcagacaaagaaggaaagtataagttcattgtccacgacgatcacagagaccagatgtgcgatgttttgcttgtgaaaagctcggat

SEQ ID NO: 147706 - DNA, 421 bp, Arabidopsis thaliana
cacatagcaaaaaatggcaaacaagttgttcctcgtctgcgcagctctcgctctcggcttcctcctcaccaacgcttccatctaccgcaccgtcgttgagttcgaagaagatgacgccactaaccccataggcccaaaaatgaggaaatgccgcaaggagtttcagaaagaacaacacctaagagcttgccagcaattgatgctccagcaagcaaggcaaggccgtagcgatgagtttgatttcgaagacgacatggagaacccacagggacaacagcaggaacaacagctattccagcagtgctgcaacgagcttcgccaggaagagccagattgtgtttgccccaccttgaaacaagctgccaaggccgttagactccagggacagcaccaaccaatgcaagtcaggaaaatttaccag

SEQ ID NO: 147707 - DNA, 419 bp, Arabidopsis thaliana
  unsure (1)..(419): unsure at all n locations
atcttcagacagcgcagcaacttcagaaccaagatgacaaccgtggaaacattgtgcgagtccaaggcccgttcggtgtcattaggccgcctttgaggggccagagacctcaggaggaggaagaagaagaagaaggacgacatggacgacacggtaatggcttagaggagaccatctgcagcgccaggtgcaccgataacctcgatgacccgtctcgtgctgacgtgtacaagccacagctcggttacatcagcactctcaacagttacgatctccccatccttcgcttcatccgtctctcagccctccgtggatctatccgtcaaaacgcaatggtgcttccacagtggaacgcaaacgcgaacgctattctttacgtgacagacggngaagcccaaatccagatcgtaaacgacaat

SEQ ID NO: 147708 - DNA, 419 bp, Arabidopsis thaliana
aaacaaaacacacccaaatatgcataagcttttgttttctcttctctccgtcgtcggactctcatttctcctcttcttccatggcgccgaggcacgccagcgagaggcgccgtttccaaacgcctgccatttcagccaaatcaacagcctcgcgcccgctcaggcgacgaagttcgaagccggtcagatggaagtatgggaccacatgagccctgagctccgatgcgccggtgtaacggtggctcgcatcacccttcagcccaattccattttcttgcccgctttctttagcccacctgcccttgcttacgttgtccaaggagaaggagttatggggacgattgcttctggttgtcctgagacttttgcagaagttgaaggatcatcaagaagaggaggaggaggagacccgggtcgac

SEQ ID NO: 147709 - DNA, 416 bp, Arabidopsis thaliana
attattaactcctgtgtcactgtccttcttttgactggattccttgcaactatctggatgcgagtcctcaagaacgatttcatgaagtatgctcaagatgaggaagctgctgatgatcaagaggaaactggatggaagtacattcatggcgatgtgtttcggttccctactcacaattctttatttgctgcatcgctcggtagtggcactcaattgttcacgctcaccatatttattttcatgcttgctcttgttggagtgttctacccatacaaccgaggagcactctttaccgctttggtggtcatttacgctctcacttctggaattgccggatacacatctgcctctttctactgtcaacttgaaggaaaaagctgggtgaggaagttgttacttactggatgtctcttctg

SEQ ID NO: 147710 - DNA, 420 bp, Arabidopsis thaliana
aaaatcttacaaaaccaaaacaaaatttaaattaaaaggttactttagctaaaatgtttaagcaaatcttaaaataattccggctactagctggcgcttcttgattaaaaccctaatggtgtggcagatgatgggaaatgaattgacgggagagtgaattacgggttgttttaagtgaatttaccaccagatcaccactgtaggtttaacatagatgtttaattacaagtttacaactatacatacaaccgatgaaactttttagactgtgtgaattcacctgattaaacaaaaaatattgattagacaaaggatatactattgtagaaacagccaaaaagtccttttcaaccacacttaaaatttccttttttggctatcaagatatacacgatatggtgtttctaccacggaaaaatt

SEQ ID NO: 147711 - DNA, 425 bp, Arabidopsis thaliana
  unsure (1)..(425): unsure at all n locations
ccctagttcccaacaaggtgacgatggcggcagcgagcttgaatgcatctggaaaaggatcgaagaaaccaaatgggttgaaggagtttctggaaagtctagaagctctgaaggcagatcttaaaaacttgagtaaggaggagctgcttgaactggaaaagcggctgaaaaatgtggctcgtaaggcgagggaagagctggagaggcgtatggagcagccctaatatgtctctgtttaccccttttaaaatgtcttaagggtcgttgaaatttagtcttaataatcgatttagtagctattgtcttaagggtcgttgaaaattagtcttaatatgtagtaaatgatcgatttagtacctaatgttttagctcctgtactgagagactcanggagttgttatgttgtatctttggatctatatatg

SEQ ID NO: 147712 - DNA, 410 bp, Arabidopsis thaliana
catcaacaaaacaacaagaaaaaatggcaataaccaacaaattaatcataacacttcttcgccttatctccatagctgtcgtccactgcttatccttccgtgtggagatcgacgagttcgagccaccacagcaaggagaacaagaaggtccccgtcgccgtcctggtggtggctctggcgagggatgggaggaagagtcgacgaatcatccataccacttcaggaagcggagtttcagtgattggttccagtcaaaggaaggttttgtgagagtgctgcctaagttcacaaaacatgcaccggctctcttccgaggaatcgagaactacagattctcgttggtggagatggagccaacaactttctttgtgcctcaccatttggatgccgatgctgtttttatagtccta

SEQ ID NO: 147713 - DNA, 351 bp, Arabidopsis thaliana
gaagcattttcgcttcaattcaataaaaggcgaaaaatctctcactgcactttatctcgagagctcagatctccgagctagagcctttcgcttctcctcttctgttcatataacaactgaataatgtcgatctccgcccaaaatccggatatttccggcgatagacaatccggccaagatgttcgtactcagaacgtgatggcttgtcaagctgtttctaatattgttaagacctcacttggtcccgtcggcctcgacaagatgttggtggatgatattggtgatgtgactattacacatgatggtgctactattcttaggatgttggaggtcgagcaccctgctgctaag

SEQ ID NO: 147714 - DNA, 278 bp, Arabidopsis thaliana
gttcggtgtcctctctctctttcactactcaccaccactctctctctctctccctgcatcggtcttggattctctctcagattccatggaagctccaaaaagctgattcgttcagccaatttttcttcactctctctcagattcggatccgtggtcagatcaaccaccgtgtgttttccgatccgattcgattctttttgtcagaaaaaatactaggattccggttccaccacaaaaccttgatttgaattggaattaattcttcttctttctctctt

SEQ ID NO: 147715 - DNA, 420 bp, Arabidopsis thaliana
gagaccatctgcagcgccaggtgcaccgataacctcgatgatccgtctcgtgctgacgtggacaagccacagctcggttacatcagcactctcaacagttacgatctccccatccttcgcttcatccgtctctcagccctccgtggatctatccgtcaaaacgcaatggtgcttccacagtggaacgcaaacgcgaacgccattctttacgtgacagacggggaagcccaaatccagatcgtaaacgacaatggtaacagagtgtttgacggacaagtctctcaaggacagctcatagccgtaccacaaggtttctcggtggtgaaacgcgcaacaagcaaccgattccagtgggttgagttcaaaacaaacgcaaacgcgcaaatcaacactcttgcgggacgaacctcagtcttgaga

SEQ ID NO: 147716 - DNA, 416 bp, Arabidopsis thaliana
agctgttacttgaccaccaagaaagctaaatgttcttgttcttagaaaccctaaaattcttgcttcttcaggagttgctagaggaacagggtggcaacatataggagcttatgcaaacataggatcgtattatctagtcgggatcccggtaggttcaatcttgtgttttgtagtgaaattgagagggaaaggactttggatcggtatattggtaggttccactctacaaacgattgttcttgctcttgtcactttcttcaccaattgggaacaagaggtatatatacctttgccttttttatattgtatttttcctcttctgttttgctagagttttgaatcttgttctgatttgggttttaggtagcgaaagctagagacagagtaatcgagatgataccacaagaaatcatatg

SEQ ID NO: 147717 - DNA, 399 bp, Arabidopsis thaliana
ggtcaaagccagaggttccgtgacatgcaccagaaagtggagcacattaggagcggggataccattgccacaacacccggtgtagcccagtggttctacaacgacggacagcaaccacttgtcatcgtcagcatcttcgatctagccagtcaccagaaccagcttgaccgcaacccaaggccattttacttagccggaaacaacccacaaggtcaagtatggctacaaggacgagagcaacagccacagaagaacatcttcaatggatttggacccgaggttattgctcaagctttgaagattgatcttcagacagcgcagcaacttcagaaccaagatgacaaccgtggaaacattgtccgagtccaaagcccgttcggtgtcattaggccgcctttg

SEQ ID NO: 147718 - DNA, 388 bp, Arabidopsis thaliana
accaaaataaaatatagatttggcgtttctaataaatgatataaaaaatcgaccggtgtcccttatttcacaacatcggtttcttgacctattattattgattacgtgatagagcgagaggcatattttggagatacacatatacacataaattggaagaataaaatcaaagagagtgagagatggctaaatcacatatgttgccgatattggcaatggggttgcagcaaatagggtacccaggcatgaacattatgttgaatatggctatgcacgccggtatgaagccacttatgctgatcgattatcgtacgatatttgccactatcgacacttttgacggcggatgaaatattgaacgggagacaagaccgataatcacaattag

SEQ ID NO: 147719 - DNA, 425 bp, Arabidopsis thaliana
aaaacatacacacatagcaaaaaatggcaaacaagttgttcctcgtctgcgcagctctcgcgctctgcttcctcctcaccaacgcttccatctaccgcaccgtcgttgagttcgaagaagatgacgccactaaccccataggcccaaaaatgaggaaatgccgcaaggagtttcagaaagaacaacacctaagagcttgccagcaattgatgctccagcaagcaaggcaaggccgtagcgatgagtttgatttcgaagacgacatggagaacccacagggacaacagcaggaacaacagctattccagcagtgctgcaacgagcttcgccaggaagagccagattgtgtttgccccaccttgaaacaagctgccaaggccgttagactccagggacagcaccaaccaatgcaagtcaggaaaatt

SEQ ID NO: 147720 - DNA, 376 bp, Arabidopsis thaliana
ggagttatggggactattgcttctgtttgtcctgagacttttgcaaaaggggagggatcatcaggaagaggaggaggaggaaacccgactcgacattttgaggacatgcaccacaagttggagaatttccggcgaggggatgtgtttgcttctcttgccggagtttcacagtggtggtacaaccgcggtgattaccatgccgtcattgtcattgttcttgatgtcaccaacagagaaaaccagcttgaccaagtccctacgatgttccaactagccgagagcagaacgcaagaagaaaaacaaccattaacgtggccattaagcaacaacgacttcagcggtttctacccaaacataatctcggaagcatttaaaa

SEQ ID NO: 147721 - DNA, 364 bp, Arabidopsis thaliana
caaatagcaaaacatggctaacaagctcttcctcgtctgcgcaactctcgccctcggcttcctcctcaccaacgcttccatctaccgcaccgttgtcgaattcgaagaagatgacgccagcaaccccgtaggtccaagacagagatgccagaaggagtttcagcaatcacaacacctaagagcttgccagagatggatgagcaagcaaatgaggcaaggacgtggtggtggtccttccctcgacgatgagttcgatttcgagggcccccagcagggataccagctactccagcagtgctgcaacgagcttcgccaggaagagccagtttgcgtttgccccaccttgaaacaagctgccagggca

SEQ ID NO: 147722 - DNA, 358 bp, Arabidopsis thaliana
aagaatacaaatacaaatagcaaaaaaaatggcaaacaagctcttcctcgtctgcgcaactttcgccctctgcttcctcctcaccaacgcttccatctaccgcactgttgtcgagttcgacgaagatgacgccagcaaccccatgggcccaagacagaaatgtcagaaggagtttcagcaatcacagcacctaagagcttgccagaaattgatgcgcatgcaaatgaggcaaggccgtggtggtggtccctccctcgacgatgagttcgatttggaagacgacatcgagaacccacaaggcccccagcagggacaccagatcctccagcagtgctgcagcgagcttcgccaggaagag

SEQ ID NO: 147723 - DNA, 428 bp, Arabidopsis thaliana
  unsure (1)..(428): unsure at all n locations
caaaaaatggcaaacaagttgttcctcgtctgcgcagctctcgctctctgcttcctggctgcgcaacgcttccatctaccgcaccgtcgttgagttcgaagaagatgacgccactaaccccataggcccaaaaatgaggaaatgccgcaaggagtttcagaaagaacaacacctaagagcttgccagcaattgatgctccagcaagcaaggcaaggccgtagcgatgagtttgatttcgaagacgacatggagaacccacagggacaacagcaggaacaacagctattccagcagtgctgcaacgagcttcgccaggaagagccagattgtgtttgccccaccttgaaacaagctgccaaggccgttagactccanggacagcaccaaccaatgcaagtcaggaaaatttaccagacagccaagcact

SEQ ID NO: 147724 - DNA, 393 bp, Arabidopsis thaliana
caaaaagaaaatggttaagctcagcaatctcctcgttgcaaccttcggggttctccgtgcggcttaacggctgccttgcgaggcagtcacttggggttcctcctcagctacagaacgagtgtaacctcgacaacctagatgttctccaagccaccgaaactatcaagagtgaagccggtcagatcgagtactgggaccacaaccaccctcagctgcgatgtgttggtgtttccgttgctcgatatgtaattgaacaaggcgggctttacttgcccaccttctttacttccccaaaaatgtactacgtcgttcaaggaacgggtatcagcggaagagtggtccctggatgtgccgagaccttcatggacttcgcagcgatgcacggacaacaac

SEQ ID NO: 147725 - DNA, 419 bp, Arabidopsis thaliana
  unsure (1)..(419): unsure at all n locations
gaaaatggttaagctcagcaatctcctcgttgcaaccttcggggttctcctcgtcgttaacggctgccttgcgaggcagtcacttggggttcctcctcagctacagaacgagtgtaacctcgacaacctagatgttctccaagccaccgaaactatcaagagtgaagccggtcagatcgagtactgggaccacaaccaccctcagctccgatgtgttggtgtttccgttgctcgttatgtaattgaacaaggcgggctttacttgcccaccttcttcacttccccaaaaatttcctacgtcgttcaaggaacgggtatcagcggaagagtggtccctggatgtgccgagaccttcatggactcgcaancgatgcaaggacaacaacanggccaaccatggcagggacgacagggacaac

SEQ ID NO: 147726 - DNA, 427 bp, Arabidopsis thaliana
ggggtccgcttagacttatatctatatacccccttttaatttgtgtgctcttagcctttactctatatgtttatatcatatcaatcgacatggcgaatgtggaccgtgatcggcgtgtgcatgtagaccgtactgacaaacgtgttcatcagccaaactacgaagatgatgtcggttttggtggctatggcggttatggtgctggttctgattataagagtcgcggcccctccactaaccaaatcttggcacttatagcaggagttcccattggtggcacactgctaaccctagctggactcactctagccggttcggtgatcggcttgctagtctccatacccctcttactcctcttcagtccggtgataggcccggcggctcttactattgagcttgctgtgacgggaatcttggcttctggttt

SEQ ID NO: 147727 - DNA, 417 bp, Arabidopsis thaliana
agcactctcaacagttacgatctccccatccttcgcttcatccgtctctcagccgtgcgtggatctatccgtcaaaacgcaatggtgcttccacagtggaacgcaaacgcgaacgctattctttacgtgacagacggggaagcccaaatccagatcgtaaacgacaatggtaacagagtgtttgacggacaagtctctcaaggacagctcatagccgtaccacaaggtttctcggtggtgaaacgcgcaacaagcaaccgattccagtgggttgagttcaaaacaaacgctaacgcgcaaatcaacactctggcgggacgaacctcagtcttgagaggtttaccacttgaagtcataaccaatgggttccaaatctcacccgaagaagcaaggagggtcaagttcaacacgctcgag

SEQ ID NO: 147728 - DNA, 412 bp, Arabidopsis thaliana
gttcgacgcacaggtcatagcttaagcattgaaaattgacgttcagttggggcaggggcttcagaaccaacaagacagcaaatgaaacatcgttcgtgttaagggacctttccaggtcgtgaggccacctctaagacagccctacgagagcgaggagtggagacacccacgtagcccacagggcaacggccttgaggagactatctgcagcatgaggtcccacgagaacattgacgaccctgctcgtgctgacgtgtacaagcccagcctaggtcgcgtgaccagcgtcaacagctataccttgcccatcttggagtatgtcaagctcagtgccactcgtggcgttctgcaaggtaatgcgatggtgctttctaaatacaacatgaacgctgacgagatcttgtactgcact

SEQ ID NO: 147729 - DNA, 416 bp, Arabidopsis thaliana
gtgctcttagcctttactctatagttttatatcatatcaatcgacatggcgaatgtggaccgtgatcggcgtgtgcatgtagaccgtactgacaaacgtgttcatcagccaaactacgaagatgatgtcggttttggtggctatggcggttatggtgctggttctgattataagagtcgcggcccctccactaaccaaatcttggcacttatagcaggagttcccattggtggcacactgctaaccctagctggactcactctagccggttcggtgatcggcttgctagtctccatacccctcttcctcctcttcagtccggtgatagtcccggcggctctcactattgggcttgctgtgacgggaatcttggcttctggtttgtttgggttgacgggtctgagctcggtctcgtg

SEQ ID NO: 147730 - DNA, 348 bp, Arabidopsis thaliana
aagaaaatggttaagctcagcaatctcctcgttgcaaccttcggggttctcctcgtccttaacggctgccttgcgaggcagtcacttggggttcctcctcagctacagaacgagtgtaacctcgacaacctagatgttctccaagccaccgaaactatcaagagtgaagccggtcagatcgagtactgtgaccacaaccaccctcagctccgatgtgttggtgtttccgttgctcgttatgtaattgaacaaggcggtctttacttgcccacctttttcacttacccaaaaattttctacgtcgttcaaggaacgggtattcatcggaagagtgtttcctggattttg

SEQ ID NO: 147731 - DNA, 400 bp, Arabidopsis thaliana
  unsure (1)..(400): unsure at all n locations
aatgggtcgagtctcatctattatctctttctctttgacactcttgatcctcttcaatggctacactgcccaacagtggcccaacgagtgccagctcgatcaactcaatgcgctcgaaccatcccaaatcatcaagagcgagggtggtcgcatcgaggtctgggaccaccatgcaccccagctccgttgctccggctttgcctttgagcgtttcgtcattgagcctcagggtcttttcttgcccactttcttgaacgccggcaaactcacgtttgttgttcacggaaggtgtctaatgggaagagttattccgggatgcgccgagacgttcatggagtcaccggtatttggagaaggtcaaggtcagggtcagagtcaaggnttccgtgacatgcaccag

SEQ ID NO: 147732 - DNA, 521 bp, Arabidopsis thaliana
  unsure (1)..(521): unsure at all n locations
agaaaacatacacaaatagcaaaacatggctaacaagctcttcctcgtctgcgcaactctcgccctctgcttcctgctcaccaacgcttccatctaccgcaccgttgtcgaattcgaagaagatgacgccagcaaccccgtaggtccaagacagagatgccagaaggagtttcagcaatcacaacacctaagagcttgccagagatggatgagcaagcaaatgaggcaaggacgtggtggtggtccttccctcgacgatgagttcgatttcgagggcccccagcagggataccagctactccagcagtgctgcaacgagcttcgccaggaagagccagtttgcgtttgccccaccttgaaacaagctgccagggcagttagcctccagggacagcacggaccattccaatccaggaaaatttaccagtcagctaagtacttgcctaacatttgcaagatccagcaggttggtgaatgtcccttccagaccaccatccctntcttnccttcttactactaga

SEQ ID NO: 147733 - DNA, 478 bp, Arabidopsis thaliana
ctaccgcaatggaacgtaaacgcaaacgcggcactctacgtgacaaacggaaaggctcatatacaaatggtgaacgacaacggagaaagagtgttcgaccaagagatctccagcggacagttactagtcgtgccacaaggcttttcggtcatgaaacatgccataggcgaacagttcgagtggatcgaattcaagacaaacgaaaacgcacaggtcaacacactcgcgggccgtacctcagtcatgagaggtttgccgcttgaggttataaccaatgggtaccagatctctcccgaagaagctaaacgagtaaagtttagcacgattgagaccacactgacccatagcagtccaatgagctacggaaggcctagggcttgaggcttgatgagcgcgtggtggaatagcgtttgaatctaaagttcggtttggtacgacttgtaatatgaaataataatgtacaaagaagttctacgct

SEQ ID NO: 147734 - DNA, 506 bp, Arabidopsis thaliana
  unsure (1)..(506): unsure at all n locations
cggncgaacaaaaagaaaatggttaagctcagcaatctcctcgttgcaaccttcggggttcttctcgtccttaacggctggcgttgcgaggcagacacttggggttcctcctcagctacagaacgagtgtaacctcgacaacctagatgttctccaagccaccgaaactatcaagagtgaagccggtcagatcgagtactgggaccacaaccaccctcagctccgatgtgttggtgtttccgttgctcgttatgtaattgaacaaggcggtctttacttgcccaccttcttcacttccccaaaaatttcctacgtcgttcaaggaacgggtatcagcggaagagtggtccctggatgtgccgagaccttcatggactcgcagccgatgcaaggacaacaacaaggccaaccatggtaaggacgacagggacaacaaggccaaccatgggaaggacagggacaacagggacaacaaggaagacaaggtcaaccattggaaggacagg

SEQ ID NO: 147735 - DNA, 462 bp, Arabidopsis thaliana
gaagacccacgcgtccggtcatagctcaagcattgacctgtgcgtcgaacccgctccacaagtttttgtgctatcagggctgctgagaaccggcaaagcgtgcctagggatcgtttccggccaaatggaacactctaggaatgcggtcgagagcgaggagggaggacacgaacttaacaaaaacgataacgacatggaggagactatctgcagcatgaagtcccacgagaacattgacgaccctgctcgtgctgacgtgtacaagcccagcctaggtcgcgtgaccagcgtcaacagctataccttgcccatcttggagcatgtcatgctcagtgccactcgtggcgttctccagggtaatgcgatggtgctttctaaatacaacatgaacgctaacgagagcttgtactggactggaggacacggaaggatccaagtggtcaatgacaactgacagaacgt

SEQ ID NO: 147736 - DNA, 473 bp, Arabidopsis thaliana
tcgcagaaaatggttaagctcagcaatctcctcgttgcaaccttcggggttctcctcgtccttaacggctgccttgcgaggcagtcacttggggttcctcctcagctacagaacgagtgtaacctcgacaacctagatgttctccaagccaccgaaactatcaagagtgaagccggtcagatcgagtactgggaccacaaccaccctcagctccgatgtgttggtgtttccgttgctcgttatgtaattgaacaaggcggtctttacttgcccaccttcttcacttccccaaaaatttcctacgtcgttcaaggaacgggtatcagcggaagagtggtccctggatgtgccgagaccttcatggactcgcagccgatgcaaggacaacaacaaggccaaccatggcaaggacgacagggacaacaaggccaaccatgggaaggacagggacaacagggacaacaaggaagaca

SEQ ID NO: 147737 - DNA, 487 bp, Arabidopsis thaliana
aagaggaagaaaaatgggtcgagtctcatctattatctctttctctttgacactcttgatcctcttcaatggctatactgcccaacagtggcccaacgagtgccagctcgatcaactcaatgcgctcgaaccatcccaaatcatcaagagcgagggtggtcgcatcgaggtctgggaccaccatgcaccccagctccgttgctccggctttgcctttgagcgtttcgtcattgagcctcagggtcttttcttgcccactttcttgaacgccggcaaactcacgtttgttgttcacggaaggggtctaatgggaagagttattccgggatgcgccgagacgttcatggagtcaccggtatttggagaaggtcaaggtcagggtcagagtcaagggttccgtgacatgcaccagaaagtagagcacctacggtgcggtgacaccattgcaacaccatctggtgtgcttaatggtctacaacaatggaat

SEQ ID NO: 147738 - DNA, 391 bp, Arabidopsis thaliana
caaatagcaaaacatggctaacaagctcttcctcgtctgcgcaactctcgccctctgcttcctcctgaccaacgcttccatctaccgcaccgttgtcgaattcgaagaagatgacgccagcaaccccgtaggtccaagacagagatgccagaaggagtttcagcaatcacaacacctaagagcttgccagagatggatgagcaagcaaatgaggcaaggacgtggtggtggtccttccctcgacgatgagttcgatttcgagggcccccagcagggataccagctactccagcagtgctgcaacgagcttcgccaggaagagccagtttgcgtttgccccaccttgaaacaagctgccagggcagttagccttcagggacagcacggacca

SEQ ID NO: 147739 - DNA, 497 bp, Arabidopsis thaliana
catgcattaaacttgctgatagcgggtccgttactttggttgataggatcgattcacaactcatgccaaatctacgagagagcggatagtcatgttcaaattctacagcagtgtgtttacattcctttcttggttggatcccttctattcttggtttccgcagttctcaatagcctcgacatatccgggtcatctcgtagtggattgaagcttcttggggaaagatggatttggcttgggatttccggggctatatgtttgtttgtgggaggattgctgaacgttgttaaggtttttaacttcgtccagatctctgggctccgcctcgagaaactacggggtggagctcaagaccgacttcttgaagggagagaaggatatctccctcttgttgctgaagaagaaagaataaggaaaatggaagctgatcacgaagcttctagtagagccaaaccccgtgcacacacaacctccaaaagccggagagggagctacag

SEQ ID NO: 147740 - DNA, 212 bp, Arabidopsis thaliana
agcaacttcagaaccaagatgacaaccgtggaaacattgtccgagtccaaggcccgttcggtgtcattaggccggctttgaggggccagagacctcaggaggaggaagaagaagaagaaggacgacatggacgacacggtaatggcttagaggagaccatctgcagcgccaggtgcaccgataacctcgatgacccgtctcgtgctgacgtg

SEQ ID NO: 147741 - DNA, 548 bp, Arabidopsis thaliana
ttcaaagctgtatttgaaagggtatatatctcacacacaaaacagatcagaagctaaaaggtaataatataatggcggatttgagggacgaaaaaggtaatccgatccatctaactgacacacagggaaacccaattgtcgacctgactgatgagcacggtaaccccatgtacctaaccggtgttgttagctccactcctcagcataaggagagtactaccagcgacattgcagagcaccctactagcaccgttggagaaacacatccggcagctgctccagctggtgctggtgctgccaccgctgccactgcgacaggagtctctgctggtactggagcaaccaccacagggcagcaacaccatgggtcgcttgaagagcatcttcgtcggtcctgaagttcatctagctctagctcggaggatgatgggcaaggaggggagaagaagagagcataaaggagaaaattaaggagatgtcggtagcggcaaacacaaggacgaacaaacaccagcgaccgtcacaacaacaggacctgccactaccga

SEQ ID NO: 147742 - DNA, 439 bp, Arabidopsis thaliana
caagaaaaaatggcaataaccaacaaattaatcataacacttcttctccttatctccatagctgtcgtccactgcttatccttccgtgtggagatcgacgagttcgagccaccacagcaaggagaacaagaaggtccccgtcgccgtcctggtggtggctctggcgagggatgggaggaagagtcgacgaatcatccataccacttcaggaagcggagtttcagtgattggttccagtcaaaggaaggttttgtgagagtgctgcctaagttcacaaaacatgcaccggctctcttccgaggaatcgagaactacagattctcgttggtggagatggagccaacaactttctttgtgcctcaccatttggatgccgatgctgtttttatagtcctacaaggtaaaggagtgatcgagtttgtgacggataaaacaaaag

SEQ ID NO: 147743 - DNA, 523 bp, Arabidopsis thaliana
  unsure (1)..(523): unsure at all n locations
gccggaagaatacaaatacaaatagcaaaaaaaatggcaaacaagctctttctcgtctgcgcaactttcgccctctggggcctcctcaccaacgcttccatctaccgcactgttgtcgagttcgacgaagatgacgccagcaaccccatgggcccaagacagaaatgtcagaaggagtttcagcaatcacagcacctaagagcttgccagaaattgatgcgcatgcaaatgaggcaaggccgtggtggtggtccctccctcgacgatgagttcgatttggaagacgacatcgagaacccacaaggcccccagcagggacaccagatcctccagcagtgctgcagcgagcttcgccaggaagagccagtttgtgtttgccccaccttgagacaagctgccagggccgttagcctncagggacaacacggaccattccaattcaggaaaatttacaagacagcttagtacttgcctaacatttgcaagatccaagcagttggtgaatgcccctttcagaccacca

SEQ ID NO: 147744 - DNA, 517 bp, Arabidopsis thaliana
caactaccaaaaccaactcgaccgcaaccctagagtgttccatttggccggaaacaaccagcagggaggctttggcggttcacagcaacaacaagaacagaaaaacttgtggagcgggttcgacgcacaggtcatagctcaagcattgaaaattgacgttcagttggctcagcagcttcagaaccaacaagacagcagaggaaacatcgttcgtgttaagggacctttccaggtcgtgaggccacctctaagacagccctacgagagcgaggagtggagacacccacgtagcccacagggcaacggccttgaggagactatctgcagcatgaggtcccacgagaacattgacgaccctgctcgtgctgacgtgtacaagcccagcctaggtcgcgtgaccagcgtcaacagctataccttgcccatcttggagtatgtcaggctcagtgccactcgtggcgttctccagggtaatgcgatggtgcttcctaaatacaacatgaacgcttacgagatc

SEQ ID NO: 147745 - DNA, 548 bp, Arabidopsis thaliana
ccgggaagacccacgcggacgaagaaaatggttaagctcagcaatctcctcgttgcaaccttcggggttctcctcgtccttaacggctgccttgcgaggcagtgacttggggttcctcctcagctacagaacgagtgtaacctcgacaacctagatgttctccaagccaccgaaactatcaagagtgaagccggtcagatcgagtactgggaccacaaccaccctcagctccgatgtgttggtgtttccgttgctcgttatgtaattgaacaaggcggtctttacttgcccaccttcttcactttcccaaaaatttcctacgtcgttcaaggaacgggtatcagcggaagagtggtccctggatgtgccgagaccttcatggactcgcagccgatgcaaggacaacaacaaggccaaccatggcaaggacgacagggacaacaaggccaaccatgggaaggacagggacaacagggacaacaaggaagactaggccaaccatggtgaggacagggacaacagggacaacaaggacgacagggacaaca

SEQ ID NO: 147746 - DNA, 522 bp, Arabidopsis thaliana
aagaaataacaaaatggctcgagtctcttctcttctttctttcttcttaacacttttgatccttttccatggctacgcggctcaacagggtcagcagggtcagcagtttccgaacgagtgccagctcgaccagctcaatgcgctcgagccgtcacacgtactgaagagcgaggctggtcgcatcgaggtgtgggaccaccacgctcctcagctccgttgctcaggtgtctcctttgcacgttacatcatcgagtctaagggtctctacttgccctctttctttaacaccgcgaagctctctttcgtggctaagggacgaggtcttatgggaaaagtgatccctggatgcgccgaaacattccaagactcatcagagttccaaccacgcttcgaaggtcaaggtcaaagccagagtgtccgtgacatgcaccagaaagtggagcacattagtgagcggtgataccattgccacaacacaccggtgtagcaacagtggttctacaacgacggacaggaaccact

SEQ ID NO: 147747 - DNA, 337 bp, Arabidopsis thaliana
aagggccagcaggaccaccaggggttccgggccatgcaccagagggtggaccatgtgagacgcggagacgtctttgccaacactccaggctctgcccactggatctacaactcaggagaacagccacttgtcatcatcgttcttttggacatggccaactaccaaaaccaactcgaccgcaaccttagagtgttccatttggccggaaacaaccagcagggaggctttggcggtcacagcatcaataagaacagaaaaacttgtggagcgggttcgacgcacaggtcatagctcaagcattgaaaatgacgtcagttggctcacagcttagaaccac

SEQ ID NO: 147748 - DNA, 508 bp, Arabidopsis thaliana
ctcagcaatctcctcgttgcaaccttcggggttctcctcgtccttaacggctgccttgcgaggcagtcacttggggttcctcctcagctacagaacgagtgtaacctcgacaacctagatgttctccaagccaccgaaactatcaagagtgaagccggtcagatcgagtactgggaccacaaccaccctcagctccgatgtgttggtgtttccgttgctcgttatgtaattgaacaaggcggtctttacttgcccaccttcttcacttccccaaaaatttcctacgtcgttcaaggaacgggtatcagcggaagagtggtccctggatgtgccgagaccttcatggactcgcagccgatgcaaggacaacaacaaggccaaccatggcaaggacgacagggacaacaaggccaaccatgggaaggacagggacaacagggacaacaaggaagacaaggccaaccatgggaaggcagggacacagggacaacaggacgacgggacaaca

SEQ ID NO: 147749 - DNA, 320 bp, Arabidopsis thaliana
cggacgcgtgggcggacgcgtgggcggacgcgtggggttataaccaatgggttccaaatctcacctgaagaagcaaggagggtcaagttcaacacgctcgagaccactttgactcacagcagtggcccagctagctacggaaggccaagggtggctgcagcttaagagcttaaaaccgcggctcaacaatgaacctctagtactgtaaaaggaagttaaatagtacgaagtaataataataatgtacgaacatgtgacaagttttgttgaggtttacctgtaaaatgccactccttttctgaataaatcttttttcgatc

SEQ ID NO: 147750 - DNA, 393 bp, Arabidopsis thaliana
  unsure (1)..(393): unsure at all n locations
gtcccacggaaacaagttcgagtggatctctttcaaaactaatgaaaacgcaatgatcagcactttggcgggtagagacctcgctcttgagggcattgccattggaggtcatatcaaatggtttccagatctctcccgaggaagctaggaagatcaagttcaacacacttgagaccactttgacccgcgctgccggtaggcaacaacaacagttgatcgaggagattgtcgaggcttaaatcaaaacgtttttctttttcttaataaagtatggtcagtttgtaatcacgtccctttacctttaacgtacgtgtaaaatatgtgtctgcggcacctcacttgtaataacactttcttctcataaataaaaaggaagtttcgagtttnnaaaaa

SEQ ID NO: 147751 - DNA, 527 bp, Arabidopsis thaliana
cggacgcgtgggcggacgcgtgggctcgaccgcaaccctagagtgttccatttggccggaaacaaccagcagggaggctttggcggttcacagcaacaacaagaacagaaaaacttgtggagcgggttcgacgcacaggtcatagctcaagcattgaaaattgacgttcagttggctcagcagcttcagaaccaacaagacagcagaggaaacatcgttcgtgttaagggacctttccaggtcgtgaggccacctctaagacagccctacgagagcgaggagtggagacacccacgtagcccacagggcaacggccttgaggagactatctgcagcatgaggtcccacgagaacattgacgaccctgctcgtgctgacgtgtacaagcccagcctaagtcgcgtgaccagcgtcaacagctataccttgcccatcttggagtatgtcaggctcagtgccactcgtggcgttcttcagggtaatgcgatggtgctttctaaatacaacatgaacgctaacgagatctt

SEQ ID NO: 147752 - DNA, 542 bp, Arabidopsis thaliana
caccaactctttataccagcctctgtaacgttcgatcatcttgtatttcatttcaaccactcattgtttttagtttgttttacgaagaatcaactatggcgacgaagagaagcgttggaactttgaaggaagcggatctgaagggaaagagtgtgttcgtgagggttgatctcaacgttcctttggatgataactctaacatcaccgatgacaccaggattcgtgccgctgttcccaccatcaagtacttgatgggtaatggatctagggttgttctctgcagtcacttgggccgcccaaaaggtgttactcctaagtacagcttaaagcctcttgtgcccagattgtctgaacttcttggtgttgaggttgtaatggcaaatgactctattggtgtagaagtccagaagttggttgcaggactacctgaaggggggttttgctcttggagaatgtgaggttctacgccgaggaagagaagaatgatcctgaatttgcaaagaagcttggtgctcttgccgatgttacgttaatgattgcct

SEQ ID NO: 147753 - DNA, 549 bp, Arabidopsis thaliana
aaaaacttctctctgaatctcagtgagttctcataaaatgagagggatggtgagttttgccgtttgggctctctgtgctgctttactctcacagcagctctttgcttctgttgcttccgtaaggtttgaggatgccaaaacatactacttatctcctccctctggctcacatggaactccttcatcacacacgcctacttcttctaactgtggaagtccaccttacgacccttctccttcaactccttctcacccttcacctccatcacatactccaacttcttccactccatcacacacttcaactccacacactccatcacacactccaacttcacacaccccttcttgtaactgtggaagtccaccttcccacccttctcacgtccttacaccctttcactttttcgtacccaacgccatcacacccttccttctgtgggatattacttatctcctacaccaagaactcctgctgttgtgacttcaccatcactcattgctgatcaagcacacccatcattgtaggaagcccactcactcctatca

SEQ ID NO: 147754 - DNA, 513 bp, Arabidopsis thaliana
cacactctctctctctggcttgctgtttactctcatcgtctcctttacttcattcgtcttcttcctctctttcccacaagctcccattgatatagagagagagatttaaggaaggaatcatggcagggggtggagctccagcacccaaagcagacgaaccacaaccacatcctcctaaagatcaacttcccaacatttcttattgcatcaccagtcctcctccttggcctgaagctattcttcttggattccaacattaccttgtgatgcttgggacaacggtgctcatacctactgctcttgttccccagatgggaggtggatatgaagagaaggcaaaggtgatccagactattctctttgttgctggcatcaacacattgctccaaacactgttcggtactagattgcctgctgttgttggagctttctacacattcgtgccaacaacgatatccataatcctttttggcagattcagtgatacctctaaccctatagatcgctttgaga

SEQ ID NO: 147755 - DNA, 305 bp, Arabidopsis thaliana
cgagtgtaacctctacaacctagatgttctccaagccatttaaactatcaagagtgaagccggtcagggggagtgctgggaccacaaccaccctcagctccgatgtgttggtgtttccgttgctcgttatgtaattgaacaaggcggtctttacttgcccaccttcttcacttccccaaaaatttcctacgtcgttcaaggaacgggtatcagcggaagagtggtccctggatgtgcctagaccttcatggactctcagcctatgcaaggacaacaacatggccaaccatggcatggactacagg

SEQ ID NO: 147756 - DNA, 528 bp, Arabidopsis thaliana
gggacaacaaggccaaccatgggaaggacagggacagcagggacaacaagggttccgtgacatgcaccagaaggtggaacatgtgagacgcggagacgtctttgccaacactccaggctctgcccactggatctacaactcaggagaacagccacttgtcatcatcgctcttctcgacatcgccaactaccaaaaccaactcgaccgcaaccctagagtgttccatttggccggaaacaaccagcagggaggctttggcggttcacagcaacaacaagaacagaaaaacttgtggagcgggttcgacgcacaggtcatagctcaagcattgaaaattgacgttcagttggctcagcagcttcagaaccaacaagacagcagaggaaacatcgttcgtgttaagggacctttccaggtcgtgaggccacctctaagacagccctacgagagcgaggagtggagacacccacgtagcccacagggcaacggccttgaggagactatctgcagcatgaggtcccacgagaa

SEQ ID NO: 147757 - DNA, 523 bp, Arabidopsis thaliana
aacaaaaagaaaatggttaagctcagcaatctcctcgttgcaaccttcggggttctcctcgtccttaacggctgccttgcgaggcagtcacttggggttcctcctcagctacagaacgagtgtaacctcgacaacctagatgttctccaagccaccgaaactatcaagagtgaagccggtcagatcgagtactgggaccacaaccaccctcagctccgatgtgttggtgtttccgttgctcgttatgtaattgaacaaggcggtctttacttgcccaccttcttcacttccccaaaaatttcctacgtcgttcaaggaacgggtatcagcggaagagtggtccctggatgtgccgagaccttcatggactcgcagccgatgcaaggacaacaacaaggccaaccatggcaaggacgacagggacaacaaggccaaccatgggaaggacagggacaacagggacaacatggaagacaaggccaaccatgggaaagacagggacaacatggacaacatggacgac

SEQ ID NO: 147758 - DNA, 281 bp, Arabidopsis thaliana
accacgcgtccgaaatttaactgagcgctaccatttttggccaggagactctctctctctctcttctctctttctctcccccggtctccggcgatggttgttgctatggaccaacgcaccaatgtgaacggagatcccggcgccggagaccggaagaaagaagaaaggtttgatccgagtgcacaaccaccgttcaagatcggagatataagggcggcgattcctaagcactgttgggttaagagtcctttgagatcaatgagttacgtcgtcagagacat

SEQ ID NO: 147759 - DNA, 538 bp, Arabidopsis thaliana
  unsure (1)..(538): unsure at all n locations
gtgacatgcaccagaaagtagagcacctacggtgcggtgacaccattgcaacaccatctggtgtagctcaatggtggtacaacagtggaaatgagcctctcattcttgttgcagccgcggatctcgccagcaaccagaaccagcttgaccgcaaccttagaccatttttgatagccggaaacaacccacaagggcaggaatggctacaaggccgaaagcaacagaagcaaaacaacatcttcaatggcttcgcacctgagatcttggctcaagccttcaagatcaatgtcgagacggctcagcagctccagaaccagcaagataaccgtggcaacatcgtcaaggtcaacggacctttcggcgtcattaggccacccttgagacgcggcgaaggcggccaacaaccacatgaaatagctaatggtttagaggagactttgtgcaccatgcgatgcactgaaaacntcgatgacccgtcggatgctgacgtgtacaagccatcactcggatacattagcacacttaacagctacaatct

SEQ ID NO: 147760 - DNA, 453 bp, Arabidopsis thaliana
aacaaacaaaaagaaaatggttaagctcagcaatctcctcgttgcaaccttcggggttctcctcgtccttaacgggtgccttgcgaggcagtcacttggggttcctcctcagctacagaacgagtgtaacctcgacaacctagatgttctccaagccaccgaaactatcaagagtgaagccggtcagatcgagtactgggaccacaaccaccctcagctccgatgtgttggtgtttccgttgctcgttatgtaattgaacaaggcggtctttacttgcccaccttcttcactttcccaaaaattttctacgtcgttcaaggaacgggtatcatcggaagagtggtccctggatgtgccgagaccttcatggactctcagccgatgcaaggacaactacaaggccaaccatggcaaggacgacagggacaacaaggccaaccatgggaaggaca

SEQ ID NO: 147761 - DNA, 478 bp, Arabidopsis thaliana
ctctcgaagttccgtgcgactctctgctcgagcaagatctcctaccgatacaatgattatctcagaggctaaccgcgaaagaaatctgcaagtacctcttcaaagaaggagtttgctttgcgaagaaggatttcaatcttgctaagcatccgttgatcgatgtcccgaacctacaagtgattaagcttatgcagagtttcaaatccaaggagtatgttagggagacatttgcctggatgcattactattggtttttgaccaatgaagggatcgagttcttgagaacttatcttaatcttccatctgatgttgttcctgctactttgaagaagtcagctaagccttgtggtcgtccatttggtggcccacctggtgatcgctcaagaggacctcgccatgaaggaggagaccgtcccaggtttggtgaccgtgatgggtaccgtgcaggtcctcgagctggtggtgagttttgaggtga

SEQ ID NO: 147762 - DNA, 505 bp, Arabidopsis thaliana
aaaacactaactaagagatcaatatggctggagtgatgaagttggcatgcatggtcttggcttgcatgattgtggccggtccaatcacagcgaacgcgcttatgagttgtggcaccgtcaacggcaacctggcagggtgcattgcctacttgacccgaggtgctccacttacccaagggtgctgcaacggcgttactaaccttaaaaacatggccagtacaaccccagaccgtcagcaagcttgccgttgccttcaatctgccgctaaagccgttggtcccggtctcaacactgcccgtgcagctggacttcctagcgcatgcaaagtcaatattccttacaaaatcagcgccagcaccaactgcaacaccgtgaggtgatgagcgacggtcaaatgaagctactagcggatgtttcgaatattatataatcgatgagataatattaaataaagatgttcgaatggctgtactcttttcaatttccctgtctttttatcggggcg

SEQ ID NO: 147763 - DNA, 371 bp, Arabidopsis thaliana
caaaaagaaaatggttaagctcagcaatctcctcgttgcaaccttcggggttctcctcgtccttaacggctgcctggcgaggcagtcacttggggttcctcctcagctacagaacgagtgtaacctcgacaacctagatgttctccaagccaccgaaactatcaagagtgaagccggtcagatcgagtactgggaccacaaccaccctcagctccgatgtgttggtgtttccgttgctcgttatgtaattgaacaaggcggtctttacttgcccaccttcttcacttccccaaaaattttctacgtcgttcaaggaacgggtatcagcggaagagtggtccctggatgtgccgagaccttcatggactctc

SEQ ID NO: 147764 - DNA, 273 bp, Arabidopsis thaliana
accaaaataaaatatagatttggggaaactaataaatgatatagagaatccacctctctcccttattgttttttgtgggtttcttgacctattattattgattagtaatagtgagagaggcatattttggagatacacataaacacataaattggaagaataaaataaaagagagtgagagatggctaaatcagatatgttgcctgtcttggcgatggtgttggtgcaaaatcgctacgcatgcttgaacatttcgtttaagatggctattga

SEQ ID NO: 147765 - DNA, 163 bp, Arabidopsis thaliana
acttgcctaacatttgcaaaatccagcaagttggtgtttgccccttccagatcccttcaatcccttcttactactgaattccaaacaagtgtgagcgtgtggttgttgatatatgttaacaccacatctcgccttgtgtttttataaaaaaataagctttggg

SEQ ID NO: 147766 - DNA, 359 bp, Arabidopsis thaliana
  unsure (1)..(359): unsure at all n locations
gcgnccgccaaaacggccncttattcaaacgtcagcagcactaacttttaaagtatgagagagctttaactcttccgctggctgttttcttctccaaattctcctgacgcgattctgttcatcttacgattttacacgtctctctagaagatttaaactttccactttacgtttctttcgatttttgaattctctcactaaagatttgtctcttccatagaaagttcttgaatttactctcttcgtgttcaaaggatttttcagaatttatagtaacccaccaatctactgattgtctccgttcattttaatctatcaagattcgatttttattctgttttttgaaattcttgaattct

SEQ ID NO: 147767 - DNA, 516 bp, Arabidopsis thaliana
  unsure (1)..(516): unsure at all n locations
catacacacatagcaaaaaatggcaaacaagttgttcctcgtctgcgcagctctcgctctctgcttcctcctcacgaacgcttgcatctaccgcaccgtcgttgagttcgaagaagatgacgccactaaccccataggcccaaaaatgaggaaatgccgcaaggagtttcagaaagaacaacacctaagagcttgccagcaattgatgctccagcaagcaaggcaaggccgtagcgatgagtttgatttcgaagacgacatggagaacccacagggacaacagcaggaacaacagctattccagcagtgctgcaacgagcttcgccaggaagagccagattgtgtttgccccaccttgaaacaagctgccaaggccgttagactccagggacagcaccaaccaatgcaagtcaggaaaatntaccagacagccaagcacttgcccaacgtttgcgacatccccgcaggtgatgtttgtcccttaacantccttcattcccttctttctactaaatc

SEQ ID NO: 147768 - DNA, 528 bp, Arabidopsis thaliana
  unsure (1)..(528): unsure at all n locations
caaaaagaaaatggttaagctcagcaatctcctcgttgcaaccttcggggttctcctcgtccttaacggctgccttgcgaggcagtcacttggggttcctcctcagctacagaacgagtgtaacctcgacaacctagatgttctccaagccaccgaaactatcaagagtgaagccggtcagatcgagtactgggaccacaaccaccctcagctccgatgtgttggtgtttccgttgctcgttatgtaattgaacaaggcggtctttacttgcccaccttcttcacttccccaaaaatttcctacgtcgttcaaggaacgggtatcagcggaagagtggtccctggatgtgccgagaccttcatggactcgcagccgatgcaaggacaacaacaaggccaaccatggcaaggacgacagggacaacaaggccaaccatgggaaggacagggacaacagggacaacaaggaagacanggccaaccatgggaaggacagggacaacagggacaacatggacgacagggaca

SEQ ID NO: 147769 - DNA, 371 bp, Arabidopsis thaliana
accacgcgtccgctttactctcttgcgatatctctgagatttgtttgacagtctctaaccatgggtaaagagaagtttcacatcaacagtgtggggattggccacgtcgattctggaaagtcgaccaccactggacacttgatctacaagttgggtggtattgacaagcgtgtcattgagaggttcgagaaggaggctgctgagatgaacaagaggtccttcaagtacgcatgggttttggacaaacttaaggctgagcgtgagcgtggtatcaccattgacattgctctctggaagttgagaccaccaagtactactgcactgtcattgatgctcctggccttcgtgatttcatcaagaacatgatcact

SEQ ID NO: 147770 - DNA, 568 bp, Arabidopsis thaliana
agaaaacatacacaaatagcaaaacatggctaacaagctcttcctcgtctgcgcaactctcgccctctgcttcctgctcaccaacgcttccatctaccgcaccgttgtcgaattcgaagaagatgacgccagcaaccccgtaggtccaagacagagatgccagaaggagtttcagcaatcacaacacctaagagcttgccagagatggatgagcaagcaaatgaggcaaggacgtggtggtggtccttccctcgacgatgagttcgatttcgagggcccccagcagggataccagctactccagcagtgctgcaacgagcttcgccaggaagagccagtttgcgtttgccccaccttgaaacaagctgccagggcagttagcctccagggacagcacggaccattccaatccaggaaaatttaccagtcagctaagtacttgcctaacatttgcaagatccagcaagttggtgaatgtcccttccagaccaccatccctttctttccttcttactactagagtccaagcccggcctagcacgatgatcatgagggtgctatgatgatg

SEQ ID NO: 147771 - DNA, 500 bp, Arabidopsis thaliana
cagggacaacaagggttccgtgacatgcaccagaaggtggaacatgtgagacgcggagacgtctttgccaacacgccaggctctgcccactggatctacaactcaggagaacagccacttgtcatcatcgctcttctcgacatcgccaactaccaaaaccaactcgaccgcaaccctagagtgttccatttggccggaaacaaccagcagggaggctttggcggttcacagcaacaacaagaacagaaaaacttgtggagcgggttcgacgcacaggtcatagctcaagcattgaaaattgacgttcagttggctcagcagcttcagaaccaacaagacagcagaggaaacatcgttcgtgttaagggacctttccaggtcgtgaggccacctctaagacagccctacgagagcgaggagtggagacacccacgtagcccacagggcaaccggcctgaggagactatctgcagcatgaggtcccacgagaacattgacca

SEQ ID NO: 147772 - DNA, 465 bp, Arabidopsis thaliana
aagaaaatggttaagctcagcaatctcctcgttgcaaccttcggggttctcctcgtccttaacggctgccttgcgaggcagtcacttggggttcctcctcagctacagaacgagtgtaacctcgacaacctagatgttctccaagccaccgaaactatcaagagtgaagccggtcagatcgagtactgggaccacaaccaccctcagctccgatgtgttggtgtttccgttgctcgttatgtaattgaacaaggcggtctttacttgcccaccttcttcacttccccaaaaatttcctacgtcgttcaaggaacgggtatcagcggaagagtggtccctggatgtgccgagaccttcatggactcgcagccgatgcaaggacaacaacaaggccaaccatggcaaggacgacagggacaacaaggtcaaccatgggaaggacagggtcaacaggtacaacaagga

SEQ ID NO: 147773 - DNA, 492 bp, Arabidopsis thaliana
  unsure (1)..(492): unsure at all n locations
cgcgtgcgcttggactaaagaagaagatcagcttcttgttgattacatccgtaaacacggtgaaggttgctggcgatctctcgctcgcgcgcggtggattacaaagatgtggtaagagttgtagattgagatggatgaattatctaagaccagatctcaaaagaggcaattttactgaagaagaagatgaactcatcatcaagctccatagcttgctcggtaacaaatggtctttaatagctgggagattaccaggaagaacagataacgagatcaagaactattggaacactcatatcaagaggaagcttctcagccgtgggattgatccaaactctcaccgtctgatcaacgaatccgtcgtgtctccgtcgtctcttcaaaacgatgtcgttgagactatacatcttgatttctctggaccggttaaaccggaaccggtgcgtgaagagatnggtatggttaataattgtgagagtagtggaacgacgt

SEQ ID NO: 147774 - DNA, 502 bp, Arabidopsis thaliana
catacacacatagcaaaaaatggcaaacaagttgttcctcgtctgcgcagctctcgctctctgcttgggtgctcaccaacgcttccatctaccgcaccgtcgttgagttcgaagaagatgacgccactaaccccataggcccaaaaatgaggaaatgccgcaaggagtttcagaaagaacaacacctaagagcttgccagcaattgatgctccagcaagcaaggcaaggccgtagcgatgagtttgatttcgaagacgacatggagaacccacagggacaacagcaggaacaacagttattccagcagtgctgcaacgagcttcgccaggaagagccagattgtgtttgccccaccttgaaacaagctgccaaggccgttagacttcagggacagcaccatccaatgcaagtcaggaaaatttaccagacagtcaagcacttgcccaacgtttgctacattccgcaagttgatgtctgtcccttcaacataccttcattccc

SEQ ID NO: 147775 - DNA, 527 bp, Arabidopsis thaliana
gtctctacttgccctctttctttaacaccgcgaagctctctttcgtggctaagggacgaggtcttatgggaaaagtgatccctggatgcgccgaaacattccaagactcatcagagttccaaccacgcttcgaaggtcaaggtcaaagccagaggttccgtgacatgcaccagaaagtggagcacattaggagcggtgataccattgccacaacacccggtgtagcacagtggttctacaacgacggacaggaaccacttgtcatcgtcagcgtcttcgatctagccagtcaccagaaccagcttgaccgcaacccaaggccattttacttagccggaaacaacccacaaggtcaagtatggctacaaggccgagagcaacagccacagaagaacattttcaatggatttggacccgaggttattgctcaagctttgaagatcgatcttcagacagcgcagcaacttcagaaccaagatgacaaccgtggaaacattgtccgagttccaagcccgtcggtgtcatta

SEQ ID NO: 147776 - DNA, 418 bp, Arabidopsis thaliana
  unsure (1)..(418): unsure at all n locations
ctcaagctttgaagatcgatcttcagacagcgcagcaacttcagaaccaagatgacaaccgtggaaacattgtccgagtccaaggcccgttcggtgtcattaggccgcctttgaggggccagagacctcaggaggaggaagaagaagaagaaggacgacatggacgacacggtaatggcttagaggagaccatctgcagcgccaggtgcaccgataacctcgatgacccgtctcgtgctgacgtgtacaagccacagctcggttacatcagcactctcaacagttacgatctccccatccttcgcttcatccgtctctcagccctccgtggatctatccgtcaaaaacggcaatggtgcttccacagtggaacgcaaacgcgaacgctattctntacgtgacagacggggaagcccaa

SEQ ID NO: 147777 - DNA, 317 bp, Arabidopsis thaliana
gtccggccgtggataatattaaaccactttttttctttttttaaaaggcaaagttggcttagccactgattccttttaatgctccggtggagtgagagataatatctccgacgttgtttcctctcctctgcgctttattcctatgtcttccagtggctgttatcttaacagtccagcgagacctcacctgcgttatctcgccggagtttggtttccgctctctttccgtcttttctcttaactttcgaaatgtccccgactctttttcttcttctccggcggttcggattcgacggccgtttcccaaagaagacgac

SEQ ID NO: 147778 - DNA, 542 bp, Arabidopsis thaliana
atttttgatagccggaaacaacccacaagggcaggaatggctacaaggccgaaagcaacagaagcaaaacaacatgttcaatggcttcgcacctgagatcttggctcaagccttcaagatcaatgtcgagacggctcagcagctccagaaccagcaagataaccgtggcaacatcgtcaaggtcaacggacctttcggcgtcattaggccacccttgagacgcggcgaaggcggccaacaaccacatgaaatagctaatggtttagaggagactttgtgcaccatgcgatgcactgaaaacctcgatgacccgtcggatgctgacgtgtacaagccatcactcggatacattagcacacttaacagctacaatcttcctatcctcagacttctccgccttagcgctcttcgtggctccatccgtaaaaaccgccttgtgctaccgcaatggaacgtaaacgcaaacgcggcactctacgtgacaaacggaaaggctcatatacaaatggtgaacgacaacggagaaagagtttcgacccaga

SEQ ID NO: 147779 - DNA, 537 bp, Arabidopsis thaliana
aaacaaaaagaaaatggttaagctcagcaatctcctcgttgcaaccttcggggttctcctcgtccttaacggctgcgcttgcgaggcagtcacttggggttcctcctcagctacagaacgagtgtaacctcgacaacctagatgttctccaagccaccgaaactatcaagagtgaagccggtcagatcgagtactgggaccacaaccaccctcagctccgatgtgttggtgtttccgttgctcgttatgtaattgaacaaggcggtctttacttgcccaccttcttcacttccccaaaaatttcctacgtcgttcaaggaacgggtatcagcggaagagtggtccctggatgtgccgagaccttcatggactcgcagccgatgcaaggacaacaacaaggccaaccatggcaaggacgacagggacaacatggccaaccatgggaaggacagggacaacagggacaacaaggaagacatggccaaccatgggaaggacagggacaacagggacaacaaggacgacagggacaacaag

SEQ ID NO: 147780 - DNA, 491 bp, Arabidopsis thaliana
  unsure (1)..(491): unsure at all n locations
ctacaatggcggaaaggttctctagcggcgaggcccaatattggcccaattatggtagcaccgccacggaccaccgtgtagcaacagccccatctcgtcgtttttccatcagctccgatcccattcaccaacatcctcgcagctctttggtttcctcgctctctttatctccactggcatcctcctcttcctccttggtgtaagcgtcaccgctgccgtgctcggcttcattgtctttcttccattgatcatcatctcgagtccgatatggattcccctttttgtcgtcgttggcgggttcttaacggtctccggatttcttgtcggaacggtggctntagtgtcgtggacgtaccgctatttccggggaatgcacccggttggatcgaatcagatggattatgcacgtagtaggatctatgacacggcatctcacgtcaaagattacgctagagaattcacgggtactttcatggcagggctaaagatgc

SEQ ID NO: 147781 - DNA, 446 bp, Arabidopsis thaliana
ctttggcggttcacagcaacaacaagaacagaaaaacttgtggagcgggttcgacgcacaggtcataggtcaagcggggaaaattgacgttcagttggctcagcagcttcagaaccaacaagacagcagaggaaacatcgttcgtgttaagggacctttccaggtcgtgaggccacctctaagacagccctacgagagcgaggagtggagacacccacgtagcccacagggcaacggccttgaggagactatctgcagcatgaggtcccacgagaacattgacgaccctgctcgtgctgacgtgtacaagcccagcctaggtcgcgtgaccagcgtcaacagctataccttgcccatcttggagtatgtcaggctcagtgccactcgtggcgttctccagggtaatgcgatggtgcttctaaatcaacatgaacgcttacgagatc

SEQ ID NO: 147782 - DNA, 432 bp, Arabidopsis thaliana
ccgggcgaccacgcgtccggtggaagacgccggaaacggcaacggcaagaagcaatgacaactgaggaaaataaaacaggcagaaataggaagaggaagagacagagaaaccctaaaccttctaaagaagaacctatcgagacgacaccgaagaatcaaaacgagaaaaagaatcaaagagataccaaaaaccaacaacatggaggttcttcagctccatcgaaacgacctaaaccttccaatttcctcgatgcgcttagagagagattatctggtgggcaatttaggatgctcaatgagaaactctacacttgctctggaaaagaagctttagactactttaaagaagatccacaaatgtttgatatgtatcatacagggtatcaacaacaaatgtcaaattggcctgagcttcctgttaactccattatt

SEQ ID NO: 147783 - DNA, 512 bp, Arabidopsis thaliana
gtagtgcttcactcttttgagtaaatagtaaagaatataatttatactaattcgtaagttctgagaggaataaatgaaaatcgcaaacatctctaaaaatacgaagagtaaagtcttgagaaaaccttttgtttttgttaattgcatgagaaaataacttacgatttaggaaactacctgacggattctattcaaattgttaatctttatgaataacagtatcgtgagtgaattcgaactaacagattcctttgaagtaggttaagcttttatacttcaaataaaatataaatatataaaaatcaatcatatcattcggtcgtcaattttttgtattctattaatatattatccttcttgaagactaatagaaaaatttagttagcgaatggtgacaagctcatctttaaccctaatttgcatagttctcagtttatctatttattccaatcaaacatcattttcattcacacgttaactacctgcttaaaacgttcaatgcaattcctagt

SEQ ID NO: 147784 - DNA, 542 bp, Arabidopsis thaliana
  unsure (1)..(542): unsure at all n locations
cccgaggttattgctcaagctttgaagatcgatcttcagacagcgcatcaacttcagaaccaagatgacaaccgtggaaacattgtccgagtccaaggcccgttcggtgtcattaggccgcctttgaggggccagagacctcaggaggaggaagaagaagaagaaggacgacatggacgacacggtaatggcttagaggagaccatctgcagcgccaggtgcaccgataacctcgatgacccgtctcgtgctgacgtgtacaagccacagctcggttacatcagcactctcaacagttacgatctccccatccttcgcttcatccgtctctcagccctccgtggatctatccgtcaaaacgncatggtgcttccacagtggaacgcaaacgcgaacgctattctttacgtgacagacggggaagcccaaatccagatcgtaaacgacaatggtaacagagtgtttgacggacaagtctctcaaggacagctcatagccgtaccacatggtttctcggtggtgaaacgcgcaacaagcaaccg

SEQ ID NO: 147785 - DNA, 482 bp, Arabidopsis thaliana
ctaactactcataaccctagcatgcagcattcaatgatgttatgccgatcgagcttctagcaataggtgagaggtatgaccacggatatcgaacatatcacctcaaagatttacagtgtggtgtgcctcccatcttctgctcctaccagcaccgttgccgttggggggacgacggagtcaggtgactactaaagcggacacaagtctaagaccgccttatgttacaccgacttcacatccttttgtgatcccatctgaaaacttaccagtgacttcgtatcctatggagactccagagacggtttgtgcgagtgaggcggtggaggaaactacgaaaccgaggctacaggcgttacattgggataaagttagagcaagtacggatcgtgagatggtttgggatcatcttcgatcaagctctttcaaattagatgatgagatgattgagacgttgattgtgtggaagtcgtttaacaacaaac

SEQ ID NO: 147786 - DNA, 376 bp, Arabidopsis thaliana
agaaaacatacacaaatagcaaaacatggctaacaagctcttcctcgtctgcgcaactctcgccctctgcttcctcctcaccaacgcttccatctaccgcaccgttgtcgaattcgaagaagatgacgccagcaaccccgtaggtccaagacagagatgccagaaggagtttcagcaatcacaacacctaagagcttgccagagatggatgagcaagcaaatgaggcaaggacgtggtggtggtccttccctcgacgatgagttcgatttcgagggcccccagcagggataccagctactccagcagtgctgcaacgagcttcgccaggaagagccagtttgcgtttgccccaccttgaaacaagctgccagggca

SEQ ID NO: 147787 - DNA, 534 bp, Arabidopsis thaliana
accacgcgtccgcacttttctgcgatatctctgagatttgttgacagtctctaaccatgggtaaagagaagtttcacatcaacattgtggtcatgggccacgtcgattctggaaagtcgaccaccactgggcacttgatctacaagttgggtggtattgacaagcgtgtcattgagaggttcgagaaggaggctgctgagatgaacaagaggtccttcaagtacgcatgggttttggacaaacttaaggctgagcgtgagcgtggtatcaccattgacattgctctctggaagttcgagaccaccaagtactactgcactgtcattgatgctcctggtcatcgtgatttcatcaagaacatgatcactggtaccttccaggctgattgtgctgtccttatcattgactccaccactggtggttttgaggctggtatctccaaggatggtcagacccgtgagcacgctttacttgctttcaccctggtgtcaagcatatgatctgctgttgtaacaagatggatgccactacccc

SEQ ID NO: 147788 - DNA, 248 bp, Arabidopsis thaliana
gggaaatcaccgccggttgttagacctcctcccgtagtggtgaggccaccgccaatcataagacctcctccggtgggctatccaccaccaattgtgaggccaccgccaatcacaagacctcccatcataatccctccaattcaaccaccgccggttacaactcctccgggactcctccctccgatcacaactcctccgggcctcctccttccagtcacaactcctccgggacttctcccttcagtcac

SEQ ID NO: 147789 - DNA, 549 bp, Arabidopsis thaliana
agaaaacatacacaaatagcaaaacatggctaacaagctcttcctcgtctgcgcaactctcgccctctgcttcctggtcaccaacgcttccatctaccgcaccgttgtcgaattcgaagaagatgacgccagcaaccccgtaggtccaagacagagatgccagaaggagtttcagcaatcacaacacctaagagcttgccagagatggatgagcaagcaaatgaggcaaggacgtggtggtggtccttccctcgacgatgagttcgatttcgagggcccccagcagggataccagctactccagcagtgctgcaacgagcttcgccaggaagagccagtttgcgtttgccccaccttgaaacaagctgccagggcagttagcctccagggacagcacggaccattccaatccaggaaaatttaccagtcagctaagtacttgcctaacatttgcaagatccagcatgttggtgaatgttcctttcagaccaccatcccttttttccttcttactactagagttcaagcccggcctagcacgatgatcat

SEQ ID NO: 147790 - DNA, 427 bp, Arabidopsis thaliana
attattaactcctgtgtcactgtccttcttttgactggattccttgcaactatcttgatgcgagtcctcaagaacgatttcatgaagtatgctcaagatgaggaagctgctgatgatcaagaggaaactggatggaagtacattcatggcgatgtgtttcggttccctactcacaattctttatttgctgcatcgctcggtagtggcactcaattgttcacgctcaccatatttattttcatgcttgctcttgttggagtgttctacccatacaaccgaggagcactctttacctgcttggtggtcatttacgctctcacttctggaattgccggatacacatctgcctctttctactgtcaacttgaaagaaaaagctgggtgaggtaggtgttactcactggatgtctcttttgtggcccattat

SEQ ID NO: 147791 - DNA, 474 bp, Arabidopsis thaliana
aagaaatataagaaataacaaaatggctcgagtctcttctcttctttctttcttcttaacacttttgatccttttgcatggctacgcggctcaacagggtcagcagggtcagcagtttccgaacgagtgccagctcgaccagctcaatgcgctcgagccgtcacacgtactgaagagcgaggctggtcgcatcgaggtgtgggaccaccacgctcctcagctccgttgctcaggtgtctcctttgcacgttacatcatcgagtctaagggtctctacttgccctctttctttaacaccgcgaagctctctttcgtggctaagggacgaggtcttatgggaaaagtgatccctggatgcgccgaaacattccaagactcatcagagttccaaccacgcttcgaaggtcaaggtcaaagccagaggttgcgtgacatgcaccagaaagtggagcacattaggagcggtgataccat

SEQ ID NO: 147792 - DNA, 434 bp, Arabidopsis thaliana
cttccctggaatgttaccttttggagaggaacatggaagctatcttgcagatccggctgaagtagagattgtgaggttcaatacatgtcaaggagctgtggaaaaatatcaacatctggaggattttcattgggctgtgagacctttgcttattgctatgggtctattgacagcgatgaagttagggatctgtgtcaggaagaaaataggaaggtcaaaggatgggaaacaacgcgatggctcgactggacaaggtgactgtaagattccggatggtaagggctctgacaaatctaaatggcttgtgttcttttaggtctgctatgagacacagaccttgtctggtccatatattatactgttctagtcataataacgtttcatgtacataatgacgttttttttttttttgctctttaaaattaccaaaaagc

SEQ ID NO: 147793 - DNA, 480 bp, Arabidopsis thaliana
gtagccggacttctttccgttctatcttataaactttaataaatcataaaaattttctgcttttaaactcttatttggatcaaaggacaaacgcttctttgtattttatgtttttagtcattatagctttttttttattgaataagtgatgatccaatggttctcactcagtgaactttggactttgaaggtttcattaaattatcgtggttctcgtatgaatctgaggtttcaattgattagttaagtagggtcttaacaagagaattcctatcaataataaagaaaacaagaagaaatccctgtccccgttccatacaaataccaaataaaaaaagacaataaagataggtaatctagaagattcaagaggcctgtaacgatcaacacaacataaagacgaatgagcttacttgattttttggcatttaaccacaaagacgagctttcgcattttgactctttcatatctttaaataa

SEQ ID NO: 147794 - DNA, 519 bp, Arabidopsis thaliana
atcagatataaagttgacatgtttgattgccaaaacaaaaacaaattggagaaaactctcgacttatgagtaataggtaaaatatatattatcatataaagcccaatggatccatttcttattgaggaagtaaaacatgatctctagaaaatatagttaagacttatgatagaaatattaaacaacttgatgaatacaacatagaatacacaaattttcggaatgaaataattttaaaaaagcaactaaacatattatacaaatgattttgcaaagatccattccataaagtaagcaatcaagagtagttggaaattcaatctaaaatgattttgcaaagatccattccataaagtaagcaatcaagagtagttggaaattcaatctagagttattggcatcccaccaaaacccaatcatatcgtttgtcttgaaatgtttagttggagaaccatactccatccatgaaattagaaatttccacttaaatcttcttttaatggaagagttcttataatt

SEQ ID NO: 147795 - DNA, 478 bp, Arabidopsis thaliana
acaaacaaaaagaaaatggttaagctcagcaatctcctcgttgcaaccttcggggttctcctcgtccttaacggctgccttgcgaggcagtcacttggggttcctcctcagctacagaacgagtgtaacctcgacaacctagatgttctccaagccaccgaaactatcaagagtgaagccggtcagatcgagtactgggaccacaaccaccctcagctccgatgtgttggtgtttccgttgctcgttatgtaattgaacaaggcggtctttacttgcccaccttcttcacttccccaaaaatttcctacgtcgttcaaggaacgggtatcagcggaagagtggtccctggatgtgccgagaccttcatggactcgcagccgatgcaaggacaacaacaaggccaaccatggcaaggacgacagggacaacaaggccaaccatgggaaggacagggacaacatggacaacaaggaagac

SEQ ID NO: 147796 - DNA, 443 bp, Arabidopsis thaliana
gtttgatttcgaagacgacatggagaacccacagggacaacagcaggaacaacagctattccagcagtgctgcaacgagcttcgccaggaagagccagattgtgtttgccccaccttgaaacaagctgccaaggccgttagactccagggacagcaccaaccaatgcaagtcaggaaaatttaccagacagccaagcacttgcccaacgtttgcgacatcccgcaagttgatgtttgtcccttcaacatcccttcattcccttctttctactaaatctcaaacaaaccctcaaagcgtatgagaagggtgttgttgatatatacatgttgacacttgacacataccacaccttatcgtgtgttttatgataaatgtaagcttttggatgtttgagggtaatgtaagcactacttaataaaataagagtttgtttattttttat

SEQ ID NO: 147797 - DNA, 398 bp, Arabidopsis thaliana
cacaaacgagtaagaatacaaatacaaatagcaaaaaaaatggcaaacaagctcttcctcgtctgcgcaactttcggcgctctggttcctcctcaccaacgcttccatctaccgcactgttgtcgagttcgacgaagatgacgccagcaaccccatgggcccaagacagaaatgtcagaaggagtttcagcaatcacagcacctaagagcttgccagaaattgatgcgcatgcaaatgaggcaaggccgtggtggtggtccctccctcgacgatgagttcgatttggaagacgacatcgagaacccacaaggcccccagcagggacaccagatcctccagcagtgctgcagcgagcttcgccaggaagagccagtttgtgtttgccccaccttgagac

SEQ ID NO: 147798 - DNA, 524 bp, Arabidopsis thaliana
gcgcaaacacaatctaatccaaaaaatcaaaagatgaatgccacaaagtttgttgtgcttctcgtgattggcgttttgtgtgccattgtcaccgcaaggcaggtcaaagatttgtccacggagaccaaattaggggcctctcttccaaaaactactaccaaaggcattggagctcagctttctgcaactggcacaacttacagcaccagcagtgtcgttagctatgctaatggttttaacaatcccaaaggtccaggggccaattcattcgaaagtgccaacacatttaccagcggacaagtcactgccaagggtcgcaaggcaagagtttcttctgcaagtgcttctgccgctgaaggcgatgctgcagctgcagtgactcgcaaagctgctgctgcacgtgcaaagggtaaggtagcttccgcatcaagggtcaagggttcctcttagaagaaaagggcaaaggaaagaagggaaaagaaaaaaggattgagcgtgaggtcatttatattctacacatgcgt

SEQ ID NO: 147799 - DNA, 451 bp, Arabidopsis thaliana
caaccacttcggttagagaaatttctggaacggtgaatggtgtcaagattacctttattgatactccgggtttgaagtctgctgcgatggatcaaagtacaaatgcaaaaatgttgtcctctgtaaagaaggtaatgaagaagtgtccccctgatattgtactatatgtagatcgtcttgacacccagaccagggacttgaacaatttgcccttgctaaggacgattactgcttctcttggtacatccatatggaaaaacgctatagtgacattgacccatgcggcttctgcccctcctgatggcccatctggcaccccattgagctatgatgtgtttgtagcgcagtgctcacatattgtgcaacagtctataggacaggctgttggagatctacgcttgatgaatccaaggctgatgaatccagttttacttgttgagaatcacccctt

SEQ ID NO: 147800 - DNA, 482 bp, Arabidopsis thaliana
aaaaatgggtcgagtctcatctattatctctttctctttgacactcttgatcctcttcaatggctacactgcccagacagtggcccaacgagtgccagctcgatcaactcaatgcgctcgaaccatcccaaatcatcaagagcgagggtggtcgcatcgaggtctgggaccaccatgcaccccagctccgttgctccggctttgcctttgagcgtttcgtcattgagcctcagggtcttttcttgcccactttcttgaacgccggcaaactcacgtttgttgttcacggaaggggtctaatgggaagagttattccgggatgcgccgagacgttcatggagtcaccggtatttggagaaggtcaaggtcagggtcagagtcaagggttccgtgacatgcaccagaaagtagagcacctacggggcggtgacaccattgcaacaccatctggtgtagctcaatggttctacaacaatggaaat

SEQ ID NO: 147801 - DNA, 366 bp, Arabidopsis thaliana
  unsure (1)..(366): unsure at all n locations
gaactatcttcaacagtttgtgtagccataaatcttattttgtattcattacgatctgttgactttgtataccattccgttgtaaataaatgatcttagcatagatccggtgtggtctttcaattctataataatggaaacagcaaccctagtcgccatctttatatctgggttacttgtaagttttactgggtatgctctatatactgcctttgggcaaccctctcaacaactaagagatccattcgaggaacacggggactagttaacgttatagcctncaaatatttggaggctgattacgttaatgaagataatgaaaaattatttcattttttagttgaaattttaggtggtttccgaaaa

SEQ ID NO: 147802 - DNA, 555 bp, Arabidopsis thaliana
cggacgcgtggggccaacaaaagcatccacacacgttttccaggcactacagtacctgcttaaactctgcagtcatgcgtttggtgttctaggcgataaggtcacagagccggtggcttctgatttggcagcaatgataaatggatgttcggacattatcactgagcttcataaagttcaacactctccaaagcttgtagctcttcaggaaattttagaagaatgcggaataggttctgatgcttctagttcagatggcactcttagtgtaggccagcacagagttctgatatttgcacagcacacagctttgctggatatcattgaaaaggactcgtttcaagcccacatgaaaagtgtcacatatatgcgactagatggttcagctgtaccggagaaaaggtttgagattgtgaaagcctttaattcagatcctacaattgatgttctgctactgacaacacatgttggtgggctagggttgaacctgacctttgctgatacacttgtagttatggagcatgatggaacccaatgcgtgatcttaggcgatgg

SEQ ID NO: 147803 - DNA, 244 bp, Arabidopsis thaliana
ggcaaacaagttgttcctcgtctgcgcagctctcgctctctgcttcctcctcaccaacgcttccatctaccgcaccgtcgttgagttcgaagaagatgacgccactaaccccataggcccaaaaatgaggaaatgccgcaaggagtttcagaaagaacaacacctaagagcttgccagcaattgatgctccagcaagcaaggcaaggccgtagcgatgagtttgatttcgaagacgacatggag

SEQ ID NO: 147804 - DNA, 278 bp, Arabidopsis thaliana
gaagataaaattggctcgagtctcttctctactttctttctccttaacacttttgatccttttccatggctacgcggctcaacagggtcagcagggtaagcagtttccgaacgagtgccagttcgaccagttaaatgcgctcgagccttcaaacgtcctgaaaagcgaggctggtcgcatcaaggtgggggaccaccaccctcttaagttccgtggttaaggggcttccttggcacgtaccataatcgggtttaagggtctttacttgcccttttttt

SEQ ID NO: 147805 - DNA, 432 bp, Arabidopsis thaliana
  unsure (1)..(432): unsure at all n locations
cagcaacttcagaaccaagatgacaaccgtggaaacattgtccgagtccaaggcccgttcggtgtcattaggccgcctttgaggggccagagacctcaggaggaggaagaagaagaagaaggacgacatggacgacacggtaatggcttagaggagaccatctgcagcgccaggtgcaccgataacctcgatgacccgtctcgtgctgacgtgtacaagccacagctcggttacatcagcactctcaacagttacgatctccccatccttcgcttcatccgtctctcagccctccgtggatctatccgtcaaaacgcaatggtgcttccacagtggaacgcanacgcgaacgctattctttacgtgacagacggggaagcccaaatncagatcgtaaacgacaatggtaacagagtgtttgacggacaagtc

SEQ ID NO: 147806 - DNA, 75 bp, Arabidopsis thaliana
gacaaacacacacacaaattttttaaaaaagaataaatttactgagttttggttttattaatatccatggctacg

SEQ ID NO: 147807 - DNA, 524 bp, Arabidopsis thaliana
gaaaatggttaagctcagcaatctcctcgttgcaaccttcggggttctcctcgtccttaacggctgccttgcgaggcagtcacttggggttcctcctcagctacagaacgagtgtaacctcgacaacctagatgttctccaagccaccgaaactatcaagagtgaagccggtcagatcgagtactgggaccacaaccaccctcagctccgatgtgttggtgtttccgttgctcgttatgtaattgaacaaggcggtctttacttgcccaccttcttcacttccccaaaaatttcctacgtcgttcaaggaacgggtatcagcggaagagtggtccctggatgtgccgagaccttcatggactcgcagccgatgcaaggacaacaacaaggccaaccatggcaaggacgacagggacaacaaggccaaccatgggaaggacagggacaacagggacaacaaggaagacaaggccaaccatgggaaggacagggacaacagggacaacaaggacgacagggacaac

SEQ ID NO: 147808 - DNA, 473 bp, Arabidopsis thaliana
gagatcttgtactgcactggaggacaaggaaggatccaagtggtcaacgacaacggacagaacgtgttggaccaacaggtgcagaagggacagctcgtggtcatcccacaagggttcgcatacgttgtccagtcccacggaaacaagttcgagtggatctctttcaaaactaatgaaaacgcaatgatcagcactttggcgggtagaacctcgctcttgagggcattgccattggaggtcatatcaaatggtttccagatctctcccgaggaagctaggaagatcaagttcaacacacttgagaccactttggcgggtagaacctcgctcttgagggcattgccattggaggtcatatcaaatggtttacagatctctcccgaggaagctaggaagatcaagttcaacacacttgagaccactttgacccgcgctgccggtaggcaacaacaacagttgatcgacgagattgt

SEQ ID NO: 147809 - DNA, 381 bp, Arabidopsis thaliana
gcgaaccaaagatgtgcataagcctagtgactttggtatagcaccagatatgattattctggtcaagaatgagacttgagagcgtccttaagcttaccaaaagattcaggaactatcccggaaaacttattcattcgaagattaaccgacactaacgagttagctcctgagatctgaaacggtagagaacctgaaaatctattattgctcaaatctaaagaacctagagacttggcattaccaatatcaccagtgaggtttccttcaaaatagtttgaagcaaggtcaagaaactgtagactaggaagaccccaaatgcctgaaggaatcattccagagagagagttgttacttacacgaagactaatcacaagcttacat

SEQ ID NO: 147810 - DNA, 451 bp, Arabidopsis thaliana
caacgcttccgccgccaacaacaatctcttctctctcctctccttctcttcgtcgtctccggcgaagaggaggcggcttctctcttcgctccaggacaatctccgtcgtttcgcatccagcgcttctctttaccgtcaacatctccggaatcaacaacaacaacatcagcaacaacagcaatcgcgcgtgaaagagaaatcagaaacgctggctcagaagatcggtaaatctatccggcgtgccggtgcgccgtcgaaagctagggtttacgctgatgtcaacgttgttagacctaaggactattgggattacgagtcccttgctgttcaatggggtgtacaggatgattatgaggtggtgaggaaggtacgaaggggaaaatacagtgagggtcttgaaggcattcatgctactgataacgagaaatgtgttatcaagatttttgagcct

SEQ ID NO: 147811 - DNA, 496 bp, Arabidopsis thaliana
gggtaatgcgatggtgcttcctaaatacaacatgaacgctaacgagatcttgtactgcactggaggacaaggagggatccaagtggtcaacgacaacggacagaacgtgttggaccaacaggtgcagaagggacagctcgtggtcatcccacaagggttcgcatacgttgtccagtcccacggaaacaagttcgagtggatctctttcaaaactaatgaaaacgcaatgatcagcactttggcgggtagaacctcgctcttgagggcattgccattggaggtcatatcaaatggtttccagatctctcccgaggaagctaggaagatcaagttcaacacacttgagaccactttgacccgcgctgccggtaggcaacaacaacagttgatcgaggagattgtcgaggcttaaatcaaaacgtttttctttttcttaataaagtatggtcagtttgtaatcacgtccctttacctttaacgtacgtgtaaaatatgt

SEQ ID NO: 147812 - DNA, 531 bp, Arabidopsis thaliana
  unsure (1)..(531): unsure at all n locations
caaaaagaaaatggttaagctcagcaatctcctcgttgcaaccttcggggttctcctcgtccttaacggctgcgcttgcgaggcagtcacttggggttcctcctcagctacagaacgagtgtaacctcgacaacctagatgttctccaagccaccgaaactatcaagagtgaagccggtcagatcgagtactgggaccacaaccaccctcagctccgatgtgttggtgtttccgttgctcgttatgtaattgaacaaggcggtctttacttgcccaccttcttcacttccccaaaaatttcctacgtcgttcaaggaacgggtatcagcggaagagtggtccctggatgtgccgagaccttcatggactcgcagccgatgcanggacaacaacaaggccaaccatggcaaggacgacagggacaacaaggccaaccatgggaaggacagggacaacagggacaacaaggaagacaaggtcaaccatgggaaggacagggacaacagggacaacaaggacgacagggacaac

SEQ ID NO: 147813 - DNA, 481 bp, Arabidopsis thaliana
gaaaacatacacaaatagcaaaacatggctaacaagctcttcctcgtctgcgcaactctcgccctctgcttcctgctcaccaacgcttccatctaccgcaccgttgtcgaatttgaagaagatgacgccagcaaccccgtaggtccaagacagagatgccagaaggagtttcagcaatcacaacacctaagagcttgccagagatggatgagcaagcaaatgaggcaaggacgtggtggtggtccttccctcgacgatgagttcgatttcgagggcccccagcagggataccagctactccagcagtgctgcaacgagcttcgccaggaagagccagtttgcgtttgccccaccttgaaacaagctgccagggcagttagcctccagggacagcacggaccattccaatccaggaaaatttaccagtcagctaagtacttgcctaacatttgcaagatccagcaagttggtgaatgtccct

SEQ ID NO: 147814 - DNA, 461 bp, Arabidopsis thaliana
gttaaagatcttctctctgctcgaatctaacctaaacaaagacttgtgattcaacagttatggtgagaatatgggttctctacaatatactaaattcgtttcttctctctttaggaccaaagaagctacgaactcttttccctctttcttggttcgacaaaactctccacatgaactcaccaccgtctccgtgaacgaggtgaccttctccatcatcgtatgcagcgccgacaaaaagaatagatccgtccgagctcaaacgcgttttccagatgttcgacaagaacggtgacggtcgaatcacaaaggaagagctcaacgactcgcttgagaatcttggaatctacataccacacaaagatctgactcaaatgatccacacgatcgatgctaacggtgatggatgcgtcgacatagacaagtttgagtcgctgcacagctcgattgtggatgagcatcac

SEQ ID NO: 147815 - DNA, 247 bp, Arabidopsis thaliana
caagctttgaagatcgacttttaaacagcgcagaatcttgagaaccaagatgtcagccgaggaaacattgtctacgtccaaggcccgttcggtgtcattaggtccgactccgaggggccagagacctcatgaggaggatgaagaggatgaacgacgacatggacgacaccttaatggcttataggagaccatttgtagcgtctggagcaccgattacatcgatgacccgtctagtgctgacgtgtac

SEQ ID NO: 147816 - DNA, 270 bp, Arabidopsis thaliana
gttccaaatctcacctgaagaagcaaggagggtcaagttcaacacgctcgagaccactttgactcacagcagtggcccagctagctacggaaggccaagggtggctgcagcttaagagcttaaaaccgcggctcaacaatgaacctctagtactgtaaaaggaagttaaatagtacgaagtaataataataatgtacgaacatgtgacaagttttgttgaggtttacctgtaaaatgccactccttttctgaataaatcttttttcgatc

SEQ ID NO: 147817 - DNA, 404 bp, Arabidopsis thaliana
  unsure (1)..(404): unsure at all n locations
gtgtagctcaatggttctacaacaatggaaatgagcctctcattcttgttgcagccgcggatctcgccagcaaccagaaccagcttgaccgcaaccttagaccatttttgatnagccggaaacaacccacaagggcaggaatggctacaaggccgaaagcaacagaagcaaaacaacatcttcaatggcttcgcacctgagatcttggctcaagccttcaagatcaatgtcgagacggctcagcagctccagaaccagcaagataaccgtggcaacatcgtcaaggtcaacggacctttncgcgtcattaggccacccttgagacgcggcgaaggcggccaacaaccacatgaaatagctaatggtttagaggaagacttgtgcaccatgcgatgcactgaaaa

SEQ ID NO: 147818 - DNA, 269 bp, Arabidopsis thaliana
gcggaccacatacacgcataaccctactgactttgctatttcaccgctttttttattctgctcaactaatgacactctggggctgcttaagctcactaacagattcaggaactatcctcggaaaacttatatcattgacaacgcagaacccacgctaatcgcaggacacagatgccatatggagcttcagaaatcacaacaccttagaacttgtcagagatggatgagcaagcagactgaggcatggccgtggtcagtggtccttccct

SEQ ID NO: 147819 - DNA, 375 bp, Arabidopsis thaliana
ctctctctctctctctctgctcgaatcgaaccgttcccaggagctgctttgatttggtttatcgttgatctgtgaaaatggggacgaatgatctcgacatcgaagaagggactctggagatcggcatggagtatagaactgtttctggtgttgctggaccattggtcattcttgacaaagtgaagggtccaaagtaccaggagattgttaatattcgcttaggagatggatcaacgagacgtggtcaggttttggaagttgatggcgagaaagcagttgtgcaggtttttgaaggaacatctggaattgacaacaagtttacaaccgtgcaattcacaggagaggttttgaaaacacctgtatcatgggacatgc

SEQ ID NO: 147820 - DNA, 451 bp, Arabidopsis thaliana
aaatggtgaacgacaaccgagaaagagtgttcgaccaagagatcttcagcggacagttactagtcgtgccgcaaggcttttcggtcatgaaacatgccataggcgaacagttcgagtggatcgaattcaagacaaacgaaaacgcacaggtcaacacactcgcgggccgtacctcagtcatgagaggtttgccgcttgaggttataaccaatgggtaccagatctctcccgaagaagctaaacgagtaaagtttagcacgattgagaccacactgacccataacaagcccatgagctaccgaaggcctaaggcttggggcttgatgagcgcgtggtggaatagcgtttgaatctaaagttcggtttggtacgacttgtaatatgaaataataatgtaccaagaagttctacgcttaaaggaactgttttgtgttgagctttgtattaagac

SEQ ID NO: 147821 - DNA, 535 bp, Arabidopsis thaliana
  unsure (1)..(535): unsure at all n locations
atcctttccgaagcatattgaaggcgttagagaagcctgatggtggtgaattcggtaactactacagcttacctgctgggaacgatcccaggatcgataaactaccttattccattaggatacttcttgaatcggccatacgtaactgtgatgagttccaagttaagagcaaagatgttgagaagattcttgattgggagaatacttctcccaagcaggttgagattccgttcaagcctgctcgggttcttcttcaggactttactggtgttcctgctgttgttgatcttgcttgcatgagagatgccatgaataatctcggtggtgattctaataaaattaatccgctggtccctgtagatcttgtcattgatcactccgttcaggtggatgtggcgagatcagagaacgcagtgcaggcaaacatggagcttgagttccagcgtaacaaggaaagatttgcttttcttaagtggngatccaacgcctttcacaacatgcttgtcgtacctcctggatctggaatagttcatca

SEQ ID NO: 147822 - DNA, 524 bp, Arabidopsis thaliana
ctttaacttcatcccaagctgcatattgtatatatcaaaaacattgttaatgaatcacatcagatattcaggggacaaagaaaaacatcaagattcaagggcataactaaacctggtaaatttctgaaatcaggttcaattccaccaccgttgatatccatatggttaggtgtgacatattttcctattgtcacaacaactcctgaaccatctcggagctcatacaccgattgaatcaaaccctgaaacccattaatcaaatgacatgaagatgatcaaaaacaattcaaaatcgatagattggttatgaaactagtaagcctttggaataacctttccataagttctttcgccaacaagaactgctttacagttatcatgaagtgcagaggccacctggagaaatatgacacataatatccgtttaacattcaaaaaaagaagagtttcccgtgggttaaatcttttgagattactcacattttcactagcacttgcttgtcttgtatttaccatacctgcaa

SEQ ID NO: 147823 - DNA, 407 bp, Arabidopsis thaliana
  unsure (1)..(407): unsure at all n locations
cgaaaaaaggctcgagtctcttctcttctttcttntctccttaacacttttgatccttttaatggctacgcggcgtaacagggtagcagggtcagcagtttccaacgagtgccagctcgaccagctcaatgcgctcgagccttcacacgtactgaagagcgaggctggtcgcatcgaggtgtgggaccaccacgctcctcagctccgttgctcaggtgtctcctttgcacgttacatcatcgagtctaagggtctctacttgccctctttctttaacaccgcgaagctctccttcgtggctaaaggacgaggtcttatgggaaaagtgatccctggaggcgccggaacattgcaagacttatcagagtttcaaccacgcttcgaaggccacggtcatagccagtggt

SEQ ID NO: 147824 - DNA, 537 bp, Arabidopsis thaliana
cgcgggcggcgggttcgacgcacaggtcatagctcaagcattgaaaattgacgttcagttggctcagcagcttcagaaccaacaacgcggcagaggaaacatcgttcgtgttaagggacctttccaggtcgtgaggccacctctaagacagccctacgagagcgaggagtggagacacccacgtagcccacagggcaacggccttgaggagactatctgcagcatgaggtcccacgagaacattgacgaccctgctcgtgctgacgtgtacaagcccagcctaggtcgcgtgaccagcgtcaacagctataccttgcccatcttggagtatgtcaggctcagtgccactcgtggcgttctccagggtaatgcgatggtgcttcctaaatacaacatgaacgctaacgagatcttgtactgcactggaggacaaggaaggatccaagtggtcaacgacaactgacagaacgtgttggaccaacaggtgcagaagggacagctcgtggtcatcccacaagggttcgtatacgttgttca

SEQ ID NO: 147825 - DNA, 513 bp, Arabidopsis thaliana
ggaaacattgtccgagtccaaggcccgttcggtgtcattaggccgcctttgaggggccagagacctcaggaggaggaagaagaagaagaaggacgacatggacgacacgctaatggcttagaggagaccatctgcagcgccaggtgcaccgataacctcgatgacccgtctcgtgctgacgtgtacaagccacagctcggttacatcagcactctcaacagttacgatctccccatccttcgcttcatccgtctctcagccctccgtggatctatacgtcaaaacgcaatggtgcttccacagcggaacgcaaacgcgaacgctattctttacgtgacagacggggaagcccaaatacagatcgtaaacgacaatggtaacagagtgtttgacggacacgtctctcaaggacagctcatagccgtaccacacggtttctcggtggtgaaacgcgcaacaggcaaccgattccagtgggttgagttcaaaacagacgctaacgcgcaaatcaac

SEQ ID NO: 147826 - DNA, 527 bp, Arabidopsis thaliana
aagaaaaatgggtcgagtctcatctattatctctttctctttgacactcttgatcctcttcaatggctacactgcccaacagtggcccaacgagtgccagctcgatcaactcaatgcgctcgaaccatcccaaatcatcaagagcgagggtggtcgcatcgaggtctgggaccaccatgcaccccagctccgttgctccggctttgcctttgagcgtttcgtcattgagcctcagggtcttttcttgcccactttcttgaacgccggcaaactcacgtttgttgttcacggaaggggtctaatgggaagagttattccgggatgcgccgagacgttcatggagtcaccggtatttggagaaggtcaaggtcagggtcagagtcaagggttccgtgacatgcaccagaaagtagagcacctacggtgcggtgacaccattgcaacaccatctggtgtagctcaatggttctacaacaatggaaatgagcctctcattcttgttgcagccgcggatctcgccagcaacc

SEQ ID NO: 147827 - DNA, 541 bp, Arabidopsis thaliana
cggacgcgtgggcggacgcgtgggacttattgcacggctaagattcatgagaatatcgatgatccagaacggtggggcgattttagcacacgagccggaagaatcagcactcttaacagccttaatctccctgttctacgtctagtcagacttaacgcccttagaggttatctctacagcggaggaatggtgttgccacaatggacggcaaacgcgcacacggtgctatacgtcacaggaggtcaagccaagatacaagtggtggacgacaatggtcagtcggtgttcaatgagcaagtgggacaaggccaaatcattgtgattccacaaggctttgcagtttcaaaaacggctggtgaaacgggtttcgagtggatatcattcaagacaaacgataacgcttacattaacacactgagcggccaaacatcgtacttgagagcagttccagtggatgtgatcaaagcgtcatatggagtgaacgaggaagaagccaagaggatcaagtttagtcagcaagagaccatgttgtctatgacac

SEQ ID NO: 147828 - DNA, 531 bp, Arabidopsis thaliana
ctcgtccttcatcgcctttgctagtgtctctgcactgctctttacctgctcacacttagatgctcagtttcttgggtataaaacaatgccatgaccagccacacaagttgatggtcatataaaccaagctgaactgcttagactgcaatcaaaccaaaacttgttaaaacccgattggttagaaaatactatttaccttatcgtcgagcatgaaatttatggcatcttcaagcttatgaagtgagaattcatccactgggattggtgaaggaccaacacctctagcatgcactcgttctccccaaaaaggttggtctccaaagaaaggcacgattgtagttgggcactgtgttcaaggaaaaagcaaaacactttcatattttaccaacttaagtcctacatcaagaaacagactttcgctttcacacatattaaacttaccgaggctttaagacccgcagccgttgttccagcaccaccatgatgaacctaaaagcaggggaccaacaatttcaggtttaaagatgagac

SEQ ID NO: 147829 - DNA, 532 bp, Arabidopsis thaliana
gaaaagataaaataaaataaaaaacaaaacccccaaatttgtgtctcctccggaaaaaaaattcgaaattccggatccaccgccatcaatccctagctttctctctctttctctatcttcgccggcgaaaccagtagggttgctcaattcgttggtagagtactgtggcaatgaagaaaggagcgaagagaaagggtgtttcgaaagcaggtcgcaaagctgctgttgcggagactcagaacgatgaggtgatagaggagacgacgaagacgacgcaggaggagagtcaacagcatgaggaagaagtcgtcgacgaggtgaaggagaatggggaagaagaggatgcgaaacctgattccttagaggaggatgaggagaatcaggaagatgaggtcaaagctgaggaagtaaaggaagaagttgagaagaaacctgttgctcgtcgtggtggtaaacgaaagagggctacgaagaaggatactgagattaaagatgagaagaaacctgttccgaaagctaagaaaccgagagc

SEQ ID NO: 147830 - DNA, 509 bp, Arabidopsis thaliana
ggcttagaggagaccatctgcagcgccaggtgcaccgataacctcgatgacccgtctcgtgctgacgtgtacaagcgcacagctcggttacatcagcactctcaacagttacgatctccccatccttcgcttcatccgtctctcagccctccgtggatctatccgtcaaaacgcaatggtgcttccacagtggaacgcaaacgcgaacgctattctttacgtgacagacggggaagcccaaatccagatcgtaaacgacaatggtaacagagtgtttgacggacaagtctctcaaggacagctcatagccgtaccacaaggtttctcggtggtgaaacgcgcaacaagcaaccgattccagtgggttgagttcaaaacaaacgctaacgcgcaaatcaacactctggcgggacgaacctcagtcttgagaggtttaccacttgaagtcataaccaatgggttccaaatctcacccgaagaagcaaggagggtcaagttcaacacgctcg

SEQ ID NO: 147831 - DNA, 501 bp, Arabidopsis thaliana
cttattctctctctctcgctatctctccctctttaagtttttttttaaaacagactctccctctaagttattcggtcgcaattaaaaaagaaaacaaaatctttataaattttgattttctctttttcacccgattattttgatttgactgttttacgacagtcaatatttcaattttattattgggtgctgacgtggcatgcatccaatagagtatcaccatgaacaccaaaacgatgcgtcttcccccacgtcgcgttctaacggcggataagcgcaaagaacgagacgccttcatctcctccgtcaccgataatccgccggaaatcgccaagttttcctctccgccgccgaaacttgttcctccgccggttaatcccatttccaagaaatcttcaaccgcagcagccgagccgatcggctcgaaccaactgatgttagccggttatctgagccacgagttcctcacccaaggcacactcttcggagagcaatggaacc

SEQ ID NO: 147832 - DNA, 539 bp, Arabidopsis thaliana
  unsure (1)..(539): unsure at all n locations
cggggcggcccaagccgtccgaaaccttccacaattggcaaacctgggttaacaggcttttcttggtttgcgcaactttggcctttggttgcctgggaaccaacgcttccatttaccgaaccgttgtcgaattcgaagaagatgacgccagcaaccccgtaggtccaagacagagatgccagaaggagtttcagcaatcacaacacctaagagcttgccagagatggatgagcaagcaaatgaggcaaggacgtggtggtggtccttccctcgacgatgagttcgatttcgagggcccccagcagggataccagctactccagcagtgctgcaacgagcttcgccaggaagagccagtttgcgtttgccccaccttgaaacaagctgccagggcagttagcctccagggacagcacggaccattccaatccaggaaaatttaccagtcagctaagtacttgcctaacatttgcaagatccagcaagttggtgaatgtcccttccagaccaccatgcctttcttnccttcttactactag

SEQ ID NO: 147833 - DNA, 533 bp, Arabidopsis thaliana
caaaaagaaaatggttaagctcagcaatctcctcgttgcaaccttcttggttctcctcgtccttaacggctgccttgcgaggcagtcacttggggttcctcctcagctacagaacgagtgtaacctcgacaacctagatgttctccaagccaccgaaactatcaagagtgaagccggtcagatcgagtactgggaccacaaccaccctcagctccgatgtgttggtgtttccgttgctcgttatgtaattgaacaaggcggtctttacttgcccaccttcttcacttccccaaaaatttcctacgtcgttcaaggaacgggtatcagcggaagagtggtccctggatgtgccgagaccttcatggactcgcagccgatgcaaggacaacaacaaggccaaccatggcaaggacgacagggacaacaaggccaaccatgggaaggacagggacaacagggacaacaaggaagacatggccaaccatgggaaggacagggacaacagggacaacaaggacgacagggacaacaag

SEQ ID NO: 147834 - DNA, 572 bp, Arabidopsis thaliana
cggaattgcggatcgatcccgcgtccgcaagaacagaaaaacttgtggagcgggttcgacgcacaggtcatagctcaagcattgaaaattgacgttcagtgggctcagcagcttcagaaccaacaagacagcagaggaaacatcgttcgtgttaagggacctttccaggtcgtgaggccacctctaagacagccctacgagagcgaggagtggagacacccacgtagcccacagggcaacggccttgaggagactatctgcagcatgaggtcccacgagaacattgacgaccctgctcgtgctgacgtgtacaagcccagcctaggtcgcgtgaccagcgtcaacagctataccttgcccatcttggagtatgtcaggctcagtgccactcgtggcgttctccagggtaatgcgatggtgcttcctaaatacaacatgaacgctaacgagatcttgtactgcactggaggacaaggaaggatccaagtggtcaacgacaacggacagaacgtgttggaccaacaggtgcagaagggacagctcgtggtcattccacaagggttcgcatacgt

SEQ ID NO: 147835 - DNA, 493 bp, Arabidopsis thaliana
  unsure (1)..(493): unsure at all n locations
attccgggcgaccacgcgtccgacttgtcaagccgggggccaacatctgatggagatcttggtgtctgcataagtgcacctggtggggctgttgctcctgttcctacatggacgcttcaaagacgcatgctcatgaatggaacatcaatggcatctccttctgcctgtggggcaattgcgttacttctaagtgctatgaaggctgagggcatcccagttagcccgtacagtgtgagaagggcccttgaaaatacatctacaccagtaggtgatctacctgaagataaactaactactggacaagggcttatgcaagttgataaggcatatgaatacttaaaacagtttcaggactatccatgcgtattttatcagataaaggtcaatctctccggtaaaacaattccaacatcacgaggcatctacctgcgggagggtactgcttgcagacagtctactgagtggacaatacaagttgatccgnaattccatg

SEQ ID NO: 147836 - DNA, 531 bp, Arabidopsis thaliana
cgcgcccgctcaggcgacgaagttcgaagccggtcagatggaagtatgggaccacatgagccctgagctccgatgcgccggtgtaacggtggctcgcatcacccttcagcccaattccattttcttgcccgctttctttagcccacctgcccttgcttacgttgtccaaggagaaggagttatggggacgattgcttctggttgtcctgagacttttgcagaagttgaaggatcatcaggaagaggaggaggaggagacccgggtcgacgttttgaggacatgcaccagaagttggagaatttccggcgaggggatgtgtttgcttcgcttgccggagtttcacagtggtggtacaaccgcggtgattccgatgccgtcattgtcattgttcttgatgtcaccaacagagaaaaccagcttgaccaagtccctaggatgttccaactagccgggagcagaacgcaggaagaagaacaaccattaacgtggccatcaggcaacaacgctttcagcggtttcgacccaaacat

SEQ ID NO: 147837 - DNA, 544 bp, Arabidopsis thaliana
gagattcgcacgagagcacatgcataaagccccaaaggagtatctacctctcatgttgacaagcgagtacaggatgctggcgcggtgagcatcaatctccaaggagatgtatccttatgtagtgttaaagagagagcttattctaccagatccggattattcacatgaatacgatataggtcgagtctttccctgcgactgcttattggtatgcaaccacgtaggcaagaatccgcgatacggatctaaaatgcgggtttggaacccgctgactggtcaaaccaggtggatcgaagccggctatcgttggaaggaatacgaagtcagatttgttctcggatactgctaccagcaagacgagaacaattcctgcagtaaaaaaatctacaaaattttgtgtttttatcctaatggccaagatacagaaatctacgagcttaactactctgataggtggacaaggacgattcctgatggtgatctcactccaggctggaccttgatatactcagagcagaccgtgtctatgaacggaaatctttac

SEQ ID NO: 147838 - DNA, 537 bp, Arabidopsis thaliana
ggcaaactcacgtttgttgttcacggaaggggtctaatgggaagagttatttcgggatgcgccgagacgttcatggagtcaccggtatttggagaaggtcaaggtcagggtcagagtcaagggttccgtgacatgcaccagaaagtagagcacctacggtgcggtgacaccattgcaacaccatctggtgtagctcaatggttctacaacaatggaaatgagcctctcattcttgttgcagccgcggatctcgccagcaaccagaaccagcttgaccgcaaccttagaccatttttgatagccggaaacaacccacaagggcaggaatggctacaaggccgaaagcaacagaagcaaaacaacatcttcaatggcttcgcacctgagatcttggctcaagccttcaagatcaatgtcgagacggctcagcagctccagaaccagcaagataaccgtggcaacatcgtcaaggtcaacggacctttcggcgtcattaggccacccttgagacgcggcgaaggggccaacaaccacatg

SEQ ID NO: 147839 - DNA, 562 bp, Arabidopsis thaliana
ccaatgcgtgcgagagaacgtacacaaatagcagagcatggctaacaagctcttcctcgtctgcgcaactctcgccctctgcttccgcctcaccaacgcttccatctaccgcaccgttgtcgaattcgaagaagatgacgccagcaaccccgtaggtccaagacagagatgccagaaggagtttcagcaatcacaacacctaagagcttgccagagatggatgagcaagcaaatgaggcaaggacgtggtggtggtccttccctcgacgatgagttcgatttcgagggcccccagcagggataccagctactccagcagtgctgcaacgagcttcgccaggaagagccagtttgcgtttgccccaccttgaaacaagctgccagggcagttagcctccagggacagcacggaccattccaatccaggaaaatttaccagtcagctaagtacttgcctaacatttgcaagatccagcaagttggtgaatgtcccttccagaccaccatccctttcttccctccttactactagagtccaagcccggcctagcacgatgatcat

SEQ ID NO: 147840 - DNA, 533 bp, Arabidopsis thaliana
aaaatggctcgagtctcttctcttctttctttctccttaacacttttgatccttttccatggctacgcggctcaacagggtcagcagggtcagcagtttccgaacgagtgccagctcgaccagctcaatgcgctcgagccttcacacgtactgaagagcgaggctggtcgcatcgaggtgtgggaccaccacgctcctcagctccgttgctcaggtgtctcctttgcacgttacatcatcgagtctaagggtctctacttgccctctttctttaacaccgcgaagctctccttcgtggctaaaggacgaggtcttatgggaaaagtgatccctggatgcgccgaaacattccaagactcatcagagttccaaccacgcttcgaaggtcaaggtcaaagccagaggttccgtgacatgcaccagaaagtggagcacattaggagcggtgataccattgccacaacacccggtgtagcccagtggttctacaacgacggacagcaaccacttgtcatcgtcagcatcttcgatct

SEQ ID NO: 147841 - DNA, 531 bp, Arabidopsis thaliana
caaaaagaaaatggttaagctcagcaatctcctcgttgcaaccttctgggttctcctcgtccttaacggctgcctggcgaggcagtcacttggggttcctcctcagctacagaacgagtgtaacctcgacaacctagatgttctccaagccaccgaaactatcaagagtgaagccggtcagatcgagtactgggaccacaaccaccctcagctccgatgtgttggtgtttccgttgctcgttatgtaattgaacaaggcggtctttacttgcccaccttcttcacttccccaaaaatttcctacgtcgttcaaggaacgggtatcagcggaagagtggtccctggatgtgccgagaccttcatggactcgcagccgatgcaaggacaacaacaaggccaaccatggcaaggacgacagggacaacaaggccaaccatgggaaggacagggacaacagggacaacaaggaagacaaggccaaccatgggaaggacagggacaacagggacaacatggactacagggacaaca

SEQ ID NO: 147842 - DNA, 560 bp, Arabidopsis thaliana
  unsure (1)..(560): unsure at all n locations
aaataatggggnggacccacgcgtccggacctttccaggtcgtgaggccacctctaagacagccctacgagagcgaggagtggagacacccacgtagcccacagggcaacggccttgaggagactatctgcagcatgaggtcccacgagaacattgacgaccctgctcgtgctgacgtgtacaagcccagcctaggtcgcgtgaccagcgtcaacagctataccttgcccatcttggagtatgtcaggctcagtgccactcgtggcgttctccagggtaatgcgatggtgcttcctaaatacaacatgaacgctaacgagatcttgtactgcactggaggacaaggaaggatccaagtggtcaacgacaacggacagaacgtgttggaccaacaggtgcagaagggacagctcgtggtcatcccacaagggttcgcatacgttgtccagtcccacggaaacaagttcgagtggatctctttcaaaactaatgaaaacgcaatgatcagcactttggcgggtagaacctcgctcttgagggcattgccattggaggtcata

SEQ ID NO: 147843 - DNA, 543 bp, Arabidopsis thaliana
gacgagcacgaggatgatttcaccaaaatgtgccgcttctgatgcagctcaattgataagcgctaaagaagatggcaaagttcttctccggactaagttttgccatcccatcttggttagattggggtggcacgatgctggtacttataacaagaatattgaggagtggccactgagaggtggagctaatggaagtcttaggtttgaggctgagcttaagcatgctgcaaatgctggtctgcttaatgctttaaagctcattcagcctctcaaagacaagtatcctaacatctcttatgcggacttattccagttagctagtgccacagcaatagaggaggctggtggtcctgatatcccgatgaaatatgggagagttgatgttgtagcacctgaacagtgtccagaagaaggaagactccctgatgctggacctccttcaccagctgatcatttgagagatgttttctacagaatgggacttgatgacaaggaaatagttgccttgtctggtgcacataccttagggagagccagaccaga

SEQ ID NO: 147844 - DNA, 547 bp, Arabidopsis thaliana
ccgccttagcgctcttcgtggctccatccgtaaaaacgctatggtgctaccgcaatggaacgtaaacgcaaacgcggcactctacgtgacaaacggaaaggctcatatacaaatggtgaacgacaacggagaaagagtgttcgaccaagagatctccagcggacagttactagtcgtgccacaaggcttttcggtcatgaaacatgccataggcgaacagttcgagtggatcgaattcaagacaaacgaaaacgcacaggtcaacacactcgcgggccgtacctcagtcatgagaggtttgccgcttgaggttataaccaatgggtaccagatctctcccgaagaagctaaacgagtaaagtttagcacgattgagaccacactgacccatagcagtccaatgagctacggaaggcctagggcttgaggcttgatgagcgcgtggtggaatagcgtttgaatctaaagttcggtttggtacgacttgtaatatgaaataataatgtacaaagaagttctacgcttaagggaactgttttgtttgagc

SEQ ID NO: 147845 - DNA, 506 bp, Arabidopsis thaliana
acgtagaacggaaaaatccattagataatgaactattggttctaagccatctctggcgctgaatcaacaattcgaagtgcttttcttgcgtattcttgataaaccagcgtttatatatagatgtaggaggatccgtttgggaagtaagaagcccctttgacatctcttcatctgcaaagaattctcgatgtgaaaacacagagacaaagggttgatctttgaataggaaaaagagtggatctgcggggtcccaaatgaattggcttattctaaaaaagccttgttctttggaagacctatctcgtctctggtactgcatggttccgctctgcaagaactccgaatcattctcttgaagctcatacttttcatcataaatgatccgcttgccccgaaatgacccggccgaatagggaaatcccaattcattaagcctttcgatacaatcaaatagaaagccccgagggcgccatattctaggagcccaaactatgtgattgaataaa

SEQ ID NO: 147846 - DNA, 536 bp, Arabidopsis thaliana
gcgagcagagcagagagaaagagattccgagagagagagagaaggagggagagatggagcttagtggtctcattaccaggacgagctccatacgaaccgaaacgacgccgttcgctcaacccttttctctgcaatctctcttcctcccacgagtttctcagcttttctcggatcatctaattaagagaggagatcttgtctcacggtgggattgatttttctcttcacgaagatcgtgttccaggcaattaactgcagaaaatggtgatgtgggtctttggctatggctctcttgtgtggaacccaggatttcactacgatgagaaagtgttaggtttcatcaagggatataaacgtgtctttgatcttgcttgcattgatcatagaggtacaccagaacaccctgcaagaacttgcaccctcgagaaagctgaagaagccatatgctggggtactgcattctgtgtccgtggaggaccagaaaaagaacgtctggctatggagtacttggaacgtagagagtgtgaatatgatct

SEQ ID NO: 147847 - DNA, 541 bp, Arabidopsis thaliana
caacccacaaggtcaagtatggctacaaggccgagagcaacagccacagaagaacattttcaatggatttggaccggaggttattgctcaagctttgaagatcgatcttcagacagcgcagcaacttcagaaccaagatgacaaccgtggaaacattgtccgagtccaaggcccgttcggtgtcattaggccgcctttgaggggccagagacctcaggaggaggaagaagaagaagaaggacgacatggacgacacggtaatggcttagaggagaccatctgcagcgccaggtgcaccgataacctcgatgacccgtctcgtgctgacgtgtacaagccacagctcggttacatcagcactctcaacagttacgatctccccatccttcgcttcatccgtctctcagccctccgtggatctatccgtcaaaacgctaaggtgcttccacagtggaacgcaaacgcgaacgctattctttacgtgacagacggggaagcccaaatccagatcgtaaacgacaatggtaacagagtgtttgac

SEQ ID NO: 147848 - DNA, 549 bp, Arabidopsis thaliana
ataaaaatggctcgagtctcttctcttctttctttctccttaacacttttgatccttttccatggctacgcggctcaacagggtcagcagggtcagcagtttccgaacgagtgccagctcgaccagctcaatgcgctcgagccttcacacgtactgaagagcgaggctggtcgcatcgaggtgtgggaccaccacgctcctcagctccgttgctcaggtgtctcctttgcacgttacatcatcgagtctaagggtctctacttgccctctttctttaacaccgcgaagctctccttcgtggctaaaggacgaggtcttatgggaaaagtgatccctggatgcgccgaaacattccaagactcatcagagttccaaccacgcttcgaaggtcaaggtcaaagccagaggttccgtgacatgcaccagaaagtggagcacattaggagcggtgataccattgccacaacacccggtgtagcccagtggttctacaacgacggacagcaaccacttgtcatcgtcagcatcttcgatctagccagtcaccag

SEQ ID NO: 147849 - DNA, 469 bp, Arabidopsis thaliana
agagaaacagccacaaaagaacattttaaatggattgggaccttaggttatggctcaagctttgaagatgcggtcttcagacagcgcagcaacttcagaaccaagatgacaaccgtggaaacattgtccgagtccaaggcccgttcggtgtcattaggccgcctttgaggggccagagacctcaggaggaggaagaagaagaagaaggacgacatggacgacacggtaatggcttagaggagaccatctgcagcgccaggtgcaccgataacctcgatgacccgtctcgtgctgacgtgtacaagccacagctcggttacatcagcactctcaacagttacgatctccccatccttcgcttcatccgtctctcagccctccgtggatctatccgtcaaaacgcaatggtgcttccacagtggaacgcaaacgcgaacgctatcttttacgtgacaaacgggaagcccaa

SEQ ID NO: 147850 - DNA, 525 bp, Arabidopsis thaliana
gccacagctcggttacatcagcactctcaacagttacgatctccccatccttcgcttcatccgtctctcagcccggcgtggatctatccgtcaaaacgcaatggtgcttccacagtggaacgcaaacgcgaacgctattctttacgtgacagacggggaagcccaaatccagatcgtaaacgacaatggtaacagagtgtttgacggacaagtctctcaaggacagctcatagccgtaccacaaggtttctcggtggtgaaacgcgcaacaagcaaccgattccagtgggttgagttcaaaacaaacgctaacgcgcaaatcaacactctggcgggacgaacctcagtcttgagaggtttaccacttgaagtcataaccaatgggttccaaatctcacccgaagaagcaaggagggtcaagttcaacacgctcgagaccactttgactcacagcagtggcccagctagctacggaaggccaagagtggctgcagcttaagagcttaaaaccgcggcttaacaatg

SEQ ID NO: 147851 - DNA, 538 bp, Arabidopsis thaliana
aaggaagacaaggccaaccatgggaaggacagggacaacagggacatcaaggacgacagggacaacaagggcgacgcatgggaaggacagggacagcagggacaacaagggttccgtgacatgcaccagaaggtggaacatgtgagacgcggagacgtctttgccaacactccaggctctgcccactggatctacaactcaggagaacagccacttgtcatcatcgctcttctcgacatcgccaactaccaaaaccaactcgaccgcaaccctagagtgttccatttggccggaaacaaccagcagggaggctttggcggttcacagcaacaacaagaacagaaaaacttgtggagcgggttcgacgcacaggtcatagctcaagcattgaaaattgacgttcagttggctcagcagcttcagaaccaacaagacagcagaggaaacatcgttcgtgttaagggaccttttcaggtcgtgaggccacctctaagacagtcctacgagagcgaggagtggagacacccacgtagcccac

SEQ ID NO: 147852 - DNA, 519 bp, Arabidopsis thaliana
gggccagagacctcaggaggaggaagaagaagaagaaggacgacacggacgacacggtaatggcttagaggagacgcatctgcagcgccaggtgcaccgataacctcgatgatccgtctcgtgctgacgtgtacaagccacagctcggttacatcagcactctcaacagttacgatctccccatccttcgcttcatccgtctctcagccctccgtggatctatccgtcaaaacgcaatggtgcttccacagtggaacgcaaacgcgaacgccattctttacgtgacagacggggaagcccaaatccagatcgtaaacgacaatggtaacagagtgtttgacggacaagtctctcaaggacagctcatagccgtaccacaaggtttctcggtggtgaaacgcgcaacaagcaaccgattccagtgggttgagttcaaaacaaacgcaaacgcgcaaatcaacactcttgcgggacgaacctcagtcttgagaggtttaccacttgaagtataaccaatgg

SEQ ID NO: 147853 - DNA, 493 bp, Arabidopsis thaliana
cgatgacattttttatttttgaaataggcaacgggttcagttcaagtcggtcatcgatcactttacatattttgtgtttcaaaatgttttagaagttttttcaactcttttttttttttttttctcgtacctaactttggaaatgaaccaatatgatgaaatgtaccaaaattttaaaaacaattgataaaattattgaaatatttaatgatttttgcaacaaaaattgaaccaaatgataagtcataatattaacagttattaagagtcattttaaaatagagtgttgagtctttttgtcgataaaaagttagtttacgatgcttttgatcattgcaggtttatctgacttgttggagtaaaaagaggagttcaaagataaaatggagaaaatgagtcaagaaaatgattgactttttcactggtcggtaccgaagacatataaaatcgataagtttgcggtttctaaaagttcatttttctatgttttagc

SEQ ID NO: 147854 - DNA, 558 bp, Arabidopsis thaliana
  unsure (1)..(558): unsure at all n locations
ccacgcgtccgcacaaatagcaaaacatggctaacaagctcttcctcgtctgcgcaactctcgccctctgcttcctcctcaccaacgcttccatctaccgcaccgttgtcgaattcgaagaagatgacgccagcaaccccgtaggtccaagacagagatgccagaaggagtttcagcaatcacaacacctaagagcttgccagagatggatgagcaagcaaatgaggcaaggacgtggtggtggtccttccctcgacgatgagttcgatttcgagggcccccagcagggataccagctactccagcagtgctgcaacgagcttcgccaggaagagccagtttgcgtttgccccaccttgaaacaagctgccagggcagttagcctccagggacagcacggaccattccaatccaggaaaatttaccagtcagctaagtacttgcctaacatttgcaagatccagcaagttggtgaatgtccctttcagaccaccatccctttcttcccttcttactactagagtccaagcccggnctagcacgatgatcattgagtgt

SEQ ID NO: 147855 - DNA, 509 bp, Arabidopsis thaliana
gctaggatcagagcaacctttgtggtggctaaggacggaagtggacagtttaagactgttcaacaagccgttaatgcttgtcctgagaaaaacccaggccgttgcatcatccacatcaaggctggtatctacagagagcaagtgatcatccctaagaagaagaacaacatcttcatgttcggagatggtgcaagaaagaccgtcatttcttacaacagaagtgttaaactcagccctggaaccaccacttcccttagtggcacagtccgtaagtctcaccaaaccctaattcactagttaggttaacaaatatttttctctacatatatagctcatgttatatattattgcgcagaggttgagtccgaaggattcatggcaaaatggatcggattcaagaacaccgccggtccaatgggacaccaagctgtggctatcagagtgaacggagaccgtgccgtgatcttcaactgcaggttcgacggttaccaagacaccttgtacgtcaa

SEQ ID NO: 147856 - DNA, 535 bp, Arabidopsis thaliana
cggacgcgtgggcggacgcgtgggcggacgcgtgggcttgaccgcaacccatggccattttacttagccggaaacaacccacaaggtcaagtatggctacaaggccgagagcaacagccacagaagaacattttcaatggatttggacccgaggttattgctcaagctttgaagatcgatcttcagacagcgcagcaacttcagaaccaagatgacaaccgtggaaacattgtccgagtccaaggcccgttcggtgtcattaggccgcctttgaggggccagagacctcaggaggaggaagaagaagaagaaggacgacatggacgacacggtaatggcttagaggagaccatctgcagcgccaggtgcaccgataacctcgatgacccgtctcgtgctgacgtgtacaagccacagctcggttacatcagcactcttaacagttacgatctccccatccttcgcttcatacgtctctcagcccttcgtggatctatccgtcaaaaccgcatggtgtttcacagtggaacgcaaa

SEQ ID NO: 147857 - DNA, 390 bp, Arabidopsis thaliana
agccgtccgaaattatccgaccttaatataatccccgttctatgggaaatgatattcataggaactgacacggtggctgttttgatcgagtggattctggctaggatggtcctccatccaaatattcaatcgacggctcacaatgagcttgatcaaatcgggggacgatcaagggctgtcgaagagtctgacatgctgtctatagtatatctaacggctgtggcgacagaagtatcgaggcttgacccgacaggcccactactttcatgagcccgtctagcaatcacagacacgatcatcgacggtcgttgtgttccggcggcgaccaccgcaatgctgaacatgttggctattgcacacgatccacacctgtggcagaattcgctggag

SEQ ID NO: 147858 - DNA, 496 bp, Arabidopsis thaliana
  unsure (1)..(496): unsure at all n locations
ggaccacaaccaccctcagctccgatgtgttggtgtttccgttgctcgttatgtaattgaacaaggcggtcttgacttgcccaccttcttcacttccccaaaaatttcctacgtcgttcaaggaacgggtatcagcggaagagtggtccctggatgtgccgagaccttcatggactcgcagccgatgcaaggacaacaacaaggccaaccatggcaaggacgacagggacaacaaggccaaccatgggaaggacagggacaacagggacaacaaggaagacaaggccaaccatgggaaggacagggacaacagggacaacaaggacgacagggacaacaaggccaaccatgggaaggacagggacagcagggacaacaagggttccgtgacatgcaccagaaggtggaacatgtgagacgcggagacgtntttgccaacacttcaggctcttgccactggatctacaacttaggagaacagccacttgtcatcatc

SEQ ID NO: 147859 - DNA, 271 bp, Arabidopsis thaliana
gaacatacacacatagcaaaaaatggcaaacaagttgttcctcgtctgcgcagctctcgctctctgcttcctcctcgccaacgctttcatctaccgcaccgtcgttgagttcgaagaagatgacgccactaaccccataggcccaaaaatgaggaaatgccgcatggagtttcagaaagaacaacacctaagagcttgccagcaattgatgctccagcaagcaaggcaaggccgtatcgatgagtttgatttctaagatgacatgtagaac

SEQ ID NO: 147860 - DNA, 341 bp, Arabidopsis thaliana
  unsure (1)..(341): unsure at all n locations
gaaaatttcaagaaccctagttaataacgataatgggttcgagagttttggcttccttctttgttttcttaatcttcacggtcatcacattgcctcccacgatccaagcttgcactccttgtactcgtcctcatcctccggttccgaaacctccacaacacggcggtggtggaggtggtggtagcaagccgcctccacatcacggtggaaaaggtggtggtaaacccccaccccacggtggaaaaggtggaggaccgccgcatcatggtggaggaggaggaggaggagggaaatcaccgccggttgttagacctccttccgtagtggngaggccaccgtca

SEQ ID NO: 147861 - DNA, 449 bp, Arabidopsis thaliana
aacgaaaatggttaagctcaacattctactcgttgcaaccttccgtgatctactcgtgcttaaccgctgcctggcgaggcagacacttgggggtcctcctcagatacagaacgagtgtgacctctgcaacctagatgatctgcaggccaccgaaactattaagagtgaagccggtcagatcgagtactgggaccacaaccaccctaagctgcgatgtgttggtgactgcgctgcgttgttatgtacattgaacaaggctgtctttactcgtccaccttctgtacttgcacaaaaatatactagcgtgttcaaggagacacgatcaactcggagagtggttactggatgtgccgagaccttcatggaccttcagtcgatgcaaggacaacaacaaggccaaccatggcaaggacgacagggacaacatgggcaaccatgggaaggacagg

SEQ ID NO: 147862 - DNA, 448 bp, Arabidopsis thaliana
aagaaattttcagcaaatttgttattaaaaatatatatatatatatatagcaaaaccttaaataaatggtgtcgctgtgtgttttgcatttgatttgaagaaataatgtgatttcatatcaaacagtgtgatatcggttaaaataacatgacagttgttatttaaaaaacactaataaatttcacgttattgataaataaaaaaagtatgtaaaaatgaatcaacttttacaatatttctcatccatcatttttgcaactggtaaaatttggagatcttggccctgaatggatgctgattttcgattcagtttttggatttagattttagtttctcgattttagatggtagcgtgagatttttgttattatttatttcgtttcttcagttggcaacatcatttctttgattcttgggttttctttacttccttttaatataacaccta

SEQ ID NO: 147863 - DNA, 522 bp, Arabidopsis thaliana
gtgccactcgtggcgttctccagggtaatgcgatggtgcttcctaaatacaacatgaacgctaacgagatcttgtactgcactggaggacaaggaaggatccaagtggtcaacgacaacggacagaacgtgttggaccaacaggtgcagaagggacagctcgtggtcatcccacaagggttcgcatacgttgtccagtcccacggaaacaagttcgagtggatctctttcaaaactaatgaaaacgcaatgatcagcactttggcgggtagaacctcgctcttgagggcattgccattggaggtcatatcaaatggtttccagatctctcccgaggaagctaggaagatcaagttcaacacacttgagaccactttgacccgcgctgccggtaggcaacaacaacagttgatcgaggagattgtcgaggcttaaatcaaaacgtttttctttttcttaataaagtatggtcagtttgtaatcacgtccctttacctttaacgtacgtgtaaaatatgtgtct

SEQ ID NO: 147864 - DNA, 514 bp, Arabidopsis thaliana
gaaggagtttcagcaatcacaacacctaagagcttgccagagatggatgagcaagcaaatgaggcaaggacgtggtggtggtccttccctcgacgatgagttcgatttcgagggcccccagcagggataccagctactccagcagtgctgcaacgagcttcgccaggaagagccagtttgcgtttgccccaccttgaaacaagctgccagggcagttagcctccagggacagcacggaccattccaatccaggaaaatttaccagtcagctaagtacttgcctaacatttgcaagatccagcaagttggtgaatgtcccttccagaccaccatccctttcttccctccttactactagagtccaagcccggcctagcacgatgatcatgagtgttgctattgatgtatgttaatactatacacagtcatcgtgtgtgttttataaaactgtaagcttaggatgttcgaggctaatgtaattagcactacaccgtaataaatgagaggtttactt

SEQ ID NO: 147865 - DNA, 554 bp, Arabidopsis thaliana
caaaagaaaaactctggtaagctgctgattagcgcatcagcaactgtaggtgcgctactcctagttgcactcatgtgtttctggggatgctttctatataaaaagctcggtaaagtcgagattaaaagccttgcaaaggatgttggtggaggtgcgtctattgtgatgttccacggagatttaccttactcttccaaagatatcattaagaagctggaaatgttgaatgaagagcacataatcggatgtggaggctttggaacggtgtataagctggccatggatgatggcaaagtctttgcattgaagagaattctaaagttaaacgaagggtttgatcggttttttgagcgggagcttgagattcttgggagcatcaaacaccgatacctcgtgaatctacgtggatattgcaattcaccaacatcaaagctactgttatatgattacttgcccggtggtagccttgatgaagcacttcatgagagaggcgagcaattggactgggattcacgcgtaaatatcatcataggagctgcaaaagggttatcata

SEQ ID NO: 147866 - DNA, 555 bp, Arabidopsis thaliana
gtcgcatcgaggtgtgggaccaccacgctcctcagctccgttgctcaggtgtctcctttgcacgttacatcatcgagtctaagggtctctacttgccctctttctttaacaccgcgaagctctccttcgtggctaaaggacgaggtcttatgggaaaagtgatccctggatgcgccgaaacattccaagactcatcagagttccaaccacgcttcgaaggtcaaggtcaaagccagaggttccgtgacatgcaccagaaagtggagcacattaggagcggtgataccattgccacaacacccggtgtagcccagtggttctacaacgacggacagcaaccacttgtcatcgtcagcatcttcgatctagccagtcaccagaaccagcttgaccgcaacccaaggccattttacttagccggaaacaacccacaaggtcaagtatggctacaaggacgagagcaacagccacagaagaacatcttcaatggatttggacccgaggttattgctcaagctttgaagattgatcttcagacagcgcagcaacttcaga

SEQ ID NO: 147867 - DNA, 325 bp, Arabidopsis thaliana
  unsure (1)..(325): unsure at all n locations
cggcgagaaagaaaacggtaagctaaacaatatattagttgcaaccttttttgtacttctcgaccgtaaccgctgcctgcctgangagtgatttggcgttcgtgctcatctccagaactacgggttatcctcgacaaccttagatgtttattcaagcctaccgaaactatcatagagtgatagccggtcaggatcgagtactgtgaccacaaccaccctcagctttcgatgtgttgccgttgtcgttgcttggaaacctcatcggaacagtggcggtgttgtctttgccgaccgttctttattttccttaaaattacactacgct

SEQ ID NO: 147868 - DNA, 512 bp, Arabidopsis thaliana
  unsure (1)..(512): unsure at all n locations
gcacggaaagtacatggcatgttgtttgatgtaccgaggagatgttgttcccaaagatgttaatgctgccgttggcaccatcaagacaaagaggactgttcagtttgttgactggtgcccaactgggttcaaatgtggaatcaactaccaacctccaacagttgttccaggtggtgacctcgctaaggttcagagagctgtatgcatgatcagtaacaacacagcagttgcagaggtgttctcacggatcgaccacaagtttgatctcatgtatgcgaagagggcattcgtgcactgntacgttggtgaaggaatggaggaaggtgaattctctgaggcacgtgaagacttggctgcactggagaaagactacgaagaagttggtgctgaaggtggagacgatgaagaagatgaaggtgaggactattgatacctcttctcaaaaaaccggcaaccaaaaaaagtttttcgtttatctgttttcattaatgattcttggtgattacaatgtt

SEQ ID NO: 147869 - DNA, 489 bp, Arabidopsis thaliana
agaggaagagaaatgggtcgagtctcatctattatctgtatctctttgacactctggagcctatgcaatggctgcactgaccaacactggcccaacgagtgccagctcgatcaactcaatgcgctcgaaccatcccaaatcatcaagagcgagggtggtcgcatcgaggtctgggaccaccatgcaccccaactgcgttgctcccgctttgcctttgagcgtttcgtcattgagcctcagggtcttttcttgcccactttcttgaacgccggcaaactcacgtttgttgttcacggaaggggtctaatgggaagagttattccgggatgcgccgagacgttcatggagtcaccggtatttggagaaggtcaaggtcagggtcagagtcaagggttccgtgacatgcaccagaaagtagagcacctacggtgcggtgacaccattgcaacaccatctggtgtagctcaatggttctacaacaatggaaat

SEQ ID NO: 147870 - DNA, 474 bp, Arabidopsis thaliana
caaaaagaaaatggttaagctcagcaatctcctcgttgcaaccttcggggttctcctcgtccttaacggctgcctggcgaggcagtcacttggggttcctcctcagctacagaacgagtgtaacctcgacaacctagatgttctccaagccaccgaaactatcaagagtgaagccggtcagatcgagtactgggaccacaaccaccctcagctccgatgtgttggtgtttccgttgctcgttatgtaattgaacaaggcggtctttacttgcccaccttcttcacttccccaaaaatttcctacgtcgttcaaggaacgggtatcagcggaagagtggtccctggatgtgccgagaccttcatggactcgcagccgatgcaaggacaacaacaaggccaaaccatgcaaggacgacaggaacaacaaggccaaccatgggaaggacagggacatcagggacaacaaggaagaca

SEQ ID NO: 147871 - DNA, 560 bp, Arabidopsis thaliana
aagaacgtatactttttactccaaatttcaattttaagatttaactggctgtttagagggagccaaacattttggctaatgagatagagaaagagaatgtgttttcaacggattctttttgttaaagaatataaatatatattaatcataatgaggcttttacacacaggtcataattgaatgttaattagggctgtaattaagatataaaaatagcatatgaaaagaacataatgaaccaaaagcggctatatatgattcctccaaagaggagtcaacatgaagctgaatttgtatctggtggtccttttcatctcctttgatgttgtttgcagtggatgattccgcacgatggtgttgatctcaagttttcgtgttagttagcgagaaactggttagtgaggagttcaatagtgtattactgtctagctagtgacgtcgcgttaatccaaatatgcaaggtcttgtaagtgatctctggtatataaaaaaacgagaaccaaaacatgcttaaaatctcggtgaattagttgcgtcacttgtgttgatcattaatactt

SEQ ID NO: 147872 - DNA, 513 bp, Arabidopsis thaliana
ttcagcaatctcctcgttgcaaccttcggggttctcctcgtccttaacggctgccttgcgaggcagtcactgggggttcctcctcagctacagaacgagtgtaacctcgacaacctagatgttctccaagccaccgaaactatcaagagtgaagccggtcagatcgagtactgggaccacaaccaccctcagctccgatgtgttggtgtttccgttgctcgttatgtaattgaacaaggcggtctttacttgcccaccttcttcacttccccaaaaatttcctacgtcgttcaaggaacgggtatcagcggaagagtggtccctggatgtgccgagaccttcatggactcgcagccgatgcaaggacaacaacaaggccaaccatggcaaggacgacagggacaacaaggccaaccatgggaaggacagggacaacagggacaacaaggaagacaaggccaaccatgggaaggacagggacaacagggacaacaaggacgacagggacaacaa

SEQ ID NO: 147873 - DNA, 533 bp, Arabidopsis thaliana
caacccaaggccattttacttagccggaaacaacccacaaggtcaagtatggctacaaggccgagagcaacagccacagaagaacattttcaatggatttggacccgaggttattgctcaagctttgaagatcgatcttcagacagcgcagcaacttcagaaccaagatgacaaccgtggaaacattgtccgagtccaaggcccgttcggtgtcattaggccgcctttgaggggccagagacctcaggaggaggaagaagaagaagaaggacgacatggacgacacggtaatggcttagaggagaccatctgcagcgccaggtgcaccgataacctcgatgacccgtctcgtgctgacgtgtacaagccacagctcggttacatcagcactctcaacagttacgatctccccatccttcgcttcatccgtctctcagccctccgtggatctatccgtcaaaacgccatggtgcttccacagtggaacgcaaacgcgaacgctattctttacgtgacagacggggaagcccaaa

SEQ ID NO: 147874 - DNA, 122 bp, Arabidopsis thaliana
caggttgtttcacattaatcttctgccagaaaccatcatgaagaaccttgaactgataccataaacatacaggggaatgatcccaaaatcttcttaacactataacatcatcatcatctatt

SEQ ID NO: 147875 - DNA, 384 bp, Arabidopsis thaliana
  unsure (1)..(384): unsure at all n locations
nnnngaaaacatacacaaatagcaaaacatggctaacaagctcttcctcgtctgcgcaactctnnncctctgctgcgtcctcaccaacgcttccatctaccgcaccgttgtcgaattcgaagaagatgacgccagcaaccccgtaggtccaagacagagatgccagaaggagtttcagcaatcacaacacctaagagcttgccagagatggatgagcaagcaaatgaggcaaggacgtggtggtggtccttccctcgacgatgagttcgatttcgagggcccccagcagggataccagctactccagcagtgctgcaacgagcttcgccaggaagagccagtttgcgtttgccccaccttgaaacaagctgccagggcagttag

SEQ ID NO: 147876 - DNA, 532 bp, Arabidopsis thaliana
agataaccgtggcaacatcgtcaaggtcaacggacctttcggcgttattaggccacccttgagacgcggcgaaggcggccaacaaccacatgaaatagctaatggtttagaggagactttgtgcaccatgcgatgcactgaaaacctcgatgacccgtcggatgctgacgtgtacaagccatcactcggatacattagcacacttaacagctacaatcttcctatcctcagacttctccgccttagcgctcttcgtggctccatccgtaaaaacgctatggtgctaccgcaatggaacgtaaacgcaaacgcggcactctacgtgacaaacggaaaggctcatatacaaatggtgaacgacaacggagaaagagtgttcgaccaagagatctccagcggacagttactagtcgtgccacaaggcttttcggtcatgaaacatgccataggcgaacagttcgagtggatcgaattcaagacaaacgaaaacgcacaggtcaacacactcgcgggccgtacctcatcatgagag

SEQ ID NO: 147877 - DNA, 555 bp, Arabidopsis thaliana
cgagctcaaccctttaattgcatctacgacagtcgtaccttttgctaggttatcgtcgtcatgatgcagcaggcacctccagcttccaacggtgctgcaacagggccagggcagattccttccgaccaacaagcttacctccagcagcagcagtcgtggatgatgcagcaccagcagcaacaacaaggtcagccgcctgcaggatggaatcagcagtctgcaccgtcttctggtcaaccacagcagcagcagtatggtggtggtggatctcagaatccaggatcagctggtgagatccggtccctgtggatcggtgacttgcagccatggatggatgagaactatctcatgaacgtctttggtcttactggcgaggctacagcagctaaagttattcgcaataaacagaacggatattcagaaggttatggctttattgagtttgtgaaccatgctacagctgagaggaatttacagacttacaatggtgctccgatgtcgagcagtgagcatgcctttaagttgaactgggcttagcttggagctggagagaga

SEQ ID NO: 147878 - DNA, 535 bp, Arabidopsis thaliana
cacaaacacaatctaatcccaaaaatcaaaagatgaatgccacaaagtttgttgtgcttctcgtgattggcgttttgtgtgccattgtcaccgcaaggcaggtcaaagatttgtccacggagaccaaattaggggcctctcttccaaaaactactaccaaaggcattggagctcagctttctgcaactggcacaacttacagcaccagcagtgtcgttagctatgctaatggttttaacaatcccaaaggtccaggggccaatgcattcgaaagtgccaacacatttaccagcggacaagtcactgccaagggtcgcaaggcaagagtttcttctacaagtgcttctgccgctgaaggcgatgctgcagctgcagtgactcgcaaagctgctgctgcacgtgcaaagggtaaggtagcttccgcatcaagggtgaagggttcctctgagaagaagaagaaggaccgcaaaggaaaaaaggattgagcgtgaggtcatctcatattctcatgcatgcgtattcctcaaacctatat

SEQ ID NO: 147879 - DNA, 545 bp, Arabidopsis thaliana
caaaaagaaaatggttaagctcagcaatctcctcgttgcaaccttcggggttctcctcgtccttaacggctgccttgcgaggcagtcacttggggttcctcctcagctacagaacgagtgtaacctcgacaacctagatgttctccaagccaccgaaactatcaagagtgaagccggtcagatcgagtactgggaccacaaccaccctcagctccgatgtgttggtgtttccgttgctcgttatgtaattgaacaaggcggtctttacttgcccaccttcttcacttccccaaaaatttcctacgtcgttcaaggaacgggtatcagcggaagagtggtccctggatgtgccgagaccttcatggactcgcagccgatgcaaggacaacaacaaggccaaccatggcaaggacgacagggacaacaaggccaaccatgggaaggacagggacaacagggacaacaaggaagacaaggccaaccatgggaaggacagggacaacagggacaacaaggacgacagggacaacaaggccaaccatggg

SEQ ID NO: 147880 - DNA, 449 bp, Arabidopsis thaliana
  unsure (1)..(449): unsure at all n locations
gtaggaatacaaatacaaatagcaaaaaaaatggcaaacaagctcttcctcgtctgcgcaactttcgccctctggttcctcctcaccaacgcttccatctaccgcactgttgtcgagttcgacgaagatgacgccagcaaccccatgggcccaagacagaaatgtcagaaggagtttcagcaatcacagcacctaagagcttgccagaaattgatgcgcatgcaaatgaggcaaggccgtggtggtggtccctccctcgacgatgagttcgatttggaagacgacatcgagaacccacaaggcccccagcagggacaccagatcctccagcagtgctgcagcgagcttcgccaggaagagccagtttgtgtttgccccaccttgagacaagctgccagggccgttagcctncagggacaacacggaccattccaatccaggaaaattta

SEQ ID NO: 147881 - DNA, 370 bp, Arabidopsis thaliana
aagaggaagcaaaatcggtcgagtctcatctatgatctcatgctctttgacactcttgatcctcttcaatggcgtacactgcccaacagcggtccaacgagcgccagttcgatcaactcaatgcgctcgaaccatcccaaatcatcaagagcgagggtggtcgcatcgagggctgggaccaccatgcaccccatctccgctgctccggctttgcctctgagcgtttcgacattgggcctcaggggctgttcttgcccactctcttgaacgccggcgaactaacgcatgttgatcacggaaggggtctaatgggacgagatattccggaatgcgcctagacgttgatggagtcaccggtgtttggagaagg

SEQ ID NO: 147882 - DNA, 500 bp, Arabidopsis thaliana
accattgccacaacacccggtgtagcacagtggttctacaacgacggacaggaaccacttgtcatcgtcagcgtcttcgatctagccagtcaccagaaccagcttgaccgcaacccaaggccattttacttagccggaaacaacccacaaggtcaagtatggctacaaggccgagagcaacagccacagaagaacattttcaatggatttggacccgaggttattgctcaagctttgaagatcgatcttcagacagcgcagcaacttcagaaccaagatgacaaccgtggaaacattgtccgagtccaaggcccgttcggtgtcattaggccgcctttgaggggccagagacctcaggaggaggaagaagaagaagaaggacgacatggacgacacggtaatggcttagaggagaccatctgcagcgccaggtgcaccgataacctcgatgacccgtctcgtgctgacgtgtacaagccacagcttcggtacatcagcac

SEQ ID NO: 147883 - DNA, 412 bp, Arabidopsis thaliana
caaaaagaaaatggttaagctcagcaatctcctcgttgcaaccttttttgttctcctcgtccttaacggctgccttgcgaggcagtcacttggggttcctcctcagctacagaacgagtgtaacctcgacaacctagatgttctccaagccaccgaaactatcaagagtgaagccggtcagatcgagtactgggaccacaaccaccctcagctccgatgtgttggtgtttccgttgctcgttatgtaattgaacaaggcggtctttacttgcccaccttcttcacttccccaaaaatttcctacgtcgttcaaggaacgggtatcagcggaagagtggtccctggatgtgccgagaccttcatggactcgcagtcgatgcaaggacaacaacaaggccaaccatggcaagga

SEQ ID NO: 147884 - DNA, 530 bp, Arabidopsis thaliana
aaacatacacacatagcaaaaaatggcaaacaagttgttcctcgtctgcgcagctctcgctctctgcttcctcctgaccaacgcttccatctaccgcaccgtcgttgagttcgaagaagatgacgccactaaccccataggcccaaaaatgaggaaatgccgcaaggagtttcagaaagaacaacacctaagagcttgccagcaattgatgctccagcaagcaaggcaaggccgtagcgatgagtttgatttcgaagacgacatggagaacccacagggacaacagcaggaacaacagctattccagcagtgctgcaacgagcttcgccaggaagagccagattgtgtttgccccaccttgaaacaagctgccaaggccgttagactccagggacagcaccaaccaatgcaagtcaggaaaatttaccagacagccaagcacttgcccaacgtttgcgacatcccgcaagttgatgtttgtcccttcaacatcccttcattcccttctttctactaaatctcaaacaaac

SEQ ID NO: 147885 - DNA, 462 bp, Arabidopsis thaliana
ctccaagccaccgaaactatcaagagtgaagccggtcagatcgagtactgggaccacaaccaccctcagctccgatgtgttggtgtttccgttgctcgttatgtaattgaacaaggcggtctttacttgcccaccttcttcacttccccaaaaatttcctacgtcgttcaaggaacgggtatcagcggaagagtggtccctggatgtgccgagaccttcatggactcgcagccgatgcaaggacaacaacaaggccaaccatggcaaggacgacagggacaacaaggccaaccatgggaaggacagggacaacagggacaacaaggaagacaaggccaaccatgggaaggacagggacaacagggacaacaaggacgacagggacaacaaggccaaccatgggaaggacagggacagcagggacaacaagggttccgtgacatgcaccaaaaggtggaacat

SEQ ID NO: 147886 - DNA, 429 bp, Arabidopsis thaliana
cgcaatggtgcttccacagtggaacgcaaacgcgaacgctattctttacgtgacagacggggaagcccaaatccagatcgtaaacgacaatggtaacagagtgtttgacggacaagtctctcaaggacagctcatagccgtaccacaaggtttctcggtggtgaaacgcgcaacaagcaaccgattccagtgggttgagttcaaaacaaacgctaacgcgcaaatcaacactctggcgggacgaacctcagtcttgagaggtttaccacttgaagtcataaccaatgggttccaaatctcacccgaagaagcaaggagggtcaagttcaacacgctcgagaccactttgactcacagcagtggcccagctagctacggaaggccaagagtggctgcagcttaagagcttaaaaccgcggcttaacaatg

SEQ ID NO: 147887 - DNA, 542 bp, Arabidopsis thaliana
ggttaagctcagcaatctcctcgttgcaaccttcggggttctcctcgtccttaacggctgccttgcgaggcagtcactgggggttcctcctcagctacagaacgagtgtaacctcgacaacctagatgttctccaagccaccgaaactatcaagagtgaagccggtcagatcgagtactgggaccacaaccaccctcagctccgatgtgttggtgtttccgttgctcgttatgtaattgaacaaggcggtctttacttgcccaccttcttcacttccccaaaaatttcctacgtcgttcaaggaacgggtatcagcggaagagtggtccctggatgtgccgagaccttcatggactcgcagccgatgcaaggacaacaacaaggccaaccatggcaaggacgacagggacaacaaggccaaccatgggaaggacagggacaacagggacaacaaggaagacaaggccaaccatgggaaggacagggacaacagggacaacaaggacgacagggacaacaaggccaaccatgggaaggacagg

SEQ ID NO: 147888 - DNA, 529 bp, Arabidopsis thaliana
atggctcgagtctcttctcttctttctttctccttaacacttttgttccttttccatggctacgcggctcaacagggtcagcagggtcagcagtttccgaacgagtgccagctcgaccagctcaatgcgctcgagccttcacacgtactgaagagcgaggctggtcgcatcgaggtgtgggaccaccacgctcctcagctccgttgctcaggtgtctcctttgcacgttacatcatcgagtctaagggtctctacttgccctctttctttaacaccgcgaagctctccttcgtggctaaaggacgaggtcttatgggaaaagtgatccctggatgcgccgaaacattccaagactcatcagagttccaaccacgcttcgaaggtcaaggtcaaagccagaggttccgtgacatgcaccagaaagtggagcacattaggagcggtgataccattgccacaacacccggtgtagcccagtggttctacaacgacggacagcaaccacttgtcatcgtcagcatcttcgatc

SEQ ID NO: 147889 - DNA, 534 bp, Arabidopsis thaliana
aacaaaaagaaaatggttaagctcagcaatctcctcgttgcaaccttcggggttctcctcgtccttaacggctgccttgcgaggcagtcacttggggttcctcctcagctacagaacgagtgtaacctcgacaacctagatgttctccaagccaccgaaactatcaagagtgaagccggtcagatcgagtactgggaccacaaccaccctcagctccgatgtgttggtgtttccgttgctcgttatgtaattgaacaaggcggtctttacttgcccaccttcttcacttccccaaaaatttcctacgtcgttcaaggaacgggtatcagcggaagagtggtccctggatgtgccgagaccttcatggactcgcagccgatgcaaggacaacaacaaggccaaccatggcaaggacgacagggacaacaaggccaaccatgggaaggacagggacaacagggacaacaaggaagacatggccaaccatgggaaggacagggacaacagggacaacaaggacgacagggacaacaa

SEQ ID NO: 147890 - DNA, 487 bp, Arabidopsis thaliana
  unsure (1)..(487): unsure at all n locations
angcgtcaggcaagaagtggttcataatcgattaccaagggaaatgggtaacagttttttccatgcaagatttaatagttgagccattcttagcctaggtaaagtccatcttgttgcgatagaaacgaacaaaaacaaataagttttagctaatgtaataaagataccaattgttgttccaaaaatttgatccctttgaaatagctccagaatagatatatacggaatagaaatattccaaccgcctaagtatagaactgttacaaataatgaggaaattaatagatttagataagatgcaacgtaaaataaaccaaattttatacctgaatattcagtttgataacctgctattaattcttcttccgcttctggtaaatcaaacggtaacctttcgattctgctgggaagaaattagaaaatgataacctatggttgcgcacaattcatcctaaacatattgatggctactttaatgcttactgtg

SEQ ID NO: 147891 - DNA, 538 bp, Arabidopsis thaliana
caatcttctctaacaaaaaactttgaaggatgaagattcttctagcatcattgtgtttgatcagtcttctcgtaggcgggccttctgtcttctctgcttcttcttcctctgaagattttgatttcttctacttcgtccaacaatggccaggatcatactgtgacacacagaagaagtgttgttatccaaattcaggcaaaccagctgctgattttggcattcatggtctttggcctaactacaaagatggcacttatccatctaactgtgatgactctaaacctttcgatagctcaacgatatcagatcttctcacctcgatgaagaagagctggccaacactggcttgcccaagcggttcaggtgaagcgttttgggagcacgaatgggagaagcatggtacttgctctgaatcggttatcgatcaacatgaatatttccaaaccgctcttaaccttaaacagaaaaccaatctccttggagctctaaccaaagccgggattaatccggatggaaaatcttactctttggagagcat

SEQ ID NO: 147892 - DNA, 488 bp, Arabidopsis thaliana
agaaaaatgggtcgagtctcatctattatctctttctctttgacactcttgatcctcttcaatggctacactgggcaacagtggcccaacgagtgccagctcgatcaactcaatgcgctcgaaccatcccaaatcatcaagagcgagggtggtcgcatcgaggtctgggaccaccatgcaccccagctgcgctgctccggctttgcctttgagcgtttcgtcattgaccctcacggtcttttattgcccactgtcttgaacgccggcaaactcacgtttgttgttcacagaaggggtctaatgggaagagttattccgggatgcgccgagacgttcatggagtcaccggtatttggagaaggtcaaggtcagggtcagagtcaagggtttcgtgacatgcaccagaaagtagagcacctacagtgcggtgacactcattgaacagcgattggtggagctcaatggttctacaacaatgcgaatgagcc

SEQ ID NO: 147893 - DNA, 466 bp, Arabidopsis thaliana
gaataatcccatattatcattaaattaaggaaaatgatttttatttgttctttataaaagacaagctgtgattgagacacattggttcgttaacgacagcttgtctaaattttcactaaaacccaaaccaaactcttttttttctggtcttttgggttttgtttctaatcatatattcatttgcacttaatcatcgattaaagctactgatgatatgataatatatgcaggtaaattgatggaggtagcttgtagaatgatggggtcacggtttattccgtgtcagtgatttcacacgttatcaaaaaaaaattccaagcttccaaattcttaattctgtaaacatgtggaaaaaaaaaagaaagagttgaatatgtaaatgatgtgatttttgggttcgatgttatttgcatgttctatttgcaatgtttttattatcatagatatgtatatctatatacgcaga

SEQ ID NO: 147894 - DNA, 497 bp, Arabidopsis thaliana
  unsure (1)..(497): unsure at all n locations
gcgacagacgagtagtagtacatatacgaatagcaaaaaaaatggcaaacatgctcttcctcgtctgcgcaactttcgccgtctgcttcctcctcaccaacgcttccatctaccgcactgttgtcgagttcgacgaagatgacgccagcaaccccatgggcccaagacagaaatgtcagaaggagtttcagcaatcacagcacctaagagcttgccagaaattgatgcgcatgcaaatgaggcaaggccgtggtggtggtccctccctcgacgatgagttcgatttggaagacgacatcgagaacccacaaggcccccagcagggacaccagatcctccagcagtgctgcagcgagcttcgccaggaagagccagtttgtgtttgccccaccttgagacaagctgtcagggccgttagcctccanggacaacacggaccattccaatccaggaaatattacaagacagctaaagtccttggctaacatttgcaagaa

SEQ ID NO: 147895 - DNA, 475 bp, Arabidopsis thaliana
gtgagacgcggagacgtctttgccaacactccaggctctgcccactggatctacaactcaggagaacagccgctggtcatcatcgctcttctcgacatcgccaactaccaaaaccaactcgaccgcaaccctagagtgttccatttggccggaaacaaccagcagggaggctttggcggttcacagcaacaacaagaacagaaaaacttgtggagcgggttcgacgcacaggtcatagctcaagcattgaaaattgacgttcagttggctcagcagcttcagaaccaacaagacagcagaggaaacatcgttcgtgttaagggacctttccaggtcgtgaggccacctctaagacagccctacgagagcgaggagtggagacacccacgtagcccacagggcaacggccttgaggagactatctgcagcatgaggtcccacgagaacattgacgaccctgctcgtgctgacgtgt

SEQ ID NO: 147896 - DNA, 542 bp, Arabidopsis thaliana
ggaatccggtcgaccacgcgtccgagaaaacatacacaaatagcaaaacatggctaacaagctcttccttgtctgcgcaactctcgccctctgctggcgtggtcaccaacgcttccatctaccgcaccgttgtcgaattcgaagaagatgacgccagcaaccccgtaggtccaagacagagatgccagaaggagtttcagcaatcacaacacctaagagcttgccagagatggatgagcaagcaaatgaggcaaggacgtggtggtggtccttccctcgacgatgagttcgatttcgagggcccccagcagggataccagctactccagcagtgctgcaacgagcttcgccaggaagagccagtttgcgtttgccccaccttgaaacaagctgccagggcagttagcctccagggacagcacggaccattccaatccaggaaaatttaccagtcagctaagtacttgcctaacatttgcaagatccagcaagttggtgaatgttccttccagaccaccatccctttcttcccttcttactac

SEQ ID NO: 147897 - DNA, 535 bp, Arabidopsis thaliana
agaaaaatgggtcgagtctcatctattatctctttctctttgacactcttgatcctcttcaatggctacactggccaacagtggcccaacgagtgccagctcgatcaactcaatgcgctcgaaccatcccaaatcatcaagagcgagggtggtcgcatcgaggtctgggaccaccatgcaccccagctccgttgctccggctttgcctttgagcgtttcgtcattgagcctcagggtcttttcttgcccactttcttgaacgccggcaaactcacgtttgttgttcacggaaggggtctaatgggaagagttattccgggatgcgccgagacgttcatggagtcaccggtatttggagaaggtcaaggtcagggtcagagtcaagggttccgtgacatgcaccagaaagtagagcacctacggtgcggtgacaccattgcaacaccatctggtgtagctcaatggttctacaacaatggaaatgagcctctcattcttgttgcagcccgggatctcgccagcaaccagaaccagc

SEQ ID NO: 147898 - DNA, 372 bp, Arabidopsis thaliana
cccacgcgtccgactagatttgcggtattgccactctctgttctccttctcgttctcttgttcctctgcactgagtcgttggctaagtcggaggagtctgaagaatacgacgtcgctgtagccttcatgttgcgggttttcgtctcctcttctgattaagaaagatcaatggaaaccaatcttcgagacgaagtttggacagatttcaaccggtcaaatcggcaatggatgcggtggtatgggaccttacaagattcattccataacgttggagccatacacatttttgctccctctttttttttattccgacatggtcttcttcgatgactctggaagagggattctttattgggttgactaggaagccaa

SEQ ID NO: 147899 - DNA, 431 bp, Arabidopsis thaliana
aagaaatactttctcaattttctctaatggctctgataaccttacttgaagtctcaatttctttactctttttctccttcctttacggatatttcttgattagcaagaaacctcaccgctcgtttctcaccaactggccatttctcggtatgcttccgggtttactcgtggagatccctcgtgtttacgactttgtaaccgagcttctcgaggcctcaaacttaacttatcctttcaaaggtccgtgttttgggggccttgacatgttgatcaccgttgatccggcttatatccatcacatcatgagctcaaacttcgcgaattacccgaaaggaaccgagttcaagaagatattcgatgttttgggagatgggattttcaacgcggattcggagttatggaaagatctgaggaatcagctcaaagcatga

SEQ ID NO: 147900 - DNA, 409 bp, Arabidopsis thaliana
cccacgcgtccgcacaaacgagtaagaatacaaatacaaatagcaaaaaaaattgtaacaagctcttcctcgtctgcgcaactttcgccctctgctttctactcaccaacgctttcatctaccgcactgttgtcgagttcgacgaagatgacgccagcaaccccatgggcccaagacagaaatgtcagaaggagtttcagcaatcacagcacctaagagcttgccagaaatttgatgcgcatgcaaatgaggcaaggccgtggtggtgggccctccctcgacgatgagttcgatttggaagacgacatctagaacccacaaggcccccagctaggacaccagattcttcatcagtgcttagcgagcttctccaggaagagccagtttgtgtttgtcccaccctgagaca

SEQ ID NO: 147901 - DNA, 398 bp, Arabidopsis thaliana
gaaaatggttaagctcagcaatctcctcgttgcaaccttcggggttctcctcgtccttaacggctgccttgcgaggcagtcacttggggttcctcctcagctacagaacgagtgtaacctcgacaacctagatgttctccaagccaccgaaactatcaagagtgaagccgggcagatcgagtactgtgaccacaaccaccctcagcttcgatgtgttggtggttcccgcgctcgttatgtaattgaacaaggcgggctttacttgcccaccttctttacttccccaaaaatttcctacgtcgttcaaggaacgggtataagcggaagagcggtccctggataggccgagaccctcatggactcgcagccgatgcaaggacaacaacatgggccaacca

SEQ ID NO: 147902 - DNA, 417 bp, Arabidopsis thaliana
caacaaccaaacactcatttctccacatcttgagagaaaaaaacagagcaagtatattagagatctcatggcgatggcggtctccggagctgtcctcagtgggcttggttcttcgttcctcaccggaggcaagaggagtgccaccgcattgggaagcggcgtaggcactggagctcagagagttggcaggaaaactcttattgtcgctgctgcggctgctcagcctaagaaatcttggatccctgccgttaaaggtggtggcaacttccttgaccctgaatggctcgaaggctcgctaccaggagatttcgggttcgacccattgggtttggggaaagaccccgcttttttgtaatggttcagagaggctgagctgattcatggccgatgggcgacggcagcgggtcttgggatcct

SEQ ID NO: 147903 - DNA, 387 bp, Arabidopsis thaliana
gaccagttcactacctttttgatcccaaactggtttgcgggtgaggcgattggttccacgaaagacaatccatttccattggcagatgcatataaggcagtgcagcagacaaaccttaagaacttagaggaaacaagacaatccttgtgagaaacacctttcgaagaaaaccgataacgagaactcactacagcgttccacatgtatttcaaagactggctatacgcgacgggaaatattctggaactttactgcctacaaggcgattaagaccaatggcgagtgaaaatgtcagtgtcacttgggagttcttttgttccggatcttctcagagatttgctagcacggtttgacataagaatttaactgcgcaggacgctctcttac

SEQ ID NO: 147904 - DNA, 408 bp, Arabidopsis thaliana
caatcactcttcacttctccccactccttactccttttttttttgcctttctaagcaatctctctcttcttcttatattctcatatttgattccttttctctctcatacgatctgcacaccactactaagaacaacagagctagagagacttgcaataattgtaaaacatgattggaacaagcttccccgaggatcttgattgtggcaacttctttgacaacatggatgatctcatggactttcccggaggagatatcgatgtcggtttcggcataggtgactccgactctttccctaccatttggaccactcatcacgacacgtggcctgccgcttctgatcctctcttttcttccaacaccaactcttgattcaatacctgagctctatgttccggtgaggacatt

SEQ ID NO: 147905 - DNA, 304 bp, Arabidopsis thaliana
agaaaaacttgtggagcgggttcgacgcacaggttttagctcaagcattgaaaattgacgttcagttggctcagcagcttcagaaccaacaagacagcagaggaaacatcgttcgtgttaagggacctttccaggtcgagaggccacctctaagacagccctacgagagcgaggagtggagacacccacgtagcccacagggcaacggccttgaggagactatttgcagcatgaggtgccacgagaacattgacgaccctgctcgtgctgacgtgtacaagcccaggctatgtcgggtgaccag

SEQ ID NO: 147906 - DNA, 431 bp, Arabidopsis thaliana
cacaaacgagtaagaatacaaatacaaatagcaaataaaatggcaaacaagctcttcctcgtctgcgcaactttcgccctctgcttcctcctcaccaacgcttccatctaccgcactgttgtcgagttcgacgaagatgacgccagcaaccccatgggcccaagacagaaatgtcagaaggagtttcagcaatcacagcacctaagagcttgccagaaattgatgcgcatgcaaatgaggcaagggcgtggtggtggtccctccctcgacgatgaagtcgatttggaagacgacattgagaacccacaaggcccccagcagggacaccagatcctccagcagagctgcagcgagcttctccaggaagagccagtttgtgtttgccccaccttgagacaagctagcagggccgtttagcctcagggacaaca

SEQ ID NO: 147907 - DNA, 392 bp, Arabidopsis thaliana
gttgtccagtcccacggaaacaagttcgagtggatctctttcaaaactaacgaaaacgcaaagatcagcactttggcggggagaacctcgctcttgagggcattgccattggaggtcatatcaaatgggttccagatctctcccgaggaagctaggaagatcaagttcaacacacttgagaccactttgacccgcgctgccggaaggcaacaacaacagttgatcgaggagatagtcgaggcttaaattaaaacgtttttccttttcttaaaaaagcatggtcagtttgtaatcacgttcctttacctttaacggacgagtaaaaaatgtgtctgcggcacctcacttggaataacaccttgtactcataaataaaagggaaggttcgaggt

SEQ ID NO: 147908 - DNA, 305 bp, Arabidopsis thaliana
cgtcagatccgcagaaagatgagtgagattatggtgaaggaggcttcatcttgtgacctcaaggagctagttgccaagttcatcccagaggccattggaagagagattgagaaggcaacacagggcatctacccgttgcagaatgtgttcatccgtaaagtgaagatcctaaaggctcccaagtttgaccttggaaagctcatggaggtgcatggagattacacagcagaggatgtttgtgtgatggtgtgacaggccaccttttgttacaatggttgaggagccaacagaaaatttttgagctt

SEQ ID NO: 147909 - DNA, 388 bp, Arabidopsis thaliana
ggaagaaaaatgggtcgagtctcatctattatctctttctctttgacactcttgatcctcttcaatggctacactgcccaacagtggcccaacgagtgccagctcgatcaactcaatgcgctcgaaccatcccaaatcatcaagagcgagggtggtcgcatcgaggtctgggaccaccatgcaccccagctccgttgctccggctttgcctttgagcgtttcgtcattgagcctcagggtcttttcttgcccactttcttgaacgccggcaaactcacgtttgttgttcacggaaggggtctaatgggaagagttattccgggatgcgccgagacgttcatggagtcaccggtatttggagaaggtcaaggtcagggtcagagtcaag

SEQ ID NO: 147910 - DNA, 259 bp, Arabidopsis thaliana
agaaaaaaggggcgaggctcatctattatctctttctcttagacactcttgatcctcttcaatggctacactgcccaacagtggcccaacgagtgccagctcgatcaactcaatgcgctcgaaccatcccaaatcatcaagaacgagggtggtcgcatcgaggtctgggaccaccatgcaccccagctccgatgctccggctttgcctttgagcggttcgtcattgaacctcaaagacttttcttggccacttttttga

SEQ ID NO: 147911 - DNA, 265 bp, Arabidopsis thaliana
agaaaatggttaagctcagcaatctcctcgttgcaaccttcggggttctcctcgtccttaacggctgccttgcgaggcagtcacttggggatcctcctcagctacagaacgagtgtaacctcgacaacctagatgttctccaagccaccgaaactatcaagagtgtagccggtcagatcgagttctgggaccacaaccaccctcagcttcgatgtgttggtgtttccgttgctcggtttgtaattgatcaaggcggactttactt

SEQ ID NO: 147912 - DNA, 356 bp, Arabidopsis thaliana
gagatttcggaagattcgatcgatttggggggtttagggtttaatctcaactggtaatcaatggcgccacctccaggactttacttcggtaccagcactcttgctctggttgctcgtgctttggctttcggggtgggtcttatttacgtgcaacattaagctcaaggcttttaagataaagaagaattcgcagatttaggccgtagccaaggctcatcacttaaccaactttgtttcttcttttcaataagattatgaaaccaaaggtatgtcttctctgaatggagctcttttcctccttaaggtatatcttcctcggggacattttttacatcttactggttttttaattcaaa

SEQ ID NO: 147913 - DNA, 354 bp, Arabidopsis thaliana
cacaaatagcaaaacatggctaacaagctcttcctcgtctgcgcaactctcgccctctgcttgctcctcaccaacgcttccatctaccgcaccgttgtcgaattcgaagaagatgacgccagcaaccccgtaggtccatgacagagatgccagaaggagtttcagcaatcacaacacctaagagcttgccagagatggatgagcaagcaaatgaggcaaggacgtggtggtggtccttccctcgacgatgagttcgatttcgagggcccccagcagggataccagctactccagcagtgctgcaacgagcttcgccaggaagagccagtttgcgtttgccccaccttgaaacaa

SEQ ID NO: 147914 - DNA, 360 bp, Arabidopsis thaliana
cgcaaccctagagagttccatttggccggaaacaaccagcagggaggctttggcggttcacagcaacaacaagaacagaaaaacttgtggagcgggttcgacgcacaggtcatagctcaagcattgaaaattgacgctcagttggctcagcagcttcagaaccaacaagacagcagaggaaacatcgttcggagtaagggacctttccagagcgggaggccacctctaagacagccctacgagagcgaggagtggagacacccacgtagcccacagggtaaccgccctgaggagactatctgcaacatgaggttccacgagaacattgacgaccctgctcgggctgacgtgtacaagccc

SEQ ID NO: 147915 - DNA, 311 bp, Arabidopsis thaliana
aaacatcataatatttttttttaatataattagtaattagattttcagtttctatagttaatctaaaatgatttactttagagtttacacaaatcatatattttctgaaatatgctttccgtgtttataataaattcttaattcgaattagtacaaatctatttaaaaccatgataaaataacattaaaagacaaaatcaaaatataacaaaaaaatggtttccttgtagattttattacacatattattattaaaaaatattttatttacattataacatttattttttatttataatatttttttttat

SEQ ID NO: 147916 - DNA, 384 bp, Arabidopsis thaliana
tcgcaagagtgaagccggtcagatcgagtactgggaccacaaccaccctcagctccgatgagttggagtttccgttgctcgctatggaatagaacaaggcggtctttacttgcccaccttcttcactttcccaaaaatttcctacgccgttcaaggaactgggtattagcggaagagtggtccctggatgtgccgagaccttcatggactcgcagccgatgcaaggacaacaacaaggccaaccatggcaaggacgacagggacaacaaggccaaccatgggaaggactgggacaacagggacaacaaggtagacatggccaaccatgggaaggacagggacaacagggacaacatggtcgacagggacaacatgggctaccat

SEQ ID NO: 147917 - DNA, 404 bp, Arabidopsis thaliana
tcgggaacgggtatcagcggaagagtggtccctggatgtgccgagaccttcatggactcgcagccgatgcaaggacaacaacaaggccaaccatggcaaggacgacagggacaacaaggccaaccatgggaaggacagggacaacagggacaacaaggaagacaaggccaaccatgggaaggacagggacaacagggacaacaaggacgacagggacaacaaggccaaccatgggaaggacagggacagcagggacaacaagggttccgtgacatgcaccagaaggtggaacatgtgagacgcggagacgtctttgccaacactccaggctctgcccactggatctacaactcatgagaacagccacttgtcatcatcgctcttcttgacatctgcaactacca

SEQ ID NO: 147918 - DNA, 442 bp, Arabidopsis thaliana
ctcgacatcgccaactaccaaaaccaactcgaccgcaaccctagagtgttccatttggccggaaacaaccagcagggaggctttggcggttcacagcaacaacaagaacagaaaaacttgtggagcgggttcgacgcacaggtcatagctcaagcattgaaaattgacgttcagttggctcagcagcttcagaaccaacaagacagcagaggaaacatcgttcgtgttaagggacctttccaggtcgtgaggccacctctaagacagccctactagagcgaggagtggagacacccacgtagcccacagggcaacggtcttgaggagactatctgcagcatgagagtccacgagaacattgacgaccctgctcgtgctgacgtgtacaagcccagcctatgttgcgtgaccagcgtcaacagcttttccttgcccattttgg

SEQ ID NO: 147919 - DNA, 241 bp, Arabidopsis thaliana
cggacgcgtgggcaaaaagaaaatggttaagctcagcaatctcctcgttgcaaccttcggggttctcctcgttcttaacggctgccttgcgaggcagtcacttggggttcctcctcagctacagaacgagtgttacctcgacaacctagatgtttttctagccaccgaatctttcatgagtgatgccggacagatcgagttctgtgaccacaaccaccctcagcttcgatgtgttggtgtt

SEQ ID NO: 147920 - DNA, 400 bp, Arabidopsis thaliana
cttctgatgagattcctttcaagtcaaaggaaattatctcgcgtgacgatacgtttgtgaagaaagctaaatcttcgttttatagtgatgggttgttagctcctagtaagccccaggttctggattcaacacttcatcaggctaagaacgttgcaggcaatgatggggagaagttgtgtctcataaaacttgctagcttgattgaggtatctgccaagatagctactcatgagctaaatttgcagcacaggctgatggatcagctcgaatggttttcggattctctaggcaagttatcgagtcttgtcaggctagatctgtttgagaatttgatcatggtactaccggtaaccataggagggcttatttctttagcgaggcttgatttgcttttcaatag

SEQ ID NO: 147921 - DNA, 424 bp, Arabidopsis thaliana
  unsure (1)..(424): unsure at all n locations
gctcgccgcgcaatctgcggcgcgatcttcaccatccttgtcatactaggtatcatagccttaatcctttggctcgtctaccgtccacataaaccacgtctcaccgtcgtcggagccgccatctacgacctgaatttcacagcgccgccgttaatctcaacctccgttcagttcagcgttttagcaagaaaccctaaccggagagtctccattcactacgacaagctctctatgtacgtaacgtacaaagatcagatcataacaccgncgcttncactaccaccgcttcgtttaggacataaatctacggttgtgatagctccggtgatgggaggcaacggtataccagtctcgccggaagtagctaatggtttaaaaaatgatgaagcttacggcgtcgttttgatgagagtggtgatttttg

SEQ ID NO: 147922 - DNA, 330 bp, Arabidopsis thaliana
cgcatttgtgcagatattattatccttcctcgtaacaagagcttagctaagatgacgaagaactacccaaccgggagcgaagattacaagaaggctgttgagaagtgcaagaggaagctcataggtttgatcgctgagaagaactaggcacccatcatggaccgactcgcatggcactctgctggaactttcgattgtcaatcaaggactggaggtccattccgaacaatgaggtttgacgctgagcaagcttatggagccaacaggggtatccacattgcttcttaggtgttggaccccatcagtgagcaattgcctaccatctttttt

SEQ ID NO: 147923 - DNA, 160 bp, Arabidopsis thaliana
tccttattaagaaagaccaacacagacacggaagaagtagcttggttcttctctttgtgaaggtgaatgcgggagatggggactggagattctgcttcgagactgattctctggttctgcttagggtttttgattctaggtgttggatttgcgcaatgtg

SEQ ID NO: 147924 - DNA, 231 bp, Arabidopsis thaliana
agaaataacaaaatggctcgagtctcttctcttctttctttcttcttaacacttttgatccttttccatggctacgcggcttaacagggtcagcagggtcagcagtctccgaacgagtgccagctcgaccagctcaatgcgctcgagccgtcacacgtactgaagagcgaggctggtcgcatcgaggtgtgggtccaccactctcctcagcttcgttgctaatgtgtctcc

SEQ ID NO: 147925 - DNA, 247 bp, Arabidopsis thaliana
gtcaagcacttgcccaacgtttgcgacatcccgcatgttgatgtttgtcccttcaacatcccttcattcccttctttctactaaatctcaaacaaaccctcaaagcgtatgagagtgcggttgttgatatatacatgttgacacttgacacataccacacctcatcgggtgttttatgataaatgtaagcttttggatgtttgagggtaatgaaagcactacttaataaataagagttttgtttaaa

SEQ ID NO: 147926 - DNA, 444 bp, Arabidopsis thaliana
cacacatagcaaaaaatggcaaacaagctgttccttgtctgcgcagctctcgctctctgcttgctcctcaccaacgcttccatctaccgcaccgtcgttgagttcgaagaagatgacgccactaaccccataggcccaaaaatgaggaaatgccgcaaggaggttcagaaagaacaacacctaagagcttgccagcaattgaagctccagcaagcaaggcaaggccgtagcgatgagtttgatttcgaagacgacatggagaacccacagggacaacaagaggaacaacaggtattccagcagagctgcaacgagctttgccaggaagagccagatagagattgccccaccttgaaacaaggtggcaagggcggtagactccagggacagcaccaaccaatgcaagtaaggaaaatctaccagacaggcaagcacttgcccaaa

SEQ ID NO: 147927 - DNA, 357 bp, Arabidopsis thaliana
ccgcttctgggatcgccgccgcgtttttgcttggtactttaactaggagagcttatggctctgctggtttcctcttagtcgctgcttacttcgtcataggaacagcggcaacgaaggttaaaatgacgcataaggaagcacaaggtgtggccgaaaagagaaagggttgaagaggaccacgcagtgtgattggttcaagtgctgctggttgtgtctgtgcttttctttcaatatatcaagtgggaggagcagttttttcccagcttttccggcttggttttgtttccagtttctggactaaagtttcttacactgtcttgagcgagatatgcaatgcttattgaaaaacatcgtatt

SEQ ID NO: 147928 - DNA, 443 bp, Arabidopsis thaliana
cttcgatctagccagtcaccagaaccagcttgaccgcaacccaaggccattttacttagccggaaacaacccacaaggtcaagtatggctacaaggccgagagcaacagccacagaagaacattttcaatggatttggacccgaggttattgctcaagctttgaagatcgatcttcagacagcgcagcaacttcagaaccaagatgacaaccgtggtaacattgtccgagtccaaggcccgttcggtgtcattaggccgcctttgaggggccagagacctcaggaggaggaagaagaagaagaaggacgacatggacgacacggtaatggcttagaggagaccatctgcagcgccaggtgcaccgataaccttgatgacccgtctcgtgctgacgtgttcaagccacaactcggttacatcagcactcttaacagttacgatc

SEQ ID NO: 147929 - DNA, 329 bp, Arabidopsis thaliana
aacaaacaaaaagaaaatggttaagctcagcaatctcctcgttgcaaccttcggggttctcctcgtccttaacggctgccttgcgaggcagtcacttggggttcctcctcagctacagaacgagtgtaacctcgacaacctagatgttctccaagccaccgaaactatcaagagtgaagccggtcagatcgagtactgggaccacaaccaccctcagctccgatgtgtaggtgtttccgttgctcggtatgtaattgaacaaggcgggctttacttgcccaccttcttcactttcccaataatttcctacgtcgttcaaggaacgggta

SEQ ID NO: 147930 - DNA, 428 bp, Arabidopsis thaliana
  unsure (1)..(428): unsure at all n locations
cgagaaccgttaagggaantggtttcttccaaacaatctccaaaatccctaaacttcgaaaatggcagaaaccgccgagacaatcaacaccacgatctcatcgccgctttctnnnttccaaaggtccaccactatctattnnntttcagatccaacatctcaagaagcagcctcaaaagacacagatctgacgaaagaagccgaatcagagaagaaaccaggaggaatctctctccgaatctggccaccgactcagaaaactcgcgacgccgatctgaatcgcctgatcgagaccttatccaccgaatcaatcctctctaagagatacgggactcttaaatctgacgatgcaaccaccggcgcgaaacttatcgaagaagagggctatggtgttgcttcgaatgctgtgtcgagtgatgatgatggga

SEQ ID NO: 147931 - DNA, 422 bp, Arabidopsis thaliana
caattatccaataattaattatggccaaatccaagttctagagttttctctagaaatatcatcattttcacctccttaaaagattctagaaattttctagaatcatcttccacctccttaaacataaaaatctagatactctaatagaataatctagataatttgaataatgtaatctagatcttatgtaagaactctctagacttaggattaaaatattttagatattttgtagtttggaggctataaataccttctccccctctcaaatgttgcaatgttgtgaagttgtattcaagttttaagcaatagtaataaaagttctatttcctaaaaaactctttcaaaacacttaaacacttttctgcattaccctctaaaagaatgttaactttaacaagctttccagggaatctaactac

SEQ ID NO: 147932 - DNA, 354 bp, Arabidopsis thaliana
ggacaacaaggccaaccatgggaaggacagggacttcagggacaacaaggaagacaaggccaaccatgggaaggacagggacaacagggacatcaaggacgacagggacaacaaggccaaccatgggaaggacagggacagcagggacaacaagggttccgtgacatgcaccagatggtggaacatgtgagacgcggagacgtctttgccaacactccaggctctgcccactggatctacaacttaagagaacagccacttgtcattatagttcttctcgacatcgtcaactaccaaaaccaacttgaccggaaccctagagtgttccatttggtcggaaacaaccagcatgga

SEQ ID NO: 147933 - DNA, 362 bp, Arabidopsis thaliana
aagaaaaatgggtcgagtctcatctattatctctttctctttgacactcttgatcctcttcaatggctacactgcccaacagtggcccaacgagtgccagctcgatcaactcaatgcgctcgaaccatcccaaatcatcaagagcgagggtggtcgcatcgaggtctgggaccaccatgcaccccagctccgttgctccggctttgcctttgagcgtttcgtcattgagcctcagggtcttttctagcccactttcttgaacgccggcaaactcacgtttgttgtttacggtaggggtctaatgagaagaagtattccgggttgcgccgtgacgttcttggagtcaccggtttttgggagaa

SEQ ID NO: 147934 - DNA, 238 bp, Arabidopsis thaliana
aatcatttggacagagcgcataacaagagtgagactagagacgcacaaactcgacacgggggaggtctgacccccaatatgcggagaaggtcgcagccatgaaccaacgcaccaaagagaacggagacaccggcgacggagaccggaagaaagaagaaaggtgagaaccgaaagcacaaccaccgggcaagatcggaggaataagggcggctaggcccaaacactgcggggttaaaga

SEQ ID NO: 147935 - DNA, 255 bp, Arabidopsis thaliana
gataaaaaaggctcgaggctctactcttctttctttctccgtaacactaatagatcctgtggcaaggctacgcggctcaacagggtcagcagggtcagcaagttccgaacgagtgccagctcgaccagctcaatgcgctagagccttcacacgtactgaagagcgaggctggccgcatcgaggagagggaccaccacactcctcagctccggtgctgaagaggggactatagacgatacatcatggagactaagg

SEQ ID NO: 147936 - DNA, 209 bp, Arabidopsis thaliana
tcgatgaaaaggggtaagctcagcaattttctcggtgcatccttcggggttctcctcgtccttaacggctgtcttgcgaggcagtcacttggggttcctccttagctacagaacgagtgtaaccttgacaacctagatgttcttcaaagccacccgaaactttcaagagtgtagccggtcagaatcgagtactgggtccacaaccaccc

SEQ ID NO: 147937 - DNA, 347 bp, Arabidopsis thaliana
ccgagtccaaggcccgttcggtgtcattaggccgtctttgaggggccagagacctcaggaggaggaagaagaagaagatggacgacacggacgacacggtaatggcttataggagaccatctgcagcgccaggtgcaccgataacctcgatgatccgtctcgtgctgtcgtgtacaagccacagctcggttacatcagcactctcaacagttacgatctcctcaacctttgatttatccgtctttcatccctccgtggatctatccgttaaaacgcaattggtgctttcacagtggatcgcttacgctatcgccattctttacttgacatacggggaatgctcaaat

SEQ ID NO: 147938 - DNA, 295 bp, Arabidopsis thaliana
aaggtcaaggtcagggtcagagtcaagggttccgtgacatgcaccagaaagtatagcacctacggtgcggagacaccattgcaacaccatttggtgtagctcaatggttctacaacattggaaatgagcctttcatacttgttagtagccgaggttctagtcagtaaccatgaaccagcttgtccgtaaccttagaccatttttgattaccggtttcatccttcatggtttggaatggcttctaggtctttaagcaacatatgctatactacacttttaaatggtttcgcacctg

SEQ ID NO: 147939 - DNA, 293 bp, Arabidopsis thaliana
aaagaaaatggtcctggtcagcaatcttgtggttgcaaccttcaggggtctcctcgtacttaacaggatgccttgcgaggcaagcacttggggtgcctcctcagctacagatccagggtcacctcgacagcctagaggttctacaagtcacccatactttcaagagtgaagccggtcagatcgagtactgagaccacatgcaccctcagattcgatgagctggcgttccctttgctcggattggaattgaacaaggaggggtttacttggccacctttttaactttcccaaaa

SEQ ID NO: 147940 - DNA, 441 bp, Arabidopsis thaliana
  unsure (1)..(441): unsure at all n locations
ataaaaatggctcgagtctcttctcttctttctttctccttaacacttttgatccttttccatggctacgcggctcaacagggtcagcagggtcagcagtttccgaacgagtgccagctcgaccagctcaatgcgctcgagccttcacacgtactgaagagcgaggctggtcgcatcgaggtgtgggaccaccacgctcctcagctccgttgctcaggtgtctcctttgcacgttacatcatcgagtctaagggtctctacttgccctctntctttaacaccgcgaagctctccttcgtggctaaaggacgaggtcttatgggaaaagtgatccctggatgcgccgaaacatttccaagactcatcagagttccaaccacgcttcgaaggtcaaggtcaaagccagaggttccgtgacatgcaccagatagtggagcacat

SEQ ID NO: 147941 - DNA, 396 bp, Arabidopsis thaliana
tcgatcacaaacgagtaagaatacaaatacattttgtattaaaaataggcaaacaagccctttcttggctgtgcaactttcgccctctgctttctcctcaccaacgcttccatctaccgcactgttgtcgagttcgacgaagatgacgccagcaaccccatgggcccaagacagaaatgtcagaaggaagttcagcaatcacagcacctaaaagcttgccagaaatagatgcgcatgcaaatgaggcaaggccgtggtggtggtcctttcctcgacgatgagttcgatttggaagacgacattgagaacccacaaggtccccagcagggacaccagatccttcagtagtgctggatcgagctttatcaggaagagccagtttgagttcgccccacc

SEQ ID NO: 147942 - DNA, 447 bp, Arabidopsis thaliana
ggaatggccaactgaattccagatcagattcccaaagatcagctcctgctaaagtgccagtggatcataggaagaaacagatgagcagtagcaatggagttggtcctggtcggtcagcgaccaatgcaagacctttaccttctaagagttcattggaaagaaatccctcaatctcggcgggaaagagttctcttcaaagcgctcagagaccgtcctcatcaagaccaatgtcatctgatcctaggcaacgggtagtagaacagagaaaggtttctcgtgacatggccacaccccgaatgatacctaaacaatcagcgcctacctcgaaacaccagatgatgagttaaccagcgctcaagagacctccctcgcgtgacatagatcatgaaaggaggctgttgaagaagaagaaacctgcaaggtcagaggatcaagaagcattcgata

SEQ ID NO: 147943 - DNA, 335 bp, Arabidopsis thaliana
aagaaataacaaaatggctcgagtctcttctcttctttctttcttcttaacactttagatccttttccatggctacgcggctcaacagggtcagcagggtcagcagtttccgaacagagtgccagctcgaccagctcaatgcgctcgagccgtcacacgtactgaagagcgaggctggtcgcatcgaggtgtgggaccaccacgctcctcagcttcgttgcttaggtgtcttcttttgcacgttacatcatcgtgtctaagggtctcttactgccctctttttttaacaccaggaagctctctttcgtggctaaaggacgaggtcttatgggaaa

SEQ ID NO: 147944 - DNA, 406 bp, Arabidopsis thaliana
aatttatccaaaattaaaatgcgtacaagcaaagcttcagtgacccaaacatggctgctttacacacagctttgtctttggaaagatctcataatccgctatgtccgtcagatcataagaagagcaaaatcgatgcttttcagtcaaaatatggtcgctgattccggcgagatcagaggtatcgatgtcaagtctcatctctccggtgcgaaagatcctagtaactttcagattgccgaaattcgaattcatgattcaatttgtattgatattccgagctctgaaaaaacacctcttttagaatcgatcaagagttgttctgcaactactatttggagagcatgttactgaggtttgtaccaaatataaagctcaaggggtttttgcagattagggtgtctaccgg

SEQ ID NO: 147945 - DNA, 421 bp, Arabidopsis thaliana
cggacgcgtgggagaaaaatgggtcgagtctcatctattatctctttctctttgacactcttgatcctcttcaatggctacactgcccaacagtggcccaacgagtgccagctcgatcaactcaatgcgctcgaaccatcccaaatcatcaagagcgagggtggtcgcatcgaggtctgggaccaccatgcaccccagctccgttgctccggctttgcctttgagcgtttcgtcattgagcctcaaggtcttttcttgcccactttcttgaacgccggcaaactcacgtttgttgttcacggaaggggtctaatgggaagagttattccgggatgcgcctagactttcatggagtcaccggtatttggaagaagtcaaggtcagggtcagagtcaagggttccgtgacatgcaccataaag

SEQ ID NO: 147946 - DNA, 326 bp, Arabidopsis thaliana
taaaacatacacaagtaattaactaacaacatatggtgttctagctcttactcgtctgcgcagctctcgccctgtgtttcatactcaccaacgcttccgtctatcgcacggttgtcgagttcgacgaagatgacgccagtaaccccataggcccaatacagaaatgtcagaaggagtttcagcaagaacagcacctaagagcttgccagagatggatgcgcaagcaaatgtggcaaggacgtggtggtggtccttccctcgtcgatgagtttgatatggtagacgacttcgagaacccgcatagacgacagctacttcagaagtgc

SEQ ID NO: 147947 - DNA, 330 bp, Arabidopsis thaliana
cgcctgccatttcagccaaatcaacagcctcgcgcccgctcaggcgacgaagttcgaagccggtcagatggaagtatgggaccacatgagccctgagctccgatgcgccggtgtaacggtggctcgcatcacccttcatcccaattccattttcttgcccgctttctttagcccacctgcccttgcttacgttgtccaaggagaaggaagtttggggacgattgcttccggctgtcctgagacttttgcagaagttgaaggatcatcaggatagtggaggaggaggagtccccgtttagtcttttttagatcattctccctattttggtt

SEQ ID NO: 147948 - DNA, 114 bp, Arabidopsis thaliana
atcttgtcatacgtttctctataagatattttaattatacagccataaattcatcggaagaggtggtagattatgcaagaatcagtcgctgagtctgaatctgaaagggaagag

SEQ ID NO: 147949 - DNA, 423 bp, Arabidopsis thaliana
cttgatcccatggctactggtctattaatcgtctgcgtcggtaaagccactaaggttgttgacagataccaaggtatgatcaaaggttatagcggagtttttcgtcttggtgaagccacttcaactctagacgctgactctcctgtgattcagcgagagtcttgggagcatataaaagatgatgacattaagaaagctttgacatcatttcttggagaaatatggcaagttccaccgatgttctctgcgatataagttggaggtgagaagatgtacgagaaggcatgaagaggagaaaccgtatagctttctccaagaagaatttcaattttccagtttgacattgaacgcattttatatgacagacaaaatctgatattccgggttttatgctctaagggtacatacatatgatctctttgt

SEQ ID NO: 147950 - DNA, 442 bp, Arabidopsis thaliana
ccgggagactttgctaacatcccagactgtgtatttccaagtggctttgctatataccgcctcttgtggagagagacgtataagggtacacacatctgttgcaccagtggttacagatcttggggagatgtatagacaagcagacactggttccattgtgtctttatatgctagattagcaattgagaaatctttgtccgcaaaattggatgatgcacggaatgcaatacagcaaaagattgttaaagccctcaaagaatatcgtaatcttcacgcggtgcagcatcgcttggggtccagattagtatacccagagtctctgaagttcttgccattgtacggattggcaattactaagtccactcctcttctaagtggacctgctgatacttctcttgatgagcgctgtgctgcatgcttcaccatgatggctctgcctgtc

SEQ ID NO: 147951 - DNA, 301 bp, Arabidopsis thaliana
cagcaatctcctcgatgcaaccttcggggttctccttgtccttaacggctgccttgcgaggcagtcacttgggggtcctactcagctacagaacgagagtaacctcgacaacctagaagttctccaagccaccgaaactatcaagagagaagccggtcagatcgagtactgggaccacaaccaccctcaggtccaatgtgttgggggtaccagggctcgtgatgtaatagaacaaggcggtgaatactagcccaccttattaacattcccaaaaatttcatacgtagatcaaggaacgggg

SEQ ID NO: 147952 - DNA, 376 bp, Arabidopsis thaliana
ggtgctaccgcaaaggaacgtaaacgcaaacgcggtactctacgtgacaaacggaaaggctcatatacaaatggtgaacgacaacggagaaagagtgttcgaccaagagatctccagcggacagttactagtcgtgccacaaggcttttcggtcatgaaacatgccataggcgaacagttcgagaggatcgaattcaagacaaacgaaaacgcacaggtcaacacactcgcgggccgtacctcagtcatgagagggttgccgctagaggttataaccaatgggtaccagatctctcccgaagaagctaaacgagtaaagtttagcacgattgagaccacactgacccataagcagccaatgagctacggaaggcct

SEQ ID NO: 147953 - DNA, 388 bp, Arabidopsis thaliana
cttggaggatcaatggccgacgttcgcacacactctcaccagcttcaagtgcaccctcaacgccagcatgaaagaggcatcaaagatctttatcctcagagtggcccttcttccactcaagtgctagccgtgtttgtcggtgtaccgataggaggaacgctgctgactatagccggtttgacattagccggttcggttataggactaatgctagcattcccgttgtttctcatctttagtccggctattgtaccaacagcctttgtcatcggtctagctatgactggattcctggcttcaggggccataggtctcaccggactatcatccatgtcgtgggtactcaactacattcgccgggccgggcagcatattccggaagagcttg

SEQ ID NO: 147954 - DNA, 143 bp, Arabidopsis thaliana
tcgaaaacaacaagaaaaaatggcaataaccatcaaattttatatatctacttttcgccttatcttcatagctgtcgttcactgcttatgcttccgtgtggagaacgacgagtttgtgccaccacagtaaggagaacaagatt

SEQ ID NO: 147955 - DNA, 277 bp, Arabidopsis thaliana
ccaatgggttccaaatctcacccgaagaagcaaggagggtcaagttcaacacgctcgagaccactttgactcacagcagtggcccagctagctacggaaggccaagagtggctgcagcttaagagcttaaaaccgcggcttaacaatgaaccgctactgtaaaaggaagttaaatagtacgtagtaattataataatgtacgaaaatgtgacaagttttgttgaggtttacctgtaaaatgccactccttttctgaataaaatctttctttccgatc

SEQ ID NO: 147956 - DNA, 306 bp, Arabidopsis thaliana
gtgacagacggtgaagcccaaatccagatcgttaacgacaatggtaacagagtgtttgacggacaagtctcttaaggacagctcatagccgtaccacatggtttttcggtggtgaaacgcgcaacatgcaaccgattccagtgggttgagttcaaaacatacgcatacgcgcaaatcaacactcttgcgggacgaacctcagttttgagagagttaccacttgaagttataaccattgggttccaaatctcacctgaagaagcaaggagggtcaagttcaacacgcttgagaccactttgactcac

SEQ ID NO: 147957 - DNA, 339 bp, Arabidopsis thaliana
cggctcagcagctccagaaccagcaagataaccgtggcaacatcgtcaaggtcaacggacctttcggcgtcattaggccacccttgagacgcggcgaatgcggtcaacaaccacatgaaatagcttatggtttagaggagactttgtgcaccatgcgatgcactgaaaacctcgatgacccgtcggatgcttgacgtgttcaagccatcactcggattcattagcacacttaacagctacaatctttctatcctcagacttcttcgacttagcgctcttcgtggctccatccgtaaaaacactttggtgctaccgcattggtacgtttacgcattctcg

SEQ ID NO: 147958 - DNA, 443 bp, Arabidopsis thaliana
tcaagatcaagagtaagacagagacacaaaggcgagagctatgtcgtcgtcggtggatttcgtgacggaacaggggagatgcggcgacgatggtaacggcgccggagagacagtaaagaatggcgaaattgatcatttgctttccgaaccgtcggctccgactatttctctccctacggaatctttcctcagagcagcgacgttactcaagaaccaggttctggaggccacgtggaaaggtggtgtcgaagctcttgcctctggttcgggtccagtgctggatccgactgtgtacacaggactactcggcacagcgttcacctgcttgtagttgtacgaggttacgcggaaccatcaagatctgcttacttgcgcagagataatcgacacgtgtgccaacgttgcgcgtgccacaaccaggcacgtgacatttttatgtggaa

SEQ ID NO: 147959 - DNA, 304 bp, Arabidopsis thaliana
aagaaatataagaaataacaaaatggctcgagtctcttctcttctttctttcttcttaacacttttgatccttttccatggctacgcggctcaacagggtcagcagggtcagcagtttccgaacgagtgccagcttgaccagctcaatgcgctcgagccgtcacacgtactgaagagcgaggctggtcgcatcgaggggtgggaccaccacgctcctcagcttcgttgctcaggtgtcttcctttgcacgttacatcatcgagtctaaggggctttacttgccctcttttcttttacacccgcg

SEQ ID NO: 147960 - DNA, 400 bp, Arabidopsis thaliana
gcatgtcctttgatatggttacagaattgtgttgcattgcatcattagatatgggatcagtttatcgatatatcatatttcagacgtttttagttcgacataattttaaagaaaacaacattaatgatatgttcattcgatgtttacaacctacaagatggatccaaattcatcaaagtggagaaaaatcaattgtattgggaacgaagcattgtttttggatcatggaacaatagttgaagccaaagatggagaattagggaaaattgcatatatttttagtatgatgagtatgggagatacgacaacattagtttacgaagtactagtcttgcgtctacgatattcaaagcggattgattgtccaaagtttcaacaccttgctgattcatcttcacac

SEQ ID NO: 147961 - DNA, 219 bp, Arabidopsis thaliana
acaactttcaataacttaccctctatttttgtgcctttagtaggcctagtctttccggcaattgcaatggcttctttatttcttcatattcaaaaaaataagattttttagatcggctgagaccgaatcatatcacctttttttttttattttaaaaacttcgattcgataagacccatttggtagaatgttgtataacacatagattcctacaaacat

SEQ ID NO: 147962 - DNA, 306 bp, Arabidopsis thaliana
agaatctaggtgttaatgtgaagatgatcactggtgatcaacttgctattggtaaggaaactggtcgcaggcttggaatgggaaccaatatgtatccatctgcggctcttctcggtaccgacaaggactcgaacattgcatccatccctgttgaggagttgatcgagaaggctgatgggtttgccggcgtttttccagagcacaaatatgaaattgtgaaaaaactgcaggagaggaagcacattgttggtatgaccggtgatggtgttaatgatgcacccgctttgaaaaaaagcagatattcgg

SEQ ID NO: 147963 - DNA, 415 bp, Arabidopsis thaliana
caactcaagagaacagccactagtcatcatcgctcttctcgacatcgccaactaccaaaaccaactcgaccgcaaccctagagtgttccatttggccggaaacaaccagcagggaggctttggcggttcacagcaacaacaagaacagaaaaacttgtggagcgggttcgacgcacaggtcatagctcaagcattgaaaattgacgttcagttggctcagcagcttcagaaccaacaagacagcagaggaaacatcgttcgtgttaagggacctttccaggtcgtgaggccacctctaagacagccctacgagagcgaggagtggagacacccacgtagcccacagggcaacggccttgaggagactatctgcagcatgaggtcccacgagaacattgacgaccctgctcgtgct

SEQ ID NO: 147964 - DNA, 116 bp, Arabidopsis thaliana
tcgcctagagaaagagcttttgatttcgattagcagtttatttgtttaatcagtaaagaaagcgttcatttttgcggatagttacttaatcagtattctagtcttttagtacacat

SEQ ID NO: 147965 - DNA, 136 bp, Arabidopsis thaliana
ggcagatacacaccgtgtctaccgtactgatagacactttcaatttcagtcgacctatgaaggcggccgatgtcaagtcagtatgaaggtgaccgtggctacggtggtggcggttacaagagcatgaagcctgaaa

SEQ ID NO: 147966 - DNA, 375 bp, Arabidopsis thaliana
gtctttgccaacactccaggctctgcccactgtatctacaactcaggagaacagccacttgtgatcatcgctcttctcgacatcgccaactaccaaaaccaactcgaccgcaaccctagagtgttccatttggccggaaacaaccagcagggaggctttggcggttcacagcaacaacaagaacagaaaaacttgtggagcgggttcgacgcacaggtcatagctcaagcattgaaaattgacgttcagttggctcagcagcttcagaaccaacaagacagcagaggaaacatcgttcgtgtaagggacctttccaggtcgtgaggccacctctaagacagccctacgagagcgaggagtggagacacccacgta

SEQ ID NO: 147967 - DNA, 455 bp, Arabidopsis thaliana
aagaaaacatacacaaattgcaaaacatggtttacaagctcttcctcgtctgcgcaactctggccctctgcttcctcctcaccaacgcttccatctaccgcaccgttgtcgaattcgaagaagatgacgccagcaaccccgtaggtccaagacagagatgccagaaggagtttcagcaatcacaacacctaagagcttgccagagatggatgagcaagcaaatgaggcaaggacgtggtggtggtccttccctcgacgatgagttcgatttcgagggcccccagcagggataccagctactccagcagtgctgcaacgagcttcgccaggaagagccagtttgcgtttgccccaccttgaaacaagctgccagggcagttagcctccagggacagcacggaccattccaatccaggaaaaattaccagtcagctaagtacttgccttacatttgc

SEQ ID NO: 147968 - DNA, 461 bp, Arabidopsis thaliana
  unsure (1)..(461): unsure at all n locations
tacacacatagcaaaaaatggcaaacatgttgttcctcgtctgcgcagctctcgctctctgcttcctcctcaccaacgcttccatctaccgcaccgtcgttgagttcgaagaagatgacgccactaaccccataggcccaaaaatgaggaaatgccgcaaggagtttcagaaagaacaacacctaagagcttgccagcaattgatgctccagcaagcaaggcaaggccgtagcgatgagtttgatttcgaagacgacatggagaacccacagggacaacagcaggaacaacagctattccagcagtgctgcaacgagcttcgccaggaagagccagattgtgtttgccccaccttgaaacaagctgccaaggccgttagactccagggacagcaccaaccaatgcaagtcaggaaaatntaccagacagccaagcacttgcccaacgtttgcgacatcccg

SEQ ID NO: 147969 - DNA, 383 bp, Arabidopsis thaliana
gtaaattaggaacaatctcttttacgttatgtctccaaatctaaactgatctccgaaacacttggtaaatggtttagctggaaatattctccttttcaaatttatttttagagggcaaaatatatataattcaattatcattagttttcaagtatcaccgatttctcttagttgagttattgctcaaatctgtttgtacacctttagtactatccgagttgataattcataatacactattaacggcataaattctcctatattcgtttgttacgaactaattattgctactaacacgtcattaactaatacatatgtattccgatgtaattattattttcaatccataatataatgttaccgcggattatcttttatggata

SEQ ID NO: 147970 - DNA, 388 bp, Arabidopsis thaliana
ccggaaacaaccagcagggaggctttggcggttcactgcaacaacaagaacagaaaaacttgtggagcgggttcgacgcacaggtcatagctcaagcattgaaaattgacgttcagttggctcagcagcttcagaaccaacaagacagcagaggaaacatcgttcgtgttaagggacctttccaggtcgtgaggccacctctaagacagccctacgagagcgaggagtggagacacccacgtagcccacagggcaacggccttgaggagactatctgcagcatgaggtcccacgagaacattgacgaccctgctcgtgctgacgtgtacaagcccagcctaggtcgcgtgaccagcgtcaacagctataccttgcccatcttggagta

SEQ ID NO: 147971 - DNA, 329 bp, Arabidopsis thaliana
aacgaacgtaatgtatatgagagaaactatactcttttttaaaataaataaaaatagaaaaatacatcgaagatgattgaatgggtgtctagactacaattgaaaaatatgactatctataataacttgaagcaacaaaatctaacagatttataattcgccctacagatcctatagaatcagggatttgaccactcagaccacatcccacacggatcctggagagtgaaagatagttcgtttaagatatgcaatagaaacaggatgttacaaacgggtcatgcatgataatgtttgcttacaaattctacaacttcttaaggacacca

SEQ ID NO: 147972 - DNA, 447 bp, Arabidopsis thaliana
  unsure (1)..(447): unsure at all n locations
aaaggagtgatcgagtttgtgacggataaaacaattgaatcgttccacataactaaaggtgatgtggtaagaatcccttctggtgtcaccaactttatcaccaacactaaccagacggttcctctccgcctcgcccagatcaccgtccctgtcaacaatcccggcaactacaaggattacttccctgctgcatcccaatttcagcaatcctacttcaatgggtttaccaaagaagtcctctctaccagtttcaacgtgccggaagaattgctagggagattggttacgagatcaaaagaaattggtcaagggattatccgaagaatttctccagaccaaatcaaggaacttgctgagcacgctacatctncttcaaacaaacacaaagccaaaaaagaaaaggaggaagacaaagacctaaagacgttgtggactcccttcaatctc

SEQ ID NO: 147973 - DNA, 471 bp, Arabidopsis thaliana
cttgcccatcttggagtatgtcaggctcagtgccactcgtggcgttctccagggtaatgcgatggtgcttcctaaatacaacatgaacgctaacgagatcttgtactgcactggaggacaaggaaggatccaagtggtcaacgacaacggacagaacgtgttggaccaacaggtgcagaagggacagctcgtggtcatcccacaagggttcgcatacgttgtccagtcccacggaaacaagttcgagtggatctctttcaaaactaatgaaaacgcaatgatcagcactttggcgggtagaacctcgctcttgagggcattgccattggaggtcatatcaaatggtttccagatctctcccgaggaagctaggaagatcaagttcaacacacttgagaccactttgacccgcgctgccggtaggcaacaacaacagttgatcgaggagattgtcgaggcttaaatcaaaac

SEQ ID NO: 147974 - DNA, 353 bp, Arabidopsis thaliana
ggcggtctttacttgcccaccttctttactttctccaaaaatttcctacgtcgttcaaggaacgggtatcagcggaagagtggtccctggatgtgccgagaccttcatggactcgcagccgatgcaaggacaacaacaaggccaaccatggcaaggacgacagggacaacaaggccaaccatgggaaggacagggacaacagggacaacaaggaagacaaggccaaccatgggaaggacagggacaacagggacaacaaggacgacagggacaacaaggccaaccatgggaaggacagggacagcatggacaacaagggttccgtgacatgcaccagaaggtggaacatgtga

SEQ ID NO: 147975 - DNA, 348 bp, Arabidopsis thaliana
aacaaacaaaaagaaaatggttaagctcagctttctcctcgttgcaaccttcggggtgctgctcgtccttaacggctgccttgcgaggcagtcacttggggttcctcctcagctacagaacgagtgtaacctcgacaacctagatgttctccaagccaccgaaactatcaagagtgaagccggtcagatcgagtactgggaccacaaccaccctcagctccgatgtgttggtgtttccgttgctcgttatgtaattgaacaaggcggtctttacttgcccaccctcttcacttccccaaaaatttcctacgtcgttcaaggaacgggtttcagcggagagtggtccct

SEQ ID NO: 147976 - DNA, 448 bp, Arabidopsis thaliana
cggacgcgtgggtttcattgtttttctatgtgttttctttcagctttaatttatgaggttgtgtttaacaaataatttatgaattttccaagtttaatttagtaccatattttattctaaaaaaattctagtgttttttaattttgatagaagaataatttacatgtaactgtaatttacatcttaaaaataacactaaaataaatatatgtcattttcagtcattttatacactatgcattgagatgcagatgcacattgttaaaaaaaaaaatcaaacgaacacatctgcattcacatgattcatctagatgcactatcaacttcataaacaaacatcatctaaatggtgtatttgaattgatcttctggatggatcacccaaatgcattacctaactgatcacacgaacaacaccatatttgaaaggaaatttttttggaaatcg

SEQ ID NO: 147977 - DNA, 446 bp, Arabidopsis thaliana
gtctaatgggaagagttattccgggatgcgtttagacgttcatggagtcaccggtatgtggagaaggtcaaggtcagggtcagagtcaagggttccgtgacatgcaccagaaagtagagcacctacggtgcggtgacaccattgcaacaccatctggtgtagctcaatggttctacaacaatggaaatgagcctctcattcttgttgcagccgcggatctcgccagcaaccagaaccagcttgaccgcaaccttagaccatttttgatagccggaaacaacccacaagggcaggaatggctacaaggccgaaagcaacagaagcaaaacaacatcttcaatggcttcgcacctgagatcttggctcaagccttcaagatcaatgtcgagacggctcagcagctccagaaccagcaagataaccgtggcaacatcgtcaaggtcaac

SEQ ID NO: 147978 - DNA, 453 bp, Arabidopsis thaliana
ggcaaagactcaacatttatgagaggtgggtgtctatggcagctagggcaatcaataacccggcgtcttgctcaatctgacaagaaggttgtgtcacgtcgctactttgcctctgaagctgacctgaaaaagactgctctttacgacttccatgttgcccatggaggaaagatggttccttttgctggttggagtatgccaattcagtacaaagattcgattatggactcaacggttaactgcagggaaaatgggagtttgtttgatgttgcacatatgtgtggtttgagccttaagggtaaagattgtgttccttttcttgagacacttgtggttgctgatgtggctggtttggctcctggaactgggagcttaactgtgttcacaaacgagaaaggaggtgccattgatgactcggtgattaccaaagtgacagatgaacatatctatttg

SEQ ID NO: 147979 - DNA, 386 bp, Arabidopsis thaliana
gacgtccgttaacgttaagctcctttaccgttacgtcttaaccaactttttcaacctctgtttggtgccgttaacggcgttcctcgccggaaaagcctctcggcttaccataaacgatctccacaacttcctttcctatctccaacacaaccttataacagtaactttactctttgctttcactgttttcggtttggttctctacatcgtaacccgacccaatccggtttatctcgttgactactcgtgttaccttccaccaccgcatctcaaagttagtgtctctaaagtcatggatattttctaccaaataagaaaagctgatacttcttcacggaacgtggcatgtgatgatccgtcctcgctcgatttcctgaggaagattc

SEQ ID NO: 147980 - DNA, 403 bp, Arabidopsis thaliana
cgggcgaccacgcgtccgataaaaatggctcgagtctcttctcttctttttttctccttaacacttttgatccttttccatggctacgcggctcaacagggtcagcagggtcagcagtttccgaacgagtgccagctcgaccagctcaatgcgctcgagccttcacacgtactgaagagcgaggctggtcgcatcgaggtgtgggaccaccacgctcctcagctccgttgctcaggtgtctcctttgcacgttacatcatcgagtctaagggtctctacttgccctctttctttaacaccgcgaagctctccttcgtggctaaaggacgaggtcttatgggaaaagtgatccctggatgcgccgaaacattccaagactcatcagagttccaaccacgcttcg

SEQ ID NO: 147981 - DNA, 408 bp, Arabidopsis thaliana
caaaacccaaatctctgagaaagaatcaaagttcaatattcgatcaatcaagctggagtggaagaaagggaaagtgaacccattcgtgaggggaataagatcgaggttaattaggcccaaatcgatgcctttaaatgtagtcaatgatcgtgatggctcttctcgcattcttttgaccgaccctgccggatcaactgctgaggtgcttttgtatggagggcaagtggtttcttggaaaaacgaaaggagagagaagttgctttatatgagcaccaaggcgcaattgaagccaccaaaggcgatcaggggagggttacctatcagctttccacagtttggaaattttggtgcacttgagcgacatggatttgcccgtaacagattctggtcacttgataatgatccttc

SEQ ID NO: 147982 - DNA, 464 bp, Arabidopsis thaliana
ctctaagacagccctacgagagcgaggagtgttgtacacccacgtagcccacagggcaacggcgtggaggagactatctgcagcatgaggtcccacgagaacattgacgaccctgctcgtgctgacgtgtacaagcccagcctaggtcgcgtgaccagcgtcaacagctataccttgcccatcttggagtatgtcaggctcagtgccactcgtggcgttctccagggtaatgcgatggtgcttcctaaatacaacatgaacgctaacgagatcttgtactgcactggaggacaaggaaggatccaagtggtcaacgacaacggacagaacgtgttggaccaacaggtgcagaagagacagctcgtggtcatcccacaagggttcgcatacgttgtccagtcccacggaaacaagttcgagtggatctctttcaaaactaatgaaaacgcaatgatcagcacttt

SEQ ID NO: 147983 - DNA, 419 bp, Arabidopsis thaliana
gctcttgtagccctgagagtacttaacaacatttttgagacatttggtcctcaacaccgccctgtgatagaatttgctgttgataatgtccagaagctgaagatacgagaagctaagcagcagcagtttcagcaacgcgagaaacacaatgaatctgatcagcagcaggcgaacggcgaagcacaggcacctgacaataaatacaaacgaaaaacgagggaaggggataacactggtccaaggaaagagaatgcagccaggtttaagaagggaccacgtgaagagagtaaagaagaagcaaaatccaatatagcagtaaaagataatgcaacagagaaagaagagacctatacgcacacaaggaaaaaccgtcttcaaacaagaaagggccaaattgatgagacagaaaagagacaacc

SEQ ID NO: 147984 - DNA, 414 bp, Arabidopsis thaliana
ctctgatccattgttgaagatgtcgaatagttaaactaaggagccaaaggttgagactgtgactcttggaccttctgttcgtgaaggagagcaagtttttggtgttgttcacatctttgcatctttcaatgacactttcattcatgtgactgatctctccggtagagaaactctcgtccgcatcaccggtggcatgaaggtgaaggctgaccgtgatgagtcctctccttatgctgctatgcttgcagctcaagatgttgctcaaagatgcaaggagcttggcatcactgccatgcacgtgaagctccgtgctactggaggaaacaaaaccaagactccaggtcctggtgctcagtctgcttttagagcccttgctcgttctggcatgaagattggtcgtattgaggatgtgac

SEQ ID NO: 147985 - DNA, 461 bp, Arabidopsis thaliana
ctctcaggtgcgtgtgctctccgctggttctttagaacaatcggcacacgctttttcattggaatcttcttcttctacgaatctcttaagtatctcaggtctgttgagagatggcagatcgattgacacgtattgctattgtgagttcagaccgttgcaagccaaagaaatgtcgccaagagtgcaagaagagttgtcctgtggtcaagacaggaaaactttgtattgaggtgactgttggttccaagcttgcttttatctcagaggagttgtgtatcggttgcggtatttgtgtgaagaaatgcccgtttgaagctattcagattatcaatctttcaagagacttggagaaagatacgacccatcgttatggggcaaacacttttaagttacacaggctcccagtttcaagaccagggcatgtgctaggggtggttggaaccaaaggtattggaaaatca

SEQ ID NO: 147986 - DNA, 422 bp, Arabidopsis thaliana
  unsure (1)..(422): unsure at all n locations
aagaaaaatgggtcgagtctcatctattatctctttctctttgacactcttgatcctgttgaatggctacactgcccaacagtggcccaacgagtgccagctcgatcaactcaatgcgctcgaaccatcccaaatcatcaagagcgagggtggtcgcatcgaggtctgggaccaccatgcaccccagctccgttgctccggctttgcctttgagcgtttcgtcattgagcctcagggtcttttcttgcccactttcttgaacgccggcaaactcacgtttgttgttcacggaaggggtctaatgggaagagttattccgggatgcgccgagacgttcatggagtcaccggtatttggagaaggtcaaggtcagggtcagagtcaagggttccgtgacatgcaccagnaagtagagcacctac

SEQ ID NO: 147987 - DNA, 422 bp, Arabidopsis thaliana
  unsure (1)..(422): unsure at all n locations
gggacaacagggacaacatggacgacagggtcaacatggccaaccatgggaaggacagggacagcagggacaacaagggttccgtgacatgcaccagaaggtggaacatgtgagacgcggagacgtctttgccaacactccaggctctgcccactggatctacaactcaggagaacagccacttgtcatcatcgctcttctcgacatcgccaactaccaaaaccaactcgaccgcaaccctagagtgttccatttggccggaaacaaccagcagggaggctttggcggttcacagcaacaacaagaacangaaaacttgtggagcgggttcgacgcacaggtcatagctcaagcattgaaaattgacgttcagttggctcagcagcttcagaaccaacaagacagcagaggaaacatcgttc

SEQ ID NO: 147988 - DNA, 466 bp, Arabidopsis thaliana
ataagaaataacaaaatggctcgagtctcttttcttctttctttcttcttaacacttgggagccttttccatggctacgcgggtcaacagggtcagcagggtcagcagtttccgaacgagtgccagctcgaccagctcaatgcgctcgagccgtcacacgtactgaagagcgaggctggtcgcatcgaggtgcgggaccaccacgctcctcagctccgttgctcaggtgtctcctttgcacgttacatcatcgagtctaagggtctctacttgccctctttctttaacaccgcgaagctctctttcgtggctaagggacgaggtcttatgggaaaagtgatccctggatgcgccgaaacattccaagactcatcagagttccaaccacgcttcgaaggtcaaggtcaaagccagaggttccgtgacatgcaccagaaagtggagcacattaggagcggtgatacca

SEQ ID NO: 147989 - DNA, 471 bp, Arabidopsis thaliana
gcctaacacaacagataatggggaaagtagttttgatgagaagagtactggttcgtggtcaggtcatgaatcggattccttggagggaataaaatctgagggtgaatctatggagaagaatgagttgttggagaaggagttcaatgattctaacggtgagtcctctgtgaccggtaaatccacgggttctggagacggaggttctcaagaaacttctgaagtgtcatctcaagaggagagtaaaggcaaggaaagtgagacaaaggataaggaagaatcttcgtctcaagaggaaagtaaagacagagaaactgagacaaaggagaaagaagagtcttcatcgcaagaggaaactatggacaaagaaaccgaagcaaaggagaaagtagagtcttcttttcaagagaaaaacgaagacaaggaaactgagaaaatagagtcttcgtccctagaggaaactaaagaaaaaga

SEQ ID NO: 147990 - DNA, 366 bp, Arabidopsis thaliana
cgagagcatggacgaccctgctcgtgctgacttgtacaagcccagcctaggtcgcgtgaccagcgtcaacagctataccttgcccatctagaagtatgtcaggctcactgccactcgtggcgttctacagggtaatgcgatggtgcttcctaaatacaacatgaacgctaacgagatcttgtactgcactggaggacaaggaaggatccaagtggtcaacgacaacggacagaacgtgttggaccaacaggtgcagaatggacagctcgtggtcatcccacaagggttcgcatacgtagtccagtcccacagaaacaagttcgagtggatctctttcaaaactaatgaaaacgcaatgatcagcac

SEQ ID NO: 147991 - DNA, 428 bp, Arabidopsis thaliana
ctacgctttactctttcactcctctctctcttgctttgctccgccgtgagaggagaaacagagggggaattgtcaagcggcggaggcggcaacgacggtgatacaacaaccagacggtaaatcggttagattttactgtacagtaaacgcgagcgaagtgattaagtcccatcccggtcaccacgtggctctcctcctctcttccgccgtacctcacggtggctctctccgcgtcactcgtataaagcttcttcgtccttctgataacctcttgctcggtcatgtttatagactcatctcctccgaagaggtgatgaaaggaataagagccaagaaatctggaaagatgaagaagattcatggagaggtttctgttgcagaagaagagattaacccactaaccctaagatctgaatctgcttctgaca

SEQ ID NO: 147992 - DNA, 490 bp, Arabidopsis thaliana
  unsure (1)..(490): unsure at all n locations
cggggcggcccaacgcgtccgaaaatggctcgagtctcttttcttcttncttttttttaaacactttggatccttttccagggctggcgcggttaaacagggtcaggcagggtcagcagtttccgaacgagtgccagctcgaccagctcaatgcgctcgagccgtcacacgtactgaagagcgaggctggtcgcatcgaggtgtgggaccaccacgctcctcagctccgttgctcaggtgtcntccttgcacgttacatcatcgagtctaagggtctctacttgccctctttctttaacaccgcgaagctctctttcgtggctaagggacgaggtcttatgggaaaagtgatccctggatgcgccgaaacattccaagactcatcagagttccaaccacgcttcgaaggtcaaggtcaaagccagaggttccgtgacatgcaccagatagtggagcacattaggagcggtgataccattgccacaacacc

SEQ ID NO: 147993 - DNA, 460 bp, Arabidopsis thaliana
aacaaaaagaaaatggttaagctcagcaatcttctttttgcaaccttcggggttctcctcgggctgaacggctgccttgcgaggcagtcacttggggttcctcctcagctacagaacgagtgtaacctcgacaacctagatgttctccaagccaccgaaactatcaagagtgaagccggtcagatcgagtactgggaccacaaccaccctcagctccgatgtgttggtgtttccgttgctcgttatgtaattgaacaaggcggtctttacttgcccaccttcttcactttcccaaaaatttcctacgtcgttcaaggaacgggtatcagcggaagagtggtccctggatgtgccgagaccttcatggactcgcagccgatgcaaggacaacaacaaggccaaccatggcaaggacgacagggacaacaaggccaaccattggatggacagggacaacagg

SEQ ID NO: 147994 - DNA, 473 bp, Arabidopsis thaliana
  unsure (1)..(473): unsure at all n locations
cacacatagcaaaaaatggcaaacaagttgtttcttgtctgcgcagctctcgctctctgctggctggtcaccaacgcttccatgtaccgcaccgtcgttgagttcgaagaagatgacgccactaaccccataggcccaaaaatgaggaaatgccgcaaggagtttcagaaagaacaacacctaagagcttgccagcaattgatgctccagcaagcaaggcaaggccgtagcgatgagtttgatttcgaagacgacatggagaacccacagggacaacagcaggaacaacagctattccagcagtgctgcaacgagcttcgccaggaagagccagattgtgtttgccccacctggaaacaagctggcaaggcccgtagactccagggacagcaccaaccaatgcaagtcaggaaatattaccagacagccaagcactngcccaacgtttgcgacatcccgcaaggtgatgtttg

SEQ ID NO: 147995 - DNA, 438 bp, Arabidopsis thaliana
cgcgtccgaacaaaaagaaaatggtttttctcagcaattttctttttgcaaccttcggggttctcctcgtgctgaacggctgccttgcgaggcagtcacttggggttcctcctcagctacagaacgagtgtaacctcgacaacctagatgttctccaagccaccgaaactatcaagagtgaagccggtcagatcgagtactgtgaccacaaccaccctcagctccgatgtgttggtgtttccggtgctcgttatgtaattgaacaaggcggtctttacttgcccaccttcttcactatctcaaaaatttcctacgtcgttcaaggaacgggtatcaagcggagagtggtccctggatgtgccgagacctttatggacttccagccgatgcaaggacaacaacaaggcccaccatggcaaggacgacagggacaacaag

SEQ ID NO: 147996 - DNA, 414 bp, Arabidopsis thaliana
aacaaagcagatttgcttcttctcgattctttgcaatttgcatgcattgctcatcaaaaaaattcctttctgggttttgttggaaaatagctgtataacttcaaatgttgaaactttgcttttcttcttcttctcttttggtcaaattttgtgttctctctagagcaaaaccctaattctctcaattctactcaaaattaatatctcttgcttccttgagaaagataaagatttgtgtttactaaggttgaggaaatgataatagcaaagcaatatcgttgcattcactcggcgacttgtcattgcacgaaaggacatcttagcgaagaagtattgtttcttatggttcagcatctaaactggaaccctaatgtgattgccactctatcttgtgtttgtaaaggtttgatgatc

SEQ ID NO: 147997 - DNA, 448 bp, Arabidopsis thaliana
cgcttgaaagaaacgccaatatcgctttttttattgcttcgattggatctaggttagagtggttggaaagataaagttcagggcttcaaatcgacacgtagattgactcctatctctctttaactcgccgggaaactctcttccaagtcaaccgttttgacataactaaatctctgacctagaggcttatcagtagaaaattagcgatattcatcgaaagaattcacctatagagatgagataggtctctataaaactcgaagctttccgttgtcgcgtagattgtatcttgtctctttctaggtcgcttggagtttgattcggaagttggctgttccgacagctgcggatttgtcagggaaattgtgtctagtgcagagaagtgatgataactcctaatagacagctcggatccaggcgaggtcggcttctttagaaaagcttactc

SEQ ID NO: 147998 - DNA, 465 bp, Arabidopsis thaliana
caaaaagaaaatggttaatctcagcaatctcttcgttgcaaccttcggggttctcctggtggttaactgctgccttgcgaggcagtcacttggggttcctcctcagctacagaacgagtgtaacctcgacaacctagatgttctccaagccaccgaaactatcaagagtgaagccggtcagatcgagtactgggaccacaaccaccctcagctccgatgtgttggtgtttccgttgctcgttatgtaattgaacaaggcggtctttacttgcccaccttcttcacttccccaaaaatttcctacgtcgttcaaggaacgggtatcagcggaagagtggtccctggatgtgccgagaccttcatggactcgcagccgatgcatggacaacaacaaggccaaccatggcatggacgaccgggacaacaaggccaaccatgggaaggacagggacaacagggacaaca

SEQ ID NO: 147999 - DNA, 408 bp, Arabidopsis thaliana
  unsure (1)..(408): unsure at all n locations
cggacgcgtgggcgagaatggatataggattctatgtaactcttcgcagtattgtttagttgctggcaaacaaatggtgggtgtcttcttaaccatttgggtgaaaagtgagctaagagaacacgtcaagaacatgaaagtatcttgtgttggcaggggactgatgggttatcttggaaataagggatcaatctcaataagcatgttgctccatncaaacaagctttgcttcgtttgtacgcacttgacttcgggacataaagaaggcgatgagctaaagagaaactctgttgtcatggagatactgaagaaaacgaggtttccgcgcgttaagagttcagaggaagaaaagtcctctgagaacatncttcagcatgaccgggtaatatggcttggcgatctaaacta

SEQ ID NO: 148000 - DNA, 464 bp, Arabidopsis thaliana
  unsure (1)..(464): unsure at all n locations
aaagaaagaagccctagattttggcaataggcggttgcnnaacaaaaaaccatggccggaattggaccgataactcaggattgggagccggtggtgatccgtaagaaacccgctaacgccgctgccaagcgcgacgagaaaactgtcaacgccgctcgtcgatccggcgccgatatcgagaccgtcagaaaattcaatgctggaaccaacaaggcggcatcaagcggcacatctctgaacacaaaaatgcttgatgatgacactgagaaccttactcatgaacgtgtgcctactgagctaaagaaagccattatgcaagccaggacagacaagaagctaacccagtcccaacttgctcaaatcatcaatgagaagccacaagtgattcaagagtatgagtctggcaaagcaatacccaaccagcaaatcctttctaagctggagagagcgcttggagcttagct

SEQ ID NO: 148001 - DNA, 452 bp, Arabidopsis thaliana
ggaagaaaaatgggtcgagtctcatctattatctctttctctttgacactcttgatcctcttcaatggctacactgcccaacagtggcccaacgagtgccagctcgatcaactcaatgcgctcgaaccatcccaaatcatcaagagcgagggtggtcgcatcgaggtctgggaccaccatgcaccccagctccgttgctccggctttgcctttgagcgtttcgtcattgagcctcagggtcttttcttgcccactttcttgaacgccggcaaactcacgtttgttgttcacggaaggggtctaatgggaagagttattccgggatgcgccgagacgttcatggagtcaccggtatttggagaaggtcaaggtcagggtcagagtcaagggtttcgtgacatgcaccagaaagtagagcacctacggtgcggtgacaccattgcaacaccatc

SEQ ID NO: 148002 - DNA, 296 bp, Arabidopsis thaliana
caaaaagaaaatggttaagctcagcaatctttttgtttcaaccttcggggttctcctcgtgcttaacggctgccttgcgaggcagtcacttggggttcctcctcagctacagaacgagtgtaacctcgacaacctagatgttctccaagccaccgaaactatcaagagtgaagccggtcagatcgagtactgggaccacaaccaccctcagcttcgatgtgttggtgtttccgttgctcgttatgtaattgaacaagacagggctttacttgcccaccttattaacttccccaaaa

SEQ ID NO: 148003 - DNA, 465 bp, Arabidopsis thaliana
aagaaaaatgggtcgagtctcatctattatttctttctctttgacactcttgatcctcttgagatggctacactgcccaacagtggcccaacgagtgccagctcgatcaactcaatgcgctcgaaccatcccaaatcatcaagagcgagggtggtcgcatcgaggtctgggaccaccatgcaccccagctccgttgctccggctttgcctttgagcgtttcgtcattgagcctcagggtcttttcttgcccactttcttgaacgccggcaaactcacgtttgttgttcacggaaggggtctaatgggaagagttattccgggatgcgccgagacgttcatggagtcaccggtatttggagaaggtcaaggtcagggtcagagtcaagggttccgtgacatgcaccagaaagtagagcacctacggtgcggtgacaccattgcaacaccatctggtgtagctcaat

SEQ ID NO: 148004 - DNA, 468 bp, Arabidopsis thaliana
caacaaacaaaaagaaaatggttaagctcatttatctcctcgttgcaaccttcggggttctgctcgtccttaacggctgccttgcgaggcagtcacttggggttcctcctcagctacagaacgagtgtaacctcgacaacctagatgttctccaagccaccgaaactatcaagagtgaagccggtcagatcgagtactgggaccacaaccaccctcagctccgatgtgttggtgtttccgttgctcgttatgtaattgaacaaggcggtctttacttgcccacctttttcacttcctcaaaaatttcctacgtcgttcaaggaacgggtatcagcggaagagtggtccctggatgtgccgagaccttcatggactcgcagccgatgcaaggacaacaacaaggccaaccatggcaaggacgacagggacaacaaggccaaccatgggaaggacagggacaacagggac

SEQ ID NO: 148005 - DNA, 101 bp, Arabidopsis thaliana
gaaaaaacaaagggaaaagaccaaagaagaatcatggtcgtaatttcaccatgattggggggaggatgattccaaattgacaggatccagacgttaatcaa

SEQ ID NO: 148006 - DNA, 356 bp, Arabidopsis thaliana
  unsure (1)..(356): unsure at all n locations
tgaaagggtttatatctcacacacaaaacatttcataagctaaaaggtaataatataatggcggatttgagggacgaaaaaggtaatccgatccatctaactgacacacagggaaacccaattgtcgacctgactgatgagcacggtaaccccatgtacctaaccggtgttgttagctccactcctcagcataaggagagtactaccagcgacattgcagagcaccctactagcaccgttggagaaacacattcggcagctgctccagctggtgctggtgctgncaccgctgccactgcgacaggagtctctgctggtactggagcaaccaccacagggcagcaacaccatgggtc

SEQ ID NO: 148007 - DNA, 421 bp, Arabidopsis thaliana
cgaataatgtgcttcttttatatgggcttttattattaaaggcccaataagtagttggtgaggatcctgaagtgaataagagaagcccaaggcttttaagtgggtcgctttattctcccaatgcttcggccttgcaactataggccagtttctgcaaatgtcttttacaatatatttcttttttgtttttttgttctcttttgggcatgtgttaacatatgtgttgcaatctacagtcttgagaattcacgcagtagatgtacaagtacgaaactcattcatgatgatgaacatgatattgataggtcttatccattaaactctatcagcttttgtgttctatttgatacttgtagatagactgtagaatttatgtatgtatttacgagtttacaagttgaataggtattcttgtaaacag

SEQ ID NO: 148008 - DNA, 446 bp, Arabidopsis thaliana
ctttgatcaggatcagtgctgcccgtcatgtacgatgccagcggaagcacacattcattgttatactcataggcaaggtagtctgacaatatctgttaagaaactgcctgaattgctacctgggcaacgtgaagggaagatttggatgtggcatcggtgcctgaaatgtcctcggatcaatggctttcctccagccacacgcagaattgtaatgtcagatgctgcgtggggcctgtcttttggcaaatttttggagctgagcttttctaaccatgcagcggctagtcgtgtggccaactgtggtcattcccttcacagagactgtctccggttctacggttttgggagaatggttgcttgcttccgctatgcttcaatcaatatttacgcagtgactctgccaccagcaaagctttattttaactatgagaaccaggaatggcttc

SEQ ID NO: 148009 - DNA, 465 bp, Arabidopsis thaliana
atttctttcagacaaccatggaggttcaaattcatgatgacatgcattgaacaagaaggaggaaattaatgtgatgaatggagctagagtaagcgctatattaattagtattaccatctatccatatatttatgattcaagactattattactcatttagtgtttgttattattattcaattttgcttgtttgtttcttatcatctttgcattgatcatcaagattatgatatttgaaaagatgggttttatgtgtgttttggtttagtactggcgttaggctgggatattgtaatctcatatttttgttctacgagtgagtttgaattttctggtttttacttgcggtttctatttcttcggttaagtaaagagtaattgaagaacgttaaaagcataggtcgtattacatgagtaatgaagaaaaaggtgttcattatcatctgtgagataccaatttctttt

SEQ ID NO: 148010 - DNA, 427 bp, Arabidopsis thaliana
aacaaacaaaaagaaaatggttaagctcagttatctcctcgttgcaaccttcggggttctgctcgtccttaacggctgccttgcgaggcagtcacttggggttcctcctcagctacagaacgagtgtaacctcgacaacctagatgttctccaagccaccgaaactatcaagagtgaagccggtcagatcgagtactgggaccacaaccaccctcagctccgatgtgttggtgtttccgttgctcgttatgtaattgaacaaggcggtctttacttgcccaccttcttcacttccccaaaaatttcctacgtcgttcaaggaacgggtatcagcggaagagtggtccctggatgtgccgagaccttcatggactcgcagccgatgcatggacaacaacagggccaccattgcaagggccacagggac

SEQ ID NO: 148011 - DNA, 469 bp, Arabidopsis thaliana
  unsure (1)..(469): unsure at all n locations
aaacaagaaaacatacacaaatagcaaaacatggctatacaagctcttcctcgtctgcgcaactctcgccctctgcttcctcctgaccaacgcttccatctaccgcaccgttgtcgaattcgaagaagatgacgccagcaaccccgtaggtccaagacagagatgccagaaggagtttcagcaatcacaacacctaagagcttgccagagatggatgagcaagcaaatgaggcaaggacgtggtggtggtccttccctcgacgatgagttcgatttcgagggcccccagcagggataccagctactccagcagtgctgcaacgagcttcgccaggaagagccagtttgcgtttgccccaccttgaaacaagctgccagggcagttagcctncagggacagcacggactcattcaatccaggaaaatttaccagtcagctaagtacttgcctaacatttgaagatccagc

SEQ ID NO: 148012 - DNA, 464 bp, Arabidopsis thaliana
gaagaaacctcatctgttgagtaagctctatatttagtgagaccagcagccacaattccctgttgtcgttcacattcagagaaatgaaaacgaatgagaccattgtgttcttaattcttatctaaagctcaaagagacaaaatgtaatgtcagttttatgtttacctgcttatcttcacggagaatgagaggtctaccaggtgaaagcaaatctctaacagtttcattataaacctcaagataagaaagatgaacaacatggttcccatctaagcttctctgtctaactttagcaaacaaatctttgattgctagaaccattacacctggattctccattgtccctaacatcgtataagtcttgcctgctcccgtagcaccgtagcagaaaactgaaccatttctttcttcaagaactgcttcaacaagatcttctgttctgaattaatcaaaatggaaagaca

SEQ ID NO: 148013 - DNA, 440 bp, Arabidopsis thaliana
  unsure (1)..(440): unsure at all n locations
agaaaaatgggtcgagtctcatctattatctctttctctttgacactcttgatcctcttcaatggctacactgcccaacagtggcccaacgagtgccagctcgatcaactcaatgcgctcgaaccatcccaaatcatcaagagcgagggtggtcgcatcgaggtctgggaccaccatgcaccccagctccgttgcttcggctttgcctttgagcgtttcgtcattgagcctcagggtcttttcttgcccactttcttgaacgccggcaaactcacgtttgttgttcacggaaggggtctaatgggaagagttattccgggatgcgccgagacgttcatggagtcaccggtatttggagaaggtcaaggtcagggtcagagtcaagggttccgtgacatgcaccagaaagtagagcccctacngtgcggtgacaccattgc

SEQ ID NO: 148014 - DNA, 463 bp, Arabidopsis thaliana
gagacaacaaaaagagagaacaatgtcttcgtcgagggagctacaatacttggagtacacatacagaaacaaccgtcccacgacgggtctcctcaactccatcttcatgaccaccgtcaacacggccgctcgttctctcgtctccgtcgcttccaccgcctctacaccagagattccttctaggcgatggtcggcttcggaccacctcaggttcatgtctatgatgatgacgtggcttaccctttggatccttagagttttcttggactatcttcctcttcctctcatctcttcttcttcttctgcttattcttattcttatcctccctttagtttcgcttcgggtcttcttaccacggctgcggagaacgcgttggtcccggctaaggcttcctcgtcgtcgtccacgtcatcaactgcgttggtgaagtattcatggtcgtcagatttggtatgatgattt

SEQ ID NO: 148015 - DNA, 361 bp, Arabidopsis thaliana
caaaaagaaaatggttaagctcagcaattttttcgttgcaaccttcggggttctcctgcggcttaacggctgccttgcgaggcagtcacttggggttcctcctcagctacagaacgagtgtaacctcgacaacctagatgttctccaagccaccgaaactatcaagagtgaagccggtcagatcgagtactgggaccacaaccaccctcagctccgatgtgttggtgtttccgttgctcgttatgtaattgaacaaggcggtcttaacttgcccacctctttcactctcccaaaaattttctacgtctgtcaaggaacgggtatcaactgaagagtggaccctggttgtgccgagaccttt

SEQ ID NO: 148016 - DNA, 262 bp, Arabidopsis thaliana
agcggacagttactagtagtgccacaatttttttctggcaacgaatacacactgtgaggggggtaattgctcattaaatcgagtataatttgtttgttggttactactactctgataaccgtatctatattaaagctaattcgttcaatcaaaccccgacttatggaatggactcattaattttataaaaggtcgacacggtctctatccgttgctcttaagaatcattgatacctcgttggatcgtatggtctttgtgctg

SEQ ID NO: 148017 - DNA, 475 bp, Arabidopsis thaliana
accacgcgtccggccatgtgagactaaaagtaaatattttagttactgagctaatctcaggaacgattatggaacggtttctgagatgagtttggccgaccgttgtgctgttcacgagatctatcgaacttgagcaaaagggaataccgtcgctagacatttgaactgggcaatcaataacatcagaaccatctttgattgccttctcatatgccaattttgtacatccaggatactccccacttgcaccattttttgatataacaagaaaatccactgaggcacgcaccattggtagatggtaatgtttttgttctattagtaagaacagaaaagaaatgtaaagcaaattacactcattaccttgttttgtagcgtttctgccaatgtgggagaagcagtctgaagaaatacaaaaataaaatgtttgattttgagtattacaagtaatgttttaagaaataatattttgtct

SEQ ID NO: 148018 - DNA, 465 bp, Arabidopsis thaliana
  unsure (1)..(465): unsure at all n locations
gtgtgctcttagcctttactctatagttttatatcatatcaatcgacatggcgaatgtggaccgtgatcggcgtgtgcatgtagaccgtactgacaaacgtgttcatcagccaaactacgaagatgatgtcggttttggtggctatggcggttatggtgctggttctgattataagagtcgcggcccctccactaaccaaatcttggcacttatagcaggagttcccattggtggcacactgctaaccctagctggactcactctagccggttcggtgatcggcttgctagtctccatacccctcttcctcctcttcagtccggtgatagtcccggcggctctcactattgggcttgctgtgacgggaatcttggcttctggtttgttgggttgacgggtctgagctcggtctcgtgggtcctcaactnacctcgtgggacgagtgatacagtgccagagcaatt

SEQ ID NO: 148019 - DNA, 449 bp, Arabidopsis thaliana
attcgaccaaaacatattttaaccaaatacaatgaatcagtctattatcaccttgaaacactatgatggattcaacgctacccaaccgaaattcactgtatttttccaaccacaacgagatgaattacaccacgactctaagtgaaatcatcttttaaaccaccaaaattcacccaatgacacgaaaacatttctagcacaaagaaaatcaaatcctatcctgagatccaatccaattccaagctattagtccctcatgatccgagtgtagaacatgtcctaatagcatctacgccaaaagcgcaacttcagaagggttttgactcctctgctttcactatttcggtcctaagcctaaaacggacatactaatccgactgatactcaaccggatcaaccgggctgagacaaaaatttcttgaagtcgaggctttattggagagcttttc

SEQ ID NO: 148020 - DNA, 283 bp, Arabidopsis thaliana
gaaaacatacacaaatagcaaaacatggctatcaagctcttcctcgtctgcgcaactctcgccctctgcttcctcctcaccaacgcttccatctaccgcaccgttgtcgaattcgaagaagatgacgccagcaaccccgtaggtccaagacagagatgccagaaggagtttcagcattcacaacacctaaaagcttgccagagatggatgagcaagcaaatgaggcaaggacggggtggtggcccttccctccgccaagagttcgatttcgagggcccccagc

SEQ ID NO: 148021 - DNA, 442 bp, Arabidopsis thaliana
  unsure (1)..(442): unsure at all n locations
ctcagaatagaaatcgtccaagattcgacgatgagtaaaagacaaagaagaagagaagtgtatgattttgccactcgttttgctactttcttttgatattttgttttaggtgtcacataaatttgatagtgtaaagaaaacaaaaccactttctagttcttaaagaaactagaaatccatggacccgtctcgtcatactcatgtgatgctcgtatctttccccggccaaggtcacgtaaaccctctacttcgtctcggaaagctcatagcctctaaaggcttactcgtcacctttgtcaccacagagaagccatggggcaagaagatgcgtcaagccaacaagattcaagacggtgtgctcaaaccggtcggtctaggtttcatccggtttgagttcttctctgacggcttcgccgacgacgatgaanaaagattcgacttc

SEQ ID NO: 148022 - DNA, 368 bp, Arabidopsis thaliana
gacccacgcgccgaaaatggttaagctcagcaatctcctcgttttatttttcggggttctcctcgtccttaacggctgctcttctaggcagtcacttggggttcctcctcagctacagaacgagtgtaacctctacaacctagatgttcttcaagccaccgaaactatcaagagtgaagccggtcagatcgagtactgggaccacaaccaccctcagctccgatgtgttggtgtttctcgtgctcgttatgtaattgaacaaggcggtctttacttgcccaccttctttactttcctaaaaatttcttacgttctttaaggaacgggtatcatcgtaagagtggtccctggatgtgccttgaccttta

SEQ ID NO: 148023 - DNA, 407 bp, Arabidopsis thaliana
gacccacgcgtccggtggatttctccttttgtgttttctatgtttacatggtttttttccgtagtcatcatcatatatgttttacattcgattgtcttttccaataggtggtcaagctgtatgaaagatgtgtggttacctgtgcaaattacccagaatactggattcgttatgtgacaaacatggaagcaagtggaagtgcggaccttgcagaaaatgcccttgctcgagcaactcaagtctttgtcaaggtatgaattgtgtttctccaacctttctgggtagttaaatttcattattttcgagtggctttgcagaataattctaaatagtcagctttgagtctcatggttatttatctgctttcttttctttcatagaaacaaccagagattcacctatttgct

SEQ ID NO: 148024 - DNA, 444 bp, Arabidopsis thaliana
atgttctcttacatccgtctactttttgcaataggcattccatagttaaatgggttggcgaggaaagctattgcaatgtttctggtcatgaattttcttgatgtctccaagatatttttaacgtatgtagcaataaactgcaaaaaatcaatacacttgaaatcttttacggctacaatcaataagaagtcgaggtagtaacatacttgggtctcaagactctcaacaataattatctttgtaaatgcttcatttttttctgctttttgtaatcctgtagagtgtagactgtagtcttgagcaagtaccaaataggaaattactccacccatcacgaggtgtaagttcttgatcggttgtacttgtgatttccaactaaagctaagatacaatgtgatttcaaatcacaaatatcactctaatatatattaattatattattct

SEQ ID NO: 148025 - DNA, 438 bp, Arabidopsis thaliana
  unsure (1)..(438): unsure at all n locations
gtccgaacatacacacatagcaaaaaatggcaaacatgttgttcctcgtctgcccagctctcgctggggggttcctcctaaccaacgcttccatctcccgcaccgtcgttgagttcgaagaagatgacgccactaaccccataggcccaaaatgaggaaatgccgcaaggagtttcagaaagaacaacacctaagagcttgccagcaattgatgctccagcaagcaaggcaaggccgtagcgatgagnttgatttcgaagacgacattgagaacccacagggacaacagcaggaacaacagctattccagcagtgctgcaacgagcttcgccaggaagagccagattgtgtttgccccacctttgaaacaagctgccaaaggccgttagactccagggacagcaccaaccaatgcaagtcaggaaaatttaccagaca

SEQ ID NO: 148026 - DNA, 469 bp, Arabidopsis thaliana
attaactaacaacaaatggcgaacaagctcttcctcgtctgcgcagctctcgccctgtggggcatcctcaccaacgcttgcggctatcgcacggttgtcgagttcgacgaagatgacgccagtaaccccataggcccaatacagaaatgtcagaaggagtttcagcaagaacagcacctaagagcttgccagagatggatgcgcaagcaaatgtggcaaggacgtggtggtggtccttccctcgacgatgagttcgatatggaagacgacatcgagaacccgcagagacgacagctactccagaagtgctgcagcgagcttcgccaagaagagccagtttgcgtttgccccaccttgagacaagctgccaaggccgttagattccagggacagcaacaccaaccagagcaagtcaggaaaatttaccaggcagctaagtacttgcctaacatttgcaaaatccagcaag

SEQ ID NO: 148027 - DNA, 458 bp, Arabidopsis thaliana
  unsure (1)..(458): unsure at all n locations
gcattttcgcttcaattcaataaaaggcgaataatctctcactgcactttatctcgagagctcagatctccgatctagagcctttcgcttctcctcttctgttcatataacaactgaataatgtcgatctccgcccaaaatccggatatttccggcgatagacaatccggccaagatgttcgtactcagaacgtgatggcttgtcaagctgtttctaatattgttaagacctcacttggtcccgtcggcctcgacaagatgttggtggatgatattggtgatgtgactattacaaatgatggtgctactattcttaggatgttggaggtcgagcaccctgctgctaaggttcttgtcgagttagctgaacttcaagatagagaagtcggtgatgggactacatcctgtgttattgtaactgctgagtntgtgaagaggcaaatgatttgtcaggaaca

SEQ ID NO: 148028 - DNA, 366 bp, Arabidopsis thaliana
  unsure (1)..(366): unsure at all n locations
gaaaacatacacaaatagcaaaacatggctaacatgctcttcctcgtctgcgcaactctcggcctgtgcttcctcctcaccaacgcttccatctaccgcaccgttgtcgaattcgaagaagatgacgccagcaaccccgtaggtccaagacagagatgccagaaggagtttcagcaatcacaacacctaagagcttgccagagatggatgagcaagcaaatgaggcaaggacgtggtggtggtccttccctcgacgatgagttcgatttcgagggcccncagcagggataccagctactccagcagtgctgcaacgagcttcgccaggaagagccagtttgcgtttgccccaccttgaaacaagct

SEQ ID NO: 148029 - DNA, 463 bp, Arabidopsis thaliana
cctatctctctctcattcaaacccaaataggtaacaaatacacaaaagtataataaaaagggggtgtctcatctttcgccacgtagacatggacgtcgaacatcacaaatccggccacatcagtagaccaacggtggatattccaccgaggaagcttctttcctccgccaagtctccgtcgtcagtttcaagtccccttcgcgactataaagaacagaaagactattgttacgactctgactctgaggatccttacgccggagaccatttccggatgtacgaattcaagatccgacggtgcacgcgtagccgtagccatgactggaccgactgtcctttctctcatcccggtgaaaaggctcgtcgccgtgaccctcgccggtttcactacaccggagaagtatgccctgagtttagccgtcacggtgatggtagccgtggtgatgaatgcggtttcgctcac

SEQ ID NO: 148030 - DNA, 470 bp, Arabidopsis thaliana
ttacaacgtacgtacaatagctatgaatccataggacggtgatagctaaacatgtacatcctaaacatgtatgggttgatgaagaggcattagttccaagcaggcagatcccacatcacagcatttagttttactatgaaactgggacttgctttgcttctacaaagctctcaactagatgatcctgatcccttcagaggtgaaggaactgctgggtaaatctttcttagcttcttctgctctccaaactggtgtatggcgtcttgaatccctgcaaatgcgaccacaaactcggctgtatccgtttgattcagcagcttcttcatcaccagctccaacactttatacctgccaagcataacaactttctctcataatgctgatcaaagctttcacttcactcaacaaaactaagacatcattaaccacacacactatctggtgtcagctatttgtttctgttcattctc

SEQ ID NO: 148031 - DNA, 410 bp, Arabidopsis thaliana
cggtgatcgtgatggtaatccgagggtcacatctgttgtcactagagatgtgtgcttgtgggctagaatgatggctgccaatctctactataaccaaatcgagaatctgatgtttgagttatctatgtggcgttgcactgatgaattccgtgtgcgggcggatgaactgcacaggaactcaaggaaagatgctgcaaaacattacatagaattctggaagacaattcctccaactgagccataccgtgtgattcttggtgatgtgagggataagctgtatcacacacgtgagcgttcccgccaattgctgagtaatggaatctcggatattcctgaaagagctaccttcactaatgtggaacagttcttggagcctcttgagctctgttaccgatcactatgttcatgtg

SEQ ID NO: 148032 - DNA, 466 bp, Arabidopsis thaliana
gaaggatccaagtggtcaacgacaacttctttacgtgttggaccaacaggtgcagaaggggcagctcgtggtcatcccacaggggttcgcatacgttgtccagtcccacggaaacaagttcgagtggatctctttcaaaactaatgaaaacgcaatgatcagcactttggcgggtagaacctcgctcttgagggcattgccattggaggtcatatcaaatggtttccagatctctcccgaggaagctaggaagatcaagttcaacacacttgagaccactttgacccgcgctgccggtaggcaacaacaacagttgatcgaggagattgtcgaggcttaaatcaaaacgtttttctttttcttaataaagtatggtcagtttgtaatcacgtccctttacctttaacgtacgtgtaaaatatgtgtctgcggcacctcacttgtaataacaccttcttctcataaa

SEQ ID NO: 148033 - DNA, 443 bp, Arabidopsis thaliana
cgccttagcgctcttcgtggctccattcgttaaaacgctatggtgctaccgcaatggagacggaaacgcaaacgcggcactctacgtgacaaacggaaaggctcatatacaaatggtgaacgacaacggagaaagagtgttcgaccaagagatctccagcggacagttactagtcgtgccacaaggcttttcggtcatgaaacatgccataggcgaacagttcgagtggatcgaattcaagacaaacgaaaacgcacaggtcaacacactcgcgggccgtacctcagtcatgagaggtttgccgcttgaggttataaccaatgggtaccagatctctcccgaagaagctaaacgagtaaagtttagcacgattgagaccacactgacccatagcagtccaatgagctacggaaggcctaaggcttgaggcttgatgagcgcgt

SEQ ID NO: 148034 - DNA, 409 bp, Arabidopsis thaliana
cggggcggcccaacccgtccgaaaaggaagaaaaaggggtcgagtctcatcttttatctctttctcttggacactctggatccgctgcaatggctacactgcccaacagtggcccaacgagtgccagctcgatcaactcaatgcgctcgaaccatcccaaatcatcaagagcgagggtggtcgcatcgaggtctgggaccaccatgcaccccagctccgttgctccggctttgcctttgagcgtttcgtcattgagcctcagggtcttttcttgcccactttcttgaacgccggcaaactcacgtttgttgttcacggaaggggtctaatgggaagagttattccgggatgcgccgagacgttcatggagtcaccggtatttggagaggtcaaggtcagggtcagagtc

SEQ ID NO: 148035 - DNA, 241 bp, Arabidopsis thaliana
ctctctctcagttaaccagtagagagctttttttgcttctacttcttctctagcgctggggcgaggctcttcttacacgagcgcatctctcacaatggctctgaaaactgcgtctctataccagctttctctgctctcaaatccacttctccacgcaccagtggcaccatctcttcccgtcgacgaaacgcctccacgatcagtcactctctccgccctctggttcgtgcagccggcgtag

SEQ ID NO: 148036 - DNA, 457 bp, Arabidopsis thaliana
ataaaaatggctcgagtctcttctcttctttctttctccttaacacttttgatcctttggcatggctacgcggctcaacagggtcagcagggtcagcagtttccgaacgagtgccagctcgaccagctcaatgcgctcgagccttcacacgtactgaagagcgaggctggtcgcatcgaggtgtgggaccaccacgctcctcagctccgttgctcaggtgtctcctttgcacgttacatcatcgagtctaagggtctctacttgccctctttctttaacaccgcgaagctctccttcgtggctaaaggacgaggtcttatgggaaaagtgatccctggatgcgccgaaacattccaagactcatcagagttccaaccacgcttcgaaggtcaaggtcaaagccagaggttccgtgacatgcaccagaaagtggagcacattaggagcggtgatacca

SEQ ID NO: 148037 - DNA, 476 bp, Arabidopsis thaliana
caaaaagaaaatggttaagctcagcaatcttctcgttgcaaccttcggggttctcctcgtccttaacggctgccttgcgaggcagtcacttggggttcctcctcagctacagaacgagtgtaacctcgacaacctagatgttctccaagccaccgaaactatcaagagtgaagccggtcagatcgagtactgggaccacaaccaccctcagctccgatgtgttggtgtttccgttgctcgttatgtaattgaacaaggcggtctttacttgcccaccttcttcacttccccaaaaatttcctacgtcgttcaaggaacgggtatcagcggaagagtggtccctggatgtgccgagaccttcatggactcgcagccgatgcaaggacaacaacaaggccaaccatggcaaggacgacagggacaacaaggccaaccatgggaaggacagggacaacagggacaacaaggaagacaag

SEQ ID NO: 148038 - DNA, 475 bp, Arabidopsis thaliana
aaaatgggtcgagtctcatctattatctctttctctttgacactcttgatcctcttcaatggctgcactgcccaacagtggcccaacgagtgccagctcgatcaactcaatgcgctcgaaccatcccaaatcatcaagagcgagggtggtcgcatcgaggtctgggaccaccatgcaccccagctccgttgctccggctttgcctttgagcgtttcgtcattgagcctcagggtcttttcttgcccactttcttgaacgccggcaaactcacgtttgttgttcacggaaggggtctaatgggaagagttattccgggatgcgccgagacgttcatggagtcaccggtatttggagaaggtcaaggtcagggtcagagtcaagggtttcgtgacatgcaccagaaagtagagcacctacggtgcggtgacaccattgcaacaccatctggtgtagctcaatggttctacaacaatg

SEQ ID NO: 148039 - DNA, 306 bp, Arabidopsis thaliana
atccgcggcacgcgtgtggcagacacttaggacaaagtgtaaatatgggtaagcctcagctaatctcctcgtggcagcgcttcggggttctactaggcccttaacggcatgcttgcgaggcactcacttggggttcctgctcagctacagaacgagtgtcacctcgacagcctagatgttctccaagccaccgaaactatcacgagtgaagccggtcagatcgagtactgggaccacaaccaccctcagctccgatgtgtcggtgtttacgacgctcgttatgcaattgaacaaggcggtctttac

SEQ ID NO: 148040 - DNA, 100 bp, Arabidopsis thaliana
gaaaaggttaagctcagcaatctcctcgttgcattcttcggggctctcctcgtccttaacggctgccttgcgaggcagccacttggggttcctcctcagc

SEQ ID NO: 148041 - DNA, 453 bp, Arabidopsis thaliana
  unsure (1)..(453): unsure at all n locations
gtgattgccaatggtaagtaacaatgtacacaaataatgacaacaatttttgtaaagaaacagctctcttatgaatcagagagaagaatttggaggaaaggaaagacgaagaaagcctaataattcaaccaaaattattgtgaatagttatttagtaatactctctaagcacctgctaatgcgctgaagctgccacctctcctctgttttagaatatgtaagaggaatgaaaaggagtgttggtggcagtacctcaatatcaggcatggggagatggatgcagctgcatttctgtaaagttattgtttcctagaggagtaaataattgatttagaggtctttcttctcagacaaagctggagttntatgaagatgagtttgtgaggatgtgtttgggggtggtggtggtgggggtagctgggaagggtgctttgccgtttgggaacctcattt

SEQ ID NO: 148042 - DNA, 469 bp, Arabidopsis thaliana
tgttaagggacctttccaggtcgtgaggccttctctaagacagccctacgagagcgaggagtggagacacccacgtagcccacagggcaacggccttgaggagactatctgcagcatgaggtcccacgagaacattgacgaccctgctcgtgctgacgtgtacaagcccagcctaggtcgcgtgaccagcgtcaacagctataccttgcccatcttggagtatgtcaggctcagtgccactcgtggcgttctccagggtaatgcgatggtgcttcctaaatacaacatgaacgctaacgagatcttgtactgcactggaagacaaggaaggatccaagtggtcaacgacaacggacagaacgtgttggaccaacaggtgcagaaaggacagctcgtggtcatcccacaagggttcgcatacgttgtccagtcccacggaaacaagttcgagtggatctctttcaaaact

SEQ ID NO: 148043 - DNA, 434 bp, Arabidopsis thaliana
cacaaacgagtaagaatacaaatacaaatagctaaaaaaatggcaaacaagctcttcctcgtctgcgcaactttcgccctctgcttcctcctcaccaacgcttccatctaccgcactgttgtcgagttcgacgaagatgacgccagcaaccccatgggcccaagacagaaatgtcagaaggagtttcagcaatcacagcacctaagagcttgccagaaattgatgcgcatgccaaatgaggcaaggccgtggtggtggtccctccctcgacgatgagttcgatttggaagacgacatcgagaacccacaaggcccccagcagggacaccagatcctccagcagtgctgcagcgagcttcgccaggaagagccagtttgtgtttgccccaccttgagacaagctgccagggccgttagcctccagggacaacacg

SEQ ID NO: 148044 - DNA, 456 bp, Arabidopsis thaliana
gcaaagttgatactgaagagctagacaagagcatcgtctcatcagctagagtgaaaagcgagccaacagctttgagctcagggttaaaaggaaagttggataactctcctggttcaggaacagagaagagcaaactggtaagcaaggtgacaagaaatatcccacgtcccaaaccgcggccgaagaagaagatattgcttaaaaagaagctaaaaatcgttgtaaattctgctacaaaaatggttgaggaagtcgatacttccttagagcctagtgcaagtcaacttctgtgccagaagtgccactgtgcggtaaagagcaccagcactgaaaaccacccgccctcgaatactagtcatactactgataaaaatgtcagtatagaagcagatcaagaatcactcgcaagcccgcgtctcattcgcattgtgaagtgtaatagcggtgatagcggtg

SEQ ID NO: 148045 - DNA, 453 bp, Arabidopsis thaliana
aagaggaagaaaaatgggtcgagtctcatctattatctctttctctttgacactcttgatcctcttcaatggctacactgcccaacagtggcccaacgagtgccagctcgatcaactcaatgcgctcgaaccatcccaaatcatcaagagcgagggtggtcgcatcgaggtctgggaccaccatgcaccccagctccgttgctccggctttgcctttgagcgtttcgtcattgagcctcagggtcttttcttgcccactttcttgaacgccggcaaactcacgtttgttgttcacggaaggggtctaatgggaagagttattccgggatgcgccgagacgttcatggagtcaccggtatttggagaaggtcaaggtcagggtcagagtcaagggttccgtgacatgcaccagaaagtagagcacctacggtgcggtgacaccattgcaacacc

SEQ ID NO: 148046 - DNA, 389 bp, Arabidopsis thaliana
acaaaaagaaaatggttaagctcagcaatcttttcgttgcaaccttcggggttctcctcgtgcttaacggctgccttgcgaggcagtcacttggggttcctcctcagctacagaacgagtgtaacctcgacaacctagatgttctccaagccaccgaaactatcaagagtgaagccggtcagatcgagtactgggaccacaaccaccctcagctccgatgtgttggtgtttccgtcgctcgttatgtaattgaacaaggcggtctatacttgcccaccttatgcactttcccaaaaatctgctacgtcgttcaaggaacgggtatcagctggagagtggtcccttgatgtgccgagaccttcatagactcgcagccgttgcatggacaa

SEQ ID NO: 148047 - DNA, 454 bp, Arabidopsis thaliana
cccaagcgacccgaaaaagaaaatggataagctcagcagtctcctcgttgcaaccttcggggttctcctcgtgcttaacggctgcctcgcgaggcggtcacttggggttcctcctcagctacagaacgagtgtaacctcgacaacctagatgttctccaagccaccgaaactatcaagagtgaagccggtcagatcgagtactgggaccacaaccaccctcagctccgatgtgttggtgtttccgttgctcgttatgtaattgaacaaggcggtctttacttgcccaccttcttcacttccccaaaaatttcctacgtcgttcaaggaacgggtatcagcggaagagtggtccctggatgtgccgagaccttcatggactcgcagccgatgcaaggacaacaacaaggccgaccatggcaaggacgacagggacaacaaggccaaccatgggaa

SEQ ID NO: 148048 - DNA, 451 bp, Arabidopsis thaliana
  unsure (1)..(451): unsure at all n locations
attataccacacaatttatctactttattgctcatgcgcctgaaattcattagtttttgttaaaacaagtatatatctcacttctttgtacttagttgccctagaagttagaagattcttatttttatagagaaaaccaattacatgtgcgtacatatatatatatatgtatgtgtgcaacatatacttaatgtatacgtatttaaatatatgatgttaggagtacttaattactattcagtatacatacacgttgcggaaaattacaaatcggtgctaaaactgtttttacattatatgaaaattgcttcaaaccatttttcattacaaatcaattatcatgtaagcataaaatctatacttatcgacattgagagggatntgaatattataccaaaaaaaatggcgtagaagtggggaccaaagcaccgcctaaaacatgagaatgatg

SEQ ID NO: 148049 - DNA, 454 bp, Arabidopsis thaliana
  unsure (1)..(454): unsure at all n locations
aattaatattatntggcttcaatctcctctttttcgttccaccagatccaagttcgcgggattgcaggctctctaacaaagttcttcacttttgctctcaaagctttcatctttcattcaactacttaagctccaagtatggcaggatccgcaccggaaggaacacaatttgatacgcgtcagtttgaccagaggctgaatgaagttctcgatggacaggatgagttcttcacctcatatgatgaggtccatgagagctttgatgccatgggtttgcaagagaatcttcttaggggtatctatgcttacggtttcgaaaagccttctgctattcagcaaagaggaattgtacccttttgcaaggggtctgatgtgatccagcatgcacagtctggtactggaaaaaccgccactttctgctctggtgtctngcagcagcttgactatgcccttc

SEQ ID NO: 148050 - DNA, 435 bp, Arabidopsis thaliana
caccagagcaaaaaagcaaaggtttcaccaaatttttcctcaaattctattaatggcctctagaaattctgacggatatttctgggatccgaccggtatgactgttcctggtctcggaccttcctttacagccgccgtttcttcttcttcttcaccaacgacttcttctacggccgtggctgtggcggatgtgacggcgatggtttcttcttcggaggaggatttgagtaagaagattaggaagccttatactattactaagtctagagagagctggacggagcctgagcatgataaattccttgaagctcttcaattgtttgatagagactggaagaagattgaagcttttattggttcaaagacagtgattcagatacgaagtcatgctcagaagtattttcttaaggtacaaaagagtgggaccggtgaaca

SEQ ID NO: 148051 - DNA, 449 bp, Arabidopsis thaliana
agacatgacaaaatggctcgagtctcctcttttctttcccccttattaacacttttgatgcgtggcccatggctacgcgggtcagcagcgctcaccatggccagcagtttccgaacgagtgccagctcgaccagctcaatgcgctcgcgccggcacacatactgaagagcgaggctggtcgcctcgaggtgtgggaccaccacgctcctcaggtaccttgctcaggtgtctccgttgcacgacacatcatcgagtcttacgagccctactcgcgctctttctctaacaacaggaagctctctatcgcggctaatggacgacgtctgatgggaaaagagatccctggatgcgccgaaacattgcatgacccagtacagttccaaccacgcttcgaaggtcatggtcatagccagacagtgcacgacatgcaccatgaagtggagctcatt

SEQ ID NO: 148052 - DNA, 372 bp, Arabidopsis thaliana
gtcgcggtgattccttctttggttgtccaaactcagacagctcaccgtttttagagaacttgccggagttaccgtttggcgggatattctgcgatggtgaaatcggacgcagcttaatcttggagaagggagaggaaaagaaagaagtgagcatccaaagatttcttcacgtttatagttcggtatatcttattgtctcgtatacatcttaatattaaggggtctggttggttttatgcttattaagagaatgataagttaactacaactaggacttatgaggcaataactcttgctttgctttccatctgttattaatcttatctcttgcttatttttcttggcttctttcactttgatgatttgggtatg

SEQ ID NO: 148053 - DNA, 449 bp, Arabidopsis thaliana
caaaaagaaaatggttaagctcagcaatctcctcgttgcaaccttcggggttctcctcgtccttaacggctgccttgcgaggcagtcacttggggttcctcctcagctacagaacgagtgtaacctcgacaacctagatgttctccaagccaccgaaactatcaagagtgaagccggtcagatcgagtactgggaccacaaccaccctcagctccgatgtgttggtgtttccgttgctcgttatgtaattgaacaaggcggtctttacttgcccaccttcttcacttccccaaaaatttcctacgtcgttcaaaggaacgggtatcagcggaagagtggtccctggatgtgccgagaccttcatggactcgcagccgatgcaaggacaacaacaaggccaaccatggcaaggacgacagggacaacaaggccaaccatgggaaggacag

SEQ ID NO: 148054 - DNA, 444 bp, Arabidopsis thaliana
cacatagcaaaaaatggcaaacaagttgttcctcgtctgcgcagctctcgctctctgcttcctgctcaccaacgcttccatctaccgcaccgtcgttgagttcgaagaagatgacgccactaaccccataggcccaaaaatgaggaaatgccgcaaggagtttcagaaagaacaacacctaagagcttgccagcaattgatgctccagcaagcaaggcaaggccgtagcgatgagtttgatttcgaagacgacatggagaacccacagggacaacagcaggaacaacagctattccagcagtgctgcaacgagcttcgccaggaagagccagattgtgtttgccccaccttgaaacatgctgccaaggccgttagactccagggacagcaccaaccaatgcaagtcaggaaaatttaccagacagccaagcacttgcccaacgt

SEQ ID NO: 148055 - DNA, 345 bp, Arabidopsis thaliana
gaagaggatggctgatgacgagagagttcgttacagagatcaacatataaggtggatagaggggacaaatgctactacttaaaggacagaggattggatacgcgaaaaaaaaaacctgggtcgcatcggccaattcatcggtccgggactgtatgtatcctgcctcacgggcaaaaagcctaatatgtacagggctctggtggctaagggtggtgatcctcgacgtcaagaaagtgaggtgactggtgacgtgcaacatttactgggaaacaattgagtctgagctgtatctacatgtgcgacagatgggttaacgagaggattggacgtggttgatatgggcaa

SEQ ID NO: 148056 - DNA, 421 bp, Arabidopsis thaliana
cgagtctaagggtctctacttgccctctttctttaacaccgcgaagctctccttcgtggctaaaggacgaggtcttatgggaaaagtgatccctggatgcgccgaaacattccaagactcatcagagttccaaccacgcttcgaaggtcaaggtcaaagccagaggttccgtgacatgcaccagaaagtggagcacattaggagcggtgataccattgccacaacacccggtgtagcccagtggttctacaacgacggacagcaaccacttgtcatcgtcagcatcttcgatctagccagtcaccagaaccagcttgaccgcaacccaaggccattttacttagccggaaacaacccacaaggtcaagtattgctacaaggacgagagcaacagccacagaagaacatcttcaatggattt

SEQ ID NO: 148057 - DNA, 439 bp, Arabidopsis thaliana
caaggccaaccatgggaaggacagggacaacatggacaacaaggacgacagggacaacaagggcaaccatgggaaggacagggacagcagggacaacaagggttccgtgacatgcaccagaaggtggaacatgtgagacgcggagacgtctttgccaacactccaggctctgcccactggatctacaactcaagagaacagccacttgtcatcatcgctcttctcgacatcgccaactaccaaaaccaactcgaccgcaaccctagagtgttccatttggccggaaacaaccagcagggaggctttggcggttcacagcaacaacaagaacagaaaaacttgtggagcgggttcgacgcacaggtcatagctcaagcattgaaaattgacgttcagttggctcagcagcttcagaaccaacaagacagcagaggaaaca

SEQ ID NO: 148058 - DNA, 444 bp, Arabidopsis thaliana
cttttgtcactcatcttcacaggaaacaatggtgtttgtgaagtcctccaaatcgaatgcttacttcaagaggtaccaagtgaagttcaggagaaggagagatgggaagactgattacagggcaaggatccgtcttatcaatcaagacaagaacaagtacaacacccctaagtaccgttttgttgttcgatttaccaacaaagacattgtggcacagattgtatctgcaagcatagctggtgacattgttaaagcttcggcttacgcacatgagcttcctcagtatggactcactgttggtcttaccaactatgctgcagcttactgtactggccttcttttggctcgtcgtgttctgaaaatgctggaaatggatgatgagtacgagggaaacgtagaggccactggagaggacttttctgtggaaccaactgattccagaag

SEQ ID NO: 148059 - DNA, 457 bp, Arabidopsis thaliana
agcaaaacggcgacgtattgcgtgacgggtgcatttggatacatcggttcttggttggttaaggggcttctccaaagaggttacacagtccatgccactctcagagatcttgcaaaatctgaatactttcaatctaaatggaaggaaaatgaacggctcagattattccgagcggatcttcgagatgacggcagctttgacgacgccgttaagggttgtgacggcgtcttccatgtcgccgcttccatggagtttgatatctcatcagatcacgttaatctcgagagttatgtccagagcaaagtcatagaaccggcgctaaaaggcgtacggaatgtacttagttcttgtctaaagtcaaagtcagtcaaaaagagttgtcttcacatcatccatcagcactctcactgctaaagatgagaatgaacggatgagatctttcgtggatgaaacatgc

SEQ ID NO: 148060 - DNA, 446 bp, Arabidopsis thaliana
atcaacatagtcttcttatggtgaaaactgaacatatatattgttaatcgtatatttaagatagaaggatatgtagatgtcgcgctaattatgtgtttgtttgtcttgtttaaataaaaaatgagagtgatagctagtgataataactttaagatataccaagaatattgagtcccatactgttcatttcatttattgcaacacaatagatttttatggtccaataattatgatactgatgcagcttacaaatattcaatgcgttctgtatatatatatatctaatttgagaaaaattaattattctgtatcatagtatttgttgcgatagtgaagtactcttcatatttatatattcttttaaaccccaatttttctgattatatgtttgcactgcatttaaaaaccagtatagccatttacgataatgaatatttaaacactct

SEQ ID NO: 148061 - DNA, 449 bp, Arabidopsis thaliana
caaaaagaaaatggttaagctcagcaatctcctcgttgcaaccttcggggttctcctcgtccttaacggctgccttgcgaggcagtcacttggggttcctcctcagctacagaacgagtgtaacctcgacaacctagatgttctccaagccaccgaaactatcaagagtgaagccggtcagatcgagtactgggaccacaaccaccctcagctccgatgtgttggtgtttccgttgctcgttatgtaattgaacaaggcggtctttacttgcccaccttcttcacttccccaaaaatttcctacgtcgttcaaggaacgggtatcagcggaagagtggtccctggatgtgccgagaccttcatggactcgcagccgatgcaaggacaacaacaaggccaaccatggcaaggacgacagggacaacaaggccaaccatgggaaggacagg

SEQ ID NO: 148062 - DNA, 171 bp, Arabidopsis thaliana
gttttcatgaactttaccgtgccatataaggagctttcaccgagtatcatagtcttatcgaagttctttgtagctttaactatctcttctaagctaaactgtctacataccggtaaatcctctgaaccaaacttggatgtttcagaaatgtaccctaaatcacaatcacac

SEQ ID NO: 148063 - DNA, 438 bp, Arabidopsis thaliana
agaaaaacttgtggagcgggttcgacgcacatgtcatagctcaagcattgaaaattgacgtggagttggctcagcagcttcagaaccaacaagacagcagaggaaacatcgttcgtgttaagggacctttccaggtcgtgaggccacctctaagacagccctacgagagcgaggagtggagacacccacgtagcccacagggcaacggccttgaggagactatctgcagcatgaggtcccacgagaacattgacgaccctgctcgtgctgacgtgtacaagcccagcctaggtcgcgtgaccagcgtcaacagctataccttgcccatcttggaatatgtcaggctcagtgccactcgtggcgttctccagggtaatgcgatggtgcttcctaaatacaacatgaacgctaacgagatcttgtactgcactggaggac

SEQ ID NO: 148064 - DNA, 456 bp, Arabidopsis thaliana
caagaaaacatacacaaatagcaaaacatggctaacaagctcttcctcgtctgcgcaactctggccctctgcttcctcctcaccaacgcttccatctaccgcaccgttgtcgaattcgaagaagatgacgccagcaaccccgtaggtccaagacagagatgccagaaggagtttcagcaatcacaacacctaagagcttgccagagatggatgagcaagcaaatgaggcaaggacgtggtggtggtccttccctcgacgatgagttcgatttcgagggcccccagcagggataccagctactccagcagtgctgcaacgagcttcgccaggaagagccagtttgcgtttgccccaccttgaaacaagctgccagggcagttagcctccagggacagcacggaccattccaatccaggaaaatttaccagtcagctaagtacttgcctaacatttgc

SEQ ID NO: 148065 - DNA, 438 bp, Arabidopsis thaliana
cacagacaaggtaaaaaaaaaaaacagcttaccaaatttttctcctccttcacggcaaatcgtcaccgccacattatctcccaaactaagaatctagggttttctaagggtttttaatcttcgtccttctctccttctccagttttaggtttcagtttcagatggcgagatacgctgctggtgcggttgattgtcctggttctcccaaatctgtgcgaatcgttgtggttggtgataagggcactggaaaatcaagcttgattgttgctgcagccactgattctttccctcccaatgtccctcctgttttgcctgattacaagttgcctattgaattcttccctgatggtatacccgtcaccattgtcgacacttcctcaaggccagaagatagggacattgttgctgaggaattgaagcgcgcagatgcagtagttt

SEQ ID NO: 148066 - DNA, 451 bp, Arabidopsis thaliana
catagcaaaaaatggcaaacaagttgttcctcgtctgcgcagctctcgctctctgcttcctcgtcacgcaacgcttccatctaccgcaccgtcgttgagttcgaagaagatgacgccactaaccccataggcccaaaaatgaggaaatgccgcaaggagtttcagaaagaacaacacctaagagcttgccagcaattgatgctccagcaagcaaggcaaggccgtagcgatgagtttgatttcgaagacgacatggagaacccacagggacaacagcaggaacaacagctattccagcagtgctgcaacgagcttcgccaggaagagccagattgtgtttgccccaccttgaaacaagctgccaaggccgttagactccagggacagcaccaaccaatgcaagtcaggaaaatttaccagacagccaagcacttgcccaacgtttgcgaca

SEQ ID NO: 148067 - DNA, 453 bp, Arabidopsis thaliana
  unsure (1)..(453): unsure at all n locations
ggagncttcttcttcgtagggtgttcatcgtttttatcgttatcgcccctacgtcagctccatgtggagaaacatgggtgcaggtggaagaatgccggttcctacttcttccaagaaatcggaaaccgacaccacaaagcgtgtgccgtgcgagaaaccgcctttctcggtgggagatctgaagaaagcaatcccgccgcattgtttcaaacgctcaatccctcgctctttctcctaccttatcagtgacatcattatagcctcatgcttctactacgtcgccaccaattacttctctctcctccctcagcctctctcttacttggcttggccactctattgggcctctcaaggctgtgtcctaactggtatctgggtcatagcccacgaatgcggtcaccacgcattcagcgactaccaatggctggatgacacagttggtcttatcttcca

SEQ ID NO: 148068 - DNA, 457 bp, Arabidopsis thaliana
aagaaataacaaaatggctcgagtctcttctcttctttctttcttcttaacacttttgatcctttggcatggctacgcggctcaacagggtcagcagggtcagcagtttccgaacgagtgccagctcgaccagctcaatgcgctcgagccgtcacacgtactgaagagcgaggctggtcgcatcgaggtgtgggaccaccacgctcctcagctccgttgctcaggtgtctcctttgcacgttacatcatcgagtctaagggtctctacttgccctctttctttaacaccgcgaagctctctttcgtggctaagggacgaggtcttatgggaaaagtgatccctggatgcgccgaaacattccaagactcatcagagttccaaccacgcttcgaaggtcaaggtcaaagccagaggttccgtgacatgcaccagaaagtggagcacattatgagcggt

SEQ ID NO: 148069 - DNA, 352 bp, Arabidopsis thaliana
  unsure (1)..(352): unsure at all n locations
ttgtcattcgtcaggcgtctttcgatcttagccatgtcatccagaaccagtcttgatccgcatacccaaggccatttttatcttagtccggaaacaatcccacaatggtcatagtattggctaccaaggccgagatgcaacatgccacatgaagaatcattttcatatgganntttggacccgaggttatttgctcaagnctttgaagatncgatcttcagacatgcgcagcatacttcagataccaagatgacaatccgtggaaacattgtccgagtccaaggcccgttcggtgtcattaggccgcctttgaggggccagagacctcaggaggaggaagaagaagaagaag

SEQ ID NO: 148070 - DNA, 453 bp, Arabidopsis thaliana
  unsure (1)..(453): unsure at all n locations
atacacaaatagcaaaacatggctaacaagctcttcctcgtctgcgcaactctcgccctgtggttcctcctcaccaacgcttccatctaccgcaccgttgtcgaattcgaagaagatgacgccagcaaccccgtaggtccaagacagagatgccagaaggagtttcagcaatcacaacacctaagagcttgccagagatggatgagcaagcaaatgaggcaaggacgtggtggtggtccttccctcgacgatgagttcgatttcgagggcccccagcagggataccagctactccagcagtgctgcaacgagcttcgccaggaagagccagtttgcgtttgccccaccttgaaacaagctgccagggcagttagcctccagggacagcacggaccattccaatccaggaaaatntaccagtcagctaagtacttgcctaacatttgcaagatc

SEQ ID NO: 148071 - DNA, 450 bp, Arabidopsis thaliana
aaggaagacaaggccaaccatgggaaggacatttacaacagggacaacaaggacgacagggacaacaaggccaaccatgggaaggacagggacagcagggacaacaagggttccgtgacatgcaccagaaggtggaacatgtgagacgcggagacgtctttgccaacactccaggctctgcccactggatctacaactcaggagaacagccacttgtcatcatcgctcttctcgacatcgccaactaccaaaaccaactcgaccgcaaccctagagtgttccatttggccggaaacaaccagcagggaggctttggcggttcacagcaacaacaagaacagaaaaacttgtggagcgggttcgacgcacaggtcatagctcaagcattgaaaattgacgttcagttggctcagcagcttcagaaccaacaagacagcagaggaaacatcg

SEQ ID NO: 148072 - DNA, 429 bp, Arabidopsis thaliana
caataaagaggaagaaaaatgggtcgagtctcatctattatctctttctctttgacactcttgatcctcttcaatggctacactgcccaacagtggcccaacgagtgccagctcgatcaactcaatgcgctcgaaccatcccaaatcatcaagagcgagggtggtcgcatcgaggtctgggaccaccatgcaccccagctccgttgctccggctttgcctttgagcgtttcgtcattgagcctcagggtcttttcttgcccactttcttgaacgccggcaaactcacgtttgttgttcacggaaggggtctaatgggaagagttattccgggatgcgccgagacgttcatggagtcaccggtatttggagaaggtcaaggtcagggtcagagtcaagggtccgtgacatgcaccagaaagtagagcacc

SEQ ID NO: 148073 - DNA, 452 bp, Arabidopsis thaliana
  unsure (1)..(452): unsure at all n locations
aaaaaaacataaaaaaacaaaccagtgtaatgtggacactaaagatgaaagacaaaaaaagtaagaaacttcaacatttctatcatcaaacttgacattaagctttaaaatccccagaaacccaaaatgtgataacatttctatcctagatttctagttttagagaaagatcaagaacacaaaacaaaagaataactctcttttattatttaggaaactctgtcaaaacctaaatctcttgatctctcttaaagtcatatataaattaaacttatgtatattgaagcttaatatataaattattttgttttatgatttaagaaataagaaagaagctaacaatatatgaacaattgaattaataagaaaactaagagaaatttggttttgggttattacaaaaaaaacaattacagtattagccaagaaaagagagagnttgctcttatagg

SEQ ID NO: 148074 - DNA, 452 bp, Arabidopsis thaliana
aaatataagaaataacaaaatggctcgagtctcttctcttctttctttcttcttaacacttttgatccttttccatggctacgcggctcaacagggtcagcagggtcagcagtttccgaacgagtgccagctcgaccagctcaatgcgctcgagccgtcacacgtactgaagagcgaggctggtcgcatcgaggtgtgggaccaccacgctcctcagctccgttgctcaggtgtctcctttgcacgttacatcatcgagtctaagggtctctacttgccctctttctttaacaccgcgaagctctctttcgtggctaagggacgaggtcttatgggaaaagtgatccctggatgcgccgaaacattccaagactcatcagagttccaaccacgcttcgaaggtcaaggtcaaagccagaggttccgtgacatgcaccagaaagtggagcaca

SEQ ID NO: 148075 - DNA, 430 bp, Arabidopsis thaliana
ccgagacgttcatggagtcaccggtatttggtgaaggtcaaggtcagggtcagagtcaagggttccgtgacatgcaccagaaagtagagcacctacggtgcggtgacaccattgcaacaccatctggtgtagctcaatggttctacaacaatggaaatgagcctctcattcttgttgcagccgcggatctcgccagcaaccagaaccagcttgaccgcaaccttagaccatttttgatagccggaaacaacccacaagggcaggaatggctacaaggccgaaagcaacagaagcaaaacaacatcttcaatggcttcgcacctgagatcttggctcaagccttcaagatcaatgtcgagacggctcagcagctccagaaccagcaagataaccgtggcaacatcgtcaaaggtcaacggacctttcgcgt

SEQ ID NO: 148076 - DNA, 455 bp, Arabidopsis thaliana
cacacatagcaaaaaatggcaaacaagttgtttcttgtctgcgcagctctcgctctctgcttgctcctcaccaacgcttccatctaccgcaccgtcgttgagttcgaagaagatgacgccactaaccccataggcccaaaaatgaggaaatgccgcaaggagtttcagaaagaacaacacctaagagcttgccagcaattgatgctccagcaagcaaggcaaggccgtagcgatgagtttgatttcgaagacgacatggagaacccacagggacaacagcaggaacaacagctattccagcagtgctgcaacgagcttcgccaggaagagccagattgtgtttgccccaccttgaaacaagctgccaaggccgttagactccagggacagcaccaaccaatgcaagtcaggaaaatttaccagacagccaagcacttgcccaacgtttgcgacat

SEQ ID NO: 148077 - DNA, 440 bp, Arabidopsis thaliana
cacttccccaaaaatttcctacgtcgttcaatgaacgggtttcagcggaagagtggtccctggatgtgccgagaccttcatggactcgcagccgatgcaaggacaacaacaaggccaaccatggcaaggacgacagggacaacaaggccaaccatgggaaggacagggacaacagggacaacaaggaagacaaggccaaccatgggaaggacagggacaacagggacaacaaggacgacagggacaacaaggccaaccatgggaaggacagggacagcagggacaacaagggttccgtgacatgcaccagaaggtggaacatgtgagacgcggagacgtctttgccaacactccaggctctgcccactggatctacaactcaggagaacagccacttgtcatcatcgctcttctcgacatcgccaactaccaaaaccaac

SEQ ID NO: 148078 - DNA, 437 bp, Arabidopsis thaliana
gcaaaaaatggcaaacaagttgttcctcgtctgcgcagctctcgctctctgcttcctcctaaccaacgcttccatctaccgcaccgtcgttgagttcgaagaagatgacgccactaaccccataggcccaaaaatgaggaaatgccgcaaggagtttcagaaagaacaacacctaagagcttgccagcaattgatgctccagcaagcaaggcaaggccgtagcgatgagtttgatttcgaagacgacatggagaacccacagggacaacagcaggaacaacagctattccagcagtgctgcaacgagcttcgccaggaagagccagattgtgtttgccccaccttgaaacaagctgccaaggccgttagactccagggacagcaccaaccaatgcaagtcaggaaaatttaccagacagccaagcacttgcccaacg

SEQ ID NO: 148079 - DNA, 457 bp, Arabidopsis thaliana
aacaaacaaaaagaaaatggttaagctcagcaatctcctcgttgcaaccttcggggttctcctcgtccttaacggctgccttgcgaggcagtcacttggggttcctcctcagctacagaacgagtgtaacctcgacaacctagatgttctccaagccaccgaaactatcaagagtgaagccggtcagatcgagtactgggaccacaaccaccctcagctccgatgtgttggtgtttccgttgctcgttatgtaattgaacaaggcggtctttacttgcccaccttcttcacttccccaaaaatttcctacgtcgttcaaggaacgggtatcagcggaagagtggtccctggatgtgccgagaccttcatggactcgcagccgatgcaaggacaacaacaaggccaaccatggcaaggacgacagggacaacaaggccaaccatgggaaggacagggt

SEQ ID NO: 148080 - DNA, 448 bp, Arabidopsis thaliana
ctgtttctcagatcttctctctgtttttttcttctcataaaataagagttgtgattcaacagttgtggtgagaatattccttctctacaatatactaaattcgtttcttctctctttagtaccaaagaagctacgaactcttttccctctttcttggttcgacaaaactctccacaagaactcaccaccgtctccgtcaacgatgttaccttctccatcatcgtcttcagcgccgacgaaaagaatagatccgtccgagctcaaacgcgttttccagatgttcgacaagaacggtgacggtcgaatcacaaaggaagagctcaacgactcgcttgagaatcttggaatctacataccagacaaagatctgactcaaatgatccacaagatcgatgctaacggtgatggattgcgtcgcatagacgagttgagtcgctgtacagctcga

SEQ ID NO: 148081 - DNA, 314 bp, Arabidopsis thaliana
aaacaaaccctcaaagcgtatgagagtgtggttgttgatatatacatgttgacacttgacacataccacacctcatcgtgtgttttatgataaatgtaagcttttggatgtttgagggtaatgtaagcactacttaataaataagagtttttttttttttttaaaataaacaaatatatactcaaatctacacaaaatagccaaaacaaaatttgtgacaaaatatatgcaataatagatgaaatatccgaaaataggtatacagtaattaatactttttgggtatatatgtaagttgattgtagttcaaactt

SEQ ID NO: 148082 - DNA, 449 bp, Arabidopsis thaliana
gtgcagtaggtggagatactgagactcataaggatcttgctattgtatttcagtctgaggagcgacataaattaaagagggttattgatacattaaagcagagactggaaacagcaaaagctgacacggaagatcttatctcaaggctgaatcaggagttagccgttcgacaatttctgtcaacaaaggtaagagatttagaggttgaacttgaaacaactcgagagagctgcaagcaaggcatggagaaaacagtcctagatgaaaaggaaagatttactcaaattcagtgggatatggaggaactccgcaagcaatgcatggaaatggaatcgtttttaaactctataaaggacgagaaaacacatattgagactgcaaatgagtcacttgttcaagaaaatcagatgttgctgcagcagatcaatgatataagagaaaattttgag

SEQ ID NO: 148083 - DNA, 432 bp, Arabidopsis thaliana
tgtgatgtgagtttgcagatattcaaacaactcaatcctcattccctttgtttcgcctctctggatttcgaagagctgagagattagggtttctcgattttcgagattagagtctaatccccaccaccagcatagctgatatcctggaggagagaatgacggattcgggtctaatgatgccggcggagattgctggaattctaaccacggcgattacgagttggtgggatgatgttaatgagtcaactcagtggcaagatgggatctttttcgctctttgtggtgcttatgctcttgtttccgccgttgctcttgttcaactgataaggatccaaatgagagtgcctgagtatggttggactactcagaaggtgtttcatcttatgaactttgtcgtcaatggagttcgtgcggttctgtttggatttcaca

SEQ ID NO: 148084 - DNA, 367 bp, Arabidopsis thaliana
aacaaaaagaaaatggctaagctcagcaatctcctcgttgcaaccttaggggttcttctagagcttaacggatgccttgcgaggcaggcactcggggttccttctgagctacagaacgagtgtcacctcgacaacctagatgttctacaagccaccgaaactatcaagagtgaagcccgtcagatcgagtactgggaccacaaccaccctaagcttcgatgtgttggtgatcacgccgctcgttatgtaatcgaacaaggcggactgtacttgcccaccttgttcacttgcccgaaaatttcctacgtcgttcaagggacgggtatcagcgtgagagtggtgcctggatgtgccgagaccttcatgg

SEQ ID NO: 148085 - DNA, 452 bp, Arabidopsis thaliana
caacaacaagaacagaaaaacttgtggtgcgtgtttcgacgcacaggtcatagctcaagcattgaaaattgacgttcagttggctcagcagcttcagaaccaacaagacagcagaggaaacatcgttcgtgttaagggacctttccaggtcgtgaggccacctctaagacagccctacgagagcgaggagtggagacacccacgtagcccacagggcaacggccttgaggagactatctgcagcatgaggtcccacgagaacattgacgaccctgctcgtgctgacgtgtacaagcccagcctaggtcgcgtgaccagcgtcaacagctataccttgcccatcttggagtatgtcaggctcagtgccactcgtggcgttctccagggtaatgcgatggtgcttcctaaatacaacatgaacgctaacgagatcttgtactgcactggaggac

SEQ ID NO: 148086 - DNA, 400 bp, Arabidopsis thaliana
  unsure (1)..(400): unsure at all n locations
gagagaggagaagtactttttatctcttaagatagtgtgcgtataagcactgtccgccagacatatatcttcatcctcaatctcgtattttgacataggctatccatatgtcataacatattttctggaataaaatatttattcatgaaactttgacatagactatccatatgtcataatatataacattattccagaattacaaaagcatctataatgcttgtcatgcatagcatgataatacatatggctataatatattacattgatttctcgttgtcatgattaatcgagaaaatctgccatatcaagatgactatcatcatctnggccattaaaaggaagttccgactcatcacagatgagataggttcaacaatcctttttttttgcctttttt

SEQ ID NO: 148087 - DNA, 451 bp, Arabidopsis thaliana
aagaaaacatacacaaatagcaaaacatggcttacaagctcttcctcgtctgcgcaactctggccctctgcttcctcctcaccaacgcttccatctaccgcaccgttgtcgaattcgaagaagatgacgccagcaaccccgtaggtccaagacagagatgccagaaggagtttcagcaatcacaacacctaagagcttgccagagatggatgagcaagcaaatgaggcaaggacgtggtggtggtccttccctcgacgatgagttcgatttcgagggcccccagcagggataccagctactccagcagtgctgcaacgagcttcgccaggaagagccagtttgcgtttgccccaccttgaaacaagctgccagggcagttagcctccagggacagcacggaccattccaatccaggaaaatttaccagtcagctaagtacttgcctaacat

SEQ ID NO: 148088 - DNA, 448 bp, Arabidopsis thaliana
ataaaaatggctcgagtctcttctcttctttctttctccttaacacttttgatccttttccatggctactcggctcaacagggtcagcagggtcagcagtttccgaacgagtgccagctcgaccagctcaatgctctcgagccttcacacgtactgaagagcgaggctggtcgcatcgaggtgtgggaccaccacgctcctcagctccgttgctcaggtgtctcctttgcacgttacatcatcgagtctaagggtctctacttgccctctttctttaacaccgcgaagctctccttcgtggctaaaggacgaggtcttatgggaaaagtgatccctggatgcgccgaaacattccaagactcatcagagttccaaccacgcttcgaaggtcaaggtcaaagccagaggttccgtgacatgcaccagaaagtggagcacattaggagcg

SEQ ID NO: 148089 - DNA, 454 bp, Arabidopsis thaliana
gttaagctcagcaatctcctcgttgcaaccttcgtttttctcctcgtccttaacggctgcctggcgaggcagtcacttggggttcctcctcagctacagaacgagtgtaacctcgacaacctagatgttctccaagccaccgaaactatcaagagtgaagccggtcagatcgagtactgggaccacaaccaccctcagctccgatgtgttggtgtttccgttgctcgttatgtaattgaacaaggcggtctttacttgcccaccttcttcacttccccaaaaatttcctacgtcgttcaaggaacgggtatcagcggaagagtggtccctggatgtgccgagaccttcatggactcgcagccgatgcaaggacaacaacaaggccaaccatggcaaggacgacagggacaacaaggccaaccatgggaaggacagggacaacagggacaacaag

SEQ ID NO: 148090 - DNA, 457 bp, Arabidopsis thaliana
tccacacatagcaaaaaatggcaaacaagttgttcttggtttgcgcagctttggctctttggtgggtcctaaccaacgcttccatctaccgaaccgccgttgagttcgaagaagatgacgccactaaccccataggcccaaaaatgaggaaatgccgcaaggagtttcagaaagaacaacacctaagagcttgccagcaattgatgctccagcaagcaaggcaaggccgtagcgatgagtttgatttcgaagacgacatggagaacccacagggacaacagcaggaacaacagctattccagcagtgctgcaacgagcttcgccaggaagagccagattgtgtttgccccaccttgaaacatgctgccaaggccgttagactccagggacagcaccaacccaatgcatgtcaggaaaatttaccagacagccaagcacttgcccaacgtttgcgaca

SEQ ID NO: 148091 - DNA, 443 bp, Arabidopsis thaliana
  unsure (1)..(443): unsure at all n locations
aaatgataactaacattgaagtctagagaattcttttactttttctacgatggagatttctgggatgaagtttctgtttttaggaatctgggtttattattactctgttcttgactctgtttctgccatggatagtcttttatctcccaagggtgttaactatgaagtggctgcgttaatgtcagtgaagaacaagatgaaagatgagaaagaggttttgtctggttgggatattaactctgttgatccttgtacttggaacatggttggttgttcttctgaaggttttgtggtttctctagagatggctagtaaaggattatcagggatactatctactagtattggggaattaactcatcttcatactttgttacttcagaataatcagttaactggtccgattccttctgagttaggccaactctctgagctngaaacgc

SEQ ID NO: 148092 - DNA, 454 bp, Arabidopsis thaliana
gacatctctctgcttctcttcttcttcttcttcttcagctttgagatctattctatcttcaaagatggccaccgatgagccttctcaaactcgctggagctttctggaatttaaaacgttttatgatgccaagtttgggaggaagaagctgcctgaagaagatgtatcaaacaaggaccaaccagaagatggatcatccaacggtaataacggtgatgtcaacaacaactcttccccagtcaccaatcaggatggtaacacagccttggccaatggcaatgtgattcgcgagaagccgaaaaagtccatgtttcccccgtttgagtctgcggaaactcgtactctcgctgagagtttgagtagggatatcatccgtgggaatccaaatatcaagtgggaaagcatcaaaggtttggagaacgctaaaaagttgctcaaagaagctgtggtgatg

SEQ ID NO: 148093 - DNA, 446 bp, Arabidopsis thaliana
gcaaaaaatggcaaacaagttgttcctcgtctgcgcagctctcgctctctgcttcctcctgaccaacgcttccatctaccgcaccgtcgttgagttcgaagaagatgacgccactaaccccataggcccaaatatgaggaaatgccgcaaggagtttcagaaagaacaacacctaagagcttgccagcaattgatgctccagcaagcaaggcaaggccgtagcgatgagtttgatttcgaagacgacatggagaacccacagggacaacagcaggaacaacagctattccagcagtgctgcaacgagcttcgccaggaagagccagattgtgtttgccccaccttgaaacaagctgccaaggccgttagactccagggacagcaccaaccaatgcaagtcaggaaaatttaccagacagccaagcacttgcccaacgtttgcgaca

SEQ ID NO: 148094 - DNA, 455 bp, Arabidopsis thaliana
cggacgcgtgggcgagaatggatataggatcccatttaactcttcgcagtattgtttagttgctagcaaacaaatggggggtgtcttcttaaccatttgggtgaaaagtgagctaagagaacacgtcaagaacatgaaagtatcttgtgttggcaggggcctgatgggttatctgggaaataagggatcaatctcaataagcatgttgctccatcaaacaagcttttgcttcgtttgtacgcacttgacttcgggacataaagaaggcgatgagctaaagagaaactctgatgtcatggagatactgaagaaaacgaggtttccgcgcgttaagagttcagaggaagaaaagtcccctgagaacatccttcagcatgaccgggtaatatggctttgcgatctaaactaccgtatagcactgtcttatcgatctgccaaagcgcttgttgagatgc

SEQ ID NO: 148095 - DNA, 453 bp, Arabidopsis thaliana
gcttcatcattaccaaatcatcaacttaatcgtttctctcaaatttagggttttctcttttgtcgaaagtcttgcggttttctgaatcatctctatctggtttgagggtttcgtttgatatctggagaaaggggtttctggaaacaaggagttcataattcgcgatcttgatctatcgatcttcatttatatataaaagcgtgaatgagattatgatggagtcgaaaggtggtaaaaagaagtccagcagtagtagttccttattttacgaagctcccctcggttacagcattgaagacgttcgtccaaacggtggaatcaagaaattcaaatcttctgtctactcaaactgctccaagaggccatcctgagtaccagcgtgcaccgatcttcataatatagttatagctttctttactttccagtttataattttcttctttcaaagctcct

SEQ ID NO: 148096 - DNA, 433 bp, Arabidopsis thaliana
caagaaaacatacacaaatagcaaaacatggctaacaagctcttcctcgtctgggcaactctgggcccttggtttcctcctaaccaacgcttccatttaccgaaccgttgtcgaattcgaagaagatgacgccagcaaccccgtaggtccaagacagagatgccagaaggagtttcagcaatcacaacacctaagagcttgccagagatggatgagcaagcaaatgaggcaaggacgtggtggtggtccttccctcgacgatgagttcgatttcgagggcccccagcagggataccagctactccagcagtgctgcaacgagcttcgccaggaagagccagtttgcgtttgccccaccttgaaacaggctgccagggcagttagcctccagggacagcacggaccattccaatccaggaaaatttaccagtca

SEQ ID NO: 148097 - DNA, 397 bp, Arabidopsis thaliana
cacaaacgagtaagaatacaaatacaaatagttataaaaatggcaaacaagctcttcctcgggtgggcaactttcgccctctgcttcctcctcaccaacgcttccatctaccgcactgttgtcgagttcgacgaagatgacgccagcaaccccatgggcccaagacagaaatgtcagaaggagtttcagcaatcacagcacctaagagcttgccagaaattgatgcgcatgcaaatgaggcaaggccgtggtggtggtccctccctcgacgatgagttcgatttggaagacgacatcgagaacccacaaggcccccagcagggacaccagatcctccagcagtgctgcagcgagcttcgccaggaagagccagtttgtgtttgccccaccttgagac

SEQ ID NO: 148098 - DNA, 448 bp, Arabidopsis thaliana
cggacgcgtgggagaaaacatacacaaatagcaaatcatggctaacaagctcttcctcgtctgcgcaactctcgccctctgcttcctcctcaccaacgcttccatctaccgcaccgttgtcgaattcgaagaagatgacgccagcaaccccgtaggtccaagacagagatgccagaaggagtttcagcaatcacaacacctaagagcttgccagagatggatgagcaagcaaatgaggcaaggacgtggtggtggtccttccctcgacgatgagttcgatttcgagggcccccagcagggataccagctactccagcagtgctgcaacgagcttcgccaggaagagccagttgcgtttgccccaccttgaaacaagctgccagggcagttagcctccagggacagcacggaccattccaatccaggaaaatttaccagtcagctaagt

SEQ ID NO: 148099 - DNA, 288 bp, Arabidopsis thaliana
caacaacaagaacagaaaaacttgtggagcgtgttttacgcacaggtcatagctcaagcattgaaagttgacgttcagttggctcagcagcttcagaaccaacaagacagcagaggaaacatcgttcgtgttaagggacctttccaggtcgtgaggccacctctaagacagccctacgagagcgaggagtggagacacccacgtagcccacagggcaacggccttgaggagactatctgcagcatgaggtcccacgagaacattgacgaccctgctcgtgctgacgtg

SEQ ID NO: 148100 - DNA, 452 bp, Arabidopsis thaliana
cggacgcgtgggaaaaagaaaatggttaagctcagcaatctcctcgttgcaaccttcggggttctcctcgtccttaacggctgccttgcgaggcagtcacttggggttcctcctcagctacagaacgagtgtaacctcgacaacctagatgttctccaagccaccgaaactatcaagagtgaagccggtcagatcgagtactgggaccacaaccaccctcagctccgatgtgttggtgtttccgttgctcgttatgtaattgaacaaggcggtctttacttgcccaccttcttcacttccccaaaaatttcctacgtcgttcaaggaacgggtatcagcggaagagtggtccctggatgtgccgagaccttcatggactcgcagccgatgcaaggacaacaacaaggccaaccatggcaaggacgacagggacaacaaggccaaccatggga

SEQ ID NO: 148101 - DNA, 427 bp, Arabidopsis thaliana
cggacgcgtgggaaagaaaatggttaagctcatcaatctcctcgttgcaaccttcggggttgtcctcgtccttaacggctgccttgcgaggcagtcacttggggttcctcctcagctacagaacgagtgtaacctcgacaacctagatgttctccaagccaccgaaactatcaagagtgaagccggtcagatcgagtactgggaccacaaccaccctcagctccgatgtgttggtgtttccgttgctcgttatgtaattgaacaaggcggtctttacttgcccaccttcttcacttccccaaaaatttcctacgtcgttcaaggaacgggtatcagcggaagagtggtccctggatgtgccgagacctttatggactcgcagccgatgcatggacaacaacatggccaaccatggcaaggacgacag

SEQ ID NO: 148102 - DNA, 454 bp, Arabidopsis thaliana
cttacagtgcctccggcgtggcccttacgtctactgctctgaagaaaggaggagttcatgctgctgatgttgccacccaatacaagtacaagaatgctttgtttgatgttaaaatcgacactgattctagtgttttgacaacagtcacacttaccgagatcctcccatcaacaaaagccattgcctccttcaaagtccctgattataattccgccaagctcgaggtgcaatacttccacgaccacgcaacagttaccgctgctgcagctttgaaacaaaacccactaattgacataacagctactcttggttcgccagtcatctcatttggtgctgaagctggatatgacacaacctccaaaactttcaccaagtacaatgccgggatcagtgtgacaaaaccagatgcttgcctctccataatattgggagacaaaggagactcactcaaagg

SEQ ID NO: 148103 - DNA, 452 bp, Arabidopsis thaliana
cggacgcgtgggcgccaactaccaaaaccaactcgaccgcaaccctagagtgttccatttggccggaaacaaccagcagggaggctttggcggttcacagcaacaacaagaacagaaaaacttgtggagcgggttcgacgcacaggtcatagctcaagcattgaaaattgacgttcagttggctcagcagcttcagaaccaacaagacagcagaggaaacatcgttcgtgttaagggacctttccaggtcgtgaggccacctctaagacagccctacgagagcgaggagtggagacacccacgtagcccacagggcaacggccttgaggagactatctgcagcatgaggtcccacgagaacattgacgaccctgctcgtgctgacgtgtacaagcccagcctaggtcgcgtgaccagcgtcaacagctataccttgcccatcttggagtatg

SEQ ID NO: 148104 - DNA, 452 bp, Arabidopsis thaliana
aacaaaaagaaaatggttaagctcagcaatcttctcgttgcaaccttcggggttctcgtcgtgcttaacggctgccttgcgaggcagtcacttggggttcctcctcagctacagaacgagtgtaacctcgacaacctagatgttctccaagccaccgaaactatcaagagtgaagccggtcagatcgagtactgggaccacaaccaccctcagctccgatgtgttggtgtttccgttgctcgttatgtaattgaacaaggcggtctttacttgcccaccttcttcacttccccaaaaatttcctacgtcgttcaaggaacgggtatcagcggaagagtggtccctggatgtgccgagaccttcatggactcgcagccgatgcaaggacaacaacaaggccaaccatggcaaggacgacagggacaacaaggccaaccatgggaaggacaggg

SEQ ID NO: 148105 - DNA, 419 bp, Arabidopsis thaliana
aatggttaagctcagcaatctcctcgttgcatccttcggggttctcctcgtccttaacggctgccttgcgaggcagtcacttggggttcctcctcagctacagaacgagtgtaacctcgacaacctagatgttctccaagccaccgaaactatcaagagtgaagccggtcagatcgagtactgggaccacaaccaccctcagctccgatgtgttggtgtttccgttgctcgttatgtaattgaacaaggcggtctttacttgcccaccttcttcacttccccaaaaatttcctacgtcgttcaaggaacgggtatcagcggaagagtggtccctggatgtgccgagaccttcatggactcgcagccgatgcaaggacaacaacaaggccaaccatggcaaggacgacagggacaacaag

SEQ ID NO: 148106 - DNA, 455 bp, Arabidopsis thaliana
cgcgtgaccagcgtcaacagctataccttgcccatcttggagtatgtcaggctcagtgccactcgtggcgttctccagggtaatgcgatggtgcttcctaaatacaacatgaacgctaacgagatcttgtactgcactggaggacaaggaaggatccaagtggtcaacgacaacggacagaacgtgttggaccaacaggtgcagaagggacagctcgtggtcatcccacaagggttcgcatacgttgtccagtcccacggaaacaagttcgagtggatctctttcaaaactaatgaaaacgcaatgatcagcactttggcgggtagaacctcgctcttgagggcattgccattggaggtcatatcaaatggtttccagatctctcccgaggaagctaggaagatcaagttcaacacacttgagaccactttgacccgcgctgccggtaggcaaca

SEQ ID NO: 148107 - DNA, 457 bp, Arabidopsis thaliana
caacaaacaaaaagaaaatggttaagctcagctttttcctcgttgcaaccttcggggttctcctgggccttaacggctgccttgcgaggcagtcacttggggttcctcctcagctacagaacgagtgtaacctcgacaacctagatgttctccaagccaccgaaactatcaagagtgaagccggtcagatcgagtactgggaccacaaccaccctcagctccgatgtgttggtgtttccgttgctcgttatgtaattgaacaaggcggtctttacttgcccaccttcttcacttccccaaaaatttcctacgtcgttcaaggaacgggtatcagcggaagagtggtccctggatgtgccgagaccttcatggactcgcagccgatgcaaggacaacaacaaggccaaccatggcaaggacgacagggacaacaaggccaaccatgggaaggacaggg

SEQ ID NO: 148108 - DNA, 259 bp, Arabidopsis thaliana
cttttgctctcgcagtgttagtaacacatgtttgtttttttagctcgtgtttggcctcctctgcggttacaaactctgctcctaatgggtttcatcattggcccccgcttaaatggggtccaaaatttccatattctccacctaaaccacctacaatcgagaaatattctccacctgtgcagtttccaccaccaatctagaagtatccaccgccaccatacgtgcattcaccgttgcagtatccaccaccgagcaagac

SEQ ID NO: 148109 - DNA, 387 bp, Arabidopsis thaliana
agccacttgtcatcatcgctcttctcgacatttcctactaccaaaaccaactcgaccgcaaccctagagtgttccatttggccggaaacaaccagcagggaggctttggcggttcacagcaacaacaagaacagaaaaacttgtggagcgggttcgacgcacaggtcatagctcaagcattgaaaattgacgttcagttggctcagcagcttcagaaccaacaagacagcagaggaaacatcgttcgtgttaagggacctttccaggtcgtgaggccacctctaagacagccctacgagagcgaggagtggagacacccacgtagcccacagggcaacggccttgaggagactatctgcagcatgaggtcccacgagaacattgacg

SEQ ID NO: 148110 - DNA, 406 bp, Arabidopsis thaliana
ctgaaatcttagttcacatagtaataaccttgatactaagcattcaaacttcaaacggtacgactttcactttgaacaatttagataaataattgaaatcaaaaccatataaaaatgcttgataaataaacaattaatcaaaattattagaaaaatacacttgacgaactaaaaatgatagaaacattgcaataagttaaaaaaaaaaaaaacacggcaaaagttatatactactttaataggtggatagtttttgagttagaaccgttgggataaagacacgtgacggcgtctaatctgagttgaaacaatggatacaagaccaccgagcggtggcctcatctttgacctataagtcatctcatcgtacggtctacgataaaacttgagatactgaacgaacgaa

SEQ ID NO: 148111 - DNA, 343 bp, Arabidopsis thaliana
gattaatgtttggcactaaatcccaggttattagctcttcaccgcagaaatctcctggtctaggtgtgatagagttaaagaatgctgaccgtccaccatctgtagttgaactctccatctgacctctaataatgaaaagcatctcgtttacaggatcgccttcgcgtataacataggtgtcttttgtgttcaaggacggaactagacgctcacatatcgcatccaagagctggtcatccatctgcgcaaagaacggcacctgaaaaattaaaagaacgtaaaattagggtttgttacttgagtggaacgtaatggaattgtggtgttattctggtgtggcttt

SEQ ID NO: 148112 - DNA, 424 bp, Arabidopsis thaliana
gaccaccatgcaccccagctccgttgctccgtctttgcctttgagcgtttcgtcattgagccgcagggtcttttcttgcccactttcttgaacgccggcaaactcacgtttgttgttcacggaaggggtctaatgggaagagttattccgggatgcgccgagacgttcatggagtcaccggtatttggagaaggtcaaggtcagggtcagagtcaagggttccgtgacatgcaccagaaagtagagcacctacggtgcggtgacaccattgcaacaccatctggtgtagctcaatggttctacaacaatggaaatgagcctctcattcttgttgcagccgcggatctcgccagcaaccagaaccagcttgaccgcaaccttagaccatttttgatagccggaaacaacccacaagggcaggaat

SEQ ID NO: 148113 - DNA, 451 bp, Arabidopsis thaliana
gcaaaaagaaattagaatttatgtggatggattcaactctatacaaaagtttagaaatattggtgctaagcgatcaaactctcacctgtacgtttgcaatattgtcgcggttccatagtggcaaaaacaagcgattggcaaaccgaagaaccaactgcactaacgatgaatgcgttagattatatctttatttgtctaaattaataaactaatgactagaagcaaatatgtgttaccatgttttgaactaactcttttcccagatagtgatcaatacgataaatctgtggttcttcaaacaaggctccaatctgagaactcagctgctctgcagattccaaatcctttccaaatggtttctcaacaacaatcctagtccatccaccaagatcagctggaaacaatatacatttccaatgaagttattacctaatattctctatctaataat

SEQ ID NO: 148114 - DNA, 457 bp, Arabidopsis thaliana
  unsure (1)..(457): unsure at all n locations
aagaaataacaaaatggctcgagtctcttcttttctttctttcttctaaacacttttgatccttttccatggctacgcggctcaacagggtcagcagggtcagcagtttccgaacgagtgccagctcgaccagctcaatgcgctcgagccgtcacacgtactgaagagcgaggctggtcgcatcgaggtgtgggaccaccacgctcctcagctccgttgctcaggtgtctcctttgcacgttacatcatcgagtctaagggtctctacttgccctctntctttaacaccgcgaagctctctttcgtggctaagggacgaggtcttatgggaaaagtgatccctggatgcgccgaaacattccaagactcatcagagttccaaccacgcttcgaaggtcaaggtcaaagccagaggttccgtgacatgcaccagaaagtggagcacattaggagcggt

SEQ ID NO: 148115 - DNA, 446 bp, Arabidopsis thaliana
cacacatagcaaaaaatggcaaacaagttgttcctcgtctgcgcagctctcgctctctgctggctcctcaccaacgcttccatctaccgcaccgtcgttgagttcgaagaagatgacgccactaaccccataggcccaaaaatgaggaaatgccgcaaggagtttcagaaagaacaacacctaagagcttgccagcaattgatgctccagcaagcaaggcaaggccgtagcgatgagtttgatttcgaagacgacatggagaacccacagggacaacagcaggaacaacagctattccagcagtgctgcaacgagcttcgccaggaagagccagattgtgtttgccccaccttgaaacaagctgccaaggccgttagactccagggacagcaccaaccaatgcaagtcaggaaaatttaccagacagccaagcacttgcccaacgt

SEQ ID NO: 148116 - DNA, 305 bp, Arabidopsis thaliana
gcccgacgcgtacgggagattgcggagcccgatatgtaatcgaacatggcggtctgtacttgcccaccttcttcacgtccccaaaaatttcctacgtcgttcaaggaacagggtattgctgaagagtggtccctggatgtgccgagaccttcatggactcgcagccgatgcaaggacaacaacaaggccaaccatggcaaggacgacagggacaacaaggccaaccatgggaaggacagggacaacagggacaacaaggaagacaaggccaaccatgggaaggacagggacaacagggacaacca

SEQ ID NO: 148117 - DNA, 456 bp, Arabidopsis thaliana
cacctctaagacagccctacgagagcgaggagtggtgacacccacgtagcccacagggcaacggcgttgaggagactatctgcagcatgaggtcccacgagaacattgacgaccctgctcgtgctgacgtgtacaagcccagcctaggtcgcgtgaccagcgtcaacagctataccttgcccatcttggagtatgtcaggctcagtgccactcgtggcgttctccagggtaatgcgatggtgcttcctaaatacaacatgaacgctaacgagatcttgtactgcactggaggacaaggaaggatccaagtggtcaacgacaacggacagaacgtgttggaccaacaggtgcagaagggacagctcgtggtcatcccacaagggttcgcatacgttgtccagtcccacggaaacaagttcgagtggatctctttcaaaactaatgaaaacgcaatga

SEQ ID NO: 148118 - DNA, 451 bp, Arabidopsis thaliana
cacatagcaaaaaatggcaaacaagttgttcctcgtttgcgcagctctcgctctctgcttcgtgcgaccaacgcttccatctaccgcaccgtcgttgagttcgaagaagatgacgccactaaccccataggcccaaaaatgaggaaatgccgcaaggagtttcagaaagaacaacacctaagagcttgccagcaattgatgctccagcaagcaaggcaaggccgtagcgatgagtttgatttcgaagacgacatggagaacccacagggacaacagcaggaacaacagctattccagcagtgctgcaacgagcttcgccaggaagagccagattgtgtttgccccaccttgaaacaagctgccaaggccgttagactccagggacagcaccaaccaatgcaagtcaggaaaatttaccagacagccaagcacttgcccaacgtttgcgaca

SEQ ID NO: 148119 - DNA, 447 bp, Arabidopsis thaliana
aacaggagaatggcgaacctcagcagtcacctagctgcaaccttcggggttctcctcgtccggaacggctgccttgcgaggcagtcacttggggttcctcctcataacagaacgagtgtaacctcgacaacctagatgttctccaagccaccgaaactatcaagagtgaagccggtcagatcgagtactgggaccacaaccaccctcagctccgatgtgttggtgtttccgttgctcgttatgtaattgaacaaggcggtctttacttgcccaccttcttcacttccccaaaaatttcctacgtcgttcaaggaacgggtatcagcggaagagtggtccctggatgtgccgagaccttcatggactcgcagccgatgcaaggacaacaacaaggccaaccatggcaaggacgacagggacaacaaggccaaccatgggaaggacagg

SEQ ID NO: 148120 - DNA, 453 bp, Arabidopsis thaliana
tttgtctgcgcggagcttttctgataaggtgttttcttatcatcaccagattttgaagctcgtacaccttgatatgaaagattagccttccctgttggagttggtgtgaccactttgtccttctgcagtcttttctgggccggcgagtaagcttcagacggattgctctttctctttgatggcgtatcaggtttgactcgagaaatccgtaactctctttctctaagcttcaagtatcctttcttgagtacgagatttgcagcttcctatagttaacaaaataaaaggactcatcagatctaattagtttttattactcaaaccttacaaagatcaaagtttacttcaacatacccgtgttttaaacaagacgtaagctattcctttcccaatgttcaagtgaggatctctaatgacacgaacagcttctatactgttctccagattactctt

SEQ ID NO: 148121 - DNA, 452 bp, Arabidopsis thaliana
aagaaaatggttaagctcagcaatctcctcgttgcaaccttcggggttctcctcgtccttaacggctgccttgcgaggcagtcacttggggttcctcctcagctacagaacgagtgtaacctcgacaacctagatgttctccaagccaccgaaactatcaagagtgaagccggtcagatcgagtactgggaccacaaccaccctcagctccgatgtgttggtgtttccgttgctcgttatgtaattgaacaaggcggtctttacttgcccaccttcttcacttccccaaaaatttcctacgtcgttcaaggaacgggtatcagcggaagagtggtccctggatgtgccgagaccttcatggactcgcagccgatgcaaggacaacaacaaggccaaccatggcaaggacgacagggacaacaaggccaaccatgggaaggacagggacaaca

SEQ ID NO: 148122 - DNA, 419 bp, Arabidopsis thaliana
cctctaccttcttcttcttcctccactcactaaccaaatccagaatcaacaataatagaaaaagccctaactttctccgtcgatggctttcttcttctactttttcttcctcttgactctttcttctccttcttcttctgcttcctcttcaaactccttgacttacatcgtccacgtcgaccacgaagctaaaccctcaatcttccccactcattttcactggtacacttcctctcttgcctcactcacctcttctcctccctccattatccacacatacgacaccgttttccatggcttctccgctagactcacttcacaagacgctagtcaactcttagaccatcctcatgtcatctctgttatcccggaacaagtccgtcacttgcacaccactcgttcccctgagtttcttggtc

SEQ ID NO: 148123 - DNA, 410 bp, Arabidopsis thaliana columbia
gaggcgccacgcgtcacgcgacatgagacgcatatttcaactcttcagtgaagagatttctttcaccgaattttctactccgatcgatcaattgaagattgaaatggaagctaattcaggcggaggaggaggagctgaaggcggaagagcggtaaccggaggaggaggaggaggaggagggagcgatgtggaattggtgagcaagacgttgcaagtggagcataagctattctattttgatcttaaggagaatcctcgtggaaggtatctaaagatatcggagaagacgtcggcgacgaggtcaaccatcattgttccttcctccggcatctcttggttccttgatctcttcaactactatgtcaattctgaggaacacgagctttttagcaaagaattgcagcttgatt

SEQ ID NO: 148124 - DNA, 405 bp, Arabidopsis thaliana columbia
aaaaaaaaaaaaaacagaaagtaacatgagatctctcttattagccgtgtgcctggttcttgctttacactgcggtgaagcagccgtgtcttgcaacacggtgattgcggatctttacccttgcttatcctacgtgactcagggcggaccggtcccaaccctctgctgcaacggtctcacaacactcaagagtcaggctcaaacttctgtggaccgtcagggggtctgtcgttgcatcaaatctgctattggaggactcactctctctcctagaaccatccaaaatgctttggaattgccttctaaatgtggtgtcgatctcccttacaagttcagcccttccactgactgcgacagtatccagtgagacaagcagaaaatcttaaagggagctactacaagaac

SEQ ID NO: 148125 - DNA, 364 bp, Arabidopsis thaliana columbia
aaagatccgccattttcaccgatctctgtttcttctcgtttggatctttggaaattttagagtttgttcgttctctctcgtatctcattttggaattgaatcgttagtggatttgatcgggaaatgagtgttttcgcgttcgattagtgtttatcagtctctggatctgtgattttgattttgttttctccagttttcgttttgaaatggcgaggaagaagatcagagagtatgactcaaagaggttggtgaaggaacatttcaaaaggctttctggcaaagagcttcctatcagatccgttcagattaatgaaacaactgatctaaatgagctagttgaaaagggaaccttggctctcgtctg

SEQ ID NO: 148126 - DNA, 391 bp, Arabidopsis thaliana columbia
cttagatcccttgtagtttccaaatcttccgataaaaatgtcgggtaaaggagaaggaccagctatcggtatcgatcttggtaccacttactcttgcgtcggagtatggcaacacgaccgtgttgagatcattgctaatgatcaaggaaacagaaccacgccatcttacgttgctttcaccgactccgagaggttgatcggtgacgcagctaagaatcaggtcgccatgaaccccgttaacaccgttttcgacgctaagaggttgatcggtcgtcgtttctctgacagctctgttcagagtgacatgaaattgtggccattcaagattcaagccggacctgccgataagccaatgatctacgtcgaatacaagggtgaagagaaagagttc

SEQ ID NO: 148127 - DNA, 362 bp, Arabidopsis thaliana columbia
gaagaacaatggcttcctctatgctctcttccgctactatggttgcctctccggctcaggccactatggtcgctcctttcaacggacttaagtcctccgctgccttcccagccacccgcaaggctaacaacgacattacttccatcacaagcaacggcggaagagttaactgcatgcaggtgtggcctccgattggaaagaagaagtttgagactctctcttaccttcctgaccttaccgattccgaattggctaaggaagttgactaccttatccgcaacaaggggattccttgtgttgaattcgagttggagcacggatttgtgtaccgtgagcacggtaactcacccggatactatgat

SEQ ID NO: 148128 - DNA, 401 bp, Arabidopsis thaliana columbia
gaggaaactctgaaagttgtgttaaaaaaaaaaactagaatcatggcggcgtcaatgacgaaacccatctcaataacttctctcggtttctattctgatcgaaagaacattgctttctctgattgcatttcgatttgttctggattcagacattcccgaccatcttgcctcgatttggtcacaaagtcaccgagtaataacagtcgtgttttacctgtcgttagtgcccaaatatcttctgattatattccagactcgaaattttacaaggtggaagcaattgtcagaccatggagaatccagcaagtttcatcggctttactgaaaatcgggattcgaggtgttactgtttctgatgtgagagggtttggtgcacaaggaggttctaccgagagacacgg

SEQ ID NO: 148129 - DNA, 368 bp, Arabidopsis thaliana columbia
ggcgctgggatgcgaacgacatatattacattcatgtggaactgaaactcagggctattcttataggttatgctaactacctactgggccaatgacaaccgacgcaagtcttaaatcaataaggaatattattttaaggtcttggaaaagcacagtgtcattattataggaggatctacgattgcaggagagtataggggaatggcacgatgtatcgcggattccttacaatcatgacataaaagagcgtaccttaccatatgaaaacagcatcgatgttatcgttctctcatctacagtgggatcatgatatccaagtacctttccttgggactcaagcttggataagatcgctcaactattctatc

SEQ ID NO: 148130 - DNA, 413 bp, Arabidopsis thaliana columbia
cgacgcatccgtccacgttcactatgcatggaacgcatgggactgcgtttgcaaattacgctgtggagcatagtgatttgttgttggcgtttggggtaaggtttgatgatcgtgtcacgggtaagcttgaggcttttgctagtagggctaagattgttcatattgatattgactcggctgagattgggaagaataagactcctcatgtgtctgtgtgtggtgatgttaagctggctttgcaagggatgaataaggttcttgagaaccgagcggaggagcttaagcttgattttggagtttggaggaatgagttgaacgtacagaaacagaagtttccgttgagctttaagacgtttggggaagctattcctccacagtatgcgattaaagtccttgatgagttgactgatgga

SEQ ID NO: 148131 - DNA, 415 bp, Arabidopsis thaliana columbia
  unsure (1)..(415): unsure at all n locations
tccggagattgccgcgcatgcgtccgacttgtgagtcaccaanagtcattggaagcaaaggtgaatgagaccaagcaacagtgaagttccagttgaagaaagttctgtgtatgggtgttgctgttggtaacctttccatggaagagaagcagctcttccagaatgtgcagatgagtgttaacttcctcgtctcgctcttgaagaagaattggcaaaacgtaaggtgtttgtacttgaagagcaccatgggaccaccacaaagaatcttttgagctctctcttcttatccttcttccatctcagaattttgcattctgtttttgtttcagagatctgtgcttgttgggatatggtttggatttatattagcagttgttttttgttgacaatatattatgcaatattcgttttaatt

SEQ ID NO: 148132 - DNA, 394 bp, Arabidopsis thaliana columbia
ctcactctttgcttctgcaactcacagtcaatggcggctgaaatggcgttagtgaaacccatctccaagttctcttccccaaagctctcaaacccgagcaaattcctctccggccgacgtttctccaccgtgatcagaatgtcagcctcttcctcaccgcctcctccaaccaccgccacctcgaagtccaagaagggaacgaagaaagagattcaagagtcgcttcttactccgaggttctacacgacggacttcgaggaaatggaacagcttttcaacacggagatcaacaagaaccttaacgaagcagagttcgaggctctgcttcaagagttcaagaccgattacaaccagacacatttcgtgaggaacaaggagtttaaagaagctgcag

SEQ ID NO: 148133 - DNA, 347 bp, Arabidopsis thaliana columbia
aaaaagcaaaagcaaaaatggctcgatctttttctattgctgcgatctgtatcgtcctcatcgccggcgttactggtcaagctccgacttcaccaccaaccgctacaccagctgcaccaactccaacaactcctccaccagcagcaactcctactcctgtctcagcaccaccaccagtcacaacatctcctcctccagtcaccactgctcctcctccagcaaatccaccaccaccagtctattctcctcctactgcttctcctccaccagctactcctcctccatgtcgcttctcctactcctcccgttgcttcttctccaccatcaactcactcctccgtcgctac

SEQ ID NO: 148134 - DNA, 397 bp, Arabidopsis thaliana columbia
ggccgagaagcgtccggataagatcatagcatgtccaagatgcaagagcatggagacaaagttctgttacttcaacaactacaacgttaatcagcctcgacacttttgtaaaggctgccaccgttactggaccgccggtggtgcactccggaacgttcccgtcggcgccggtcgtcggaagtccaaaccacctggtcgtgtcgtggttggtatgcttggagatggaaatggtgttcgccaagtcgagcttataaatggcttgctcgttgaggagtggcagcatgccgcagccgcagctcacggtagtttccggcatgattttcccatgaagccggttccggtgttactccgacggtcaatcgtgctgattataattatttactctcttttttaaaaa

SEQ ID NO: 148135 - DNA, 397 bp, Arabidopsis thaliana columbia
gtaaattggcagatccatggaatattgaacgcagtgagttggggacttctatttcccattggagcaatgatagctaggtatatgagaatctttgaatcagcagatcctgcttggttttacctccacgtgtcatgccaattctctgcttatgtcatcggtgttgccggatgggccaccggactcaagcttggttcagaatctaaaggtattcagtacaacactcaccggaacatcggcatctgtctcttctctatagccactcttcaggtaaattaaaccgttgctaatactcattaggaccaaagagtgttatttgttatattagtggatattgcaagttggccatttaaaaagatatgttttgttctgttattgaaacgatgctttgtgtcttttt

SEQ ID NO: 148136 - DNA, 396 bp, Arabidopsis thaliana columbia
gattagttcaaagggcaagtgttgtcaaacgaagatcaagtgatgacactggattttcatacaggacacctgaacacgagcacgtcgatatctcattctgagtaatgatccaaaactactccaaaatcgggtcttttctgtcattcgaagctaaaatgcagcttgaaaactcaaaaggaagagagagttttgctcaatgcataagagaatctgatccaaaggactacagagaagtaaagaagcatcttggttcataccaaaagtgtaagaaaatatatgtttgtgtatttttgtaagagtaaaattagagtacataaccatgtttcaatcatctttcttgtaccattttctcttcacctgttgaataatcaagtatgagacttgttgctgcatcaa

SEQ ID NO: 148137 - DNA, 384 bp, Arabidopsis thaliana columbia
ctttaccagatcagacgtcaatttcaactctttagtgattagattgctcacaccgaatttggtactgcgaccgatcaattgaggattgaaatataatctcattcatgcggaggaggaggagctgaaagcggaagagcggctaccggacgaagaggaggaggaagagggagcgatgtggtattggtgagcaagacgttgcatgtggagcataagctattctattttgattctaaagagaatcctcgtggaaggtatcttaagatatcggagaagacgtctgcgaccaagtcaaccatcattggtcctttctccggcatctttcggttccctgatcttttaatctactatgtcaattctgatgaacaccaacttttttacaaataa

SEQ ID NO: 148138 - DNA, 386 bp, Arabidopsis thaliana columbia
ctgatcgttatcgaaaccgcgcgattctaaccaagtccagttaattttgtgctccatagcgattccatggcttctttaatggtatctctcggttccacttctctgttaccgcgcgagattaacaaggataagctaaagcttggaacttctgcttcgaacccgttcctaaaagcaaagtcttttagcagagtgactatgacggttgcagtgaagccttctcgtttcgagggtataactatggctccaccagaccctattcttggagtcagtgaagcattcaaagctgacactaacgggatgaaactcaatcttggtgttggtgcttatcgtactgaggaactccagccttatgggcttaatgttgttaaaaaggcggagaatttgat

SEQ ID NO: 148139 - DNA, 389 bp, Arabidopsis thaliana columbia
ggtgtcacgaaaacgaacgaatcagtgtcggctcttgggttccgaacaaaaacaacattgtacgtcggatccaaaaaacgcgcgttatataaacgcttaatttctccaggattcttcttctgcttccgccattgctcgaaaatcgcgtcttctgacaatgtgctgaaactgagtcatcgtccgagttagcaaagtgaaacttcgaagtttctcttacactaatctcaggtttgggattttgtaagaaaccgcgtttacaagtaagtgcgtttgcgtctgaaactttctttccaagaaagatttattcttttcccagtttgcaaaagcaaaactgatacctttctcgttaatccttctacgtagaaggaaagatttcggattttatttgc

SEQ ID NO: 148140 - DNA, 368 bp, Arabidopsis thaliana columbia
cggacgcgtggggaagaagaatataacaaaactgggttttttatatctggaattctgaagaaattcttcacggatttgatctgtttaaactataaaagtcttgatttttataaatcagctaaaaataagacacggtttagggtttatggtttgactagaaacaacaatactgaaatgggttgtgaggtttcaaagttatgtgcattttgttgtgtttctgatcctgaaggatctaatcatggtgtcacagggttagatgaagataggagaggtgaagggaatgatttgcctcagtttcgtgaattctcaattgagacgttgaggaacgcaacatcaggatttgctacagagaatatagtatcagagca

SEQ ID NO: 148141 - DNA, 398 bp, Arabidopsis thaliana columbia
agcagctgcaaacatggcaagaggattgaagaagcatctaaagaggctcaatgctcctaagcattggatgcttgacaaacttggtggtgccttcgctcccaaaccatcttctggacctcacaagtcgagggagtgtcttcctcttgtcctgatcatcaggaacaggttgaagtatgctttgacttaccgtgaagttatctctatcttgatgcaaaggcatatccaagttgatggcaaagtcaggactgacaagacttaccctgctggtttcatggatgttgtatccatccccaagaccaatgagaacttccgtcttctctacgacaccaagggacgtttccgtctccactccatcaaagatgaggaagcaaagttcaagctttgcaaggttagatcta

SEQ ID NO: 148142 - DNA, 400 bp, Arabidopsis thaliana columbia
aaatggaggaaggtctaaagattcaatctttggtcatttatccgatcaaatcttgccgtggaatctctgttcctcaggctaccgttactcatactggttttcagtgggaccggtattggttagttgttaactataaaggaagagcatacactcaaagagttgagccaacccttgctcttgttgaatcggagttgcctaaggaagccttcttggaagattgggagccaacaaatgactcattgttggtgataagagctcctggtatgagtccgttaaagataccgttgactaggccaagctcggtagcagaaggtgtgtcgatgtgggaatggtctggctctgcttttgatgaaggagaagaagctgcgaaatggttttcagattatcttggaaaacaaag

SEQ ID NO: 148143 - DNA, 397 bp, Arabidopsis thaliana columbia
gttaactatgatgatttcgttaatgacgtggaagcgggtgacatgcttcttgttgatggtggtatgatgtcgtttatggtgaagtcaaagaccaaagactctgtcaaatgtgaagttgttgatggtggagaacttaagtcaaggagacacctgaatgtccgaggaaagagtgcaactttaccttcaatcactgagaaggactgggaggatattaaatttggagtggagaacaaagttgacttttatgcagtttcctttgtcaaagatgctcaagttgtacacgagttgaagaaataccttcaaaatagtggtgctgatatacacgtgatagtgaaaattgagagtgcagactccatacctaacttgcactccattatcacagcatcagatggggcaa

SEQ ID NO: 148144 - DNA, 401 bp, Arabidopsis thaliana columbia
ggttcttccactactcttctctcccctcctgattctcctcgcgcagagaagcctctgcttccgatagacgggaaagcagaagagaaggaagagaaagagaataaaaaaccagtttcatactcatacgcattcttccacatcatcttctcccttgcgagcatgtactctgcaatgctcctaaccggctggtcaacttcagttggtgaaagtggtaagctggtggatgtcgggtggccttcagtgtgggtccgtgttgtgaccagctgggccactgctggtctcttcatctggtcccttgttgctcccattctcttccccgaccgtgagttctgagctaatgcatctacttgagattctgaataacttttcatgaatcttcaatttgtaaaaaaatattcgat

SEQ ID NO: 148145 - DNA, 381 bp, Arabidopsis thaliana columbia
agaggaagaagaagaaggagaagaagaagccaactactgaagttgaggtaaaggaggaagagaagaaagggtttatggagaagttgaaagagaagcttcctggacacaagaaacctgaagacggttcagccgtcgctgcggcaccggtggttgttcctcctcctgtggaagaagcgcatccagtggagaagaaagggattcttgagaagattaaggagaagcttccaggataccaccctaagaccaccgtagaggaggagaagaaagataaagaataagaagattatcattaaagatattaagaataatgatggttgatttgctttgtttttttttttttttattgtgatgattgatcatcttttgcttttgtgatgtgta

SEQ ID NO: 148146 - DNA, 391 bp, Arabidopsis thaliana columbia
cacttgtgagtcaccaagagtcattggaagcaaaggtgaatgagaccaaagcaacagtgaagttccagttgaagaaagttctgtgtatgggtgttgctgttggtaacctttccatggaagagaagcagctcttccagaatgtgcagatgagtgttaacttcctcgtctcgctcttgaagaagaattggcaaaacgtaaggtgtttgtacttgaagagcaccatgggaccaccacaaagaatcttttgagctctctcttcttatccttcttccatctcagaattttgcattctgtttttgtttcagagatctgtgcttgttgggatatggtttggatttatattagcagttgttttttgttgacaatatattatgcaatattcgttttaatt

SEQ ID NO: 148147 - DNA, 376 bp, Arabidopsis thaliana columbia
gttctcatcttttaagtactgaggattttgttggacattttcttacctccattattggcagagagaaacaaagaaataaagaacaaaagcaaataacagagaatatggatttggttcagaagcagaagagtttgcaagattacaccaaatcactcttcttagaagggattttggacagccagttcttgcagctgcaacaactacaagatgaaagcaatccagattttgtttcacaagttgtcacactcttcttccaagactctgataggattctcaatgatctctcactttccctagaacaacaagttgtagacttaaaaaagttgatccccatgttcatcaactcaaaagtagcagctccagtataggagcacag

SEQ ID NO: 148148 - DNA, 401 bp, Arabidopsis thaliana columbia
  unsure (1)..(401): unsure at all n locations
actttaccggatttttgttttggtgctcgacgactctgattcgaaatctctctctctcggaaaagctgaatctggatcatcaaagtatcattttaaagtttgatcatttcttctttgggtatatagggtagtattcaaaatggcagcttcagaaacagttctacgtgttccattaggatctgtatctcaatcttgctatctagcttccttctttgttaactcaacaccaaaacctctcgtttaaacccgttagtagaaacagaaagaccgtccggtgtacaaactcgcatgaggtctcaagcgtaccaaaacattcatttcatangtcaaactctgttttgaaaggtaaaaagtttgtttccacgatatgcaaatgccaaaaacatgatgttgaggagagt

SEQ ID NO: 148149 - DNA, 397 bp, Arabidopsis thaliana columbia
aaaatttttcagttccccgatcgccggaattttcgccggtgatgtaattttcccgcgccttttttgggaggtgaatttttttttcttctaaaagctcgagaagagtgaaaaccccagaaatgaccttgcgattcgtatggctccggctgttttcgctaccttaaacgaaccgtcgtaccaggaacaatgcggcgccgtttttatgaggaaatttacaaaccaatccgtcaccgaaaacaccaataaccttccgctcttcaaccctaaccctaaccctaatttcgaaaggagcaattcgagcaagcagtgcgatgactcgtcggaatttggaagctatgctacttttaatctcgctgggtacacctcaagtcagctcaaggagcttaagaaagcgctt

SEQ ID NO: 148150 - DNA, 395 bp, Arabidopsis thaliana columbia
cggacgcgtgggcagaaacctttgtttcatttgcttcgtgtgcgatcgcgagaacaagggaaaatgagggtttatatcctcaagctttttcgaacaccattgatcgttgatctaagatttttcttctagtcgagtttcttaaggggctttgatcaaactcaaaattgaagaccaatactttgaaggattctggtaaagctaagcaactatgagttcaaattcatgggctgatgtttctgaatcagagagggcaccatctggtggtggttggggttattctcgtccgtctcgaaccaactatgttcctccacatcttatgagccgtacaccatcttcggagtttgttgctccttcacctggtaataatgatcgtgggggatatggtggtgcaaata

SEQ ID NO: 148151 - DNA, 403 bp, Arabidopsis thaliana columbia
caattcaagaaatcttttattgtgttataataaaaaaaaataagcatttcagttgcagaaaataagttgaaagtgaagtgttaagtggactgtttggtcagatccgtagactcaaaatatattagatattgacgaaattgccccttaatatggtcatacagtcaaagcaacccactatcttgagacccacaaaacagtaaaaaaaaaagctaatgaatttccactagattctgttgtttttattagtaataaaaaatttttgagtgttaacattttgatattgtttgtatttgaaacaaccagaatgcccatcggaatgtgataggaggtgtaaaaagacacagtaccacaaggcttgcattacgttctgcaacaaatgctgcaggaagtgtctctgtgtgcc

SEQ ID NO: 148152 - DNA, 396 bp, Arabidopsis thaliana columbia
gtttctcatctcctcatctttttatcttctttgattgatccacatggcttccgctgccgcaagttccgccttttcactccttaagtccaccggcgctgttgcttcctccgccggaactcgcgcacgtgcctcccttctgccaattccctctacctctgtttccgcgcgtcctctaggcttctccgccactctagattcccgtcgtttctctctccacgttgcttccaaagttgaatcggtgcgtgggaagggaagcagaggagtggtttctatggcgaagaagagcgtcggagatctgacctcagctgatttgaaggggaagaaggttttcgtgagagctgatctcaatgtacctctcgatgataatcagactatcactgacgataccagaatccg

SEQ ID NO: 148153 - DNA, 396 bp, Arabidopsis thaliana columbia
gcttttagctccagatctgtggaaccgccatagctatggagttttatagaagttctagaagattacaaattcttggatctgtgattcttctgctctctattcatgtcgctcactctttttaccttcctggtgttgctcctcaggatttcgaaaagggagatgaattgaaagtgaaagtaaacaagttgacatctataaagactcagcttccatattcgtattactctcttcctttttgtcgtcctaagaagattgtggacagtactgagaatcttggtgaagttcttcgtggtgaccgaatcgaaaatgctccttattcgtttaaaatgcgtgaggcgcaaatgtgtaatgttctcggtcgtgttatgcttgatgcaaagtctgccaaagcgttta

SEQ ID NO: 148154 - DNA, 397 bp, Arabidopsis thaliana columbia; identical to SEQ ID NO: 130400

SEQ ID NO: 148155 - DNA, 376 bp, Arabidopsis thaliana columbia
ctctcttgcgttttcgattttattacaagaactttgttttgggcttcatccatcgttcaaggttcgttgaaaactatgaagaaagttgagttttttatgctccttctctgcttcatcgcagcgtcatctctagtgtctgctgatccaccaacatgtcctgctgatttgggaggcaagtgtagtgattctgatgactggcaaggtgatttcttccctgaaatccccaagattaagtatgagggaccttcgagtaagaacccacttgcttacaggtggtataacgctgaagaagagattcttgggaagaaaatgaaggattggtttagattcagtgttgcgttttggcatactttccgtgggactggaggtgatccat

SEQ ID NO: 148156 - DNA, 395 bp, Arabidopsis thaliana columbia
cgcaagactcctttcacattcttacttgctgctatgggtaaagagaagtttcacatcaacattgcggtcattggtcatgttgattctggaaaatcgaccacaactggtcacttgatctataagcctggcggtattgacaagcgtgtcatcaagaggttcgagaaggaggctgctgagatgaacaagaggtccttcaagtacgcatgggtgttggacaaacttaaggccgagcgtgagcgtggtattaccatcgatattgctctatggaagttcgagaccaccaagtcctactgcacagtcattgatgccccatgacatcgcgatttgatcaagaacatgattactggtacctaccaggctgattgtgctgttcctatcattgactccacctctgg

SEQ ID NO: 148157 - DNA, 396 bp, Arabidopsis thaliana columbia
ccgaaaccctaatccccaatttctctttcaagttttcgatcacgatctctggaaaattaagagagaaattcaaaaacttcgggagttcaaagtctcattcagacattccagaaggtattctagtcgactgagtaaacaatcatgagaatcagaaaaggaagtagagttgaggtatttagcaacaaagaggcgccttatggtgcgtggcgatgtgctgagattgtctcgggtaatggacatacctacaatgttagattttactctttccaaattgaacacgaggaggcagttatggagaaagttccaaggaagataattaggccttgtcctccacttgtggatgttgagagatgggatactggtgaattggtggaagttcttgataatttttcctgg

SEQ ID NO: 148158 - DNA, 391 bp, Arabidopsis thaliana columbia
  unsure (1)..(391): unsure at all n locations
ttctcatcttctacactcgtttattctctatctctcttcctctctctttctcttctcttcttcctcttcatcctctcaccacacatgcttctctcttcctctaccctcatttccaccgccgatgacctagacgacctctctctcttccaccgcgccgtcgtctcttcctccaccaacaacaaccgtcgtctcatctccctctctccaaatccacccccaaagatcgctttcctcttcctaacaaactccgatctaaccttcttacctctctgggaaagcttcttccaaggtcaccaagatctctacaacgtttacatccacgcagatccaacctcctncgtctctcctcttctcgattcttcatcaatcaacgctaagttcatcccggcga

SEQ ID NO: 148159 - DNA, 398 bp, Arabidopsis thaliana columbia
cttaaagcagctttaaagctttgaacatgtttagctataatccctgaggaactatcctcatgtctctctccagttgcttgcttcccttttctcaatcagcgacggctccgtcttcctccgtctgctcttgccatctcgccgcctctttttctaattttccggtttcgtcaagagactatagtttctccagaagtggaagccttgttctcaacggaggaggctcgaatctctgccggagattctgtggtttgaaactgtggatacttaagagcttgaatcgtagacaaggcaacaacagaaaacatcagcctgtaaacgagcttacaacacactcaaagcacactttcctcagcgatgatgaacgaggttttgctgaagaaactagagctgaagattta

SEQ ID NO: 148160 - DNA, 374 bp, Arabidopsis thaliana columbia
gcaatcacactctctctttgttcgagtaccaacaatggcccttcaagctgcttctttggtctcctctgctttctctgttcgcaaagatgcgaagttgaatgcttcttcatcatctttcaaggactcgagtctttttggtgcctccattaccgaccaaatcaaatccgaacatggatcttcctcgttaagattcaagagagaacagagcttaaggaatctagcaattcgagcccaaaccgctgcgacttcaagccctacagttacaaaatccgtggacggcaagaaaacgttgaggaaaggaaatgtggtggtcactggagcctcgtctgggttaggtctagccacggctaaagctctagctgagacagggaaat

SEQ ID NO: 148161 - DNA, 393 bp, Arabidopsis thaliana columbia
cggacgcgtgggttcgccttctcttagcctaccctttttccttcctcctctccgattcttcctccgtcagtaaaagaaaatcaaaatggcttcacacattgttggatacccacgtatgggccctaagagagagctcaagtttgcattggaatctttctgggatggtaagagcactgctgaggatcttcagaaggtgtctgctgatctcaggtcatccatctggaaacagatgtctgccgctgggactaagttcatccctagcaacacctttgctcactacgaccaggttcttgacaccaccgccatgctcggtgctgttccacctaggtatggatacactggtggtgagatcggccttgatgtttacttctccatggctagaggaaatgcctc

SEQ ID NO: 148162 - DNA, 397 bp, Arabidopsis thaliana columbia
cgagtctctcgacggtcgcatatcaaaagtccatttctttcttctctttggaggatcagcaactatggatgaagagtacgaagtcatagttctgggtactggtctcaaggagtgcatccttagtggtcttctctccgtcgatggtcttaaggtacttcacatggacaggaatgactactacggtggagagtcaacttctcttaatctcaatcagctgtggaagaagttcaggggagaagagaaggctcctgctcatttaggttctagcagagactacaatgttgacatgatgccaaagtttatgatggctaacggaaagcttgttcgtgtccttattcatacggatgtgaccaagtacttgtcttttaaagctgttgatggaagctatgtttttgtc

SEQ ID NO: 148163 - DNA, 400 bp, Arabidopsis thaliana columbia
cgctctcacagtagaagaaaaaattagaaaggttgtgagaatggcggctacagcagcttcaagcttacaaattgctacacgaaggccgagcatgtcttcgcctagcaaaattcttaaagcaggaacctacattgttggtgccaatcctggaaacgcttcatgggataaactttcatgcactcgccaattatcaaaccttggatgtttgagaaaccacagtgctgttccaacttgtaagagacccttttctttttccacaagggcaatgtctgaatccagtgaaaacaaggctccttcagggcttccaattgatttgagagggaaaagagctttcattgctggtatagctgatgataatggctatggttgggccatagcaaaatctcttgctgctgctgga

SEQ ID NO: 148164 - DNA, 398 bp, Arabidopsis thaliana columbia
gtgaaatagagaacttcattctctttttttttcatttcatgcctattggcgttccaaaagtaccttttcgaagtcctggagaaggagatacatcttgggttgacatatacaaccgactttatcgagaaagattattttttttaggccaagaggttgataccgaaatctcgaatcaacttattagtcttatgatatatctcagtatagaaaaggataccaaagatctttatttgtttataaactctcctggtggatgggtaatatctggaatggctatttatgatactatgcaatttgtgcgacccgatgtacagacaatatgcatgggattggccgcttcaatagcatcctttatcctagtcggaggagcaattaccaaacgtatagcattccctcac

SEQ ID NO: 148165 - DNA, 399 bp, Arabidopsis thaliana columbia
attcttctcacaagaatcagattcaagatagaagtttttcaaacaatgtctagtcctcttggtcactttcagattcttgtttttcttcatgctttgcttatcttctcagctgagtcccgcaaaacccaattgctgaacgataatgatgttgaatctagcgacaagagtgcaaaaggcacacgatgggctgttttagttgctggatcaaatgaatattataactacaggcatcaggctgacatatgccacgcgtatcagatactccgaaaaggcggtttaaaagatgaaaacatcattgtgtttatgtatgatgatatcgcgttttcctcggagaatcctaggcctggagttatcattaataaaccagatggagaagatgtttataaaggagttcctaag

SEQ ID NO: 148166 - DNA, 399 bp, Arabidopsis thaliana columbia
ctcaaaatcaaacgagtttctttgataatcttcttgctaagtgttcttgttgagttttgctatggagggttcacaagtgaatatgtcagaggaagtgatttaccagatgacatgccactagacagcgatgtttttgaagttcctcctggtcctaattcacctcaacaggttcatgtaacgcaagggaaccatgaaggtaatggagtgatcatttcttgggtgactccggttaagcccggttctaagactgttcaatattggtgtgagaatgagaaatcgaggaaacaagcagaagcaacagttaatacttaccggttctttaattacccgtctggttatattcaccattgcctcatcgatgatttggaagtaagtcttatcactttaaaagccgttttt

SEQ ID NO: 148167 - DNA, 353 bp, Arabidopsis thaliana columbia
gttgatgtgagattcgaagatcaggagggattgcctccgatcatgacatctctcgagggacgaggatcatccaacaagggtggtccttgaggtgtctcatcacttgggtcaaaatgtcgttaggaccattgctatggatggtactgagggtctcgtccgtggaaggaaggttctcaacactggtgctccaatcactgttcctgttggaagggccacccttggacgtatcatgaacgttcttggagaacctattgacgagagaggcgaaattaagaccgagcattacttacccattcacagagacgctccagctttggttgatttggccaccggtcaagagattctcgctactg

SEQ ID NO: 148168 - DNA, 370 bp, Arabidopsis thaliana columbia
aaaacgatggagagcacgaagattgctccttcattcgatcgtgccagtgagcttaaagctttcgatgagacgaagactggtgtgaaaggactcgttgactctggaatctcaaagattccacgcattttccatcactcatctgtcgaactagcaaaccctaaaccacttccctcggacctgctacatctcaagacgatcccaacgatcgatctcggaggacgggacttccaggacgcgattaagcacaagaacgcgattgaagggattaaagaagcagctgccaagtggggtttcttccaagtgatcaaccatggagtttcgctcgagcttcttggagaagatgaaagatgggagttcgtgacttttaatg

SEQ ID NO: 148169 - DNA, 403 bp, Arabidopsis thaliana columbia
attttatatcttcaatcatcttacgcaggctgttgtagcagcagtgtctatcggagacgatgaagttcaacgtcgccaatccgaccaccgggtgtcaaaagaaactcgagatcgatgacgatcaaaaactccgcgcctttttcgacaagaggctctctcaggaagttagcggagatgctctaggcgaggaattcaagggatacgtattcaagatcatgggaggatgtgacaagcaaggtttcccaatgaaacaaggagttctcactccagggcgtgtccgtcttttgcttcaccgaggtactccttgttttagaggacacggaaggaggactggagagaggagacgaaagtctgtccgtggttgcattgtgagccctgacctgtctgttcttaacttggtcat

SEQ ID NO: 148170 - DNA, 395 bp, Arabidopsis thaliana columbia
gagaaaacttcgtctctcttctctgcttcgccctctcatttcctgtgagataaaggcggagtctctctccagttattttgctcatccatcgattcttagagttcaaaatggttgatcaagttcagcaccccactattgcgcagaaagctgccgggcagttcatgcgttcaagtgtttccaaggacgttcaagtgggttaccagaggccttctatgtatcaaagacatgcaacctacggaaactactccaatgctgcatttcaatttcctccgacatcccggatgttggcaacaactgcttctcccgtgtttgtccaaaccccaggagagaaggggttcactaactttgcccttgactttctgatgggtggtgtttctgctgccgtctccaagact

SEQ ID NO: 148171 - DNA, 402 bp, Arabidopsis thaliana columbia
gaatttagaggaaaactactttgaacaagtgggagctttcaatgatcaagcagcggttgttcgtctcttacgttattcaggagaatcaaattcatctggagaagaaacatgtggtgcctctgctcattcagattttggaatgataactcttcttgcaactgatggagttgcagggcttcaagtttgtagagataaagataaagaaccaaaagtttgggaagatgtcgctggtattaaagggacttttgttgtcaacatcggcgaccttatggaaagatggactaatggtcttttccgatcaacattgcatagagtggtgtcagtgggaaaggaacgtttttcggtggctgtatttgtcgatccagacccaaactgcgttgtaaagtgcttggagagctgttg

SEQ ID NO: 148172 - DNA, 394 bp, Arabidopsis thaliana columbia
cccacgcgtccgaaacaatggcgtattctcttcctacatttccccaagccttaccttgctcgtcaaccaaaacttcttcctccttggctaccttccgatctcctttcttaagattcaatggttccacttccttaatcccctcctctatctccatcacttcacgtggcacatcctccccgaccatcatcccacgtgctgccgcctcagaatccgactctaacgaagccctagccaacacaaccttccacggcctctgctatgtcttgaaagacaacatagacaccgaccagatcatcccagcaggagccgcttgcaccttcccatcgaaccagcaagagcgtgatgagatcgccgctcacgctctctctggtctaccagactttcacaaaacacg

SEQ ID NO: 148173 - DNA, 397 bp, Arabidopsis thaliana columbia
gtgaagtattgaatgagaagaggcaattaaaaatctcccgtgactctcgtctccccatctctctctctccctctgcccaaatttctggggcaaatttgttcatcagatctactacaatctctctttttcttcgggtatggagggccaacgaggcagtaattcttcgttgagctctggcaatggcaccgaagtcgccaccgacgtttcttcttgcttctatgttcccaatccctctggaaccgatttcgatgccgagtcgtcttctcttcctcctctctccccagctcctcaagtggcattgtcaattcctgcggagcttgccgccgccattcccctcatcgatcgcttccaggttgaagcttttctgcggctaatgcagaaacaaatccagtctgct

SEQ ID NO: 148174 - DNA, 397 bp, Arabidopsis thaliana columbia
  unsure (1)..(397): unsure at all n locations
ccaacctctaagttccttcaagcacagagcaaagtggttgctattgcttggattggatttgtggctctttcccttcacgttattatgctctggttgtttataatcgagtttggttgggggacaaatggtgctgctttggcgtttaatattacaaactggggaactgcaattgctcaaattgtttatgtgattggttggtgtaatgaaggctggactggtttatcttggttggcttttaaagagatttgggctttcgttagactctccattgcatctgctgttatgctttgtcttgagatctggtatatgatgagtatcattgttcttactggccgtcttgacaatgcagttatcgctgntgattccctttctatatgcatgaatatcaacggcttgg

SEQ ID NO: 148175 - DNA, 394 bp, Arabidopsis thaliana columbia
  unsure (1)..(394): unsure at all n locations
cgagtctctcgacggtcgcatatcaaaagtccatttctttcttctctttggaggatcagcaactatggatgaagagtacgaagtcatagttctgggtactggtctcaaggagtgcatccttagtggtcttctctccgtcgatggtcttaaggtacttcacatggacaggaatgactactacggtggagagtcaacttctcttaatctcaatcagctgtggaagaagttcaggggagaagagaaggctcctgctcatttaggttctagcagagactacaatgttgacatgatgccaaagtttatgatggctaacggaaagcttgttcgtgtccttattcatacggatgtgaccaagtacttgtcttttaaagctngtgatggaagctatgttttt

SEQ ID NO: 148176 - DNA, 356 bp, Arabidopsis thaliana columbia
caatgggtagttgaaaagtgtctagaaactagtctgatgacaaacatccgagctcgcatcatcaggagaattgattaactatggtcgtcttgatcaagtgatgttggatccttatggaaattatgtcattcaagcagctcttaaacaatccaaggggaatgttcatgctcttttggttgatgccattaaactgaatatctcatctcttcgtaccaatccttacggtaaaaaagtcctctccgcacttagctcgaagaagtaaatcggcaggtttttggttttaaagattcaaagagacaaaatattcaaagatctaatctacaattcctctgtttcgactaatataaaattatatt

SEQ ID NO: 148177 - DNA, 395 bp, Arabidopsis thaliana columbia
tgatgatgttggtattccacaagattacaggcacatggagggtttcggtgtccacacctacactcttattgccaaatctggaaaagttctctttgtgaagttccactggaaaccaacttgtgggatcaagaatctgactgatgaagaggccaaggttgttggaggagccaatcacagccacgccactaaggatctccacgatgccattgcatctggcaactaccccgagtggaaacttttcatccagaccatggatcctgcagatgaggataagtttgactttgacccacttgatgtgaccaagatctggcctgaggatattttgcctctgcaaccggttggtcgcttggttctgaacaggaccattgacaatttcttcaatgaaactgagcagc

SEQ ID NO: 148178 - DNA, 394 bp, Arabidopsis thaliana columbia
gccgttttgaatctccggcgacttgacagagaagaacaaggaagaagactaagagagaaagtaagagataatccaggagattcattctccgttttgaatcttcctcaatctcatcttcttccgctctttctttccaagctcataaaaaatggctgaggctgatgatattcaaccaatcgtgtgtgacaatggtaccggtatggtgaaggctggatttgcaggagatgatgctcccagggctgtttttcccagtgttgttggtaggccaagacatcatggtgtcatggttgggatgaaccagaaggatgcatatgttggtgatgaagcacaatccaagagaggtattcttaccttgaagtatcctattgagcatggtgttgttagcaactgggat

SEQ ID NO: 148179 - DNA, 303 bp, Arabidopsis thaliana columbia
caacaacagatcttaaacgttctactccgtgctgcactactcatcctaaatggccggctggacaatggctctctgctgccgtgccttcgcctttaagaccttctagctttaccccccggcatgtgaagtcctcggaagcgcccgagtgacaatgacgaagactggtgccatagccaaaaggcccatcaagcagaccatggtacggatctgaccgagtctagaactggggtccaagctctggcgaatcaccgagctaccttaccggcgagttaccctgagaccactgatgggacaccgacagac

SEQ ID NO: 148180 - DNA, 393 bp, Arabidopsis thaliana columbia
caacagcatcatcaaactctaataaacccaagttggtgtatactataatggtgatggctggtgcttcttctttggatgagatcagacaggctcagagagctgatggacctgcaggcatcttggctattggcactgctaaccctgagaaccatgtgcttcaagcggagtatcctgactactacttccgcatcaccaacagtgaacacatgaccgacctcaaggagaagttcaagcgcatgtgcgacaagtcgacaattcagaaacgtcacatgcatctgacggaggaattcctcaaggaatacccacacatgtgtgcttacatggctccttctctggacaccaaacaggacatcgtggtggtcgaatgtcctaagctaggcaaagaaacggcag

SEQ ID NO: 148181 - DNA, 401 bp, Arabidopsis thaliana columbia
agcctacctaatctaagcagggccgctcgctcccaccaaaggacaaatctctctcccgcactcatctctgttcattggttcctcccaaaaaatatcaatcaaatcggaataaactatacgaatcctccaatataaagctccaccctttctctttctatctctctctctccattggtgactgtctctcttccctcgtaaacatcgctgtctctaaagatggcctctctctcaggcctatactcttcttctccatctctcaaacctgccaaaaaccattcctttaaagcattgccggcgcaatctcgagattccttctctttcccacataccttcaaacccaccaatctaccggtgactctctcctcggctcgttctgtggcacgcgacatttctcatgcgga

SEQ ID NO: 148182 - DNA, 380 bp, Arabidopsis thaliana columbia
gaacagccggtgagttcatggcttcaagctatgactatgacgctcctctcgatgaatacggcttaccaagagaaccaaagtatagtcacttgaaagcattgcataaagccatcaaacttagtgagccagctttgctttctgctgatgctaccgttacatcgcttggagctaagcaagaagcttatgtgttctggtctaaatcatcttgggctgcgtttttatcgaacaaagatgagaactctgcagcgagagttctgttccgtggattcccatatgatttgcctccttggtcagtcagtattttacctgattgcaaaacagaggtttacaacactgcataggtcaatgcaccaagcgtacacaggaatatggttcctact

SEQ ID NO: 148183 - DNA, 400 bp, Arabidopsis thaliana columbia
ctctgcttcgatttcttcttcttcttcagaattcagatcagatctccggcgataatctttgagatctgaaatttcttacaatcaggagagaaagatgtacggattcgaggcgcttacgttcaatatccatgggggatacttggaggcgatcgtcagaggccaccgtgctgggcttctcaccaccgccgattacaacaatctatgtcagtgtgagaacctagacgatatcaagatgcatctctctgccaccaaatacggtccttacctccaaaacgaaccatcacctctgcataccactacaattgtggagaagtgtacgctcaagcttgttgatgactacaagcatatgctttgccaagctactgagccaatgtctacctttttagagtacatcagatat

SEQ ID NO: 148184 - DNA, 399 bp, Arabidopsis thaliana columbia
cacgatgggacgaagacctgcgagatgttaccgtcagattaagggaaagccatacccgaaatcacgatactgtcgtggtgtgccagatcccaaaatcaggatctacgatgttggtatgaagaggaaaggtgttgatgagtttccattctgtgttcatttggtttcatgggagaaagagaatgtgtcaagtgaagcacttgaagcagcacgtattgcttgcaacaagtatatggtgaaatctgctgggaaagatgcttttcatttgaggattagggttcatcctttccatgttctcaggattaacaagatgctttcgtgtgctggagctgataggcttcagactggaatgagaggtgcttttggtaaagctcttggtacttgtgctagagttgcgattgg

SEQ ID NO: 148185 - DNA, 399 bp, Arabidopsis thaliana columbia
  unsure (1)..(399): unsure at all n locations
gaagagagagacggcgatggcggctacaggatctggacggtctcaattcatttccagttccggcggtaaccgaagcttctccaattctccactcatcgagaactctgattctaatcagattattgtctctgagaagaagagctggaagaatttctttgcttacttaggccctggttttcttgtttcaatcgcatatattgatcctggaaactttgagactgatctgcaagctggagcacactacaagtatgaattactttggatcatattggtggcctcatgtgcggctttggtgattcaatctctggctgctaatcttggttctctcgaggaaaatccctcgttccgcttctggtatcaaggaagctngcaggttttacttgatagaaagtggattgg

SEQ ID NO: 148186 - DNA, 398 bp, Arabidopsis thaliana columbia
tcccaacgaaatggagaaaatggccaaaggatggtttccgatgagcggcactagtagcagcggagatcagcagcagcaaccgctgcaaacaggaggaacgtctctgctagctgattggaattcttacgcagcatcgagagattttgaagaagacaccggaactttaggcttcgatatcgaatccgccgttagatctgccaacgacactgtttccggcacctttaatgttgtttcgaaaggagttagagataacctgcagtctgcaacaagtagtatgccttcaggaaaagctttgatgtatttcggtttacttctagcaagtggtgtattcttcatcttcattgccttcaccatgtttcttccagtcatggtgcttatgccacagaagtttgcaattt

SEQ ID NO: 148187 - DNA, 400 bp, Arabidopsis thaliana columbia
aaaaaatcgaaaatggttgcctcagccgccgcacgacctcttgtcaccgtccaaggacttgacggtgacatgagcaccgatcaatccaccaccgtcactttaccagacgtcatgactgctccagttcgacctgacattgtcaacttcgtccacgcccaaatctccaacaacagccgtcagccttacgcagtctccaaaaaggccggtcaccaaacctccgccgagtcctggggaaccggaagagccgtgtcacgtatccctcgtgttcctggtggtggaactcaccgtgccggtcaagcagcgttcggaaacatgtgtcgtggtggtcgtatgtttgctccgactaagatctggagacgctggcaccgtcgtgtcaatgtcaacatgaagaggcacgcga

SEQ ID NO: 148188 - DNA, 407 bp, Arabidopsis thaliana columbia
gtaggaggagtgatgacaaagttgatcccatgaaacacggttattccaaccaagaaatctgaggttttcacaacgtaccaagaccagcagaccaccgtctccattcaggtctttgaaggtgaaagaagtctcaccaaggactgcaggctactcgggaaattcgacctcactggagtcccaccggccccaagaggaacccctcaaatcgaggtcacatttgaagtggacgccaacggtattcttaatgtgaaagcagaggacaaggcgagtggtaaatcagagaagattacaatcacaaacgagaagggtcgtctgagccaagaagagattgaccggatggtgaaggaggcagaggagtttgcagaggaagacaagaaggtgaaggagaagatcgacgccaggaatgc

SEQ ID NO: 148189 - DNA, 387 bp, Arabidopsis thaliana columbia
ctcgagttgatatgtctagtactaaagatatgtcaactgtccaaaacgcaactccttttaacggcgttgccccatccaccaccgtgcgagttacaatcgtccaatcctccaccgtctataacgatactcctgccactatagacaaagcggagaagtatattgtggaggcggcaagcaagggagcagagctagtgttgttcccggaggggtttatcggtggctatcctcgaggctttaggttcggtttaacggttggcgttcataacgaagaatggcgcgatgagtttcggaagtaccatgcttctgctattcatgttcctggccctgaagtagcaagattggctgacgtggctaggaaaaaccatgtgtacttggtaatgggagcca

SEQ ID NO: 148190 - DNA, 366 bp, Arabidopsis thaliana columbia
aaaatctggcaaagtgaagctcaatctttactacgaatcactttgtcccggttgtcaggaattcatcgtcgatgacctaggtaaaatctttgactacgatctctacacaatcactgatctcaagctgtttccatttggtaatgccgaactctccgataatctgactgtcacttgccagcatggtgaagaggaatgcaaactaaacgcccttgaagcttgcgcattaagaacttggcccgatcagaaatcacaatactcgttcatacggtgcgtcgaaagcgatacgaaaggctgggaatcatgtgttaaaaactctggacgtgagaaagcaatcaatgattgttacaatggtgatctttctagaaa

SEQ ID NO: 148191 - DNA, 400 bp, Arabidopsis thaliana columbia
cccaactctttttcaattcctcccatcaatcttcttcatttgttcttctgttggtggtggtgatctagttttcaaagaatcgattttgccaagtgggttcttcttgataacctttcttcttctttgaaatgggttcttctgtggagcagaacattcttgttactggtggtgctggctttatcgggacgcatactgttgttcaacttctcaaagatggttttaaggtttcgatcatcgataattttgataactctgttatcgaagctgttgatagagttagggagcttgttggtcctgatctctccaagaagctcgacttcaatctgggtgatctaagaaacaaaggggacattgagaaactattctccaagcaaagatttgatgctgtgattcattttgc

SEQ ID NO: 148192 - DNA, 405 bp, Arabidopsis thaliana columbia
aaactctctcatcttcctctttctctctcttttcttcctaaatgataaggtaacttcaaaactacgacaattcaacactctaaaggacacgccaagatttaggtttttagcttgattcaaaaatggagacgaatccgtgtgacatgaatcagctcgattccgattcgcatctccctcctcgaaaacgattacttgctggattcaagaaatttaactccaacggcattaatggatcttctccttcagatttcgcttcttcttcctctacttcaaactcaaacggatcttcctctgcttccaccaatgttcagacccatctcggcaacttgttatcttctcctttcaacaatgaccagtcacctgaagagctcgtggaggcaacgagatctgcagctgctttagcgg

SEQ ID NO: 148193 - DNA, 371 bp, Arabidopsis thaliana columbia
gtcgaattcgaagaagatgacgccagcaaccccgtttgtccaagacagagatgccagaaggagtttcagcaatcacaacacctaagagcttgccagagatggatgagcaagcaaatgaggcaaggacgtggtggtggtccttccctcgacgatgagttcgatttcgagggcccccagcagggataccagctactccagcagtgctgcaacgagcttcgccaggaagagccagtttgcgtttgccccaccttgaaacaagctgccagggcagttagcctccaaggacagcacggaccattccaatccaggaaaatttaccagtcagctaagtacttgcctaacatttgcaagatccagcaagttggtgaatg

SEQ ID NO: 148194 - DNA, 400 bp, Arabidopsis thaliana columbia
aaagctctgaaattagggtttttcgtctgcgatcacgatccttcaattactttgcgataatggagaagataagacaaccaacacatgcaggctcttggtataccgataatcctacaaaattgtcatctgatcttgaagaatggcttaatgcaactggtttgaccaaatctcctgatgtacgaggcgtcattgcaccacacgcaggttattcgtactccggtcgtgcagctgcttatgcttttgcaaacatagatcctactaacatttcacggatatttcttcttggtccatctcaccacttttatactccaaaatgtgccctttcgactgcaacagtttataaaacccccattggaaatctacctgttgatgtggagatgattaaggagatacgagctat

SEQ ID NO: 148195 - DNA, 366 bp, Arabidopsis thaliana columbia
ctcgttttcgattctacaatggctgacaagaagattaggatcggaatcaacggattcggaagaattggtcgtttggttgctagagttgttctccagagggacgatgttgagctcgtcgctgtcaacgaccccttcatcactactgagtacatgacctacatgttcaagtacgacagtgttcacggtcaatggaaacacaatggactcaagatcaaggatgagaagacccttctcttcggtgagaagccagtcactgttttcggcatcaagaaccctgaggatatcccatgggccgaggctggagctgactacgttgttgagtctactggtgtcttcactgacaaagacaaggctgcagctcacttg

SEQ ID NO: 148196 - DNA, 413 bp, Arabidopsis thaliana columbia
acccaccaccacgaaactggtcagctagagaatactagcgaccttaccgaggctagcttaacgagctctctctgcgaggatagcagcggttataccaccaaatgaatcaatctacatccagaacctcgacgactggatcatgacagaggtattggcgagatctattaaaacatttacacgacagctatgagttctctggacgatgaaagagctatcggtggctcacacgtgtatgaacctgttgaagaaccgaccgagcctgtttctccttctgatgttacacttgatctgaatcctattaaagatgatgaggtagcaaactcgccacctagcgaagaagcttggtggaaaagaagcgttgcctctttgattgcccaagcgaaagaaactaatacagtttggtccatctgcat

SEQ ID NO: 148197 - DNA, 397 bp, Arabidopsis thaliana columbia
tcgttttgcatcgccattgttgtgttgctggagctaaatagagagaaagagagagagtgtgtgtgatggtgatgagaaagctacagttaccgttgagccagacgcagaaggttaggtttgagagagcaatcgagcggcttcaatcactgtcgtcgtcggctaactctgacgcttctgttatcgtcaccgactctattcccgtcaaccatgacgatgccttcctcaagggacatggaacttccgaggtcgatggtgagttgctcgcgacggtctgtggagtagtggagcgtgtggataagcttgtctatgtacgcaccttgcgagccaggtacaagcctgaagttggggatattgtggtaggccgtgtcattgaggttgctcaaaaacgttggagagt

SEQ ID NO: 148198 - DNA, 316 bp, Arabidopsis thaliana columbia
aagaaatggaatgagcacaacaaagcgttatagatgattcgagacattctcatgtatatggataggacttatattgagagcaccaaaaagactcatgttcatccgatggggcttaacttgtggagggataatgttgtgcatttgactaagatacatacaaggcttctaaacactcttcttgatctagtgcagaaggaacggataggtgaagttattgatagggggtcgatgaggaatgtcattaagatgtttatggatctgggtgaatctgtgtatcaggaggattttgagaagccgatttttgatgcgtcttctg

SEQ ID NO: 148199 - DNA, 397 bp, Arabidopsis thaliana columbia
aaagctctgaactcagggttaagcttgtaccttcgcactaaaagaatggcgtctttgggtgtgtcggaaatgcttggtactccccttaacttcagggcagtttcaagatcgtctgctccgttggcatcaagcccatccacgttcaagactgttgctctcttctctaagaaaaagccagctcctgctaagtccaaggctgtctctgagactagcgatgagctcgccaagtggtatggtcctgacaggagaattttcttgcctgatggtcttttggatagatcagagatcccagagtacttaaacggtgaagttgctggagattatggttatgacccatttggtcttggaaagaagcctgagaactttgctaaataccaagcttttgaattgatccatg

SEQ ID NO: 148200 - DNA, 403 bp, Arabidopsis thaliana columbia
tcgctcgttttcgattctaggatggtcatttaagtctattcaatcatggaaaccggtttaaacatcttaaagctatcgctatgcgtcagcctagtcgtggttggatcatatgctcaggctcccgcaccatggaatccatctaatgggtttcgtccggggacatgtgaccactacgagtgtcccacctataaattggtagaggccggatacggctttgagatccgcatgtacgacgctgccctatggatatctactagtcctatcccctccctatccatgactcaagccaccaaaaccggtttccgacgattaaataggtacatagaaggagataacaagagcaacgtgaagatgaacatgacagctccggtgatcgcacaagcaacgcctggaagatcagtct

SEQ ID NO: 148201 - DNA, 406 bp, Arabidopsis thaliana columbia
acgcagctggtcagctagagaatactagcgacataaccgaggctggcttaacgagctcactcgaagatgttaacggcagatataccaccgaatcaatcaatctacatccaaaacctcaacgaaaggatcaagaaagaggaattgaagagatctctttactgtttgttctctcagtttgggaggatacttgatgtggttgctttgaagactccgaagctccgaggacaagcctggggttacttttagtgaagtcactgctgctggtcatgctgttcgtcagatgcaaaattttcccttctatgataaaccaatgcgcttacaatatgcaaaagcaaagtcagattgtctagctaaagctgagggaactttcgttgcaaaagataagaagaggaagcaagaagaaaaa

SEQ ID NO: 148202 - DNA, 387 bp, Arabidopsis thaliana columbia
agaaaaccagagatggcgttgacgacagcttctactttatttgttctaccggccaatgtcacctcggtcgccggcgcttcgtcgtccaggagctccgtgtctttcttgccgatgagaaacgccggttctaggctcgtagtcagggcagccgaagatcctgctccggcttcctcttcttcaaaagattctccggcagctgccgctgctccggatggagctactgccaccaaacccaagccaccaccgattggtcctaagagagggtctaaggtcaagattctaaggagagaatcctattggttcaagaacgttggatcagttgttgccggtgatcatgacccttaaactcgattccccgttgtggtccggttcgcaaaagtcaattac

SEQ ID NO: 148203 - DNA, 293 bp, Arabidopsis thaliana columbia
gtcgtcttcagcttcatcggccgttgcatttcccggcgataagagagagaaagaggagaaagagtgagccagatcttcatcgtcgtggttcttgtttcttcctcgatctctcgatcttctgcttttgcttttccgattaagatcgtagaccatggccgatgctgatgacattcaacctattgtctgtgacaatggtactggaatggttaaggctggattcgctggagatgatgctcccagagcggttttccccagtgttgttggtcgacctagacatcatggtgtcatggttg

SEQ ID NO: 148204 - DNA, 300 bp, Arabidopsis thaliana columbia
tccgttttcatttaaatagaaggcccgaaagcttttatggaaaaatcggggttcaattttatgttttctaagggagaattggaatacagaggtgagctaaagtaagcaatggatagttttgctcctggtgaaaagactactataagtcaagaccgttttatatatgatatggataaaaacttttatggttgggatgagcgttctagttattcttctagttattccaataatgttgatcttttagttagctccaaggacattcgcaatttcatatcggatgacaccttttttgttagggat

SEQ ID NO: 148205 - DNA, 266 bp, Arabidopsis thaliana columbia
aacaaacctggagagaaagggaatgccgaattcgtcttctgttgatcattgcttcacttctgcttccagagcttttactcagaagaagctcgctgatctcaaatctctctttttttccctcgcttccaagtctcagagcaatgaccaatacgtctcgtaccctgttttccaggagtattttggtctgagtggttctttaggagaaaggatctttgatatggctactccacacaggaaagatgataaaatgacttttgaagatcttg

SEQ ID NO: 148206 - DNA, 297 bp, Arabidopsis thaliana columbia
gtttcaagctctctgtttctcagatcttctctctgttttgttcttctcataaaataagagttgtgattcaacagttatggtgagaatattccttctctacaatatactaaattcgtttcttctctctttagtaccaaagaagctacgaactcttttccctctttcttggttcgacaaaactctccacaagaactcaccaccgtctccgtcaacgatgttaccttctccatcatcttcttcagcgccgacgaaaagaatagatccgtccgagctcaaacgcgttttccagatgttcga

SEQ ID NO: 148207 - DNA, 299 bp, Arabidopsis thaliana columbia
aaataatggagacgaagtggagagagaaagctcccactctctcggaccccaaagcttcttcttcttcttcctcttcttcctcttcctcttctctaatctgaatccaaagcctctctctttatgacacaagatcgctcagaaatgtctgaagatgacgatgaccaacaatctccaccgttggatctaccctctaccgccatagctgatccttgctcatcttcctcttcaccaaacaaatctcgtaactgtatctcaaattctcaaactttccctgaccatgttctcgaaaacgtacttga

SEQ ID NO: 148208 - DNA, 293 bp, Arabidopsis thaliana columbia
  unsure (1)..(293): unsure at all n locations
gttcccggcgagttcgactcggtgattgattttttcctagaaaaataaaatttcttcttaacgattgatcgattttggttttctatctttcgattctagatctagaattcaatttgtgaggtttggagatggcgagcgagctgatcaatcggcgacacgagacggatcaacccacccgcgatgcttattaccccgaaccaatcaaaccatggttcacggtgactcgtccgatgcgttacatgctccgtgaacagagacttatcttcgttctcngtggcattgcaatcgctact

SEQ ID NO: 148209 - DNA, 289 bp, Arabidopsis thaliana columbia
ctcaaaacagagtatcccaaaaaacagagcaatctctaaaaaatctcaagaaacctcactaaaatgggttcaacggcagagacacaattaactccggtgcaagtcaccgacgacgaagctgccctcttcgccatgcaactagccagtgcttccgttcttccgatggctttaaaatccgccttagagcttgaccttcttgagattatggccaagaatggttctcccatgtctcctaccgagatcgcttctaaacttccgaccaaaaatcctgaagctccggtcatgctcg

SEQ ID NO: 148210 - DNA, 293 bp, Arabidopsis thaliana columbia
cgcagatgcgaagggtattttggttaattccttcacggagcttgagccgcacccgtttgactatttctctcacctggagaaattccctccggtttacccggtcggaccgattctcagcttgaaagatcgagcgagtccgaacgaagaagcagtcgatcgggatcagatcgttgggtggctcgatgatcagccggagtcatcggtggtgttcctctgtttcgggagcagaggaagcgttgatgagccgcaagtgaaggagatagctcgagctttggaactcgtcggctgcagat

SEQ ID NO: 148211 - DNA, 293 bp, Arabidopsis thaliana columbia
agagaaaaatgctgagtagatcagttgcttctgctgttacaccggtctcatcttcttctctcttaccaaactcaaagcctatcttctgtctgaaaaccctctccggttatcgttcttcttctttctgtggcggctgtattcgtaaaatcaaccataagcctcttcgaatgacgagttccaatattacaccaagagctatggccacacaacagcttgagaacgctgatcagctcattgattctgtcgaaacttttatcttcgattgtgatggtgtgatttggaagggagataaa

SEQ ID NO: 148212 - DNA, 295 bp, Arabidopsis thaliana columbia
caatcatgtcttcttcgtttctctcctccactgctttcttcctcctcctttgtctaggattctgccacgtgtcctcttcctcctccgaccaagggacttacatcggtcacatggctaaatctcagatgccgtcgtctttcgacctccactctaactggtacgattcatctctcagatctatctccgactcaaccgaattgctctacacttacgagaacgcgattcatggattctcaacacggctaactcaagaagaagccgactcgctcatgactcaacctggtgttatctccgt

SEQ ID NO: 148213 - DNA, 276 bp, Arabidopsis thaliana columbia
ctctctcaatcccggcggtgaagatgaagtacaacccaagagtgacctcttctcgcagaaagaacaggaaggctcatttcacagcttcctccagcgagaggcgtgtgataatgagctctcctctctccaccgatcttcgtcagaagtacaatgtcagatccatgccgatccgtaaagacgacgaggttcagatcgttcgtggtacttacaagggacgtgaaggcaaagttgttcaggtttaccgtcgcaaatgggtgattcacatcgagagaatca

SEQ ID NO: 148214 - DNA, 298 bp, Arabidopsis thaliana columbia
gcaagttccagcatttttttgtactccagatatggttggggaggcttttgtgccccaggattatcacatattgcatcaatcacctgagcatgttcacagattttaccaagagattagcaagttaggtcgtcctgaagagaatggtttaatgagcatcacttctaccttgcaagctattgacaagaagataatggcgcttggttacggagtaatcagtgcagagatagctactgtggacacacaagaatctcatggaggtggttatattgtactggtgactgggtatttgacgggaaaa

SEQ ID NO: 148215 - DNA, 298 bp, Arabidopsis thaliana columbia
ctcagaatcttaaccatggcggcgacgagcgagcacaccatcttgcaatttgtgtctccgtcatcaacggcgtccgctacaacctctgtactcacggcgaggatccaccctctcgttatctttaacgtctgtgattgcttcgtgagacgtcctgactcagctgaacgagtcatcggaactctcctcggatctatcttacctgacggaaccgtcgatatccgcaattcatacgccgtccctcacaatgaatcatccgatcaggttgctgtggatattgattaccaccacaatatgttag

SEQ ID NO: 148216 - DNA, 298 bp, Arabidopsis thaliana columbia
cttcagatgctgaatgtctttgatgtgtctcttgctgtgggggggcattacggcttgtcgatcactgatcttgtgctcgctggattatcacacgtgagcgagaagggattctgggtcatgggaaatggtgtcgggctgcaaaaattaaactctctgaccatcacagcctgccaaggagttactgacatggggcttgaatctgttggaaagggctgcccgaacatgaaaaaggcgatcatcagtaaatcccctttgttatctgacaacgggttggtctcttttgcaaaagcttctttat

SEQ ID NO: 148217 - DNA, 296 bp, Arabidopsis thaliana columbia
cccacgcgtccgcccacgcgtccgcaacaacaaatcttaaacgttttactttgtgctgcactactcaacctcaatggccgcctcaacaatggctctctcctcccctgccttcgccggtaaggccgtcaagctttcccccgcggcatctgaagtccttggaagcggccgtgtgacaatgaggaagactgttgccaagccaaagggcccatcaggcagcccatggtacggatctgaccgtgtcaagtacttgggtccattctctggcgaatcaccgagctaccttaccggagagttcc

SEQ ID NO: 148218 - DNA, 295 bp, Arabidopsis thaliana columbia
aaataccctaatcacattttgtaacaataatacaattatgcattaaaactctccgacgatgcctcaggcaccgatgccagagttctctagctcggtgaagctcaagtacgtgaaacttggttaccaatatttggttaaccatttcttgagttttcttttgatcccgatcatggctattgtcgccgttgagcttcttcggatgggtcctgaagagatccttaatgtttggaattcactccagtttgacctagttcaggttctatgttcttccttctttgtcatcttcatctccact

SEQ ID NO: 148219 - DNA, 299 bp, Arabidopsis thaliana columbia
ttctttgttgttctttgttccaaaggctttgagaaaaaagggggttcgagaaccggtacggacttgcaacgtcgcagaagtacgactgtctcttgttcgatttggacgatactctttatcctcttagctccggaatcgcaagagaatgtgggaacaacatcaaagattacatgaccgagaaactcggtatacctaaggacaaaatcgtcgaattgtctgatcttctatacaagaactatggaacaacaatggctggtcttagggcgatcggatatgaatttgactacgatgagtaccac

SEQ ID NO: 148220 - DNA, 296 bp, Arabidopsis thaliana columbia
ctcatcaccagcttcgcatcttcttctccggcttgatcttctctcgtttctagatctccgacgatcggaatatcaaatccgatcgattaattctgtcaatcacacaaaaaccgaaaaccaaaaaaaaaccatggcgtttgagaagatcaaggtggcaaatcccatcgtcgagatggatggtgatgaaatgaccagggttatttggaagtctatcaaggataagcttattactccttttgtggagttggatatcaagtacttcgaccttggtcttcctcaccgtgatgctacggatg

SEQ ID NO: 148221 - DNA, 295 bp, Arabidopsis thaliana columbia
catcaccacaacgccggacgacaatgggtattgatctgatcgccggaggtaagagtaagaagaccaaaaggacagctccaaagtctgatgatgtctacctcaagcttactgtcaagctttaccggtttctggtaaggagaactaatagcaagttcaatggtgtgatattgaagaggcttttcatgagcaaagtcaacaaagctcctctttctctatctaggcttgtggagttcatgactggcaaggaagataagattgccgtcttggttggaactataactgatgatttgagggt

SEQ ID NO: 148222 - DNA, 298 bp, Arabidopsis thaliana columbia
agagccatcaacagtcgttggcgaatcgcatccaatggatgtggaggagccacttgagcagaagacatctgttggaggtggggatgacagcaatgctgcaaacgcagatatgatcaaagaaaataatattatcgatgcaggcgactcagaaaagttgaatttagatagaagttctggtgatgagtctatggaggatgagccggagacaaagcaatccgagtcaattacatctgatgataagagtgcaaaaattgaaatgctttctaaggaggaaagccgtgctgatatggatgcgggg

SEQ ID NO: 148223 - DNA, 293 bp, Arabidopsis thaliana columbia
cgagaatatgacgactttttctgttccgattgataacggagatgctatgaagatcgcagaagaagaatcacaaagaacactgtacccatatgttactggaacttcaattgttgcaatcaagtacaaagatggggttttgatggcttctgatatgggaggttcatatggatcaaccttaagatacaagaacatcgagagagtgaaggctattggtaagcattctcttcttggtgccagcggagaaatcagcgactttcaggagattctccgttatcttgatgagctcaccctga

SEQ ID NO: 148224 - DNA, 296 bp, Arabidopsis thaliana columbia
gcaagttccagcagcagcttgtactccagatatggttgggaatgcttttgtgccccagtattatcacatattgcatcaatcacctgagcatgttcacagattttaccaagagattagcaagttaggtcgtcctgaagagaatggtttaatgagcatcacttctaccttgcaagctattgacaagaagataatggcgcttggttacggtgtaatcagtgcagagatagctactgtggacacacaagaatctcatggaggtggttatattgtactggtgactgggtatttgacgggaa

SEQ ID NO: 148225 - DNA, 301 bp, Arabidopsis thaliana columbia
gattctaccggatcctaggctcgctatcagcgtccgtaggccggggctggaccttagcacagatcgcggacatcatctggatggaaacgagcagccctgatctcaatagaatgcacccaattcgccacaggtatcacagttcaagacactcggaagtcatgctcgcctacaatctgtagacgagcttcaactggtacgattcctctatgactgaacaccagatggttgagatcattccgccgattgctaggcgcggatattgaaggcagctcataacgcatgggggtttacatgcggatgc

SEQ ID NO: 148226 - DNA, 137 bp, Arabidopsis thaliana columbia
aacgaaaccgtcgaaattagccacggcggcgaggttaattccggcgagatggacctctacaggagcggaggcggaaacaaaagcttcctctggcggcggaagaggatcgaacttgaagacttttcagatctatcgat

SEQ ID NO: 148227 - DNA, 295 bp, Arabidopsis thaliana columbia
gaagaaccaaaagggttcaagcttgagtttttctttgatgagaatccttacttcaagaacactgtcttgaccaagacatatcacatgattgatgaagatgagcctatccttgagaaggccctcgggacggagattgagtggtatcctggaaagtgtttgacacagaagattctaaaaaagaagccaaagaaaggatccaaaaacacaaagccgatcactaagactgaggactgtgagagtttcttcaactttttcagtccacctcaagttcctgacgatgatgaggatcttgatg

SEQ ID NO: 148228 - DNA, 291 bp, Arabidopsis thaliana columbia
gcttagcaaaattcttctgaatgaataatcggcgattatgtctttgaaaaacgatgcgagtagtagccacgacggtggaagcaacagagaaagcgtaatcgatgatcatggccgccgtaaaagcacttgcggctactgtaaatccccagctcggtccagtatctctcacggtttatcagcacagactcttaccgtttatgactaccaagctcttattgaccgaggctggagaagatctggtacttatctttacaaacatgagatggataaaacgtgttgccctccttatac

SEQ ID NO: 148229 - DNA, 255 bp, Arabidopsis thaliana columbia
gaaaattctaatcggggtttaaatacaaaaacttgggaaatgggggaacctaactggaaaacaatggatatgagacgtgcttcgatgtgtatgatgttaatttgcgtctccttggttctcctttcgggttttggccagtttgtgatctgcagtgaagaaaaaggaacgtcaacgacacgtctaaagataagcttggggattagcgattcagaacatggacggtgaaaaaacgagattgcctctcgtgtcagacca

SEQ ID NO: 148230 - DNA, 296 bp, Arabidopsis thaliana columbia
aacaacaacaacacatacatctacatattaaccatgaagcttcttgggttcgccttagctattctattagttgtggcgacttgcaaacctgaagaagagattacttgcgaagagaacgttccattcacatgtagccaaacagatcgtttcaacaaacaagatttcgaaagcgacttcatcttcggtgttgcatcttctgcttaccagatcgaaggcggcagaggtcgtggacttaacgtttgggatggcttcactcaccgatacccatagaaaggtggagccgatttgggcaatgg

SEQ ID NO: 148231 - DNA, 295 bp, Arabidopsis thaliana columbia
cttcttcactttctctctgaatctgccgtcacgcggaagcttccgattcaaaacactctctacatgcattgttgttgtacaactacaacactatacgacgagtcttcaagcttccgcgtcttcttcctcttttgagaatcgcttcttctttcctccatcgttggttcacgattctctctgcaatgagtgatttcttcgatgaggggaagcagcaattcgcaagtgttgctgatgggaatgcaccacttaagtatccaagcttcaagctacctaagtcgactttcggagatactgg

SEQ ID NO: 148232 - DNA, 295 bp, Arabidopsis thaliana columbia
cggacgcgtgggttgttcttgtggcgggaataacaaagacatcgccgatatggggaaagacgaagaggaaatgcgaggtgagatcgaggagcgactaatcaatgaagagtacaagatctggaagaagaacactcctttcctctacgatctcgttattactcacgctctcgagtggccttcacttactgttgaatggcttcctgaccgtgaagaaccttccggtaaagactactccgttcagaagatgattctcggtacccatacctccgagagcgagcccaattacttgatgcta

SEQ ID NO: 148233 - DNA, 297 bp, Arabidopsis thaliana columbia
actttaccggattttggttttggtgctcgacgactctgagtcgaaatctctctctctcggaaaagctgaatctggatcatcaaagtatcattttaaagtttgatcatttcttctttgggtatatagggtagtattcaaaatggcagcttcagaaacagttctacgtgttccattaggatctgtatctcaatcttgctatctagcttccttctttgttaactcaacaccaaacctctcgtttaaacccgttagtagaaacagaaagaccgtccggtgtacaaactcgcatgaggtctc

SEQ ID NO: 148234 - DNA, 297 bp, Arabidopsis thaliana columbia
ctcttctacattttccaacgatggcctcaaacgcactctcgtgtttcaccgccgctaatcccgctctgtctcctaagccactactccctcacggctctgcttctccgtcggtttctctcggcttctccaggaaagttggcggcggcagagcagtggtcgttgcagcggctacggtggacacaaacaacatgccgatgaccggagtcgtgttccagcctttcgaagaggtgaagaaagccgatctggccattccaatcacatctcatgcctctctcgctcgccagaggtttgccgacg

SEQ ID NO: 148235 - DNA, 300 bp, Arabidopsis thaliana columbia
agcccttgcaaaccataaccaaaccatcatcatcatcatctcttggtgacagaagaaaagagttgaggaacagagaaaatggcagcacaagcacttgtgtcttcttcacttacctcctctgttcagacagctagacagatatttggctcaaaaccagttgcgtctgcctcacagaagaagagttcctttgttgttaaagctgctgcaactccacctgtcaagcaaggagccaacagaccattgtggtttgcttcatcgcagagtctctcttacttggatggcagcttacctggtgactat

SEQ ID NO: 148236 - DNA, 90 bp, Arabidopsis thaliana columbia
ctcctctctcccttggtttggaaactgccggtggtgtcatgaccactttgatcccaaggaacacaaccatccaacccaaaaaggaacaag

SEQ ID NO: 148237 - DNA, 233 bp, Arabidopsis thaliana columbia
aacactcgctacttttgcgcgctatatctttttcgatggtaactttctaccaaaaaagcactgggatgcattatggtgatggagcttgggtggatgaagatgaagctgttgatgggcactttatggagaatcaccttcgtgattaagatgatgatgatgatcatgttatcctcatccatacgccttactaacttgagacacttttgtgtcaactgctaatctggaagctattg

SEQ ID NO: 148238 - DNA, 296 bp, Arabidopsis thaliana columbia
cgctctctcttcatctccaacagagacttctttctagagaaagagatcttcacaaatatgactgtgatgaatcaccgacacaagcaatgtcattttctcctcctccttctgatcactgtcttctctgccgcgttggatggtgtttcttccgagacagacgtcggagggtttgactacggtgaagcattgtctaaaagcttactctactttgaagctcagagatcaggaagacttccgtacaaccagcgcgtgacttggcgtgatcactctggtctcaccgatggtcttgaacaagg

SEQ ID NO: 148239 - DNA, 296 bp, Arabidopsis thaliana columbia
aatttatcatcctttctctttcgtcttctcaatttctgaatcaaacccaattcccttctcgaaatctagtttctctacagtgcgaaaatcgaggttaattgtgttcgtcggaaacgatggcggtgagtttgacggagggagtggtaatgaagatgttgaacggagaagtgacgagcgagacagatatgatgccagtgctacaagtaacggaattgaagctgattcagagcaagcttcatcaaaatcaggaatctagcaatcgatataagtttttattatcagatgggactgacttg

SEQ ID NO: 148240 - DNA, 298 bp, Arabidopsis thaliana columbia
cttcaactccgccataacaaccgccgcaacctccggcgtgaagaaactccactttttctcaacaacccaccgtcccaaatccctctccttcaccaaaaccgcaatccgcgccgagaaaacagattcctccgccgccgctgctgcagcccccgccacgaaagaagctcccgtgggattcacgccaccgcagctagacccaaacacaccgtctccgatcttcgctggaagcaccggtggtcttctacgtaaagcgcaagtggaagagttctacgttatcacgtggaactcaccgaaagaa

SEQ ID NO: 148241 - DNA, 286 bp, Arabidopsis thaliana columbia
cagagttaaattgagtttgtgtctcgtaacttatcctgtgagcgaaaatggtgaaagcaactaaggcagagaagaagatcgcctacgataccaagctatgtcagcttatcgatgagtacacccagatcttggtcgttgcggccgataacgtcggatcaactcagcttcagaacatcagaaagggtcttcgtggagactccgtcgtgcttatggggaagaacactatgatgaagcgttccgttaggattcactctgagaacaccggaaacactgcaatcctgaatct

SEQ ID NO: 148242 - DNA, 298 bp, Arabidopsis thaliana columbia
attggttctggatcacatgtgcatctaagtctttggaaaaacggcgaaaatgtcttcccggcatctaataactcatcttctcatggaatctcttccgttggagaagagttcatggccggagttctatttcatcttccatcaatcttagctattatagctccactcccaaacagctacgaccgaatccaacctaatacatggagtggagcattccaatgttggggcaaagaaaaccgcgaagcagcgttaagagcagcttctccaccaggaactcctgatggtttagttactaactttg

SEQ ID NO: 148243 - DNA, 298 bp, Arabidopsis thaliana columbia
aaaaagagtcacttccgtgtcacaagaaaccatgaaactttctcttcatcaaccacttctcttcttcttcttagccagcgtcctcccattaatcctgaccgtccattctcaatcagacgactcatatttcatccgtactagctgcaacaccacattataccctgacctatgcttctcttctctttcctccttctctagctctgttcacaacgatccagccctcttggctcgagccgccatctccgtcactctcaccaagactctcgacttagcctcatacctcgccaatatcaccact

SEQ ID NO: 148244 - DNA, 299 bp, Arabidopsis thaliana columbia
cttagcgtctccggcgaatacccactacgactgagtatggcgctcgaaatcgaagctcgagatgtaataaagattatgcttcagttctgcaaagaaaattccttgaatcagacattccagacattacaaagcgagtgtcaggtttccttgaatacagtagacagcgtcgagacgtttatttctgatattaatagtggaagatgggactcggtactacctcaagtttcccagcttaaacttcccaggaataaacttgaagacctttatgaacagattgtattggagatgatagaacttcg

SEQ ID NO: 148245 - DNA, 294 bp, Arabidopsis thaliana columbia
gaagaaacaaagagagaagatgaagaatgttatgctgattattgacgagagcaacgcaagttatgatttactcatttgggcacttgaaaaccaaaaagataccattgagagctccaaagtttatatctttgcaaaacagccacaaaattcctttactcctactaccgtactttcttcatcagtcggctttgctcaaattttatatccattttcacctaattcagaactcataagattggctcaagaaaagaatatgaaaattgctttgggtatattagagaaagccaagaagat

SEQ ID NO: 148246 - DNA, 292 bp, Arabidopsis thaliana columbia
gcagctgatccagatagaccaatctggttcccgggaagcactcctccagagtggctagacggtagcctccctggtgacttcggatttgatcctcttggtctttcatcggacccggacagtctaaaatggaacgtacaagccgagatagtccactgccgatgggctatgctaggagccgccgggatattcatcccagagttcctaacgaagatcggaatcctcaacactccgtcatggtacacggcgggagagcaagagtatttcacggacaaaaccacactctttgtcgttg

SEQ ID NO: 148247 - DNA, 293 bp, Arabidopsis thaliana columbia
aaaatctgtagctttcgcatgtaaatctctctttgaaggttcctaactcgttaatcgtaactcacagtgactcgttcgagtcaaagtctctgtctttagctcaaaccatggctagtaacaaccctcacgacaacctttctgaccaaactccttctgatgatttcttcgagcaaatcctcggccttcctaacttctcagcctcttctgccgccggtttatctggagttgacggaggattaggtggtggagcaccgcctatgatgctgcagttgggttccggagaagaaggaagt

SEQ ID NO: 148248 - DNA, 154 bp, Arabidopsis thaliana columbia
gcccgaaattccgggtcgccccacccttccgaaaaaagatccaaaacccttaaatttaacaaaatcgatgggctgccaaatttttttccggcgattttcctcgagtgaaattcggctaaaggtgattatagcgatcatcgaatcaaattgattg

SEQ ID NO: 148249 - DNA, 278 bp, Arabidopsis thaliana columbia
gcccagtagctctaatcgctacgattgctacacaccacatcccttaagaaaaccctaatcatctctctctcgcattctataggaatcgcttcccgaagcttccaacattctcttgtttctcctttgtctctcaatttcagtttcctatattatacgcttgtattaatcaccagtatacattttgtcgtttctgggtctggaaccctagtagttattatagcatccatcgctttcttcaatcgccgtccatcagagtttcaagggatttgctttaaaga

SEQ ID NO: 148250 - DNA, 296 bp, Arabidopsis thaliana columbia
ctgatttgcccgtgaagagacctagagaagcagaggaggacaataacggcggcgccatggaaacagagaacggtggaggagagataaaggagccttcttgtatgtcctctattattcctggatggttctctgagattagtcctatgtggccaggagaagcacattctctcaaggtagagaagattctattccaagggaaatcagattaccaggatgttattgttttccagtctgcaacatatggaaaggttttggttttggatggagtgattcaactcactgagagagatgaatgt

SEQ ID NO: 148251 - DNA, 239 bp, Arabidopsis thaliana columbia
cttcacacgaatcaaaaacaaaaagcttcgtacatttcgcctagctttcttcgttctagggtttcggatcttacttaattacccaaaacccttgaatccattactctgtgtgagcttaaatctcttaccttttatcactttcaatcgattgggtattaagttgtaaaggaaggaacttggaatcatgaagcttgggcttttcactctctcgtttcttctgatcttgaatctagcaatgg

SEQ ID NO: 148252 - DNA, 296 bp, Arabidopsis thaliana columbia
atctgcacttacttcaaatcacaacccacttggctcctcattctcttcgttctggggtcaatctcaatcttcaaattcatcttcaccctcctcagatctttctacatctacttcctccgaccatccaaaaacctccgccgatacggttcatgggcaatcatcaccggaccaacagacggaatcggtaaagctttcgcctttcagttagcccagaaaggtcttaaccttatactcgttgctcgtaacccagacaagctcaaagatgtctctgattccatcagatctaagtatagtca

SEQ ID NO: 148253 - DNA, 298 bp, Arabidopsis thaliana columbia
aaacaatgacaagctccgataaatctctgtcgcacgacgttttcgtctacggcagtttccaagaaccatccgtcgtcaatctgatcctcgaatgttctccggtcatggttcccgctcaactccacggctatcacgtatatagactcaaaggtcgcttacatgcatgtatctctccttctgagaatggactaatcaacggcaagatactaactgggttaacagattctcagttagagaatttagatatgattgaaggaagtgaatatgtgaggaagactgttgaagttgttttgactga

SEQ ID NO: 148254 - DNA, 292 bp, Arabidopsis thaliana columbia
caatttctctcttgcgttttcgattttattacaagaactttgttttgggcttcatccatcgttcaaggttcgttgaaaactatgaagaaagttgagttttttatgctccttctctgcttcatcgcagcgtcatctctagtgtctgctgatccaccaacatgtcctgctgatttgggaggcaagtgtagtgattctgatgactggcaaggtgatttcttccctgaaatccccaagattaagtatgagggaccttcgagtaagaacccacttgcttacaggtggtataacgctg

SEQ ID NO: 148255 - DNA, 293 bp, Arabidopsis thaliana columbia
ggattcttcagtgaggagaggaaatgtcggatcttcagacaccgcttgtgaggcccaagaggaagaagacttgggttgattactttgtcaagttcagatggatcattgtcatcttcatcgtccttccattctcagccacattctacttcctcatctacctcggggacatgtggtcagagtccaagtcctttgagaaacgtcagaaggaacacgacgagaatgtcaagaaagtcatcaaaaggcttaagggtagggatgcttccaaggacgggcttgtctgcactgctcgtaag

SEQ ID NO: 148256 - DNA, 292 bp, Arabidopsis thaliana columbia
caacggaatgcattgcaacggtccctcaaatattcagtgaaaacaaaaccaaagaggattcttcgatcttcgatgcaaagctccttaatcagcactcgcaccacatacctcaacagttcgtatggcccgaccacgagaaaccttctacggatgttcaacctctccaagtcccactcatagacctagccggtttcctctccggcgactcgtgcttggcatcggaggctactagactcgtctcaaaggctgcaacgaaacatggcttcttcctaatcactaaccatggtgtcga

SEQ ID NO: 148257 - DNA, 246 bp, Arabidopsis thaliana columbia
gtggaaccgtttttccaatcaattaaagggcggctttttgaccgggatttttattccagtgaaccgaaattcaaaaggtggaaaaaaaaaaagcgtaaaggaatctattaggaactcaaagtcatggcaaacaaacaatatgcatcatcctcctgtggctacttccaacaaaccagctggtcccaagcaagcaaaatcacatggaattggaggtgggagcaactcatcagccgaagtgcaagctct

SEQ ID NO: 148258 - DNA, 297 bp, Arabidopsis thaliana columbia
tcttaaacgttttactttgtgctgcactactcaacctcaatggccgcctcaacaatggctctctcctcccctgccttcgccggtaaggccgtcaagctttcccccgcggcatctgaagtccttggaagcggccgtgtgacaatgaggaagactgttgccaagccaaagggcccatcaggcagcccatggtacggatctgaccgtgtcaagtacttgggtccattctctggcgaatcaccgagctaccttaccggagagttccccggagactacggatgggacaccgccggactttca

SEQ ID NO: 148259 - DNA, 229 bp, Arabidopsis thaliana columbia
caaaaatggagactagagaaacaaaaccagtgatctttctcttccctttccctttacaaggtcacttaaacccaatgtttcagctcgccaacatcttcttcaacagaggcttctccatcactgtgatccacactgagttcaactctccaaactcttccaatttccctcatttcactttcgtatccatccccgatagcttgtctgaacctgaatcctatcccgatgtcat

SEQ ID NO: 148260 - DNA, 297 bp, Arabidopsis thaliana columbia
ctagtgttaaaccagagtaaagcttgaaactttggactaaaagaatggcgtctttgggtgtgtcggaaatgcttggtactccccttaacttcagggcagtttcaagatcgtctgctccgttggcatcaagcccatccacgttcaagactgttgctctcttctctaagaaaaagccagctcctgctaagtccaaggctgtctctgagactagcgatgagctcgccaagtggtatggtcctgacaggagaattttcttgcctgatggtcttttggatagatcagagatcccagagtact

SEQ ID NO: 148261 - DNA, 300 bp, Arabidopsis thaliana columbia
ctaaagctctcttttctctccagatttcgattcccgaggctcgagagaaaaccgtaaatctcttctccgttcactcaatcaaccaaagatgcgtgagattcttcacatccagggtggtcaatgcggtaaccagatcggagccaagttctgggaagtggtttgcgccgagcacggcatcgatccaaccggaaggtacaccggagactcagatctgcaacttgagcgcatcaacgtttactacaatgaagcgagttgcggtagattcgttcctcgtgcagtgctcatggatttggagcctgg

SEQ ID NO: 148262 - DNA, 302 bp, Arabidopsis thaliana columbia
gtttcttcgtctctaaagattagatttttaagttttgaatagaaagcgatatgtcagagaagttttcaccgactttgaggctcggagatctcaacgatttcattgctccgtctcaagcttgtgtcatatctcttaaggactcaaaacccatcgtcaagaagtctgatcgaccccaggttgtgattgccccaaaacagcagcttgaaccggttaaaatttctctcaaggattgcttggcttgcagtggatgcatcacatcagctgagacagttatgcttgagaagcaaagcttagacgagttt

SEQ ID NO: 148263 - DNA, 293 bp, Arabidopsis thaliana columbia
agctacgttacacttccgagttgggtgccatcaccattattgccggtttatatcgacaacatacacaaagccaagcatgggagtgattcgagcacctatgacaccgaaggaaggtatgtcccagttaacctcgagaacatatttagcaaatacgcgctaacggttaaagataagttatcatttaaagaggtttggaatgtaaccgagggaaatcgaatggcaatcgatccttttggatggctttcaaacaaagttgaatggatactactctatattcttgctaaggacgaaga

SEQ ID NO: 148264 - DNA, 79 bp, Arabidopsis thaliana columbia
gccgattcgtttttgctctttaagctttcttcttgatttcgacggtgtctctcaatctccgtcaagcttgacgaatttc

SEQ ID NO: 148265 - DNA, 306 bp, Arabidopsis thaliana columbia
cctgtccgatcgaattctttcctttccttaatctaatctcctaccaagaggcgctctcttctcttcctctaatttccttctcccttactaaatttccttctttaatctctactttgcccaaaagcatttaactttaaccggaaaaatcttacatttttttcctcctggatctctctctctatatctgcagattcacactacagctgatttagatctatttcgtaagtgggtctttcaaagtcgtctcctttgatctactttgattcaggggtcgttgatttggtgataagtcagtagaaatggata

SEQ ID NO: 148266 - DNA, 293 bp, Arabidopsis thaliana columbia
atatattacaaaacacatactaattgtttctccttctccttcttccttgcaaatggatactttagcttcaaactcttcggatctcacgaccaagtcaagtctcggaatgtcgtcgtttaccaacatgtatctcctcacaacgcttcaagcccttgcggccctttgcttcttgatgattctcaacaaaataaagtcatcttcacgaaacaagaagttgcatcctctcccgccaggacccaccggttttccaattgttggaatgattccggcgatgcttaaaaaccgtccagttt

SEQ ID NO: 148267 - DNA, 301 bp, Arabidopsis thaliana columbia
cggacgcgtgggttctagagagagacatatagagaaagagagagaaagctttagggtttcaaaaaaaaaaaaaaagagaccctttagaaatctcctaacaggaaagttttctcaattgctatagaaaatgggagtcatgatcaatcaccatttcctcgcttttatcttcggcatcttaggaaacgtgatatccttccttgtattcctcgctccagtgccaactttttatagaatatacaagagaaaatcgacggaaagtttccagtcgctaccgtaccaagtgtcgctatttagctgcatg

SEQ ID NO: 148268 - DNA, 113 bp, Arabidopsis thaliana columbia
gcctcttgcagagaaatctgcggtcaaatagttttctaaatgcaagtgctcagcgttctgggagggctgcatatggagtaaagtctccttttaaacttcatggacctgatgat

SEQ ID NO: 148269 - DNA, 300 bp, Arabidopsis thaliana columbia
aaaacatataatcacccaaaaggctaaagaaaagttttcgtttgttcccctaacgaaatctcagagaagatgatatatatctataaaagtatcatctcatagattccatcttttctctattacatggagaagaaaaaagaagaggatcatcatcatcaacaacaacaacaacaacaaaaggagatcaagaacacagagacaaagatcgagcaagaacaagaacaagaacaaaaacaagaaatctctcaagcatcatcatcatcaaacatggcgaatctagttacgtcatcagatcatcat

SEQ ID NO: 148270 - DNA, 298 bp, Arabidopsis thaliana columbia
atttcgagatcctctcggcttgttcgttcttcgtgaacgatcccatctattgtttctcgctagtctcagattcgactaacttggatatctccgatactgaagaagcctccttcttctttttccgctcttcccgatgccgatcgataagatcttcaaagatgatgctagtgaagagaagggagaacgtgcgaggatggcatcatttgttggtgcaatggctatcagtgatctggttaagtctactttagggccaaagggcatggatagaatcttgcaatctactggtagaggtcatgcg

SEQ ID NO: 148271 - DNA, 294 bp, Arabidopsis thaliana columbia
ctctttctctctctctccttcaagttgctgcaatccgttgaaaacccaataaacccccaattttccatttctcataaagttcacatttttccttcttcttcttctgccaattctctgattccctcgtttcaatctccgttttgctttgcctatcagataaatttcttcttgctttcctttctatctcataacgataagttgaattaatctttgcgtcttagttcatcagtagagagagtagggttttttccgcttatttttagggaatttcattttgttggaggtgagaatctt

SEQ ID NO: 148272 - DNA, 294 bp, Arabidopsis thaliana columbia
ctcgagttgatatgtctagtgctaaagatatgtcaactgaccaaaacgcagctccttttaacggtgttgcccaatgcaccaccgtgcgagttacaatgggacaatccttcaccgaatataacgatgcttctgccactattgacaaagcggtgaactatattgtggaggctgtaagcaagggagcaaagctagtgtcgttcctggaggggtttatcgggggctatactggaggttataggttcggtttaacggttggcgttcataacgaagaacgtcgtgatgagtgtcggaagt

SEQ ID NO: 148273 - DNA, 456 bp, Arabidopsis thaliana columbia
  unsure (1)..(456): unsure at all n locations
aacaaaatttgttatctctctacccttaaataaagaccctcttcactcctttntgatccgtaaatgtttcacgagagcaagaacaaggtggatgggatggagatggagaaaggaaaaaaagagagtgggtcgagaaaaggacttgagttaacgatgagagttttggctttggtcctaacaatggtagctgcgacagtacttggtgttgcgaaacaaacaaaggttgtgcctataaagcttattcctactttacctcctcttaatgtctctacaaccgccaaagcctcttacttgtctgcttttgtgtacaacatttctgcaaacgcgatagcttgcggttacaccgcgatctcaatagtgattgtgatgatcagcaaaggcaaaagaagcaaaagtttgttgatggcggtcttgataggagatcttatgatggtggctttactgtttttcagcact

SEQ ID NO: 148274 - DNA, 460 bp, Arabidopsis thaliana columbia
  unsure (1)..(460): unsure at all n locations
aaaaaaagcaaagaacactngaacgttnnctaganagagatggaagggaaagaagaggatgtgcgagtgggagctaacaagttcccggagaggcaaccgataggtacatcggctcagacggacaaagactacaaggagccaccaccagctccatttttcgagccaggcgagctgagttcgtggtccttctacagagccggaatcgccgagttcatagccaccttcctgtttctatacataacagtattgacagtgatgggagtgaagagagcaccaaacatgtgtgcctctgttggaatccaaggcattgcttgggctttcggtggcatgatctttgcccttgtctactgtactgctggaatctctggtgggcacataaacccagcggtgacatttggtctgttcttggctcgtaagctgtcattgacgagagctgtcttttacatcgtgatgcaatgtc

SEQ ID NO: 148275 - DNA, 388 bp, Arabidopsis thaliana columbia
acccgtactggacttcgccaagggagtcatgatgacttaggtaattgtcctagctacagccccaggagtgaggacaattgatcctgaccttgcacagaggcatatatacatggcatatttacctttggctcacatccttgagttagcagctgagagcgtaatggctactattgggagtgctattggatatgggtctcccttgacgctaacggatacttcaaacaagataaaaaagggtacaaaaggagatgtcacagcactcaagcccactataatgacagctgttccagccattcttgatcgtgtcagggatggcgtccgcaaaaagggtgatgcaaagggcggatcgtcaaagaacatggttgactttgcatatgctcggcgatta

SEQ ID NO: 148276 - DNA, 464 bp, Arabidopsis thaliana columbia
caaaacccaattagccggagatggccgcatctcactcgttgctgcagctgcttcttccatcatgggttctctggtggctcccggtatccatcccggttcaggtcggttcacagccgtgttcggtttcggaaagaagaaggcagctcccaaaaagagtgccaaaaagacggtgactacggaccggcctctttggtacccaggcgccatttctactgactggcttgatggttccttggttggagattacgggtttgatcccttcggtttaggcaaaccggccgagtatcttcaattcgatatcgattcactagaccagaatctggctaagaacttggccggagacgtgatcggaacccgtacggaagctgccgacgccaaatcgacgccgtttcagccgtacagtgaggtgttcggaatccagagattcagggaatgcgaactcatccacggacggtgggcgatgc

SEQ ID NO: 148277 - DNA, 288 bp, Arabidopsis thaliana columbia
  unsure (1)..(288): unsure at all n locations
aatttctatcttccatttccatctgatgaancattgtcgatgtctttgagaactcgagcatgggcgtggtcttggcttctacttggccggaaccctagatcttcattttctcggcagatatctactctcgattcctcaacatcaacatttcccagaagaatctccgggtactactcctcctccttctttcccggaaatcaaacgccatggatctcatctcagaggtaccgcttcttctcctcaagcacaatgtcaccatcggaagctgatagagtagtgagagaactt

SEQ ID NO: 148278 - DNA, 457 bp, Arabidopsis thaliana columbia
  unsure (1)..(457): unsure at all n locations
cgtccgcgatgacgtctatggaaaaagaggagagatcngtcgncagatcgttgaggcttgtgagaattggggcatcttccaagtggtcgatcacggcgtcgatactaacttagtggcggatatgactcgtctcgctcgtgacttctttgctttacctccggaagacaagctccgtttcgacatgtccggtggtaaaaaaggaggattcatcgtctctagtcacctccagggagaggctgtgcaagattggagagagattgtaacgtatttctcgtacccggtgagaaacagagactactcacggtggccagataagccggaaggttgggtgaaagtgacggaggagtatagtgagaggcttatgagtttggcttgtaagcttcttgaggttttgtctgaagctatgggtcttgagaaagagtctcttaccaatgcatgcgtcgatatggaccaaaag

SEQ ID NO: 148279 - DNA, 462 bp, Arabidopsis thaliana columbia
gcctatttgggggatcatcaaccttctatcaactccatggatccttacaagtatcgtccttgaagcgcgtacaacgccccattctacaccacaaacggtggtgctccagtctccaacaacatctcttccctcaccatcggagaaagaggtccggttcttcttgaggattatcatttgatcgagaaggttgctaatttcaccagagagaggatccctgagagagtggttcatgctagaggaatcagtgctaagggtttctttgaagtcacccatgacatttcaaacctcacttgtgctgattttctcagagcccctggtgttcaaactccggttattgtccgtttctccaccgttgtccacgaacgtgccagtcctgaaaccatgagggatattcgtggttttgctgtcaagttttacaccagagagggaaactttgatcttgttgggaacaacactccggtg

SEQ ID NO: 148280 - DNA, 431 bp, Arabidopsis thaliana columbia
attaaatacaaaaaataaaaatccttttaaattattcttatcttcaaccaagaatgggagaggtccattaaggtcccaaagttgcacacgagaagaagccggctgccaccgtagtcccagttgagactactgacggcaagccaaagagcggcggaggagattccgcggcagcagcagcaccaccggtcgccgcggttgtctctgcctttgtttacaaagtggatatgcactgtgaaggctgcgctaagaagataaagcgaatggttaagcactttgatggagtgaaagatgtgacggcagatactggtggaaataagcttttggtggtcggaaagattgatccagtgaaactccaggagaagttggaggagaaaaccaagagaaaggtggttctcgcgaatccaccgtcaaaggtagagggacctgttgct

SEQ ID NO: 148281 - DNA, 258 bp, Arabidopsis thaliana columbia
  unsure (1)..(258): unsure at all n locations
ggggcgccaccagaagaagcagcatcaaaccagaancaccancaagactgcgggcagctgaaaacgagtcttcgatggggcttgtgggacgggaaccagcacctgatggatctattaaagtcgcaccatctcccagctggtgcttactcggctactgcgggggcaagctgtaaaggcggagcttaagcggttctcaccctctgcctatgcttggttcgagactgcgatcacctttctacttacaagaaccctgaggag

SEQ ID NO: 148282 - DNA, 460 bp, Arabidopsis thaliana columbia
  unsure (1)..(460): unsure at all n locations
ctctccctttcctctttcgtctcctacgngtanataccttgcaaaaaatcaagtcttttttggtgtttaaatcacccatttttgtcaatctgtttttcgagcaaaacaccaggaggaaaccaaaaagctagaggctttgtggagtgagaagaagagtctcagtgaaaacagaaagcagcatttgagattccactgttaatctttgaattaaaaatgagtgcagcagctacaatgcctatgccccgagaagcgtctaattacgatgagatctctatgcaacagagcatgctcttctctgatagtctcaaggatctgaagaatctgagaacacagttgtattcagcagctgagtatttcgaactatcctacacaaacgatgaacaaaaacagatagtcgtggagacactgaaagattatgcaataaaggctctggtgaatacagttgaccatttggggtctg

SEQ ID NO: 148283 - DNA, 457 bp, Arabidopsis thaliana columbia
acgttaccgagtatgatgcaatcgcataggttatttgcctaagatggtatatgactactatgcatctggtgcagaagatcaatggactcttcaagagaacagaaacgcttttgcaagaatcctcttccggcctcggattttgattgatgtgaacaaaattgatatggcgactaccgtcttggggttcaagatctcgatgccgatcatggttgctcctactgcctttcaaaagatggctcaccctgatggggaatatgctacggctagagctgcgtctgctgctggaaccatcatgacactatcttcatgggctacttcaagtgttgaagaagttgcttccacagggccaggaatccgattcttccagctctatgtatacaagaacaggaaggtggttgagcagctcgtgagaagagccgagaaagctgggttcaaagccattgctctcactgtagac

SEQ ID NO: 148284 - DNA, 453 bp, Arabidopsis thaliana columbia
catgctcgagggctctagcagccgcttgcgtgatgagtgacgaacgccgcacgcaaaaacagtcttatgacaatccaggggcgcaactaacacggcataggcataggattcggcaaccaggcgggtccgatataccactcggagatggctgcagcaaagaacaaaggaactgtgaatcagcattaccagctaacaactggcataggaagacgacgcgctaatgtgataaacgacacaacagagcaaatacatccatggagatggagactctatctagggctagccaccgtcccaggtatactcatgttcctcggtggactcgttatgcccggaacacccaacagtctcgacaagcaagggaagctagagaaggctaaagccgtgctgatcaaaggacgtggcacaaacaatataaaagctcgactgtcggatcttgccgaagacagtgacgct

SEQ ID NO: 148285 - DNA, 466 bp, Arabidopsis thaliana columbia
attttctcgagaaaaagaaaatgtgattatccaatcgattttttcgcagaagaagacgaaagagagaagaagagaaagagattggaaatcatggcgaatgtagtgggacagctaaaacgaggaatctcgagacaattctcaactggatcgcttcgtcgtacgcttagtcgtcaattcacgcgtcaagcttcacatgatcctcgccggaacaatatgcgatttagttttggtcgacaatcgtctttagatccgattcgtcggagtcctgatggttctaacggtccgcagcttgctgtaccggataatctcgacgctactatgcagcttctatttgtggcttgtagaggtgatgttgaaggtgttcaggatctgcttgatgaaggtattgatgttaatagtatcgatcttgatggtcgtacggctcttcatatcgctgcttgtgaaggtcatgtcgatgttgtcaagc

SEQ ID NO: 148286 - DNA, 440 bp, Arabidopsis thaliana columbia
aacaaaaccaaactagaatctttgacaaaaaacgtacctttaagactcagagactatcaatgttcagtctccacgctgcttgaaactgaagcagagaagcaaagagatgtcttttgaggagttcacgccgttaaacgagaagtctcttgtagactacatcaagtcaacacctgctctctcttccaagatcggagccgacacgtccgatgatgatttggttatcaaagaagttggagatggcaatctcaatttcgttttcatcgttgatggatcctatggctctcttgccatgaaacaggctcttccatatattcgctgtatcggtgaatcatggccaatgacgaaggaaagagcttatttagaagcaacaactttgcgaaagcatgggaatttatcacctgatcatgttcctgaagtctaccattttgacagaacaatgg

SEQ ID NO: 148287 - DNA, 459 bp, Arabidopsis thaliana columbia
  unsure (1)..(459): unsure at all n locations
atccatactcatcataacttcaacctcagcncctaactactaaaaccctnttactataaatggtacgtacacgtaccacttctgctcctcaaattcatcaaacccatttctattccaactcccaaaaatggcgattcgtcttcctctgatctgtcttcttggttcattcatggtagtggcgattgcggctgatttaacaccggagcgttattggagcactgctttaccaaacactcccattcccaactctctccataatcttttgactttcggttaaaatattttactttgccattcccaactctctcacttatttttgttcttaatgttagaaatacatgtttgttctgaatttatattatgaatttatattatggttttcactagtgttagaaatacatgtttgccattccattcccaactctctccataattaactgttttttttctttcttttct

SEQ ID NO: 148288 - DNA, 454 bp, Arabidopsis thaliana columbia
  unsure (1)..(454): unsure at all n locations
gaaaaacatcacaaaagagatctgnggnttggaatggatcaccatggaaaaagtagaggtacgaccaatttataaccatccgctgttaccttttactcgtttttcctacaaggcttgtaaagggtgtgggtatgttggttacatatatggaggctaccattgcaatgagttggggtgtgaatctgtgtttcataaagagtgtgccgacccgttaccagaaatcaaccactattctcatccagaccatcctctaaagctcctcataaatgtcgaaccacttgcttcttgtagccagtgtccatcttcgtttgaaaatggttatctttgttcgatttgtgacttcaagttggattttcgttgcgcgacgaggttgcctttggaatttattcttgaagaatccactgtccacgagcatccgattcagctctctgatggaacccgtgacggttttgtg

SEQ ID NO: 148289 - DNA, 251 bp, Arabidopsis thaliana columbia
  unsure (1)..(251): unsure at all n locations
gttctggcccaccacagggcgtgtggacatggattanttagacaggaaactggtgtgcactctcctcccagaggaagaacaagtcgcagctgcagtgtctgcttgattactgctctgtcccattgtgttgtgtccctttctctcaccacgcactcttctctttcacattctgtccatagtgttctcattatacgctttctgtctcttactctattatttcattcgaatacatcttctataaattatataaa

SEQ ID NO: 148290 - DNA, 425 bp, Arabidopsis thaliana columbia
  unsure (1)..(425): unsure at all n locations
cttttgagagagagaagaagaaaaatgcattagagtgagaatgaaggngtcgaaggtaacaccttcgttttcactggaggtcttggcttccacggtgcagctctctgcttagagctcgttcgtcgtggtgctcgccaagttcgctcttttgacctccgtcactcttctccttggtccgatgatctcaaaaacagtggcgttcgctgcattcaaggtgatgtgactaagaaacaagatgtggataacgctttagatggagcagactgtgttttgcatcttgcttcttatggtatgtctgggaaggagatgcttcggtttggtcgttgtgatgaggttaacatcaacgggacttgtaatgtcttggaagctgcgtttaaacatgagattacaagaattgtgtattgtagcacttacaatgttgtgtt

SEQ ID NO: 148291 - DNA, 465 bp, Arabidopsis thaliana columbia
cttttcgtcatcgtaatcccgcggtgaagtagactatataagcattgagagtgaaaagaaaaacaatgtcgcagctgttatcttctcctccaatggcggttttctccaaaaccttcataaaccataagttttcagatgctcgttttctctcttctcactcaattctcacctccggtggattcgccggaaaaattattcctttaaaaccgacggcgaggttgaaattaacggtgaagtctcgacaaagtgattactttgagaaacagaggtttggtgactcgtcttcttcgcaaaacgctgaagtatcttctcctagattttacgtgggtcattcgatttacaaagggaaagctgctcttacgatagaaccacgagcaccagagtttgtggctttggaatctggtgcgttcaagctgacaaaggaaggttttttgttgctccaatttgctcctgcagctggtgttc

SEQ ID NO: 148292 - DNA, 434 bp, Arabidopsis thaliana columbia; identical to SEQ ID NO: 130416
  unsure (1)..(434): unsure at all n locations

SEQ ID NO: 148293 - DNA, 384 bp, Arabidopsis thaliana columbia
  unsure (1)..(384): unsure at all n locations
gacgatgaaggttgaaaccatnagnaaagaaaataaattttcatcttcgccaactccaaatggggggcatactttccaactctggatgtacgatcacatccttcctccagtttacacagtagcctttctcttctacaccaaaaatgatttgatctctcaagaacacacttcccacaaactcaagacttctctgtctgaaaccctgaccaagttctaccctcttgccggaagaatcaccggagtaaccgtcgattgtaccgatgaaggagctatctttgtcgatgctcgtgtcaataactgtcctctcactgaatttctcaagtgccctgatttcgacgccctccaacagttgctttctctagaatgtgtagacaacccatacgt

SEQ ID NO: 148294 - DNA, 452 bp, Arabidopsis thaliana columbia
  unsure (1)..(452): unsure at all n locations
gtcgtctcgttcaagcacatatgagatgaatgaatatgctgccgcaattcattacggcactggagcaattgctggtttttttagtaatgatgctgncacagttggcgatttagttgtcaaggatcaggagtttatcgaggcaaccaaggagcctggtataacatttgttgtagctaaatttgatggtatccttggtcttggattccaagagatctctgttggaaaagctgctcctgtttggtacaacatgctcaagcaaggccttatcaaggagccggttttttcattttggcttaaccgtaatgcagatgaagaagaaggtggtgaacttgtatttggaggtgttgatccaaatcatttcaagggcaaacatacatatgttcctgtgacacaaaagggctactggcagtttgacatgggtgattgtcttatttggcggngcacccactggg

SEQ ID NO: 148295 - DNA, 452 bp, Arabidopsis thaliana columbia
gtgatgaagggcattccggttatagcagagtggctttatttcaggccccgaagcttacactggggctaatgtattcccatggatgctcacagtcgctgcaactaacatagaccgtaccttttatgcagacatgacttttggaaataacattaccataattggtcaagctcaatatacaggtaaggaagtatctgctggtttagtttacattgaacactataaaaccgacacctctagcatgctgggaaaagttgtcctgacgtttgtgaaagaagattgggaaatggcaagcgcattggcgactacaactatcaacaaggcggcggggctgatcgtggcacgaagtggtgattatcaaagtgatattggctataatcaaccattcatctacgtagactatgaagtcggagctaagattctacgatacatccgctcgtcaagttctcccacga

SEQ ID NO: 148296 - DNA, 438 bp, Arabidopsis thaliana columbia
  unsure (1)..(438): unsure at all n locations
aacaaaaccaaactagaatctnngacaaataactaacctttaaaactcagattntatctctcgtcagtctccacgctgcttgaaactgaagcagagaagcaaagagatgtcttttgaggagtttacgccgttaaacgagaagtctcttgtagactacatcaagtcaacacctgctctctcttccaagatcggagccgacaagtccgatgatgatttggttatcaaagaagttggagatggcaatctcaatttcgttttcatcgttgttggatcctctggttctcttgtcatcaaacaggctcttccatatattcgctgtatcggtgaatcatggccaatgacgaaagaaagagcttattttgaagcaacaactttgagaaagcatggaaatttatcacctgatcatgttcctgaagtctaccattttgacagaacaat

SEQ ID NO: 148297 - DNA, 414 bp, Arabidopsis thaliana columbia
  unsure (1)..(414): unsure at all n locations
aagaagaagaaaaaaaaaaaaaaaacgaactacgtaanattacgaagacgaagaaacaaagataaaggctttagatttagctgcaggggaggtggcggaacaaaaccctaatcctaattttccccgaatatgccatttttgaggattgtgagacttctcttacctggaatcagggttttgattagaagatctctaatttggttgttgtagatgcatctccgtgaaatcattccctcttggatctaccagttatttggttgcatgggtacagaggttgttttggatgctgcaataaaccaccgcttatagttgcagtggatgagccgtctaaagggttaaggattcaaggtcgtttagtgaaaaagcccaacgtatcagagggacttctggagcacaagcacctgcgagatggat

SEQ ID NO: 148298 - DNA, 457 bp, Arabidopsis thaliana columbia
  unsure (1)..(457): unsure at all n locations
accagatctgctttcgaagacgaatctagcnattagccatggacaaaccgtacggatacgcgagcgtgagcatgagcggcatagatcgttccgccggaaaggatattgatcttgagatgggagtcggagaagcgacgctttatcctgggctaagttacggcgagaatcagctccgatggggatttattcgtaaggtctatgggattctctcagctcagcttcttcttacgacgcttatctccgccgtcgttgttcttaatcctcctgttaacgatctcttgaccggatctcctgggattcttctcttcctctgcatcgttcccttcatcttaatctggcctctgcacatttaccaccagaagcatcctgttaacctgatcctccttgccctcttcactgtttcattgagtttcactgttggtgtcagttgtgctatgacagaaggacgaattgtgct

SEQ ID NO: 148299 - DNA, 465 bp, Arabidopsis thaliana columbia
ccacgcgtccgattctcttctctctatctctctcgcgtacgccgtactgtagcgaccaattgaatccacgaggagagctcagtaaatactatggcgaccaacgaacccgagcacgagcacagagacgaggaagaggccggagctaacgaggatgaggacaccggagctcaggtcgctccgatcgttaggcttgaggaggttgccgtcactaccggcgaggaagacgaagatgccgtccttgatctgaaatcgaagctttatcgattcgataaggatgcgaatcagtggaaggagagaggagctggtactgtgaagttcttaaagcataagaacactgggaagattcgtctcgttatgaggcaatctaaaactttgaagatctgtgctaatcacttcgttaaatcgggcatgagtgttcaggaacacgttgggaatgaaaagtcatgtgtgtggcacgctcgtgac

SEQ ID NO: 148300 - DNA, 458 bp, Arabidopsis thaliana columbia
aatctctcaaatctctcaaccgtgatcaagaagtagatcttcgttaagactctcaccggaaagactatcaccctcgaggtggaaagctctgacaccatcgacaacgttaaggccaagatccaggataaggaaggtattcctccggatcagcagaggcttatcttcgccggaaagcagttggaggatggccgcacgttggcggattacaatatccagaaggaatccaccctccacttggttctcaggctccgtggtggtatgcagattttcgttaaaaccctaacgggaaagacgattactcttgaggtggagagctctgacaccattgacaacgtcaaggccaagatccaagataaggagggtattcctccggaccagcagaggttgatcttcgccggaaagcaacttgaggacggcagaactttggcggattacaacatccagaaggagtctacgct

SEQ ID NO: 148301 - DNA, 460 bp, Arabidopsis thaliana columbia
  unsure (1)..(460): unsure at all n locations
ctcattctctgattcggtccatcgatcacataggctcaaagcttaatcgnttcctttcttcgtattctagccatggctcagaccgttgtcctcaaagttggtatgtcatgccaaggctgcgttggtgccgtcaatagagttttaggcaaaatggaaggggttgagtcatttgacattgatatcaaggagcaaaaggtgacagtgaaaggtaatgttgagcctgaagcagttttccaaacagtttcaaagaccggaaagaagacttcttactggccagtggaggctgaagctgagccaaaagccgaggctgatcctaaggtcgaaaccgtgactgagactaaaaccgaggctgagactaagactgaggctaaggttgatgcaaaagctgatgttgaaccaaaagccgcagaagccgagactaagccatcacaagtttaagtatactaacgatgaaaaggaa

SEQ ID NO: 148302 - DNA, 449 bp, Arabidopsis thaliana columbia
  unsure (1)..(449): unsure at all n locations
cacacatctcacatccccctatctctcncatacgttaaacgttnnagnnccccaaaaaaatagcaaaagaactaaaagaaaaaccctagaagccgaagaatctcctactcgttgtcgatcggatcacctaactaattactcgttgataatcattatatcgagaaatatgattaattttgaggccacggagctgagattagggctaccgggtgggaatcacggaggagaaatggctggaaaaaataatggtaaaagaggattttctgagactgttgatctcaaactgaatctttcatcgacggctatggattcagtttccaaagtcgatgtagagaatatgaaggagaaggtcgtgaaaccaccagccaaggcacatgttgtgggatggccaccggcacgatctttccgcaagaacgtcatgttcggccaaaaaccgaccaccggagatg

SEQ ID NO: 148303 - DNA, 368 bp, Arabidopsis thaliana columbia
  unsure (1)..(368): unsure at all n locations
gaaaaaaaagctattgtttgaaagatgaagtagnnttactatggcaaaggatgtggaagccgggcccggagaaggatttcagacaagagactatcaagatccgccaccagctccgtttattgatggagcggagctaaagaagtggtctttctacagagcagttatcgcagagttcgtagccactctcctcttcttatacatcaccgttttgacagtcatcggttacaagattcagtccgatactgatgccggtggcgtagattgcggcggagtttgaatcctcggtatcgcttgagccttcggtggtatgatctttatgctgcgctactgcaccgcctttatctatgggggtcacattaacccagcgg

SEQ ID NO: 148304 - DNA, 383 bp, Arabidopsis thaliana columbia
  unsure (1)..(383): unsure at all n locations
gacgatgaaggttgaaaccattagnaaagaaattannatgccatcttcgccaactccaaatggtcggcaaactctccaactgtgaatgtacgatcacatccttcctccagtttacacagtagcctttctcttctacaccaaaaatgatttgatctctcaagaacacacttcccacaaactcaagacttctctggctggaacccttgaccaagttctaccctcttgccggaagaatcaccggagtaaccgtcgattgtaccgatgaaggagctatctttgtcgatgctcgtgtcaataactgtcctctcactgaatttctcaagtgccctgatttcgacgccctccaacagttgcttcctctagatggtggagacaacccatac

SEQ ID NO: 148305 - DNA, 455 bp, Arabidopsis thaliana columbia
tcttcttcttcgatcaaaaaacctcgtgcttcatacaatggagaccagcatcgcgtgctactcacgtgggatccttcccccaagtgtctcttctcaacgatcctctacattggtctctcctccttcctactccacatcctccagcttcaagcgtctaaaatcgagctcaatcttcggagattcactacgattagcaccaaaatcgcaacttaaagccacaaaagctaagagcaatggtgcttcaactgtgaccaaatgtgaaattggccaaagcttggaagagtttttggcacaagcaactcctgacaagggattgagaactttgctgatgtgtatgggagaagcattgagaacaatagcttttaaagttagaacagcttcttgcggtggaacagcttgtgttaattcctttggtgatgaacaactcgcttgtgatatgcttgctgataagcttc

SEQ ID NO: 148306 - DNA, 455 bp, Arabidopsis thaliana columbia
  unsure (1)..(455): unsure at all n locations
cagcaaagcctctcgttgctagaggaancatacatatggtgtttgtgaagtccaccaagtcgaatgcttacttcaagaggtaccaagtgaagttcaggagaagaagagatggaaagactgactacagggcaaggatccgtcttatcaaccaagacaagaacaagtacaatactcctaagtatcgttttgttgtccggtttaccaacaaagacatagtggcacagattgtatctgcaagcattgctggtgacattgttaaagcttctgcttacgcacatgaactgcctcagtatggtctcactgttggtcttacaaactatgctgcagcttactgtactggccttcttttggctcgccgtgttttaaagatgttggaaatggatgacgagtatgagggaaacgttgaggccactggagaagacttttccgttgagccaactgattcaaggagacct

SEQ ID NO: 148307 - DNA, 442 bp, Arabidopsis thaliana columbia
caggcagcccatggtacggatccgactgagtcaagtacttgggtccattctctggcgagtggccgagctaccttaccggagagttccccggagactacggatgggacaccgctggactttcagctgatcccgagacattcgcaaggaaccgtgagctagaagttatccacagcaggtgggctatgctcggagccctaggctgcgtcttccctgagcttttggctaggaacggagtcaagttcggagaggcggtttggttcaaggccggttcacagatctttagcgatggaggactcgattacttgggaaaccctagcttggtccacgctcagagcattttggccatttgggccactcaagttatcttgatgggagctgttgaaggctacagagtcgcaggaaatgggccgttgggagaggccgaggacttgctttaccccgg

SEQ ID NO: 148308 - DNA, 456 bp, Arabidopsis thaliana columbia
  unsure (1)..(456): unsure at all n locations
cttttagtaacaatggttnctnctnctntaacctagcttgtgttcttgggttgtctcctcctgctcacattcacggacaaccttgtggctggaaaatctggcaaagtgaagctcaatctttactacgaatcactttgtcccggttgtcaggaattcatcgtcgatgacctaggtaaaatctttgactacgatctctacacaatcactgatctcaagctgtttccatttggtaatgccgaactctccgataatctgactgtcacttgccagcatggtgaagaggaatgcaaactaaacgcccttgaagcttgcgcattaagaacttggcccgatcagaaatcacaatactcgttcatacggtgcgtcgaaagcgatacgaaaggctgngaatcatgtgttaaaaactctggacgtgagaaagcaatcaatgattgttacaatggtgatctttctaga

SEQ ID NO: 148309 - DNA, 371 bp, Arabidopsis thaliana columbia
  unsure (1)..(371): unsure at all n locations
gaaacccctaaacaagggatcgttaccgctttcttcgtacccttctcctcaatggggttaggtcccctcaaatcnngaagtgatccgttaccgcaacccgaaatcgatcgagccgtnngagattaactccgtcnaacgatannatccgttgatcgatgtnttcgaggaacaanggcgattcacnggtggtaaccttccaaggaacaccaatcggagtttcaatggataacacgagattggcgatagcagcgattggtaaactcatgtttgctcaattctcagagcttgtgaatgatttctacaacaatggtttaccctcgaatctaaccgcttcgaggaatccaagtttggattatggattcaagggagct

SEQ ID NO: 148310 - DNA, 458 bp, Arabidopsis thaliana columbia
  unsure (1)..(458): unsure at all n locations
ggaagaagctccagtggcattatactcaacannttagatgagaggtgggagtctatggcagctggggcaatcaataacccgtcgtgttgctcaatctgacaagaaggttgtgtcacgtcgctactttgcctctgaagctgacctgaaaaagactgctctttacgacttccatgttgcccatggaggaaagatggttccttttgctggttggagtatgccaattcagtacaaagattcgattatggactcaacggttaactgcagggaaaatgggagtttgtttgatgttgcacatatgtgtggtttgagccttaagggtaaagattgtgttccttttcttgagacacttgtggttgctgatgtggctggtttggctcctggaactgggagcttaactgtgttcacaaacgagaaaggaggtgccattgatgactcggtgattaccaaagtgacagatg

SEQ ID NO: 148311 - DNA, 439 bp, Arabidopsis thaliana columbia
  unsure (1)..(439): unsure at all n locations
cggacgcgtgggtttttcttcaacaccttgaactacccataccgngaaggngctgacttcgtgcgcggataccctttcagtctccgtgagggtgtttccaccgctgtttcccacggtctgtggctcaacatccctgattacgatgcccctacccaacttgtgaagcctaaggaaaggaacacaaggtatgtggatgctgtcatgaccatcccaaagggaactcttttccctatgtgtggtatgaacttggcctttgaccgtgagctcattggtccggctatgtactttggtctcatgggtgatggtcagcctattgtcgctacgacgatatgtgggctggatggcgtatcaaggtgatctgtgaccatttgggattgggagtgaagacaggttcgccctacatttaccacagcagagccagcaacccgtttgtgaactt

SEQ ID NO: 148312 - DNA, 453 bp, Arabidopsis thaliana columbia
gaagaacaatggcttcctctatgctctcaatcgctactatggttgcctctccggctcaggccactatggtcgctcctttcaacggacttaagtcctccgctgccttcccagccacccgcaaggctaacaacgacattacttccatcacaagcaacggcggaagagttaactgcatgcaggtgtggcctccgattggaaagaagaagtttgagactctctcttaccttcctgaccttaccgattccgaattggctaaggaagttgactaccttatccgcaacaagtggattccttgtgttgaattcgagttggagcacggatttgtgtaccgtgagcacggtaactcacccggatactatgatggacggtactggacaatgtggaagcttccctggttcggttgcaccgactccgctcaagtgttgaaggaagtggaagagtgcaagaaggagt

SEQ ID NO: 148313 - DNA, 455 bp, Arabidopsis thaliana columbia
  unsure (1)..(455): unsure at all n locations
gaagaatcaaatggcgatggctatggaacgtancttcttctccccttcatcttacgtctgtcgtccttgtcaagctaggggatccacatcttccagagtttccatggcttctacgattcgctctgcgactacagaggttacgaatggaaggaaactgtatatccctcccagagaggtgcatgtccaagtcaaacattcaatgccgccacaaaagttagagatctttaagtctttagaaggatgggctgatgaaaccctgttgacttatttaaaacctgttgagaaatcgtggcagcctaccgattttcttcccgaacctgagtcggaaggattctatgaccaagtcaaggagctaagggaaaggtgcaaggaacttcctgatgactattttgtggtgcttgttggggatatgatcactgaagaagcactttctacttaccagaccatgttgaaca

SEQ ID NO: 148314 - DNA, 440 bp, Arabidopsis thaliana columbia
  unsure (1)..(440): unsure at all n locations
gttgtattgttactcgatggaggaagtgaatgnttttagacgacggccacaccnggttgagggcggtttctttgtggtgacagattacaaagaaaagatagttttcaagatcgacggttgtggagttcttggaaccaaaggagagttagttctcagagatagtgatggcaacgatttgcttctcattcacaaaaagggaggagtggtgcatgctttgagcattcataacaagtggaaaggttatagttacgactaccaaggaagtcctaaaccgtttttcacgtagagggatcccaaacactcttgcttctgcataaccagttcaatcctgatctcggttggaccggggaattgctacttcgatgttaaagggtatttcccggatagggatcgtagcatcgttgattccaaaggaaatgtgattgcacaagttaaagaat

SEQ ID NO: 148315 - DNA, 455 bp, Arabidopsis thaliana columbia
  unsure (1)..(455): unsure at all n locations
aaagatttaatctttcattggaatctgngaggatcntangataagcgaatatgggttcaatctctgtatccaattctatgcccataactcgacttccactacttacatcactctatcatcaaagcttccttccgatttcttcttcatctttctctcttcttcctctctctaatcgtcgtcgctcctccactttttcaccgtcaatcaccgtctctgccttcttcgctgctcctgccagcgttaataataataactctgttccggcaaaaaatggaggttacacagttggggatttcatgactccgagacagaatttgcacgttgttaagccctctacgtcggtcgatgatgcgttggaacttctggttgagaagaaagtcacgggattgcctgtaattgacgataattggacactggttggtgttgtttctgattacgatttgcttgcattggac

SEQ ID NO: 148316 - DNA, 444 bp, Arabidopsis thaliana columbia
cgctgccgcactatcgtctcctacctccttagcctacaagctttcacgcgggagctcaacatcagccatggcggaacagactgagaaagcttttcttaagcagcctaaggtcttccttagctcgaagaaatctggaaagggaaagagacctggaaaaggtggaaaccgtttctggaagaacattggtttgggcttcaagactcctcgtgaagccattgatggagcttacgttgacaagaaatgccccttcactggaactgtttccattagaggtcgtatcttagctggtacttgccacagtgcgaaaatgcagaggaccattatcgtgcgaagggattaccttcactttgtgaagaagtatcagaggtatgagaagaggcattcaaacattccggctcatgtctcaccatgcttccgtgttaaggaaggagaccatatcatcat

SEQ ID NO: 148317 - DNA, 457 bp, Arabidopsis thaliana columbia
  unsure (1)..(457): unsure at all n locations
ggtactggagtatcaacaatggaagnngctcaagtgagttcaagggtggntccacccagatggggttcttataccacgtgttggaaagtatcttgcggcttcatcagcaaatcttgtcaatgtactagatgtagaaacacaagctattcgacactctttacaggggcatgctaatccgataaactcggtttgctgggatccctctggtgacttcctggcatctgttagtgaagatatggtaaaagtatggacgctggggacaggtagtgaaggagaatgtgttcatgagctaagctgcaacgggaacaaattccagtcatgtgttttccatccggcttacccctcgctgctcgtaattggttgctaccagtctttagaactatggaacatgtcagagaacaagacgatgacattaccagctcacgaagggctaattacatctttggctgtttcaact

SEQ ID NO: 148318 - DNA, 464 bp, Arabidopsis thaliana columbia
gcgtccgaacttctgtgtgtgtgggtgtgagtttcttatagtatattcagaaacaatgattgggttgtgggaagtataggaaaagcaaagagaacacgctcaaaatgctactagaggaggagcttctgttaagaagcaatctgctggcgaacttcgtcttcacaaagatatatcagagttgaaccttcctagctcttgttcaatatcttttccaaatggcaaagatgatttgatgaactttgaagtatccattaaacttgatgatggatattaccacaatggtacgtttgttttcacattccaagtctctcctgtgtatccacatgaagctccaaaagttaaatgcaaaaccaaggtttatcatcccaatatcgatttggaaggaaacgtttgcctgaacatcttgcgtgaagattggaaacctgttcttaacattaacacagttatctacggactctttcatc

SEQ ID NO: 148319 - DNA, 462 bp, Arabidopsis thaliana columbia
  unsure (1)..(462): unsure at all n locations
acaaatcttaaacgttnnactnngtgctgcacaatancatacctcaatggccgcctcaacaatggctgtctccttccctgccttcgccggtcaggccgacaagctttcccccgcggcatctgaagtccttggaagcggccgtgtgacaatgaggaagactgttgccaagccaaagggcccatcaggcagcccatggtacggatctgaccgtgtcaagtacttgggtccattctctggcgaatcaccgagctaccttaccggagagttccccggagactacggatgggacaccgccggactttcagctgaccccgagacattcgcaaggaaccgtgaactagaagttatccacagcaggtgggccatgctcggagccctaggctgcgtcttccctgagcttttggctagaaacggagtcaagttcggagaggtggtttggttcaggccggttcacagatcttc

SEQ ID NO: 148320 - DNA, 415 bp, Arabidopsis thaliana columbia
agagatctctgttggaaaagctgctcctgttagtaacatacatgctcaagcaaggccttatcaaggagcctgttttttcattttggcttaaccgtaatgcagatgaagaagaaggtggtgaacttgtatttggaggtgttgatccaaatcatttcaagggcaaacatacatatgttcctgtgacacaaaagggctactggcagtttgacatgggtgatgttcttattggcggtgcacccactgggttctgtgaaagtggctgttctgcgatagcagattctggtacatctttgcttgccggtccaacgactataatcaccatgataaaccatgctattggagcagctggagttgttagccagcagtgcaagactgttgtggatcaatacgggcagaccattttggatttactttt

SEQ ID NO: 148321 - DNA, 454 bp, Arabidopsis thaliana columbia
  unsure (1)..(454): unsure at all n locations
tatccctgagactattccgcccaatccagaggatangccacccctncctcctatgcaatggcttattggaatggttccacattcttttcctaccttcatgggggaatcagtcgaaaccagtagttctgctttatcagcggcaccacccattggttctagcttgaatgttcaaattgggtctccaccatcagagctatctgtatctttaggaagtgacgaatcagaacgacttcctggagggtttgttcacaatgcatcagaaaagccattgcaatcatccattcagttcccaaccatgagcactgatttgaatagtcaatacgacagttctgagctccctacaataccttatcaggagtgcatagaggattttggttctgaggagaacaatcttttggctgaccatgcagctcagaaccacgagctcgtttactctcaagcgtcgtcattgcag

SEQ ID NO: 148322 - DNA, 376 bp, Arabidopsis thaliana columbia
  unsure (1)..(376): unsure at all n locations
caaaagcgaaaaaacttncncncaagtttaataaccgtgaccaagangcagancnnnagggganacttttaccggaaagacggggcaccctcaaagaggaaagctccnacaccatcgacaacgttaaggccaagatccaggataaggagggcattcctccggatcagcagaggcttattttcgccggcaagcagctagaggatggccgaacgatggctgattacaatatccagaaggaatccaccctccacttggtcctcaagcaccgaggaggtatgcagattttcgctaaaaccccaacgggaaagacgattactctggaggtggaaagttctgacaaccaacgacaacgacaagggcaagatccacgacaaag

SEQ ID NO: 148323 - DNA, 361 bp, Arabidopsis thaliana columbia
  unsure (1)..(361): unsure at all n locations
ggtggaaaatgctgatgagtgnatggtaaatgacattgaagccctttacgacatctgggggagattacttaagcttaccactcctagctttggtgatctgaatcatcttatctctgcaaccatgagtggagttacatgctgtcttaggttcccgggtcagctcaactctgatctgaggaagctcgcagtgaacctcattcctttccctcgtctccactttttcatggttggttttgcccctctcaccttccgtgggtctcagcagtaccgtgcactcactgtccctgagctgacccaacagatgtgggattcaaagaacatgatgtgcgcagcagacccgcgccacgggcggtacctaact

SEQ ID NO: 148324 - DNA, 440 bp, Arabidopsis thaliana columbia
  unsure (1)..(440): unsure at all n locations
ctccgttaaaccctagcgattggaatatggatanactccaaatggctttcttaagtaaagttggaaggttattcagtcagaccagcagccatgtcactgcctctagctcgatgctacagagcatccgttgcatgtcttcatcaaaaatctttgttggaggtatctcctacagcactgatgagtttggcttaagagaagcttttagcaaatatggagaagttgttgatgcaaagattattgtggaccgtgaaacaggcagatctaggggctttgctttcgtaacatttacttcgactgaggaggctagtaatgccatgcaattggatggacaggaccttcatggtcgaagaattagggtgaattatgcaactgaaagaggaagtgggtttggaggaaggggattcggtggtcctggtggtggttatcgagcctcagatggt

SEQ ID NO: 148325 - DNA, 453 bp, Arabidopsis thaliana columbia
gtagtaactgcagatggaatacacacgcaggagtgagagagcacgaaagaggagctataaacaggagggtattaggagtagacgcgggcatgctcaacagagaagagagagaccaaaccaaggcagtagagaatgaagcgtgagagaagtgctgctggctggagaaagtgaaccatggattgccacaggactgaacggacaagatcgagaggatgacgtagggccataacaagacatgccacgaacaaaagtacagcagacatgctcaagaacaacggttgggaccagacggagacagaagacgaagatgtcgattgggaaaggactctctacgtccgaaagctcactcaaatcaatcacaatgacagttcagatgagtacgatgaatacaggacggccatgaacgactttgggccgagactggagaataccgctgaggagaaagtgaagcta

SEQ ID NO: 148326 - DNA, 440 bp, Arabidopsis thaliana columbia
  unsure (1)..(440): unsure at all n locations
tacagccgcatcatccttctcccttgtgcgatancgtttgcgtgagatttgtctgaaaagtagctaaccatgggtaaagagaagtttcacatcaacattgtggtcattggccacgtcgattctggaaagtcgacaaccactggacacttgatctacaagttgggtggtattgacaagcgtgtgatcgagaggttcgagaaggaggctgctgagatgaacaagaggtccttcaagtacgcatgggtgttggacaaacttaaggctgagcgtgagcgtggtatcaccattgacattgctctctggaagttcgagaccaccaagtactactgcactgtcattgatgctcctggtcatcgtgatttcatcaagaacatgatcactggtaccttccaggctgattgtgctgtccttatcattgactccaccactggtggttttga

SEQ ID NO: 148327 - DNA, 574 bp, Arabidopsis thaliana columbia
  unsure (1)..(574): unsure at all n locations
aattaaccgggtccgagcgccacgcgtcncnngcttcttcnntccaatcannatctcagnnagatttttaaataatgtaatatggcaacaannnaccctaaagtcggtacggcgtacattgtaccgnntcggtggcagagatccgtccggatcgtattcgtgggatggagctttnntacgccgacaccaactnaccagaaacncnngccgagagatttcaagaggcacgtcttgtactcgtgacgagaggagtgaatnncggtaaaccaaggtagagccacttacatctanncaaaggatcaangnnctttcaccgagtggatnntccgaaattcatggtgtcaacggagggtggatttcacnnagctcgggaatgggtacccggagggtgaagtcttatctatgtganntcgaagttcaaaagacccgagaactttatcaaagaaacatacanggacgcaggtgattttgtctatggcttaacgctggttgcgaacccacgaatggatctcagttttttattttgtactgagaaagacttcgtggctcgatgggaaacatgttgtgtttggtc

SEQ ID NO: 148328 - DNA, 459 bp, Arabidopsis thaliana columbia
  unsure (1)..(459): unsure at all n locations
gcagaagaacattttcgtgtcttgctctgcgggtaanntaggaccaactgcatccacagtgagtaatggagctccgtggttgatgactgtcgctgccagttatacggataggacgtttccggcgattgtccggatcgggaaccgtaaaagcttggtcggatcatccttgtataaaggaaaaagcttaaagaatctgcctttggcgtttaacagaacagctggagaagaaagcggagccgtgttctgtatccgggactcgctcaagagagaactcgtcgagggtaaaatcgtcatttgcttaagaggagccagcggcagaacggccaaaggagaagaggtgaaacggagcggaggagcagcgatgcttcttgtgagcacagaggcggaaggagaggagcttcttgctgatcctcacgttttaccggccgtttcacttggattttccgacggtaaaacctt

SEQ ID NO: 148329 - DNA, 458 bp, Arabidopsis thaliana columbia
  unsure (1)..(458): unsure at all n locations
ccaaaaaccacaacaaaacacttggcaaagctaaatancttcctcggcgcccaaatcctctttggggccgtggtttcttccgccggagacggtgaaaacttcgctagaaccatggaccggaaacttcttggtctccacaaaaaggagaaacttacccatttcaaagtctattggcacgatatcttaagcggtccgaacccaacctccatcatgatacaaccaccggttacaaacagttcctattttggagccatctccatgatcgacaacgctttgacggccaaagttccgatgaactccacggtgttgggtcaggcccaaggattttacgccggagcggcccaaaaggagttgggtttcctgatggcgatgaactttgctttcaagacagggaaatataacggaagcacgatcacgattcttggcaggaacacggcgttgtcggaagtcagagaaat

SEQ ID NO: 148330 - DNA, 346 bp, Arabidopsis thaliana columbia
  unsure (1)..(346): unsure at all n locations
gaacgacccacgcgnccgccggggaggaaaccacagcgngggaggagaatatatttttagccaccaccacccccacgaagcggggggcgtaaatttaggcaaggggcagacccccacggcccaagccaccaaggtcgcaccattcaccggctagaagacaaccgctaattacccgggcacccgcacggacaacaacgacattacttccatcacaagcaacggaggaagagtcagcagcacgaaggagcggccaccaatcggaaagaagaagatcgagactctataatacctaaccgaacaaagcgacgtagaaacggctaaagaaggagacaaccaaagccgaaac

SEQ ID NO: 148331 - DNA, 470 bp, Arabidopsis thaliana columbia
  unsure (1)..(470): unsure at all n locations
atttcccccaaattgggaatccaaaaccctagataacttcatgagagaattcttctccatctgaatgcatatgtcaaagctaatgaccagaaccagcggatcatcaagccccaacacgattccagaccaaatcgaatcaccaacaagctcaagatcggtgacgcagacgacaaacggatcgcaccaattcgtgatacaaggatacagtttagctaaaggaattggtgtagggaaacacatagcaagtgataatttctccgtaggaggttatcaatggactatcttcgtctaccctgacggtaaaaatccagaggataactcttcttacgtctctgtgttcatcgttttggctagtgaatgtactgaagttagagcgctttttgagctttctcttgttgatcaaagtggtaaagggaagcataaggttcatagccattttaatcgntcacttgatggtggtccttatacgc

SEQ ID NO: 148332 - DNA, 410 bp, Arabidopsis thaliana columbia
  unsure (1)..(410): unsure at all n locations
gaaaaaaaaaaataaagctgtgaaaaggtaataatttacatgaagnncacgggagtaggggncgagttttgttcgtgttagggaccatgctgcctccagntccagtcaaagcaagggtggtcaaaggttccggagaagaagtgaacgtaacgtgtgatgcgacgcagcttagttcatgtgtaacagcagtaagcacaggagcaccaccatctacagattgttgcggcaaactgaaggagcatgaaacttgtttgtgtacatacattcaaaatccgttgtatagttcgtatgttacttctccaaacgctcgtaaaacgttagcagcttgtgatgttgcttatcctacttgttgatgtttgtgatattactaaaacaagctattaatgacaataataataaaaatttaaatc

SEQ ID NO: 148333 - DNA, 433 bp, Arabidopsis thaliana columbia
gcgacacccctcctcgcgatgtctggttcatgagataaactcatctatgttgctgccatatacactggtaccgggcaagcgaagccagattacttagctactgtggatgtggaaccgagttcatccacatactcgagtgttatccacagattaccaatgccttaccttgaagatgaacttcatcactcaggctggaactcatgtagctcttgctatggtgattcttcttgcgagagacgttatctcatcttgccttctcttctgtctggtcgtatttacgtgatcgatacgaaaacaaacccgagggaaccatctttgcacaaattcgtggaccctgcagaggttttggagaagacggggttggcttatccgcatcagcctcattgcttagcttccggagacgttcttgtgtcttgtcttggagacgaagatg

SEQ ID NO: 148334 - DNA, 471 bp, Arabidopsis thaliana columbia
gccccacgcttccgctctgctcaaatggcgatggcggctctaacaataacttcttctgctataactctcctcaacaggcctttcttacctaaccggtgttccttcttctcctctgattcacaatctcctcttctccgattctctgcttctacctctgttcgttctcgttttccatccgcagccataagcgccgttgctcccaaatcggacataaataaaaatgaaactccaaagatcgaaatagaggaaactcaagtgttcgcgtgtcctgtttgctacgaaccacttatgaggaaaggaccttcaggtatcaacctacaagcaatctacaggtctggattcaagtgtggacaatgtaacaagacatattctagcaaagatgaatacttggatcttactgtcactgctgatttggatgattataatgaagtcaaacccattactaccgagctctttcggagtccattagta

SEQ ID NO: 148335 - DNA, 450 bp, Arabidopsis thaliana columbia
agcaaagcctctcgttgctagaggaatttaataatggtgtttgtgaagtccaccaagtcgaatgcttacttcaagaggtaccaagtgaagttcaggagaagaagagatggaaagactgactacagggcaaggatccgtcttatcaaccaagacaagaacaagtacaatactcctaagtatcgttttgttgtccggtttaccaacaaagacatagtggcacagattgtatctgcaagcattgctggtgacattgttaaagcttctgcttacgcacatgaactgcctcagtatggtctcactgttggtcttacaaactatgctgcagcttactgtactggccttcttttggctcgccgtgttttaaagatgttggaaatggatgacgagtatgagggaaacgttgaggccactggagaagacttttccgttgagccaactgattcaaggaga

SEQ ID NO: 148336 - DNA, 433 bp, Arabidopsis thaliana columbia
  unsure (1)..(433): unsure at all n locations
aagagctaaatgcagagagcttcagacccgacctaataatgacgatcgntaaaccgncgcaggtctcattctccggcggcggatcttcgccgttatgttcactcaaaagctcactcctcaccgtcgctattctcactttcatttccctcttctacctctctctcaattccttacgcacttcgccgccgtctcctgtcatcgtggtaacaccgattcatgttcctcataccttcgtgaatgagtataagactgataacgaaacaccgacgatggaagaagaaacctactccgatgtttatcactcaccggaggctttccgattgaattacgccgagatggagaagagattcaaggtttatatttatcccgacggcgatccaaatacgttttatcaaacgccgaggaaagtcaccggtaaatacgctagtgaggg

SEQ ID NO: 148337 - DNA, 460 bp, Arabidopsis thaliana columbia
ctcatttccctctgattagatcccttaccccgataaagacaccaaaattcttgagggcgagagagctgattgatgtctttggtatctggagccagggacatggggttcgacgacaacaacaacaacaagaacaacaaggatggagatgatgagaactcctcctccagaacaagagccgacgacgatgctcttagtcgacagatgagcgaatcttctctttgtgctaccgaggaggaagaagacgacgattccaaattgcaattgggtcctcagtacactatcaaagaacatctcgagaaggacaaggatgatgagagtctgaggaaatggaaggaacagcttctcggaagtgttgatgtcaccaacattggagagactcttgatccggaagtgaggattgatagcctcgccatcatatctcctggaagacccgacattgttctcttggttcctgagaatg

SEQ ID NO: 148338 - DNA, 467 bp, Arabidopsis thaliana columbia
  unsure (1)..(467): unsure at all n locations
ctttttctaattttctcttcttctncnnctttctcgatttgagagaaaacaaaaaaattctgaatgtacatgtttcacgaaaaggagaagaaaaaaaacaatggcggatcaggtcaccctcgctccgatctctgagtttaaggaagctttcagcttattcgacaaggatggtgatggttgcattaccaccaaggagctgggtactgtgatgcgttcccttggacaaaacccaaccgaagcagagcttcaagacatgatcaacgaagtggatgctgatggtaacggtaccattgatttcccagagttcttgaaccttatggctcgtaagatgaatgacaccgactctgatgaagagctcaaggaagcattacgggtgttcgacatggaccagaacgggttcatctcagcagctgagctccgacatgtgatgacanaccttggtgagaagcttactgatgaagaagttg

SEQ ID NO: 148339 - DNA, 419 bp, Arabidopsis thaliana columbia
gtcgttcttctttgatttgggcacaacggatagatttcggtgtggcagatcttctcttgtggggtctctctacctgttttttctccagctctggtgatggtgtgattgatccgacgggcttctcttgtggaggcaatccaaggagtcgtttggctcttgtggattgttcgtggtggttagtggcgttgtgggttttgtttggtggtcgacgtctctcctccattggtgggcagttgagggtggtagcctcttcggccatgggtatggattctctgtgtccattgggtttcgtcccttttgcttcatctctggtttgctttcaggtggagttttgatgttcatggtgttggcggtgttggttcatttggtgaaggcgagcctttgggtgttatggctatgttcaccgagggttgaataga

SEQ ID NO: 148340 - DNA, 437 bp, Arabidopsis thaliana columbia
  unsure (1)..(437): unsure at all n locations
agaagagcgtcttcataaacgcccttcgncatcnttcctgcaaatctattttctagatctttctttcttccgcgaaacgacaatgagagagtgcatttcgatccacattggtcaggctggtattcaagtcggaaatgcttgctgggagctttactgtcttgaacatggcattcagcctgatggccagatgcctggtgacaagactgttggtggaggtgatgatgctttcaacaccttcttcagtgaaaccggtgcaggtaagcacgtcccacgtgctgtctttgttgatcttgagccaactgtgatcgacgaggtcaggactggtacttaccgtcagcttttccaccctgaacaactcatcagtggtaaagaagacgcttctaaccatttcgcccgtggtcattacaccattgggaaagaagattgtgatctctgct

SEQ ID NO: 148341 - DNA, 447 bp, Arabidopsis thaliana columbia
  unsure (1)..(447): unsure at all n locations
ctaaaactaaatacaaagaaacagagatgggttttgttacagaggaggngagagctaaggcagagatgttcaccggagatgagatatgtagagagaagacaaagtgtttcctcaaggaaatatctatgcccaatggtttattaccattgaaggatatagaagaggttgggtatgacagagagtcaggtgttgtatggctgaagcagaagaagagcatcactcacaagttcacagagatagataagcttgtctcctatggaaccgaagtcacagccattgttgagaccgggaaaatcaagaagctcactggagtcaaagccaaggaacttcttatttgggtcactatcaatgagatctataccgaggaaccccctaccaagatcacgttcaagacaccgaccacactgtccaggactttcccggtcacagcttttatagtcccagaag

SEQ ID NO: 148342 - DNA, 463 bp, Arabidopsis thaliana columbia
  unsure (1)..(463): unsure at all n locations
gaaaaaacatctttggtgtaacaaaaagggtcaatgcnattcaaagcactgatcgaatccataggctggtcttgacaaagactcatacggttctctcttatcaaaactcataggcgaatctaaattcgtccagaacaatccgccggagctcatccctcaagaggacctaatcgtcaaacacgtccttgactctctccgtccttatagcacagaaactggtggtggtcctctggtgatcaatcatgtcgcgtatcattcaggtagaggtaatctcatcgttgagtacccaggatctgttcccggaaagatcttgtctttcgtcggaatgcatatggacgtcgtcactgcgaatcctgatgattgggaatttgatcctttctcgctaagcatagatggtgataagcttcgtggtcgtgggacaacagattgtcttggtcacgttgctcttgtcactgaactcatg

SEQ ID NO: 148343 - DNA, 429 bp, Arabidopsis thaliana columbia
  unsure (1)..(429): unsure at all n locations
gcgataaagaaacggtatgacgtcgtnnggtaccatgatttctcttcttcttcttctgtctgtttcatcggcggttttctccgatgacgcttctttccagaaacttccggtgccggaaactaggtcaggtcccgaagctttcgcttttgattccaccggtaaagggttctataccggtgtctccggtggtaaaatcctcaagtacctccccgagacgggttatgttgactttgcccagatcactgaatcctcgaactcttcatggtgcgatggtactattggaacggctttagccggacgctgtggtcgaccagcaggaatagcattcaacgagaaaacaggtgatctttacgtcgccgatgctccgttgggtcttcacgttatttctcccgccggtggtttggctacgaagatcaccgacagtgttga

SEQ ID NO: 148344 - DNA, 442 bp, Arabidopsis thaliana columbia
  unsure (1)..(442): unsure at all n locations
aaaaaaaaaaaacagaaagtaacatgtgattcncncttattagccgtgtgcctggttcttgctgtacactgcggtgaagcagccgtgtcttgcaacacggtgattgcggatctttacccttgcttatcctacgtgactcagggcggaccggtcccaaccctctgctgcaacggtctcacaacactcaagagtcaggctcaaacttctgtggaccgtcagggggtctgtcgttgcatcaaatctgctattggaggactcactctctctcctagaaccatccaaaatgctttggaattgccttctaaatgtggtgtcgatctcccttacaagttcagcccttccactgactgcgacagtatccagtgagacaagcagaaaatcttaaaggaagctactacaagaactataataacctaataattaataaatgagggcattggtt

SEQ ID NO: 148345 - DNA, 419 bp, Arabidopsis thaliana columbia
gaattcttcttcttaattgagaaacaacaataagttgaataacgtaaattcaaaactctgctgatcattcaaaaccagaaactgtgaccggaaaagaatcagagaagtaaagaaaaacagaacaaaattaaaacagaatttcttctctaatccattacgccggcgatttcggcggcgtaggagatgaaagttcgtaggaaacttggtggtggttgcggcggagacgtcgttgtttcatggcggacgttcttttggttcgcgattctgtttgtcttctccttcgatctcttctccaccatgtttatttttaaggggaagtttcgtccggtggttcgttcgacgataagcttctcaacggctgatacggcaagggcggttttccgagagtctatatcgacttctccggcggttacgattcg

SEQ ID NO: 148346 - DNA, 485 bp, Arabidopsis thaliana columbia
  unsure (1)..(485): unsure at all n locations
aaaaaccagttcgccccacgcgtccggccggttacacgacgccggannccccccgcagtaatctggaattcagaggntngaagccttgggggtgtttggtgactcaggcggccagtctgggtgcgaatcgtagaaccagaatcgctcgcggtggacgaatcgcctgtgaggctcaggacaccactgccgccgccgtcgaagtaccaaatctgtctgattcagaatggcaaacaaaggttctggaatcagatgtcccagatctggtcgagttctgggcaccatggcgtggaccttgccgtatgattcaccccataggtgaccagctagccaaagatttcgcagggaagttcaaattctacaaaatcaacactgacgagagcccaaatacagcaaaccgttacgggatacgaagcgttccaacagtaatcatgttcaaaggcggtgagaagaaagatagcatcattggagctgtgcctagagagacg

SEQ ID NO: 148347 - DNA, 461 bp, Arabidopsis thaliana columbia
  unsure (1)..(461): unsure at all n locations
agcacagaacatacctaaaatcgagaaaaatggttattgtggtgaaggtaaagtggtgtgtggaacatgtgtctccggttacatcgcctcatggctcgncaagttcctacttagccgtggctacactgttaaggcctccgtccgtgatcccagtgatccgaaaaagacacaacacttagtttcactagaaggtgcaaaggaaagacttcacttgttcaaagcagaccttttggaacaaggttctttcgactctgctattgatggttgccatggagttttccacactgcttctccattttttaatgatgccaaagacccacaggctgaacttattgatcctgcggtcaaggggacgcttaacgttttgaattcgtgcgccaaagcctcttcggttaagagggttgttgtaacctcctccatggctgcccgtggttacaatggaaaaccacgcacacctgatg

SEQ ID NO: 148348 - DNA, 381 bp, Arabidopsis thaliana columbia
  unsure (1)..(381): unsure at all n locations
ccggatggaaggaccgagccgagcgacgcgttcggaaaagaaagaagtaaagaagaattagaatcnctacacaaatggngctccaacaacaaacgcattttctcacaaagaagatagatcaagaagacgaagaagaagaaccttctcatgatttcattttccgatctaagcttcctgatatcttcatccctaaccacctccctctcaccgattacgtcttccaaaggttctccggcgatggcgacggagattcctcaacaacctgtatcatcgacggtgccactggccgtattttgacctacgccgatgtacaaaccaacatgcggaggatagctgccggaatccaccggctcgggatccgccacggagacgtcgtaatgc

SEQ ID NO: 148349 - DNA, 455 bp, Arabidopsis thaliana columbia
  unsure (1)..(455): unsure at all n locations
aaacgaaatcgtggtcttactctctcttcagtgntctgacctgagcacacacacagagagggggtttttgtcactcatggaacccaatatttaccaacttgccctcgcggctctattcggagcttccttcgttgctgtttctgggtttttcatgcatttcaaggcactgaatctagtccttgagcgtggtaaggagcgtaaagagaaccctgatggagacgagcctcaaaatccgaccttggtgaggcggcggagccaagttagaaggaaggttaatgaccaatatggtcgcagtcctgcttctcttccagatgccactccttttaccgatggtggcggcggcggcggcggtgatacaagacggagcaacggtcacgtttatgtcgatgaaattcctcctggtctccctaggcttcatacgccatctgaagggagagcttctgtacatggagcta

SEQ ID NO: 148350 - DNA, 431 bp, Arabidopsis thaliana columbia
gagaaacaacaagaagtagtaatggcttccataatgctctcctccgccgctgtggttacatgcgccttttcaggccaccatgggcgctccattcaccggcttgaagtcatccgctgcattcccggtcacccgcaagaccaacaaggacatcacttccatcgcaagcaacgggggaagagttagctgcatgaaggtgtggccaccaattggaaagaagaagtttgagactctatcttacctccctgaccttagtgacgtcgaattggctaaggaagttgactaccttctccgcaacaagtggattccttgtgttgaattcgagttagagcacggatttgtgtaccgtgagcacggaaacactcccggatactacgatggacggtactggacaatgtggaagctttcattgttcggatgcaccgacttcgctc

SEQ ID NO: 148351 - DNA, 218 bp, Arabidopsis thaliana columbia
  unsure (1)..(218): unsure at all n locations
agacgcagcangcnncgngggggggcggacaacgggaaacnacggcgccgacacccccagaggccccccgacgcacaaagcacagcaatgtgcgaaggcacaaatcgaaaaggcaagagaaacaatgcctaaaagcgattggagtaagaggagcgaaaaggagaaagacaatatgggaaacgaggaaagaaaacgacctacaaagaagaagaaggacg

SEQ ID NO: 148352 - DNA, 403 bp, Arabidopsis thaliana columbia
  unsure (1)..(403): unsure at all n locations
caacaccaaagacggaatttnngggtgttcctaattttagccacganananctttgaagctggcaaattaatttgatgctagaaccgcttggtcacagngcaccagtattggaaggatcttagatcagggtcactgtggttcttgctgggcctttggtgctgttgaatcactgtctgacagattctgcatcaaatataacatgaatgtttctttatctgtcaatgatcttttagcatgttgcggattcctttgcggtcaaggttgtaatggtggatacccaattgctgcgtggcggtactttaagcaccacggtgtagtcactgaagagtgtgatccatactttgacaatactggttgctcgcacccgggatgtgaacccggttaccctacaccaaaaatgtg

SEQ ID NO: 148353 - DNA, 301 bp, Arabidopsis thaliana columbia
  unsure (1)..(301): unsure at all n locations
ggcgatcaagagacgaangnnnanactttgatagatattaagccnnccnncnancncccaacggcttgtcctaatggtcttcgggcttatatatacctgaaattagcccagctaccttttgaacttgcgttcaattcaaccttccctgattcagatgaactgccgtactttgaaagtgatacatatgttgcatataacaatgaagatggaggagttattgaaaaactgaagaaagaatggaatgttaatctggactctcaactacaggctctttcggattatttatcttttaaagctctta

SEQ ID NO: 148354 - DNA, 440 bp, Arabidopsis thaliana columbia
  unsure (1)..(440): unsure at all n locations
cttattgtcgcggtggtaaagagagtgangtacgntatcaaactntaggatnctncttacttggggtcattatgggagagagctgatcacctctgaacttgcttttcggattttgtcaattttgagcgaagaacagttcttaccaaataaaaacggaggaatcctgaaaaacacattagacaaactagtcataaaaatggttcctatagaaaacccgaatggtcgcaaacgtgttgaatctggagatctttgtgaacgaagaaatggaagaggagttgacctgaaccgaaattggggtgttgactggggcaagaaagaaaaggattatgatccatctgaagagaatccaggaactgctccgtttagtgagcccgaaactcaaataatgcggaagctagccatatcatttgatccttacatatggataaatgtgcattctg

SEQ ID NO: 148355 - DNA, 156 bp, Arabidopsis thaliana columbia
  unsure (1)..(156): unsure at all n locations
ggagaaccagaatcaatgaaggaacccaggtttgatttagtttaacatccanggaacataaggaccggatcagctgatgaaggacagttcttaaacatgcttatcaagctcgttaacgccaagaacacaatggagatcggagtttacactggctac

SEQ ID NO: 148356 - DNA, 425 bp, Arabidopsis thaliana columbia
  unsure (1)..(425): unsure at all n locations
aataaaccataccataaaaaacangaaaatctacatacttttactncncnngcnctnggccgctgcggtctttgcatccgttccagggctcatcgaactcgncgattcgaaaaccatctttgggaacgtagccgaactcttagagaaagagaaactttccatcaactacgccaactgcagaagctggcaccttggtgttgagacctctaacatcatagacttcgacacggtgcccgcaaattgcaaagactatgttgaagactacttgatcacttccaaacagtaccaatacgactccaaaaccgtgtgcaaagaggcttaattctattgccaaagacttgccctaaagaacgacaccgtcaatgtttggatctttgacctaaatgataccctcctctctagtattccctactacgcaaaatatg

SEQ ID NO: 148357 - DNA, 467 bp, Arabidopsis thaliana columbia
  unsure (1)..(467): unsure at all n locations
gaccacgcgtccgattcgccgttcgcttttccctcgccgncgaaaatacattttgccgaagaaggataaggttccggggccgttatcgaagccggcgagagatccggaggtggaaagcagaagaagaagaagtggagcaagggaaagcaaaaggagaaggtgaacaacatggtgctgtttgatcaagctacttatgacaagcttctcactgaagctcccaagttcaagctcatcaccccttccattctctctgaccgtatgaggatcaatgggtcgctagcaaggagagcgattagggagctaatggccaaaggtgtgatcaggatggtcgctgctcactcgagccagcagatctacactcgtgccaccaacacctaagatgtttggtttctttatccacctaagatgtttggcttctttttcttatctcttgttgtttgattcttcaggaacttgttagaatcttt

SEQ ID NO: 148358 - DNA, 384 bp, Arabidopsis thaliana columbia
  unsure (1)..(384): unsure at all n locations
gaatggaaggaccgagccgacgccacgcgtacgcggacgcgtgggcggacgcggggattaaataatttgaacagngnnagcccccactgtatgcctncttgccaactaaaactacattgcgtgacttcttctgtaaccatttttctattccgatcaaaccatggcgtatttagctccgatttcttcatccttatccatattcaagaatccccaactctcaagattccaattttcttcttcctcaccgaacccacttttccttcgacctaggattcagattctgagtatgaccatgaacaagtcgccgtctttagtggtggttgcggctactactgcggcagaaaagcaaaaaaagaggtatcctggagaataaaagggttttgt

SEQ ID NO: 148359 - DNA, 411 bp, Arabidopsis thaliana columbia
  unsure (1)..(411): unsure at all n locations
acccacgcgtccgcaaatctcaatcatcctgctncccattaagtaacttcttatctcggagnaancagagagtgggaaattttcagaaatcagtggcgacaggaccagttgttcatcctcaaccagttagaggtgatcccatcgacctcaaaaacgcagcagcaaagaatcgtcgtgctcttggcgacattggaaacgtcgattctcttattggagtcgaaggaggaaagcttaaccgccccattactcgtaactttcgtgctcagttgctagaaaacgcacaagttgcagccgccgctaacaaaaaggctccgattcttgatggagttactaagaaacaagaagatgtaagagcggttcaaaagaaagcaagaggtgataagcgtgagccggcaaaaccaatcgaagtga

SEQ ID NO: 148360 - DNA, 414 bp, Arabidopsis thaliana columbia
gaaaaactaaaaaagagaaccccaatttactaatatttattatttcgccccgaagattctgtttctgatcatttacacccctaaaaagagtagagctttcgtgaagccaccatgtgtggaggagctataatctccgatttcatacctccgccgaggtccctccgcgtcactaacgagtttatctggccggatctgaaaaacaaagtgaaagcttcaaagaagagatcgaataagcgatccgatttcttcgatcttgacgatgatttcgaagctgatttccaagggtttaaggatgactcggcttttgactgcgaagacgatgatgatgtcttcgtcaatgttaagcctttcgtcttcaccgcaactactaagcccgtagcttccgctttcgtctccacttgaggttcagcatat

SEQ ID NO: 148361 - DNA, 479 bp, Arabidopsis thaliana columbia
  unsure (1)..(479): unsure at all n locations
accggaaatgaccggccggaccgacgcgtccgcggacgcgtgggttttaatggatggggctattacatactctctcttnggannnncaaaacaaaggaatcttaaatccagactttaaccatgacggatacaatgtctgctcatatggatcgacataataagcttgattatgacggctcagaggatgaaaagaaaacaaagctttgttccctcaagaagaaagcaatcaatgcctccaacaaattcaaacactccttcaccaagagaactcgaaggaacagccgagtcatgtctgtctctattgttgacgatattgatcttgaagagcttcaagctgttgacgctttccgtcaagctcttatcctagacgagcttctcccttccaaacacgatgatcatcacatgatgctgaggtttctgagggcaaggaagtttgatcttgagaaagcaaagcaaatgtggactgatatgatccattg

SEQ ID NO: 148362 - DNA, 458 bp, Arabidopsis thaliana columbia
aatctccaccagagttatgggaatcaccggaagtcaacgccagatcagctcgattttttccactctcaagggtatttggtaatcgaatcgttcgcgagtgaggatgagataagaggcttaaggaagaggatggatgagttgcttaatcagtttgattgttccgtctcctctatcttctccaccaaaaatcagaagcacaccacagataattacttctttgagagcgctgagaaaatctccttcttctttgaagaaaaagcttttggtgatgatgggaaattgaagcaacccaaacaactctctataaacaaagttgggcatgcactgcatgagcttgacccattgtataaggatttcacatattcgtcaaagttttcaagtttggcatcatccttaggttacaggagaccagttgtcatgcagtctatgtatattttcaagcaacctggaattggagg

SEQ ID NO: 148363 - DNA, 314 bp, Arabidopsis thaliana columbia
  unsure (1)..(314): unsure at all n locations
gtttgtttttcgtttcttctccgangggtcataggtaattcgaattaagataaagatgaggccagggttcgttggcaatttcgagtatgaaactcgccagtcggatctggaacggttgttcgacaagtatgggagagtcgaccgagtggacatgaaatctggatatgcttttgtgtactttgaggatgaacgtgatgctgaagacgctattcgcaaactcgaccaattttcttttggatatgagaaacgcaggttatcagttgaatgggcaaagggtgaaccgtgcaagcctcgtggtgacgcgaaagcccctt

SEQ ID NO: 148364 - DNA, 367 bp, Arabidopsis thaliana columbia
cttgtgggctatctcacccaaataccgactacatatatatcaatgtggctatgatggaaaaagaagtagggaatgatcatctagctctaaggtacctgcatgaagctctaaagagcaataaaagattgctaggagctgaccatattcagactgcggcaagctatcatgcaatagcagtggctctctctttcatggaagcacattcattgagtgtgcaacatgaacaaactacacttcagatacttactgcaaaacttggagcagatgaccttcgtacacaggatgctgctgcatggctcgaatattttgaatcaagagccatagagcagcaggaagcaggccgaaatggaatcccaaagcctgatgc

SEQ ID NO: 148365 - DNA, 420 bp, Arabidopsis thaliana columbia
  unsure (1)..(420): unsure at all n locations
aataaacccaagttggtgtatactattttggtgatggctggtgctnctnctttggatgagagcagacaggctcagagagctgatggacctgcaggcatcttggctattggcactgctaaccctgagaaccatgtgcttcaggcggagtatcctgactactacttccgcatcaccaacagtgaacacatgaccgacctcaaggagaagttcaagcgcatgtgcgacaagtcgacaattcggaaacgtcacatgcatctgacggaggaattcctcaaggaaaacccacacatgtgtgcttacatggctccttctctggacaccagacaggacatcgtggtggtcgaagtccctaagctaggcaaagaagcggcagtgaaagccatcaaggagtggggccagcccaagtcaaagatcactcat

SEQ ID NO: 148366 - DNA, 408 bp, Arabidopsis thaliana columbia
  unsure (1)..(408): unsure at all n locations
ccccaaaccagaagaagaaacaaaaancgaatttctcatcaatagcaaaaaaaaaattactcttagattttcctcaaaaaccttaatcaatcgccgggaaaatgaatattccggtgactatttcctccattactgtttctaataacgctgtttccgacaatcgtcgtcatgtttcccgtgaaaatcgtcagcgttaagaaaaccgtcacttatatttttttttcttttcttcttcgtttttgtgaagatgatgatccactgatttgagagtagtagcttgagaggtttttagtagatttcgattttgcgattatttttgtttcctggagagatctcatttttttgccacttccgatgatgaagatccagccgattaacaacgatttgccggcgaatagagtggaatca

SEQ ID NO: 148367 - DNA, 430 bp, Arabidopsis thaliana columbia
  unsure (1)..(430): unsure at all n locations
cgaagaggatcgcttaaccgnagcaagagtagatataattgagcgnnncttatcacaacccggtttcgtagcagaagtatttacaggttctccgggaaaatatgttggtctagcggaaacaattagagggtttaatttgatcctttccggagaatttgattctcttcccgaacaggccttttacttagtgggtaacatcgatgaagctactgcgaaggctacgaacttagaaatggagagtaaattgaagaaatgaccttaaatctttgtgtactgactccgaatcgaattgtttgggattcagaagtaaaagaaatcattttatctactaatagtggacaaattggtgtattagcaaaccacgcgccgattgccacagcttgtgatataggtattttgaaaatacgccttgctaaccaatggttaacga

SEQ ID NO: 148368 - DNA, 448 bp, Arabidopsis thaliana columbia
  unsure (1)..(448): unsure at all n locations
cagatacgcaaagcactccatnccatacnatgactctcttcgcctctnnnagggcgcagccaagagacagagaagaagagagagactcgtaagcaacaataaccaatagctctctctctctctctctctctctcctctgctgattcttcgctgactcttgcctcctcgacgtcgtcttcggctttgtagcatctcgccgaagcgtcgttgatttgagagagacccaatttggattgttagaaaatgggttacataggagctcatggtgtagctgctcttaagaaacacaaatacagtggtgttgatcactcttatcttgccaaatatgttctccaacctttttggaaccgttttgtcaaaatcttccctctatggatgccccccaacatgataacacttatggggttcatgtttcttctcacatctgctctcttaggctatatatact

SEQ ID NO: 148369 - DNA, 390 bp, Arabidopsis thaliana columbia
  unsure (1)..(390): unsure at all n locations
acgagagctgtgttccgcatctcccggaaatacttcctttgagtcgaagngaaagactgagctgagaccatgtagttgcggtagtagggtatggaacaacgatagacggaacaaagtattggattgttaagaattcatggggagaggaatggggagagaaaggatacataagaatgcagagagggattcgtcataaagaaggactttgtggtattgcaatggaagcttcttatcctctcaagaactccaacactaacccttctagactttccttggactcgcttaaggatgaactctaaattaaatctctttatattaagattaaaatagacattgacaagtttggttatggatgattgtttttttttttttaatataattttttttttc

SEQ ID NO: 148370 - DNA, 391 bp, Arabidopsis thaliana columbia
aagaaattgtcagtgcatatgaactgcttgatcactctgattttggattctgtttcagcgatgtggtggtcaagttacttccagaaggaaaatttgatccaaatgcagacacaatcgtcgctacagaggcgaaacacctacttacagagagtgactacagtggcgcatattttttgtcaagtattggtgttgttacaggttttaaaaatggttccgtgaaggtgaaatgggccaatggttctactagcaaggttgcaccatgtgaaatttggaaaatggaaaggtctgaatattccaactctagcactgtaagttcggaaggcagtgttcaagatctaagtcagaagattagtcaatcggatgaagcatcttcaaaccatcaagaaacggg

SEQ ID NO: 148371 - DNA, 370 bp, Arabidopsis thaliana columbia
cgcgattcgtctaaggttttgttactgattagtaaactatgggaggtgacaatgataatgacaaagacaaagggtttcatgggtatcctcccgctggatacccaccccctggggcttatccacccgctggatacccacaacaaggttaccctccaccacccggtgcttacccgcctgcaggttatcctccgggtgcctacccacctgctcctggtggttatcctcccgcccctggttatggtggttatcctccagctcctggttatggaggttatcctcctgcacctggtcatggtggttaccctcctgctggctatcctgctcatcactcaggacacgcaggaagaattgggggtatgattgcaggtgc

SEQ ID NO: 148372 - DNA, 520 bp, Arabidopsis thaliana columbia
  unsure (1)..(520): unsure at all n locations
cacaaggtccaagcaccgaaaacaaggcgnnctagactagacttttatcaacaaanccagatttntgagctggagggtaatactttgagaagggagaagaaacaatgctcgaaccactagacccatagaaggggatctttgaagcgagcgtactctnnaatgatggcgaggatctcctaaagaccgtaacgatagttttgcacaattaggnnnaccagcttctctgcacctgtgttccaatgaatcgaaaagggcttttgaaaggccggtantgaatggtggctcgcttcaaacttctcacatnggaagcctatgaatacccatcaagagacanctcgacaancctccgctctgctatgcatnnaataccggcattctcgcttgctgtcaatgcttgatanctaaggggctctgagattcgtacctggttctcatgaaagatngggaacccctatacatactgaaaggaaggtcaaagagattactnataacncacttgatttatgacatttcaagggag

SEQ ID NO: 148373 - DNA, 438 bp, Arabidopsis thaliana columbia
  unsure (1)..(438): unsure at all n locations
gacgccggaaaatcgcaatgggngcgnactattatttgtcggagctatggaggaagaagcagncggatgtgatgaggtttcttcagagggttaggtgttgggagtatcgccagcagccttccattgttcgtcttgttcgtcccactcgtcccgacaaggctcgtcgtctcggctacaaggccaagcaggggtttgttgtctaccgtgttcgagtcagacgtggtggacgcaagaggccagtgcctaagggtatcgtgtacggtaaacccaccaaccagggagtgacacagcttaaattccagcgtactaagagatctgttgctgaggaacgtgctggtcgcaaactgggaggccttagggttgttaactcctactggctcaatgaggactctacctacaagtactaccagattattcttgtagaccctgcacacaatg

SEQ ID NO: 148374 - DNA, 457 bp, Arabidopsis thaliana columbia
  unsure (1)..(457): unsure at all n locations
gaccacgcgtccggcggcggcgttagtgtgagagccacgnctgagctagnttaggataaagaancgnccgncgcggcgagtattgctttcaatgaagccgccggtgagacgccgagtgagcttagtcattcccgtactttcttggatgcgcgaagtgaacaagatcttttatctggtatcaagaaggaagctgaagctggaaggttgccagcaaatgttgcagcaggaatggaagaattgtattggaactacaaaaatgcagttttaagtagtggagcttccagggcagatgaaactgttgtatcaaacatgtctgttgcttttgatcgcatgcttcttggtgtggaggatccttatacttttaatccatatcataaagcagtcagagaaccatttgactactacatgtttgtccatacatacatnncgcctcttattgatttcaaaaattcgtacg

SEQ ID NO: 148375 - DNA, 439 bp, Arabidopsis thaliana columbia
  unsure (1)..(439): unsure at all n locations
catnngacccctnncgaaannngcattatttaatttttncgngngcnncacaacgggagggctctttcgagagaatgggcgtcctcaattcaaatcctttacgcaaagtttcagtttttattcactttcttacataacccatcaaaccaaatcctcgatcggattatgttaatcaattgctaagagctttttcttctacttcttcgcaatccgccatggccgcagctttaaggtcgaatacgtcaagagaaaccgcttctcttacactttctcattgtagatactttatcttcaaccgtatccacaccgctcgaaccgccacaagtcccccttactgtaatcaccgttctaaatccgaagagaaaatcccctataaaatttcccctcttggaacgagtttcttggaaaatccaggaggaggagagagcctaatccgact

SEQ ID NO: 148376 - DNA, 378 bp, Arabidopsis thaliana columbia
  unsure (1)..(378): unsure at all n locations
ctttaaggtcaaagaagctttaacctttcattttattcaccgnccagnggcgnaaagagagaacagaaatctacgaactcgttgaatccggagaagaagtgagtgagttcgagaagatggtgtttgctcacggtgttgacaaagaaggacacgtcgtgatctacagttcttacggtgagtttcagaacaaggagcttttctccgacaaggagaagcttaacaagttcctcagctggaggattcagctacaagagaagtgtgtgagagctattgatttcagcaaccctgaagcgaagtcttcgtttgtgttcgtcagcgacttcaggaacgctccaggacttggtaaaagagccttgtggcaatttattagacgcgctg

SEQ ID NO: 148377 - DNA, 415 bp, Arabidopsis thaliana columbia
  unsure (1)..(415): unsure at all n locations
cctgagtcttttagnctganctctaatagatatggcgttcgcaggaacaacccagaaatgcatggcatgtgacaaaacagtttatcttgtcgacaagttaaccgccgataaccgggtctaccacaaagcttgtttccgatgtcaccattgcaaaggaactctcaagcttagcaattacaactcctttgaaggagttctctactgcagaccacatttcgatcaaaacttcaagagaactggaagtcttgagaaaagcttcgaagggacaccaaagattgggaaacctgataggcctttggagggagagagacctgctggaaccaaagtttcgaatatgtttggtggaacacgagagaaatgcgttggttgcgacaaaaccgtgtatccaattgagaaggtatcggtgaatggaaca

SEQ ID NO: 148378 - DNA, 253 bp, Arabidopsis thaliana columbia
  unsure (1)..(253): unsure at all n locations
cttcttctgatcctcctcttagcccctttattgatttcgcatnccnncngngannngcgcggtagtatatctgnaattgcaggactatcaaanncacaatgcggatctgagatttcgtggataattctagtaacagattcgataatgggaggaggatttagagttttgcatttggtgaggccattcttggcttttcttccagaagtgcaaagtgctgacaggaagattccatttagagagaaagggatctaca

SEQ ID NO: 148379 - DNA, 432 bp, Arabidopsis thaliana columbia
cggacgcgtgggtggcgcttcagcatttcttataatccatcagaatcggagaccggaggagaatcatacgcggcgtcgatggtagtcgaagagctggtgacttctctcaatacacagagactttacagggagctgacactatccctcaggaccggtttacgcgatgcttgcgctgaattctccttccttcgcatccgtggtcttagatctcttctcaaaactctccgaactgtcgctgattcagattcaatcattcgtctcttctctcatacccaaaccatttccgatctccaactggttccggtgctttttcaacattcattgaaagaagcggaggatgataaagtgacgagcttggatcatatattcagtgtggagccgatgaagataacaagtccttctacggatgctgaggttgctgttgctcttaga

SEQ ID NO: 148380 - DNA, 343 bp, Arabidopsis thaliana columbia
  unsure (1)..(343): unsure at all n locations
tttctctctctcgccgacgacgaaaacatggttgctaatgctaagaaagctnngaagaagaacatgaagaaggttgctgcttcggcttcttcttctcagctacctcttccccagaacccgaaaccttcagctgattttttgccactagaaggaggtccagctcgaaaagctccagttaccaccccacctcttcagaataaagctactgtgctatacatcggtagaatccctcatggcttctatgagactgagattgaagctttcttctcgcagtttggaacagttaaaagagttagagtcgccagaaacaaaaagactgggaaatcaaagcattttgggttca

SEQ ID NO: 148381 - DNA, 411 bp, Arabidopsis thaliana columbia
  unsure (1)..(411): unsure at all n locations
taaaattctcggcgaagaagngaagnnnctgtcgatcattaggtgatatggataaggagaaggatcatgaagtggagtggcttgaagctcanaagatagaaataagcgttgacttattagctgcagcgaaacaacaccttttgttccttgaaactgttgataggaatcgatggctctacgatggtcctgcgcttgaaaaagccatctacaggtacaatgcttgttggcttcctttgcttgttaaatactctgagtcatcatcggttagtgaagggtctttggtccctcctcttgattgtgaatggatttggcattgtcacaggcttaatccggtgaggtataattctgactgtgagcaattttacgggagagttctcgacaattctggagttctttcttctggtgatggga

SEQ ID NO: 148382 - DNA, 98 bp, Arabidopsis thaliana columbia
  unsure (1)..(98): unsure at all n locations
ggaccgacccgtccggaacaatggctncctctatgctctctnccgttacttggttgcctctccggctcaagccactatgggcgcttctttcaacgggc

SEQ ID NO: 148383 - DNA, 428 bp, Arabidopsis thaliana columbia
  unsure (1)..(428): unsure at all n locations
aagaaataaaaaacgaancggaagagtgagtagtgtgagagatnggagccagnnggagatgggaataaggttcatattgatggtcaacaagcaaggccagactcgtcttgctcagtactacgaatggctcactctcgaggaacgtcgcgctctcgaaggcgaaatcgtccgtaaatgcctcgctcgcaacgaccaacagtgttcgtttgtcgagcatcgcaactacaagatagtctacaggcgttacgcatctctcttcttcatgggtggggttgatgacgatgaaaacgagctggcgatgctagagttcatacatcttttggtcgagacaatggacaagcattttggaaatgtgtgtgagctagacataatggtccatctggagaaagctcattttatgctgtgagaaaaggtgatgaaaggttgca

SEQ ID NO: 148384 - DNA, 409 bp, Arabidopsis thaliana columbia
  unsure (1)..(409): unsure at all n locations
gatagattgtgtggttaaggcnngtataaatcctttgatcatacgnncanngnncagggcggctttgtccgattctggtggagaacttgcacgtnccataatgcatgatgctgttcgtgttatcattggccgaaaaaacacagcatctgaaaccgtcaagcaaaagctggtttttgctggaagtgaagaagggaaacttcttgctcttcgccaaagctttgcagagagtctgaatccaccggtactgatctttgtacaaagcaaagaacgagcaaaagaactctatgatgaactgaaatgtgaaaacatcagagccggagtcatccattccgatctccctccgggagagcgggaaaatgcagttgatcaatttagagcgggagaaaaatgggttttgatagccactgat

SEQ ID NO: 148385 - DNA, 421 bp, Arabidopsis thaliana columbia
  unsure (1)..(421): unsure at all n locations
atgcggtttccttttgcttcaggtgagattncaatttagttcttagtacaatgggatctgnagatgctgctaatggaagtgggaagaaacctacagttatatttgttcttggtggtccaggaagtggtaaaggtacccagtgtgcttatattgttgaacattatggttacacacatctgagtgctggagatcttcttagagctgagattaaatcaggttctgaaaatggaactatgatccagaatatgattaaagaggggaagattgtaccttctgaggttactatcaagcttctacagaaagctattcaggaaaacgggaatgacaagttcctcattgatggtttccctcgtaatgaggaaaaccgagcagcatttgaaaaagttactgagattgaaccaaagtttgtcttattcttcga

SEQ ID NO: 148386 - DNA, 417 bp, Arabidopsis thaliana columbia
  unsure (1)..(417): unsure at all n locations
gtgaaagaagacaaacaaaccganggagatagatttagaggncnngcctacgacactgggtgatgatcaacaagacatcaccagaggcaagggtatggttgactctgtcttccaagctcctatgggaaccggaactcaccacgctgtccttagctcatacgaatacgttagccaaggccttaggcagtacaacttggacaacatgatggatgggttttacattgctcctgctttcatggacaagcttgttgttcacatcaccaagaacttcttgactctgcctaacatcaaggttccacttattttgggtatatggggaggcaaaggtcaaggtaaatccttccagtgtgagcttgtcatggccaagatgggtatcaacccaatcatgatgagtgctggagagctttggagtggaaa

SEQ ID NO: 148387 - DNA, 355 bp, Arabidopsis thaliana columbia
tatccccatttctctgaaaaccctatcaataccttctctcgttccgccactgccgccgccggtactcaacggtggtgaattttctatacagtcagttcgatcctctttttatcgacaatcctacacaaatccataatcatggccgccactgcttcctccgaagcttctgaaggaccagtgatgggtctcatcaacaagcgtctccgtgctctccgtaagaaatacaaccgaatcactcaaatggaagaatcgatttctcaaggcaaaaccctaaacaaggagcaagaagaagtcctccgctctaaacctgccgtcgtcatcctaatcgacgagcttgaaaagatccgtgctcctc

SEQ ID NO: 148388 - DNA, 465 bp, Arabidopsis thaliana columbia
  unsure (1)..(465): unsure at all n locations
accggaatggaagggccgacccagcccacccgtgcgaaggcaaacgaggcgacgaagaaggttccatatttgaagactccganccacgcgggttcgacatgggtgaggaggcagcctccaaaggtgaaagctttccttgccgtcgtatctggcatggcggctcttgttctcctcaaactcatcgttcacgatcacgacaatctcttcgttgccgccgaagctgttcattctattggaatctctgttcttatctataaactcatgaaggagaagacttgtgctggattgtcattgaaatctcaagagcttacggcgatatttctagctgtgaggctttattgcagttttgtaatggaatatgatatacataccattctggacttggctaccttgggaacaactctttgggttatatatatgatcccgtttaacctcaaaactacctacatggaagaaaaagacaac

SEQ ID NO: 148389 - DNA, 318 bp, Arabidopsis thaliana columbia
gttttagcggttgcactgcacgaagttacattaaaaaacccaagagcaagactaagaccggagcgagagaagctcgaaaatggctctagcgttcgatgagtacgggcgtccgctcattatactgagagagcaagatcaaaagactcgtcttagaggaatcgatgctcagaaagccaatatcgccgctggtaaagccgaggctcggatccttcgatcctctcttggacccaaaggaatggataagatgcttcaaggacctgacggagacatcaccatcacaaacgatggtgctacgatattggagcaaatggatgttga

SEQ ID NO: 148390 - DNA, 413 bp, Arabidopsis thaliana columbia
  unsure (1)..(413): unsure at all n locations
gtcgattcctcaccatctccattgctnctgaaatcagtttcttgggaacggcgccnnaatgggtgactgcaatgttaccacaagtgaagccatcaccttgcgatcccacagcagccggaagccactgtgggtcttcgaccgcatctcagctggctcttttgtataccgcatttgcccttatatcgatcgggtcaggcgggatcagaccatgttccttagcatttggagctgatcaactagacaacaaagagaacccaaaaaatgaaagagttctagagagtttctttggttggtactacgcttcctcagctgtggcggatctcatcgcgttcacgggtattgcatacattcaggagcatctcgggtggaaaatagggttaggagtacctgcggacctcatgtagatcgctgct

SEQ ID NO: 148391 - DNA, 278 bp, Arabidopsis thaliana columbia
accggcctggaagaccgaccgacccacgcgtacgagaacccaactatctgcaaacccgcttttataatcttcctggaccgccactggcagagaagggtctgaagcgggctggagtggcccgtcgcggctgcattactagccatggatcacgtctctgcttcagttccgatcataatgcctcatgggatcctacctaactgctgtaaggccagggatgcctacctcacacaagttcttacttacccttctggcttttccggcctttggctaagaaatgg

SEQ ID NO: 148392 - DNA, 293 bp, Arabidopsis thaliana columbia
  unsure (1)..(293): unsure at all n locations
cggttgaatacaggnggagnncggtttaatcattagaatgtgcacgcaagaaaggcgaggcatgagtgggatcccttgcgtttcggttagcgctaccggtttagctagaatgcacactaaaccagaagtaatgtttggattaatcaacggtgcagaaaaacaagaaatatggagttatttagagtctgctaaagatatgaaagaactaattcgtatcggaagacatcctaattcatggaatgaagtctcttgtttcagcattgagtggaagggttcgaaagagtggtatctga

SEQ ID NO: 148393 - DNA, 299 bp, Arabidopsis thaliana columbia
  unsure (1)..(299): unsure at all n locations
ggccgaccacgcgtccgaagaaaatcaaagcagcagnnanggttgaataagcttcaaagcaccccacggaagaggaggggatgaatacggaggcgtctagttcggtggggaagctagagacagacgtggagatcaaggcttcggctgataagtttcaccacatgttcgctgggaaaccacaccatgtctccaaagcaagtccaggcaacattcagggatgtgatctgcacgaaggcgactggggcacagacggctctatcggcttctggaattacgtacatgatggggaggcaaaggtg

SEQ ID NO: 148394 - DNA, 295 bp, Arabidopsis thaliana columbia
cttctctagttctttgcaagcggaaatgtattgagtgctatcaaagttatcttcttcaattggctcgtctacttccaggaaactggtttctgggcggattataagtagcagaaactatgcggccaaggatatcagtttcgggatcggagctcgggcagctatgttgcagggtgtatccgaggttgcagaagctgtgaaagtcactatgggaccaaagggaagaaatgtgataattgagagcagttatggcggaccaaagatcacaaaggatggtgtcaccgtggcaaaaagcata

SEQ ID NO: 148395 - DNA, 452 bp, Arabidopsis thaliana columbia
aaaaaaaaacacaaaagcggcgttgttttaataagattttccgacaagatttctcgtgagaggatttgtctgaatctttctttcgaagaggttttgagttaatttcaaaatggttttggagaaaaaatctgcattgttggaagatttgataaagaaatgcggcggttgtgcggtggtcgacggtggtttcgctacccagcttgagattcacggcgccgccattaacgaccctttgtggagtgctgtttctctcatcaaaaatcctgagctcatcaaaagggttcacatggaatatttggaagctggtgcagacattgtggttacttcatcttatcaggctacgatcccggggtttctttctagaggtttatcaatagaagagagcgagtctttgcttcaaaagagtgtagaattagctgttgaagctcgtgatagattctgggagaaagtga

SEQ ID NO: 148396 - DNA, 347 bp, Arabidopsis thaliana columbia
  unsure (1)..(347): unsure at all n locations
gaaaacccgggcccgacccacngcgnccgcacacgtggggaggtagaggaccnnngactacaataaagatcggagaaccggcancaancncagggaaggaagaagcaccacgaacgggcacggaccaaagcacaacacaggctcttggtaaggctccgaagggaatgtgagagggcaaagagagctctaagtagacagcaccaagtccgtgtagagatcgagacaccctatgacggcgccgacacttcagagccacacaccagagctcgcaacgaggagcgtaacaaagaaacgggcaggaagaccaagggacccagagaagacagccaagcaagaagccccgcaac

SEQ ID NO: 148397 - DNA, 429 bp, Arabidopsis thaliana columbia
aatttcaatctcgaaaggctctccaatgtggtaatacacttgatctgtgtattaatatagtggatattgaatcacttgaacaattgatccctcgtctcactcaactggttcgggggggggtgggcctaaatccagaggtgggggtggcaggtttattttaatggtaggtcaaaaaggtgggtcccagataaagccggtcactggaatgctgctgagacttttggttcctgttgccaaagaggagaaaagttctgctgcaaaacgtgccttttcgagtgcttgcggcattgtattgaagtattctagcccctctcaagctcaaagcttaatcgaagaaactgcagctctgcactctggtgatagaagctcccagatcgcatgtgcgagtctgttcaaaagcttctcatctacagctgctgatattatgag

SEQ ID NO: 148398 - DNA, 449 bp, Arabidopsis thaliana columbia
ctcatttctccacatcttgagagaaaaaaatttatttgtatattagagatctcatggcgatggcggtctccggagctgtcctcagtgggcttggttcttcgttcctcaccggaggcaagagaggtgccaccgcattggcaagcggcgtaggcactggagctcagagagttggcaggaaaactcttattgtcgctgctgcggctgctcagcctaagaaatcttggatccctgccgttaaaggtggtggcaacttccttgaccctgaatggctcgatggctcgctaccaggagatttcgggttcgacccattgggtttggggaaagacccggcttttctgaaatggtacagagaggctgagctgatccatggccgatgggcgatggcagcggttcttgggatcttcgtcggccaggcctggagcggtgtggcatggtttgaagctggagcc

SEQ ID NO: 148399 - DNA, 460 bp, Arabidopsis thaliana columbia
  unsure (1)..(460): unsure at all n locations
atctggaccgtacgatactccgattacccaattattgctttaacataggggtacatctgtgagcttcacattccatcttcccccaatctcctatttgtgtcttcttcgagtttatatatagagagatagagattggagagcgagcgagacaaatcagaagagagagatttagatattgtagagtgagattctaaagagagagagagagagagatatggctagtggaatcgctcgtggtcgtttagctgaagagaggaaatcgtggaggaagaatcatcctcatggttttgtggcaaagccggagacggggcaggatggaactgtgaatctaatggtgtggcattgcactatacctggtaaagctgggactgattgggaaggtggattctttccattaacgatgcacttcagtgaggattatccgagcaaacctncgaaatgtaaatttccacaagggttt

SEQ ID NO: 148400 - DNA, 390 bp, Arabidopsis thaliana columbia
ctggatttgaaagttcgataaaaattttcagtcacattgacttctggaagcgatctcgatggctctagaattgtttcgacgacgaagatgaagaagattcaaattggtgcggtggcgctattggtgtttctatctgtggcctctctctttgaaatcggattggcttctccgaacacagttcctgctttcctctggtctccgcatctccagtctgctaatggtgaattggatgaggctgtaaattatcaggtcatgtctgcaaaggatctagttggttctgttttcactcaaggaggttggtcaaactttctgtgctcagagaagaagcttgagcaacctgttgatgttgcacttgtgttcataggcagagagttactgtcttctgatgtt

SEQ ID NO: 148401 - DNA, 431 bp, Arabidopsis thaliana columbia
cagcatcgagccacgcgctcctgaattttaatattcacagaagatggattacttgaagcataaagtcgatcccgcttttgttatggaacgccgtgccatgaagagagactatgaggaattcaaagtaaagataaatgcattggtttctgtatcacagaaagttcctgaagatggttggactatgcaagatggaactccttggcctggaaacaatgtccgggaccatccaggaatgattcaggttttcctgggacacagcggagtttgtgatatggatggaaatgagttacctcgtttggtgtatgtttctcgtgagaagcgaccgggatttgatcaccataagaaggctggagctatgaattccttgatccgggtatctgctgttctctcaaatgctccttaccttcttaatgtggactgtgatcattaca

SEQ ID NO: 148402 - DNA, 451 bp, Arabidopsis thaliana columbia
  unsure (1)..(451): unsure at all n locations
aagaaaaaaagcaaagaacactngaattttatcaagatagagatggaagggaaagaagagggtgttcgagtgggagctaacaagttcccggagaggcaaccgataggtacatcggctcagacggacaaagactacaaggagccaccaccagctccatttttcgagccaggcgagctgagttcgtggtccttctacagagccggaatcgccgagttcatagccaccttcctgtttctatacataacagtattgacagtgatgggagtgaagagagcaccaaacatgtgtgcctctgttggaatccaaggcattgcttgggctttcggtggcatgatctttgcccttgtctactgtactgctggaatctctggtgggcacataaacccagcggtgacatttggtctgttcttggctcgtaagctgtcattgacgagagcttgcttttacatcg

SEQ ID NO: 148403 - DNA, 400 bp, Arabidopsis thaliana columbia
ccgggaaggaacgggccggccgacgcatgcgtgcgggaatagcgtatacagtttcgacgatgtcattgctgagaactgccagaagagcaagagcttgttcattgcatggtctccggacactgccaaagtgagagacaagatgatttacgcgagctctaaagataggttcaagagagaactagatggaattcaagtggaacttcaagctactgatccaacagaaatgggtcttgatgttttcaaaagccgcaccaactaagtaaaacaaaaccctgtaagggcatttgaataagtttggtttctggagtgaatatgtttcctctgactgttatgaaaactttttaacaccttcaacttcattctacttggtattattgtatgtcctttgatgtgttatgtg

SEQ ID NO: 148404 - DNA, 390 bp, Arabidopsis thaliana columbia
  unsure (1)..(390): unsure at all n locations
gtggactgaggattggacttcattctttcaggattanttaaaagagccttatattagatctgctgaggatattgctttccatgccgctcttttcgttgcaaaaaatggaagttacatcaactattacatgtaccatggtggaacaaactttggaaggacttcatcttcgtatttcattacaggatactatgatcaagctcctctcgacgaatacggtcttttaagacagcctaagtacggtcatttgaaggagcttcacgctgcgataaaatcctctgcaaatcctctgcttcaaggaaagcaaacgattctctccttgggaccaatgcaacaagcttatgtctttgaagacgcgaacaatggatgcgttgcgtttcttgtaaacaatga

SEQ ID NO: 148405 - DNA, 424 bp, Arabidopsis thaliana columbia
  unsure (1)..(424): unsure at all n locations
gagaatctggtgctttagctttggtaaaatgtagattatctctagaacggttgctgnttcactcattgtgtcattcctcctgggtttctctgcctttgctgagcgcaatgacgggaccttcagagttggactgaaaaaactcaagttggattcgaaaaatcggcttgcagcacgcgtcgaatccaagcaagaaaagcccctgagagcttacagacttggagattctggagatgctgatgttgttgtgcttaagaattatctagatgctcagtactatggtgagatcgccattggtactccacctcagaagttcactgtggtttttgacactgggagctctaacctctgggtgccatcatcaaaatgctatttctcacttgcatgtctcttgcatcccaaatacaagtcgtctcgttcaagcaca

SEQ ID NO: 148406 - DNA, 445 bp, Arabidopsis thaliana columbia
ctttctacaaggctttcaatccattatcctctagttttctctggatctcttcctcctaccggcgggttgcctactctctttgagcggagtaacatcttcgccgcttcatatgactctgttgtagtcgaggactttcttttggtctcaggcggagcttccaatttaggagattgggttaagggataaagatttcttcaagtcttctttgagcttctttcagacggaaccggtgattgttcatcagatctgcaagacgaaaactgtagaaggagtacggtggtggttgcttgaagccaacggaggtgctgagtcaactcgcagatttgcccggcgccgactgcttctccttctccttcttatgtgtgaacacgtggagttacacgtggtgttacacgtggtggctccttattttcttaatcctttactttatttagtgtaagattaa

SEQ ID NO: 148407 - DNA, 454 bp, Arabidopsis thaliana columbia
  unsure (1)..(454): unsure at all n locations
gcaaaactaagtgctatctctcttctncttctttcatactatcaacttatataccatgagtctgtggaacactgaaaacacatgggcctttgtctttggcttgctcggcaaccttatctcctttgccgagttcctatctcctgtgccaacgttctataggatttggaagaagaagacaacagaagggtttcagtctattccttatgttgtggcgctcttcagtgcgacgctttggctttactatgcgacacagaagaaagatgtcttcctcctcgtaaccattaacgcctttggttgcttcatcgaaaccatctacatctctatgttccttgcctacgctcccaagccagctcggatgttgacagtgaagatgctacttcttatgaactttggaggattctgtgcgattctccttctttgccaattcttgtaaaaggagccacacgtgctaaga

SEQ ID NO: 148408 - DNA, 438 bp, Arabidopsis thaliana columbia
  unsure (1)..(438): unsure at all n locations
tgaatattgaagaaagtttctctgataaataaangatggacgaagatagcaagtttagacgttgggattagttgattccagatgctcttggtttaatctttagccacttacctcttcaagaagtactaacagtggtgcctagagtttgcaaagcatggaacagagctgttactggaccttattgttggcaagagattgacattgagctgtggagtaaccgttttcaccagtctgatcatcttgaccggatgcttgagatgttgatccctagaagcgctggctctttgcgaaaactctccgttactggccttcgaaatgactctatcttctccttcattgcacaacatgctggttcacttaagaccttgaaggtgccaagaagtggtctgactaattcgggtgtggtaaacgtagctgaaaagctttcgtctctcactt

SEQ ID NO: 148409 - DNA, 367 bp, Arabidopsis thaliana columbia
  unsure (1)..(367): unsure at all n locations
acgaagcacactgagaattcaccggccagtgantaccaataagtgttgtagtttccggttacttcgaataaccttcaatggagcttccgttactctcgtatgctagctccgcgtcgttttcacggacaggcttatgctcttcttcttcttcctcctcaactagtatctatgagtttccggagagaagacggagtttaaaattgagattcaatggtggagaaaggtcacgaagcgttatagcttccgctgaacggagcagtgaagggattgagaagacaacagacaccgtcggtggcggaggaggaggaggagcaagcagatttgctggtactgccatggaggttactacacttgatcgtggttttgc

SEQ ID NO: 148410 - DNA, 339 bp, Arabidopsis thaliana columbia
  unsure (1)..(339): unsure at all n locations
gtcgattcttcgcgagattggngatgttagtcctactgaggatggagatgaagaagaagaagaggactaggatgaagatgatggacgtgatgaggaagatgaagaaggagaaggagaaggtgggcaagaggaaaggccaaagcttgatgaagggttttatgaaattgaagctattcgtcgtaagagagttcgaaaaggcaaggttcagtatctaattaaatggcgcggatggcctgaaactgccaacacatgggagcctttagagaatctccagtctattgctgatgttatagatgcctttgagggaagtttgaagccaggaaagcctggtaggaaacg

SEQ ID NO: 148411 - DNA, 454 bp, Arabidopsis thaliana columbia
ccacgcgtccgatataatgacttgaccttgatgcggactgaaattaattgatgataacttttggttgctgatggttatattattacccttttacagttttacattttgactgatttggttttgtgtttacatatttttaacgagggacacaaattgtgtattggttatgtggttggctttgttttacagattcagttaattgatgtgatcttcgacgggtttgtcctaactgtagctgtgggtgatgatagttctgaaaatctagtctggatgttattgatgaaggtgtttggctcattccattatgtctagccgcttgagacgtttccgcagtttatgacctttagtttatgttcgttttgttatgttcccgaagccggtaataaaagtgtatttctgaaactactacgccttgtattcaatagataatattcatattctacatttgatttct

SEQ ID NO: 148412 - DNA, 385 bp, Arabidopsis thaliana columbia
  unsure (1)..(385): unsure at all n locations
gtctctctgcttcaggggtctncgtttttcttcccatttttcaagnctttgaccaggcttgtttcattggtcctgaactcagggttagagcagcatttgcatatatccaaggggtttgggggccaatggatagactttaagatgggttctgggaattggattaaggcattaattggatggaggagagagaaacagggacctgaaaggaaaaaacctggggttgagaaaccaaaaaagggttccaagaagaagggtacatcactagttactcgtagtgaggattgggctgctactcggattcagactgcttttaaagcctataaggctagaaaaagcttacggcgtctaaaaggaattgcaagagcaaagttatcaactgagaaac

SEQ ID NO: 148413 - DNA, 383 bp, Arabidopsis thaliana columbia
  unsure (1)..(383): unsure at all n locations
ggaaggcccggcccgacccacgcgtccgctgcaatctgtctctcgnaatctcttttcattcttttgtccgaaccttaactgattttcggtttcctgagacagatttctagtgtgaagaatcatttcgagccatgtctccggctaaagtctcttcctttgaccaaaacattgaagaagctcattcagtgagtagtccaagacgagttttaagcttctcgaagagaaataagcaaaagcctggtttccaagatacagacagtagaaggtcatcttcatttagagcatcagaagtgcatggacctaaaccctcagaggtgtacggtttcgtaggatcgatatcgactgttgttgccacagtcatcttcttggtatgggcatatgtt

SEQ ID NO: 148414 - DNA, 457 bp, Arabidopsis thaliana columbia
  unsure (1)..(457): unsure at all n locations
tttccagccaacgccgtaccagactctcggaggtggngctaacaccgttgctcatggctacaccaaaggttctggccttggtgctgaaatcatcggaacattcgttctcgtctacactgtcttctccgccaccgacgccaagagaagcgcccgtgactcacacgtcccgattttggcgccgctcccaatcggatttgcagtgttcttggtacacttggcaacaataccgatcaccgggaccggaatcaacccagctagaagtcttggagccgcaattatctacaacaaggaccactcttgggatgaccattggattttctgggttggaccattcattggagcagctctagcagcactatatcaccagattgtcatcagagcgattcctttcaagagcaagagttagagacacacagaaagattccacggtccagaatttgttctttagtagtttctt

SEQ ID NO: 148415 - DNA, 443 bp, Arabidopsis thaliana columbia
  unsure (1)..(443): unsure at all n locations
actatggatggtgtcagatccgngtccgacggttagatcttccgtcctgataacttcgtatttggtcaatccggtgccggtaacaattgggctaaaggacactacactgaaggtgctgagcttatcgattccgttctcgatgttgttcgtaaggaagctgagaattgtgactgcttgcaaggattccaagtgtgtcactcattaggaggaggaactggatctggaatgggaacgttgttgatttcaaagattagggaagagtatccagataggatgatgctgacgttttctgtattcccatcaccgaaagtgtcagacactgttgttgagccttataatgcaactctctctgttcatcagcttgtggagaatgcagatgagtgtatggttcttgacaatgaagctctctatgacatttgcttcagaactcttaagctcaccac

SEQ ID NO: 148416 - DNA, 448 bp, Arabidopsis thaliana columbia
atttccccaatttctcagagagactcaaaaataccatcatctccaaatcgccgccatgtttaaacaggcttctcgtctcctctcccgatctgtcgccgccgcatcttccaaatcggtgacgactcgtgccttttcaacggaacttccatcgacgctcgattccactttcgtcgaggcatggaagaaagtcgcaccgaatatggacccaccgcagactccttctgctttcatgaaacctcgtccttccactccttcttctatcccgacgaagctcaccgtcaattttgtcctcccttacacatctgagcttaccgggaaagaggtcgacatggtcatcattcccgcatcaacaggacaaatgggtgtcttgcccggacacgttccaacaattgctgagctaaaacctggcatcatgtccgtccatgaaggcactgacgtgaagaaatac

SEQ ID NO: 148417 - DNA, 406 bp, Arabidopsis thaliana columbia
gaggaatgcaaactcaacgctctcgaagctatcagtttatacactttgcctaacccgaaatcgcagtacaagttcatacgatgcgttgaaaacaatacggataactgggaatcatcatgtttaaagggctatggaaatgagaaagccatcaatgattgttacaatagtgatctctctaagaagctcatacttggatatgcaaaacaaacctcgagtcttaagccgaaacatgaattcgtaccatgggtcacaatcaacagcaaaccactctatacgaaactagatgatttggtgggtcaagtctgcaaagcttacaaaggaaagactccactcccaatagactgtagttccgctgccttgtccgagaggaaaatgtcgaatgttgaattctcctatgtagatgaaa

SEQ ID NO: 148418 - DNA, 361 bp, Arabidopsis thaliana columbia
  unsure (1)..(361): unsure at all n locations
gtcttaagctttatttctccgntttctgaatgactttctttatcgnctcggtttcgtcgtctgatgtcaacgacggcgatgatctcgtgatccgtcaggtggttggtggagccgagcctcaggttttgacctcagaggatcacttttctctcttcaagcggaagttcgggaaggtctacgcttccaacgaggagcatgactatagattctcggttttcaaagcgaatctcaggcgagcgaggcgtcaccagaagttggatccgtcggcgactcatggtgttacgcagttctcagatctgactcggtctgagttccgtaagaagcacttgggggttagaagtggctttaagcttcctaaaga

SEQ ID NO: 148419 - DNA, 415 bp, Arabidopsis thaliana columbia
  unsure (1)..(415): unsure at all n locations
ctgatccttctctcatcctcagaaagtangtcataaaccatgctgcttacttcaggcgtcaccgccggtcattttttgaggaacaagagccctttggctcagcccaaagttcaccatctcttcctctctggaaactctccggttgcactaccatctaggagacaatcattcgttcctctcgctctcttcaaacccaaaaccaaagctgctcctaaaaaggttgagaagccgaagagcaaggttgaggatggcatctttggaacgtctggtgggattggtttcacaaaggcgaatgagctattcgttggtcgtgttgctatgatcggtttcgctgcatcgttgcttggtgaggcgttgacgggaaaagggatattagctcagctgaatctggagacagggataccgattacgaagc

SEQ ID NO: 148420 - DNA, 406 bp, Arabidopsis thaliana columbia
  unsure (1)..(406): unsure at all n locations
aaaaaaggggtacctnnncancnccttttgataactttttctcnnncancanaacgctgacgctcgtcttcgacgtctgggatcgcatccaggaattgggtttagttcgattcgatcatcagctatctcaatttttctggggattgttctaaaggtttctagtgacttgtttaaagtggttggtattggataatgccttctctcatctcacagcaatggcaggagaggactagtggattcttttcttcatcaggaacgaagcttagggaagcagggcagactgctggtagttttgtcggggaagttgctaaggatgcgaaagtgaatgttgcagatgttgcataaagagttgggtcgttgtttaaaagccggtgggcaattcttcaacaacctgcaactagacatg

SEQ ID NO: 148421 - DNA, 386 bp, Arabidopsis thaliana columbia
  unsure (1)..(386): unsure at all n locations
ctttcgcgtcttttgcttcctcccncnnnttgcctttgttttcttnaganctagctaatatggcgacgattttgttctttctcgcttctaatcaccgtagagatcctcccgatctgcaaatccgatccgaattctcaacgaatttgtagatctgatctgtgattccatcgttgacgacggatcttcgcttacatcgtttgatctgtcgcagatctgccgttttctatagatctagatctggatcgtccttcgcggcttcttcacatgcaagattctgtgaattgttcaagttgaggcatcatttctggattactaggagacgaatctgttgcagacagatgtgtgtgtgttggattgaattgagattagggtgtagaagatgtttt

SEQ ID NO: 148422 - DNA, 449 bp, Arabidopsis thaliana columbia
  unsure (1)..(449): unsure at all n locations
ggaatgaaggggtggaccgacgcgtgcgtacaacgtcgcgaataatggcatcaccncttttgttttcttctgtcatcgctgccatttctggtcgaagtttcttgggtggtaagaaactgaggctgaagaagaagttgactgttccagctgtgtccaggccagatgcgtcggtgcgcgccgtcgcagctgatccagatagaccaatctggttcccgggaagcactcctccagagtggctagacggtagcctccctggtgacttcggatttgatcctcttggtctttcatcggacccggacagtctaaaatggaacgtacaagccgagatagtccactgccgatgggctatgctaggagccgccgggatattcatcccagagttcctaacgaagatcggaatccttaacactccgtcatggtacacggcgggagagcaagagtatttcacg

SEQ ID NO: 148423 - DNA, 454 bp, Arabidopsis thaliana columbia
atcatgggagatccaatgaggaaggaagtggggtcggttttttagaaaaccgagacggcaaagcgagaattcaaatctttgtctcagagctgccagaagaaggtttcatataatcagtctttattaacaatcctgcttctttttacctctacaactcttttatatccatcaatactcacaccagatgataaataaatgacaggagagggaatacaaagagatacatgaggctttcgacgaaaagaacaaagagaaagcacaccttgtttcaatcttaatggagctactagctgaaagtgaaagagtaagggtgaagaagctggaagagatcaacaagactattgggtccttgcgataatcaattctaccttttacatgggaactgtttgaggttttggatcatttatggattaaagttcctctactgaagtgtgagaaaaggtgtaaaagaatg

SEQ ID NO: 148424 - DNA, 426 bp, Arabidopsis thaliana columbia
  unsure (1)..(426): unsure at all n locations
gcgagatcgcagctccaatgctacggcgagtcctccctctgtttcgacgggcacgatctactcggagaatgtagtcgtcgtgacaaaccaatcgaacggatgaaagcaatggtgacgtggtacatctcaacactccggcctttgatctttggcttggctccatacaatcctgtcatcggcgaaactcaccacgtgtccaatggtcacattaacgttctcgcagagcaaatatcgcatcatccaccagtttctgctcttcatgcaactcacgagaaagaaaacgtagacgttttgttatgtcaatatttcacgcctaaatttcgtggtgcttacgtggacgttgaggtgaagggtaaaagagtggtgaaacttctgaatcacatagagactnacgaaatgaaccaaccaaaacttctcatgacggtt

SEQ ID NO: 148425 - DNA, 390 bp, Arabidopsis thaliana columbia
  unsure (1)..(390): unsure at all n locations
ggatggtcagacccgagagcacgctctncncgttttacccttggagncaagcagatgatgggctgttgtaacaagatggatgccaccacccccaaatactccaaggctaggtacgatgaaatcatcaaggaggtgtcttcatacctgaagaaggtcggatacaaccctgacaaaatcccatttgtgccaatctctggattcgagggagacaacatgattgagaggtcaaccaaccttgactggtacaagggaccaactcttcttgaggctcttgaccagatcaacgagcccaagaggccatcagacaagccccttcgtcttccacttcaggatgtctacaagattggtggtattggaacggtgccagtgggacgtgttgagactggtatg

SEQ ID NO: 148426 - DNA, 396 bp, Arabidopsis thaliana columbia
ttcaccaattttagaattcccattctcattccttctctctttctatttctccaaatttgccgaaagattttacattttatcttcaatccttccttgatttacgtttgaaatatttcgacccaaaactatactgatggagagaacaaacagcattgagatggatcgagagagattaacggcggagatggcgtttcgagattcatcatcggccgttataagaattcgaagacgtttgccggatttattaacgtccgttaagctcaaatacgtgaagcttggacttcacaactcttgcaacgtgaccaccattctcttcttcttaattattcttcctttaaccggaaccgtgctggttcagctaaccggtctaacgttcgatacgttctctgagctttg

SEQ ID NO: 148427 - DNA, 409 bp, Arabidopsis thaliana columbia
  unsure (1)..(409): unsure at all n locations
gggcgagccacgcgnccgcaaaaacataagctaagaaaacgaatctccctattttttttatcacccaacaagaagtgcggacacttttggtgtgggtgggaggctcttcacatgccttgttttaacggtgtgcatagttgcatcagtcgatgctgcaatctcatgtggcacagtggcaggtagcttggctccatgtgcaacctatctatctaaaggtgagtgggtgccaccttcatgttgtgcaggagtcaaaactttgaacagtatggctaaaaccacaccagaccgcctacaagcttgcagatgcatccagtccactgcgaagagcatttcttgtcttaacccaagtctagcccttggcctttctggaaagggcggggttagcattccatatccaatcttcatgagc

SEQ ID NO: 148428 - DNA, 205 bp, Arabidopsis thaliana columbia
  unsure (1)..(205): unsure at all n locations
aagctgngnggcttactgtacctcacaccggatcaaagtgcgtctccgaagaaatccaaagcaacgtcatcgttttagctgattaccttgttatctactaggaacattctatcttccctactgtctccgttaaggttacagcaccttatggcaccgtgttacaccacatggaaaatacaacaaacggtcagtttgcattcacaac

SEQ ID NO: 148429 - DNA, 403 bp, Arabidopsis thaliana columbia
  unsure (1)..(403): unsure at all n locations
cgaaggacttatactgnctacaacattcgtccgcatctttgnanncacnagctgctggaggggcattgttccatcctcaggttcccgcgatcttattcacgcctatctgtccgcattctctatcattccgcccactaatattaccggaacacgtgacagtgagagtccaagtgccattcaacagcagaagctccgcttgggtctcctttgatgggaaagaccggaaacagcttgaagcaggggatgcactagtgtgtagcatggcaccatggcccgtctcaaccgcttgtcaagttgaatccactaacgacttcttacgcagcatccacgatggtcttcactgggacctaagaaagactcaatctgctgatggaccttagaaacatattcctccagctttttc

SEQ ID NO: 148430 - DNA, 426 bp, Arabidopsis thaliana columbia
gtttcagcgtagataatcttctaggatagtgacttttgtacgagtatacagagctgagttggatgatggaaaggttcttgctgtgaagaaaattgattcgtctgctctcccacatggcatgaccgatgatttcattgaaatggtatcgaaaatagccaatttggatcatccaaatgtgaccaagcttgttggttactgtgctgagcacggacaacatctcgtggtctatgaattccacaaaaatggatcattacatgacttcttacacttatcagaagaggaaagtaaagcattggtgtggaattcacgagtcaagatcgctcttgggactgcacgcgcattggagtatctgcatgaagtttgctcaccgtctatagtggacaagaattcaaatcagctaattatttactcgattcagatctgaat

SEQ ID NO: 148431 - DNA, 348 bp, Arabidopsis thaliana columbia
gttaacagatcgactccaccggggagtttactagcttccacggctaggaagcaggctaatagaaaaagcattgatcagaagaaaaccagtctaacagcatcacttacaaaaccaaacgtgaggagaagattggaatggaaagctggaggagctagtattcccactggtgtgtctcttgaagacgaacaacattgtgatcatgacgagaatgcgaaggaaacgagtcattctagtcacaatacggtgcagaagttaggaggtgtttccagttctcttaatggcaatatcccaccatccggtgctacaatggtaacagggcatcacgtcttgtctgaaaacccaatagta

SEQ ID NO: 148432 - DNA, 401 bp, Arabidopsis thaliana columbia
ttttctgactcttcaatctctcccaaagcccaatgcgatctctgcaaatctctcgcgactctctgtttcaagatgcaaatcttcgtgaaaacactcactggcaagactatcactctcgaggttgagagctctgacaccatcgacaatgttaaggcaaagattcaggacaaggaaggcattcctccggatcagcaaagattaatattcgccggtaaacagctagaagatggccgtaccttggccgattacaacattcagaaagaatcaacccttcatttggttctccgtttaagaggtggtatgcaaatctttgtcaagactctgactggcaagaccattactttggaggttgagagctctgacactattgacaacgtcaaaagcaagatccaggacaagga

SEQ ID NO: 148433 - DNA, 443 bp, Arabidopsis thaliana columbia
  unsure (1)..(443): unsure at all n locations
caaaattttgattagaaaaaaaaanaaactccatccccattataannnagggncaaaaaaagagcatccaccattaatacaggtgaaacccaactttctctccccttttttcttacaagtttgaatatcaaagtacggtctcttttttttctatataatagttatttaatcaaccatacacattcatcaaatccatatttcatgcagctgttacatttttattatatgtcctcttacttccttttgagtgtgtatatgtgcttaattatattccctcatcacaacctcaatctcaatctcaatcatgtctccaaatctcaatcatgcttcttccactttgattcttatctatctggatcacaattctattcatatcctttaatcaaaatcatatcatagcttcttttttttatattactaatcttgatgaagatcaccaaaac

SEQ ID NO: 148434 - DNA, 379 bp, Arabidopsis thaliana columbia
attttgatactttgttaaaggcactaatgaagaagcagtatctgaaatctggatctgggacaaggaaggaaaaggacaaggcgaagaggtggttcttggataacggaagcatcttcttaagagaacttgtagctgattgtaacggtaaatccattcctattcgcagtttttctcctgagcagatattgaaagccaccaacaatttcgattctagctgttttgtctcgcaagatgtatactataaatggtatagaggtgaaattgaagatagatcttacatgatcaagagattctcagaggatgagattacaggaaaacgacatagagtttaagaagtttacaacgacaatgtctagtctgctcggatgaacaatcacag

SEQ ID NO: 148435 - DNA, 422 bp, Arabidopsis thaliana columbia
  unsure (1)..(422): unsure at all n locations
cgcgtccgaaaaaaaaacacaaaaaagnnncaaaggccgcctcacattggctctctcctcccctgctttcggcggaaaggctgtgaacctttcccctgcggcatcagaagtccttggaagcggccgtgtgacaatgaggaagactgttgccaagccaaagggtccatcaggcagcccatggtacggatccgaccgagtcaagtacttgggtccattctctggcgagtcacccagctaccttaccggagagttccctggagactacggatgggacacagctggtctatccgctgaccccgagacattcgcaaggaaccgtgagctagaagttatccacagcaggtgggccatgctcggagccctaggctgcgtcttccctgagcttttggccaggaaacgagtcaagtttggagaggcagttg

SEQ ID NO: 148436 - DNA, 324 bp, Arabidopsis thaliana columbia
ccagcggtgccatttcttctccaaggtgctcggccggtaagaaactgaggctgaagaagaagttgactgttccagctgtgtccaggccagatgcgtcggtgcgcgccgtcgcagctgatccagatagaccaatctggttcccgggaagcactcctccagagtggctagacggtagcctccctggtgacttcggatttgatcctcttggtctttcatcggacccggacagtctaaaatggaacgtacaagccgagatagtccactgccgatgggctatgcttggagccgccgggatattcatcccagagttcctaacgaaaatcg

SEQ ID NO: 148437 - DNA, 424 bp, Arabidopsis thaliana columbia
  unsure (1)..(424): unsure at all n locations
gaaaaccgggccggcccacgcgtccgagaaaatcaaagcagcagttaaggccgtcctttcttattagcaccccaaggaagangaggagaggaattctgaagcgtctagggcgccaccaaagctagagacagacgtggagatcaaggcttcggctgataagtttcaccacatgttcgctgggaaaccacaccatgtctccaaagcaagtccaggcaacattcagggatgtgatctgcacgaaggcgactggggcacagtcggctctatcgtcttctggaattacgtacatgatggggaggcaaaggtggcgaaggagaggatcgaggcggtggatccagataagaacttgatcacgtttagggttatagaaggtgatctgatgaaagagtacaagagcttcttgctcaccatccaggtgacccct

SEQ ID NO: 148438 - DNA, 395 bp, Arabidopsis thaliana columbia
  unsure (1)..(395): unsure at all n locations
acgaaacaagcaaaacaaggcncagccttgctccttatttatnagaaganacaaaggagccaggcatcctcagagacgaggagcgcccccaccattcctgaatcacaagtttctgcatcactaccatgttttcaggcgagcgctgacgggataagaccacggaagagcttacctgaagccaggaagagagacatcttctatggagaagatgacgtggcagacttgcaggctagagaagaggaagcggaacaagacacggtcatgaaagcttatagaaagaacgaaactatgaaatctatccaagatacgagacgaagacaaagaaggctcgttaagcntcgaatgttaagactccctcaaactcattttctctagagatcggaactaaaaacccc

SEQ ID NO: 148439 - DNA, 385 bp, Arabidopsis thaliana columbia
  unsure (1)..(385): unsure at all n locations
gaaaaaaacaaacancnagaaacaaacttcctccttattctgccgnnnncnagnacaagagggatttttataaatattcgacgccccacacaagcgngnnnntaatccctctctgatttaattttgtttcctagtctttaaagatccatggcagccatagatatgttcactagcaacacagatccttttcaagaagagctcatgaaagcacttcaaccttataccaccaacactgattctccttctcctacgtatgcaaacacagtctccggtttcaatcaaaccacatctatcggactaaaccagctcacaccctaccaaacccaccaaaaccaaaaccagcttaaccagaaaccttacataatctcttcaaagctaaccccaa

SEQ ID NO: 148440 - DNA, 453 bp, Arabidopsis thaliana columbia
  unsure (1)..(453): unsure at all n locations
tatgaatatgaagaaacagattatggaagtgcctgnttagtcattgatgctgcctcctcctgcacgcgcttcttcctccatctcagggatatggatcaagaaagatcgatggagacagcataaccaataaacagatcaagaagttctggagacagaagcagatcattgaagaggatcatctctattctgctattaaggctgcagctcgtgtcagagctcgtaatctctctgatgaggactacaaacgctttgaagaaagcttggacatggaggacctggaaaccgaagatcatcagggattgaaagactggtggacaaagagcaaatacgcgtacttgaaccagccggctcttggatctgcagattcactgaagagaaagaggttttcgacttatacaccaaactgtttctcgttcaagccttgcaatcctctctacgcaacttcgctcaatg

SEQ ID NO: 148441 - DNA, 436 bp, Arabidopsis thaliana columbia
aaagagacggagagtgagagaagagagaatcactccttgacaaaaggccgccgccgctgctggggctctcgtcaccatccaaaccttggatggtgacatgtccaccgatcaatcctccaccgtcgtacttcccgacgtcatgacggcgccagttcgaccagacatcgttaacttcgttcacgcccaaatctccaacaacagccgtcagccatacgccgtatcgaagaaggccggtcaccagacctccgccgagtcctggggaaccggacgtgccgtgtctcgtatccctcgtgttcccggtggtggtactcaccgtgctggtcaagctgcgttcggtaacatgtgtcgtggtggtcgtatgttcgctccaaccaagatctggcgccgctggcaccgtcgtgtcaatgtcaacatgaagcgtcacgcaatcgtctca

SEQ ID NO: 148442 - DNA, 363 bp, Arabidopsis thaliana columbia
aattaagacccttttctcttcttttcttcttctccactagggtcagatcctttaccgagagttcatcttgtacgagattcatctttaacaaccagattcgccataggccgccgccgtcgcagcacccgagactcatctccttgaaagccgtcgcgaagctaggtttccgtgagatctctcaaatccgacaattggctccgcttcactctgcgatacctcatttcggaatgctgcgatgtagatcgcggcagccgttttctacctctgttgtgaaagctcaagctactgctactgagcaatcaccaggggaagttgttcaaaaagtggaatctccagtggtccgtatcactggtgcctcgagag

SEQ ID NO: 148443 - DNA, 420 bp, Arabidopsis thaliana columbia
  unsure (1)..(420): unsure at all n locations
aggagaaaggggnnncaggaaacaaggagctttttttctcganctagancnancganctggatggatatataaaagcgtgaatgagaccctcacggagtcgaaaggtggtaaaaagaagtccagcagtagtagttccttattttacgaagctcccctcggttacagcattgaagacgttcgtccaaacggtggaatcaagaaattcaaatcttctgtctactcaaactgctccaagaggccatcctgagtaccagcgtgcaccgatcttcataatatagttatagctttctttactttccagtttataattttcttctttcaaagctccttttctgctgtttcccggatccaatcgttctctccttctactacaagtnctgtcgctcacacaacaaggcgagatggccctatctgcaatc

SEQ ID NO: 148444 - DNA, 367 bp, Arabidopsis thaliana columbia
  unsure (1)..(367): unsure at all n locations
aagacgcggggacaaagacacagagaaagactcctttttttaaancgaaagcagagaaaaggggggagtgtttgaagacatgaagctcaccgcgctagagcgcattgtgttcatggagggtgtcatggactgtccagagacaatcatagcaactgaggacaaactttctggaggagaagctgctgtaacgagcgatgcagtacagcttatgtcatgcacaacaccaatgctcacatgagtaccaccgtccaaagagtgctgccgcaaaccgaacgagcaacagccgagtaacaggacatatatgaaagatccaagatacaggcaacatcatcgggctgcaaatgcttataaaacactagcaacttgt

SEQ ID NO: 148445 - DNA, 439 bp, Arabidopsis thaliana columbia
gccggaattcggtcgccacgcgtcgaatcttaaacgttactttggctgactactcacctcattggccgcctcaacaatggctcgctcctcccctgccttcgccggtaaggccgtcaagctttcccccgcggcatctgaagtccttggaagcggccgtgtgacaatgaggaagactgttgccaagccaaagggcccatcaggcagcccatggtacggatctgaccgtgtcaagtacttgggtccattctctggcgaatcaccgagctaccttaccggagagttccccggagactacggatgggacaccggcggactttcagctgaccccgagacattcgcagggacccgggaactagaagttttccacagcaggtgggccatgctcggagccctaggctgcgttttccctgagctttaggctagaaacggagtcaagttc

SEQ ID NO: 148446 - DNA, 438 bp, Arabidopsis thaliana columbia
  unsure (1)..(438): unsure at all n locations
agaagcaattgaaacgcaaaaggaattccgtgattatatgttncaagcnannnatnagagggggaattcttaatttgaaccatgtcctgtaattatttggcaggcttttgagccccctatagacttgagtaaacacatgcgcgagccaataacaggagcactgtctatggaggagctccaaagggaggaacatcatcatgatcattccctcaagaatgcagagataagactcaataacaagacatgtgaatttgatggaggccacttaaatcatgaccatggcagtgtaccattttcatctcatgattggttggattcttcagtacaggcgcatgttcctctggttgatgtaaataaggtatgctttttcacttttactatggntgattatattagatttttttcatcctagcaactcataatttgtgaaaagctatt

SEQ ID NO: 148447 - DNA, 179 bp, Arabidopsis thaliana columbia
  unsure (1)..(179): unsure at all n locations
aaaacccaaaaagcnnccgcgtcgactcttcaaaggaggcgccagcggggggggaagcagacagcgaancggggccggagagcaggagcaacagaaatcggcaccggacggcggcaaacaggtcccgaggccgagccgggaaaagggggaccccgggagagaggcccccctcccctccc

SEQ ID NO: 148448 - DNA, 433 bp, Arabidopsis thaliana columbia
  unsure (1)..(433): unsure at all n locations
acctaaatctctctcgatctcaaagacgcacctggctgtcaagaagaccagaancggaatcaacggtttctgaagaatcggtcgtgtggctgctagagttgttcttcagagggatgatgtcgagctcgtcgctgttaacgatcctttcatcaccaccgagtacatgacatacatctttaagtatgacagtgttcacggtcagtggaagcaccatgagctcaaggtgaaggatgacaaaactcttctcttcggtgagaagccagtcactgctttcggcatcaggaaccctgcggacatcccatggggtgaggctggagctgactttgttgatgagtctactggcgtcttcactgacaaagacaaggctgctgctcacttgaagggtggtgctaaaaaggttgtcatctctgccccaagccaagatgcgcccatg

SEQ ID NO: 148449 - DNA, 419 bp, Arabidopsis thaliana columbia
  unsure (1)..(419): unsure at all n locations
nctnccttatctctaggaaaccaagaagcactgattttttggccnncnncnnccncancggagcggcgttactagcaggttcggtcggacctaccgacatctccggcgaggttaccgacggtttcgttaacccgatcaggcaagtcgtcccggaggagaacgatgaacaactcctcaacgcagaacatcacttcactctattcaaatccaagtacgagaagacttacgcgactcaggtagagcacgatcatcggttccgtgtcttcaaagctaacctaagacgagctaggcgtaaccagcttctagatccgtctgccagccacggcgtcacgcagttctcagatcttactccgaaagaattccgccgcaagtttttaggactgaaacgccgagggttcgtcttcctactgatactaaga

SEQ ID NO: 148450 - DNA, 191 bp, Arabidopsis thaliana columbia
acatgaggccccccaaaacaagcggttatccaggtcggacttaccgattctacaccggagaaacagtatacgcattctgagatggactcagctacaccaaattcagtcacactttagtcaaagctccaagtctcgtttctctcggtctttaataaaatcacagtttgccgatcatcataatgtcaatctct

SEQ ID NO: 148451 - DNA, 291 bp, Arabidopsis thaliana columbia
  unsure (1)..(291): unsure at all n locations
agaaaacaaaactcgctnccagaaattactcctttatctncncnancaagcnnancgaagggcacatctggaggaagaaacaacggctcgcaccaagcaaaccgctaggaaatccaccggaggtaaagctcccaggaagcagcttgccaccaaggcggcgaggaaatcagcaccaaccaccggaggagtcaagaagcctcaccgttaccgtccaggaaccgtcgctcttcgtgagattcgtaagtaccagaagagcactgaattgttgatccgcaagctttcctttcagcg

SEQ ID NO: 148452 - DNA, 281 bp, Arabidopsis thaliana columbia
  unsure (1)..(281): unsure at all n locations
ngcgaggacgcgagggccaanccaggcagctcctccaaaaataagaagacagancnancaacggggagcaaccagagcaagnaggagcccccccccaccccggccaagaactagaggtctgagaaaggcgaaggcaacaggaagacgaaccacacgaaaccccgacgcacccccaatgaacccggcagctggaccacaagtggaagaatcctcaccggagagcgggcaatcggtgacaaccccgaccggggaccccggacaccggatcagtcagcaacagc

SEQ ID NO: 148453 - DNA, 349 bp, Arabidopsis thaliana columbia
  unsure (1)..(349): unsure at all n locations
ggcctagaaacttgagctcaacacaaagactgctgcttcaagagctgncaccgcaaacgacgtcctcaagccacctccattcgcactggatgctttggagccgcatatgagcaaacaaactctggagtttcactggggaaaacatcacagagcttacgtggacaacctcaagaaacaggttcttggaaccgagcttgaaggcaagcccttagagcacattatccacagcacttacaacaatggtgatctcctccctgctttcaacaacgctgctcatgcgtggaaccacgagttcttctgggagtcaatgaaaccaggtgggggaggaaaaccatcaggagagcttctt

SEQ ID NO: 148454 - DNA, 374 bp, Arabidopsis thaliana columbia
  unsure (1)..(374): unsure at all n locations
aatcagattgctgacgggncaggnnttanatgggtttcttgncgggcaaaaggaggatgacgcggtttcaaagtggcgatacgtgggagcagctggtggaattggacaacctcttgcgatgttgatgaagatgaatcctttggtttcggttcttcatctctatgatgttgctaatgctcctggagttactgctgatattagtcatatggatactagtgccgttgttcgtggatttctcgggcagccgcagttagaggaagcacttacgggtatggatttagtgatcatacctgctggtgttccgaggaaaccagggatgacgagggatgatctgtttaacattaatgctgggattggggggcactctctgaagc

SEQ ID NO: 148455 - DNA, 437 bp, Arabidopsis thaliana columbia
  unsure (1)..(437): unsure at all n locations
cttcttcatcgatttctctctnccaatccctccttttgatgtcgaaccctagagttttcttggacatgtgtctcagcggtactcccatcggacggatcgagatggagcttttcgctgatacaaccccaaacacggcggagaatttccgtgctctctgtaccggcgagaaaggaatgggaaagctaggtaagccacttcacttcaaaggatcgatcttccaccgtgtgattcccggattcatgtgtcaaggaggtgatttcaccgccaagaacggaaccggtggtgaatcgatctacggtgctaagttcaaggacgagaactttatcaagaagcatacaggagctgggattctctcaatggctaactctggtcctaacactaacggatctcagttcttcatctgtaccgataagacgtcgtggntagatggtaagcac

SEQ ID NO: 148456 - DNA, 368 bp, Arabidopsis thaliana columbia
  unsure (1)..(368): unsure at all n locations
cacaaccggtttcatcggtagaagaacaagccgtccagattttgctncggancncacatctgagatcatattaatctctctgagaagcccaacaacgaaaccctagttcccatggatctctcttcacgcttctcatcgatccttatccttctcttgatctccatctccatagcttcggctgagattcgtaaatcagagatccgatccgatgatcgtccaatcatccctttagacgaattcggtttcactcacagcggtcgtcttgagcttgacgcttccaagatctggctttccaacagcaatcccgatctcgatctctccaaagtgggcttctttctctgcactagagacgcttgggttcatgtgat

SEQ ID NO: 148457 - DNA, 457 bp, Arabidopsis thaliana columbia
  unsure (1)..(457): unsure at all n locations
ccacgcttccggagagagagagagagagagagagagagagtggtgcgtatagagaaagngggggaaaaaaggcgaagaattctcagattccatggaatttagggttaggacttcccctaatttggaaacctagtcctgtttcctgatctgttttccggatcggacgagagacgaattaacgaaaatgggcgcgaattctattccgacggacgcaaccattgatcttgatgagcagatctcgcagctcatgcagtgcaagcctctctcggagcaacaggttagagcattatgcgagaaagccaaggagatcttaatggatgaaagcaatgttcagcctgtgaaaagccctgtgacaatctgcggtgatattcatggacagttccatgatcttgcagagcttttccgtatagggggaatgtgccctgataccaattacctgtttatgggagactatgtg

SEQ ID NO: 148458 - DNA, 431 bp, Arabidopsis thaliana columbia
gaggagtactcaatgctcaaaacatagatatcctcctttagaacttcccatattatttaagtgctacatcatagggtgttttgatgatatcgatgtatgttcatatgaacggtggaagcaagtatgcaaattttgcaacagacttgactacagcctgtccccgtatcttactctctggaccatcaggctctgagatatatcaggaaatgttggcaaaagcgcttgctaaacagtttggggccaaattgatgattgttgattctcttttgttgcctgggggatcaccagccagggaagctgaatcctctaaagaaggttctaggcgtgaaaggctgtctatgcttgctaaaagagctgttcaagctgcacaagtattgcagcataagataccgacttcaagtgttgatgctgatataacaggtggctcaaca

SEQ ID NO: 148459 - DNA, 432 bp, Arabidopsis thaliana columbia
  unsure (1)..(432): unsure at all n locations
cganaggagattagccggnacganncgaccctcgtcatttttaacncgccncannnnaccggggggctgtcttataggagcaaagcgccccaccacgcctttcgtactcaaaatagctatatagatattgtttagcagagaggaggaagatagtgaaatgagtaggctatcttttcgaccccgtccactggacatacacaagaagctcccaattttaaagacttttaaagactttgaagacgaagataatccttcttccattactagaaactctcagtagctgcgtatatctgccgtacaggttgttgacaatgaggtgcatcctccagagcctatgaagaaactgatatcggaaatcccaacacctcactatcttgttgttgaacatatgaaagagactactctaggacttttaatcagcctgcttcatat

SEQ ID NO: 148460 - DNA, 437 bp, Arabidopsis thaliana columbia
  unsure (1)..(437): unsure at all n locations
ggggacgagattacaagcaccaatncanctccatcaccattttcaaannctncnnaaaattggctgctttctcctttaccatctgcagcaccggacctagtcaaaaagtctttcttctcaaatggatcaaaagcctcttggattgctcacgatccacgtcaagagagggattaatctcgccattcgcgaccatcgtagcagcgatccttacatcgttctcaacgtcgccgatcagacattgaagacacgtgtggtgaaaaaaaattgtaacccagtatggaatgaagaaatgactgttgctatcaaagatcctaatgtcccaatccgcttgacagtgtttgattgggacaagttcacaggagatgacaaaatgggagatgcgaacatagacattcaaccatacttagaggctttgaaaatggngatggagcttttga

SEQ ID NO: 148461 - DNA, 297 bp, Arabidopsis thaliana columbia
  unsure (1)..(297): unsure at all n locations
cacattttaagaaagaaaaaaaaaaatcgatcgcttataaaagnccccagagcccgaagacaggaatttcacggcgcttgagtgcactgagttcgcggagggtgtcatggtttctccagtttcaatcagagcaactgaggtcaaactttctggaggagaagctgatgtaacgtgtgatgcagtacagcttagttcatgcgcaacaccaatgctcacaggagtaccaccgtctacagagtgttgcgggaaactgaaggagcaacagccgtgtttttgtacatatattaaagatccaag

SEQ ID NO: 148462 - DNA, 386 bp, Arabidopsis thaliana columbia
  unsure (1)..(386): unsure at all n locations
caaaataacgttttttnnnagacaactcgctcccttttgcatgctagctctagataacaggcgtattctcaagctatgggtatgcagctattaccacgtcaagtcctttgtcgataggggtaactttgagctctcctggtggatcatatgagcttggtttcttcagttctaacaactctgggaatcagtatgttggaatctggttcaagaaagtcactcctcgggttattgtttgggtggctaacagagaaaagccagtctctagtactatggcgaatctcacaatcagcagcaatggaagtcttatcttgcttgatagcaaaaaagatctggtgtggtcatcttgaggagatcccacatctaacaaagtgtcgtgctgagctttt

SEQ ID NO: 148463 - DNA, 452 bp, Arabidopsis thaliana columbia
  unsure (1)..(452): unsure at all n locations
aacaaatacacaacttgtaactncaaatagacctccctctaagaagagagagagaaagaaagatggagaagaacatgaagtttccagtagtagacttgtccaagctcaatggggaagagagagaccaaaccatggctctaatcaatgaagcttgtgagaattggggcttctttgagatagtgaaccatggattaccacatgacttaatggacaagatcgagaagatgacaaaggaccattacaagacatgccaagaacaaaagttcaatgacatgctcaagtccaaaggtttggataatcttgagacagaagtcgaagatgtcgattgggaaagcactttctacgttcgtcacctccctcaatccaatctcaatgacatttcagatgtgtctgatgaatacaggacggccatgaaagacttggtaagagactggagaatctngctgaggatt

SEQ ID NO: 148464 - DNA, 385 bp, Arabidopsis thaliana columbia
attctcttcgtctcaacatttagggttccatagatctgctgattttcacatccacaagtatggcgtctcaaatcagcaagaagagaaagtttgtagcggatggtgtattctacgctgaattgaatgaggttctcacaagagagctagcagaggatggttactctggtgttgaggttagggttactccaatgaggactgagattatcatcagagctactcgtactcagaatgttcttggtgagaaggggaggagaattagggaattgacatctcttgtccagaagagattcaagtttccagttgacagtgttgagctctatgctgagaaggttaacaacagaggtctctgtgccattgctcaagctgagtctctacgttacaagct

SEQ ID NO: 148465 - DNA, 248 bp, Arabidopsis thaliana columbia
  unsure (1)..(248): unsure at all n locations
aagagccagatgctaagcgaganaaatttggtcctgttttnganncgggagccgcaagggcggcaccttaaacagagncagcgaccgcacacaaagcgccnanccngaaaccaccnnccaccgccaaacnaagcacagaaacgccagcacccgaggcaaaaaacgggaagcaaagaccaganncgnggaccacaaggnagaacgccccnangggaaanagggacaaggcggacaaccgcaccacgacc

SEQ ID NO: 148466 - DNA, 377 bp, Arabidopsis thaliana columbia
  unsure (1)..(377): unsure at all n locations
cagatgaccgcattagctgntataaagctcactccccctggttgggtaggncttctgcaaagcacaatattagagagtgtgggatgcccctggttcaatcgttcagaggcaaaggatcgtgaaattgtagcaaaaaagttaagggaccatgtccaaggagctgacagtaatcctcttctcatatttcccgaagggacatgtgtaaataataattacacagtgatgtttaagaagggtgcttttgaataggactgcactgtttgtccaattgcaattaaatacaacaagatttttgttgacgccttctggaatagcagaaaacaatcatttactatgcacttgctgcaactcatgacatcaatggcctgttggatgtg

SEQ ID NO: 148467 - DNA, 440 bp, Arabidopsis thaliana columbia
  unsure (1)..(440): unsure at all n locations
gtccgccaaagtcgaaaaacagagtcattnaggctgctcaattggtgaagatagagataggaagtgtgggtgactcctttagtgtagcatctcttaaggcttacttgtctgaatttatcgcaactcttctctttgtgtttgctggcgttggctctgctcttgcttttgccaagctcacatccgatgcagccttggaccccgctggtcttgtcgctgtcgctgtggctcacgcctttgcccttttcgttggtgtttccatagccgccaacatctccggcggacaccttaaccccgccgtgacactcggtctcgccgtcggtggcaacatcacagtaataaccggtttcttttactggattgctcaatgccttggctccatcgtcgcagtgtcttcctctcgtcttcgttaccaatggccagagcgtaccgactcatggagt

SEQ ID NO: 148468 - DNA, 365 bp, Arabidopsis thaliana columbia
  unsure (1)..(365): unsure at all n locations
ctttctttcatcttcatcttaaacnnncnttatcnctctctctctctcaagactatagagctggtgggcttttttcctgagtcttttagtccgatctcttacaagaatggcgttcgcaggaacaacccagaaatgcatggcatgtgacaaaacagtttatcttgtcgacaagttaaccgccgataaccgggtctaccacaaagcttgtttccgatgtcaccattgcaaaggaactctcaagcttagcaattacaactcctttgaaggagttctctactgcagaccacatttcgatcaaaacttcaagagaactggaagtcttgagaaaagcttcgaagggacaccaaagattgggaaacctgata

SEQ ID NO: 148469 - DNA, 239 bp, Arabidopsis thaliana columbia
  unsure (1)..(239): unsure at all n locations
gcccaagcncaaaggggaagagagagaccaaaccacggcgctaaacaaggaagccagggagaaacggggcgnccacgagacagacaaccaaggagaaccacaagacccaanggacaagaccgagacgaagacaaaggaccacgacaagacacgccaagaacaaaagnncaaagacacgcacaaggccaaagggacggagaaccccaagacagaaggcgaagaaaggcgaggggaaagca

SEQ ID NO: 148470 - DNA, 283 bp, Arabidopsis thaliana columbia
  unsure (1)..(283): unsure at all n locations
gcggctgctcccaagggcagaggcggcaccctcttcttctgagagaacncgactacaggcgcggagtcttctccgactgattcacccgcgaagaaagacctcaggtggagaaaatgcaagcagcacacagcttcaaagccgtatagagaagcattccaatgagggtgatgaagatgctatacccggggtgattgaagcacttctacagagaagactcggtgtctaacacccagagactgatgatgcattgtgggcaaaaaatgagcctctacctttcaaagat

SEQ ID NO: 148471 - DNA, 443 bp, Arabidopsis thaliana columbia
gagaaagtagccattgaaaaccctggatcctcgctgttcttttggagccaatattctctgtctccgagcaaaaaggtccttattttccatttcatttcttttcaccaatggacatatatggaccttccaatagccttgaatccgcagttaactcaatgaaagtgatggtgaagaaattgcacagtgagggaatagaggtacttttggaagtagtttttacacatactgctgattctggagctcttcgtggaattgatgacagttcctattactacaagggaagagccaatgatctagattctaaaagttacttgaactgtaactatcctgttgttcagcagttggtattggagagcttgcgttattgggtaaccgagttttatgtagatggattttgtttataaatgcttcatctctcttgagaggcggtcacggggaacagc

SEQ ID NO: 148472 - DNA, 422 bp, Arabidopsis thaliana columbia
  unsure (1)..(422): unsure at all n locations
ggtttagcttttttggaccgnacatctnctcctagattacatggctgaggcttctgatttgtgtggaatggcctaagaaggataaccgtcgttttctccatgttgtctaccgcgttggtgatcttgatcgcaccattgagttttacactgaggtctttggtatgaagctgttgaggaaaagagatatccctgaggagaagtattctaatgcttttcttggttttggacctgaaacatctaactttgttgtggagctcacatataactatggtgttagctcatatgatattggaactggctttgggcattttgccatttcaactcaagatgtttccaaactggttgagaacgtccgtgccaagggtggaaatgtgactagggaacctggtccagtcaaaggtggaggcagtgtcattgcgttt

SEQ ID NO: 148473 - DNA, 418 bp, Arabidopsis thaliana columbia
  unsure (1)..(418): unsure at all n locations
gacccacgcgnccgcaagngccgcagcaggagganncagcnacattctttgttttttagagcnanagannncagcagccgcggtgctaagtcttcggtggagtccctcagcaacttcaggaacgctccaggacttggtaaaagagccttgtggcaattcatcagacgcgctgttaaacaattcgaggacaattatcctgaattcgccgctaaagagctattcatcaatgtcccatggtggtacattccatactacaaaacattcggatctatcatcacatccccaaggactaggagcaagatggtccttgctggtccatccaaatctgccgatactattttcaaatacatagctcctgaacaagttcccgttaaatacggtggacttagcaaagatactcctttgaccgaaaaaacca

SEQ ID NO: 148474 - DNA, 312 bp, Arabidopsis thaliana columbia
  unsure (1)..(312): unsure at all n locations
gctgaacttatccgncacccgganattccgtccattgcccaagaagaacnagananaggggggggccgtgacaggccngggagggcatcacacatcgctcagcttccttaccttcaggcggttatcaaagagaatttcaggcttcatccaccaacaccactctcgttaccacacatcgcgtcagagagctgtgagatcaacggctaccatatcccgaaaggatcgactctattgacgaacatatgggccatagcccgtgacccggatcaatggtccgacccgttagcatttaaacccgagagattcttaccc

SEQ ID NO: 148475 - DNA, 422 bp, Arabidopsis thaliana columbia
  unsure (1)..(422): unsure at all n locations
ctaaaatctctctctgccaanccatcccctccatgttctaacncncgnnnncgaaggtacagtgtctgacaagaagaggaggaccgcaaccaacgganncggaagaanaggncgnnaggncgctagagangnncnccagagggacgaagnngagcncgncgctgtcaacgaccccttcatcactactgagtacatgacctacatgttcaagtacgacagtgttcacggtcaatggaaacacaatgaactcaagatcaaggatgagaagacccttctcttcggtgagaagccagtcactgttttcggcatcaggaaccctgaggatatcccatgggccgaggctggagctgacctacttgtggagtcttctggttgtttcactgacaaagacaaggctgcagctcacttgaagggtggtgcca

SEQ ID NO: 148476 - DNA, 336 bp, Arabidopsis thaliana columbia
gagagagtgacagaggagtgtgagatcacctccctttagtagattagggttttcgagatgccgtattgaatcggctacgaatgtcccaattttgaattttgtgaatctctctctttctctgtgtgtcggtggctgcgatggaggccagtgccggcttggttgctggatcctaccggagaaacgagctcgttcggatccgacatgaatctgatggcgggaccaaacctttgaagaatatgaatggccagatatgtcagatctgtggtgatgatgttggactcgctgaaactggagatgtctttgtcgcgtgtaatgaatgtgccttccctgtgtgtc

SEQ ID NO: 148477 - DNA, 407 bp, Arabidopsis thaliana columbia
ctgggaagaagctccagtggcaaagactcaacatccattatgagaggagggagtctatggcagctagggcaatcaataacccgtcgtcttgctcaatctgacaagaaggttgtgtcacgtcgctactttgcctctgaagctgacctgaaaaagactgctctttacgacttccatgttgcccatggaggaaagatggttccttttgctggttggagtatgccaattcagtacaaagattcgattatggactcaacggttaactgcagggaaaatgggagtttgtttgatgttgcacatatgtgtggtttgagccttaagggtaaagattgtgttccttttcttgagacacttgtggttgctgatgtggctggtttggctcctggaactgggagcttaactgtgttcac

SEQ ID NO: 148478 - DNA, 354 bp, Arabidopsis thaliana columbia
  unsure (1)..(354): unsure at all n locations
ggagattttagagctgttcttcaagggaacgttgctaatttgctagagattagncttgaaagtggtgatccaaccgttgaccaattcgaagggagtcatttggtttttgtggctgctggctccgacccttttgatgtcattaccaaagctgtcaaggctgttgaacaacatcttcaaacattttcacaccgagagagaaagaaaatgccagatatgttgaattggtttggttggtgcacttgggatgcattctataccaatgtcacagccaaagacgtcaagcaaggacttgagagcctcaaagctggtggagttaccccaaagtttgtcataattgatgatggatggcaatct

SEQ ID NO: 148479 - DNA, 415 bp, Arabidopsis thaliana columbia
tgatcttcaaactctagggttcttctctgacgtaaattagcttatcatcgccaaccagtgcttgtagctcgtccagatgttactgctcgggattatcgtttccgattggatttggatcgaatcccatcaatgtgggattggtttgttacccaaaaagatacagtattgctgctcggaagttcgtagtggcttgctcctcctcctcttccgatccacttttggttaaggctgcaaaagggcaagccataagtcgtcctccagcttggatgatgaggcaagcaggaaggtatatggctgtttaccaaaagctcgccaagaaacatccgtccttcagagagagatcagagaacactgatctaatagtggaaatctctttgcagccttggcaagcattcagacccagacgtgtcatcat

SEQ ID NO: 148480 - DNA, 447 bp, Arabidopsis thaliana columbia
  unsure (1)..(447): unsure at all n locations
ttttcttctcccattcactcactatctagcgcctagtttaagatggcgagaatgagtttgatgatcattatgattatggttgcggtgaccatgattaacattgctaagagtgatcccattgcaccatgttacttcatatttggtgactctttggttgataatggcaacaataatcagcttcagtcattagctagagctaattactttccttacggtattgactttgctgccggtccaaccggtcggtttagcaacggcttaaccactgtcgatgttatcgctcagctnttgggtttcgaggactacattacaccttacgcttctgcaagaggacaagacattctccgaggagttaactatgcttccgctgctgccggaatccgagacgaaaccggcagacaattgggaggtcgaatagcatttgcagggcaagtagcatatcacgtg

SEQ ID NO: 148481 - DNA, 376 bp, Arabidopsis thaliana columbia
  unsure (1)..(376): unsure at all n locations
gcaagactcctttcagattcttactagcagccctgggttatgagaagnnncacatcaacattgagggcattggtcatgttgagggtggaaaatcgaccacaactggtcacttgatctataagcttggtggtattgacaagcgtgtcatcgagaggttcgagaaggaggctgctgagatgaacaagaggtccttcaagtacgcatgggtgttggacaaacttaaggccgagcgtgagcgtggtattaccatcgatattgctctatggaagttcgagaccaccaagtactactgcacagtcattgatgccccaggacatcgtgatttcatcaagaacatgattactgttacctccccaagctgaattgtggctggtct

SEQ ID NO: 148482 - DNA, 294 bp, Arabidopsis thaliana columbia
  unsure (1)..(294): unsure at all n locations
cagagttcacagaaacatangcaaagaccgtccttttatattaccanngnaaanctatgaacggtgtcttactcggtggctaaggcggcactactagggttttgcattctgcaagtgacgagcttacttgttccgcaagcaaatgctagggctttccttgtgtttggagattctctcgttgacaatggtaacaatgactttcttgctaccactgctcgtgccgataattaccctcatggtatcgatttcccaactcatcgtcctacgggccgtttctccaatggtctaaacatt

SEQ ID NO: 148483 - DNA, 297 bp, Arabidopsis thaliana columbia
cgatactctacttttttatgaatccttcaatcgttctaacggaaccaacacaacaacagatggtgttgtagaaagaaaaaacagcaatggcttcacaaaccaaactcaagaaacctaattctcattttagcctttgtactttcctcttcttcaccgtcctctttaccataccggctctctttctcctccgcacctccacttgctcctcctccaccgctgcagtctcctcctcctcctctgacacaaaccagccaccgtggtctggcgacctccaaaccgcccaatttgcctggaacc

SEQ ID NO: 148484 - DNA, 345 bp, Arabidopsis thaliana columbia
  unsure (1)..(345): unsure at all n locations
ccgtccntctaaattagnctnnnnagagaatggggaaaatcaaaagagttccgaccgttgtttcgaactaccagaaggacgatggagcggaggatcccgtcggctgtggacggaattgcctcggcgcttgttgccttaacggggctaggcttccattgtatgcatgtaagaatctggtaaaatccggagagaagcttgtaatcagtcatgaggctatagagcctcctgtagcttttctcgagtcccttgttctcggagagtgggaggataggttccaaagaggactttttcgctatgatgtcactgcctgcgaaaccaaagttatccccgggaagtatggtttcg

SEQ ID NO: 148485 - DNA, 280 bp, Arabidopsis thaliana columbia
  unsure (1)..(280): unsure at all n locations
aatcaatccaacaacgaatggagattgaagatcgattcttgaaagtggacatgttgtgtgcggatcatggattcgtcgcccgaagaaagtaaactgggttcttatcgctaaagcttccaaacgccgnggctcatctgtttcttctcctgctctcctcaacatcttctcttttgaccccattactgcttctctttcctcctctcctttggcaacacacacgcttaaggatagtgatggtgatcctgtggctgtttcagtgcaccctggtggggattacttt

SEQ ID NO: 148486 - DNA, 154 bp, Arabidopsis thaliana columbia
acaacggcgatgatcttttgatccttcatgtggttggtggagcctagcctcaggttttgaccttagaggatcacttatatctcttcaagcgtaagtttcgggaaggtctacgcttacaacaaggatcatgactttagattcttggttaacaaag

SEQ ID NO: 148487 - DNA, 416 bp, Arabidopsis thaliana columbia
gtttagaaaaaaacagcgataaaaccgaatcacattcaaacaaaaaaaaaagagaagagagagagtatttttttttgttttcgttttcaaaaacaaaatctttgaattttatggcaacccgtcttctccgaacaaactttatccggcgatcttaccgtttacccgcttttagcccggtgggtcctcccaccgtgactgcttccaccgccgtcgtcccggagattctctcctttggacaacaagcaccggaaccacctcttcaccacccaaaacccaccgagcaatctcacgatggtctcgatctctccgatcaagcccgtcttttctcctctatcccaacctctgatcctctccgttccaccggcgtgttgcatgcggcggcgataggtcctatgggcgacctagggacgtgggtc

SEQ ID NO: 148488 - DNA, 294 bp, Arabidopsis thaliana columbia
  unsure (1)..(294): unsure at all n locations
cagctttttactcgataaanncgncttttggtagattctgtataaaatctagcttatcgagggttatcctcaaagtttattaaatcaataataaaaatctctgaagaaaagtttgggtttttgccatttgggttttcttctgtctcatctggttttcgagagagatagagaaagtgagacaaggttaaggaggaagaagatgactgagaatcgggtggttttggctctgcttatactctgcattgntgggtttgagccaagtttcatccatggagctacggattcatcagatac

SEQ ID NO: 148489 - DNA, 287 bp, Arabidopsis thaliana columbia
caaggtagtcataaaaaaaaaaaaaaacacaataaatttttaatggccgcctcaacaatggctgtgtgctcccttgctttcgccggaaaggctgtgaacctttcccctgcggcatcagaagtccttggaagcggccgtgtgacaatgaggaagactgttgccaagccaaagggtccatcaggcagcccatggtacggatccgaccgagtcaagtacttgggtccattctctggcgagtcacccagctaccttaccggagagttccctggagactacggatgggacac

SEQ ID NO: 148490 - DNA, 369 bp, Arabidopsis thaliana columbia
  unsure (1)..(369): unsure at all n locations
aattaagggccgaccacgcgtccgggaagctccgatctgagttttttttagcaattgcgataatgattcctagcctcgnctctctgatggttatcggtcttgttgcgatcgcctccgccgcagttattttcgaggagcgctttgatgatggctgggagaacagatgggttaaatctgagtggaagaaggatgataacactgctggggagtggaagcacactgcgggaaattggtctggtgacgctaacgataaaggtatccagaccagtgaagactacagattctacgccatttcagctgagttccctgaattcagtaacaaggacaagaccttagtctttcatttctcagtcaagcacgagcaaaaag

SEQ ID NO: 148491 - DNA, 385 bp, Arabidopsis thaliana columbia
  unsure (1)..(385): unsure at all n locations
ggatcagcacggctgncaattcctncnnccgactagntatttcgancggaacacctaaagaggctgttgaattacgagataagctgcacaagacaaggttacagatatccgaattggtgaagaatacttcagctaaacttaaggaagctagcgaagccgaccttcatggatcagctagtcaaattaagaagatagctgatgctaaactggcaaaagatttccaatcagttctcaaagagtttcagaaagctcagagacttgcagctgaaagagaaataacatatactcctgtggtcacaaaagaaatacctaccagttataatgcacctgaactggatactgaatctttaaggatctcccagcagcaagctcttcttctacaatc

SEQ ID NO: 148492 - DNA, 378 bp, Arabidopsis thaliana columbia
  unsure (1)..(378): unsure at all n locations
ctgngctctttcagatcccattatcacaaanacttcnctctctctctctcagagaagaaaccgaagaagaagaaaaagctctcaactttcttcgatttctcagggaactctttcgttaatctcaaactcaatcatgtctaccccagctgaatcttcagactcgaaatcgaagaaagatttcagtactgctattctcgagaggaagaagtctccgaaccgtctcgtcgtcgatgaggctatcaacgatgataactccgtcgtctctcttcaccctgcaaccatggagaagcttcagctcttccgtggtgataccattctcatcaagggtaagaagagggaggacactgtctgcattgctcttgctgatgagacatgtga

SEQ ID NO: 148493 - DNA, 327 bp, Arabidopsis thaliana columbia
  unsure (1)..(327): unsure at all n locations
ggaaccctcgttgagggannnngagaaaatatttaatcagtatatanngaaaganccccatggctgatagagttggatcattatcttcttcactgcagcgctgctcgttcttcttctggtttaggggctttcttaatttcatccccttcaacttgttgcagnnggtattgcagctgaaaatctttccaagcnagaaactgacctcatnggattcttcagaatgagattgtaaagggaagtcaatgagnaatccaaacgctggatggaaagcttctttcaatgatcggtttgcaaacgccactgttgcagagtttaagcgccttcttg

SEQ ID NO: 148494 - DNA, 339 bp, Arabidopsis thaliana columbia
cgatttcacctccattttcttcgatcagggttttgattatgtatcctacctagctcgcaccttaaggaggtgattcagtttacaagcaaaatggtgaagatttgctgcattggagctggatatgttggtggtccaaccatggctgtcattgctctaaagtgtccatctgttgaagtagctgttggtgatatctctgtgccaaggatcaatgcctggaacagtgatcagttaccgatctatgagcctggtcttgatgatgtcgttaagcagtgccgtggaaagaatcttttcttcagcaccgatgttgagaaacatgtgagagaggctgacattgttttt

SEQ ID NO: 148495 - DNA, 409 bp, Arabidopsis thaliana columbia
  unsure (1)..(409): unsure at all n locations
attgacgatggcgctttgtgctactactcaaagtacnattcgtatagcggcgacgctccggcgtgttgctcgacctttcgctactgacgcggtggttgagtcggattacaagcgtggtgagatcggtaaggtctccggaatcccagaggagcatctttctcgcaaggtgataatatactcacctgctagaacagctacccagtcaggatctggaaaactcggaaaatggaagattaacttcgtctccaccttaaagtgggagaatccgttgatgggatggacttctacaggtgacccctatgctaatgttggtgactctgctcttggctttgattctgaagaagctgctaagtcttttgctgagcggtatggttgggattataaggtcaagaagcccaacacaccatta

SEQ ID NO: 148496 - DNA, 392 bp, Arabidopsis thaliana columbia
  unsure (1)..(392): unsure at all n locations
aaaaagagtcacttccgtgtcacaagaaaccangtaactttctcttcatcaaccacttctctgctggttcttagccagcgtcctcccattaatcctgaccgtccattctcaatcagacgactcagatttcatccgtactagctgcaacaccacattataccctgacctatgcttctcttctctttcctccttctctagctctgttcacaacgatccagccctcttggctcgagccgccatctccgtcactctcaccaagactctcgacttagcctcatacctcgccaatatcaccactctccagccagagagcaacgaagatggtgctcaccacccaaccgcagccgcttgttttcacgactgttccgacaatcttaaagacgcggtcgaag

SEQ ID NO: 148497 - DNA, 271 bp, Arabidopsis thaliana columbia
  unsure (1)..(271): unsure at all n locations
cccggaccccncggactgggcggttttactctctggacgctaatgttcattcgggtttccgctcgacccgcgacattcgtcgaggatttcaaagccgcctggtcggaatctcacatccgtcaaatggaagacggaaaagctatccagctcgtccttgatcagagcactggatgtggatttgcttccaaaagaaaatatctattcggacgagtgagcatgaagatcaaactcattcccggagactttgccggaccgtcaccgtttttacatg

SEQ ID NO: 148498 - DNA, 426 bp, Arabidopsis thaliana columbia
  unsure (1)..(426): unsure at all n locations
aagctgaggagatctttgagaagacgggncaagtancttatcctacnncnacngataaccctgagtttcagatcgtgttgtctattatcaaggaaggtcttcaagttgatcctaagaagtaccacaagatgaaggagagacttgttggtgtctctgaggaaactaccactggtgttaagaggctttaccagatgcagcaaaatggaactcttttgttccctgccattaacgttaacgactctgtcaccaagagcaagttcgacaacttgtatggttgccgtcactcactccctgatggtctcatgagggccactgatgtcatgatcgctggaaaaggttgctgttatctgtggatatggtgatgttgggaaggggttggctgctgtcatgaagactgctggtgctagaggtaattgtgactgagat

SEQ ID NO: 148499 - DNA, 334 bp, Arabidopsis thaliana columbia
  unsure (1)..(334): unsure at all n locations
cgcgtgcgaacccctgaanngcagattcatgatttcatnagcagaagananggaggcatgagctggcatagaagatgagtaccatcataaaaacaacagagtttactgctggaaaggtcttcggtttacagctcggcaagaccttgaaggattttctaggtttactgaaatgggaatcgaaggagttgtcccagttgaactattgccgcctgaggtccggtccaaataccaagctaaaccaaacgaaaaagccaaacgagcgaagaaagaagaaaccaaaggtggatctaatgaaacagagggaaaccagaatggtggtttttaatagtgaagc

SEQ ID NO: 148500 - DNA, 409 bp, Arabidopsis thaliana columbia
  unsure (1)..(409): unsure at all n locations
ctcaatttctggatccaccangcatgttcaataattttcatctctccgngcttctccggcggacccacttcgcttaccatcaaatcgtcaatcacatcagctaattaccaatgcgagacctttgcgaagacaacaacgttccttcatctccgcatcagcatccactgtctccgctcctaaacgcgaaacagatccgaagaaacgagttgtcattactggtatgggtctcgtctctgtgtttggtaacgatgttgatgcttactacgagaaattgttgtctggtgagagtggaatcagtttgattgatcgtttcgatgctttcaagttccctactcgattcggtggtcagatccgcgggttcagctctgaaagttatattgatggcaaagaatgagcgtaggcttgatga

SEQ ID NO: 148501 - DNA, 319 bp, Arabidopsis thaliana columbia
  unsure (1)..(319): unsure at all n locations
gcaaaagaaaaaaaaagctatggggngaaagtagaataagttaactatggcaaaggatgtggaagccgttcccggagaaggatttcagacaagagactatcaagatccgccaccagctccgtttattgatggagcggagctaaagaagtggtctttctacagagcagttatcgcagagttcgtagccactctcctcttcttatacatcaccgttttgacagtcatcggttacaagattcagtccgatactgatgccggtggcgtagattgcggcggagttggaatcctcggtatcgcttgggcctttggtggtatgatc

SEQ ID NO: 148502 - DNA, 380 bp, Arabidopsis thaliana columbia
ggaaagtgaagatgagaaacctgcctagataagtctgacactaaggcctctaaaaaatcgagtagtgatgagtcaagcgagtctgaggaagatgagagtgaagacgaggaggaaacccctaagaaaaagagctctgatgtagaaatggttgatgctgagaaatcaagtgctaaacagccaaagacaccatccactcctgctgctggaggatcaaagacactctttgctgccaatctctcttttaacattgaaagagcagatgttgagaatttcttcaaagaagctggtgaagttgttgatgttagattctctaccaacagagacgatggttctttcaggggatttggccatgttgagttcgcatcttctgaagagcacag

SEQ ID NO: 148503 - DNA, 420 bp, Arabidopsis thaliana columbia
  unsure (1)..(420): unsure at all n locations
ctcttttctctccagatttcgantcccgatgcntgtgagaaaaccgnaaatctcttgtgcgttcactcaatcaaccaaagatgcgtgagattcttcacatccagggtggtcaatgcggtaaccagatcggagccaagttctgggaagtggtttgcgccgagcacggcatcgatccaaccggaaggtacaccggagactcagatctgcaacttgagcgcatcaacgtttactacaatgaagcgagttgcggtagattcgttcctcgtgcagtgctcatggatttggagcctgggactatggatagtctcagatctggaccgtacggtcagacctttcgacctgataacttcggctttggtcaatccggtgcgggtaacaactgggccaagggacactacactgaaggagctgaactaatcg

SEQ ID NO: 148504 - DNA, 352 bp, Arabidopsis thaliana columbia
  unsure (1)..(352): unsure at all n locations
ccggncggaaaaccgggccgacccacgcgccggaaaaaccccaaaaaaaacacccttgatggcgataaaacccagaaanccagaggggaattttatgcaaccccagcgccaccctcacaaaaactccacattcttccgacaatctatgagaaaggaagagaaatggatcaacaaggacaatcatcagctatgaactataggccaaacccatatcaaaccaacaccatgaccactacaccaaccgcgtcagaccatccagcataccatcagaaccaccagcaacaacaacaacagctcactcaacagcttcaatcttgctgggagactcaactcaaagagaatgagaaaacca

SEQ ID NO: 148505 - DNA, 414 bp, Arabidopsis thaliana columbia
  unsure (1)..(414): unsure at all n locations
cgggaaaccaggatgtgtacggaatacatgttcgcttatagcatgtcctctngatcttggcagagggaacgagggacgtattgaatgtccgtaccatggatgggaatactcaaccgatggagaatgtaagaagatgccgtctacaaagttactgaaggtgaagatcaaatcattaccttgtcttgaacaagaaggtatgatctggatttggcccggtgatgagccacctgcacctatacttccttctttacagcctccatcagggtttttaattcatgctgagcttgtaatggacctcccggtggaacacggtttacttctagataatctcttggatcttgctcatgccccattcactcatacatccacttttgcaaaaggcttgagtgtcccaaagttggtgaagtttttaac

SEQ ID NO: 148506 - DNA, 338 bp, Arabidopsis thaliana columbia
  unsure (1)..(338): unsure at all n locations
ctttgattcattgttgttgttctctgctgtnntttcatatagcatcatcatgtacggaagagatccatggggaggtccattggagataaacactgcagattccgccaccgacgatgatcgtagtcggaatttaaacgatttgggatcgtgcggctctttcacgtccactagatgagacgcagcagagttggttacttggtccaacggagcagaagaagaagaagtacgtcgatctcggttgtattatcgttagccgcaagatcttcgtctggactgttggtactcttgttgccgccgcgttactcgccggattcattaccttgatcgttaaaactgtg

SEQ ID NO: 148507 - DNA, 413 bp, Arabidopsis thaliana columbia
  unsure (1)..(413): unsure at all n locations
ctccagacgaaaaatgggtgctttcaggtnnatccagttccaggttgngggaagagctctgcgcgacagagaaggatgtgcagcctaagatttacaggatgaagctctgggctacgaacgaggttcgtgccaagtccaagttctggtatttcttgaggaagctcaagaaggtgaagaagagtaatggacagatgctcgccatcaacgagatctatgagaagaacccaacaacgatcaagaacttcggtatttggttgaggtaccagagtagaactgggtaccacaacatgtacaaggagtaccgtgacaccactcttaacggagctgttgagcagatgtacactgagatggcattccgtcaccgtgtcagatttcctttgcattcagatcatcaagacagccactgtcccacc

SEQ ID NO: 148508 - DNA, 397 bp, Arabidopsis thaliana columbia
cagtccagcagtaccggcgagaacttttagtttttcttccggatccacatctcctaaatctcgattgataattaccccacaaagttattgggaggatcaatggagagttctacacaaagccgccgaggaagagaaaaagagtccttctccaatacagaagaaaaagccttggttcagggtgaaaagacttttcagagcagagtctgagccaactcatagcgccaagtcaccaaatgggaaaagtgaagtcaagatatcatcagttgcgcgaaacttgcttgaagattttaatcggcagcttgtttctgaacctgtggaagctaatccaatagatgttgtgaacaatgaagatagctcaattcgagaaaccgaggatataaacacggattttgaaact

SEQ ID NO: 148509 - DNA, 390 bp, Arabidopsis thaliana columbia
gctaatcagaagcgttccacaagaaggatgtttggtctccgtgtttggaacgtatgggaaacatggatgtcctctagagtttgctctttttggaccaaagttcatggccaagaatttgtatcaactctctccggtccaagtaagactccacgcctaataaaaacaaaaatgggattgcttgtaatcaatcctttattgattgttgttgtgacgggttaggatcttgaattggcgaaaatgttggtgagagtaaaccccatcattacaaataatctggcagggacaagaagctttagtgaggaagggtacggtaccgttacacgtatatatattgtatgtggagaggacatggcggtacccgaggattaccagtggtggatgatcaagaac

SEQ ID NO: 148510 - DNA, 413 bp, Arabidopsis thaliana columbia
gtcaatgatgagcagaactcgaagcagcatagcttgggaacaccatctttccttgaggtgaggaaacaagcttcatttttcttcaaagagaagcttaaaacggcgcgtttagctctcaccgatgttactcctcttcaactaatgactgaggaagctacggatggtgagtcatgtggaccaaatacacaaaccttagggtccatttcaaaggctgcttttgagtttgaagattacttggcgattgttgaagtcttgcacaaaagattggcaaagttcgataagagaaactggaggatggcttataacttactaatagttgttgagcatttactcactcatggaccagagagtgtttccgatgagtttcaaggtgatatagatgttattctccaaatgcaacccttcaacagatt

SEQ ID NO: 148511 - DNA, 437 bp, Arabidopsis thaliana columbia
atcattttcagctcattactcacctctacatactctctgtggccaaaaataaacagagacatatcagactaaggagtatttaataagcatcatctaacaacaggccaagaagcaaaaaattgaaaaaacttgtgtaaaaagcatgcagcgaaacagagttcttgcgttcttgttgctagcagctcagctcttggtgaagatacctgaaacgtgtgcaaaatttcccgcacttatcgtatttggtgactcaactgttgattcaggcaacaacaaccagatttctactgttctgaagagcaatttccagccatatggccgggattactttgacggcaaagcgactgggagattttcaaatggccggattgcaccagacttcatttctgaaggtttgggactcaagaacgcagtccctgcctacctagatccagcataca

SEQ ID NO: 148512 - DNA, 424 bp, Arabidopsis thaliana columbia
  unsure (1)..(424): unsure at all n locations
taaaaaccctaaatttctttaatttcggcgcattagaatatcgttgntaaaggttnttgatggaggttgtttaaatgggcgagcttgctatgtccgaagcagacatcaggatggagaatgagcctgatgatttagctagtgataatgttgctgagattgatgtgagtgatgaagagattgatgctgacgaccttgagagacggatgtggaaagatcgtgtcaggcttaaaagaatcaaagagcgacaaaaagctggctctcaaggagctcaaacgaaggagacacctaagaaaatctctgatcaagctcagaggaagaaaatgtctagagctcaagatggtatccttaagtacatgttgaagcttatggaagtctgcaaagatcgcgggttgcctatggtataataccggaaaaggcaagcctg

SEQ ID NO: 148513 - DNA, 392 bp, Arabidopsis thaliana columbia
  unsure (1)..(392): unsure at all n locations
tagttacatatcttcaacaaagngaanctcaagtggatattaccgaaaagcggaggaggtgctctgtgcctcctctttgtgtttgctctctgttcggaggctcattcccttagctgtgacgtcaaggttgttggcgatgtcgaagtcattggctactcagaaatcagcaaaatcaagatccccaatgcattctcaggacttcgagttacgatagaatgcaaggcggccgattcaaaaggccattttgtaacgaggggaagcggagaagtggacgaaacaggaaagtttcatcttaatattcctcatgacattgtcggtgatgacggaactctaaaagaagcttgctatgctcatcttcaaagtgccttcggcaacccttgtccggcccacga

SEQ ID NO: 148514 - DNA, 432 bp, Arabidopsis thaliana columbia
  unsure (1)..(432): unsure at all n locations
tctctctcccgcaaccttcgattttcgttaattcgcattcatcggagagagaaaacaatcaataagcgaccatgttggtgtaccaagatcttctcaccggtgatgagcttctgtctgactctttcccttacaaggagattgagaatggaatcctctgggaagtagaaggaaagtgggttactgtgggagctgtagatgttaacattggtgccaatccatctgctgaagaaggtggtgaggatgaaggtgttgatgactctactcaaaaggttgttgacattgtcgacaccttcagacttcaggagcaaccaacttatgacaagaagggattcatcgcttacattaagaaatacattaagctnttgacacccaagctcagcgaagaagatcaagctgtcttcaagaagggtattgagggagctaccaagtttt

SEQ ID NO: 148515 - DNA, 335 bp, Arabidopsis thaliana columbia
  unsure (1)..(335): unsure at all n locations
agaaagcagacacacacagcaaaacacggcatacatgatcaaccncgacagcacaccacngggcggcgccaagggcgagcggcgcgcccaacaaccggaccggagccgaaagcgaagaagaagacgccagcaaccccggaggaacaagacagagaggccagaaggaggaacagcaagcacaacaccaaagagcgagccagacaaggacgagcaagcaaangaggcaaggacgaggnggggggcccgcccccgacgaagagcacgaaagcgagggcccccagcagggacaccagcaaccccagcagcgcgcgaacgaggcccgccaggaagagcca

SEQ ID NO: 148516 - DNA, 420 bp, Arabidopsis thaliana columbia
  unsure (1)..(420): unsure at all n locations
gnntagagagaagatagaganagagattaaatactttttcnccnnccnnncngncagagagggagattaccttcttcataggagacgatccctttcttcttctgcattccccaaattttatcttcccaagaaacccaacacagaagaaaatcttaaagtgaattgtggtggagatgaaagttggagctccggcaagtaagccgggtcggatcattgttcaagtttttcttctacaacttcttcttcttcttcaaagtgttcattcacagagatcacaaaacaaacttaacatcacaaagcctggacaaaacataccagccttaacagtttagctaaggagagttggccatgatacggcggtagctgataatggtattgtccaagatactttctcgaacccaaaagcttaataactgggat

SEQ ID NO: 148517 - DNA, 408 bp, Arabidopsis thaliana columbia
  unsure (1)..(408): unsure at all n locations
nnctctctctctttctctttctttctcaatattagtagttttatactctagctnactaatcaaagatgcgagagattcttcacatacacggtggccaatgcggaaaccagatcggagctaagttctgggaagtagtttgcgccgagcacgggatcgattcgacgggaagataccaaggagagaacgatttgcaactcgaacgagtcaatgtctactacaacgaagcgagttgcggaagattcgtcccacgcgccgtcctcatggatctagagcctggtactatggatagtgtcagatccggtccgtacggtcagatcttccgtcctgataacttcgtatttggtcaatccggtgccggtaacaattgggctaaaggacactacacttgaggtgctgagcttatcgatt

SEQ ID NO: 148518 - DNA, 193 bp, Arabidopsis thaliana columbia
tctccggtgttgaatcatttctcaatacttattttatttctcctcctttctttttcaagactcataaaaaaaaggcgtgaggcgtgatgatatttataccaaaccatgtgtgacaaatggtacccggtttggtgaaggctggattttgcatgagatagatgctcccagggctgttttttccaatgattgatgg

SEQ ID NO: 148519 - DNA, 392 bp, Arabidopsis thaliana columbia
  unsure (1)..(392): unsure at all n locations
aaacagagaggcggcgacggagccattttgtaatttagccggcgaacgannataaggagggggatagtctctagacggatatgcacgaaccaagcatcgatacagataaactcagctacgagattttctctattcttgagagcaaatttcttttcgggtacgacgactcgaaacccgaacccgcgaattcggttgttgctgggtcgattaagaaccagagaggtaaaatctgtattctgagtatcgatggaggtggaatgagagggatcttacccggtaaggctttggcttatctagaacacgctctgaaatctaaatcgggtgacccgaatgcccgaatcgcctgatactttgacgtatcccgcgggtccggtataggtgggatttacaca

SEQ ID NO: 148520 - DNA, 310 bp, Arabidopsis thaliana columbia
  unsure (1)..(310): unsure at all n locations
aaaaaccgggccgacccacgcgnccgaaaaaaacaagnggaagcnnnaaaatttagtgatctgagcaaaaanggcgacgacgggaacggacgttatggaagttggggtcaacccaccaaccgagaaatactacaagaggtggaagaacgagaaccatgtcttccctgatgctatcggccaccacattcaaaatgttaccgttcacgaaggcgaacatgactctcacgggtctatcaggagttggaactacacatgggatggaaaggaggaggagttcaaggagagaagagagactgaccacgagactcaa

SEQ ID NO: 148521 - DNA, 417 bp, Arabidopsis thaliana columbia
  unsure (1)..(417): unsure at all n locations
tttcaatgcctggggaggagctaanganggaagttacttttattggagncatgaccttttagttggacgaaagattctcgctgtggaacgaattccaagatttcaacattcgatgattcttgaaggaggcagcatccatgtcgatggggaaggaacctgccttgtcacagaagagtgtctcttgaacaaaaaccgaaaccctcatatgagtaaagagcaaatagaggaagaacttaagaagtacctcggagtacaatcatttatctggcttcctcgtggtctttacggggatgaggacacaaatggtcacattgataacatgtgctgcttcgctagaccgggagttgtgttattgtcttggacagacgatgaaaccgatcctcaatacgaaaggtctgtggaagctctttcgggttt

SEQ ID NO: 148522 - DNA, 371 bp, Arabidopsis thaliana columbia
  unsure (1)..(371): unsure at all n locations
aagggcgaatattaattcttttatatgannnnncnnctcaaaaggaaggaagaaatacatattatgagatttaacccttcttagcacaagaataccatataaataattatataaattcccagctgcttagcttttttcttcaaagttgaaaacaaaatgaataaacccatctcagagttgaaactaaagaggcagaaagagcctaaaatacagagaacaagactgattctggacagaagtgaaacagaggctgacaggtttcaagcttggaccttgttagacttgagtggcttgactacctcccaggtgaaatcagcatcgtcccttccaaagtgaccataggcagcagtcttcaagaacctaccattacc

SEQ ID NO: 148523 - DNA, 414 bp, Arabidopsis thaliana columbia
  unsure (1)..(414): unsure at all n locations
ggccgacccacgcgnccgaacnacaagctccaaaagcnnncnccnncnatttttctcttatcncnannncgnacggaggggtgtaaccgttgcgatggagattgaccctcgagatcgnatttccggtgaacgaccgatcattatggtcaccaacgacgacggaatagacgcgcctggccttcgttctcttggtcgtgtgctcgtctgcactaacctgtacgatgttcgcgtttgcgctcctgattcggagaaatctgctgttagtcacagtataatatggagtagaccactcactgcaaaacgagttgagatcgatggagctactgcttattctgtagatggaactcctgcggagtgcactgggttgggctcatcggaagcactctttgcttcttgatctggcctggttctgag

SEQ ID NO: 148524 - DNA, 344 bp, Arabidopsis thaliana columbia
  unsure (1)..(344): unsure at all n locations
gaaaccgggcgccacgcgtcgtaaacagaataaanaaaacatttagttgattaagccgcnnngcgaagagcaggcgcgacttacagagcnctaggagggccacccgaaancaancaccggaaaacaagaccatacnncaccgccgcgacagctgccggcggaaccgcaactccgacaccaccgcaganaacgccgacggacccacaaaacacacaccgagcancaccgcaaccgaaaggggacgggccncaaaaaggaccccgcaaccaaacggcgcccccggggaaacaccaccaggccgcgacaccngggcacaggcgcggaaacggcgcgagccagaaaaa

SEQ ID NO: 148525 - DNA, 211 bp, Arabidopsis thaliana columbia
  unsure (1)..(211): unsure at all n locations
gaccacgcgtccgctaacagnctctcactntctctctnctctcatacatattcttttttgagnccgngaaggctaagtgtgtaagaatgacgaaggatgagttgacggaggaagagtcgctctccggcaaggactacttagacccaccgcctgtgaagacgttcgaggtgagagagctcaagaagtggtccttctacagagctgtcatcgc

SEQ ID NO: 148526 - DNA, 428 bp, Arabidopsis thaliana columbia
ctattacactcgatacgactatgagaacgtagatgcaactgcagctaaagaactcatgggactttgggttaagttgcaatcttcacttcccgaagtcaacaagattataaagggaattcatccagaggtggcaaatgttgcaagcgcagatgagttcgagtacaaagatccagtagatggctctgtttcaaagcaccaagggatccgatacttattcgaggatggatcacgacttgtgttccgtctctcgggaactggctcagaaggagcaacaataaggctatacattgaacaatacgagaaggacgcctcaaagatcggccgagattctcaggatgctcttggtcccctggttgatgttgcattaaagctgtcgaaaatgcaagagttcaccggccgatcatcaccaactgttattacataagaca

SEQ ID NO: 148527 - DNA, 398 bp, Arabidopsis thaliana columbia
  unsure (1)..(398): unsure at all n locations
ctcaaacagacaatttaattccaaaaganaaaatcaanttaaagatgaatgccacaaagtttggtgtgcttctcgtgattggcattttgtgtgccattgtcaccgcaaggcaggtcgaagaagtgtccaaagagaccaaattaggcacctctcttccaaaatctactaacaaaggcattggagctcagctttctgctgctggtcttacttacagcggcagcagtgtctctagctctgctagtgcttttaacaatcccaaaggtccaggggccagtgcatccgaaagtggctacacaagtaccatcggacaagtcattgccaagggtcgcaaggcaagagtttcttttgcaagtgcttctgccgctacaggtgaggctgcaactgcagtgactcgcaaa

SEQ ID NO: 148528 - DNA, 385 bp, Arabidopsis thaliana columbia
  unsure (1)..(385): unsure at all n locations
accaatttccatatcacaaagaaaagacaagatgancttgaagacaacgccggagctctggaaaggaaatggagtgttccgtacggatcatctcggagaaaaccgaatggttagtcgatcaaaccggctaggtgatggatcaaaccgtttccctagaaccggtacaatccattgccaacggttaagcatagcaaagaccggtttgcatcgtgagacgaaggctcgagccatacttagccctgtgtccgatccggccgcttccatagcccaaaagcgagtattcacctttggaaaaggaagaagcgaaggcaacaagggcatgaagtccttgttgggagggaaaggagccaacctggcggagatggctagcataggcttgtcggtg

SEQ ID NO: 148529 - DNA, 401 bp, Arabidopsis thaliana columbia
  unsure (1)..(401): unsure at all n locations
aggtgaatctatatgatcattcatgtttattgntacttcgatttctccagagacgagttttgctacatgaagactcgacggaaactccttgaagggcacgacttttttccatttctcggtttcaagcttctcggctaaaccttcttcagcatctggttcacccattgagaacttaccaatgttctttttctcttctttgaggtaaagtctttttccagctattagtctgaattgagagagcgtttgtaatttcccagcagctccgattttgttgtgtggccagtctttgctggttatggcagtgaagcgtatatcagaggtaaaggaaagtgaagtgttgtttatggattctgaagctcgagttatcgttaagtgaacgttgcctattaaggcacgtgtgg

SEQ ID NO: 148530 - DNA, 393 bp, Arabidopsis thaliana columbia
  unsure (1)..(393): unsure at all n locations
aaaaaaatggcggaggagagcagagtttcattantggtgtcggtaacagtcgcccacgaccgtcttctagccggccaccgctatctagacgtcaggactccagaagagttcagccagggacatgcctgtggggcgatcaacgtgccttacatgaatcgaggagcatcagggatgtcaaagaaccccgacttcctggaacaagtctcctcccatttcggacaatccgataacatcattgttggctgccagagcggtggtagatctatcaaagccaccaccgatcttctccatgcaggtttcacgggagtcaaagatatcgtcggtggctatagtgcctgggccaagaatggccttcctacaaaggctngatgacttaccattcaccaaacatct

SEQ ID NO: 148531 - DNA, 381 bp, Arabidopsis thaliana columbia
  unsure (1)..(381): unsure at all n locations
gaatagtttgatcatcttgtgagaaaaataangtangnttagtgatgctatcttcggtgacattgaaaccagctggtttcacggtggagaagacggcggctagaggattaccgtcgctcacaagagctcgtccctccttcaaaattgtcgccagtggcgtcaagaagatcaagaccgacaagcccttcggaattaacggcagcatggacttgagggacggcgtcgacgcctccggcagaaagggcaagggatacggtgtttacaagtacgtcgacaagtatggagctaacgtcgatggatacagtcctatttacaacgagaacgagtggtcagcgagtggtgacgtgtacaagggaggagtcaccggattggcaatttggg

SEQ ID NO: 148532 - DNA, 395 bp, Arabidopsis thaliana columbia
  unsure (1)..(395): unsure at all n locations
cttgctcctccgtcatggcttnctcaacatcaatcgcgcttcgntaccatcatcctcaaatgtctctcaggaactctcttcgcgctcccaaatcgccttcttttgtcaggcttcccctcggaaaggtgttacagagcaggattgtgatacgtgctgcttcgtctgcggctggtaatccacagtctgatgctgactttaatccgtatgaggttcttggtgttaaccctatagagggatttgacaagatcaagcaaacttatggaaggaaacttaaagatgctcagaggagcggtgatgaagccactgctgctctacttgagaaggcatatgataagctcatgtatgcccagttgatgaataggaaaaagggggtgacttttggtttcgtttaaggt

SEQ ID NO: 148533 - DNA, 447 bp, Arabidopsis thaliana columbia
  unsure (1)..(447): unsure at all n locations
gngtaagggcctngacggagacgaaattagatgagattcctaaggaccacgggcngcaaagaccggaacttgtttctcatttagctttgctttcctaggtttcaatctggtttatgaatgtatgaatatttgaaataataatagtttcaccattattttttttgttataacaagcaaaagtcatggtggtggaggtgaattgaccaatggcttatgtatcactcaaagcacaatgccttttacccacttacaatggctaactatttaagctagtcattagtttctttttcttattattttactttgtatcatggaactatgtaagaattttaacaaggccttgttcttttggagattgccagctaccagtatgagaaattttagatgttttcttcacgttgataaaattgtttagttagcacaatgttaacttacctcatttttttt

SEQ ID NO: 148534 - DNA, 365 bp, Arabidopsis thaliana columbia
  unsure (1)..(365): unsure at all n locations
catgtatacacacatatagnnacaaacacacttactcntttcacagatatataaaaatgtctgggtataataaagcactattgatcggcaacaaagtcgtcgttatacttgtattcctcttatgtttggttcactcgtcagagtcacttcgaccactgtttgcatgtgatccagcaaacgggttaacccggacgctccggttctgtcgggccaatgtaccgatccatgtgagagttcaagatttgctcggaaggctcacgttgcaggagaagatccgcaacctcgtcaacaatgctgccgccgtaccacgtctcggtattggaggctatgagtggtggtccgaggctctccacggcattttcgac

SEQ ID NO: 148535 - DNA, 401 bp, Arabidopsis thaliana columbia
ggcgattcgttgtgtagcgagtagaaaaacccttgccgttttgaaggagacatcatcgaggctatggaggatcagagggattcagacttttacgcttcctgatcttccttacgattatggcgcattggaaccggccattagtggagagatcatgcagattcatcaccagaagcatcaccaggcttatgttactaattacaataatgctcttgagcagcttgatcaagctgtgaacaagggagatgcttccactgttgttaagttgcagagcgccatcaaattcaacggcggaggtcatgtcaaccattcgattttctggaagaaccttgctccttccagtgaaggtggtggagagccaccaaaaggatctcttggtagtgccattgacgctcactttggct

SEQ ID NO: 148536 - DNA, 370 bp, Arabidopsis thaliana columbia
  unsure (1)..(370): unsure at all n locations
ctaacttattcacttttccggcactgantcagatcggtaaaaacaactccggcacaaaatggagctttttccagtcatgttagccacactctgcattgtcctgcagcttctcattggctcgtcagctttggctacgacaaatcgccacgtgtcaaactctcattggcttcccgcagtagctacatggtacggaagccccaacggtgacggcagcgacggaggagcgtgtggttacggtacgttggtggatgtgaagccgttacatgcgagggttggagcggtgaatccaattctcttcaaaaatggtgaagggtgcggagcttgttacaaggttcgatgcttggacaagagcatttggttcccggagagc

SEQ ID NO: 148537 - DNA, 109 bp, Arabidopsis thaliana columbia
  unsure (1)..(109): unsure at all n locations
acagcgaatatcttaagtaccaaaaanggcgggcnacaagcnggaagctatcgaagcggcaccggcccaagacgancnggananngngancccaaccancagaagcccc

SEQ ID NO: 148538 - DNA, 440 bp, Arabidopsis thaliana columbia
  unsure (1)..(440): unsure at all n locations
gtatctccatttcggggaaataagcgacataactttttccagngtgcccggatgaaacagagtatatgggcaagagataagaacagtgaaggagaagaaagtgcagatctttttcttaggggaatcggtttaagagagtattctcggtatatatgtttcaacttcccgtttactcacgagcaatcgttgttgagtcatcttcggtttttcccttgggatgctgatgttgataagttcaaggcctggagacaaggcaggaccggttatccgttggtggatgccggaatgagagagctttgggctaccggatggatgcataacagaataagagtgattgtttcaagctttgctgtgaagtttcttctccttccatggaaatggggaatgaagtatttctgggatacacttttggatgctgatttggaatgtgacatccttgg

SEQ ID NO: 148539 - DNA, 412 bp, Arabidopsis thaliana columbia
  unsure (1)..(412): unsure at all n locations
gaaagatcaatctagagagaccaaatttagatcggtagagatggctnctacctccgcgatgtgattggtcacaccacttaaccagacccgttcgtctcctttccttaagccattacctctgaaaccatccaaggctttggttgcaactggaggcagagcacagaggcttcaagttaaggccctcaagatggacaaggctttgaccggtatctccgcggctgctcttactgcttcgatggtgattccggagatagctgaagctgctggttctggaatctctccttccctcaagaatttcttgctcagcattgcttctggtggccttcgcctcactgtcatcattggtgtcgtcgtcggcgtctccaactttgaccctgtcaagagaacctaagacctatatatctttcttaca

SEQ ID NO: 148540 - DNA, 419 bp, Arabidopsis thaliana columbia
  unsure (1)..(419): unsure at all n locations
agaaaacaaaaagcatagcctaacagaacagtttcatgnttatgtcaaancaaganggngacgcgaacgacaattagaaccgncgatctccgctccgacacggngactaaaccaacagagtcaatgcgttcagcaatggcaaacgcggaagtagacgacgacgttttgggaaacgatccaacggctctgcgtttggagaaagaggtggctgagatcgctggaaaagaggcggcgatgtttgttccgtcagggacaatggggaatctgataagcgtgttggtccattgtgatgagagagggagtgaagtgattcttggagacgactctcacattcatatatatgaaaacggcggcgtttcaagcctcggtggtgtgcattcgaggacggtgaagaatgaggaagacggtacgatggagat

SEQ ID NO: 148541 - DNA, 382 bp, Arabidopsis thaliana columbia
  unsure (1)..(382): unsure at all n locations
ctggtgatagcaaaaaganngnaggagtttatttttttgtccaacgaanacgctaccaagaacgtttacttccttggctgcgtcgcgaatgccttaggaatccgtgactggcttgaatcccaaggacatcagtacatcgtcactgatgacaaggaaggccctgattgcgaacttgagaaacatatcccggatcttcacgtcctaatctccactcccttccacccggcgtatgtaactgctgaaagaatcaagaaagccaaaaacttgaagcttctcctcacagctggtattggctcggatcatattgatctccaggcagctgcagctgctggcctgacggttgctgaagacacgggaagcaaacgggcctcaatggctgaag

SEQ ID NO: 148542 - DNA, 326 bp, Arabidopsis thaliana columbia
  unsure (1)..(326): unsure at all n locations
cacaacctagctagctagtaaacagnattttttatataccaaaaanggcttcaagttgcatagtttttttcttggctctcaatcttctctttttcacaacaatctccgcctgtggtagctgtactccgtgcggcggaggttgcccctctcccaagccaaagccaactcctaaaccaaccccaagccctagctctggctcgagcaagtgccctaaagacaccctcaagctcggtgtctgcgctaatgtgctcaacggcctcctggacttgacccttggcaagccaccggtcgagccatgctgcagcctcatccaaggactcgctgat

SEQ ID NO: 148543 - DNA, 289 bp, Arabidopsis thaliana columbia
  unsure (1)..(289): unsure at all n locations
tggaggttggggttttggtaatgggaatggatcctttttttctggnaatgggntttctttgcgctttgtagagttaacgttgcagcgagagattgattgtccaaggagatttaatctctcaccttcgatgaagtctttgttgagagagaatgttgcagcctttgctgctgggtatcgtgctagtatggagcaaaagaagcaggtgcaaatgcagtctgaaactagtggtactagcttgtcttgcacggctgctgctacacattcagagaagtgtgagcagccacatgtc

SEQ ID NO: 148544 - DNA, 308 bp, Arabidopsis thaliana columbia
  unsure (1)..(308): unsure at all n locations
ggcccagcacaagaacaacngacccaagcacgagacaccaacggtcgcaacagaggaagcaccagcgacgacaacagaagacacggaacgagcgagggaaagacaccacgaggaagaaggaagaggaagggaaaccacaagagacaacgacgcgcgaggccgagcccgaacaaaaggcacagatccccgaaccggaggcagccgcagagcacgaggaagagaaggagaacaagaaaaccacggcgagagagagccacaagaaaagacccggggaagaagagaagaaacaagcccagcggcaacaaaaa

SEQ ID NO: 148545 - DNA, 463 bp, Arabidopsis thaliana columbia
  unsure (1)..(463): unsure at all n locations
gaataangggacgacccacgcgnccggnatgcagctatgntagctgagaagaagaagttaattggttcntctggnnggcncgncaacagtgggtggtctggtggcagttatggtgccggaaacagaatcaagctggcatacactagaaagatcatcgatgcaatccattcgggcagtctcttgaaggcaaactacaagaaaaccgaaatctttggatttgaaatcccaactgagatcgaagggataccttcagagatcttggaccccgtcaactcctggtctgataagaaggcacacaaagatactctggtgaaactgggaggtctgttcaagaagaacttcgaggtttttgctaaccataagatcggtgtggatggtaagcttacggaggagattctcgctgctgggcctaatttttagaaaaacccaactcttgaaggaaggtggccgaaaagaaagaaag

SEQ ID NO: 148546 - DNA, 290 bp, Arabidopsis thaliana columbia
tgggaatttattcattcacctgctgccatggctaaattatctttcaaggattctcttaaagctcttgaagccgatcttcaacacgctaatacactagctttagattatcctcgggagaaggatggagcgcgcgttcagatgagattatcatacagcccgactgctcaattttttctttttattctccaatggactcattgtaagcctgctggcttcctcggcttactcagaggcctaatttatatgactcatccagatgggaaaacaccattgttggttacgaaagaaaa

SEQ ID NO: 148547 - DNA, 373 bp, Arabidopsis thaliana columbia
  unsure (1)..(373): unsure at all n locations
ggcacagagncagnaaaggcgcncctttgaataactttgaacnngccaaagccagcagggagcttagtttgaaggtgctctccatcattgacaagtatgctgagcgtggtcttaggtcgttggctgttgctcgccaggtggtgccagagaaaacaaaggaaagcccaggtgcgccatgggaatttgttggcttgttgccactttttgatcccccaagacatgacagtgctgaaacaattcgacgggctttgaatcttggtgttaacgtcaagatgatcactggtgaccaacttgctattggtaaggaaactggtcgcagacttggaatgggaacaaacatgtatccatcttcggctctttttggtacacacaa

SEQ ID NO: 148548 - DNA, 431 bp, Arabidopsis thaliana columbia
  unsure (1)..(431): unsure at all n locations
gtgagagaagaaagatagagaaaaataagtgnangttaaggtgnganganggnggcgagactgtgcctttgggcactctctgcaacatctgaagcagtaacagaggctgagccaggtttgatgatgaacttctacaaggacacgtgtcctcaggccgaagacatcgtccgtgaacaagtcaaactcctctacaaacgccacaagaacaccgctttctcttggctccgtaacatcttccatgactgcgccgttgagtcatgtgatgcgtcgcttttgctggattcgacaagaagagagctaggagagaaagaacacgacaggagcttcggacttagaaactttaggtacatcgaggagatcaaggaagctttcgagagggagtgtcctggtgttgtcttaatgtctgacattctcgtcttgtccgcaagaga

SEQ ID NO: 148549 - DNA, 443 bp, Arabidopsis thaliana columbia
  unsure (1)..(443): unsure at all n locations
cttgtctccatgtaaaaaacctccgncgnctttttcttccttctttataaccctaaaccaaaaaccctcatttccttcaatcttgttactcacatggcgctaaggagattatcaaagtctgtttcgtcagccatcaaagctcaatacactctctcgagaccctctcctctcctccgntctcgctctctctcttcctctcctcactacacctctattggccggccaacaaattcattcatcggaaaaatcaataactcttctatcactcatgcgactactactcatggtcaactcttccctctttcttttccgcgacgcttttgtactaccacagctcaggttaatcaaaatgagtttacggagatggcatgggaagggcttatcaacgcctttgacgcggctcgtgaatcgaaacaacagattgtggaatctgaacatttgtt

SEQ ID NO: 148550 - DNA, 436 bp, Arabidopsis thaliana columbia
aaaaaaagttactcagatctcacgatttgagtagaatacgcaatgaggacaccgacgacgatgctccttcttgtcggagctatcctcttcttcggcgccggctatgtcagatccgacgccttcgaccaccggtacaagggaggggacaccggtcctctttacgccaacaagggcggcccatttcacaatccaagtgagacgtatcgaaaatttggaccttccttttggtttccaaaggggggggaaggaaaaaaaggaggctttggcgagggtctaaaacggggatcggctagttagcgctccatacaagctcaacttcagagatgaaaaagagtctgaggtatactgcaacaagaagttgagtaaagaagaggtcaaacagttcagaaaagcttgtgaggaagactactacttccagatgtactatgatgatcta

SEQ ID NO: 148551 - DNA, 436 bp, Arabidopsis thaliana columbia
  unsure (1)..(436): unsure at all n locations
gccaacgaagcaatagctatgaaaagctttactcntttcttcttcttcttcttcttcttcttcttcgattgtttagattacttgggtttgacccaagtttgcttctttctatgattcatcaatctagatcttgctatctgggtccagaaacgattcacgcgcttcattcatgatataaagttactaccttttttttattttaccttctgggtcatggttttgtctgcttttcgtcttttgcttttgtctggatgattcataatctctcgagatctattatgttcacaagagttgttcttatgcgtggtgagatgatcttaggagtgtttcactatctttcttcaattcgggtttttagtttctgagatctgtttttgaagaatctgatctgagtttgaggaagtttgactaaatagatcgaagaagatgtttaagt

SEQ ID NO: 148552 - DNA, 438 bp, Arabidopsis thaliana columbia
  unsure (1)..(438): unsure at all n locations
cggacgcgtggggtcacatcactatctttnctcgtgtggtcgtctctttcaagttgaatatgccttcaaggccgtgaaaacagctggtattacttcaatcggagttcgtgggaaagattcggtttgcgtcgttacccagaagaaagttcctgacaagcttttggatcagtctagtgttacacatctgttccctatcaccaagtacattggattggtagctactggcattacagctgatgcaaggtctttggttcaacaagcaaggaatcaagcagctgaatttcggttcacttatggatatgagatgcctgttgacattcttgctaaatggatagcggacaagtcacaggtctacactcaacatgcttacatgagaccccttggagttgtcgctatggtaatgggtgttgatgaagagaatggtcccttactttacaa

SEQ ID NO: 148553 - DNA, 365 bp, Arabidopsis thaliana columbia
cgggaaggaatggccggaccgacccatgcgttcagatctcacgatttgagcagaatacgcattgtggacaccgacgacgattctccttcttgtcggagctatcctcttctccggcgccggctatgtcagatccgacgcctccgaccaccgttacaaggaaggagacaccgttcctctctacgccaacaaggtcggcccatttcacaatccaagtgagacgtatcgatattttgatcttcccttctgtatcccagagggtgtgaaagagaagaaggaagctcttggcgaggttctaaacggggatcggctagttagcgctccatacaagctcaacttcagagatgaaaaagagtctgaggtatact

SEQ ID NO: 148554 - DNA, 420 bp, Arabidopsis thaliana columbia
  unsure (1)..(420): unsure at all n locations
caaaaggtgaagaaaccacaaccaaaaaaaataacttcttgttgagaaaagcacttttgagatgagagcatatttgattactatacagcaaacgctgacgccggaagcagcgacggttttaaaccagtcgattgctgaagccacacgtcgtaaccatggccacacgacaccgttacacgtggcagctactctcttatcttcttcctctggttatctccgacaagcttgtatcaaatctcatccaaactcttctcacccacttcagtgtcgagctctcgagctctgtttcagcgtcgctctcgaacgttttcctacaactagtacaacaacaaccactacttcgtcgncttcttcttcttctgcgtcgcaaacgcaagaaccgctactttcaaacgctttgaccggggctttaaaacgtgc

SEQ ID NO: 148555 - DNA, 440 bp, Arabidopsis thaliana columbia
  unsure (1)..(440): unsure at all n locations
cggttttccatttttgtcccttcaagaggatcnctgggtacgacctctacacggncctcaccggcgtgattcctctctacgtggcgcatgatcctcgcttacggctctgtccggtggtggaaaatcttctcacccgaccaatgctccggaatcaaccgttttgtcgccatcttcgccgtccctctcctctcttttcacttcatctccaccaacaatccttacgcaatgaatctccggttcatcgccgccgacactctccaaaaaatcatcatgttgtcacttttagtcctatgggctaatttcactcgctccggtagcctcgagtggagcatcacaatcttttccctctccacactttccaacactcttgttatggggattcctctcttgatcgccatgtatggcgaatactctgggttcctcatggtccaaatcgtcgt

SEQ ID NO: 148556 - DNA, 417 bp, Arabidopsis thaliana columbia
agagaatcgaagaactcgtatcagatatttataatcaatgggtagccaacgacgaagatcggtgatagctttgattttcatctgctgcgccatttcttctacctcatctgatcaggttggaacaaattatagagattctcatgaatttttcgattccgatacaatctgtatctctgatcaatacattatggagtcttatttcactacatacacttccttagacgactcagagtttcgaaacttcttgcttcttcaacaatgttctgacaaagttcctactcaagattcaaacattgttcctgcaacttcatttatacaacatagaaacattactggtgaaggttcacatcgtaatctcatcacatccatcaagcttcttctttatcactcagagtctcaatttcgtgagctcgtgat

SEQ ID NO: 148557 - DNA, 388 bp, Arabidopsis thaliana columbia
  unsure (1)..(388): unsure at all n locations
aatcgatggcggggatactagngaacatnnatcnccctcaacctccgattctccgatcgcttgcttcttcttcgcgaagaagttcaattcgaaccctagttatggtcaaagcttcttcctctgaaccttccgagtctgtttcagtctccacgaagaccagtgacgacactggagctgttgttgtgttcactgctcctcctggtttcaagccaccggagccaaaacggttcgccgtcaaatccggaaaactcttcgatgtcttgggtgcagcaattggattgtttttccgattcggcactggtgttttcgtttctgggtactctgcatcttttgtgtctaaggaagagattccagctgatcagtatgcgttgcgtttaggcgggatcac

SEQ ID NO: 148558 - DNA, 442 bp, Arabidopsis thaliana columbia
  unsure (1)..(442): unsure at all n locations
ccggaaatgcttggtactccccttaacttcagggcagtttcaagatcgnctgcnccgttggcatcaagcccatccacgttcaagactgttgctctcttctctaagaaaaagccagctcctgctaagtccaaggctgtctctgagactagcgatgagctcgccaagtggtatggtcctgacaggagaattttcttgcctgatggtcttttggatagatcagagatcccagagtacttaaacggtgaagttgctggagattatggttatgacccatttggtcttggaaagaagcctgagaactttgctaaataccaagcttttgaattgatccatgcgagatgggctatgttaggagcagctggtttcatcattcctgaagctttaaacaaatatggcgctaactgtggccctgaagctgtctggtttaagactggtgctttgc

SEQ ID NO: 148559 - DNA, 432 bp, Arabidopsis thaliana columbia
  unsure (1)..(432): unsure at all n locations
agattgtgttgttggatgatgaagaacaagatgntttctggataagacggaatctgaaactgcagtcgtggttactacgaaaagtcttgttggtaatcgaaacagttcagatgcgagtttgccaattactcccttcaggtcagatgaaatcaagaaccgtcaagctagaatcgaaatatcgatgaaagacaactgtaacaacggtgatcattcagcgaatggaggaacagaaagtggattagagcattgtgtgaagatcataagacaactcgagtgttcaggacatatcgataagaatttcagacagaagtttctgacttggtatagcttgagagcaacgtcacaagagattagagttgtgaagatattcattgatacatttattgatgatcccatggctttggctgagcagctcattgatactttcgacga

SEQ ID NO: 148560 - DNA, 438 bp, Arabidopsis thaliana columbia
  unsure (1)..(438): unsure at all n locations
gaaacaatggagatttctccttactgtctgctttctcttcttcccattttcctcctctctgggttctccctttcatatgatggatttgatggtcacgcagcaacaagcagagctcttcttcagacaaggacaacctgcaaagaagattttgctaacaagaactacacaatcataacaagcagatgcaaaggaccaaattatccggcaaatgtgtgttgctccgccttcaaggactttgcttgcccttttgcagaagttcttaacgacgaaaagaacgattgtgcctccacaatgttcagctacatcaacctttacggtcgttatcctcctggaatctttgccaacatgtgtaaagagggcaaagaaggtcttgactgcactgatgtcacccagtccgcatccgcaacttctgattctatcccacgtgcctncacaact

SEQ ID NO: 148561 - DNA, 377 bp, Arabidopsis thaliana columbia
  unsure (1)..(377): unsure at all n locations
gcttttgattcacagagaaggagcaggaaatangttttttatcaatctatttcgtgaagagagaggttacaatccggagatgatccgagaatcgcaacgccggagatttgccagcgttgaaatcgtcgatgagatcattaagctggacaaggaatggcgtcagcgtcaatttgaagttgatagcttcagaaaggagttcaacaagctcaataagcaagtggcgcagctcaaaattaaaaaagaagatgcgagtgagattattcaacaaactgagaaaaacaaacaagattctactgcaaaggaggctgaagttcgtgaagcttatgctgctttgaaagccaagttggagcaagttggtaatttggtccatgattctg

SEQ ID NO: 148562 - DNA, 432 bp, Arabidopsis thaliana columbia
  unsure (1)..(432): unsure at all n locations
gattcaaaaagctccaatgggatcactngatagctaatagctcagaagaaattgcttgacgaaaagaatcataggaaacaaatcgatcagagcattacagacattctgcggctttcagttaaacaaaccaatgtcttaaatctcttaacttccacaagaacaacaggacagcctcttgtagacgattgggattgcttcaagactctagttaatagcttcaagaatcactgcggtgcaacggtgcattacggattgaagtatacaggagcgcttgccaatatctgcaatatgggagtggatgtgaagcaaactgtttcagccattgaacaagcttgttcgatgtaatgatttgcaaaacaatgtgatattcgactttaaaaatatcaaagttaatttcaataaaactcgatgtagagatggttggttcatgat

SEQ ID NO: 148563 - DNA, 447 bp, Arabidopsis thaliana columbia
cccacgcgtccgggggtcgattcgagcatatagctgaaccggtatacatttcttcaaccctctcgccggtcaatggcttttcggagttctctccactaggatcaaatctcttgatgtcaaaattgaaaccaaaactaaggataatgtgtttgtgcagctggtttgttcgattcagtatcgtgtagtgaaagctagtgctgatgatgcgttttatgagcttcaaaaccctaaagagcagatccaagcttatgtctttgatgtggttagggctttggtcccaatgatgacgcttgatgctctttttgaacaaaagggtgaagttgccaagtctgttcttgaggagcttgagaaggtgatgggtgcttatggatacagcattgagcacattctaatggttgacattattcctgatccctctgtacgcaaggcaatgaacgaaatcaatgc

SEQ ID NO: 148564 - DNA, 442 bp, Arabidopsis thaliana columbia
gcttgcagcaaaccctggtattattgctgttattaacaagcatcgttggagagtagggattatgactgaacttgctccagttggttatgttggtgttagtccacgatgccttctggggtttaacaagaatcaaggagaggagatttctctacgccttcggactgatgatctcaagggattcagaaagtatcagagcataaaaaagactctattgcatgagcttgctcacatggtatacacggagcatgatgagaaattttatgctcttgatagccagttgaacaaagaagctgaaagcttagattggactaaatcaaggggtcacactttgaatggaacaaaatttatcaatgacgatgatgaggaagactacttcttcgatgaaaatgaaactgtttctcaaaggcttggtggaaaccagtccgataatcttggaaatgct

SEQ ID NO: 148565 - DNA, 433 bp, Arabidopsis thaliana columbia
  unsure (1)..(433): unsure at all n locations
gccttccgaacatttgaagcgtttaagattccatcntatgaagagcaactctctagatgggaatgacctgaggatgatcttatatggtggcctatcgtgggaataaaggacccatgtcgcccagtggtaaaaattcaagtttacctggtgaaccagcctgaatcaagggtcggatggtgaccggtgagaacattcagactgccaaagcaattgcactggagtgtggtatattagcttcagactcagatgctagtgagcctaatctgattgaaggaaaagtatttcgatcctattcagaagaagaaagagataggatttgtgaagagatatctgtaatgggtagatcatcacccaatgacaaacttcttcttgtgcaatcgctgaagaggaggggacacgtcgtggctgtgactggtgatggaaccaatgatgc

SEQ ID NO: 148566 - DNA, 414 bp, Arabidopsis thaliana columbia
  unsure (1)..(414): unsure at all n locations
gatccaagacattttgattacactccancgtcggcttaaatggtgacggaaaagaaaacgaagaagtctcatgagggtatcaacagtaggttggctcttgttatgaagagtggtaaatacactcttggttacaagtctgttctcaaatccctccgtggctccaaagggaaactgattctaatctccaccaattgcccaccgttgagaagatcagagattgagtactacgcaatgctcgctaaagttggtgtccaccattacaatggaaataacgttgatttgggaacagcttgcggaaagtacttccgtgtttcttgtctgagcattgttgatcctggtgattctgacattatcaagtcaattcctggtgaccagtgatacaattttcagattttatttttcccagacttttta

SEQ ID NO: 148567 - DNA, 407 bp, Arabidopsis thaliana columbia
gctgaaactctcttgctcttgcttctaaaatcagttctttgagactttgatcacacagttagcaaaatcataatctcttctttcctggttttttttttttttcttcttcttcttcccgtttcacgaaacaagaagttttttttgggaaagccgttgacttgactttttctttggggtgttgtgtgggagcttatagtatggtaccataagtgggagcttatagtttggggtgttgtgtgggagcttatagtatgaggaaaaatgttagatttgaagaatgcttcactgattttttaccataagtatgtcaactggattaagcttaagtagctatggtttttactatgttcatgtggggatctcttttcctctctgtctacttcaatcctggatgacttgcgattttt

SEQ ID NO: 148568 - DNA, 431 bp, Arabidopsis thaliana columbia
tcactcttcatcttcaaagactgcgccttttagcttagtgaaaaaggttcgagcttcggaaactatggcagcattccctaaccttaactctgatgctggattgaagaagctcgacgagcatcttctcactcgcagttacattactggataccaggcttcaaaggatgatatcaccgtctttgcagctcttgcaaagcccccaacttcacagtatgtgaacgcttctcgttggtacaatcacattgatgccctcttgaggatctctggtgtctctgctgaaggaagcggtgtcattgttgagggatcagctcctatcactgaggaggctgttgctactccccctgcagctgattctaaggatgctgcggctgatgaagaagatgatgatgatgttgaccttttcggagaggagaccgaagaggaaaagaaag

SEQ ID NO: 148569 - DNA, 359 bp, Arabidopsis thaliana columbia
ctgctgctttgaagggatctgaccacctccttataactgaagttagcgcaaggctagatgctcagcagaagaagcttaaccttccaatcctcccaaccacaaccattggatccttcccacagaccgtggaactcaggagagttcgccgtgaatacaaggccaagaaaatctctgaagaggattacgtcaaggccatcaaggaagagatcaagaaagttgttgacatccaagaggaccttgacattgatgttcttgttcacggagagcctgagagaaacgacatggttgagtactttggagagcaattgtcaggtttcgcattcacagcaaacggatgggtgcaatcctatggatctcgc

SEQ ID NO: 148570 - DNA, 339 bp, Arabidopsis thaliana columbia
ctctactgcaatttttagggttttatcctccgatagtctcaacctttttcttatcctcaacaaggagaaatggcggcgactcaacttacagcgtcaccagggactatgtcagcaaggagcttaacctcgcttgaagggctcagagcttcgagtgtgaaggtttcaatctttgaaaccagggaccctaaaacagagccagttccgccgttgggttgacaaagctgcttctgttgttccccctaagtatactacaattaagccattgagagatcgagttttggtgaatatcaaggaggcagaggagaacactataggtggtatctcactcacatacactgc

SEQ ID NO: 148571 - DNA, 440 bp, Arabidopsis thaliana columbia
gcgatttcacctccattttcttcgatcagtgcttgaaccagagcctacctagctcgcaccttaaggaggtgattcagtttacaagcaaaatggtgaagatttgctgcattggagctggatatgttggtggtccaaccatggctgtcattgctctaaagtgtccatctgttgaagtagctgttgttgatatctctgtgccaaggatcaatgcctggaacagtgatcagttaccgatctatgagcctggtcttgatgatgtcgttaagcagtgccgtggaaagaatctcttcttcagcaccgatgttgagaaacatgtgagagaggctgacattgtttttgtgtctgtcaacacccctactaaagacccgggtcttggagctggcaaagctgcggatttgacttactgggagagcgctgctcgtatgaatgccgatggttcg

SEQ ID NO: 148572 - DNA, 443 bp, Arabidopsis thaliana columbia
  unsure (1)..(443): unsure at all n locations
acccttccggggagcacccaatcgccccaacagaatcgaccctgcnttgagaaggtttggaagatttgacagggagatcgatattggagttcctgacgaaattggacgtcttgaagttctgaggatccatacaaagaacatgaagctggctgaagatgtggatctcgaaaggatctcaaaggacacacacggttacgtcggtgctgatcttgcagctttgtgcacagaggccgccctgcaatgcatcagggagaagatggatgtgattgatctggaagatgactccatagacgctgaaatcctcaattccatggcagtcactaatgaacatttccacactgctctcgggaacagcaacccatctgcacttcgtgaaactgttgtggaggttcccaacgtctcttggaatgatattggaggtcttgagaatgtcaagagagagc

SEQ ID NO: 148573 - DNA, 431 bp, Arabidopsis thaliana columbia
  unsure (1)..(431): unsure at all n locations
taggctcggtatcgcggttgatgtcgcgctaggtcntgagtatttgcatactggttgcaagccgccgatcattcatagaaacgtcaagtgtacaaatgtattcttagatgaaagtttcaatgcgaagttaggcggttttggcctttcgagagcgtttgatgcagccgagggaagtcatttgaatacagctattgctgggactcctggatatgttgaccccgagtattacacatcaaacatgttaacagagaagagtgatgtgtacagtttcggtgtagttctattagagatcgttactgcgaaacccgctatcataaagaatgaggaaaggatgcatataagtcaatgggttgagtctttgctttcaagagaaaatattgtagagattcttgacccgagtctttgcggagactatgacccaaactcggcat

SEQ ID NO: 148574 - DNA, 434 bp, Arabidopsis thaliana columbia
  unsure (1)..(434): unsure at all n locations
gtcaaaaagaggagctaataataatatggcggctttgtgatgactatctctngtttcttgtgtcttcaagtaatatattgcttgctctcttcatttgctccaacaaatgtgcaaggattgaaagttggattctacgacaaggcatgccccaaagccgagcttattgtcaaaaagtctgtcttcgaggctgtgaagaatgatcggacaattgcagctcctttgctcaggatgttcttccacgattgcttcgttaggggatgcgaagggtcggtattgctagagctaaagaacaaaaaagatgagaaaaactcaattcctaacctcacccttcgaggatttgagatcatagacaatgtcaaggcagctctagaaaaggagtgtccgggcattgtttcttgctctgatgtattggctcttgtcgctagagacgcaat

SEQ ID NO: 148575 - DNA, 413 bp, Arabidopsis thaliana columbia
  unsure (1)..(413): unsure at all n locations
atttaattccaaaagataaaaacaatcaaaatantatatgccacaaagtttgttgtgcttctcgtgattggcattttgtgtgccattgtcaccgcaaggcaggtcgaagaagtgtccaaagagaccaaattaggcacctctcttccaaaatctactaacaaaggcattggagctcagctttctgctgctggtcttacttacagcggcagcagtgtctctagctctgctagtgcttttaacaatcccaaaggtccaggggccagtgcatccgaaagtggctacacaagtaccatcggacaagtcattgccaagggtcgcaaggcaagagtttcttctgcaagtgcttctgccgctacaggtgaagctgcaactgcagtgactcgcaaagcttctgctgcacgtgcaaagggtaa

SEQ ID NO: 148576 - DNA, 364 bp, Arabidopsis thaliana columbia
  unsure (1)..(364): unsure at all n locations
gtctctctctatgtagacatctatccanggttacattgacggatcagactcttcttcaacgcgtcctagccaaacccaccgaccaaaggcttagcaacggaatcggattcaggtattattctgcggcttttctctatacttctcgtcggagcaatctctttgtgggcaaaccatgaggcttcaaaaggcttctccataagtatcatcaatgatgctaaagattctccttccggtaaaagattcgcccttttcttcgaatctgatgatacggcagtgcggatattgctcgatgcaagcttctttgtggagaggtttctctacgagggtgttcctcatcgtctccgtaagcctgtaaaccacgtta

SEQ ID NO: 148577 - DNA, 421 bp, Arabidopsis thaliana columbia
gactagttctgggtcgctcggcgtttcggtaactgtattgacctcttctggtgatctctggtatctcggtggcgagtggaggcgtgatgttgcatttgcaggatttgaagttccgatacaaatggacatttcggcggagaagatgatatttggagtggctggtattgatcctcagagaagagatgagttgatcaaggtgttggatatcgacatctcatggagactgcacaaggtatccgatggccaaagaagacgtgtacagatctgtatgggactcctgaagccattcaaggttctccttttggatgaaataactgttgatcttgacgttctcgctagagcagaccttttgaagtttctgagaaaggaatgtgaagaacgaggagcaaccataatctacgcttctcatatattcgatggc

SEQ ID NO: 148578 - DNA, 442 bp, Arabidopsis thaliana columbia
  unsure (1)..(442): unsure at all n locations
gctctctcgaagttccgtgcgactctctgtnctttgctgatctcctaccgatacaatgattatctcagaggctaaccgcaaagaaatctgcaagtacctcttcaaagaaggagtttgctttgcgaagaaggatttcaatcttgctaagcatccgttgatcgatgtccccaacctacaagtgattaagcttatgcagagtttcaaatccaaggagtatgttagggagacatttgcctggatgcattactattggtttttgaccaatgaagggatcgagttcttgagaacttatcttaatcttccatctgatgttgttcctgctactttgaagaagtcagctaagcctggtggtcgtccatttggtggcccacctggtgatcgctcaagaggacctcgccatgaaggaggagaccgtcccaggtttggtgaccgtgatgggtac

SEQ ID NO: 148579 - DNA, 396 bp, Arabidopsis thaliana columbia
  unsure (1)..(396): unsure at all n locations
tgcttatattttcctacaacactctcttaatanatttacaaaaaaaaaagacgttctttctttgtttgtatttagaagaaaaatggctaccaattacaacgagaagcttcttcttaattatgttcccgtttacgttatgcttccgttgggagttgtgaatgtggaaaatgtatttgcggacccagaaacgcttgaaacgcagcttaaacgtctcaaagaagaagctggcgttgatggcgttatggtcgatgttcggtggggaatcatagaatccaaaggtcccaaacaatatgattggacggcctacaaaacgctgttccagctgatcgcacgtttgggactcaaaatccaagcaatcatgtcttttcaccaatgtggtggaaacgttggcgacat

SEQ ID NO: 148580 - DNA, 439 bp, Arabidopsis thaliana columbia
  unsure (1)..(439): unsure at all n locations
ctttaatttagagagaaaaaataagcattcttccntctctgttttcgagcgggaaattctggagatggctatacaagcgcagttgaattacaacgctccgaatgcgaatcaaatcggttttggtgggtccgagttttctttgatcaacaacaatggcgttatcggaatcggtaacgatcagtcttatcttgtcaataatctccagttgcagaaagatttcaaccaacatgctctgtttcatcatcagcatcatcaacaacaacagtttccttctcaaagctttttagctgctcagatggagaaacagaagcaagagatcgatcagttcatcaaaatacagaacgagaggttgagatatgtgttgcaagaacagaagaagcgagaaatggagatgattttacggaaaatggagaagtaagctttgcttttgatgagtcag

SEQ ID NO: 148581 - DNA, 273 bp, Arabidopsis thaliana columbia
  unsure (1)..(273): unsure at all n locations
ctggaatctagagagaaaaaacaagcaaataattttctccgaacncgagcgcgaaaagcggcagattgctatacaagcggaggcgcccaacaacgctccgaacgcgaaacaaatcggctttggaggagccgagttatctttgaacaacaacaatggcgctaccgaaatcaagataacgaacagacttatcttgacaataatccccagttgcacaaagatatcaaccaacaaacttatgctccatgaaccagcatctatcaacatcaaacaata

SEQ ID NO: 148582 - DNA, 421 bp, Arabidopsis thaliana columbia
atggaatacggaaacatgcttgtgatggaacatggatatgtcaagagagtccaacttgccgagacctacctcagccaggctgctttgggagacgcaaacgctgacgccatcggccgcggaactttctacggaaaaggagcccagcaagtaaacctgccagttcctgaagggtgtactgatcctgtggctgaaaactttgatccaacggctagaagtgacgatggaacctgtgtctacaacttttgagcaatattatcctgcttattaatttgctgttttactcctattgtctcttttggtttatttttctcctttgtgtaattgtggattggatcttgtcctcttttgttccctttttttttttttatgatgtacaacacattggtaatttaaaattgccttgtcataaactacacttctt

SEQ ID NO: 148583 - DNA, 440 bp, Arabidopsis thaliana columbia
  unsure (1)..(440): unsure at all n locations
aagaagaagacgaagaagaatcaatggctttngttanctcttcctctccttttctatgcaaatcatcctccaagagtgatttggggatttcttcgtttcctaaatcttctcagatttcgattcatcgatgtcagaagaaatcgatctcacggaagattgtttccgttatggctcctcaaaaggatcggtctcctggaactacaggatcggtgaaaactgggatgacaatgacggagaagattctagctagagcttcggagaagtcattagtggttcctggtgataacatttgggttaatgttgatgttcttatgactcatgatgtttgtggtcctggtgcttttggtatcttcaagagagagtttggtgaaaaagccaaggtttgggatccggagaagattgttgtgattccggatcattatattttcactgctgataag

SEQ ID NO: 148584 - DNA, 406 bp, Arabidopsis thaliana columbia
cggacgcgtgggcggacgcgtggggtctatttgtgattctctcatcttcttttgttttgcttcacatcgttcacatcaattagtttctatcagctccagcaaatggttagtgtgttcatcagctaaaatcattaaggattgcgttacttcttcttcaggaaggactagaaatgagaaagagttgattactccatattgagtgtgaagatgacgaggtggtctatgtctatgcactgcacattgttcttgctatttctgttgaggctcacttgtatattctcagattccgattatttgatgggtcttggaagctatgacatcacaggacctgcagctgatgttaacatgatgggttatgctaacatggaacaagtagcatctggtgttcacttcaggctcagagctc

SEQ ID NO: 148585 - DNA, 388 bp, Arabidopsis thaliana columbia
gtcaataatcacaatggtttggttaatgaaaggttttgtctttgtgacattactctctttagtggttgtaataacagaatcagctcctgaatctgctcttatcaccaaacttcctggtttcgaaggcacttttccttcgaaacattactccgggtatgtgacaattgataaggaacatggaaagaatctatggtattactttattgaatcggagaagaatccatcgaaagatccggtggtgctttggctcaatggtggtccaggttgttcaagcatggatggatttgtgtatgagcatggtccattcaatttcgaactaccaaagaaaaacaatagtctcccactcttgcatcttaatcctataggtggtccaaggtctctaacatta

SEQ ID NO: 148586 - DNA, 444 bp, Arabidopsis thaliana columbia
gtttagtacacaacagcaacatcaaactctaataatctccaagttggtgtatactataatggtgatggctggtgcttcttctttggatgagatcagacaggctcagagagctgatggacctgcaggcatcttggctattggcactgctaaccctgagaaccatgtgcttcaggcggagtatcctgactactacttccgcatcaccaacagtgaacacatgaccgacctcaaggagaagttcaagcgcatgtgcgacaagtcgacaattcggaaacgtcacatgcatctgacggaggaattcctcaaggaaaacccacacatgtgtgcttacatggctccttctctggacaccagacaggacatcgtggtggtcgaagtccctaagctaggcaaagaagcggcagtgaaagccatcaaggagtggggccagcccaagtcaaagat

SEQ ID NO: 148587 - DNA, 399 bp, Arabidopsis thaliana columbia
gtttcttcttctttaaccaagctggttcttggttgtctcctcctgctcacattcacggacaaccttgtggctggaaaatctggcaaagtgaagctcaatctttactacgaatcactttgtcccggttgtcaggaattcatcgtcgatgacctaggtaaaatctttgactacgatctctacacaatcactgatctcaagctgtttccatttggtaatgccgaactctccgataatctgactgtcacttgccagcatggtgaagaggaatgcaaactaaacgcccttgaagcttgcgcattaagaacttggcccgatcagaaatcacaatactcgttcatacggtgcgtcgaaagcgatacgaaaggctgggaatcatgtgttaaaaactctgggcgtgag

SEQ ID NO: 148588 - DNA, 342 bp, Arabidopsis thaliana columbia
gttaaaaccctagcccagtctatttaatgattcaccgagtagtcttctagtcctgcgtatacttcttcttcttcgtttatacttagaagatgaattgtgcaatttccggcgaagttccggaggagcctgtggtttctaagaagtcgggtttgctttacgagaagcggctaatccagacgcatatatccgattatgggaaatgcccggttactggtgagccacatactcttgatgacattgttcccatcaaaactgggaagatcgtaaagccgaaaccattacacacagctagcatccctggattgcttggaacgtttcagactgaatgggacagtttgatgc

SEQ ID NO: 148589 - DNA, 406 bp, Arabidopsis thaliana columbia
gagctctctctctctttctctctactttttggattttttctttctcctttttcttcaacgagagtatctttttcactttactcttcactccatcaatatcacactcttcttgctactatctctctttgctttgtacaaagccaacactcgtctttttgttctaatttgcatctgataatgttggcctcgctgatcatcttcgttgctcttctctgcaatgtgactgtcataagtggcttaaacgacgaaggctttgcgctcttaacgtttaaacaaagcgttcacgatgatcctacaagttctcttaacaattggaactcatcagacgagaacgcctgttcgtggaacggtgtaacttgcaaagaactcaaggtggtgtctctaagcattcccaggaagaatcttt

SEQ ID NO: 148590 - DNA, 389 bp, Arabidopsis thaliana columbia
aagaaataacaaaatggctcgagtctctttctttctttctttctgcttaacacttttgatccttttccatggctacgcggctcaacagggtcagcagggtcagcagtttccgaacgagtgccagctcgaccagctcaatgcgctcgagccgtcacacgtactgaagagcgaggctggtcgcatcgaggtgtgggaccaccacgctcctcagctccgttgctcaggtgtctcctttgcacgttacatcatcgagtctaagggtctctacttgccctctttctttaacaccgcgaagctctctttcgtggctaagggacgaggtcttatgggaaaagtgatccctggatgcgccgaaacattccaagactcatcagagttccaaccacgct

SEQ ID NO: 148591 - DNA, 427 bp, Arabidopsis thaliana columbia
  unsure (1)..(427): unsure at all n locations
gtttttctttgttgcgtatctgnacttagttttcatatcataaaaataaaacatatctttagctgatgttgtcttcttcttgataaacagattttctacagctttttttctttctaatttaataattcttgagactttttaaaaccctctgcgaaacagatgattcgagttttggtttcttcatctgtgttttgattttttcgtcttttattcttagtcaaacacataaatttcttttactactcttcgtagatgacttctcatgttccaaaacatcctcgtaaatcctttgaagatatggtgaagaatcttaaagtggatcctcttgctaaggtcactgcctccaccacttccatggtttctgcaaaagagaataagaatcagtcagaggcagagccatcatattatgaaactcttgagacatatc

SEQ ID NO: 148592 - DNA, 441 bp, Arabidopsis thaliana columbia
  unsure (1)..(441): unsure at all n locations
atcgggaatcaaacatcgcctccgnctctcatttcaaacgctatctccatctccttcctccggcgccgccatggaatctccgaagaattctctgatcccgagcttcctctattcatcatcttcatctccgagatctttcctcctcgaccaggtgctcaattccaactccaacgctgcattcgagaaatctccttctccggccccgcgttcctctcctacgtcgatgatttctcggaagaatttccttattgcatctcccaccgagccagggaaggggatcgagatgtattcacctgccttctacgctgcttgtacctttggtggaattctcagctgtggtcttactcacatgaccgtgactcctctcgatctcgtcaagtgcaatatgcagattgatccagcgaagtacaagagcatctcgtctggttttggaattttgct

SEQ ID NO: 148593 - DNA, 392 bp, Arabidopsis thaliana columbia
caaaaaaaagaaaacacaaaaacaaagattagaatggcttcctcaaccatggctttgtcctcccctgccttcgccggaaaggctgtgaagcctgccgcatcagatgtcctcggaagcggccgtgtgaccatgaggaagactgtcgccaagccaaagggtccatcaggcagcccatggtacggatctgaccgagtcaagtacttgggtccattctccggcgagcccccgagctaccttaccggtgagttccccggtgactacggatgggacaccgctggtctatccgccgacccagagaccttcgccaggaaccgtgagctagaagttatccacagcagatgggccatgctcggagccctaggctgcgttttccctgagctattggctaggaa

SEQ ID NO: 148594 - DNA, 442 bp, Arabidopsis thaliana columbia
  unsure (1)..(442): unsure at all n locations
ctccggtgaagaaaaaatgtcgcacaacganactanntcgctttatcaatcatctcaatcagacattgacgagattgagaatatgatgaacgacagttttcaatcaggtcccggaaccgtgcttcctgctcgaccaccgagtccgatccgtccgtcgattcccgtttcatcctcaccgttcgttcaatccaatctcccaccgcttccaccgtcgtcttcctcctccactcagaaggtgatgcctgttccagctcctccaccacttccgtcagcaggtaacgaaggtaacaagagtattggaggtagcggattcggatctccgccaaatacattgacggagcctgtttgggatactgtgaagcgtgatctgtcacggatcgtgagtaatttgaagcttgggggggtttctaatccgtatagggaaagatctgggaaagcactt

SEQ ID NO: 148595 - DNA, 447 bp, Arabidopsis thaliana columbia
  unsure (1)..(447): unsure at all n locations
agattctcgagacatcgaagctcaccatcancataaatccaaacaagggtttcttgcaacggtccaagagagtatgaaccatgctctcttggctcgttctcttgctttcaacctcactctttctcatcgaaccgtacaaacccacacgttcgatcccatccacgactgcctcgagctgctcgacgacacacttgacatgttatctcgcatccatgcggataatgatgaagaagatgtccatacatggctaagcgcagcactcacgaaccaagacacttgtgagcagagccttcaagaaaaatccgagtcatacaaacacggacttgcgatggatttcgtcgcaagaaacctaaccggtttgttgactagctcgcttgacttgttcgtatccgtcaagtcaaaacaccggaaactcttatcgaaacaagagtattttccgacgttcgt

SEQ ID NO: 148596 - DNA, 391 bp, Arabidopsis thaliana columbia
acaagaactaacaatgataatgagaagcgctgcattacttttaccttaacctacgcgccgcccagggaccgtttgttccaagggtggtaaccacggctcgaaccgtctctgctgctactcctcgtgttgctaaaccgattacaagagcttcttcagatggaaacctctacaagattcagtcgccggagagcataacgaaaaccatcagcgtatatcacgaagaaacggcgtctttgagggttttggaaggatctcgactcccccaaggaggttccaacggtggatttggtggtagaggcggatatggtgccagaagtagcggtggaggtggaggttggagcgtagaacgttatcacgaagagatgattcaacgctatctcggagacactct

SEQ ID NO: 148597 - DNA, 382 bp, Arabidopsis thaliana columbia
  unsure (1)..(382): unsure at all n locations
cggagacgaagggggtgtttcgtgtgttattgagatattgagattattgctttgtaaaactcaaaatctatggcggtttctagcgccttcgttgttacaccgaagctggagaagctgttagcgaatcaccataatccaacgtattcttcttctccggccccgttggatgtaattgggatacgtgctcttccgatgaacaataggaacaagcgaggtctgatccagagagcgcgttgcgagatttctccgtctaataaggcagctagcatctcagctctcgagcagctcaagacttctgctattgaccgatacactaaggaaagaagcagcattgtggggaatggggcttagcattcacacagctnctgttgaggatgcgtga

SEQ ID NO: 148598 - DNA, 323 bp, Arabidopsis thaliana columbia
  unsure (1)..(323): unsure at all n locations
ctcgtttctagatctccgacgatcgganaataanatttatcgattaattctgtcaatcacacaaaaaccgaaaaccaaaaaaaaaccatggcgtttgagaagatcaaggtggcaaatcccatcgtcgagatggatggtgatgaaatgaccagggttatttggaagtctatcaaggataagcttattactccttttgtggagttggatatcaagtacttcgaccttggtcttcctcaccgtgatgctacggatgacaaagttactattgaaagtgctgaagctacttagaagtacaatgtggcgatcaagtgtgccaccatcac

SEQ ID NO: 148599 - DNA, 440 bp, Arabidopsis thaliana columbia
  unsure (1)..(440): unsure at all n locations
aaaagaacaattcgttttttcgctctctcatnttaatatcttcttcttcttcttccttcattgagcttcagcttcaactgtacaaagattggtaaaaggagaagaagaagatccattaaaccgtatctatcttttctctctccacttctatttccatggcggagggtgaagagaagaacggaattattgattcgattcctttattcgctaaggagcttattgccggcggcgtcacgggtggtatagctaaaaccgccgttgctccactcgagcgaattaagattcttttccagaccagaagggatgagtttaaaaggataggacttgttggatcaatcaacaagattggcaaaactgaaagtttgatgggtttctacagaaggaatggtgcaagtgttgctcggatagttccctatgcagctcttcattacatggcttat

SEQ ID NO: 148600 - DNA, 421 bp, Arabidopsis thaliana columbia
  unsure (1)..(421): unsure at all n locations
ggaggctatggcgacgacggcgaagatnttgagtgtttctacaagcagactaaaagcaatatcaccggaggtatctccaagtccaagccttcttcccggaaagtggctcccaaacacgcggcggctcaaggttctgatgttacccagcccgccgcattgatttcacacggctccgtcgatctcaacgaggattatgacaaggaggaggagatgcttagacaatttgacatgaacatcacttatggtccgtgcctgggtatgacgagacttgatcgttgggagcgtgcagtgcgtcttgggatgaaccctcccaatgaaatcgagaagcttttgaagaccgggaaagtccagcaagattgtctgtggcaaggtcgtgtctagataggtgttctttaatcctttatctatgcccttgtatgat

SEQ ID NO: 148601 - DNA, 430 bp, Arabidopsis thaliana columbia
atccatacaaatctccatctgttggatttgtcaatcatgatttatcaccctaatgtcgatgaatcttctggtgctgtttgcttagatgttataaaccagacttggagcccaatgtttgatcttataaatgtgttcgaatccttccttccgcaactgcttctatatccaaacccatcagatccatttaatggagaagccgcttctctgttgatgcgagaccgtgcagcctatgagctcaaagtgaaagaatattgtgagaaatatgcaaaaccagaggagattttaagtgatgatgatgatgatgatagcatgagcgaagatggttcggactctgatgatgatgacgacgacgaaatcgttgggaaagccgatccatgactgtttacaaatcaatctttctttgcactttcattactccatcttcaacttt

SEQ ID NO: 148602 - DNA, 417 bp, Arabidopsis thaliana columbia
  unsure (1)..(417): unsure at all n locations
aaacgattagagatcttcttctttctcctgttgtanttgaagataaaggaaacagaaagcgcgagatctgagtgacggagtaatttcaaagggaggttttcgagatcagaaatggcgcaacccctcgtgaagaaagacgatgatcacgacgatgagttggagtattctccattcatgggaattgagaaaggagcggttcttcaagaggctagagtctttaatgaccctcaggttgatcctagacgatgctcccaggtcattacgaagcttctttatttgcttaaccaaggggagtcattcaccaaggttgaagcaacggaagttttctttttagttacaaagctttttcaatcaaaagacacgggtttgaggagaatggtctacttgatcattaggagttatcttcaatatctgatg

SEQ ID NO: 148603 - DNA, 446 bp, Arabidopsis thaliana columbia
  unsure (1)..(446): unsure at all n locations
gttttgatcagacacaaaaagtatctctctccgtacntgtgtcaaggttatgcaagaagcggcactaggtatgatgggagccaccgtaggcggagacggagacaccgcggtcgtggcggagcagaatagacagttgaaaggtgagatagcgacacatccgatgtatgagcaattattagccgcacacgtggcgtgtttaagagtagctactccaatagatcaacttccgatcattgaagctcagctttctcaatctcatcatcttctccgttcttacgcttccacggccgttggataccatcatgatcgtcacgagctcgataatttcttggcacaatatgtaatggtgttgtgtagcttcaaagaacaggtgcaacagcacgtgagggttcatgccgtcgaagctgttatggcttgccgtgaaattgagaacaaccttcattctt

SEQ ID NO: 148604 - DNA, 445 bp, Arabidopsis thaliana columbia
  unsure (1)..(445): unsure at all n locations
gacaagcaaagcttaaagctgaaagcgggaaaatcacttcttattatatagcagcccactgcgagtgattctgacgatatcacctgtggctcctgacaacgcccccgnaacttactggttattttgtgtgttttagcttgtgaaattcaaagtgaagatcaagaaattcgtctattccaaaaaaatcgtataatcgaattcaatagcatggttggtattttctccaggttttctgttgttagaggcagccatagacgaacacagagtgccatcgatggcagggaagtattgtctccaagatctgatcttgctccggcaactaataccacaaccactgaaactcatgggatcgaagtagcaacagagtttaaaccggtggatcacccgatggagcccttagacaacgatcaaccgatccaatgtccactcccagagccatccattc

SEQ ID NO: 148605 - DNA, 366 bp, Arabidopsis thaliana columbia
  unsure (1)..(366): unsure at all n locations
cggacgcgtgggagctgatgaggctgatcgtgnatcactatcaagtccactggtatttctctctactacgagatgactgatgaatccttgaagagtttcactggagccagagacggaaacgagtacctcatcaatcttattgattcacctgggcacgttgacttttcttctgaggttactgctgctctccgtattactgatggtgctcttgtggtggtcgactgcattgagggtgtgtgtgttcagactgagactgttctacgtcaggctcttggtgagaggattcgacctgtcttgactgtcaacaagatggacaggtgtttccttgagcttcaggttgatggtgaggaggcttaccagactttc

SEQ ID NO: 148606 - DNA, 375 bp, Arabidopsis thaliana columbia
  unsure (1)..(375): unsure at all n locations
acaaaatggctcgagtctctactctncangtggnctgcttaacacttncgatccttttccatggctactcggctcaacaggggcagcagggtcagcagtttccgaacgagtgccagctcgaccagctcaatgcgctcgagccgtcacacgtactgaagagcgaggctggtcgcatcgaggtgtgggaccaccacgctcctcagctccgttgctcaggtgtctcctttgcacgttacattatcgagtctaagggtctttacttgccctctttctttaacaccgtgaagctttcttttcgtgctaagggacgagggcttatgggaaaagtgatccctggatgcgccgaaacattccaagacttaatatgtggtccaa

SEQ ID NO: 148607 - DNA, 427 bp, Arabidopsis thaliana columbia
  unsure (1)..(427): unsure at all n locations
ttcccctctcttctgttgaagaaagctttaatcnttctgggtttcttttaactatggcgacaggggttagtttcttcttagctctggtaatgacggnggtgattcttgctccttctgtcgtctctggagaaaatgggttttccgatcttaaaatccgtactcacttgaaacgactcaacaagccagctctcaaatcgattaagagcccagatggagatatgattgactgtgttccaatcactgaccaaccagcttttgctcatcctctgctcattaatcacactgtccagatgtggccaagtttgaacccagaaagtgtatttagtgagagtaaagtttcatcaaaaaccaagaatcagcagtctaatgctatacatcagctttggcatgtgaatgggaaatgtccaaagaacacaattcccatcag

SEQ ID NO: 148608 - DNA, 442 bp, Arabidopsis thaliana columbia
  unsure (1)..(442): unsure at all n locations
aaaaaaagcaaagaacacttgaacgttttctagtangatatggaagggaaagaagaggatgttcgagtgggagctaacaagttcccggagaggcaaccgataggtacatcggctcagacggacaaagactacaaggagccaccaccagctccatttttcgagccaggcgagctgagttcgtggtccttctacagagccggaatcgccgagttcatagccaccttcctgtttctatacataacagtattgacagtgatgggagtgaagagagcaccaaacatgtgtgcctctgttggaatccaaggcattgcttgggctttcggtggcatgatctttgcccttgtctactgtactgctggaatctctggtgggcacataaacccagcggtgacatttggtctgttcttggctcgtaagctgtcattgacgagagctgtctttt

SEQ ID NO: 148609 - DNA, 424 bp, Arabidopsis thaliana columbia
  unsure (1)..(424): unsure at all n locations
atttttctcttcttcctcttctgaaatanttgggtttgagttcttcttctaatcgatcaggaagatgggtggaggaaacgcacagaaatcagccatggctcgtgccaaaaacttggagaaggctaaggctgcaggaaaaggtagccaattggaagctaacaagaaagctatgtcgattcagtgcaaggtttgtatgcaaacattcatctgcacgacatcggaagtgaaatgcagggagcacgcggaggcgaagcatccgaaagccgatgttgtcgcttgtttccctcacctcaagaagtgatgaaagctattatctcaactataaaggattccaatgtataacgtatggatcctcatctttcctatgttttgatcaaagtctcgacaaattttatggtttctatttctctctacttgtttcaac

SEQ ID NO: 148610 - DNA, 370 bp, Arabidopsis thaliana columbia
aacacacctccgctctctcggcatagacgttgaggataccggagtgtcctcttactactctgctggatctgaagtcggtcgccgcgtctccgcttcatcgtcttccgaagttcgcggcttagtctgctgcggcaccggcgtcggagttgcgatgttcgccaacaagttcccgggcgtctacgcagccacttgtctctccgtcgaagacgccgtcaacgctcgatcaataagcaattgcaatgtcctcgcattctccggcatcaaaacatccccggaaaccgccttggaaatcttcgacgcttggatcaaaactcctttcaaatctccttgtcctgcgtccggatccgaaccatggagcttagttatcttt

SEQ ID NO: 148611 - DNA, 441 bp, Arabidopsis thaliana columbia
aaaagattcactaaatggccaccgcaagcaccgttgttactttcagaccctcctccgtttcagcttcttccgaattaacccatctgagatcaccctccaaactccccaaatttacgcctctgccatcggctcgctcacggtcctcttcttcgttctccgtctcctgcaccatcgctaaggacccagctgttgtcatggcggactcggagaagattaaggccgctggatctgatccgactatgtggcaacgacctgattcattcggtcgtttcgggaagtttggcggcaagtacgtccccgaaactctaatgcacgccctctctgaactcgaaacggctttctattcgctcgccaccgacgaagatttccagagagaattagcagagatcttgaaagactacgttggtcgggaaagtcctctttactttgcagagaggctca

SEQ ID NO: 148612 - DNA, 432 bp, Arabidopsis thaliana columbia
ctttctctctctcgaataataatttttcatttgttgtgtccttttggtgcttgaagcgatgaccatggcagcaaatctagcgcgacggctgatcggaaaccgatcgactcagatccttggagccgtgaactctagctcaggtgcggctagttctgtcgctagggctttctgctcctccaccactccgatcaccgcaactctcttccctggcgatgggatcggtcccgagatcgccgaatctgtcaaaaaggtgtttacaacagctggtgtaccaattgagtgggaagaacactatgttgggactgagatagatccgagaacacagagtttcttgacatgggaaagtctcgaatctgtgcgtagaaacaaagttggtttgaaaggtccaatggctactccaattgggaaaggtcaccgttctttgaacctgac

SEQ ID NO: 148613 - DNA, 391 bp, Arabidopsis thaliana columbia
  unsure (1)..(391): unsure at all n locations
aaaacaagtttcatgtttgaatgggcgatcnagtaactgtgctgctccagagggggcactcaagtcttctcggaaaagatttatagtattcgatcagtcgggagagcagactcgtttgttacaatgtggatttcctctgcggtttccttcttctatggatgcagagcgagggaacattctcggtgccctacacccagagaaagggtttagtaaagatcatgccattcaagaaaagatattgcaacatgaagatcatgaaaatggcgaagaagactcggaaatgcacgaagacactgaggaaatcaacgcgttactgtattctgatgatgacgataatgatgattgggaaagtgatgatgaagtaatgagcactggtcactctccattcaca

SEQ ID NO: 148614 - DNA, 359 bp, Arabidopsis thaliana columbia
  unsure (1)..(359): unsure at all n locations
gaaatttttggagaaattggagcttcgattcattcanttatgaggatctctgatgattagtggcgaaattcgtgaagacatcttcgtccttgctttcgaatcgctgaatcgtgttacgttttctagattcggctgaggagtgaaattggatttttgaatcgatttctgaataaagaggaagaggatcggagatggcggcgggtgtaatggtaacggccacgggagcagtggtgattctgtacttactgagccgtcggatcgtgtgggcgagaaatggagaagatgattcaggaggtgaattgggtaaatcagggtgatctggaaggaggaggattgttaggagacctgctcaagcaccg

SEQ ID NO: 148615 - DNA, 446 bp, Arabidopsis thaliana columbia
atataatatataagatcgatctcacttttggactgaataagaagctattggatcgctgacagatgatcctttcagattcagagagttttatcgatcagatcattttttctcaatgacgaaaaaggcggtgcttattgggatcaattacccaggaaccaaggcggagttacggggatgcgtcaacgatgttcgtcgtatgtacaaatgtctcgttgaacggtacggcttctccgaggagaacatcaccgttctcatcgacaccgatgaatcctctactcagtctactggcaagaacattcgccgcgcgcttgctgatctcgtcgaatctgccgattccggcgacgttcttgtcgttcattacagtggacacggtacgaggttgccggcttagactgggaaaacgatgacactgtgtttgacgagtgtattgttcttgcgacatgaat

SEQ ID NO: 148616 - DNA, 433 bp, Arabidopsis thaliana columbia
  unsure (1)..(433): unsure at all n locations
gaggaacaacaacaatcttctaacgaacaagtanatgtatgtctatcttaaaacggcgtcgcatccagcaaaaagcatcgctaaagctactctgttcctcgtcacctctctcttcatatctgctggtctcttagacttattgggttgtttcgatttcacaacttttacaggtctgaagcaggtaacaactagtatcagaaaatcaccaatcacaagccaaagattccctaaccaatgcggcgtcgttcagaaccaaactcaattatttccccaaaatggctcctcgagaaacaacgacaaacccagaagcagccattcaagaatatccacgtgtccttcttacttccgttggatccacgaagatctacggccatggaaagagacaggtgtaacgagagggatgcttgagaaagccaggaggacggcgcatttc

SEQ ID NO: 148617 - DNA, 431 bp, Arabidopsis thaliana columbia
gagtgactctagcgctttctctcgtcgctagtacttttttcatctttgaccctaaaacttggcaaatttcgagctttcaggtgtaatccattatgatgttgctgctaatcccgtagaaatcagaaagtagccatccttgaagcaaaacatagcccacacgctggggattgctcaaattcggagaattctgccggcattgagactttggtcattagaaaaattgaatgataaggatacacgacaggcatggagtgcaacaaagacgaggcgacgagggcgaaagaaattgcccagaacaagctcaaaatgaaagacattgccggggctaagaaacttgccttgaaagctcaaaatctgtatccagagatagaaggtgtttctcagatgttagcaaccttggatgtgtatatcgctgcagaaaacaaagtaaa

SEQ ID NO: 148618 - DNA, 434 bp, Arabidopsis thaliana columbia
gaaaaacctttccaaaaatggcaaagatccgtaacttagtcttcttcttaggggtattagcggcttttacactctccagtttcccggtaactgtttccggcgagccccctatcttattcactttcggcgactcttcctacgatgtgggcaacacgaagttcttctcgtcggagttcgatccagccaccacgtggccttacggcgattccatcgatgatccctccggtcgttggtctgacggccacattgtcccagatttcgtcggtcgattgattggtcatcgtgaaccgattcctccggtacttgatccaaaagctgatctttctcgtggagcaagctttgccattgctggagcagttgttcttggatctcaatctactactgcatccatgaattttggacaacagatatcgaagtttttagagttacataag

SEQ ID NO: 148619 - DNA, 433 bp, Arabidopsis thaliana columbia
  unsure (1)..(433): unsure at all n locations
cactagaacgcccttgttgacgatcctttacnctgctgcatctagggttcctcgaacaatgtgatatctcacaccgggtaaatccttaacccttccccctcttactaagactacagaatgttcttgtaaattatggccaataccaggtatataagcagtgatttcaaatcccgaggttaatcgtactctggcaactttacgtaaagcagagtttggttttttgggggtgatagtggaaaagttgacagataagtcacccttactgccactctacagaaccgtacatgagattttcacctcatacggctcctcgttcaattctttcgaagtcattgggtccctttcctcgttcgcgaatctcctcccttcttccactccgtcccgaagagtaactaggacaaactcggtcacgttttcatgttcaactgaacac

SEQ ID NO: 148620 - DNA, 391 bp, Arabidopsis thaliana columbia
atttgtctgaaaaaatctttgtgcgatgcatgattatgtcgtcgacccatcagttagtttcttcgatgatctcttcttcctcatccactttcttagccccttcaaattttaatctcagaactcgaaatgcttgcttacccatggcaaaacgggtcaatacttgcaaatgtgttgctacgccgcaagagaagatcgagtataagaccaaagtgtcacggaattcaaacatgtccaaacttcaggctggatacctattcccggagattgcaagaagaaggtctgcacacttgttgaaatatccagatgcacaagttataagtcttggaataggcgacacaactgagccaattcctgaagtgatcacttctgctatggcaaaaaaagctcatga

SEQ ID NO: 148621 - DNA, 385 bp, Arabidopsis thaliana columbia
  unsure (1)..(385): unsure at all n locations
gagaggatcgaggcggtggagccagatttgatcntgatcacgtttagggttatagaaggtgatctgatgaaagagtacaagagcttcttgctcaccatccaggtgacccctaagcctggaggccctggaagtattgtgcactggcaccttgagtatgagaaaattagcgaggaggtagctcacccggaaactctcctccagttctgtgtcgaggtctccaaagagatcgacgaacatctcttggccgaggaagaggaggtgaagacaccagagacgcctagtttggtgggaaagctagagacagacgtggagatcaaagctttcgctgagaagttccatcacatgttcgcccggaaaccacaccatgtctctaaagcatcttcag

SEQ ID NO: 148622 - DNA, 441 bp, Arabidopsis thaliana columbia
ctctgaagcatccatggaagctcctccacctgcatgcgatccatacaagttcctcaacattacactgaactcagatggatctctcaccagacaccgtgatttccccaaactgcccccaacagagcaatccaaagacataccattaaaccaaaccaacaataccttcatccgaatcttcaagccacggaatattccgccggaatccaaacttccgatcctcgtttactttcacggcggtggatttatcctctacagcgccgcttcagctcctttccatgaatcttgcaccaaaatggctgatcgtcttcaaactataatcctctccgtcgaataccgtctagctcccgaacaccgtctcccggcggcgtacgaagacgccgtcgaagctatcttatggctccgggatcaagctcgtgggccaatcaacggtggtgattgcga

SEQ ID NO: 148623 - DNA, 408 bp, Arabidopsis thaliana columbia
ccgaattctccaagtctctcatcatcacacccattctaacaaactttctacgagagaaaaaaacaaaaagataaacaaacaatggagaatcttgtaggtcttcttcgaattcatgtgaaaagaggtgtgaatctcgccattagagacatctcaagcagtgatccttacatcgtcgttcactgcggtaaacagaagttgaaaacacgcgtggtgaaacatagtgtaaaccccgagtggaacgacgacttgacactttccgtgactgatccgaatctcccgattaaacttacggtttatgactatgacttgctctccgcggatgacaagatgggagaagccgagttccacattggtccatttattgaagctattaaatttgcccatcagcttggaccaggacttcctaat

SEQ ID NO: 148624 - DNA, 323 bp, Arabidopsis thaliana columbia
ttcacattcactgttacttcttcatagaacccctcactctctctcacacacaactgtactctctgtggagatttgaagaaaaccctaattcccaattttcttttgtcgttttccttctccgacgattgagagttttcctagatctaaagaaaaaagtttcaatcttcactatgcaatactgagaagaaattccacaaggaaaaaaaatgtcaagctccgacccgaaacccggacctaaaccgggtccatggccaccaactccagaatccgccgcaatgccaccgtcttcctgggctaaaaaaaccggatttcgtcccaaattc

SEQ ID NO: 148625 - DNA, 481 bp, Arabidopsis thaliana columbia
  unsure (1)..(481): unsure at all n locations
ccggnattgaatgaccggaccgacgcacgcgtacgcagaggaccatggagaaatcaacaagtaccttanttataaccatcgngataacctccatgttgctagggtttggaaactctgatcttgctcaggacagagaggagtgtacgaaccagctcatagaactatccacgtgtattccgtacgttggaggagacgccaaggctccaacaaaagattgttgtgcagggtttggccaagttataagaaagagtgagaagtgtgtttgcatattggtcagagacaaagatgatcctcaacttggtatcaagattaacgcaaccctagccgctcatcttccctccgcttgtcatatcacggctcctaacatcactgactgtatttcgattctgcatctacctcgtaactcaacattggctaaagagtttgagaacttaggaaggattgaagacaactacaacttcacatcttctacacaaattca

SEQ ID NO: 148626 - DNA, 365 bp, Arabidopsis thaliana columbia
atttctcacattttcgtagccgcaagacttcttttatattcttacttgcagctatgggtaaagagaagtttcacattaacattgtggtcattggtcatgttgattctggaaaatcgaccacaactggtcacttgatctataagcttggtggtattgacaagcgtgtcatcgagaggttcgagaaggaggctgctgagatgaacaagaggtccttcaagtacgcatgggtgttggacaaacttaaggccgagcgtgagcgtggtattaccatcgatattgctctatggaagttcgagaccaccaagtactactgcacagtcattgatgccccaggacatcgtgatttcatcaagaacatgattact

SEQ ID NO: 148627 - DNA, 300 bp, Arabidopsis thaliana columbia
  unsure (1)..(300): unsure at all n locations
actgacttctctattaagatacagagtatanatggatgcaccaagagagaaccttttcacaggaggtctatttctgagttaacattacataaagtgtcgagtttgatgggttccttctctatgctctctcaacgcgaagttgaaccaagagggacattgcgtcgacacaccagtggaaatgatcttaaatcaaggagtactgagagctctaatcgtcttccaggacacaggaaaaatgcttctgctgcttctgatatcagtagcatatctttccgctcttcgaggtctggttcagctttc

SEQ ID NO: 148628 - DNA, 272 bp, Arabidopsis thaliana columbia
ttcctcagccatggccgtcgggaaaaactagtgaatctctaagggtaggaagggaggaaagaagaaggctgttgatcctttctgcaagaaagattggtatgatgttaaggctccttcaatcttcactcacaggaatgttggaaagacacttgtttccagaactcagggtaccaaaattgcctcagaaggcttgaaacacacagtttttgaggtttctcttgctgatcttcaaggggatgagggtaacgcttacaggaagaacccgcttaaaa

SEQ ID NO: 148629 - DNA, 227 bp, Arabidopsis thaliana columbia
  unsure (1)..(227): unsure at all n locations
ngagaagaaaaaagaaaaaaaggttttccgtttttttgtcganagnagccgcccgaagaagtgtcttttcctctctggcttaaccacgaattggctctgatattagagtttctctagccatggcgaacgcggcatctggaatggctgggcatgatgatggcaagctgagatttctggaactgaaggctaaaaggacacaccgtttcataggttacaagattgaggag

SEQ ID NO: 148630 - DNA, 295 bp, Arabidopsis thaliana columbia
  unsure (1)..(295): unsure at all n locations
ggccgacgacgcgagcggaaagaaagcaaagaacacnagctcgtacgctgctngaganggaaggnaaagaagaagaagagagagtgagaganaacaagaccccccacaacaaccganaggnccaacggcncagacggacaaagacnacaaggagccaccaccagcgccacnnnncgagccaggcgagcggagcacgngagccagcaacagagccgaaaacgccggaggcacagccaccnaccagggggaagacacaacaagaaagacagagacgggagagaagagagcaccaaac

SEQ ID NO: 148631 - DNA, 228 bp, Arabidopsis thaliana columbia
  unsure (1)..(228): unsure at all n locations
acgcgnncgacgcgacagatcgaacnaacgacgccggngttggccgttcnttttacncgccgnngcagcggcngcaaggaaggggacccgggaggccccccacaccagcnccaanncaagccggnncacagcccggnncgganncggaaccaagaaagcancncccaaaaaggcnaagacggnnancncagaccggccccnaaggnncccaggcgcaaaancacccga

SEQ ID NO: 148632 - DNA, 263 bp, Arabidopsis thaliana columbia
  unsure (1)..(263): unsure at all n locations
ggcgccacgcgncgggacgcggggcccaaagaaaaacaagtggngttttgttncacnccncncnaggncaacgaaaccncagagacggcccgcaccccccccccaaggcgcagccancnccgcagcnccaaacnccaacggncncaaaccacgancnnncnccgnncgcgccacaaccgcaggnnacgacnagaacgcnnncacgnncgacccgancaaggaancgancgggncacgngagangacgagaagggacaagacgg

SEQ ID NO: 148633 - DNA, 340 bp, Arabidopsis thaliana columbia
gaacacactatcgaagacgctgaatccatcatccatcgatggatttcaccagaacacgtccactcttcttccttctgcttcatctcatcgctattttcaaccgaaaaccgcgaagaagcgaaacgattcatcgacgctgttaccaccttacactccggtatgataagactaatctcagtgaatccaacgtcaatgaaactcgttaaagcagagaatctaatgcgtatctcaatgactcatctctccaaagagttttaccgcattctcaaatcgaaccgaccgtatctcgaccccgaaatccgctctatccggtcttcaaaagcttccgattccgactccg

SEQ ID NO: 148634 - DNA, 162 bp, Arabidopsis thaliana columbia
  unsure (1)..(162): unsure at all n locations
gggccgaccacgcgagcgangagccagacgcgcaaacagactgagccctgcccgancgannngnnanaaaagggagaaggaaagacgagaananacacaaccccnccgagaaaagagaaaccgagacgncaacaagganagacgacacagaagaagcaagag

SEQ ID NO: 148635 - DNA, 234 bp, Arabidopsis thaliana columbia
  unsure (1)..(234): unsure at all n locations
aaccaaaacccnaaaaccnaaacnnncagagccaccancacnnncaccaacccnanccacgaccaagacgacgangagcncgaccagcncgacccaccggagannacagannccgnagagaaaggganaaaagggcnaagancancagagagacccancnncgaaagcaaaggagaaaccaacncnaaacccgaagaagcnacgagcaagcgagaagaagaggacgaagaagaa

SEQ ID NO: 148636 - DNA, 143 bp, Arabidopsis thaliana columbia
  unsure (1)..(143): unsure at all n locations
agggccgacccacgcggccggggagacattataanaaaaagatttttngggttgtttatacaagaacccancacgagaagaggagccggacaggacccaagaggcccacccgaaggccaggcaganggngaaggcagcaaccg

SEQ ID NO: 148637 - DNA, 219 bp, Arabidopsis thaliana columbia
  unsure (1)..(219): unsure at all n locations
cggacgcgagggcncaacgancatcggacttgatgaagcgngaaggcaaacaacgcgggggggagaggacnaaccggacccggcccccgacacngaanccaaggccggaancgaagngggncaacccnnagacnncacggccaaccgcaggagnannaaccaaagagacancaaagccgaccaancacncgaaanncaccgggaaaaggggncaagcaa

SEQ ID NO: 148638 - DNA, 393 bp, Arabidopsis thaliana columbia
  unsure (1)..(393): unsure at all n locations
annagcgccattagagaacagagaaaaaaacttaatggtctttttagccgccgggaacaaggacgccttgggaacttccggggccccctccacccccaagaaacnccactttttctcaacaacccaccgtcccaaatccctctccttcaccaaaaccgcaatccgcgccgagaaaacagattcctccgccgccgctgctgcagcccccgccacgaaagaagctcccgagggattcacgccaccgcagctagacccaaacacaccgtctccgatcttcgctggaagcaccggtggtcttctacgtaaagcgcaagtggaagagttctacgttatcacgtggaactcaccgaaagaacagatctttgagatgccgacaggaggagcagcgatcat

SEQ ID NO: 148639 - DNA, 254 bp, Arabidopsis thaliana columbia
  unsure (1)..(254): unsure at all n locations
agccgccaaggagaagnacncgctcgcacctgncattcagaccaaggcnagcgaggcnagaggagccgatcttagccctcaccccaccaacactagggaaacagcgcacgcaatcaggaagctaccatagatcaaggcgaagagggacctagaggatgagatagctcacaagcaagcaattcccttcacacgtttctgcagaggagtagggagaacagctcaagctaagaacaggcactctaaaaggcaaggac

SEQ ID NO: 148640 - DNA, 152 bp, Arabidopsis thaliana columbia
  unsure (1)..(152): unsure at all n locations
agcaaaaacccccccagaaganagccgngaagcncaacgaggcgacgaanangaggaancgagnccncncnagaaggngaacgagaaagacggcaagaccagcncgaaaagagangccaaggcggcgccncnggagccnccncccgcggcgg

SEQ ID NO: 148641 - DNA, 212 bp, Arabidopsis thaliana columbia
  unsure (1)..(212): unsure at all n locations
anngagcattcagccaataagaggcacaagttgacgcttccagagcacnggangccacaaaggccagggagcggangganaaggccaccccancccagnangcagngaaaganganganncaagaggaaaagganacagnccngaaagacggcgaganaggncaccnganaggagaaggcgancaccaagnccnnacagaagagaaagggga

SEQ ID NO: 148642 - DNA, 215 bp, Arabidopsis thaliana columbia
  unsure (1)..(215): unsure at all n locations
aagaaacaaanaggaggaancncaanncncgaancagacancncggagaagagananggcgacagagncancggaancggaagaagaaggaaagannagnggaggaaaccanaagcnaancanagacgacgancnaagagagaaggggaaaaacgcagcnaggagcgggagcncnnagaagcccggcaaaggcgncaccacncnccgcgacgaca

SEQ ID NO: 148643 - DNA, 130 bp, Arabidopsis thaliana columbia
  unsure (1)..(130): unsure at all n locations
gaaaaaangagacgaagaagaagttcctacgtgncttgaacaanggcnnnaagagggaaaagcaaggcctagagcnncncccacacaacaccaacaacaacncacgaagcnccagagaaacccaccggaa

SEQ ID NO: 148644 - DNA, 176 bp, Arabidopsis thaliana columbia
  unsure (1)..(176): unsure at all n locations
cgaccanacccgnccacaagccgaccacanagnaaccaaagcagncaagaaagccaagncaaacgaccaaacngncccngcngcgcnnnagaggangcannnccacgacggggncgncagaggaagagaaggcncagnncncnaagacncnaaggggaagaacaaagcagagaaag

SEQ ID NO: 148645 - DNA, 330 bp, Arabidopsis thaliana columbia
  unsure (1)..(330): unsure at all n locations
ccggatctgatcgctcccggagnaaacatcctcgccgcgtggaccggtgctgctggaccaaccggacttcgcttcgattcttgccgcgtggagttcaatatcatctctgggacgtcgatgtcttgccctcacgttagtggtttagcggcgcttctcaagtcggtgcattctgaatggagcccggcggcgattagatcggcgcttatgaccaccgcttacaaaacctacatagacgagaaaccgttactcgacatcgcgacagggaagccttcgacgccgttcgatcacagtgcaggacacgtgtaccaacaactgcactaatcaggacta

SEQ ID NO: 148646 - DNA, 268 bp, Arabidopsis thaliana columbia
  unsure (1)..(268): unsure at all n locations
ggagcaggaaagaagnagganatctctcccctccgtgaagagaaaggnaacaagggggagaggagccgagaancgcaacgccggccacccgccagcgnngaaancgncgangagaacaaaaagcnggacaaggaaaggcgncagcgncaannagaagnnganagcnncagaaaggagnncaacaagcnncaaaagcaaggggcgcagcncaaaannaaaaaagaagaagcgagggagannanncaacaaacggagaaaaacaaacaag

SEQ ID NO: 148647 - DNA, 119 bp, Arabidopsis thaliana columbia
  unsure (1)..(119): unsure at all n locations
ancccaaagccaaagccaaagaattttaacgctccttttnacggagaacacaacagaggagaagaaacaancaaaanccnccgacgcaagccgccaaagaagaagaaaggcacgacgag

SEQ ID NO: 148648 - DNA, 464 bp, Arabidopsis thaliana columbia
  unsure (1)..(464): unsure at all n locations
aaaaaaactcattaagnaaagacttttgacgctaatgtttgacgannncncgaagaagctatggcggatctacgcactgacgaacacatctccgaatncaaggaagcttttagcctcttcgacaaagatggcgatggttgcatcacaacaaaagagctgggaacagttatgcgttcactaggacaaaacccaacagaggctgagctccaagacatgatcaacgaggttgatgcagatggaaacggcactatcgacttccccgagttcctgaacctgatggctaagaagatgaaagacactgactccgaggaagagctaaaagaagccttcagggttttcgacaaagaccagaacggtttcattctcgttgctgagctacgccatgtgatgaccaatcttggtgagaagctaactgatgaagaagggaagagatgatccggaggctgtgtgatgagatggcagat

SEQ ID NO: 148649 - DNA, 402 bp, Arabidopsis thaliana columbia
cacgaacgaagccacgaacttgggtctttggctcttctttgtgtcaatgtctccgtgtgagaatagaagactccatcgcttcttcaacttcaagatggcaaagtgagaaagataccttcttttcttcttatgccacagcttaaagttgcatcctttaaatatcagattgctactgtctcatttggttggaggaaagaataggcgatgagcagaaccgttgctgaccatcttgcgtagagctggctgtgacattgtagaggctctacaagccggtgctttgactttctggagaataaaatggactcttttttcaaaaactcatatctggacccaaaggctgtgcgtgcccagcttcctaagagggctgatcttgcggctccttctgaaccgatgaccgttgcg

SEQ ID NO: 148650 - DNA, 406 bp, Arabidopsis thaliana columbia
ctctattctttctctttgctgctcttaaactttttcttagctttttctatcttcgtgtgataatggctggtaaaggagaaggtcctgcgatcggtatcgatcttggtacgacgtactcttgcgtcggagtgtggcaacacgaccgtgttgagatcatcgctaatgatcaaggaaacagaaccactccctcgtacgttgctttcactgactccgagaggttgatcggtgatgctgctaagaaccaagtcgccatgaaccctgttaacactgttttcgatgcaaagaggttgattggtcgtagattcagtgacgcatctgtccaaagtgacagacagttatggcctttcactatcatctccggaactgcagagaaaccaatgattgtcgtcgaatacaagggagaaga

SEQ ID NO: 148651 - DNA, 403 bp, Arabidopsis thaliana columbia
cttcaactctcaaattgaagtttccatgggaggccacgaaggtttcagcaaccaacgcctctcctccgccacatggttctctcatttccgtgcttcagctctccgatctaaatcactgccccctccgtcctcgcagactgccgttcgctccacctctggcgactctctggttcgtcgcctcggccttttcgacctcatactgttgggcgtcggcgcttccatcggcgccggtgtcttcgtcgtcaccggaaccgtcgctcgcgatgctggacctggagtcacaatcagcttcttgctagctggagcatcgtgtgtgttgaacgctctctgttatgctgaactttcatctcgtttccctgctgttggtggtggagcttacatgtactcttactcagctttcaat

SEQ ID NO: 148652 - DNA, 201 bp, Arabidopsis thaliana columbia
  unsure (1)..(201): unsure at all n locations
gaccggtacggactggctgggtcgacgcctgcgcacaaatctgcanatcttcttctttttctggttttatgaatttcaaagctaacaattcctaggcggttacaatttggcgggacaattcttcattccttggcgggccccggaggtaaaagatgatctttttggtttctggtgagataaaacaaaaatcttggtaacact

SEQ ID NO: 148653 - DNA, 400 bp, Arabidopsis thaliana columbia
tttccagccaacgccgtaccagactctctgtggtggtgctaacaccgttgctcatggctacaccaaaggttctggccttggtgctgaaatcatcggaacattcgttctcgtctacactgtcttctccgccaccgacgccaagagaaggccccgtgactcacacgtcccgattttggcgccgctcccaatcggatttgcagtgttcttggtacacttggcaacaataccgatcaccgggaccggaatcaacccagctagaagtcttggagccgcaattatctacaacaaggaccactcttgggatgaccattggattttctgggttggaccattcattggagcagctctagcagcactatatcaccagattgtcatcagagcgattcctttcaagagcaag

SEQ ID NO: 148654 - DNA, 410 bp, Arabidopsis thaliana columbia
gaaaaaaggaacagactttttacttgtgcctttgaccaagaaccacaaagaggaggaaatcaaatggtttttgggagtttgatggattgattgattattcagcaaatcccacagaagaaatcagaagctgcttcttattttttggtcacgaccagtcttaatcaaagtagttcgtctcctacttgttattaaaagtgtatatttctgttgggagtttctgttctcctaccacctcattgacctttaatgatggactcatagtttggtgccaagtgacccaaaaaaaaaaaaaaaaaaagtcgatcttgaagatttcatactttttctggcaattctgtttggtttcagaggaaggagtcaaaacaatggggatcgtttcagaagaagccattgatgaattccaagagctg

SEQ ID NO: 148655 - DNA, 421 bp, Arabidopsis thaliana columbia
  unsure (1)..(421): unsure at all n locations
gggccacgcnncccgtccgctcttcttcttctatttttgctgtgtgacgaacgagaagactcttttttgaattgcgattcttcttcttctccgtttctttcgctacttcctcagcttcgtcaccgtcgaaaattcttcacgttttcctcggaattttccaattgtcttctccaattctcttgcgatcgttgaagatctgaaaaattcgaagcgtttgatcatggcttcgtacactcccaagaacattctcatcaccggagctgctggtttcattgcgtctcatgtcgccaacagactcatacgaagctatcctgattacaaaatcggtgtgcttgacaagcttgattactgttcaaatctcaagaatctcaatccttttaagcactctccgaacttcaagtttgtcaaaggtgatatcgct

SEQ ID NO: 148656 - DNA, 397 bp, Arabidopsis thaliana columbia
cacacatatacacacgctttcgtttaaactctctctgtttcaatcattaatcagaaagaagcaacacaaatatggatcacgacaagtctacttcttgttgctgcgttcttgatgcttccacttatgttggtttctggattctcaagaaattgcttagcagaggatactctgttcacgcagcgattcgtagaaacggggagagtgaaattgaggagatgatcagagagatggaaacaacagaagagagattagtggtgtacgatgtagatgtgttggattatcaaagcatacttgtctctctcaagacatgtaacgttgtcttctgttgcttagacagccctgaagggtacgatgagaaggaggtggatttggaagtgagaggagcgatcaatgtggt

SEQ ID NO: 148657 - DNA, 386 bp, Arabidopsis thaliana columbia
gccgcaactacctctctctctaggtctctttctctatctccctctgtttactcccacagctctaaaagcgttttcgaatcgtcacacctggagaaggaagctaatcactttctcattttggaactttgaggagagatctgaaagtttttttttttttgttgttgttctggatcgttcctgttccactctcttcatcttccgatcatcgttattttcgaagctctctacaaacaaaatcgattttttttctggttaatctaaagaggtgaccgaaagaagaaaacttttacgttttgcatggagtaagaatgccagagttaagaagtggagcaaggagatcgagacgccttgacgagcagcctaaccctccgctagttgaacaagca

SEQ ID NO: 148658 - DNA, 406 bp, Arabidopsis thaliana columbia
caaaaaatcagtcggcgaaacgggaagagatctatcggaaatcttacggcggcggaagtcatggcgaacatagaatcagaagcagtcgatttcgagccagaggaggatgaccttatggacgaagaaggtacagctattgacggagctgatgtttctccacgcgcgggacatccgaggcttaagtcggctattgccggagctaatggcgaatcagcaaagaagaccaaaggccgtgggtttcgcgaggagaaagattccgatcgtcagcgtcgtctttcctcacgcgatttcgaatcacttggttcagatggccgtcctggtccgcagagatccgttgaaggatggattatcttggtctctggagttcatgaggagacacaggaggaggatataaccaatgcttttg

SEQ ID NO: 148659 - DNA, 407 bp, Arabidopsis thaliana columbia
gaagaagcaaaaagagtcatattcgttgaaaacatcattcactcttctctgcgtctccttctttcacccgaaattgtctctgacaccgttttgattcagccatggctaatgctgcgttaggaatggcagtccatgatgactgcaagctaagatttctggaactgaaggcgaaaaggacacaccgtttcattgtctacaagattgaggagaagcagaagcaagtgattgttgagaaagttggtgaacctattctaacttacgaggactttgcagcaagtcttccagctgacgaatgccgatacgccatttatgatttcgactttgtcactgcagagaattgccagaagagcaagattttcttcattgcatggtgtcccgacgtagcaaaggtgagaagcaagatgatc

SEQ ID NO: 148660 - DNA, 398 bp, Arabidopsis thaliana columbia
cgatccttgatgcttgcttagagcatgatcctgaaagcaaagtggcgtgtgagacatgcaccaagaccaacatggtgatggtgtttggtgagatcactaccgctgcgaaagttgactatgagaagattgttagatccacttgcagggagattggttttatctctgctgatgttggtcttgacgctgacaaatgcaatgttttggttaacattgagcaacagagccctgacattgctcagggtgttcatggtcatttgaccaagaagcctgaagatattggtgctggtgatcagggacatatgtttgggtatgctactgatgagactcctgagctcatgccgttgactcatgtcctagccaccaagcttggtgctaagcttactgaagtgaggaagaac

SEQ ID NO: 148661 - DNA, 386 bp, Arabidopsis thaliana columbia
ctttcattgtagttaacgaaaagattacgataatggcaacatcagctatccagcaatcctccttcgccggccaaacggctctcaagccctccaacgaactcctccgcaaggttggtgtatccggtggtggccgtgtgaccatgcgtcgtaccgtcaagtctactcctcaaagcatctggtacggaccagaccgtcccaagtacttaggaccattctcggagaatacaccgtcctacctaaccggagaataccccggagactacggctgggacaccgctggactctcggctgacccggagacattcgctaagaaccgtgagcttgaagtaatccacagcagatgggctatgttgggtgctctcggatgcacattccctgagattctc

SEQ ID NO: 148662 - DNA, 407 bp, Arabidopsis thaliana columbia
aacttgacccacaccgaaagaaaaagagaagaagagagactttttttcttgggcattcccaagttttcttttttcttcctcttaacactttttttgtgggtatttccctaaaaagaaaactttatttttgttcttagtaaatctgcttttaaattttataaaaatgggaaactgtttgatgggaggaaacaacgttgagaaaatggttaaagaagaagaagtaatgaagaaagaatacaagagaaaagatcgtaaagtaaagatagttttgagaagagatgagttagagaaactcattctttttcagctaaatgccaatggtaacgtcgacggcaagggagaaacaactttggcttcttttggtgactttctaagggagttagaggcggagagatctgcgggagaag

SEQ ID NO: 148663 - DNA, 405 bp, Arabidopsis thaliana columbia
tctctttcaatctatctctgaatctctcactctcctacccgaaaaccatgaactccaacgaccaggatccgattccgttcagacccgaagacaacaacttctccggttccaaaacctacgccatgagcggcaaaatcatgctaagtgcaatagtaatcctcttcttcgtcgtcattttaatggtcttcctccatctttacgctcgttggtatctcctccgtgctcgtagacgtcatctccgtcgtcgtagccgtaaccgtcgcgctacgatggttttcttcaccgctgatccttccaccgccgcaacttccgtcgtcgcttcacgtggacttgatccaaacgttattaaatctcttcctgttttcactttctccgacgagactcataaagatccgatcgaatgcg

SEQ ID NO: 148664 - DNA, 407 bp, Arabidopsis thaliana columbia
agcagccatggctgccaccaacacaatcctcgcattctcatctccttctcgtcttctcattcctccttcctccaatccttcaactctccgttcctctttccgcggcgtctctctcaacaacaacaatctccaccgtctccaatctgtttccttcgccgttaaagctccgtcgaaagcgttgacagttgtttccgcggcgaagaaggctgttgcagtgcttaaaggtacttctgatgtcgaaggagttgttactttgacccaagatgactcaggtcctacaactgtgaatgttcgtatcactggtctcactccagggcctcatggatttcatctccatgagtttggtgatacaactaatggatgtatctcaacaggaccacatttcaaccctaacaacatgacacacg

SEQ ID NO: 148665 - DNA, 392 bp, Arabidopsis thaliana columbia
gatctggcacagagagaaatggcagtttttcgaggatatcggaacgagaatgttgatttggagaaaatacctattgaggaagtgttcagcagtgaaatgcacagagaaggtttatctggagcagaaggagaaaacagactccagatctttggccccaacaaactcgaggagaagaaggaaagctgttactcaagttcttgggttttatgtggaaccctctctcttggtatggaagcagctgcaatcatggctattgcttggctaatggcggggaaagccaccggattgcaagatttgtcggatcgtttgtcttttggtatcaattaactattagttttgtcgaagaaaacaatgcttggaatgctgctgcttgcttttatggctggtcttgc

SEQ ID NO: 148666 - DNA, 406 bp, Arabidopsis thaliana columbia
caacactaagcaaaaaagaaaagctcaagccgagagagacaatggcatcaacattcacgagctcaagcagtgttcttaccccaacaacattccttggccagactaaagcctcaagctttaacccccttcgtgatgttgtctctctcggatctcccaagtacactatggtctgttttctttttggtcttaatctcgtcatattaaaggtgtttcatctttcttcttgagtttgtgtctgactttcacgtaaaatgtctatgtgaagggaaatgatctttggtatggacctgacagagtgaagtacttaggacccttttccgttcaaactccgtcttacctcaccggagaattccctggcgattatggttgggacaccgccggtttatccgcagaccctgaagccttt

SEQ ID NO: 148667 - DNA, 395 bp, Arabidopsis thaliana columbia
gttagatcagacaatgcaccagaattgaagtttgtgaagttgtttaaagaaaagggcatcattcattatttctcttgtccagaaacaccagaacaaaactcggtggtggaaaggaaacatcaacacatattgaatgttgctcgttctcttatgtttcaagctcaagtgcctgtggaatattggggagagtgtgtgttaactgcagtctttctcatcaatcgattgcctacaccattgcttcatgacaaatctccttttgaagtgcttactaacaaaatgcctgattttaatggtcttcgtgtgtttggctgtctttgttacagttctacatcaaccaaaaatcgagataagtttcaaccaagagctaaggcgtgtgtgtttcttggttatccacc

SEQ ID NO: 148668 - DNA, 379 bp, Arabidopsis thaliana columbia
ggaagtggaggttcaaaatcgtcagctttcggattcttctccggctcaaaacgtgaagaaatttgggctcaagaactctattcagaccaacttcggctctgactacgtcttccagattgtcccaaaaatcgattggacagcaatcgcggtttccttatcaaccaacaccgtcaagctttactcgccggtgactggtcagtactacggcgaatgtaaaggccactccgataccgtcaatcagattgcgttttcctccgactcggcggcgtctcctcacgttttgcactcttgttcctccgatggtaccatttgatcttgggacactcgaagtttccaacaagtttcgcgtattgatactgggaatgatcaagagattttc

SEQ ID NO: 148669 - DNA, 396 bp, Arabidopsis thaliana columbia
aataaaaagcctgttgtgggaatggaacaagctgcagagaggagttcaaccattgttgcatccacctctgaagggtcggattttgatccgatatctcgattgaggaagctcttgttccgccaaatgcttgtgggaatcaaagacggcagattcttccttggaaatttccattgcattgacaaacaaggaaacatcattctccaagacactgtggagtatcgtagcatacgaagatcatctccttcgcctactgaacagcgttgtcttggtatgatcctaatcccttcctcttgcaagacatcttgccatgttgattgctctatcgatgaacagcttttcgtgattcagctgaaagagtagagcttcttttaagacttcatgagagaatctttccaa

SEQ ID NO: 148670 - DNA, 407 bp, Arabidopsis thaliana columbia
caaacatcgaaagagagacacttttctctctctctttctctatctccttccaatctctctagggttttcgttacaacggcgaaaagatgttcggtagaggaccctcgaagaagagcgacaacactaagttctacgagatcttaggtgttcctaagagcgcttcaccagaagatctcaagaaagcttacaaaaaagccgctatcaagaatcatcctgataagggtggagatcccgagaagtttaaggagttagcacaagcttatgaagtgcttagtgacccggagaagcgtgagatttatgaccagtatggagaggatgcactcaaggaaggaatgggtggtggaggaggtggacatgatccatttgatattttctcatccttctttggtggaggcccctttggaggt

SEQ ID NO: 148671 - DNA, 282 bp, Arabidopsis thaliana columbia
tttgatcaaacaccggagcacagtatatgttggaccatttcttgagttccttctggtcctggcacaaagattctgggatggccttggaagaggggagtacaccggattggaaaactgcacccaagtatctacttgcttacactagcatatcgtaccctagatcttgaaagatttaatagagaaggaaacggtccatatttggatatcctttaagcacggtcttcttaaacactgaattgccgttatagaagggggaggaaaaaaaaagacccctgtatcctt

SEQ ID NO: 148672 - DNA, 405 bp, Arabidopsis thaliana columbia
tgaacttcgccgtcgagagcatccatgggtcgtgtcatcagagctcaacgtaagggtgcgggttccgtcttcaaatcccacactcaccaccgcaaaggtccggctaagttccgtagcctcgatttcggcgagagaaatggttacctcaagggcgtcgtgacggagatcatccacgatcctggtcgtggtgctcctcttgctcgtgtcactttccgtcatcctttccgtttcaagaaacaaaaggagctcttcgtcgccgccgaaggtatgtacaccggtcagttcttgtactgcggtaagaaagctactctcgtcgttggaaatgttctccctcttagatctattcctgaaggagctgttgtctgcaacgtcgagcatcacgtcggtgatcgtggtgtcctcgct

SEQ ID NO: 148673 - DNA, 404 bp, Arabidopsis thaliana columbia
gcgtctctctcccgcaaccttcgattttcgtttattcgcatccatcggagagagaaaacaatcaataagcgaccatgttggtgtaccaagatcttctcaccggtgatgagcttctgtctgactctttcccttacaaggagattgagaatggaatcctctgggaagtagaaggaaagtgggttactgtgggagctgtagatgttaacattggtgccaatccatctgctgaagaaggtggtgaggatgaaggtgttgatgactctactcaaaaggttgttgacattgtcgacaccttcagacttcatgagcaaccaacttatgacaagaagggattcatcgcttacattaagaaatacattaagcttttgacacccaagctcagcgaagaagatcaagctgtcttc

SEQ ID NO: 148674 - DNA, 410 bp, Arabidopsis thaliana columbia
aagaccgtgaagagcttgaacaatcccgcatatctcaaccatccaccaccacaaccaccggaccatcttcctgctgcggcgccttctctctccaccacctcatagacccaaaacacaaaaacccttcctccaaatccgaccgaatcggtctctcttaaaacactccatggaagtcgaagtcaagctccgtctcctaaccgccgctgctcatctccgtctcaccactctcctcactccataccacctcaaaacccttcaccaacgcaacaccttcttcgacacacccaaaaacgacctctctctccgccgcgccgtcctccgtctccgcttccttcaaaacgccgccgtttccgcggcttctccttctccgccgcgttgtatcgtctctcttaaagcgaagccaactctag

SEQ ID NO: 148675 - DNA, 396 bp, Arabidopsis thaliana columbia
ccacaattcgcagccattttttactctcttcttcccctgagaacgacaggagaaagaataaaaaccctaaatttctttaatttcggcgcttcaaattatcgttgttaaaggtttttgattgattttgtttaaatgggcgatcttgctatgtccgtagcagacatcatgatggagaatgagcctgatgatttagctagtgataatgttgctgagattgatgtgagtgatgaagagattgatgctgacgaccttgagagacggatgtggaaagatcgtgtcaggcttaaaagaatcaaagagcgacaaaaagctggctctcaaggagctcaaacgaaagagacacctaagaaaatctctgttcaagctcagaggaagaaaatgtctagagctcaagat

SEQ ID NO: 148676 - DNA, 408 bp, Arabidopsis thaliana columbia
gaaacggcaaaaatttatgctgaaatctttttttcttccttattctcctctttcgcttgatttcgccgtccgattatctctatcgccgataaatatccggcgtcactcagtagatcttgaagctgttgcttttcttgctttgctcttcgcgcaagattctctttctctgttttcaattgaggattcgaagttgatcgctatttgattcgattggttttgagttttcgatcctcgacggatggagattttgaagtgaatcggaggagcgaataagagaaagtgagagatggatgatagagaaagctcgttcgtagctgttaggcggatttctcagggtctcgaacgaggaagcgtttacaattcatcatctgctgaggctgtgcctggatcagcaacttggttaggcct

SEQ ID NO: 148677 - DNA, 408 bp, Arabidopsis thaliana columbia
gaagaatggagttattcaataatggaacggccgttagattacggagctgtcacgatacatacatctacgccgtcgaggatgaaaaaaccgtccgtcaaagctctgacggaacctcacggcaatcgctatggacggtggagatggttccacgtaaaccaaaattcatacgtctcaagagctgctacggcaagtatttaacggcgagcgagtcgtcgtttcttctgggaatgaccggcgcgaaagtcatccaaacgccgccgtttcgtcaagcggagcatgaaagcgactgggaaccaatcaaagaagagtcaacggttaaactcatgtcgtggaacgagaaatatttacgtgggaacggatgagctccgccgcggaggaactctgtgacgtgtgatcgtgagccgcaca

SEQ ID NO: 148678 - DNA, 398 bp, Arabidopsis thaliana columbia
gcgttaagctacagataactccaagattcgggtctttgtttgttttgaagatcagggtcattttacgataattccggtactcgttattgtgtatatatatctctttcccggaaatttcggttcttgttgtacaaaaactccaaaaaaacgcataaaaaatattctgtaaatggttgaaattctctgggaatttcaacgggtcttgtggtatcatgtcacagaagagagagtttgaagaagggaaaggtcgaattgagggcggctcatccgaagacaagcgtagaagattcaaaagtgtggttcatgaggtaatgagattacaaaccgtcaaacattttctcgaacctgttctcgagcccttaattcgtaaagtgggcaaagaagaagttgattaactc

SEQ ID NO: 148679 - DNA, 402 bp, Arabidopsis thaliana columbia; identical to SEQ ID NO: 121137

SEQ ID NO: 148680 - DNA, 403 bp, Arabidopsis thaliana columbia
atttaattccaaaagataaaaacaatcaaaagatgaatgccacaaagtttgttgtgcttctcgtgattggcattttgtgtgccattgtcaccgcaaggcaggtcgaagaagtgtccaaagagaccaaattaggcacctctcttccaaaatctactaacaaaggcattggagctcagctttctgctgctggtcttacttacagcggcagcagtgtctctagctctgctagtgcttttaacaatcccaaaggtccaggggccagtgcatccgaaagtggctacacatgtaccatcggacaagtcattgccaagggtcgcaaggcaagagtttcttctgcaagtgcttctgccgctacaggtgaggctgcagctgcagtgactcgcaaagctgctgctgcacgtgc

SEQ ID NO: 148681 - DNA, 403 bp, Arabidopsis thaliana columbia
caaagaacgacactttgtccaagcgtggcccgacttttggcagcaccatgaacgtcctctacggagagtacacatgtggtcaaggttccattgatccaatgaacaacataatctcacactacttatacttccttgacctcatgggtattggaagagaagacgcgggaccaaacgatgagctcagctgcgcagaacagaaacctttcaacccttcaactgtaccttcctcttcctcttcgtaagtcttatgatatatcgccgttgctctcaagtctctcttgcttaatgttacgtaataagtgaaattgcttgtggtaaaaaaagaagaagtgtgtttttgtccctctagaacttataatgcaaacaacattacattttatatttttctgtatgtaaaaccata

SEQ ID NO: 148682 - DNA, 383 bp, Arabidopsis thaliana columbia
ctcacattttctctgtaaaaatgggatctaggttccaatcattcttgctcgtgttcttgctttcatgtttaatcctcatatcaactgcctcgtgtgagcgaaatggtgatggaacgattagaattggattgaagaagaggaaactagaccggagcaacaggctagcttctcagctttttttgaaaaaccgagggtctcattggtctcccaaacactattttcgcctgaacgatgaaaatgcggatatggttccgctgaaaaactatttggatgctcaatactatggtgacattaccattggtactcctcctcagaagttcactgtgatctttgatactggtagctccaatctctggataccatctactaaatgttacctatcg

SEQ ID NO: 148683 - DNA, 408 bp, Arabidopsis thaliana columbia
cataaatcgtaatccattttctctcaactttaggaatctcaaatctccgatttggaaatccggcgacaatggtgagagatattgaagatgagattagagacgagaagaatcctcgtcctcttgatgaagatgatatcgctctcctcaagacttatgggttagggccttactctgcacctatcaagaaagtggagaaagaaattaaggatctcgccaagaagatcaacgatctatgtggtatcaaggagtctgatactggtttagctcctcccagtcaatgggatcttgtatctgataagcaaatgatgcaagaagagcaacctctgcaggttgcgagatgcacaaagattataagtccaaacactgaatacgccaaatacgtcataaatgtcaaacatattgctaagt

SEQ ID NO: 148684 - DNA, 407 bp, Arabidopsis thaliana columbia
tggatcatcgggttttactgggtgacggctgataccgaggcactagctcaatcttcgccacaactctactggctctgtgttgcattccttgcgtttgatgttatgtttgttgtcatttgcgtagcggttgctagtcttattggtattgctgtttgttgctgtttaccttgcatcattgcgatcttgtacgcattagcagatcaggaaggtgcaccggatgaagagatagagaggcttttaaaattcaagtttctcacagtaaagaattctgagaaagtgaatggcgaaatacgggaaactcaaggagggataatgactggattagataccgagtctcaaaccgaacgtatgttattaagcgaagatgctgaatgcagcatttgtctatgtgcttatgaagatggagt

SEQ ID NO: 148685 - DNA, 387 bp, Arabidopsis thaliana columbia
ggactcctccaaactctcatctttctctctttgcctcttcctcatttgcattatctatctcccccaacattctctcgcatgcggctcttgcaacccacggaagggcggaaagcactcccctaaagcccctaagctaccagttcctccggtgaccggccctaagctaccagttcctccggtgaccgtccctaagctaccagtccctccagtgaccgtccctaagctacccgttcctcctgtgaccatccctaagctacccgttccaccagtgactgtacctaagctacccgttcctcctgtgaccgtccccaagctacccgttcctccagtgaccgtccccaagctacccgttcctacagagacagtccctaagctacccgttccccc

SEQ ID NO: 148686 - DNA, 399 bp, Arabidopsis thaliana columbia
aagagccacacactcacaaattatattgagagagagagagagagagacagagagagagagagattctgcggaggagcttcttcttcgtagggtgttcatcgttattaacgttatcgcccctacgtcagctccatctccagaaacatgggtgcaggtggaagaatgccggttcctacttcttccaagaaatcggaaaccgacaccacaaagcgtgtgccgtgcgagaaaccgcctttctcggtgggagatctgaagaaagcaatcccgccgcattgtttcaaacgctcaatccctcgctctttctcctaccttatcagtgacatcattatagcctcatgcttctactacgtcgccaccaattacttctctctcctccctcagcctctctcttacttggct

SEQ ID NO: 148687 - DNA, 389 bp, Arabidopsis thaliana columbia
cttctcttcttcaagctcatcaatcaatggcgtcgtctctatctccaccggaagaagcttcgtatcaccaccgtcataccaaaaggtacacctcctccgcttcctccgcttcctccaccaccaacggaaccgtcgaatcatcggtttccgatttcgtcaaacgtcccaaaatctctcatccgaattacatatcaagttccgagatcgaatcagagttttctcatcacgatccagatttcgcaagaatcaacaacggtagttttggttgttgtccgtcatcaatcctagctttacaacgagattggcagctccggttccttcgtcaaccggatcgattctatttcgacgaactcaaaccaaaaatctccgattctagatctgtaatcaaa

SEQ ID NO: 148688 - DNA, 403 bp, Arabidopsis thaliana columbia
ataactcccatggaactaactttgtcgactctcctgagcccatctatggcacccagttcttgcctagaaagttcaaggtcgctgtaactgttcctacagataattccgtcgacctcctcaccaatgacattggcgttgttgttgtttcagatgaaaatggggaaccacagggtttcaatatttatgttggtgggggtatgggaagaacacacagaatggagtctacttttgcccgcctggcagaaccaataggttatgttccaaaggaagatattttgtatgctgtgaaggccattgtagtcacacagcgagaacacgggagacgagatgatcgtaaatatagcagaatgaaatatttgatcagctcctggggaattgagaagttcagagatgttgttgagca

SEQ ID NO: 148689 - DNA, 395 bp, Arabidopsis thaliana columbia
ggagataataatcacaaactacaaaagtagaaagaagaaaaaagaacaaagtatcagttcttgaatatttgcatcaatggaggaatccaaaacacctcacgttgcgatcataccaagtccgggaatgggtcatctcataccactcgtcgagtttgctaaacgactcgtccatcttcacggcctcaccgttaccttcgtcatcgccggcgaaggtccaccatcaaaagctcagagaaccgtcctcgactctctcccttcttcaatctcctccgtctttctccctcctgttgatctcaccgatctctcttcgtccactcgcatcgaatctcggatctccctcaccgtgactcgttcaaacccggagctccggaaagtcttcgactcgttcgtggagg

SEQ ID NO: 148690 - DNA, 408 bp, Arabidopsis thaliana columbia
cactaccttctcttccaaaagtcgcctttttgaaaacacaaaaagacgaaaatgaccctattcaagaggccatgtctttactcaaagatggacaaggaagatccagaagaggtacttagccgacgagccaagttcttgatttacaaaacacttcaagaagccgacttgatttctcggcgtgatcctcattcggcgtttatacggatgaagctgtatctgttgaaggtcaagatcggaaagaggttggctaatctacaccggagagtggtatccgccgttaagattggcggaattcgaaagcattctcataatggcgtgagagcgttgaagaagatgttccaaggaggtgcaacaactggactacctaggcctattttctcccttgaagtttgaaatttcatttattta

SEQ ID NO: 148691 - DNA, 408 bp, Arabidopsis thaliana columbia
ctctgttgaattcctcaaacaatgcctctttctctccgtctttctccttcgccgacggctttatctccgactaccggaggatttggtccatcgaggaaacagtgccggattccttactccggcgtcccgacgacgaagattggtttctgttctttggattctaggaaaagaggagattcctctgttgttaggtgtagcttagaaaccgttaatgtcagtgttggtcaggtgacggaggtcgataaggacacgttctggcccatcgttaaagccgccggtgaaaagcttgtcgtacttgacatgtacactcaatggtgtggtccatgtaaagtgattgcccctaaatacaaagctttatcagagaagtacgacgacgttgtgtttctaaagcttgactgcaatccagat

SEQ ID NO: 148692 - DNA, 407 bp, Arabidopsis thaliana columbia
gttttgaggaaagctctgttttggaagctttacaaagccatctcttaaaagacttgttggtttgtgatggtttcatgggagattttgacttcgatgcttcttttgtctcaagactttggtgtatagaaccacacgttcctaaacaagaacctgattctccagttcttgatccggattctttcgtcaacgagttcttgcaagtggaaggggaatcatcatcatcatcatcaccagagctgaattcatcgtcatcaacatatgagactgatcagagtgtgaaaaaggcagagaggttcgaagaagaagtagatgctagacattaccgaggagtgaggcgaaagccgtgggggaaatttgcagcagagattcgagatccagcaaagaaaggatcaagaatctggctagga

SEQ ID NO: 148693 - DNA, 382 bp, Arabidopsis thaliana columbia
cggacgcgtgggctcgaagaaattgattcatcacgaagcgaaatcatacaaagatctagaagaaggaaacaacaatttcaagagacatggcaggcaaaggtggaaaaggactcgtagctgcgaagacgatggctgctaacaaggacaaagacaaggacatgaagaaacccatctctcgctctgctcgtgctggtattcagtttccagttggacgaattcacaggcaactgaagacccgagtctcggcacatggcagagttggtgccactgcagccgtctacacagcttcaatcctggagtatctgacagcagaggttcttgagttggctgggaatgcgagcaaggatctcaaagtgaagaggataacgccaaggcatcttgc

SEQ ID NO: 148694 - DNA, 403 bp, Arabidopsis thaliana columbia
gacagataccacaagcaaaggaacttttagccaacttgataatctatcaatggctaacatcacaaaaaaaagttcgaggctgtgggcgttcctaggagctgtttactggatatctttggtcacatatttcttcttgtggaaagcttataagcatgtctcttcattgagagctcaagctctgatgtctgctgatgtaaaacccgagcaattcgctattcttgttagggatatgcctgcaccacctgacgggcagacacagaaagagtttattgattcttatttcagagaaatataccctgagacattctacagatcgcttgtcgcaacagaaaacagcaaggttaataaaatatgggaaaaattggaaggttacaagaagaagcttgcgcgagcagaagcaata

SEQ ID NO: 148695 - DNA, 387 bp, Arabidopsis thaliana columbia
tcgaaacacaaagcaatgggctcttcttctccattaacaaggagaaacagagcaccaccatcctctgtttcctctgtttatctaatctttctctgtttcttcctctactttttaaatttctcaaacgctcaatcatcgccggttttcgcctgcgacgtagctgcaaacccttctctcgccgcctatggtttctgcaacaccgttttgaagatcgaataccgagtcgctgatctggtcgcgaggctcacgttgcaagaaaagatcgggtttttagtgagtaaagctaacggcgtgactcgtcttgggattccaacgtatgaatggtggtctgaagcacttcacggcgtttcttacatcggacccggcacgcatttttctagccaagtt

SEQ ID NO: 148696 - DNA, 402 bp, Arabidopsis thaliana columbia
  unsure (1)..(402): unsure at all n locations
aattctcacaaaccttctcttctaaattcctccaaaccctaaaattctcaatctccgatcgtcggaaatttttcagcggtgggccggagctggcgtcaatgatttcggtaaaggaaaatggtttttccaatggtgtcgctctcatcaactctcgatcgaaccaaagctcttaacgccatgaatttagatatggatataaagtataaaagctttcttgatgaatgggaatctgatccgagagtgaaatgtgttatcgntgaaggaagcacatctagggccttttgtgcagggatggatattaaaggagttgctgcagaaatccaaaaggacaaaaacacacctcttgtgcaaaaggtatttacagcagagtatacactgatatgtgcaattgctgcgtacaaa

SEQ ID NO: 148697 - DNA, 371 bp, Arabidopsis thaliana columbia
caacaaacaaaataaataaattcaacagcgatatatcttcatctctctctctctcgccagattttcatcgactcgatttcagatttaagatctcagatacaaaactccgacatgtctacgttcagcggcgatgaaacagctcccttcttcggcttcctcggcgctgcagccgcactcgttttctcctgtatgggagctgcttatggaaccgcaaagagtggtgttggtgtggcttctatgggagttatgagacctgagttggtgatgaaatctattgtccctgttgttatggctggagtgttgggtatctatggattgatcattgctgttatcatcagttccgggattaaccccaatgcttaatcttacta

SEQ ID NO: 148698 - DNA, 407 bp, Arabidopsis thaliana columbia
gttcttgaagctccattccggtttgaaaaacgtccaagtaataacagagtcattgtccaaattactctctttgatgtcctccccagataatgaagaaacagatccgaggaagctataaaagcggcatcggaaaagcagaaattggcagcctcatgggtccaagctgcgttagtcactaacttatcgcccttctctgtctactccagcaaacaagccaaacttgctgcctccaggagcaaacccgtgatcatactcgagagcccgggtaataattcctctagtaaaacccgtgggaatattcaaaacaagccaacgattggatctaaactcgtagcacaaggaatgatccgtaaacacagggagaacagtagcagccagaaagccacctcggtagcagggtcagagtc

SEQ ID NO: 148699 - DNA, 399 bp, Arabidopsis thaliana columbia
ccgatatatcgttaccagagaaagagagctcagagatttagttagcttaatttttcttttcgttttgaaattaaggaagtgattgttatcaccggaggagagagagaaaatgttgggaattttcagtggagctatagtatcgccgccggaagagttagtggctgccggaagcagaactccgtcgccgtaaacaaccggatcaactttagtaaaccggttcgtcgagaaaaatccatccgctgtttctgtacaagtcggcgactatgttcagcttgcttacagccatcacaacgagagtcctctccggcctagatcatttggagctaaggatgaaatattctgcttgttccaaggctcacttgacaacctaggaagcttgaaacagcagtacgggcttgc

SEQ ID NO: 148700 - DNA, 380 bp, Arabidopsis thaliana columbia
gatttcatccctgtcaaacaattgcgtgagaagtacaacagacctcggcatgaagttccttttgattcacaagacgaagattaagatgaaaacctaagagttcacaaccgcagactcgagcacaaaccacaaaaaaaacagaactctagcatagctcaaagcatctagcatccaacttagagatgttctgttggttttatacccatgtagatgtagttatcacttagcagttagcacgactgttcttgctatatacactgaaacaagtcaactttattcaagaatgctttgtgtataaatgcttctttgttcatcctaactgacttatccagaaaagccaagacaactaacttactgctaaaaaaaaaaaaaaaacaaat

SEQ ID NO: 148701 - DNA, 409 bp, Arabidopsis thaliana columbia
ctaaaaacacttatcgtttcgtctcttctctgatccattgttgaagatgtcgaagagaaaaactaaggagccaaaggttgagactgtgactcttggaccttctgttcgtgaaggagagcaagtttttggtgttgttcacatctttgcatctttcaatgacactttcattcatgtgactgatctctccggtagagaaactctcgtccgcatcaccggtggcatgaaggtgaaggctgaccgtgatgagtcctctccttatgctgctatgcttgcagctcaagatgttgctcaaagatgcaaggagcttggcatcactgccatgcacgtgaagctccgtgctactggaggaaacaaaaccaagactccaggtcctggtgcttagtctgctcttagagcccttgctcgttct

SEQ ID NO: 148702 - DNA, 411 bp, Arabidopsis thaliana columbia
gcattcacactctctctttgttcgagtaccaacaatggcccttcaagctgcttctttggtctcctctgctttctctgttcgcaaagatgcgaagttgaatgcttcttcatcatctttcaaggactcgagtctttttggtgcctccattaccgaccaaatcaaatccgaacatggatcttcctcgttaagattcaagagagaacagagcttaaggaatctagcaattcgagcccaaaccgctgcgacttcaagccctacagttacaaaatccgtggacggcaagaaaacgttgaggaaaggaaatgtggtggtcactggagcctcgtctgggttaggtctagccacggctaaagctctagctgagacagggaaatggaacgtgataatggcgtgcagagacttccttaaagc

SEQ ID NO: 148703 - DNA, 405 bp, Arabidopsis thaliana columbia
atggtttcttcttctttaaccaagcttgtgttctttggttgtctcctcctgctcacattcacggacaaccttgtggctggaaaatctggcaaagtgaagctcaatctttactacgaatcactttgtcccggttgtcaggaattcatcgtcgatgacctaggtaaaatctttgactacgatctctacacaatcactgatctcaagctgtttccatttggtaatgccgaactctccgataatctgactgtcacttgccagcatggtgaagaggaatgcaaactaaacgcccttgaagcttgcgcattaagaacttggcccgatcagaaatcacaatactcgttcatacggtgcgtcgaaagcgatacgaaaggctgggaatcatgtgttaaaaactctggacgtgag

SEQ ID NO: 148704 - DNA, 360 bp, Arabidopsis thaliana columbia
tgttactctttttagattccgttgttgttctacattgtagatcctttcttcttttgttttgattcactgcttttagggtttccttctccagaaactttgattctttcgtttttgtcggtgattgtgtcttaattctgagtgtgcatatgagagtataagctcgaaattgactcgtggagctcatgcactgagctatagagtgttgtttgattctgcgattaagtatcactttcttcagatttatcttgatttctatgttgattgaatcgaggaaggaatctttttttctctcatcttcgttagcttcactattgatgtttactactacatattgttgttttaggcagttttgctttgtac

SEQ ID NO: 148705 - DNA, 405 bp, Arabidopsis thaliana columbia
ctccatctgaaattctttgaagacaaacgcccacaacacggttgtagttatgcttgtagtttgatctatttccctaatatgacgatccgaaagaagggtgacgatcacttgggtgtgatatgtaaccctagcacagggcagtatgggtatgtgatcttaccacctttactggatttcaagagcgtgccttacggtaaatttttagggtttgatccgattgacaagcaattcaaggtattaatcccgatattcgattttgataaacatcaaacggatcatcatattcttacattaggagctgaaacagttgggtggaggaagatccaatctcccttacgctatcttcctcatagtaatggaacaatttgcatcaatgggattttgtattacctagctaaaattaat

SEQ ID NO: 148706 - DNA, 409 bp, Arabidopsis thaliana columbia
ggagactccgatcgcttcagagtttgtgcagaaggttcatatttcagagccggagccagaggttaaacacgaaagtcttcttgaaaagcttcaccgaagcgacagttcttctagctcctcaagtgaggaagaaggttcagatggtgagaagaggaagaagaagaaggagaagaagaagccaactactgaagttgaggtaaaggaggaagagaagaaagggtttatggagaagttgaaagagaagcttcctggacacaagaaacctgaagacggttcatccgtcgctgcggcaccggtggttgttcctcctcctgtggaagaagcgcatccagtggagaagaaagggattcttgagaagattaaggagaagcttccaggataccaccctaagaccaccgtaaaggaggag

SEQ ID NO: 148707 - DNA, 404 bp, Arabidopsis thaliana columbia
aaataacaaaatggctcgagtctcttctcttctttctttctgcttaacacttttgatccttttccatggctacgcggctcaacagggtcagcagggtcagcagtttccgaacgagtgccagctcgaccagctcaatgcgctcgagccgtcacacgtactgaagagcgaggctggtcgcatcgaggtgtgggaccaccacgctcctcagctccgttgctcaggtgtctcctttgcacgttacatcatcgagtctaagggtctctacttgccctctttctttaacaccgcgaagctctctttcgtggctaagggacgaggtcttatgggaaaagtgatccctggatgcgccgaaacattccaagactcatcagagttccaaccacgcttcgaaggtcaaggtcaaa

SEQ ID NO: 148708 - DNA, 394 bp, Arabidopsis thaliana columbia
aagaaacacacttcggaagatggagatcactaacgttaccgagtttgatgcaatcggagagcataagctgcctaagatggtgtacgactactatgcatctggtgcagaagaccaatggactcttcaagagaacagaaacgcttttgcaaggatcctctttcggcctcggattctgattgatgtgagcaagattgacatgacaaccaccgtcttggggttcaagatctcgatgcccatcatgggtgctccaactgccatgcaaaagatggctcaccctgatggggaatatgctactgctagagctgcatctgcagctggaactatcatgacactatcttcatgggctacttccagcgttgaagaagtcgcgtctacagggccagggatccgattc

SEQ ID NO: 148709 - DNA, 440 bp, Arabidopsis thaliana columbia
cgacgaattcggatccaatggttttggtcttatcgtgaacataggtctagtggctgagcctgcggtaatggcgaatccccaagtcgcatgcggataccttgccaagtcccgagaagcgatatgcgcatgtctcctcgacccatttcttttgcgagagcttcggtacccatggatatgatagaaggctctcgtcgctattggaacgaagatccagcaatcatggatgagacgcagtgccatctcaaagcggctagaattgtatcgagcagcccaatccgagatcgatgctgttgcttggtccaagtgataccggcatgtcatgtccactgttttgctcggttctggtcggtgtggctcagactcggagcagagatttagggtctggaatttgtataagatgatcttcccgataccatgcagtatcgttttatataacattt

SEQ ID NO: 148710 - DNA, 329 bp, Arabidopsis thaliana columbia
ggtgggtttttttttattttggttggtttttttttttttttattttttttttttttttatataaattacattttcataaatcagacatttgacaatccgattgaaattgtctcattaagagaaaaagaacaccgccctttggtaatttaatgggccgagtttattcattagaatgttttaaaaaaaaaattaaacttcggtgaaacttgggggcttgtatgcaataaaactgttgcattggacttttccggttttttccaatcccattatcctaattaaggcccccgggtactccttttttcttttttaaatttctttaaaactttagc

SEQ ID NO: 148711 - DNA, 169 bp, Arabidopsis thaliana columbia
tcccgttctgttttttattttttggctaatttttttccggacccatggggggggaaccaccacgaccaccaccattttttgggatctccttttcaaccaaaccatttctttcttcctccaaataaccattaccaatctccagattttccctcccattttccctaaaccc

SEQ ID NO: 148712 - DNA, 402 bp, Arabidopsis thaliana columbia
cgtgagtggaggctctctgagtagagagagcctacccttgaaaataacctagggaggtctccaattttcaagctttacccattcaaaagaatcgtccttttttcctatttctgactttgagctatgatgatggtccattcgatgagcagagatatgatgaacagagagtcgccggataaagggttagattccggcaagtatgtgaggtacacgccggagcaagtggaagctctcgagagagtttacactgagtgtcctaagccaagttctctaagaagacaacaactcatacgtgaatgtccgattctctctaacatcgagcctaagcagatcaaagtttggtttcagaaccgcaaatgtcgtgagaagcagaggaaagaagctgctcgtcttcaaacagtg

SEQ ID NO: 148713 - DNA, 404 bp, Arabidopsis thaliana columbia
gaagaaactacaatagttaatcaatcaaagagaagtaagagaaatggcagattctaactgtggatgtggctcctcctgcaaatgtggtgactcttgcagttgcgagaagaactacaacaaggagtgcgacaactgtagctgtggatcaaactgcagctgtgggtcaaactgtaactgttgatgaaattattatggtctaaaatcatatatatggcagaaaaattggggaaaatatgtgttttatgctaagagatgtgtgtgtgttgttggaataaagacgtgaccgttgtgttgcgtatcaactctcttaagctttgacttttcccagctttgtattttcctatgtatggtaatggtgtgattgtgtaatgttttcatatgtaacgtaaaaaaaatatttatgt

SEQ ID NO: 148714 - DNA, 408 bp, Arabidopsis thaliana columbia
cttctattagccgccatggtgaagtactcgcaagaacccgacaatcagaccaagtgttgcaaggctagaggatccgatcttagggttcacttcaagaatactagggaaacagcgcacgcaatcaggaagctaccattgatcaaggcgaagaggtaccttgaggatgtgatagctcacaagcaagcaattcccttcacacgtttctgcagaggtgttgggagaactgctcaagctaagaacaggcactctaatggtcaaggacgttggccagccaagtctgctcagtttggtcttgatttgctcaagaacgctgagagcaatgctgaggtgaaaggtttggatgttgatgccctcttcatatcacacatccaagtgaaccaagccgcaaagcaaaggagaaggacttac

SEQ ID NO: 148715 - DNA, 410 bp, Arabidopsis thaliana columbia
gaagaacaaagtttgaaccttttgttttttcatctctctccgtcgcttcttcctagcgggtccttcactcgaatcgggggtgtgaaagttttttctagggtttcgaaaagatgcctgcgacagcaggaagagtgcgtatgcccgcaaacaatcgggtgcatagcattgcagcgcttcagactcatggaatatggcagagtgcgattggttatgatccttatgcaccaactagtaaagaagagcctaagacgacacaacagaaaaccgtatatcccgttaactcgtacgcgagttttcagggacttttggctcttgctaggatcacgggctcgaataacgatgaggctcgcggttcttgtaagaagtgtggccgtgttgggcatttgacgtttcagtgtaggaatttcttg

SEQ ID NO: 148716 - DNA, 424 bp, Arabidopsis thaliana columbia
ggaaggcccggggcgacgcctcgcgtacccttggagagaagagagaaagagagaattagagacagagataatggcgtacagtgcgggtttcctacaccagagcgcattggcttcatcagccgcacgatcatcatcttcctcctcatcccagcgtcacgtgtcgctctccaaacctgttcagatcatctgtaaagctcaacagtctcatgaagacgataactccgccgtctcccgccgtcttgctctcactctcctcgtcggcgccgctgctgttggttccaaagtatctcctgctgatgccgcctacggtgaagctgcaaacgtgtttgggaagccaaagacgaacacagacttcttgccatacaatggagatgggttcaaagtgcaggttccagcaaaatggaacccaagcaaagagattgag

SEQ ID NO: 148717 - DNA, 446 bp, Arabidopsis thaliana columbia
  unsure (1)..(446): unsure at all n locations
cgggggggacccacgcgtccgttctttttcatttcctcccatcaacctttttatttggtcctccggtgggggggggggtgctattttcaaaagatcggttttgcccaattgggttcttcttggtaacccttcttcttctttggaatgggttcttctggggaaccaaacattcttggtacttgtggggcctgctttatccggacgcatactggtggtcaacttcttaaaaatgggtttaagggttcgatcatcgataattttggtaactctgttatcgaaactggtggtagagtttagggagcttgttgggccctgatctctccaaaaaagcttcgacttcaaatctggggtgaatctaaagaanacaaagggggaacaattggagaaactatttctcccaagcagaagaatttggatgcctgtggattcatttttgcggggtcttt

SEQ ID NO: 148718 - DNA, 405 bp, Arabidopsis thaliana columbia
  unsure (1)..(405): unsure at all n locations
acactctactaccaacgttcatgccttactgcggtgactgngttgattgcaaatgggacaaaagcaacttatgtagcaaatttcctttcaaggtatccccttggatgccaagatacgataattccagcagattcaccgacctcaatggcgaaactctctttcatttcttgaacgtctccagcttcagcgaatacacggttcttgatgtcgctaacgttgttaagattgattcttcgattcctcctagtcgtgcttgcctcctaagctgcggagtctccaccggtgttggtgctgcttgggagaccgccaaagttgaaaaaggatcaaccgttgtgattttcggacttggttctatcggattagcggttgcagagggtgcgagactttgtggtgcctctagaatca

SEQ ID NO: 148719 - DNA, 405 bp, Arabidopsis thaliana columbia
  unsure (1)..(405): unsure at all n locations
gagcccttgaagataacttgggattcttcggagatggattgtgagtttgaccagggggaaaatggtgagaaaatctctgttagaaaaaggtttatggagagtactaaactcagtgcgtctcgggttctcgatacgttacagcaagattgtcccggtttcaatacgaaatcagctttagatgaattgaatgtttcaatctcagggctattagtgagagaggttcttgttgggatcttaagaactctgagctttgataataaaacaaggtgtgctaagctcgcttacaagngctttgtgtggtgtggtggacaagagaatttcaggcacactgcgaattgttatcatttacttatgaagatatttgctgaatgtggtgagtataaagccatgtgcaggctaattgat

SEQ ID NO: 148720 - DNA, 398 bp, Arabidopsis thaliana columbia
aaaccactccaccgtcaattgatggctacgttctcgtggccaagtcactctctcatgtcggcgtaacccacatgtgcggcgtcgttggaatccccgtcacgtctctagctagccgagctatggctttaggtatacgtttcatcgccttccacaacgaacaatccgctggttacgccgcttcagcttacggttacctcacgggtaaaccgggtatccttttaacggtttcgggtccgggttgtgttcatgggctcgcgggtctttccaacgcttgggttaatacatggccgatggtgatgatctctggttcttgtgatcagagagatgttggtcgtggagatttccaggagcttgatcagatcgaagcggttaaagctttctcgaaattatcagagaaa

SEQ ID NO: 148721 - DNA, 402 bp, Arabidopsis thaliana columbia
aatgatgctcaaagtcccatctgttcatctccaccatcctagattttctccatttggtttctaccatacttccttacttgtgaaaggcaccagagatagacgtcttattcttgttgagcgtagcagacatctatgtacattgcctctcgctgctgctaaacaatcagcagcttctccttctgaaaacttatcgaggaaagcgaagaagaaagctattcaacagtctcctgaagcattgctgaaacaaaagctagatatgtgctctaagaaaggtgatgtcttggaagctcttcgcttgtatgatgaggcaagacgcaatggcgtgcagcttagccagtaccattataatgtgttgctttatgtatgctcgttggctgaggcagcaacagagtcgtctccaaa

SEQ ID NO: 148722 - DNA, 331 bp, Arabidopsis thaliana columbia
  unsure (1)..(331): unsure at all n locations
aagagaccgagccactaggtaccgctgttcctctggctctagcgagagacaaattgcttgatggatctggagagcccttctttgttcttaacagtgatgtgattagtgagtaccctcttaaagaaatgcttgagtttcacaaatctcacggtggggaagcctccataatggtaacaaaggtggatgaaccgtcgaaatatggagtggttgttatggaagaaagcactggaagagtggagaagtttgtggaaaagccaatactgtatgttaggtacaagatcaacgctgtggattattttttgaacnnnnnnnnntcttgatagattgagct

SEQ ID NO: 148723 - DNA, 160 bp, Arabidopsis thaliana columbia
aagagaccgagccactaggtaccgctgttcctctggctctagcgagagacaaattgcttgatggatctggagagcccttctttgttcttaacagtgatgtgattagtgagtaccctcttaaagaaatgcttgagtttcacaaatctcacggtggggaagc

SEQ ID NO: 148724 - DNA, 419 bp, Arabidopsis thaliana columbia
aagagaccgagccactaggtaccgcttttcctctggctctagcgagagacaaattgcttgatggatctggagagcccttctttgttcttaacagtgatgtgattagtgagtaccctcttaaagaaatgcttgagtttcacaaatctcacggtggggaagcctccataatggtaacaaaggtggatgaaccgtcgaaatatggagtggttgttatggaagaaagcactggaagagtggagaagtttgtggaaaagccaaaactgtatgtaggtaacaagatcaacgctgggatttatcttctgaacccatctgttcttgataagattgagctaagaccgacttcaatcgaaaaagagactttccctaagattgcagcagcgcaagggctctatgctatggtgctaccagggttttggatg

SEQ ID NO: 148725 - DNA, 401 bp, Arabidopsis thaliana columbia
ggctttggctcggattcgtccgtctttttttttcttagccgagtacttcggtagattagttggaacgattgatgattttgagttaattgaacgttcggcgtatgagtggtgatcggatagctagtgttcgtaggctccatgctcgcgcatcgaactacctaccacctatccttctcagttaattcacgggcgatgttacgctcgatgatgagttccggggcctgtgtttcgtacctaatttgaaggaattgttgagttcggtttacacccatgcccgcggcttctccttcgtggggaagtcgtgggcacaaacatcggctcttgtcacctattgtcatcgcatttagtgccttgctcgcattggtgaatgagttgcgggttgatatcttctatgctgaaat

SEQ ID NO: 148726 - DNA, 427 bp, Arabidopsis thaliana columbia
cccacgcgtccgatattctgaaagcagccaaaggaaagtttgtttgataaacctgcgtttcattcccggacggagctctaatctttcagtctctatacctctttctctatctctgagaatctatggcggtggctgcagcggcgatgatcgggttgccacaggcgtatctggaagggaaggaggtgaaggagacgagttcgttggttactgaactctgccgtcacttttatactcaaggttgggtgtctggcactggcggtagcataacgatgaaagttcatgatgcttcgattcctaaaccggagcaacttatcgccatgtctccttcaggtgttcaaaaggagaggatgcaacctgtggatttgtacatcttatctgcttatggatccatcatattcacaccctcttcaaagccattcccaaatta

SEQ ID NO: 148727 - DNA, 400 bp, Arabidopsis thaliana columbia
  unsure (1)..(400): unsure at all n locations
cgcgtncggagagccgtcagggagagcatttcatttatcggagaagatgaagacgattctttcgtccgaaacgatggacatccccgacagtgttaccatcaaggttcacgctaaagtgatcgaagtcgaaggacctcgcgggaagcttgttcgcgatttcaagcatctcaacctcgatttccagctgatcaaggatccagagactggaaagaagaagcttaagatcgattcgtggtttggaacacgcaaaaccagcgcctccatcagaaccgctcttagccacgtcgataacttgatctccggtgttaccagaggtttccgttacaagatgaggttcgtgtacgcccattttcccatcaacgcctccatcggcggtgacggaaagtctatcgagatccgt

SEQ ID NO: 148728 - DNA, 409 bp, Arabidopsis thaliana columbia
attctcccaccgacacacttctcgttgtacagtctttgaaactcaacggtcggaccaaactcgtaagcagactgtctccatctgtcaacacaaacggaccgtacagtctcgtgatggaagccaagaagctagtcttgtactacacgacaaacaaaactccgaaaccaatcgcttattttggatacgaattcttcaccaagataacacaattccagtcaatgacgttccaagctggggaagattccgacacaacgtggggtctagtcatggaaggtgtcgattctggttctaaattcaacgtttcaacgttcctctcacggccgaaacacaacgcgacgttgagttttattcggttagaatcagacgggaacatcagagtttggagttacagtacgttggcgactttcac

SEQ ID NO: 148729 - DNA, 372 bp, Arabidopsis thaliana columbia
cttcacttctctctccttcaacaaaattttctacctttgtttcttctctcagatttcataaagaaaagatttaatctttcattggaatctgtgagtaacagaggataagcgaatatgggttcaatctctttatccaattctatgcccataactcgacttccactacttacatcactctatcatcaaagcttccttccgatttcttcttcatctttctctcttcttcctctctctaatcgtcgtcgctcctccactttttcaccgtcaatcaccgtctctgccttcttcgctgctcctgccagcgttaataataataactctgttccggcaaaaaatggaggttacacaagtggggatttcatgactccgaga

SEQ ID NO: 148730 - DNA, 414 bp, Arabidopsis thaliana columbia
aagagaccgagccactaggtaccgctggtcctctggctctagcgagagacaaattgcttgatggatctggagagcccttctttgttcttaacagtgatgtgattagtgagtaccctcttaaagaaatgcttgagtttcacaaatctcacggtggggaagcctccataatggtaacaaaggtggatgaaccgtcgaaatatggagtggttgttatggaagaaagcactggaagagtggagaagtttgtggaaaagccaaaactgtatgtaggtaacaagatcaacgctgggatttatcttctgaacccatctgttcttgataagattgagctaagaccgacttcaatcgaaaaagagactttccctaagattgcagcagcgcaagggctctatgctatggtgctaccagggtttt

SEQ ID NO: 148731 - DNA, 381 bp, Arabidopsis thaliana columbia
aagagacctagccagttagctccgctgcgcctctggctatagcgagacacagagagcttgatggatctggagagctcttctatgcccttaacagtgaagagattatgcgatgtgcccctttcaagatatgctagcgctacacaaacctcacggctggactccatcatcctggttacgaaggtggaagaaccgacgagctattcagagcttgttattgctgaatgctctggatgagtgtctaaatatttgtcctggatctttgcttgtgctgaatcgagacgaacggtgaattctatacgcttttgacagtgccggatcttcggatagtgacttccccatcttcggattcttgtgatagtcaagcttatattgtccgggaat

SEQ ID NO: 148732 - DNA, 408 bp, Arabidopsis thaliana columbia
gcaaacgaaagggaagtgtgtcagaaatctcagagggtgagaatcccaatgaggatcttacccgaacctcgaggttcggttccgtgtcttctccttcttgtgtcggttctcttatcagcgactctctcactcgctcgtgtcgtcgaagttgtcggttacgccgagagcaagatcaaaaccccccatgcattttcaggacttcgagtgacgatcgactgtaaggtgaataaaggccattttgttacaaaaggttcgggaaacattgacgacaaaggaaagtttggtcttaatattcctcatgacattgtctccgacaacggagcgttaaaggaggagtgttacgctcagcttcacagcgcggcgggaacaccttgtccggctcacgacggccttgagtccaccaagata

SEQ ID NO: 148733 - DNA, 360 bp, Arabidopsis thaliana columbia
tttctttctgatcatttccaaattatttctaagctaagaaaatctttaaaaataacaaagcttctaaaataataatccgacctaccggattcaaaccattgatctgaagatcatctataaaccagtccttgatctataaactaaaataagggaagaaaaaaacaagagagagaaatagagaatgaagtcttttgcggctaaggtagaagagggagttaaaggaatagacggaaagccgtcggtaggtccggtgtaccggaatcttctgtcggaaaaaggttttcctccgattgattctgagatcaccactgctggggacattttcagtaaatcagtggagaaattccctgacaataatat

SEQ ID NO: 148734 - DNA, 416 bp, Arabidopsis thaliana columbia
ctaatttcgttgccgtctctccaagcttgaataagcctctcagttctcacagcgaagatgcctacagtaagcgtgaagtggcaaaagaaagtgttggatggtatcgagattgacgttagtctgcctccttatgttttcaaggctcagttgtatgatttgactggagttccaccagaacgccaaaagatcatggtcaaaggtggtctcttaaaggatgatggagattgggctgctattggtgtgaaagatggtcaaaaattgatgatgatgggaactgctgatgagatagtgaaagctcctgagaaggccattgtttttgcagaggatctacctgaagaagcgctagccactaatctgggttacagtgctggccttgtcaatcttggcaacacgtgttacatgaactccacggtgca

SEQ ID NO: 148735 - DNA, 391 bp, Arabidopsis thaliana columbia
gttcctagaaagctaaaaccaatggagtggtaaattgatggatttgattgcacctctctgtattcttcaagctttgcctatgctggtagttcaggttctgatatagctcatgctttctctaaaagctcaaagtcaacttccattagctcttcatcagctgaagtaagaacacacaattttacatccgaaactggtgaaagtcttcctggagaatttgcaaaggggattgatacttctccaagtcttgaactttcttttggctctggtgatccggttctcggtttaaagcttggtaaacgaacgtactttgaagacttttgggaagtggagaatgctaaaggtttgggacttccagtgactctggcttcatcttctgtttctcccgtgaaga

SEQ ID NO: 148736 - DNA, 415 bp, Arabidopsis thaliana columbia
gaaagattccacctgggttgggtcgtgaagaaagagaagaagaaaccgaagaagctcgaagaagaacgaaggagattcttcctttccccagatttttcgtttgaagaagaatcgaaaaacttagatttttggttttgctttcggagttattcgaatttgaaatatctgaatctgttgattcatttattctccgcatgaagctgtgttggtgaagtttttcggagatttagggtttctgagttgttcctcgtttggttggtgaataaagcgaagatgaacgtgatgcgtcgtcttaagagcattgcttcgggtcggacctccatttcttcggatcctggtggggactatgcgttgaagagagctaagctggatcaagagaacgacaacttgtgtgttgatccaatgcatgttgacc

SEQ ID NO: 148737 - DNA, 422 bp, Arabidopsis thaliana columbia
ctgaaatttttcttagagaagaagaagaagaagcaaaatggccacaagcgcatcagctttgctctcaccaaccacattctccactgcaatctcccacaaaaaccctaactccatctcattccatggccttcgtcccctccgtctaggtggctcctcctccgccctacccaaactatcaaccaccgggagaaaatcctcctccgctgtcgtgagagctgagctaagcccttccatcgtcataagtctcagcacaggtctctccctcttcctcggccgtttcgtcttcttcaacttccagagagagaacgtagcaaaacagggcttaccggagcagaacggaaaaacccatttcgaagctggagatgatcgtgctaaggagtacgtcagtctcttgaaatcgaacgatccaattggattcaaca

SEQ ID NO: 148738 - DNA, 346 bp, Arabidopsis thaliana columbia
caattcgacctcaattgaaattagggtttctctgcaactccacaaacagactcttaacaaaacttcgattcccaatttcaacaatggcttgcgtaaacgaaccatcacctaaactccaaaagctcgaccgaaacggaatccatggcgattcatcaccatcaccattcttcaaagtgaagaaactctccgagaaagctgttataccaacacgcggctcaccactctccgctggatacgatctctcaagtgcggtggattcaaaagttccagcgagaggtaaagcgcttatcccaacggatctaaatatcggtgttcccgaaggaacttacgcgagaattgcgccgag

SEQ ID NO: 148739 - DNA, 190 bp, Arabidopsis thaliana columbia
gacagacctagacctctctgcttgtttttgtgcatgctctctctatcactatcctgtctgattctagtgttgggctgatcctctgcgtactctggacttgtcctgtcttcagataaaacaagtactgcatatcgaagatcagatgtcataacgatagctacgtgtggttaaggcaaaacaggttacgtca

SEQ ID NO: 148740 - DNA, 410 bp, Arabidopsis thaliana columbia
ccgacgagcgctgatcaaatcaaccggtgaagcaaagctatagatctactatctccttcacagttgctatcagagatgtataataatatgggaccccggcctggaatggcaatgcctcaggcaaatcctcagcctagcccatttgggaatccgttctctggacctggctctggacttatccggagtggcttgggagcttatggggagaagattttcggttctagctctgagtatgtgcagagcaacataagtcgctacttctccgatcctcaatactattttcaagtgaatgaccagtatgtgaggaacaagttgaagattgttctacttccattccttcacaggggacactggactcgaatatcagaaccagttgggggtagactttcatacaaaccaccgatatacga

SEQ ID NO: 148741 - DNA, 423 bp, Arabidopsis thaliana columbia
gttcctccagtgacagtccctaagctacccgttcccccggtaactgtacctaagctacccgttcctccagtgaccgtccctaagctaccccttcctccgatttcagggctacccatacctccagtggtaggtcccaatctgccattgccgcctttgccaattgtaggtcctattcttccaccgggaacaaccccaccagccacaggagggaaggactgtcctccaccgccagggagcgtaaagccaccatcagggggcgggaaggcgacatgtccaatagacacgctgaagttaggtgcttgcgtcgacttgttgggaggtttagtaaagatagggcttggggatccagcagttaacaaatgttgtccgttacttaaaggcctcgttgaagtcgaagccgcggcttgtctctgcactaccctc

SEQ ID NO: 148742 - DNA, 415 bp, Arabidopsis thaliana columbia
gtgcgccgttggcgcattctcttataccaccattaacgtgcgtcaacaccggaaccgttgaatcagacgttactggtatcaggttcgatcgttgcctcgataccgattctctcgccaagatctctctttccaccgtcatgtcgaaagctcgtgtttataccgatgttaacgtgatccgacctaaggattattgggattacgaatctctcaatgttcagtggggggagcaagatgattacgaggtagtgaggaaggtggggagagggaaatacagtgaggtttttgaggggattaacatgaataacaatgagaagtgtattatcaagattctcaagcctgttaagaagaagaagattagaagggagattaaaatacttcagaatctttgtggagggccaaatattgtaaagctgct

SEQ ID NO: 148743 - DNA, 386 bp, Arabidopsis thaliana columbia
ataaaaaaaaaaaaaacacaaaaaagtttcaatggccgcctcaacaatggctctctcctcccctgctttcgccggaaaggctgtgaacctttcccctgcggcatcagaagtccttggaagcggccgtgtgacaatgaggaagactgttgccaagccaaagggtccatcaggcagcccatggtacggatccgaccgagtcaagtacttgggtccattctctggcgagtcacccagctaccttaccggagagttccctggagactacggatgggacacagctggtctatccgctgaccccgagacattcgcaaggaaccgggagctagaagttatccacagcaggtgggccatgctcggagccctaggctgcgtcttccctgagcttt

SEQ ID NO: 148744 - DNA, 411 bp, Arabidopsis thaliana columbia
gacagaaaatgaaaaatttaaaatggagttttctattgcattttgtaagctgagaacaactaagttaaagggaaagcaaaaatgggctgcatcggtgttgtgaatgtaacaagcataaatccatatctcacaagaagatcaaacaaaccctacaattcaagaagaccatcatccatggctgctgcgattagagctgagtctactgagaaattagggattacaattgaaaagaatcctcctgagtccaaactaacccaactcggtgttcgtagttggcccaagtggggttgtcctccaagcaagtttccatggacttacagtgcaaaggagacttgttatttactacaaggaaaagtgaaagtgtaccctaatggatccgatgaaggcgtagagatcgaagcaggcgacttt

SEQ ID NO: 148745 - DNA, 421 bp, Arabidopsis thaliana columbia
caagtagaaactttaaaacgagagagagagaaagaaatggcgacatcgggaacgtacgtgacggaggttccgttgaaaggatcggcggagaaacactacaagagctggaagagcgagaaccatgtcttcgctgacgccattggccaccacatccaaaatgtcgttgttcacgaaggcgaacatgactctcacgggtctatcaggagttgggactacacatatgatggaaagaaggagatgttcaaagagaagagagagatagatgatgagaataaaacattgacgaaaagaggactggatggtcacgtgatggagcatctcaaagtatttgatatcatctacgaatttattcccaaatctgaggatagctgcgtctgcaaaatcactatgatatgggagaagcgcaacgatgacttttccg

SEQ ID NO: 148746 - DNA, 424 bp, Arabidopsis thaliana columbia
ctcctcaagaaaatcaaagcagcagttatggtcgacgtagcaacaaagcaccccatggaagatgaggtgaagaagacggaggcgtctagtttggtggggaagctagagacagacgtggagatcaaggcttcggctgataagtttcaccacatgttcgctgggaaaccacaccatgtctccaaagcaagtccaggcaacattcagggatgtgatctgcacgaaggcgactggggcacagtcggctctatcgtcttctggaattacgtacatgatggggaggcaaaggtggcgaaggagaggatcgaggcggtggagccagataagaacttgatcacgtttagggttatagaaggtgatctgatgaaagagtacaagagcttcttgctcaccatccaggtgacccctaagcctggaggccctggat

SEQ ID NO: 148747 - DNA, 421 bp, Arabidopsis thaliana columbia
gatggagtgaacaacatgaacttagccaccgattcgcagaagaaaaaccggattcaggtttccaacactaagaaaccattgttcttctatgtcaatctcgccaagaggtatatgcagcagtacaatgatgttgaattgtctgcccttggcatggccattgcaactgttgttactgttactgaaatactgaagaacaatggttttgctgttgagaagaagatcatgacttcaactgttgatattaaggatgatgcaagaggacgtcctgtgcagaaagctaagattgagattacgcttgtgaagtcagagaagtttgatgaactaatggctgcagccaatgaagaaaaagaagatgcagaagctcaggtgcagaactgaaaatagcttttaactattttgggtttcttgatgcttattctat

SEQ ID NO: 148748 - DNA, 417 bp, Arabidopsis thaliana columbia
ctcttccacgatttctgctccgaggtggctcgtgatctcaacgccatcgtcgtatctccttcgtaccgattagctccagagcatcgattaccggcggcgtatgacgacggagttgaggcgttggattggattaaaacctccgacgatgagtggatcaaatctcacgccgatttctcaaatgtgtttcttatgggaactagcgccggagggaatttggcttacaacgtcggactaagatccgtcgattccgtctccgatctgagtccgttacagatccgtggattgattctacaccatccattcttcggcggagaagagcgaagtgaatctgagattagacttatgaacgatcaggtttggcctcccatagtcaccgatgtaatgtgggatctgtctcttcccgtcggcgttgaccga

SEQ ID NO: 148749 - DNA, 384 bp, Arabidopsis thaliana columbia
ggaaagaggagaatcccaatgggtgagcataagctgcacattggtgaccttaaacatactattttggtccaaccgcaactttgacggacgcataaaaaaaccaacaaataaggaaagcattttaacaaagtggagtgtttcctcttatttatataatatagagagataggtttattttcttatgaaattattactcaagaaagtatgaatttgtaaagaaccaccaaagggttgcttcttggttgtgtcttttttcctttaatttttttttggaccaaaggtattgtaacttgtggctcccaacataagaaatacaaggagcccttgtaaaatgctgaaactaaagataaatgataaatttgatatatactggatttttagagt

SEQ ID NO: 148750 - DNA, 87 bp, Arabidopsis thaliana columbia
gactcttcaatctctcccaaagcctaaagcgatctctgcaaatctctcgcgactctctctttcaagatgcaaatcttcgtgaaaaca

SEQ ID NO: 148751 - DNA, 416 bp, Arabidopsis thaliana columbia
attttagaatctaagcttcccggttagtactacccttaaataaactaagtttcatgtctgaacttgactaccaggttcccactgcctttgatccgtttgctgatgcgaatgttgaggactcaggtgccggaacaaaagaatacgttcatattcttgtccagcagcgaaatggtaggaaaagcttgacaaccgtacagggcctgaagaaagagtacagctataccaagatacttaaggacctcaagaaagagttttgctgcaacggcactgtggttcaggattcacaactcggacaggttatacagcttcaaggtgaccaacgtaagaacgtctgcacattccttgtccaggctggtttggtgaagaaggataacatcaagatccatggtttctaagctatctagtggatcatatta

SEQ ID NO: 148752 - DNA, 402 bp, Arabidopsis thaliana columbia
ggagtgagcaataataaaagctcacttactcacacttttattcatttctctgaaaacccttaaatctccggatttcgattcccgaggctcgaaaaaaccctaaatctcttctccgttcactcatccaaccgaagatgcgtgagattcttcacatccagggtggtcaatgcggtaaccagatcggcgccaagttctgggaagtggtttgcgccgagcacggcatcgatccaaccggaaggtacaccggagactcagatctgcaacttgagcgcatcaacgtttactacaatgaagcgagttgcggtagattcgttcctcgtgcagtgctcatggatttggagcctgggactatggatagtctcagatctggaccgtacggtcagacctttcgacctgataact

SEQ ID NO: 148753 - DNA, 320 bp, Arabidopsis thaliana columbia
  unsure (1)..(320): unsure at all n locations
nntccgcggaccgcccgtgggtccaacctacccttcctttggagtgatgcaggannagattctcttccctnngttgcttnnaaataaaannaaagcaaanngtgcgtgnnngtttctcttcttcnnttttgctttggcnnccttaaatnngaattatggcnnaagagaaggtntatgaattgtagataccatgggnnggctttcttaatataccattttctaaatatatgaaanaatgtaantgtattagatgacccattgtgtagcttctttttcttccatgctnttttaagggacccttgtctttggttgcccannaa

SEQ ID NO: 148754 - DNA, 416 bp, Arabidopsis thaliana columbia
gtcttttcctcttaattttttctaggaaaattctcaaatccatctccgcgatacgaacagagagaagaagacttagaaaaatggctgttcaacctacaagaataggtctagctggacttgctgtgatgggtcagaacctagctctcaacattgcagagaaaggcttcccaatctctgtttacaacagaactacttccaaagttgatgagaccgtcgaacgagccaaaaaggaaggcaatcttcctctttacggcttccatgaccccgagtcttttgtcaagtccattcagaagccacgcgttattatcatgcttgttaaggctggttctcccgttgaccagaccatcaagaccctctctgcttatttggagaaaggtgactgtattgtcgatggtggtaatgaatggtatgagaac

SEQ ID NO: 148755 - DNA, 414 bp, Arabidopsis thaliana columbia
gacaacttcttcttctccaacccaaattcctctcttctcaacctcgtcctctccgttctcctcctccaacatttctccgatcagtgatgggttcgtcttcttctttctcctcttcttcctcgaagcttctctttcgtcaactctttgagaacgaatcttccacctttacttatcttctcgccgacgtttctcatcctgataaacctgctttgttgattgatccggtggacaagactgtggatagagacttgaaactgattgatgagttaggactaaagcttatctatgctatgaacactcatgttcatgctgatcatgtcactggtactggacttcttaagacgaagctcccgggtgtgaaatccgttatttcgaaagcaagtggttccaaagctgatttgtttcttgaacctg

SEQ ID NO: 148756 - DNA, 418 bp, Arabidopsis thaliana columbia
caaagccaacgaagaaaagcacaattttggcgaaacccagtgagagagagacagagagaaaggagggaaattccagcttcccttttctctctcgttcttgctcttttgatctgcgtgaaaagaaagaatttttattttcccgacagagaaaagtcccaatttttaaaattaggactttttgattttcgaaaattttggtgttaatggaaacagatagtatcgattccgtgatcgatgacgatgagatccatcaaaaacaccaattctcatcaaccaagtctcagggaggagccaccgtggtaatctctccggctacaagcgtttacgagctccttgaatgccctgtctgcaccaattcaatgtacccaccaatccatcagtgtcataatggacatactttatgttcaacctgtaaatc

SEQ ID NO: 148757 - DNA, 418 bp, Arabidopsis thaliana columbia
cggacgcgtgggggatgactccaatttatatagctcagccctcagctcacgacatctttgtcggaaactggaaacctacaaagaacgacactttgtccaagcgtggcccgacttttggcagcaccatgaacgtcctctacggagagtacacatgtggtcaaggttccattgatccaatgaacaacataatctcacactacttatacttccttgacctcatgggtattggaagagaagacgcgggaccaaacgatgagctcagctgcgcagaacagaaacctttcaacccttcaactgtaccttcctcttcctcttcgtaagtcttatgatatatcgccgttgctctcaagtctctcttgcttaatgttacgtaataagtgaaatggcttgtggtaaaaaaagaagaagtgtgtttttg

SEQ ID NO: 148758 - DNA, 418 bp, Arabidopsis thaliana columbia
ccctacttctccgatacaaccaaaacctaaaattaatttattcccattatcaacccatatgtttatggggttttgatgatcaaccattttgcaacacttttagatttgcggaaaaaccaaagagttgaagtgaaagaacaaagatggctagcttgaaactgggttccaaatctgaagtctttcatcttagtggtcacacatggctttgcaagactggtcttaagcccgatgttatgatccaagtcgtagacgaaagcttccatctccataagtttcctttgttgtcaagaagtggatatctagaaactctgttcagcaaagcctctgagacaacttgtgttgctcagcttcatgacattcccggtggtcctgaaacattcttgcttgtagctaagttttgttacggtgtaagaattga

SEQ ID NO: 148759 - DNA, 420 bp, Arabidopsis thaliana columbia
ggtagtttctggtctttgctggactctaaatggtcacttaagcaaataaacgcctccactgcagataatccgctctttgagattttgggccctcgagtggtgaaaattttctcggggagaaagctggattatgaaccaaaacactgcgcaaaccttagaagtgatctagatttcatgactcttgtggaattttccaagcaacatccatatggaaaaactgtgggattggttgatatgagatttggttccattgaggcgaaagagaattggttgcttttacccggaatcgtatctgctttcatactccatactgttctgaagaaaggaggttctgaaggcttcaatgtcacaaccaaagatataaaagaggaaagcaaacagactaaacttgttgctgcgacagaaaataatgtgaatgca

SEQ ID NO: 148760 - DNA, 415 bp, Arabidopsis thaliana columbia
cagagaaggagcaggaaagatgttggatatcaatctatttcgtgaagagaaaggtaacaatccggagattatccgagaatcgcaacgccggagatttgccagcgttgaaatcgtcgatgagatcattaagctggacaaggaatggcgtcagcgtcaatttgaagttgatagcttcagaaaggagttcaacaagctcaataagcaagtggcgcagctcaaaattaaaaaagaagatgcgagtgagattattcaacaaactgagaaaaacaaacaagattctactgcaaaggaggctgaagttcgtgaagcttatgctgctttgaaagccaagttggagcaagttggtaatttggtccatgattctgttccagttgataaggacgaggctaataatcttgtgattaaactgtggggt

SEQ ID NO: 148761 - DNA, 423 bp, Arabidopsis thaliana columbia
ccggatccgccaccggaacttctggttacatcaacatcaccgatataaaaggcggtaaagtcgcttttggtgtccaagacgacgatagcaagctcacagctcactacgtcaaatccgtctttgaaaagccttacaacatctctgttcttcacatcagccaagtcttaacctcgccggaagcagaagctcccacggcgagtcccagcgacctcatcctcaccacaatcctcgaaaaacaagggtgcaaagctttctccgacatcttgaagtcaaccggcgccgacaaaacgttccaagataccgtagacggaggcttaacggtgttctgtccctccgacagcgctgtcggtaagttcatgccgaaattcaaatccctttctccggcgaacaagactgcgttagtgctttaccacggcatgccgg

SEQ ID NO: 148762 - DNA, 411 bp, Arabidopsis thaliana columbia
ttttcgtttgccactttttgatcaagcgaaactccaaaacacagagccatgccgccgaagttggacccgagccagatcgtcgatgtgtacgtccgtgtaaccggaggagaagtgggagccgccagttctctagctccaaagatcggtcctctcggtctcgcaccaaagaagatcggagaagacatcgcgaaagagacggccaaagaatggaaaggacttcgtgtcaccgtgaagctgacggttcagaatcgtcaagctaaggtaaccgtggttccatctgctgcagctctcgtcatcaaggcgttgaaggagccagagagagaccgtaagaaggtgaagaacattaagcataacggtaacatctctttcgatgatgtgactgagattgctaggattatgaggcctagatct

SEQ ID NO: 148763 - DNA, 417 bp, Arabidopsis thaliana columbia
ggcgtctcggagagtcttatcatctcttctccgttcatcttccggtagatctgccgccaaattaggcaaccgtaaccccaggcttccttctccttcacccgcgcgtcacgccgctccatgtagctacctcctcggccgcgtcgccgagtacgcgacctcttcacctgcaagctcagctgcgccatcttctgctcctgctaaggatgaggggaagaagacctatgattacggtggcaaaggtgcgatcgggcgtgtttgccaggtcattggtgccattgtcgatgtgagatttgaggatcaggaaggattgccaccaatcatgacatctctcgaggtgcaggatcaccccacaaggctagtgcttgaggtgtctcatcacttgggtcagaatgtcgtcaggaccattgctatggatgg

SEQ ID NO: 148764 - DNA, 413 bp, Arabidopsis thaliana columbia
cggacgcgtgggccctgctcttgctctcaatgctcagatcgagaaaaccaaacgcaggttcgacaactacgggaagtacggattgttatgcgggtcagacggtttaccgcacttgatagtgaacggagaccagcggcattggggagagttcattactccagggattcttttcctctacattgctggatggatcgggtgggttggaagaagctacttaatagctattagtgctgagaagaaacccgcgatgaaagagatcatcatcgatgttcctttggctagtcggatcatcttccgtggtttcatttggcccgttgctgcctacagagagtttctcaatggtgatctcattgctaaggatgtttaaaaagggaacttgttttctgcttttgtgtactctctctaatctcttt

SEQ ID NO: 148765 - DNA, 417 bp, Arabidopsis thaliana columbia
gatgtcgtcagaggtcaagtggctctcatcaccggtggtggatccggtatcggttttgagatctcttctcagtttggcaaacatggagcttctatcgctatcatgggacgacgaaaacaagtcctcgatgacgccgtctctgctcttcgatctcttggaatccaggctattggattggaaggtgatgttcgtaagcaagaagatgcgagaagagttgtggaagcaacttttcagcattttggtaaacttgatattcttgttaacgccgctgctggcaattttctggctgctgctgaggatttgtctcctaatggcttcagaacagtcttagacattgatgcggtaggaacattcaacatgtgtcacgcagctctcaagtatcttaagaaaggagcgcctggaagagactcatcaagc

SEQ ID NO: 148766 - DNA, 418 bp, Arabidopsis thaliana columbia
atcaaagcagcagttatggccgacgtagcaacaaagcaccccatggaagatgaggtgaagaagacggaggcgtctagtttggtggggaagctagagacagacgtggagatcaaggcttcggctgataagtttcaccacatgttcgctgggaaaccacaccatgtctccaaagcaagtccaggcaacattcagggatgtgatctgcacgaaggcgactggggcacagtcggctctatcgtcttctggaattacgtacatgatggggaggcaaaggtggcgaaggagaggatcgaggcggtggagccagataagaacttgatcaacgttagggttatagaaggtgatctgatgaaagagtacaagagcttcttgctcaccatccaagtgacccctaagcctggaggccctggaagtattg

SEQ ID NO: 148767 - DNA, 417 bp, Arabidopsis thaliana columbia
caaaaagaaagagacacaaagagcgagagagggagagagatggaggtaatgcgagttcttcacatgaacaaaggaaacggtgaaacgagttatgccaagaactccaccgctcagagtaacataatatctctaggcagaagagtaatggacgaggccttgaagaagttaatgatgagcaattcagagatttcgagcattggaatcgccgacttaggctgctcctccggtccgaacagtctcttgtccatctccaacatagttgacacgatccacaacttgtgtcctgacctcgaccgtcctgtccctgagctcagagtctctctgaacgacctccctagcaatgacttcaactacatatgtgcttctttgccagagttttacgaccgggttaataataacaaggagggtttagggttc

SEQ ID NO: 148768 - DNA, 416 bp, Arabidopsis thaliana columbia
gctaaccatagaatacatggacttggcggaacagtctctgcaagctctcaaaaagatatctcaggagcacccaactgcctgtttgcgagctggtgctcttatggctgtgctctcgtatctggatttcttctccactggtgttcagcgcgtagcactatctactgctgccaacatgtgcaaaaaactaccttctgatgcatctgattatgttatggaagctgtacctttgctgacaaacctacttcagtatcatgattcgaaggttttggaatatgcttctatctgtctgactcgaattgctgaagcatttgcaccgtatcccgagaaattagatgaattatgtaaccatggcctggtgacgcaagctgcgtctcttatttccacgagcaattcaggaggtgggcaagcatctctta

SEQ ID NO: 148769 - DNA, 409 bp, Arabidopsis thaliana columbia
gaattctagcagattttctggtagcataggctttctgtgaccttgaacccatttatacatacgaagggacttatgatataaacaccttagtaacagggagggaagtaacgggtattgcgagtttcaaaccggctacacgtagccgtctctaagttaaaaggttgtccattgtttgttgttgtctgttggttagtattgatattgtgatgtggggtttacatctacaaatgtgccaaataatctgacccaaaaagatttagggtccaatgggggaataatatcgttgttgcaaaacttaatccagttattgcttcttgcaatatggattcgacttgtggcttgtactgggggaaataccatttgttaaccttttattaattcaaattgccaatgtcaataacttttggtg

SEQ ID NO: 148770 - DNA, 418 bp, Arabidopsis thaliana columbia
ccgcccttcttcgtgcttctcttccttctttgtcggatcgtcaggtttacagatcagctcttgtggaggatatgggtgaagaagacaccgcgacggtggatcagaacagtttcggtggtggcaaagattcattgcttcgtaatcgtcattcgtcgccattgccttcaccgacacagctttcttctaaagtgattacattgcctaccgtattaacccttggccgtgtagctgccgttccgattctcgtcgccaccttttacgttgattgctggtggggaagaactgctacgacaagtattttcattgcagcagccattacagattggcttgatggatatattgcacggaagatgagattgggttctgaatttggtgcatttttggatccagtggcagataagcttatggtagcagctac

SEQ ID NO: 148771 - DNA, 393 bp, Arabidopsis thaliana columbia
atctgcatcgtgctcatcttagctttttcctctttctgggtttatctgtgcttaaggcaaaaaaagagtgctccttttttcatatcttcttcaaagtttcgtttttttttggtgtttattagaatctagaagttaacaattggagaatttggaattgggaaaataggggttagatatatctgtaagtggtttggttcttcttagcaagtgtttaactttgggagaggaagatgagaattacaagtgttgttatggttattggctatgagacttgtctctggtgtgagctgagatggtggtagatactttgatttaacgtcttggctatggagaatcatcatccttctactctattgtctatggattcaagtgcttcttctcatgaggagcttg

SEQ ID NO: 148772 - DNA, 412 bp, Arabidopsis thaliana columbia
cgccacttcttgtgggactcgaactacgttgtcctcctcatctcttcaacactcactctcgtccctcttcatctctctccattcccgccttatccttacgaatcctcacgccgacggcggcaacgacatcttccgctgttattgaattaccggcgaacgtagcagaagctcctcgttccaaacgccattccaattcatacctggcgagaaaatccgccatttctgaagttcaacgctcctcggattttctctcttctctgcagagattagcaacagttttgaaggtacaagatttgaatgtaattttgcgtgattttggaatctctggaagatggcaggatcttatacagctctttgaatggatgcaacaacatggaaagattagtgtttcaacttacagtagctgcataaa

SEQ ID NO: 148773 - DNA, 412 bp, Arabidopsis thaliana columbia
  unsure (1)..(412): unsure at all n locations
gcgttttaagctctcactagcaagcaagtactagcaacaatggcgtcaagcactgcgactatgctcaaagcctcaccggtgaaatctgattgggttaagggacagagtcttctcctccgtcaaccttcctctgtctcagctattcgcagccacgtggcaccttccgctctcaccgtccgagccgcttctgcttacgccgatgagctcgtcaaaaccgctaaaacaatcgcgtctccgggacacggaattatggcgatggatgagtccaacgcgacttgtggaaagcgtttggcgtcaattgggctagagaacacggaggctaaccgtcaagcttacaggacgttgcttgtgtcggctccaggacttggacagtacatctncggagctattctgttcgaggagactctgtacc

SEQ ID NO: 148774 - DNA, 419 bp, Arabidopsis thaliana columbia; identical to SEQ ID NO: 119662

SEQ ID NO: 148775 - DNA, 278 bp, Arabidopsis thaliana columbia
aaaaaatataaaataaaaaacactatgtcggaaaactacgaccgtgccagtgagttaaaagcattcgacgagatgaagattggcgtgaaaggactcgtcgacgccggagtcacaaaagtcccgcgcattttccataacccgcatgttaacgtagcaaaccctaagcctacatcgacggtggtgatgattccaacaatcgatctaggtggcgtgttcgaatccacggtcgtgcgagagagtgtagttgcgaaggctaaagacgcacttgaggagtttga

SEQ ID NO: 148776 - DNA, 414 bp, Arabidopsis thaliana columbia
gagatatcagagagagttcgagctcgattagctgttctctcaggtcatttatcggaaggaaaacaggattctccagcgatcgagcgatggtgcacgtcggcggatacgagtgtcgcaccgcttggatctttgaagggaacactgacgatcgtcgacgaacgcaccggaaaaaattataaagttccggtctcagatgatggtaccgttaaagccgttgatttcaaaaagatagtgacggggaaggaagacaaggggcttaagttatacgatccaagttacttgaacacggctcctgttcgatcttcgatttcttacatcgatggagatgaagggatccttcgttaccgtggctacccaattgaggaaatggctgagaacagtacttttctggaggtggcttatcttctcatgtat

SEQ ID NO: 148777 - DNA, 416 bp, Arabidopsis thaliana columbia
ctggtacctcccaggctgattgtgctgtccttatcattgactccaccactggtggttttgaggctggtatctccaaggatggtcagacccgtgagcacgctctccttgctttcacccttggtgtcaagcagatgatctgctgttgtaacaagatggatgccactacccccaagtactccaaggccaggtacgatgaaatcatcaaggaggtgtcttcctacttgaagaaggttggttacaaccccgacaaaatcccatttgtgcccatctctggatttgagggtgacaacatgattgagaggtccaccaaccttgactggtacaagggaccaactctccttgaggctcttgaccagatcaacgagcccaagaggccgtcagacaagccccttcgtctcccacttcaggatgtctac

SEQ ID NO: 148778 - DNA, 417 bp, Arabidopsis thaliana columbia
  unsure (1)..(417): unsure at all n locations
ttcaccgtcacaacttgtgcttcctttcgtcctcgtcgccgtcgtcagagagaaaacgattaaagctggtggtatggggagagataaagaagataagacagagatggattcggttgttccatggatgagagctccggttgacgtcagcaatgtcgaaaactgcgctctcgataccctcccttgccttaatcccaagttgaagaaagcattggagaacatgggcatatcttcactatttccagtgcaaggtgcagtttggcatgaaactatagggccaggtggttttgaaagagacatctgtgttaactctccaacaagaagtggaaagactctttcttatgctttaccaattgtgcagcttcttgcatctcgtcctgtgagatgncctcgtgctttagtcgtattgcaacacgtgat

SEQ ID NO: 148779 - DNA, 409 bp, Arabidopsis thaliana columbia
  unsure (1)..(409): unsure at all n locations
caaacccggaaagcttcgtctgccatttttcattcttctaagccctagctcaaagctttctctctcaaatccgccatgactaaacagcacgcgaactggtctccttacgataacaatggaggaacatgtgtggccatcgctggatcggattactgggttatcgccgccgatactcggatgtctactggttacagtattcttagtcgcgattactccaaaatccataaactagcggacagagcttgtttgtcttcctctggcttccaggctgatgtgaaagctttgcagaaggttctcaaatccagacacttgatctatcaacatcagcataacaagcagatgagctgtcctgcaatggcccagcttctctccaacacgncttatttcaagcggtttttcccctactatg

SEQ ID NO: 148780 - DNA, 416 bp, Arabidopsis thaliana columbia
cctggatgcgccgaaacattccaagactcatcagagttccaaccacgcttcgaaggtcaaggtcaaagccagaggttccgtgacatgcaccagaaagtggagcacattaggagcggtgataccattgccacaacacccggtgtagcacagtggttctacaacgacggacaggaaccacttgtcatcgtcagcgtcttcgatctagccagtcaccagaaccagcttgaccgcaacccaaggccattttacttagccggaaacaacccacaaggtcaagtatggctacaaggacgagagcaacagccacagaagaacattttcaatggatttggacccgaggttattgctcaagctttgaagatcgatcttcagacagcacagcaacttcagaaccaagatgacaaccgtggaaacat

SEQ ID NO: 148781 - DNA, 413 bp, Arabidopsis thaliana columbia
cttcccaccgttctcgtcaccggcgctagtggcagaacaggccagattgtgtataagaagctgaaggaggggtcagacaagtttgtagcaaagggtttagttagaagtgctcaaggaaaagagaaaattggaggagaagctgatgttttcattggggatataacagatgctgatagcattaaccctgcgtttcaaggaatcgatgcgcttgtgattctcactagtgctgtgcctaaaatgaaacctggttttgatcccactaaaggtggaagacctgagttcattttcgaagatggacagtatcctgaacaagttgattggattggacagaagaatcaaattgatgcagccaaggttgctggtgttaagcatattgtcgtggtcgggtcaatgggtggtaccaatccggatca

SEQ ID NO: 148782 - DNA, 404 bp, Arabidopsis thaliana columbia
aagaccctgacatcagtattcgtagacgcgctcttgatttgctatatgggatgtgcgatgtgtcaaatgcaaaggatatagttgaagagttgttgcagtatcttagcacagcagaattttctatgcgggaggaattatcacttaaagctgctattcttgctgagaagtttgctcctgatctttcatggtatgtagatgtgatccttcagttgatcgacaaggctggggattttgttagcgatgacatttggtttcgtgtggttcagtttgtaacaaataatgaagacctgcagccttatgcggcatcaaaagcaagagaatatatggacaaaattgcaatccatgagaccatggtgaaggtcagtgcttatattttgggggagtatggtcaccttttagctaga

SEQ ID NO: 148783 - DNA, 408 bp, Arabidopsis thaliana columbia
gtcacgacgaccctcacactacacactacacataaaattgaaagccccactgcgaatccaccacaaagcaaaaaaaatttgtttgttattcgaatggagctcctgagcacgatcaatctcttagcaatagctctagtgcttcttgtagttccgaagatatatggagcttgtcggatccttgtttggcggccatggatgctatcgagaagattcaagaagcaaggaatctctggtccaaaatacaggatcttgtatgggaacctccgagagattaggaagatgaagaacgaagctaagcttatggttcttgatccaaactccaacgatatcgtccctcgcgtcttacctcatcttcagcaatggaagtctcaatatggagagacctttctttactggcaaggaacagat

SEQ ID NO: 148784 - DNA, 415 bp, Arabidopsis thaliana columbia
aaaaaaaaatggctcaattcttagagaaggcaacttcggctctcagcgaagccaaagaatccgttacaagcaccgctgaatccgtcacggcttctctcactgatgctgagaaaaccgttaaccaaaccgccaggagcactctaactgacgccgagacaaccgttgcagcatctgttgaaacggtcaagaccgaggctgcagccgcaccagacaaagcgtctggtgtgtctacacaggctaaggatgcagtggacaaagctttttctagaggtatagaaggagccaaatctttgcttcaaactttcgaagcgaagagcagcgatatttcctcaaagcttgttggaggtgttaccaatcttgtgagtggagcatcgagcagcaccgtggcaaaccgagaccttccagtatctacaga

SEQ ID NO: 148785 - DNA, 416 bp, Arabidopsis thaliana columbia
attcaattttagggaattcaatcccattgcttcttcttctcttggtgattcgcctcttctcttgtgtgaatccctttcacgatctttggcacagctcactggtgatctggagtgaagtctcggtctcttgtcttcctcttggtgattttcttcttatcacacaaagatattggagctcttgggatttctctttccctcaagcagtctccatgtcttctccgcatcttctctgtgagcctccctcacgtctcttccggttgtcgatgcagccttcttcagcttcctctctctcatgtacaatctcaagaagaacaaagatcaaagacaaagaacaaagaaggaaaaagcttcttgaagaataaactctcgtttcttctctttctctctagaactccctttgtgtcttgtctcacacc

SEQ ID NO: 148786 - DNA, 464 bp, Arabidopsis thaliana columbia
  unsure (1)..(464): unsure at all n locations
nncacgcgtccgaaagggccgagaaagggctccggcggtagaagtataaccaaagnngccggaaaggaagcttctccgaagggaagggctggtgccggaggggcgacaagaagaaaatagatgaaganagaagagtggtcgagacttacanagatctacantcttcaagggtgcttaagcanagttcatncccgatatncggaatctccagcaaagncgatgggnngatcatgaaccagtttcattnaacgatatcnttcgagaaagcttgctcaaganggcgtcgaagcttgcgaggtacaataagaaacctacgatcacttctcgggagattcagactgctgtgagattggtgcttcctggagagttggcgaagcatgccgtttctgaggggactaaagccgtcacgaaattcaccagctcttgaataattgagttagggttcttatcatatggatgttgct

SEQ ID NO: 148787 - DNA, 405 bp, Arabidopsis thaliana columbia
tgatttttttctctgatcttcgagttctgataattgctcttttttctctggctttgttatcgataatttctctggattttctttctggggtgaatttttgcgcagagatgggttcggcgaacaacgagtacgagtttctgagtgagattgggctgacttctcacaacttgggatcttacgttgctggcaaatggcaagccaacggacctcttgtttcaactctcaatcctgctaacaatcagccaattgctcaagttgtggaagcttctctagaggattacgagcaaggtttgaaagcttgcgaggaagcagctaaaatatggatgcaggttacggctcctaagagaggtgatatcgtcagacagattggggatgcactaagatccaaacttgactatcttggtc

SEQ ID NO: 148788 - DNA, 185 bp, Arabidopsis thaliana columbia
ttaaagctaactacgatatttttcgagaatatgacaactttttctgttccgattgataacggagattctatgaagatcgcagaagaagaatcacaaagaacactgtacccatatggtactggaacttcaattggtgcaatcaagtacaaaaaatggggtttggtggcttctgatatgggagggtc

SEQ ID NO: 148789 - DNA, 416 bp, Arabidopsis thaliana columbia
atcgaattaaaatcttcgtcagattcgagagacgacgacgacgaacttgttgttctcgattatcatcagcagctcccttcaaaaaccctaactctctgagctcgatcgacaagtgataatggccaacagtaatttgccgcgaagaatcatcaaggaaactcaacgtctgctcagtgaaccggctcccggtataagtgcctctccatctgaggataatatgcggtatttcaacgttatgattcttggtcctacacaatcaccttatgaaggaggagttttcaagttggagctctttttgcctgaagaataccctatggcagctcccaaggttaggtttctcacaaagatataccatcctaacattgacaagcttggaagaatctgtcttgatattctcaaggacaaatggagccctg

SEQ ID NO: 148790 - DNA, 330 bp, Arabidopsis thaliana columbia
tttctctctatctctttctaaaacacaaccatgactgtttcttcatctccatgggctctcatggctctctttctaatggtttcttcaacaatggtaatggctattcctccacgcaaggccattgatgtaccatttggtcgtaactacgtcccaacttgggcttttgaccaccagaaacagttcaatggcggttccgaacttcaacttattctcgacaaatacactggcacaagatttcaatcaaaggggtcatattttgttggacattttagtatgcacataaagcttccagcttgtgacacaaccggagttgtcacagctttctatcta

SEQ ID NO: 148791 - DNA, 422 bp, Arabidopsis thaliana columbia
ggtccggattatcgacccggttgaagctttacaggacccgacgtttctgcacaaaaggagagaataaactcgagaagacggaatctagcgttgcgcatcacagcgacactgaatctagtgtttctcgctacgatgagacctataagaaactcgataagctcgatttcgttaccgctgcgaagatcttgttcactgaaccacccaagaagaacaaatttgggtttgattggcatgtggtgcaattcatcatcgtctgcttgccatctgtagctgggtatctggttgctcaatatgctcgccggaaaatgaagatcatggatgctgaacttggagagaagaaaaggaaagaagaagaaaagaaagagaaagaagaagctgaacaaaaggcattacaagtagaggcagcaaccaagtctcacgaa

SEQ ID NO: 148792 - DNA, 421 bp, Arabidopsis thaliana columbia
gtcaggacacaacaaagcagttagctatgcgaagttcttggataatgaaactcttgtaacagcatcaactgataacacgttaaagctttgggatcttaagaaaaccactcacggtggcctctcaacaaatgcttgcagcttaacttttggcggccatacaaatgagaagaactttgttggtttgtctacttctgatggatatatagcttgtggctctgagacaaatgaggtttatgcctatcaccggtctcttcccatgccaattacctcgtacaagtttggttctattgatccaatatcaggtaaggagatagaggaggacaacaacctgttcgtttcaagcgtttgctggagaaaaagatcgaatatggttgtttcagctagctcaaatgggtcaatcaaagttctacagttggtctgg

SEQ ID NO: 148793 - DNA, 406 bp, Arabidopsis thaliana columbia
gaagaaatggggttccttaagccaaccatggcgattctttttctagcgatggtcgccgtttcatcagccgtggacatgtcaatcatctcctacgacgagaaacatggcgtctccaccaccggtggccgtagcgaagccgaggttatgagtatctacgaggcatggttggtgaaacacggcaaggctcagagccagaactctcttgttgagaaagatcgacggttcgagatctttaaagacaatcttcgtttcgtcgatgaacataacgagaagaatcttagttatagattgggtttgactcgttttgcggatcttactaacgatgagtatagatccaagtatcttggagctaagatggagaagaaaggtgagagaaggactagcctacggtacgaggctcgtgtcg

SEQ ID NO: 148794 - DNA, 159 bp, Arabidopsis thaliana columbia
ctcacggagattggagaaagaggtgttaatatcagtggaggacagaagcagagggtttccatggctagggccgtttactcaaattcagatgtgtacatctttgatgacccgttaagtgcccttgatgctcatgttggtcaacaggtttttgaaaaatgc

SEQ ID NO: 148795 - DNA, 436 bp, Arabidopsis thaliana columbia
  unsure (1)..(436): unsure at all n locations
tgctncgccccncnnncncgaaatctccaaagaacccgacaaagcgccatgtcgctcactatcccggcgaatctcgttctcaacccgagatctaacaaatctctcactcaatccgtacctaaatcctccgcaagattcgtctgctccgatgacaaatcctcctcctccacacctcaatccatgaaagctttctccgccgccgtcgccctctcttccatcctcctctctgctcctatgccagctgtcgctgatatctcaggtttgactccttgcaaggactcaaaacagttcgctaaaagagagaagcaacagatcaagaagcttgaatcttctcttaagctctacgctcctgaatctgcccctgctcttgctctcaatgctcagatcgagaaaaccaaacgcaggttcgacaactacgggaagtacggattgttat

SEQ ID NO: 148796 - DNA, 417 bp, Arabidopsis thaliana columbia
gctaaggagaggcgaattcgaatcgagaagatggtgtctgggtcagggatatgttcaaagcgtgtcgttgttgacgcacgtcaccatatgtgtggtcgtcttgcttcgatcatagctaaagagttgctcaatggacagagtgttgttgttgtccgatgtgaggagatttgtttgtctggtggtttggttcgtcagaagatgaagtacatgaggtttcttaggaaacgcatgaacactaaaccttctcatggtcctattcatttccgtgctccgtctaagatcttctggcgtaccgttcgtgggatgattccacacaagaccaagcgtggtgctgctgctcttgcacgtttgaaggtgtttgagggagtaccacctccttatgacaaggtcaagagaatggtcattcctgatgctctc

SEQ ID NO: 148797 - DNA, 411 bp, Arabidopsis thaliana columbia
caatggcttcctctatgctctcttccgctactatggttgcctctccggctcaggccactatggtcgctcctttcaacggacttaagtcctccgctgccttcccagccacccgcaaggctaacaacgacattacttccatcacaagcaacggcggaagagttaactgcatgcaggtgtggcctccgattggaaagaagaagtttgagactctctcttaccttcctgaccttaccgattccgaattggctaaggaagttgactaccttatccgcaacaagtggattccttgtgttgaattcgagttggagcacggatttgtgtaccgtgagcacggtaactcacccggatactatgatggacggtactggacaatgtggaagcttcccttgttcggttgcaccgactccgctc

SEQ ID NO: 148798 - DNA, 464 bp, Arabidopsis thaliana columbia
  unsure (1)..(464): unsure at all n locations
gggtcggacccacgccgtaccgaggaaatataacgaaataaccaaaatggcttcgaggtctcttctctttctttnctttctggcttaaccactgtttgatccttttccatnggctttacgcggctcaaccagggtcagcagnggtcaggcagtttccgaaccgagtgcnncagctcgaccaagctcaatgcgctcgaagccgtcacancgtacctgaaagaagcgagggctggtcgcattcgagggtgtgggaccaccacgctcctcagcttccgttgctcagggtgtctcctttgcacgttacatcatcgagtctaagggtctctacttgccctctttctttaacaccgcgaagctctctttcgtggctaagggacgaggtcttatgggaaaagtgatccctggatgcgccgaaacattccaagactcatcagagttccaaccacgcttcgaaggtcaaggtc

SEQ ID NO: 148799 - DNA, 416 bp, Arabidopsis thaliana columbia
  unsure (1)..(416): unsure at all n locations
acgcttttgacaatgggccacagacacagcaagtccaaatcctccgatccgccaccgtcctcctcctcctcttcctccggcaacgtagtccaccatgttaaacctgccggagaacgccgcggatcatccggttccggaaccgtcggatcgtcaggctccggaacaggcggatctcgttccaccacatctactcagcagaatggtcggatcttaagtcggcccatggagggagtacggagaacctatgagtttggtcgggagcttggtcggggccagtttggtgtcacgtacctcgtaactcacaaagagacgaaacaacaggtcgcttgcaagtcaaatccctacgcgcccgncttgttcacaaagacgacattgaagatgttcgccgtgaagtccagattatgcaccatctcagc

SEQ ID NO: 148800 - DNA, 331 bp, Arabidopsis thaliana columbia
ttttcctacgcccgcgaccatcaccgtggtcaacctgcttcaatcctcgctaaagagttgctcaacggacccagtgttgctgctgtccgatgtgcggagatttgtttgtctggcgcatcggctcggcagaagatgaagtacatgaggtttcctaggaaacgcatgcacactacaccttctcatggtcctatgcattgccgtgctccgtctgagatcttctggcgtaccgctcgcgggatgattccacacaagaccaagcgtggtgctgctgctcttgcacgtttgaaggacaaagacgacatttcaaatgttcgtcgcgaagtccagatta

SEQ ID NO: 148801 - DNA, 418 bp, Arabidopsis thaliana columbia
gggttgaagcggatagtacgccacctctatctctctctcaccctatcgaactcgcgaagaacatcttcttcttcttcttctccgtcttcgtcttcgcgagctctctcagtagcgcaataaaatgggggcttcgcttcctcctaaggaggccaacctcttcaagctcatcgtcaaatcatatgagactaagcagtacaagaagggactcaaggcagctgatgccatattaaaaaagtttcctgatcatggagagactttatcgatgaaaggactgactctaaactgtatggaccgcaaaactgaagcatatgagcttgttcgacttggagtgaagaatgatatcaaaagccatgtttgctggcatgtgcttggtcttttgtaccggtcagacagagagtatagagaagcaatcaaatgc

SEQ ID NO: 148802 - DNA, 417 bp, Arabidopsis thaliana columbia
aaaggaattcactgtctctctttaagactaaccgatgaatattcctccaatgctcatgcccggagacagcttccttccccggagcttctccctgttctctcagacaatgcttaccaccattttgttctagctacagataatatcttagctgcatcggttgtggtctcatctgctgttcaatcatcttcaaaacccgagaaaattgtcttccatgttatcacagacaagaaaacctatgcgggtatgcattcttggtttgcactcaattctgttgctcctgcgattgttgaagtgaaaagcgttcatcagtttgattggttaacaagagagaatgttccagttcttgaagctgtggaaagccataacagtatcagaaattattaccatgggaatcatattgctggtgcaaacctcagc

SEQ ID NO: 148803 - DNA, 416 bp, Arabidopsis thaliana columbia
gctatctgggtccagaaacgattcacgcgcttcattcatgatataaagttactaccttttttttattttaccttctgggtcatggttttgtctgcttttcgtcttttgcttttgtctggatgattcataatctctcgagatctattatgttcacaagagttgttcttatgcgtggtgagatgatcttaggagtgtttcactatctttcttcaattcgggtttttagtttctgagatctgtttttgaagaatctgatctgagtttgaggaagtttgactaaatagatcgaagaagatgtttaagcagatacttgggaagctttctaagaaaacttctgctaagttttgggataatggtgaatcccaaactctagataacaacaacaatcaaggaggaggtgatgaagttttaagcct

SEQ ID NO: 148804 - DNA, 379 bp, Arabidopsis thaliana columbia
aaaaacaatgaagaaaacaccgtaacgaatcataaaatttctcaaaatccaaactctgttttttgttcttcctcttccagatttggtttctttttttgaaaaactctctagcttcagttttttttttctctctctctctctctctaggaatgtttttgttcgtggatactggaatcatgagaataagattttgaaggagaaagcaagatccatgttctttgtcggagaatttagggctaatatgtggatttgagcttctttgattcccaatttgtgaaagttttgaaatttttgggaaagagagaatgtttaagcagtttctgagtaaacttccgaggaagtcttcaaaatctgattcaagagagctgaatcgttcgag

SEQ ID NO: 148805 - DNA, 423 bp, Arabidopsis thaliana columbia
ctctcttctcctcctccttttcgccttcgtattcctcaccatccccgccgtgatctccgccatcggtgttaactacggaactctcggaaacctcccaccaccgactcaggtggctaactttatcaagacacaaacttcgattgatagcgtcaagatcttcgatgtgaatcccgatatcctacgtgccttcgctggaactggtatctccgtcgttgtcaccgttcctaacggtgatattccggcgttggctaacggaagacaagctcgtcggtgggtttcgggtaacattttgccgtttcatcctcagacgaagattaagtatatctcagtcggaaatgagattctgctcaccggagataattacatgatcaataatctcttaccggcgatgaggaatcttaacaacgctttaggttcgtgctg

SEQ ID NO: 148806 - DNA, 412 bp, Arabidopsis thaliana columbia
ggactcctccaaactctcatctctctttctttgcctcttcctcatttgcattatctatctcccccaacattctctcgcatgcggctcttgcaacccacggaagggcggaaagcactcccctaaagcccctaagctaccagttcctccggtgaccgtccctaagctaccagttcctccggtgaccgtccctaagctaccagtccctccggtgaccgtccctaagctacccgttcctcctgtgaccatccctaagctacccgttccaccagtgactgtacctaagctacccgttcctcctgtgaccgtccccaagctacccgttcctccagtgaccgtccccaagctacccgttcctccagtgacagtccctaagctacccgttccccccgtaactgtacctaagctaccccgt

SEQ ID NO: 148807 - DNA, 380 bp, Arabidopsis thaliana columbia
ggacgagtcaaatggcagactaacacagctaacaaaggcgtcaccggattccaaatcttacccaacggaaacatcgtcctacacgacaaaaacggcaaattcgtatggcagagtttcgatcaccccaccgatacactcctcaccggccaatcgttaaaagttaacggagtcaacaaactcgttagccgtacatctgattcgaacggctcagatggtccgtacagcatggtgctggacaaaaaaggtttaaccatgtacgttaacaaaaccggtacgccgttagtttacggcggatggccggatcacgatttccgcggcaccgtcactttcgccgttacaagagaattcgataatttaacggagccgtcagcttacgagct

SEQ ID NO: 148808 - DNA, 332 bp, Arabidopsis thaliana columbia
agacgacatgggaaggcacctggaacatatcattctcgttactgaaatcaagaggtatgatcaaatctggtgacctcgtgatcgcagtctcggacatgctgcaatcaatccaggtaatgaacgtcccgtaattctctctctttatacaatttcgcaatcccgcataagagtgttttgtttcctacttttgttactgtttttagactactcttacattagattccagaggcatcatcatcttcggtttgttaacaacagtaatgtgtaaagcttagttgtagtgtgtactagttgtttttggttttcaataatatcagtaatcttattcaaat

SEQ ID NO: 148809 - DNA, 428 bp, Arabidopsis thaliana columbia
ggcattgttactcgtaggccccttgtcttacagttgcaaaagatcgatgatggaacccgggagtatgcagagtttcttcacctcccgaggaaaaagtttactgattttgctgctgtgaggaaggagattcaagatgagactgacagagagactggacgcagcaaggctatttctagtgttcccattcaccttagcatatactctcccaatgttgtcaacttgacactgatagatcttccagggcttacaaaagttgctgttgatggacaatctgatagtatagtgaaggacattgaaaacatggttcggtcctacattgaaaagcccaactgcatcattttggcaatctcacctgcaaaccaagatcttgctacctcagatgcaattaatatttcccgtgaggttgatccatcgggggacagaacatt

SEQ ID NO: 148810 - DNA, 417 bp, Arabidopsis thaliana columbia
ggttatggtccggttggcctccttaatttcctggggaaaatttcaaccaggcttcagcgaagacgaatttacattggacacaaacttctggagagaacaagtgaatcagtactgggagttgatgaatgttaataagactgaagtgcgaaatgtgatggacacaaatgcattcattggtggatttgccgcagccatgaactcatatcccctttgggtcatgaacgttgtacctgctacaatgaacgataccttatccggaatttaccagaggggcttaaccggtgcttatcatgattggtaagcgaatacgatctctttctcaaattttcatcctttctcacttaagcttagcaccgatagtaaaactagttcctcataggtgtgagccattctcaacatatccccgtacttacgatc

SEQ ID NO: 148811 - DNA, 380 bp, Arabidopsis thaliana columbia
aggcgtccgggctagccaaaacaatctttttgagttgtcaaatcatcgacttgtacgaccaaatctcaaagctcaagagcttaaaaccttccaaaaatgtcgacactttgttcggacaactcgtgtccacgtgcttacccacggatacaaacatcgatgtcacaaatatgtgtgaagaagtcaaagacatgagagctaatctcatcaagctttgtggtgaagccaaaaggtatttagagcaacacttcttcacaattttgggatccttacaagaggacccaatcccactcgaccatttacacatatttgcttactactgcaactacattaagctcggcacgcgcgagttcgatctcctgagcgaacactcaaaccatgtg

SEQ ID NO: 148812 - DNA, 371 bp, Arabidopsis thaliana columbia
aggcaatgcaagctttgatctttcttggtttcttggccacttcatgtctcgctcaagctcctgcaccagcaccaaccaccgttactcctccaccaacggcgcttcctccagtgacagcagaaacaccttcaccaattgcttcaccgcctgttccagttaacgagccaactccagctcctaccacttctccaacaacatccccggttgcttctcctcctcagaccgatgctcctgctcccggtccttccgctggattaactccaacttcgtctccagctccaggaccagacggtgctgctgatgcaccaagtgccgcatgggctaacaaagctttccttaggggaacagctgttgccggagctttatacgct

SEQ ID NO: 148813 - DNA, 417 bp, Arabidopsis thaliana columbia
caatggtggaggagatgtacatggaggaaatgttggagcaggcaaagaacatgggatccatggaaaagactcctttggatcaaagcaacgaagattctgcttcaaagtcaacaagtaaccaagaaaagagcccaatggcggacactaattaccatatgaatcccaatcacaacggtgacctagaaggcgtcactggaatgcaaggaagccccaagagactaagaaccagcgacgagacaatgatgcagccaataaatgcggatttcagctccaacgagaagctcacgatgaagattctagaagaacggcaagggattagatcagatggtggctaccctttcatgggtaatttcgggcaataccaaatggatgagatgtcaagatttgatgtagtctcagaccaggagctcatggcgc

SEQ ID NO: 148814 - DNA, 422 bp, Arabidopsis thaliana columbia
gcaaagcctctcgttgctagaggaatcaaacaatggtgtttgtgaagtccaccaagtcgaatgcttacttcaagaggtaccaagtgaagttcaggagaagaagagatggaaagactgactacagggcaaggatccgtcttatcaaccaagacaagaacaagtacaatactcctaagtatcgttttgttgtccggtttaccaacaaagacatagtggcacagattgtatctgcaagcattgctggtgacattgttaaagcttctgcttacgcacatgaactgcctcagtatggtctcactgttggtcttacaaactatgctgcagcttactgtactggccttcttttggctcgccgtgttttaaagatgttggaaatggatgacgagtatgagggaaacgttgaggccactggagaagacttt

SEQ ID NO: 148815 - DNA, 422 bp, Arabidopsis thaliana columbia
gtcgaaatcttaacaccaatcccaaatcagaaatatcaaaactttttattttattttatcaaaatggcgcttatgaatggaagcatgaatctatcatcggtcaaatcatcgatgatcaaccaccgtcaaccaaacttctcctccgccgtctccagacccacttctttccggatctccgccgtgcaaaccgacccaaaaacaccagctgcttcatcggcgtcggcggcgacgacgactccggcaacgttgacgaagcccgttggagttaatgtgggtaaaggaaaatgggcaccagagagttggaggacgaagaaagctttacagcaaccggactatccagatttagctgcgcttgaagctgtgctagagacgatcgaagcttttccttcgatcgtgttcgccggagaagctagattgcttga

SEQ ID NO: 148816 - DNA, 425 bp, Arabidopsis thaliana columbia
gaagacagaaatggcaaccgcagctctctccgccgcccgacccaaccgccttagctcagcctcctccgatgttcctctccaccccctatatctccctaccaagctccaatttccttcccgtaagactcagctgtggcgctccgccgcgattctcttacccacacggcggcgatgcgctccgcctagagctagttctcgcgccgacgattctccacccttcgatatgtctgtggagacggcgcttaaggttctcggagtctccgaaggagcttccttcgacgaaattcttcgtgccaagaaatcgatcctggcttctcgtaaggacgaccccaacgccatctctcaagctgaggctgcatatgacatgctgctgatgcagagcctaaaccaacgccgagcaggaaaaggtgtaagcaacaacattc

SEQ ID NO: 148817 - DNA, 421 bp, Arabidopsis thaliana columbia
caagttagtcataaaaaaaaaaaaaaccacaaaaaagtttcaatggccgcctcaacaatggctctctcctcccctgctttcgccggaaaggctgtgaacctttcccctgcggcatcagaagtccttggaagcggccgtgtgacaatgaggaagactgttgccaagccaaagggtccatcaggcagcccatggtacggatccgaccgagtcaagtacttgggtccattctctggcgagtcacccagctaccttaccggagagttccctggagactacggatgggacacagctggtctatccgctgaccccgagacattcgcaaggaaccgtgagctagaagttatccacagcaggtgggccatgctcggagccctaggctgcgtcttccctgagcttttggccaggaacggagtcaagtttg

SEQ ID NO: 148818 - DNA, 422 bp, Arabidopsis thaliana columbia
caagaacccagaaagaggaacgaagaaactaattcaaaggatcaagttcaccgcttcattttagtcattaaacaaagatggtgatgggaggagaagcatccatggaactggaccagtgttttcagaagatgaagatggaaggaatctcgatcaaagagtggaaagatatccctgtggagcttctgatgaggatcctttcccttgttgatgatcgtaatgtcattgttgcttctggtgtttgcactggctggagagatgctatctcttttggcctcactcgtctccgtctatcttggtgcaacaacaacatgaacagcttggttctttctcttgttcccaagtttgtaaagctgcagactttaaatctaaggcaggacaaaccgcaactagaggacaatgcagtggaggccatagcatatcac

SEQ ID NO: 148819 - DNA, 335 bp, Arabidopsis thaliana columbia
aaaaaatgtcttcgataatccatggagctggagctgctacgacgacgttatcgacgtttaattccgtcgattccaagaaactcttcgttgctccttctcgcacaaatctttcagtgaggagccagagatatatagtggctggatctgatgcgagtaagaagagctttggttctggacttagagttcgtcactctcagaaattgattccaaatgctgttgcgacgaaggaggcggatacgtctgcgagcactggacatgaactattgcttttcgaggctcttcaggaaggtctggaagaagagatggacagagatccacatgtatgtgttatgggt

SEQ ID NO: 148820 - DNA, 401 bp, Arabidopsis thaliana columbia
atcgtctcctacctcctttgcctacaagctttcacgcgggagctcaacatcagccatggcggaacagactgagaaagcttttcttaagcagcctaaggtcttccttagctcgaagaaatctggaaagggaaagagacctggaaaaggtggaaaccgtttctggaagaacattggtttgggcttcaagactcctcgtgaagccattgatggagcttacgttgacaagaaatgccccttcactggaactgtttccattagaggtcgtatcttagctggtacttgccacagtgcgaaattgcataggaccattatcgtgcgaagggattaccttcactttgtgaagaagtatcagaggtatgagaagaggcattcaaacattccggctcatgtctcaccatgct

SEQ ID NO: 148821 - DNA, 375 bp, Arabidopsis thaliana columbia
tgaagcttaaatctcagccgtccgatcatgccgatcagaaacatcgccattggccgtccagatgaagccacccgtcccgatgccttaaaggcggcgttggctgagttcatttcaactttgatctttgtcgtcgccggttcaggctctggcatggctttcaacaagctcactgaaaacggagccaccactccttctggtctcgtagctgctgcagtggctcatgcctttggactcttcgtcgctgtctcagttggtgccaacatctctggtggacacgttaaccctgccgtcactttcggtgctttcattggtggtaacatcactctcctccgtggtatcctctactggattgctcagcttctcggctccgtcgtc

SEQ ID NO: 148822 - DNA, 388 bp, Arabidopsis thaliana columbia
gttggaagtgtgggagactcattcagtgtatcatctcttaaagcttacttgtctgagttcatcgcaactcttctcttcgtattcgcaggcgttggctctgctgttgcgtttgccaaactaacctctgatggagccttggacccagctggtcttgtagcaattgcaattgctcacgcgtttgctcttttcgttggagtttccattgcggctaacatttctggtggtcaccttaacccagccgtgactcttggccttgccatcggcggaaacataacactcatcacaggtttcttctattggattgctcagtgtcttggctccatcgtcgcttgtcttctcctcgtctttgttactaatggcaagagcgtaccgacccacagggtctcag

SEQ ID NO: 148823 - DNA, 381 bp, Arabidopsis thaliana columbia
  unsure (1)..(381): unsure at all n locations
gaatttgacgactaatatcagacttcatcagcttacgtcgatctacgtacgacggctatgacgatgacgtcgatcatcagatccagtcctacttcgtttatcgtcttacagatttgttatcttctttgcttcactttcccttgctctttgggtctgaggatgnacaccattactggtagagtcaagattccaccaagcaacgtgattggtcacatagcaaagttctcaaatgtcaaagtatactcaatggtggacagaagattacgtttctaggcctgatggatacttacttttatgaagtgcctgctgggctcatttgattgaagtatcagcaatgggttacttctttctccggtcgagtagatgtagtgctcggatcgt

SEQ ID NO: 148824 - DNA, 283 bp, Arabidopsis thaliana columbia
aagactaattcacatcttttaaaatgaatcatagccgacgtaagaaattccaacacggtttatagcacaataatcgtcgatttgtagatcaattgacatattaaccttatataatgtaaacataaataatattccgcagccagagacaatccttgccttttcagttctgtggaagatccttatgaattcagtttgtattgagaatatcataaaagattgcaggtttcttggtaactggagccagttcctcgactgcggcagctaaaccaaggacggtagcttc

SEQ ID NO: 148825 - DNA, 403 bp, Arabidopsis thaliana columbia
aagaagttggggtttgattaacgttttgcatcggagatgggtttggtcatgaggtttgatctttaccttatgtttgtgatgttgatgggtttagggtttacgatatcaaatggatacaagttctatgttggtgggaaagatggttgggtcccgactccttccgaagattattctcattggtctcaccgaaaccggtttcaagtcaacgacactcttcattttaagtacgccaagggaaaagattcagtgttggaggtgactgaacaagagtacaacacatgcaacacgacacacccgctgacttccctctcagacagagactctttcttcctacttagccactcaggttcctactttttcattagtggcaactctcaaaactgtcttaaaggtcagaagctag

SEQ ID NO: 148826 - DNA, 421 bp, Arabidopsis thaliana columbia
ggaaggtggttctggtggtgccctagccattggctgtgcgaataaaatgctgatgctcgaaaacgcagttttctatgttgccagtccagaggcatgtgcagcgatcttgtggaagacttctaaggctgctcctgaggctgctgaaaagcttagaattacctccaaggagctggtcaagcttaatgtagctgatggaatcattcctgaaccgcttggaggggcccatgccgatccttcatggacgtcgcagcaaataaagattgctatcaatgaaaacatgaatgaattcggaaaaatgagtggggaggagctcctgaaacacaggatggctaagtaccgaaagattggagtgttcatagagggcgaaccaatagagccaagtaggaaaatcaacatgaagaaaagggaagccgtgttctca

SEQ ID NO: 148827 - DNA, 396 bp, Arabidopsis thaliana columbia
ggagaatggttgcccggtttggcatctcctgattatctcaccggcagtcttgccggtgacaatgggtttgacccgttgggtctagcagaggatccagagaacttgaaatggttcgtccaggcagagctggtcaacggacgatgggctatgctcggtgtcgctgggatgcttttgccggaagttttcaccaagatcggaatcataaatgttcctgagtggtacgatgctgggaaagagcagtattttgcatcgtcgtcgacattgttcgtgatcgagttcatattgtttcattacgttgagatcagacggtggcaagacatcaagaacccatgaagtgtgtaccaagaccctatctttaagcaatacagcttacctaagggtgaaagtggtttccct

SEQ ID NO: 148828 - DNA, 404 bp, Arabidopsis thaliana columbia
gcagtaaggagacgaaattttggtgctcgtttgctactaccgcacctatggaaagaccttcaagggaccacgtcgtccttacgagaaggagcgtcttgattctgaattgaagctggttggtgagtatggtctgcgtaacaagcgtgagctctggagagtgcagtactctcttagccgtatccgtaatgctgctagagatcttttgactcttgatgagaagagtccaagaaggatctttgaaggtgaggctttgctccgtaagatgaaccgttacgggcttcttgatgagagccagaacaagctcgattacgtcttagctttgactgttgagaactttcttgagcgtcgtcttcagactattgtgttcaagtctggtatggctaagtctatccatcactctcgtg

SEQ ID NO: 148829 - DNA, 406 bp, Arabidopsis thaliana columbia
agcagctaaaatactgggttcttggtttcttccatcgaaatcgaaaaaagctaagatctttgcgttttgaaacgatggcggaagaacataagcatgatgaatctgtgatcgctcctgagccagctgttgaggttgtggagagagaatcgttgatggataagatatcggagaagatccatcacggtggtgattcttcttcgtcttcttcatcttctgatgatgaagacgagaagaagaagactaagaagccctcttctccttcgtcttctatgaaatcgaaagtttaccgcttgttcggacgagagcagcctgttcataaggttctcggcggtggaaagccggctgatatattcatgtggaagaacaagaagatgtctggtggtgtactaggtggtgctacagctgc

SEQ ID NO: 148830 - DNA, 414 bp, Arabidopsis thaliana columbia
tctctctctctctcgcgacgcagatttcgattcgtcgaatattttagctaatcctctctcttaatctctttgaacatttttccccaaattcgccgcagtgaatactttctcttcccgtaaatctccaaaaatcgagttttttttattacttctcaattgaatttgcttcttccgattgatctcttaattgattcgcttgtgggttggatttgaatcctctcttactttccaaaggtcataccttttcacagatctatctttgaaattgtgaagaagaagaagaagaagacgatgattcgactaagaacatacgcaggccttagttttatggcaactttggctgtaatttatcatgcattcagcagcagaggccaattttaccctgcgactgtttatctatcaacctcaaagatc

SEQ ID NO: 148831 - DNA, 415 bp, Arabidopsis thaliana columbia
cttcaatctctcccaaagcctaaagcgatctctgcaaatctctcgcgactctctctttcaagatgcaaatcttcgtgaaaacactcactggcaagactatcactctcgaggttgagagctctgacaccatcgacaatgttaaggcaaagattcaggacaaggaaggcattcctccggatcagcaaagattaatattcgccggtaaacagctagaagatggccgtaccttggccgattacaacattcagaaagaatcaacccttcatttggttctccgtttaagaggtggtatgcaaatctttgtcaagactctgactggcaagaccattactttggaggttgagagctctgacactattgacaacgtcaaagcaaagatccaggacaaggaaggaatccctccggatcagcagag

SEQ ID NO: 148832 - DNA, 413 bp, Arabidopsis thaliana columbia
tattagtcgcttatttttcatttccgtagtaaaaaccaaaaatcataatgacacaatatataaaattaatgacaccaatacaaaacacgaaacggaagaatcttcgttcctctttaccgtccggccgagaaaagcctaatcacatctttctcctctattcttctttttaaaacatgagatctctctctcttctcatcaccattgatctctggttttcataatctattctttgattcttattctatctctgaattttgatttgttcttcgggggagatagggttttacaattctcaggccggttcttgagatggaggagaacacggcggtggctgcggcggagagaagatcaggttgagagctatagagtgtaatgtttggtagacgtggcttgtggtccaagaaatctaccgc

SEQ ID NO: 148833 - DNA, 409 bp, Arabidopsis thaliana columbia
ttttagagagaagatagtttttgagtttaccttcttcttcttcttctttgttgtcaaagagagagattaccttcttcataggaaaagatttctttcttcttctgcattccccaaattttatcttcccaagaaacccaacacagaagaaaatcttaaagtgaattgtggtggagatgaaagttggtgctccggcaagtaagccgggtcggatcattgttcaagtttttcttctacaactacttcttcttcttcaaagtgttcattcacagagatcacaaaacaaactttacatcacaaagcctggacaaaacataccagccttaacagttcagctaatgagagttggccatgatacggtggtagttgataatggtattgtccagttactttctcgtacccagatagcttt

SEQ ID NO: 148834 - DNA, 425 bp, Arabidopsis thaliana columbia
aacaaacaaaaagaaaatggttaagctcagcaatctcctcgttgcaaccttcggggttctcctcgtccttaacggctgccttgcgaggcagtcacttggggttcctcctcagctacagaacgagtgtaacctcgacaacctagatgttctccaagccaccgaaactatcaagagtgaagccggtcagatcgagtactgggaccacaaccaccctcagctccgatgtgttggtgtttccgttgctcgttatgtaattgaacaaggcggtctttacttgcccaccttcttcacttccccaaaaatttcctacgtcgttcaaggaacgggtatcagcggaagagtggtccctggatgtgccgagaccttcatggactcgcagccgatgcaaggacaacaacaaggcccaccatggcaaggacgacagg

SEQ ID NO: 148835 - DNA, 401 bp, Arabidopsis thaliana columbia
cacaatcttctcttacaaaaaactttgaaagatgaagattcttctagcatcattgtgtttgatcagtcttctcgtaatcttgccttctgtcttctctgcttcttcttcctctgaagattttgatttcttctacttcgtccaacaatggccaggatcatactgtgacacacagaagaagtgttgttatccaaattcaggcaaaccagctgctgattttggcattcatggtctttggcctaactacaaagatggaacttatccatctaactgtgatgcctctaaaccattcgatagctcaacgatatcagatcttctcacttcaatgaagaagagctggccaacactggcttgcccaagcggttcatgtgaagcgttttgggagcacgaatgggagaagcatg

SEQ ID NO: 148836 - DNA, 374 bp, Arabidopsis thaliana columbia
cggacgcgtgggagccattcaaaggctctagaatcaccggatctcttcacatgaccatccaaaccgccgtactcatcgaaaccctaactgctctcggtgctgaagtcagatggtgttcctgcaacatcttttccactcaagaccacgccgccgcagccatcgctcgtgactccgccgctgatttcgcctggaaaggtgagactcttcaggagtactggtggtgtaccgagcgtgctctagattggggtccaggtggtggtcctgatctgattgttgatgatggtggtgacgctacttttaagttcatgaggttgttaaagctgatgagatcttcgtgaagtctggtcttgtttctgaacctactttactgattt

SEQ ID NO: 148837 - DNA, 323 bp, Arabidopsis thaliana columbia
gtggcgtggaaagcccgtcttcatcaggcgaagaacagaagatgacatcaagctggccaatagtgtggatgttggatccctgagggacccacaagaagactcggttagagtcaagaatccagaatggttgatcgtggttggagtatgcactcatttggggtgcatccccttgcctaatgctggtgattatggtggttggttttgattgtgtaacggtttatttaatcttatattttggtattatttttgtaaggacctaaaacttttactttcttttatgttcttttactttatgattattgtgtattttttcatttaattta

SEQ ID NO: 148838 - DNA, 413 bp, Arabidopsis thaliana columbia
gaaagacttcacattttaccattatttgctctgagctcagtaggagagttcaagaaacaatggcaaagatgcaattatcaatctttatcgctgtcgttgcgcttatcgtctgctctgcatctgctaaaaccgcaagccctccagctccagtgctgccaccgacaccagctccagcaccagccccggaaaatgtgaatctcaccgagcttttaagtgtagctggtccgttccacacattcctcgactaccttctctcgactggagtcattgagactttccaaaaccaagctaacaacactgaggaaggcatcacaatctttgtccctaaagatgatgctttcaaagctcaaaagaatccttccttgtcaaatctcacaaaggatcagcttaagcagcttgttctcttccatgct

SEQ ID NO: 148839 - DNA, 405 bp, Arabidopsis thaliana columbia
ctctgctctttctacattttctaattttctcttgggctacttttcgactactaacaaatccaacgatgaggggattggtgaacaagctcgtgtccagatctctctccatctccgggaaatggcagaaccaacagcttcgtcgtctcaacatccacgagtatcagggagctgaattgatggggaaatatggagttaatgtgccgaaaggagtagctgcttcttcgttggaagaagttaaaaaggctattcaagatgttttccctaatgaaagcgagttggttgttaagagccagattttggctggtggaagaagtcttggaacattcaagagtggtcttaaagggggtgttcacattgttaaacgtgatgaagctgaagagattgctggaaagatgctaggacaag

SEQ ID NO: 148840 - DNA, 408 bp, Arabidopsis thaliana columbia
caaaaccatcacagcaaaaaaaactcactccctagaaaagtttgaaaatggcgaaggcagataagaaaccagcggagaagaaaccggcagagaaaactccggcagccgaaccagcagcagcggcagagaagaaaccaaaagccggaaagaaactcccgaaggaaccagccggcgccggagacaagaagaagaagagatcaaagaagaacgttgagacatacaagatctacatcttcaaggtgttgaagcaagttcatccagatatcggaatctccagcaaagccatgggaatcatgaacagtttcatcaatgatatctttgagaaacttgctggtgagtcttcgaagcttgcgaggtacaacaagaagccgacgattacttctagggagattcagactgcggtgagac

SEQ ID NO: 148841 - DNA, 367 bp, Arabidopsis thaliana columbia
ggctgcgatggcgaggatatcgtgtctgtggctgggcttgcgtgaggaccaaaagctttctgggaaaaatctttccatgggaggcataagcgtcgacatttctgtctactgatgatgatggcgaagaatgaatgcaggtgagtctgctggcgagtgagtgaatataccttattcactgtttctccccagtagaaaaaaaaagtctctaaataaaaaaatgggtcaaattaggtatagaagtaagcaagggtttgtaaatttgaaaaaaaaaaaacttggttttgtcgtctgggtattggaattaaatactaccttgtccctcatttgcctttgatgaggataaacatgaattagtctctccttctcc

SEQ ID NO: 148842 - DNA, 414 bp, Arabidopsis thaliana columbia
caacactcttgaaaacagagccatggaacattctctcatcatcctcctcttcaccgtcctcctcctcctcaccaccactcccggaatcctatctcagccctctccagccgtcgctccggccccaccaggacccacaaacgttaccaaaatcctagagaaagctggtcaattcaccgtcttcatccgactcctcaaatccactggagtcgctaaccaactctacggccaactaaacaactccgacaatggaatcactatattcgcaccgagtgattcctcgttcaccggtctcaaagccgggaccctaaattcgttaaccgatgagcaacaagtagagcttattcagtttcatgtcataccaagttacgtctcttcctcaaacttccaaacaataagtaaccctctccggactca

SEQ ID NO: 148843 - DNA, 419 bp, Arabidopsis thaliana columbia
aacacactctgagtcttgaaggtcaacaacgtcgagaataatggcatcatctctttgtgcttcttctgccatcgctgccatttcttctccaagtttcttgggtggtaagaaactgaggctgaagaagaagttgactgttccagctgtgtccaggccagatgcgtcggtgcgcgccgtcgcagctgatccagatagaccaatctggttcccgggaagcactcctccagagtggctagacggtagcctccctggtgacttcggatttgatcctcttggtctttcatcggacccggacagtctaaaatggaacgtacaagccgagatagtccactgccgatgggctatgctaggagccgccgggatattcatcccagagttcctaacgaagatcggaatcctcaacacttcgtcatggtaca

SEQ ID NO: 148844 - DNA, 392 bp, Arabidopsis thaliana columbia
acaagatccattatctgagtcaagatccgaccagatcccggagacccgtcggagacgacccatcaaagttcatcttgcagtctattccggtttgctcttgatcgctttgtacgtcactctcatcgtcacacacgacggctccaaggctgaaatagcgacggagtcacgtcctcgtatggccggcgtgtcggagaagagcaacgacggggtttggatatcatccgatgatgggaaagttgaagcgttcccgtggaacaatactattttgtcgtggcaacgcacggcgtttcatttccagcctgagaaaaattggatgaacgatcctaatggtccattgttctataagggatggtaccatttcttctatcaatacaacccaaatgcagctgtgt

SEQ ID NO: 148845 - DNA, 407 bp, Arabidopsis thaliana columbia
cttgaatttttcaagaacttaagaaaaagacatctttaatggcggccatgaactcgagtgttctcacttgcagctacgcaattgctggctctggctcggtagagcttaaccagaaagttggtttggtgaattcatcagttgggtttggtcagaagaaacagatgattatgcctgtgatcaaagctcaacgcgttgttggtgatgatgttgatggatctaatggaagacgatcagccatggttttcttagcagctacactcttctccactgctgctgtttctgcttctgctaatgctggcgtcattgacgaatacctcgagaggagcaaaaccaacatagaacttaatgataagaagagattggctacaagtggagcaaactttgcgagagcattcactgttcaattc

SEQ ID NO: 148846 - DNA, 458 bp, Arabidopsis thaliana columbia
  unsure (1)..(458): unsure at all n locations
tcgatcccatcgcagtccgaataaaatatataaataaataaacacctatggcggaataactatcgaccagtgccatgtgagttaaatagcatttcgacgaagatgatagattaggcgtagaaagagactcagtcgatcgccgagatgtcacataatagtcccgcagcatttttccatatacccgcatagttaatcgtagcaaatccctaagcctacatncgacgagtggtgatgattccaacatatcgatctaggtggcgtgttcgaatccacggtcgtgcgagagagtgtagttgcgaaggttaaagacgcaatggagaagtttggatttttccaggcgattaaccatggggttccacttgatgtgatggagaagatgataaatggtattcgtcggtttcacgaccaagatccagaagtgaggaaaatgttctatacccgagacataaccaaaaagc

SEQ ID NO: 148847 - DNA, 410 bp, Arabidopsis thaliana columbia
caacgaagaagcttcagtgccaacgtattggctgcaacgccatgttcaccgatgacgacaatcctcaaggttcttgtcaatttcatgcttccgtacgtcttcttctctccccatctttaatcgattcttctctttcttttctaagtcttcgatagtttctgataaacccatagagtagcttttgaatttgattttatgatgtgaggttacgaatttcgatttttgatcatgagaagatgattacgcaagtgtttaattaggttttggattagctgattgattacatgtagatttcatttagttgtaagtaagtaagctttgaacacagctttgattgtctaattgtcaaattttaactaagttgtttgcttgcaacctatgaattctgtgagactgtgagcttattagaa

SEQ ID NO: 148848 - DNA, 421 bp, Arabidopsis thaliana columbia
  unsure (1)..(421): unsure at all n locations
tcnttctcttctctcattaattcttagagtttcacagtctcaagatttagatcactttctgccaattttccagattgatctctctaattatggcttccatgagtttcgccttgaatcgcttctctggactctcctctaaaaccaccttatcagctgacttcgatccatcctctcgccggagttttctaccgccgactagagttggacttaagatctcttccgccgccgaatcggagcctgatctcagtgtcactgtaaatggcctgaaaatgcccaatcctttcgtgatcgggtcgggtccaccgggtaccaactacaccgtcatgaagagagcctttgatgaaggttggggggccgtcatcgccaaaaccgtatctttagatgcatccaaagttatcaacgtgacacctagatatgctcg

SEQ ID NO: 148849 - DNA, 409 bp, Arabidopsis thaliana columbia
ctctggatttgggaaagcaactctgtcgatggatgaatctcttttcgaaacttctgggtgatatgctcaatgtgagtgaaattgttcttcgaatttgttgaatttcgtccattgtgtgaaattgcagacgcgtcttgtagtttgattgtgaaacttaattttgtaggcttctttgagttacttcgttggaattttggagttaggctttttacatgtttaatctttaatcgagtggttggtagaataagcggatctcactataatgctttttgatcatcgcaagcctcatgagattgtatacaacttgaagaagctttgattgatttgcatttgcaggttgattatctgtggaaaatgatggtcttcttagcatgatcaaggtgtctgacttgtgaagttttgtagatga

SEQ ID NO: 148850 - DNA, 167 bp, Arabidopsis thaliana columbia
gtttctttagtcttcaattcccgattacagctctggatcaggtggcactatccacagatcttcaggagcttttggtctaagcacaccttctctaaaaactccgctcccaatatcaagcccctctgccgttcgattttgatgtccgacatggtcatacaaagcaacgt

SEQ ID NO: 148851 - DNA, 391 bp, Arabidopsis thaliana columbia
cggacgcgtgggatcccgggatgattcaagtgtatctcggcaaagaaggagcattcgacattgatggtaacgaattgccacgtctcgtgtatgtatcaagagagaagcgtcctggttacgcacaccacaagaaagctggagccatgaatgcaatggttcgagtctctgcagtactcactaatgctccattcatgcttaatctcgactgtgaccattacatcaacaacagtaaagccataagagaatcaatgtgctttctaatggatccacagcttggtaaaaagctctgttatgtccaattcccacaaagattcgacggaatcgatcttaacgatcgatacgccaacagaaacatcgtcttcttcgatataaacatgagaggcttagatgg

SEQ ID NO: 148852 - DNA, 410 bp, Arabidopsis thaliana columbia
  unsure (1)..(410): unsure at all n locations
gaagaattaaacacaaaaatgtgggttaaagttttctcttttttaatccttatgataacaatggtggttattggtgttagcaaagaatattgtgatgacaaacagtcatgtcaaaactttttgttggagcttaaggcgggttcatcgtcactctcggagattagacgtcgtgacttattgatcatcgttttgaagaattccgtacggaggatcgacatggttatgattggtgtgatggatgatacaaaacaacatgaggagatggagaatgatttgcttggtgtgaaggaggacacaaaactatttgaggagatgatggagtcgacaaaagataggatgatccgttcggtggaggaactcttaggaggagaatttcctaatcgtggatcttacgagaacgtncacacttg

SEQ ID NO: 148853 - DNA, 375 bp, Arabidopsis thaliana columbia
ggcttcctctatgctctcttccgctactatggttgcctctccggctcaggccactatggtcgctcctttcaacggacttaagtcctccgctgccttcccagccacccgcaaggctaacaacgacattacttccatcacaagcaacggcggaagagttaactgcatgcaggtgtggcctccgattggaaagaagaagtttgagactctctcttaccttcctgaccttaccgattccgaattggctaaggaagttgactaccttatccgcaacaagtggattccttgtgttgaattcgagttggagcacggatttgtgtaccgtgagcacggtaactcacccggatactatgatggacggtactggacaatgtggaa

SEQ ID NO: 148854 - DNA, 413 bp, Arabidopsis thaliana columbia
cttctctctctggtagccatggcttcggctactttctctgtggccaaaccatctcttcagggtttttctgagttctcaggacttcgaaactcctctgctcttccctttgccaagagatcttcttccgatgagtttgtttccttcgtcagtttccaaacttctgcaatgagaagcaatggtggatacaggaaaggggtgaccgaggccaagataaaggtagccatcaatgggttcggtaggattggtaggaacttcttgaggtgttggcatggtcgtaaggactctcctcttgatgtcgttgtcattaacgacactggtggtgttaaacaagcatcacatctcctcaaatacgactcaactcttggaatctttgacgctgatgtcaaacccttcaggagactcagctctctctg

SEQ ID NO: 148855 - DNA, 317 bp, Arabidopsis thaliana columbia
aaagtaaccgaactcaaaagaaaattcattatttatggtccaagaccatacatttggatgaatgcaacttagaaaaattggttgaatagatagatagatggaaaagatcataactatacttaacaaaaaaatactaagaaaagtccacatgcggcgaaggttttttgttgctgtcggaaaaaggagaagtccaactcctagtaaaataggtcctggaagtggaatgaaagggatgatccatgaatattgatatgtatgttccataaaataaaaaatcctttttattttattcttaattttattttttcttattcact

SEQ ID NO: 148856 - DNA, 416 bp, Arabidopsis thaliana columbia
ttcattctcccaccattgaggtttaacttatacaaacagatctttttgaaattggattcatctaagaagcagactctgttttcatggctgtttacaataccaaactctgtttggcctctgttttcttgctcttagggcttctcttggcttttgacttgaagggtatagaagcagaaagtcttaccaaacagaaactggactcgaagatacttcaggatgagattgtgaagaaagtcaacgaaaacccaaacgctggatggaaagctgctataaatgatcgattttcaaacgccactgttgcagagtttaagcgtcttctcggtgttaaaccaacaccaaagaagcatttcttaggtgttcctattgtgagccatgatccatctttgaagctacctaaagcttttgatgctagaact

SEQ ID NO: 148857 - DNA, 407 bp, Arabidopsis thaliana columbia
caaaacaaaaacaagaatgggtagatccaacgagcaagatctgctctctaccgagatcgttaatcgtgggatcgaaccatccggtcctaacgccggctcaccaacgttctcggttagggtcaggagacgtttgcctgattttcttcagtcggtgaacttgaagtacgtgaaacttggttaccactacctcataaaccatgcggtttatttggcgaccataccggttcttgtgctggtttttagtgctgaggttgggagtttaagcagagaagagatttggaagaagctttgggactatgatcttgcaactgttatcggattcttcggtgtctttgttttaaccgcttgtgtctacttcatgtctcgtcctcgctctggttatcttattgatttcgctggttacaagc

SEQ ID NO: 148858 - DNA, 414 bp, Arabidopsis thaliana columbia
cccgaaagcaaagactgagagaaccaaggctccgatctaacaatgaggaagaggacgctcgtgtccgttttgttccttttctcgcttctgtttcttcttccagatcaaggaagaaagttacacgcgaatgcagaagagagttccgatgatgttacagatccaccaaaagttgaggagaaaattggtggtcacggtggtttatcgacggattccgatgtagttcatagagagtctgagtcgatgtcaaagaagacgcttcgcagtaacgcggagaagtttgagttccaagctgaggtttctcggcttatggacattattatcaactctctatacagtaacaaggacattttcttaagagagttatctccaatgcttttgatgccttggacaaaattaggttccttgcactcactg

SEQ ID NO: 148859 - DNA, 390 bp, Arabidopsis thaliana columbia
cctaaatcctcatcactcattctgatttcacaaagctaaacaaaaaaaggagagcgtatgctgagaagaagaggagaccaaatcaccaaacaaacaacaatggctgtctcaactatctactcaacacaagctctcaattcaactcatttcttaacctcttcttcctcctccaaacaagtcttcctctaccgtcgtctaccactaaccaaccgtagattcaacacactcatcacttgcgcacatgataccatcgtgatcggactagctgctgactctggctgcggcaaaagtacctttatgcggatgctcaccagcgtctttggtggcgctgctaagccaccaaaaggcgggaaccctgttttcaacacactcatcattcgacactaccac

SEQ ID NO: 148860 - DNA, 323 bp, Arabidopsis thaliana columbia
  unsure (1)..(323): unsure at all n locations
agagtccatcgattgttcacaggaaatgcttctaagtgtgtcttgtcttatctggttcgtggtggtgagtttgttacaaaaaaatctattttccctagttgagatgggaattgaactatctgttgttatgtggattttattttcttttttctctttagaaccttatggttgtgtcaagaagtcttgtgtactttagttttatatctctgttttatctcttctattttctttaggatgcttgtgatgatgctgttnaaaaaaataaaaaataaataaaatatattaattattaataataaaaaaaatattaaaaaatatntttt

SEQ ID NO: 148861 - DNA, 405 bp, Arabidopsis thaliana columbia
gctggggaaacttcgccggagattcatacgtcgtcgtcgtctttagtatctgtatcgtcaatggcgttgctgaagtctttcatcgatgttggctcagactcgcacttccctatccagaatctcccttatggtgtcttcaaaccggaatcgaactcaactcctcgtcctgccgtcgctatcggcgatttggttctggacctctccgctatctctgaagctgggcttttcgatggtctgatccttaaggacgcagattgctttcttcagcctaatttgaataagttcttggccatgggacggcctgcgtggaaggaagcgcgttctacgctgcaaagaatcttgtcatctaatgaacctatcttgcgagacaatgatgttttgaggagaaaatcattccatcagatg

SEQ ID NO: 148862 - DNA, 368 bp, Arabidopsis thaliana columbia
cggacgcgtgggtgaagatttagagaaggcatggcaggaatcggacctttgttcgaattccagtgtaggagtttgtaggggtgggaactttctcagcgcagcggacaggatcaaactttgaggggtagtaattgatctgttaaaagtacaaaccaaatgagaattttgattcccaagtaaaagacttacaatggtagctcaagtggtgtactaagacgtacctcctcatctctgtgcatgaagttcataaaaccttcatggtgattgttgtggtgagcacatttgggagcattgactggaagctgcatataattcggtccaaggcgatgtgtctgagtgtcaccataagcaaagatcctacactggag

SEQ ID NO: 148863 - DNA, 399 bp, Arabidopsis thaliana columbia
gtggaggtcttccacacctccagagcctggatttctcttacaattcaatcaacggaaccatcccagacagtttctccaacctttcatctctagtttcactaaatctcgaaagcaaccacctcaaaggcccaatcccagatgccattgatagacttcacaacctgacagagcttaacctgaagagaaacaagatcaatgggccaatcccagaaacaatagggaacatatctggaatcaaaaagcttgatctgtcagaaaacaacttcacaggtccaatcccgctctcactagtccacctggcgaagctttcttcattcaacgtcttctacaacaccctctctggtcctgttccacctgtcctctccaagaagttcaactcaagctcttttttggggcaca

SEQ ID NO: 148864 - DNA, 389 bp, Arabidopsis thaliana columbia
gaggatttctaatgcgagatctaaaaacatatctttccgtagcaccggtactaagtactctatggttcggttcgttagcaggtttattaatagagattaatcgtttatttccagatgcattaacatttccctttttttcattctagttattaacatcagaaaggggtgaaaaatttagagatacaatcaacaatcggggactaacccccccaccttttctaattagtagaataaattagaaaaggtgggggggggggggcatggtcgttaattcgtgggttcaggatccaatgaaattaggtatagaacgaatataagtgttgctagggaacctttcagatacttaaaaaaactacggtacaaagattttttatatagtttttacataa

SEQ ID NO: 148865 - DNA, 372 bp, Arabidopsis thaliana columbia
gaaagatgaaaatgcatcttattctctcgatagttttggcaattatactcgcttcctccgttgcagaagcttttctcgatgaaaaaactcaacaaagggtcaacggaatctgcaagcagacaatggataccagattttgcagtagtctcttgatcaagaacctgaatacttttcccgcaagtaacaaagaaatcatgaacgtgacagtaagcgaagctgaaaggttcgcggccaacacttatttcttcatcagcacgcttctcaggaatgctggagacgagaggcctgatcttcaagcgtgcgccgaagcttacgccattgtgaactcggcgttcacgaaagctgtaaccttcttcaagcaagcttactaca

SEQ ID NO: 148866 - DNA, 420 bp, Arabidopsis thaliana columbia
aaagagacggagagtgagagaagagagaaacatttcgagacaaatggccgccgccgctgctcgtcctctcgtcaccatccaaaccttggatggtgacatgtccaccgatcaatcctccaccgtcgtacttcccgacgtcatgacggcgccagttcgaccagacatcgttaacttcgttcacgcccaaatctccaacaacagccgtcagccatacgccgtatcgaagaaggccggtcaccagacctccgccgagtcctggggaaccggacgtgccgtgtctcgtatccctcgtgttcccggtggtggtactcaccgtgctggtcaagctgcgttcggtaacatgtgtcgtggtggtcgtatgttcgctccaaccaagatctggcgccgcttgcaccgtcgtgtcaatgtcaacatgaagcg

SEQ ID NO: 148867 - DNA, 421 bp, Arabidopsis thaliana columbia
cggacgcgtgggatattattaggagagacttttctttactggaacggaacagagccaaggatatgcatctcagatcctgaacttgcaaaaactatgttgtcgaacaagttaggtttctttgtcaaatcaaaggcaagacctgaggctgttaaacttgtcggctccaaaggacttgtctttatcgaaggtgctgattgggttcgccatagaagaatcttgaaccctgctttctccatcgataggctcaagatcatgacgaccgtgatggttgattgtacgctcaagatgttagaggagtggagaaaagagagcactaaggaagaaacagagcacccgaagattaaaaaggaaatgaacgaagagttccaaagactaacagctgatataatagcaacctctgcgtttggaagcagttacgtcg

SEQ ID NO: 148868 - DNA, 410 bp, Arabidopsis thaliana columbia
cggacgcgtgggatattattaggagagacttttctttactggaacggaacagagccaaggatatgcatctcagatcctgaacttgcaaaagctatgttgtcgaacaagttaggtttctttgtcaaatcaaaggcaagacctgaggctgttaaacttgtcggctccaaaggacttgtctttatcgaaggtgctgattgggttcgccatagaagaatcttgaaccctgctttctccatcgataggctcaagatcatgacgaccgtgatggttgattgtacgctcaagatgttagaggagtggagaaaagagagcactaaggaagaaacagagcacccgaagattaagaaggaaatgaacgaagagttccaaagactaacagctgatataatagcaacctttgcgtttggaag

SEQ ID NO: 148869 - DNA, 364 bp, Arabidopsis thaliana columbia
cggacgcgtgggatattattaggagagacttttctttactggaacggaacagagccaaggatatgcatctcagatcctgaacttgcaaaaactatgttgtcgaacaagttaggtttctttgtcaaatcaaaggcaagacctgaggctgttaaacttgtcggctccaaaggacttgtctttatcgaaggtgctgattgggttcgccatagaagaatcttgaaccctgctttctccatcgataggctcaagatcatgacgaccgtgatggttgattgtacgctcaagatgttagaggagtggagaaaagagagcactaacgaagaaacagagcacccgaagattaaaaaggaaatgaacgaagagt

SEQ ID NO: 148870 - DNA, 402 bp, Arabidopsis thaliana columbia
ctttatctctcttgcaatgaagctctctatgcgtttgatctcagctgttctcatcatgttcatgatattcgtcgccactgggatgggaccagtcactgtggaggcacgcacttgtgagtcgcagagccataggttcaagggtacatgcgtgagtgcatcaaactgcgccaacgtgtgccacaacgaaggctttgtcggaggtaactgccgtggattccgtcgtcgttgcttctgcaccagacattgctgatctacccattctcatgcataattcaagctttgatccatcgtcgtgtgtcacttctttcttatctaatcttccgtacagtaccatgaagtaccgtacattagtgtgttctcaataagtctttggatttgtgtgtttccggtttaaatgtaatg

SEQ ID NO: 148871 - DNA, 415 bp, Arabidopsis thaliana columbia
cacatacacaacttgaaacttcaaatagattactttcaaagaagagagagagaaagaaagatggcgaagaacatgaagtttccagtagtagacttgtccaagctcaatggggaagagagagaccaaaccatggctctaatcaatgaagcttgtgagaattggggcttctttgagatagtgaaccatggattaccacatgacttaatggacaagatcgagaagatgacaaaggaccattacaagacatgccaagaacaaaagttcaatgacatgctcaagtccaaaggtttggataatcttgagacagaagtcgaagatgtccactgggagagcactttgtacgttcgtcacctgcctcaatccaatctcaatgacatttcagatgtgtctgatgaatacaggacggccatgaaag

SEQ ID NO: 148872 - DNA, 350 bp, Arabidopsis thaliana columbia
tcttagcccttttaaaccataaccaaactattagtctactcatccaacgaggaccatgggggtaaattctcggacggcaaagctaatatcacgcgagctaggcgttaccagaattaccatccgtcggcaaatcatggtgttacgcagttctcagatctgactcggtctgagttccgtaagaagcacttgggggttagaagaggctttaaactttctaaagatgcccacaaggctcccatactatctatcgaagatatatcggagaaactctttacttggatggcagcttacctggtgactattgaaaccacccctttggtctttcagacccagaaggtactggaggattc

SEQ ID NO: 148873 - DNA, 427 bp, Arabidopsis thaliana columbia
ggcgacggcgttgaagaagaacagaaagaagagaggtcacgtcagcgccggacatggacgtatcggtaagcaccgtaagcatcccggagtcgtggaaacgcaggaggtatgcatcaccacaggatcctcttcgacaagtaccatccaggttacttcgggaaagttggtatgaggtatttccacaagcttcgtaacaagttcttttgcccaatcgtgaacctggacaagctatggtcacttgttcctgaagacgtgaaggcgaaatcgagcaaggataatgttccgttgatcgatgtgacgcagcatggtttcttcaaggttttggggaaaggtcatttgcctgagaacaaacctttcgttgtgaaggctaagcttatctctaagactgctgagaagaagattaaggaagctggtggtgctgttgtct

SEQ ID NO: 148874 - DNA, 337 bp, Arabidopsis thaliana columbia
atttccatggagctacacatttgcttgaaagaatggctttcaagagcacgttgaacagaactcattttcgtcttgtgagggaaattgaggctattggaggcaacacatccgcttctgcgtctcgagagcaaatgagttacactattgatgctcttaagacctatgtccctgaaatggttgaagttcttattgacagtgttagaaaccctgctttcttggactgggaagtgaatgaagagctactgaagatgaaggtagagatagcggaacttgcaaagaaccctatgggtttcctcttggaggccattcattctgctgggtactctggttcattggc

SEQ ID NO: 148875 - DNA, 392 bp, Arabidopsis thaliana columbia
gcaaaacaaagatcggagaagatgaagacgattctttcttccgaaacgatggacatccccgacagtgttaccatcaaggttcacgctaaagtgatcgaagtcgaaggacctcgcgggaagcttgttcgcgatttcaagcatctcaacctcgatttccagctgatcaaggatccagagactggaaagaagaagcttaagatcgattcgtggtttggaacacgcaaaaccagcgcctccatcagaaccgctcttagccacgtcgataacttgatctccggtgttaccagaggtttccgttacaagatgaggttcgtgtacgcccattttcccatcaacgccttcatcggcggtgacggaaagtctatcgagatctcgaacttccttggcgagaa

SEQ ID NO: 148876 - DNA, 409 bp, Arabidopsis thaliana columbia
ctctaaacttctctctttctttttttctcaaagcttttttccttctccctaaacgatgaagattttcgtgaagactctcagtggttcgaacttcgagatcgaagtaaaacctgcagataaggtttctgatgttaaaacggctatagaaactgttaaaggtgcagaataccctgctgctaagcagatgctgatccaccaaggaaaggttctaaaggatgagaccacattggaagagaacaatgttgttgagaacagtttcattgttatcatgttgtccaagaccaaggcttctccaagtggggcatcaaccgcatctgcaccagcacctagtgctacacagccacagacagtagctacacctcaggtttctgctcctactgccttagttccagttcctacaagtggaact

SEQ ID NO: 148877 - DNA, 369 bp, Arabidopsis thaliana columbia
cccacgcgttcgcaactgtccaaaacgcaactccttttaacggcgttgccccatccaccaccgtgcgagttacaatcgtccaatcctccaccgtctataacgatactcctgccactatagacaaagcggagaagtatattgtggaggcggcaagcaagggagcagagctagtgttgttcccggaggggtttatcggtggctatcctcgaggttttaggttcggtttagcggttggcgttcataacgaagaagggcgtgatgagtttcggaagtaccatgcttctgctattcatgttcctggccctgaagtagcaagattggctgacgtggctaggaaaaaccatgtgtacttggaatgggagccataga

SEQ ID NO: 148878 - DNA, 318 bp, Arabidopsis thaliana columbia
cctgcgtgtgcactgtaggtgaattatgctttttttggccgatcggatacgagttcatgaatatgtgattgataagaagatgccgcagaatctactggaggaaagcatacgaccttcgtggacgatgagaagggcagcgcgtgtggctacgtaagtagggtgttacgacctgctggtgttgatgatgggatcggcggggctgctatgtatgagaaagtgcgtgccggttatgatcatcggatggctgaagatcttcacgacggaggagattgtgcgaccgttcaagatgacaagggagcagctggattgacagtctat

SEQ ID NO: 148879 - DNA, 403 bp, Arabidopsis thaliana columbia
cggacgcgtgggatattattaggagagacttttctttactggaacggaacagagccaaggatatgcatctcagatcctgaacttgcaaaaactatgttgtcgaacaagttaggtttctttgtcaaatcaaaggcaagacctgaggctgttaaacttgtcggctccaaaggacttgtctttatcgaaggtgctgattgggttcgccatagaagaatcttgaaccctgctttctccatcgataggctcaagatcatgacgaccgtgatggttgattgtacgctcaagatgttagaggagtggagaaaagagagcactaaggaagaaacagagcacccgaagattaaaaaggatatgaacgaagagttccaaagactaacagctgatttaatagcaacctctgcgt

SEQ ID NO: 148880 - DNA, 405 bp, Arabidopsis thaliana columbia
caaactctgaaatcgttctttcaaatctctcaatcgggatcaagatgcagatctttgttaagactctcaccggaaagactatcaccctcgaggtggaaagctctgacaccatcgacaacgttaaggccaagatccaggataaggaaggcattcctccggatcagcagaggcttattttcgccggaaaacagctagaggatggccgtacgttggctgattacaatatccagaaggaatccaccctccacttggttctcaggctccgtggtggtatgcagattttcgtcaagaccttaacgggaaagacgattactcttgaggtggagaggtctgacaccatcgacaacgtcaaggccaagatccaagacaaggagggtattcctccggaccagcagaggttgatct

SEQ ID NO: 148881 - DNA, 335 bp, Arabidopsis thaliana columbia
cgagcaataatgagggtttctcaatctctaatcccttttgccataattgctttggtcctttcctttgtcaatgcttatgatccaagtccactccaagacttctgtgttgccattgatgacctaaaaggcggttttgtaaagacccggagcgagtcgatgcaaaagattttttcttctcaggtctcaatgtgcccgggaacaccaataatcaagttggctctaatgtgaccactgttaatgttgatcagatccccgggctaaacaccatgggaatatcattggtccgcatagactacgcaccgcatggccaaaatccaccttacacgcaccctcgt

SEQ ID NO: 148882 - DNA, 407 bp, Arabidopsis thaliana columbia
aaaataagagagagagagagagaaacaggatcattcattatgcccgccttatctcactacagatcagtatcatctctaccgtccgttgaccgatcattccttctcatccaacgactcaggatccacggcagctcttcttccttccctgaatcttctccttctgcgtctattctctccggcgcagatccgttgaagtgtacggtctctggtggatctcttgctaaatggatcaccgggatttcagctggatccgccttagggtttctctattggtcctctggttcttctgattccatctctggtttgtttggtgggagtaatttattgtccttcgctgatagttcaacgccttctgtttgtggtgtaaaagtcggcgatctgaaaccgagatcgtttattccgaaatt

SEQ ID NO: 148883 - DNA, 380 bp, Arabidopsis thaliana columbia
cggacgcgtgggatattattaggagtgtacttttctttactggaacggaacagagccaaggatatgcatctcagatcctgaacttgcaaaaactatgttgtcgaacaagttaggtttctttgtcaaatcaaaggcaagacctgaggctgttaaacttgtcggctccaaaggacttgtctttatcgaaggtgctgattgggttcgccatagaagaatcttgaaccctgctttctccatcgataggctcaagaacatgacgaccgtgatggtttgttgttcgctcaagatgttaggggagtggaggaaagagagcacttaaggagaaacagatcccccggaagattaaaaaggaaatgaacgaagagttccaaagactaaca

SEQ ID NO: 148884 - DNA, 435 bp, Arabidopsis thaliana columbia
  unsure (1)..(435): unsure at all n locations
ggcttcagcatcagcgacagctactcttctcaaacccaatcttccgccgcataaaccgaccatcatcgcctcctccgtatctccgcctcttcctcctccacgtcgcaaccacctcctccgccgcgatttcctctccctggcggcaacatccacgcttctaacacaatcgattcagtttctagctccggcgccggtctccgccgctgaagatgaagagtatatcaaagatacgtcggcagtgatcagtaaagtaaggagtacgctttcgatgcagaagacagatccgaatgtggctgatgcggtggcggagctgagagaagcgtcgaattcttgggttgccaagtaccggaaagagaaagctcttctcggaaaagcttctttccgggatatatactcggcgttgaatgctngttcaggtcattatgtgagttttgg

SEQ ID NO: 148885 - DNA, 404 bp, Arabidopsis thaliana columbia
ctactactcatattgcttatattttcctacaacactctctcaacaaaaaaacaaaaaaaaaagacgttctttctttgtttgtatttagaagaaaaatggctaccaattacaacgagaagcttcttcttaattatgttcccgtttacgttatgcttccgttgggagttgtgaatgtggaaaatgtatttgcggacccagaaacgcttgaaacgcagcttaaacgtctcaaagaagaagctggcgttgatggcgttatggtcgatgtttggtggggaatcatagaatccaaaggtcccaaacaatatgattggacggcctacaaaacgctgttccagctgatcgcacgtttgggactcaaaatccaagcaatcatgtcttttcaccaatgtggtggaaacgttggc

SEQ ID NO: 148886 - DNA, 424 bp, Arabidopsis thaliana columbia
tacaaaacacaactttcatatataacaaaaaaagttatagaaatggccaaagacgtggaaggacctgagggatttcagacaagagactacgaagatccgccaccaactccgtttttcgatgcggacgagcttaccaagtggtctttatacagagccgtcattgccgagttcgtagccactctcctcttcttgtacatcaccgttttaactgtcatcggttacaagattcagtccgacacaaaagccggtggagttgactgcggcggcgtcggaatccttggcatcgcgtgggcttttggtggcatgatcttcatccttgtctactgcaccgccggtatctcaggtggtcacataaaccctgcggtgacgtttggtttgttcttagcccggaaggtatcgctgattagggcggtgcttacatggg

SEQ ID NO: 148887 - DNA, 366 bp, Arabidopsis thaliana columbia
aaatgcggaagttaacggcggttaattcattactgaaacggaacaattatctttttccgcgccatggctcctcacaaacagcagctcagagaacatcctccgtccgcgagaccgaaaccgaaacaaaacttccgaaaatgcccccgttcaatcattcttcgccgccttacgacggtccatctacggcagagatcatcgcatagcggcgagagttcctcagccccgctctctatcacttctacaacacacccttaaacattgtggaggcaaagatgcagtatgtgttcgacgagaatggacgtcgatatttagatgcctttggaggaatagcgacggtttcgtgcggccattgccacccggaagtag

SEQ ID NO: 148888 - DNA, 408 bp, Arabidopsis thaliana columbia
cacatttccatttttctctcttccataaatcccaaaagaaactaggaagaggagtaaataatatttgttttaaagaaatgattctccacaaaatggcgttcttggccgttattctcttcttcttgataagcagcagcagcctttgcgttcatagccgtgaaacgtttgcttgcgatacaaaggacgcagcaacagctacactgagattctgccagctttcagttcctataccggagagagtcagagatttgatcggacggttgacattggccgagaaagtgagcttgttagggaacactgcggcggcgataccacgtctaggaatcaaagggtactagtggtggtcggaggctttacacggcgtttcaaatgtgggacccggtactaagttcggtggggtttaccctg

SEQ ID NO: 148889 - DNA, 425 bp, Arabidopsis thaliana columbia
caacattcctaacactacactccaagcaactagcttctctactactcaatactatgtttctatcggcatctatggcttcttcttcacttcacgttgctatcttctctttaatcttcttattctcactcgccgctgcaaatgaagtcaccgtcggtggaaaatccggcgactggaagatccctccttcctcttcttactcattcactgagtgggctcaaaaagctcgcttcaaagtcggcgactttattgttttccggtatgaatctggtaaagactctgttttggaagtaacaaaagaagcttacaacagctgcaacaccacgaaccctttggctaactacactgatggagaaaccaaggtgaaattggacaggtctggtcctttctacttcattagtggagctaatggtcactgtgagaaaggt

SEQ ID NO: 148890 - DNA, 409 bp, Arabidopsis thaliana columbia
aatttttcatggagatcagatcttaggagaagccaacaagatctttgctggacttaaagttaacttggctgccaaggtttctgggattcactggttgtacaaccaccacagccacgctgcggagttgactgctggatattacaaccttttcaagagagatggttaccgtccgatcgcccggatgctctcaaaacactacggcattctcaacttcacttgccttgagatgaaagataccgacaatacagctgaagccctaagtgctcctcaagaacttgttcaagaggtactgagcaaggcatggaaagaaggtatagaagttgcgggtgagaacgcattagagacctatggagccaaaggttacaatcagattcttcttaacgcgaggcctaacggggttaacccaaac

SEQ ID NO: 148891 - DNA, 381 bp, Arabidopsis thaliana columbia
aagaaaacatacacaaatagcaaaacatggctaacaagctcttcctcgtctgcgcaactctcgccctctgcttcctcctcaccaacgcttccatctaccgcaccgttgtcgaattcgaagaagatgacgccagcaaccccgtaggtccaagacagagatgccagaagtagtttcagcaatcacaacacctaagagcttgccagagatggatgagcaagcaaatgaggcaaggacgtggtggtggtccttccctcgacgatgagttcgatttcgagggcccccagcagggataccagctactccagcagtgctgcaacgagcttcgccaggaagagccagtttgcgtttgccccaccttgaaacaagctgccagggcagtta

SEQ ID NO: 148892 - DNA, 387 bp, Arabidopsis thaliana columbia
  unsure (1)..(387): unsure at all n locations
caagaacccaaagatctctctctatttgtttgccttcttctttctttctgactcaaaccctcaaatcaattctcgcgattaagcaaaaccctagatttattctactcttcgaagtcgatttcaatggaaggttcctcgtcagccatcgcgaggaagacatgggagctagagaacaacattctcccagtggaaccaaccgattcagcctccgacagtatattccactacgacgacgcttcacaagccaaaatccancaggagaagccatgggcctccgatcctaactacttcaagcgcgttcacatctcagcccttgctcttctcaagatggtggttcacgctcgctccggtggcacaatcgagatcatgggttttatgcaggggtaa

SEQ ID NO: 148893 - DNA, 420 bp, Arabidopsis thaliana columbia
cgagcgattcgataccagttaccgtcaccgagatttagagctcctagatgcgaatcatcggaaccgattaagcagattcagatccagcaacgaccaagaggtggcgatttagccgagaacgggaagatcgtgctccaaccaaggctttgcacgctgagatcttatggatctgatatggtcatcgctaaaaaggacggcggagatggtggaggaggaggatctgatgttgagttagcgtctccgttttttgagacgcttacggattacatagagagttcgaagaagagtcaggatttcgaaaccatctccggtagactcgccatgattgtatttgcggcgacggtgacggaggagattgttacggggaactcgttgtttaagaaactagatgtggtaagattgagtgaagctattggagct

SEQ ID NO: 148894 - DNA, 422 bp, Arabidopsis thaliana columbia
gccggatctagatctacgctcaaacgaacatcgagtattcctgattttgagcctgttaagtctctgcgttcgactttgattctgcagccaaaagccggatctccattgctgatgctgattgcagaagagtatggttgtcgtatttacaacccagaagatggtagggtttacgagccgaagagtgacttttcagggtatcgattcctgggaagctcaggtaagtggtttctggtggtagattctcgaatgaaactctatattatagatgtatttagcgagaagaggatcgatcttccaccactagaatcatttaagggtagccattttaagatttggcgtgaaggagaggagaatgtcaagcatatggtaatggatgatgaggatccattttgtgatgaatttcctcatgctgccgaagatct

SEQ ID NO: 148895 - DNA, 429 bp, Arabidopsis thaliana columbia
gaaaaaatgccggcggcgaagaggactcccaaggttaaccgtaaccctgacctaatcaggggagttggaaaatattcgaggtctcagatgtaccacaagagaggtttgtgggctatcaaggccaagaacggtggcgttttccctcgtcacgatgctcagccaaaggtcgacgctccggttgagaagcctgccaagttttatccggcggaagacgtcaagaagccgcttgttaacagacgcaagcctaagcctaccaagctaaaagccagcatcactccaggaactgtgttgatcattcttgctggtagattcaagggtaagagagttgtcttcctcaagcaactttcttctggtttgcttcttgtaacaggaccattcaagattaatggtgttccattgagacgtgttaaccaagcctatgtgattgga

SEQ ID NO: 148896 - DNA, 355 bp, Arabidopsis thaliana columbia
cggacgcgtgggaatattattaggagagacttttctttactggaacggaacagagccaaggatatgcatctcagatcctgaacttgcaaaaactatgttgtcgaacaagttaggtttctttgtcaaatcaaaggcaagacctgaggctgttaaacttgtcggctccaaaggacttgtctttatcgaaggtgctgattgggttcgccatagaagaatcttgaaccctgctttctccatcgataggctcaagatcatgacgaccgtgatggttgattgtacgctcaagatgttagaggagtggagaaaagagagcactaaggaagaaacagagcacccgaagattaaaaaggaaatg

SEQ ID NO: 148897 - DNA, 443 bp, Arabidopsis thaliana columbia
  unsure (1)..(443): unsure at all n locations
ccggnncggaaattccggggcggccccacccgtccgatcgattttttccaacttcaataaaggggaaccaacgtaaccctaattttgctttctcctctttgttcagaaaattttccctttactctcaaattccttttcgatttccctctcttaaacctccgaaagctcacatggcgtctcgaaactatcggtgggagctcttcgcagcttcgttaaccctaaccttagctttgattcacctggtcgaagcaaactccgaaggagatgctctctacgctcttcgccggagtttgacagatccagaccatgtcctccagagctgggatccaactcttgttaatccttgtacctggttccatgtcacctgtaaccaagacaaccgcgtcactcgtgtggatntgggaaattcaaacctctctggacatcttgcgcctgagcttggg

SEQ ID NO: 148898 - DNA, 432 bp, Arabidopsis thaliana columbia
cttccaaagaaggttaaacaccaagggttttggttttggggttttaacatgcctggtttaaccgggggcctaagtgcaataagccatgcctcaatctcatgtgggacaatggcagggtgcttggctccatgtgcaacctatctatcaaaaggggggttggggccaccttcatgttgtgcaggagtcaaaactttgaacagtatggctaaaaccacaccagaccgccaacaagcttgcagatgcatccagtccactgcgaagagcatttctggtctcaacccaagtctagcctctggccttcctggaaagtgcggggttagcattccatatccaatctccatgagcactaactgcaacaacatcaagtgaaatggaagcttacgtcgtcgtttttggcgtaagagtatggtttaccagaagtactagaataaa

SEQ ID NO: 148899 - DNA, 398 bp, Arabidopsis thaliana columbia
cggacgcgtgggtccaaaacacacccactcttacgcacacacacaaagacaatgtctcctttcaaaatattcttcttcacgactcttctcgtggcggcgttttcagtgtcggctgctgatttcaacactgacgtctacgtatcttgtggaaatggccgtgggaagatactcaacaacggccagcttcttactctctccttagacaaatcctctggttccggttttcaatccaaaacagagtatttgtttggaaagattgatatgcagattaagcttgctcctggtaactctgcaggaacagtcacaactttttacctaaaatccgaaggatccacttgggatgagactgattttgagttcttgggtaatgtgagtggagatcctgatactttacacac

SEQ ID NO: 148900 - DNA, 383 bp, Arabidopsis thaliana columbia
gttcatcttccggtagatctgccgccaaattaggcaaccgtaaccccaggcttccttctccttcacccgcgcgtcacgccgctccatgtagctacctcctcggccgcgtcgccgagtacgcgacctcttcacctgcaagctcagctgcgccatcttctgctcctgctaaggatgctgcgaagaagacctatgactacggtggcacaggtgcgaacgggcgagatcgccatgtcacaggcgccattgtcgatgtgagatttgaggatcacgaaggattgccaccaatcatgacatctctcgaggtgcaggatcacccgacaaggctagtgcttgacgtgactcatcacttgggtcagaatgtcgtcaggaccattgctatggat

SEQ ID NO: 148901 - DNA, 424 bp, Arabidopsis thaliana columbia
aaatcatcaacttaatcgtttctctcaaatttagggttttctcttttctcgaaagtcttgcggttttctgaatcatctctatctggtttgagggtttcgtttgatatctggagaaaggggtttctggaaacaaggagttcataattcgcgatcttgatctattatcttcatttatatataaaagcgtgaatgagattatgatggagtcgaaaggtggtaaaaagaagtccagcagtagtagttccttattttacgaagctcccctcggttacagcattgaagacgttcgtccaaacggtggaatcaagaaattcaaatcttctgtctactcaaactgctccaagaggccatcctgagtaccagcgtgcaccgatcttcataatatagttatagctttctttactttccagtttataattttctt

SEQ ID NO: 148902 - DNA, 348 bp, Arabidopsis thaliana columbia
agacattctcgtgagggttcattctgaatgtctaacaggggacatatttgggtctgcaaggtgtgattgcgggaaccagctagcactctcgatgcagcagatcgaggctactggtcgcggtgtgctggtttacctacgtggacatgaaggaagagggatcggtttaggacacaagcttcgagcttacaatctgcaagatgctggtcgagacacggttgaagctaatgaggaattaggacttcctgttgattctagagagtatggaattggtgcacaggtattaaccaagatcacattatcatccaaaaaagacaacaattttttttccgggtattttactaaatcttc

SEQ ID NO: 148903 - DNA, 430 bp, Arabidopsis thaliana columbia
  unsure (1)..(430): unsure at all n locations
cacactcacaaattaaaaagagagagttagagagagagacagagagagagagagattctgcggaggagcttcttcttcgtagggtgttcatcgttattaacgttatcgcccctacgtcagctccatctccagaaacatgggtgcaggtggaagaatgccggttcctacttcttccaagaaatcggaaaccgacaccacaaagcgtgtgccgtgcgagaaaccgcctttctcggtgggagatctgaagaaagcaatcccgccgcattgtttcaaacgctcaatccctcgctctttctcctaccttatcagtgacatcattatagcctcatgcttctactacgtcgccaccaattacttctctctcctccctcagcctctctcttacttggcttggccactctattgngcctgtcaaggctgtgtcctaact

SEQ ID NO: 148904 - DNA, 372 bp, Arabidopsis thaliana columbia
ggtttttcaagccaagggttcattttttacaacccatgagaattctttggccaaacacgtctaacatctttttgaattcaccccaaactcaaatcctaccctaaaattcggatttttcttcttcttgcttttctaagttaggatcgacatttttatcctccgaaagattcgtgcttttttctctctgtagattacgattggtttgtagatttaagaaaaacaaaaagatgagttttagggatgataatacggaagagggaaagaaatgatcttcggcgaccgttcttacacacaggaagttggtatcggatgggttcgagacaatctagtatgttggaatcgtctcaagttattcgagacagctcaatttct

SEQ ID NO: 148905 - DNA, 423 bp, Arabidopsis thaliana columbia
  unsure (1)..(423): unsure at all n locations
cggccccgtgggctggttccttctttggatcatcttcaacaaaaaaaagttacgatctttctttccgggtcatcggaatttgagctagcttagctaaagttccgatctttcctctctgggtcgtcggaatttgagctttttaaaatcatgggaaattgttttgccaagaaccatggattgatgaagccacagcaaaatggtaataccactagatcagttgaagtaggagtaaccaaccaagatccaccgtcgtatactccacaagcgagaaccactcagcagccggagaaaccaggttccgtgaatagtcaaccaccaccgtggagggcggcggctgcagcaccaggactaagtcccaagaccaccactaagagcaattcaatactagagaacgctntcgaagacgtgaagctctnttacaca

SEQ ID NO: 148906 - DNA, 428 bp, Arabidopsis thaliana columbia
accgaacacttttttttcttttgcaataaaccaaaaaaagttaaaaattcaaaaacttaattactaagcaaaagtgtgcacgaagaacaaagcgacgcatccgattttatttgtttgataagttcgtgtcgtcttcgtctctctaacccaattctgtggtgtctgaagaaagcagaatcaaatccatgtctttcagaggacttagcaggccaaatgcaatatctggaatgggtgttgcagatgagagcaaaaccacatttctagagcttcaaaggaaaaaaactcatcgctatgtggtcttcaagattgatgaatccaaaaaagaagttgttgttgagaaaactggaaatcctacagagagctacgatgatttcttagcttcacttcctgataatgactgcagatacgctgtttatgactttgatttc

SEQ ID NO: 148907 - DNA, 398 bp, Arabidopsis thaliana columbia
ctgttcgagttgtcaggtctcacaaggagaagcgttctgcatacgcccctgaggaaggagtgagatatgatggggtttacaggattgagaagtgctggcgcaaagttggagtacagggttcttttaaggtctgtcgttacctgttcgttagatgtgacaatgagccagctccatggaccagtgatgagaatggagatcgtccaagacctatccctaatattccagagcttaatatggccaccgacctgtttgagagaaaagaaactccatcatgggattttgatgaaggtgagggttgttggaaatggatgaagccgccacctgcaagtaaaaagtcagtgaatgttttggctcctgaggagaggaaaaatttgaggaaagccataaaggcggcacac

SEQ ID NO: 148908 - DNA, 424 bp, Arabidopsis thaliana columbia
atggcgctctcctctttcaatctctcttctctattattcctcctcttcttcactccttccgttttctcgtattcgtatcaaccttctctaaaccctcatgaaacttctgctacaagtttctgcaaaaacacaccatatccagatgcatgttttacctccttaaaactatccatctccatcaacataagccccaacattctctctttcctcctccaaaccctccaaacagctctttccgaggctgggaaactcaccgatctcctttctggcgctggggtctccaacaacctagttgagggacaacgtggctctcttcaagactgcaaagatcttcaccacatcacttcttctttcttgaaacgatcaatctccaagatccaagacggtgttaacgattcacggaaactagccgacgctagagcgt

SEQ ID NO: 148909 - DNA, 418 bp, Arabidopsis thaliana columbia
gaagaatgggacctcgcttgtgaatggggctcatgacacttccaaacttgcaggattattggagaactttattaagaagtatgttcagtgttatggatgtgggaatcctgaaactgagatacttatcactaagacgcagatgcttcagctgaaatgtgcggcttgtgggtttctctcggatgttgatatgagggacaagctaacgtcgtttattttgaagaatcctccagagcagaagaagtcgtctaaggacaagaagtcgatgaggagagctgagaaggaaagactcagagaaggtgaagcagctgatgaagagatgaggaagctcaagaaggaggctgctagtaagaagaaagcagcgaccacgggtacttcgaaagacaaagtgtcgaaaaagaaagatcattctccacctcga

SEQ ID NO: 148910 - DNA, 423 bp, Arabidopsis thaliana columbia
  unsure (1)..(423): unsure at all n locations
cttctctgagaaaaaacaacagatccgaattttatctttaatcagccggaaaaaatggagaaagcgatcgagagacaacgcgttcttcttgagcatctccgaccttcttcttcttcttcgcacaattacgaggcttctctatctgcttctgcttgcttggctggggacagtgctgcatatcagaggacctctctctatggagatgatgttgtcattgtcgcggcacataggactccactatgcaagtccaaacgtggcaatttcaaggatacatatcccgatgatttgctcgcacctgttttgagggcattgatagagaagacgaatctaaacccaagtgaagtaggtgacattgttgtgggtactgttttggcacctggatctcagagagccagtgaatgcangatggctgcgttctatgct

SEQ ID NO: 148911 - DNA, 421 bp, Arabidopsis thaliana columbia
gtcgaatgcacattggtgtagcgcaaaatccaatgcatgtgcagtatgaagatcacggtttgcaccatatcgacaatgaaaacagtatgatggatgaccatgctgatggtgggatggatgaaggagtggagacagacattccttctcaccctggaaactcagctgataatcgtggtgaagttgtagaccgtggaattgaaaatggagatcaattgacattgtccttccagggacaagtttatgtttttgaccgtgtctcgcctgagaaggttcaagctgtgcttttgttacttggtggaagggaagtaccacatacactcccaacaaccctaggatcaccttatcagaacaataggggtctatctggtactcctcaacggcttaacggttcgcagcggttagcttttttgctcaggtttag

SEQ ID NO: 148912 - DNA, 372 bp, Arabidopsis thaliana columbia
cgaatccggtcgcccacgcgtcgaacattctttctagactgagaaatcaccatgggagtcgctgtcttcatcctcagattctatacaatcattttccaaacacgtcctctctcgcataaaaaccgatcaccaacgcgcgccggagtccgcaagtcaccaatcagatctctcatctctccgctcctcataaccacaccatatgtacgaattctgaagcgggcaagatatcaacgttagataccgatgaaaaaccagatctgaatctaatcgcagatcggatcagatccgatgaaaattcgctccgacagaatttcaaatcggaaatcctgccggcttgtttacgctggccagtcacataacatctcgcgcgag

SEQ ID NO: 148913 - DNA, 388 bp, Arabidopsis thaliana columbia
ctctctcgcttcttcaacgatcgcataaattccctctttgtctgctcgattcctgatctctagggtttgggttccggagacgaagggggtgtttcgtgtgtaattgagatattgagattattgctttgtaaaactcaaaatctatggcggtttctagcgccttcgttgttacaccgaagctggagaagctgttagcgaatcaccataatccaacgtattcttcttctccggccccgttggatgtaattgggatacgtgctcttccgatgaacaataggaacaagcgaggtctgatccagagagcgcgttgcgagatttctccgtctaataaggcagctagcatctcagctctcgagcagctcaagacttttgctattgaccgatacac

SEQ ID NO: 148914 - DNA, 410 bp, Arabidopsis thaliana columbia
ctcagatcgagtctcttaagaactcgatcattcgaaatcaactcgaagatcttcaattccatcaaactcaaggagtttcgtttctctgatttcttcgattgagataaggagtaaatggcgacagatgatttttttagcttgcagagagaatattggcgacaagtggcggaatccgatggtttcgatattgagagtgttcaaataccaccatctatgtatggaaggatcaatggactgattccccacaactgtgaaatcaatacgccgcttccttaccgtgtcttgggcaagcactatgctaagcttgggcttcatcgttacaatatgttgaaggggactaaattcgagttcggtcgcctaatgaaattcaacatgttacaaaactgtgtggcctctttctacataacttt

SEQ ID NO: 148915 - DNA, 167 bp, Arabidopsis thaliana columbia
tccggccaggactcctttacaaattctaacttgcagttatgggtaaagagaagtttcacattaacattgtggccatgggtcatgtggattctggaaaatcgaccacacctggtcacttgatctataagctgggtggtattgacaagcgtgtcatcgagaggttcgag

SEQ ID NO: 148916 - DNA, 422 bp, Arabidopsis thaliana columbia
  unsure (1)..(422): unsure at all n locations
ggtgcttcttatgattatggtgacaacaaaggatttagctcatatccctctgagggtaagcagatgtcagggacggttccgtcttcgataccggtttcgtatggtagctttcaaggaactactaagaagattgatattccgaatatgagagttggtgttatcattggtaaaggtggagagactattaagtatcttcagcttcagtctggagctaagattcaggttactagagatatggatgcagaccctaattgtgctactaggactgttgacctaactggtacccctgatcagatctcaaaggctgaacagttgatcactgacgttcttcaagaggctgaggcaggcaatacagctggttcaggtggaggaggcngccgtaggatgggtggacaagcaggggctgatcaatttgtatgaaa

SEQ ID NO: 148917 - DNA, 393 bp, Arabidopsis thaliana columbia
ctgccttcaacgtcatcaatggtggatcccatgccggaaacaagcttgctatgcaggagtttatgatcctccctgttggagctgcttctttcaaggaagccatgaagatgggtgtggaagtttaccaccacttgaagtctgtgattaagaagaagtacggccaggatgccacaaatgttggtgatgaaggtgggtttgcaccaaacattcaggagaacaaggagggtcttgaattgctcaagactgctatcgagaaggctggatacactggaaaggttgtcattggaatggatgttgccgcttcagagttctactcagaagacaagacctacgacttgaacttcaaagaagagaacaacaatggctcttagaagatttctggtgatgctctaa

SEQ ID NO: 148918 - DNA, 421 bp, Arabidopsis thaliana columbia
atttgttcttctgttggtggtggtgatctagttttcaaagaatcgattttgccaagtgggttcttcttgataacctttcttcttctttgaaatgggttcttctgtggagcagaacattcttgttactggtggtgctggctttatcgggacgcatactgttgttcaacttctcaaagatggttttaaggtttcgatcatcgataattttgataactctgttatcgaagctgttgatagagttagggagcttgttggtcctgatctctccaagaagctcgacttcaatctgggtgatctaagaaacaaaggggacattgagaaactattctccaagcagagatttgatgctgtgattcattttgcgggtcttaaagctgtgggtgagagtgttgaaaaccctcgccgctactttgacaataac

SEQ ID NO: 148919 - DNA, 402 bp, Arabidopsis thaliana columbia
gaagaaagatagagaaaaaaaatgggaggcaaaggtgtgatgatggtggcgatactttgcctttgggcactctctgcaacatctgaagcagtaacagaggctgagccaggtttgatgatgaacttctacaaggacacgtgtcctcaggccgaagacatcgtccgtgaacaagtcaaactcctctacaaacgccacaagaacaccgctttctcttggctccgtaacatcttccatgactgcgccgttgagtcatgtgatgcgtcgcttttgctggattcgacaagaagagagctaggagagaaagaacacgacaggagcttcggacttagaaactttaggtacatcgaggagatcaaggaagctctcgagagggagtgttctggtgttgtctcatgttctgac

SEQ ID NO: 148920 - DNA, 422 bp, Arabidopsis thaliana columbia
aaacgcaaaaacctattatcaaaagaactagggagaaatgactaatcccatgatcatggttatgctgttgttgtttcttgtgatgtcgactagagcagacgaagagctgattaagacagagtgtaatcacacagaataccaaaacgtatgcctcttctgtcttgaagccgatccaatctccttcaatatcgaccgtgctggacttgtcaacatcattatacactgtctcggatctcaacttgatgttcttatcaacaccgtcacgagtctaaagttgatgaaaggagagggtgaagcaaatgagaatgttctgaaagattgcgtcacaggctttgcgattgcacaattacgacttcaaggagccaacatcgatttgataacccttaattacgataaagcgtacgaattggtgaaaactgcgt

SEQ ID NO: 148921 - DNA, 383 bp, Arabidopsis thaliana columbia
cggacgcgtgggatattattaggagatacttttctttactggaacggaacagagccaaggatatgcatctcagatcctgaacttgcaaaaactatgttgtcgaacaagttaggtttctttgtcaaatcaaaggcaagacctgaggctgttaaacttgtcggctccaaaggacttgtctttatcgaaggtgctgattgggttcgccatagaagaatcttgaaccctgctttctccatcgataggctcaagatcatgacgaccgtgatggttgattgtacgctcaagatgttagaggagtggagaaaagagagcactaaggaagaaacagagcacccgaagattaaaaaggaaatgaacgaagagttccaaagactaacagctga

SEQ ID NO: 148922 - DNA, 387 bp, Arabidopsis thaliana columbia
cggacgcgtgggatattattaggagagacttttctttactggaacggaacagagccaaggatatgcatctcagatcctgaacttgcaaaaactatgttgtcgaacaagttaggtttctttgtcaaatcaaaggcaagacctgaggctgttaaacttgtcggctccaaaggacttgtctttatcgaaggtgctgattgggttcgccatagaagaatcttgaaccctgctttctccatcgataggctcaagatcatgacgaccgtgatggttgattgtacgctcaagatgttagaggagtggagaaaagagagcactaaggaagaaacagagcacccgaagattaaaaaggaaatgaacgaagagttccaaagactaacagctgatata

SEQ ID NO: 148923 - DNA, 399 bp, Arabidopsis thaliana columbia
cggccaaccttgtggttggaaaatttgtcaaagtgaagttcaatttttactacgaatcactttgtcccggttgccaggaattaatcgtcgatgacctaggtaaaatctttgactccgatctctcaaccatcactgatctcaagctgtttccatttggtaatgccgaactctccgataatctgactgtcacttgccagcatggtgaagaggaatgcaaactaaacgcccttgaagcttgcgcattaagaacttggcccgatcagaaatcacaatactcgttcatacggtgcgtcgaaagcgatacgaaaggctgggaatcatgtgttaaaaactctggacgtgagaaagcaatcaatgattggtacaatggtgatctttctagaaagctgatacttgggt

SEQ ID NO: 148924 - DNA, 420 bp, Arabidopsis thaliana columbia
gttttagatcgcggccggccgttcgtgttttagcggacgcgtgggcaagaacagactacttagtggctcctcctgacacagagatcatagatcatcttgagataccgtcgacgattccagattggataacagaagaagagattcaagtgtatgcggaaaagtttcaaagatctggattcactggccctttgaattactacagatccatggatatgaattgggagatattggcgccgtggcaagactccaaaatcgtcgttcctactaagtttatagcgggagacaaagatatcggatatgaaggacctaatggaacaatggagtatgtgaaaggagaggtgttcaagattgttgtgcctaatcttgagatagttgttattgaaggtggtcatcattttatccagcaggagaagtctgaac

SEQ ID NO: 148925 - DNA, 429 bp, Arabidopsis thaliana columbia
tctttctcttctcattcatttgttctttcttcagagaaaaacaaaaaacagagcatttttttttggtcaagagcaagaaaaaacagagcatacttttgcaaaaagcagagcttggagcgctttcttgtcatctaaaattcaaaggcagagacgatgggagatgtagttttgttcatagatgaaacatatttgaaatcgagttttaatcgctgtagaatctgtcacgaagaagaagctgagagctactttgaagctccttgttcttgttcaggaaccatcaagttcgctcacagagattgcatacaacgatggtgtgatgagaaaggaaacacaatttgtgaaatttgtctccaggagtataaacctggatacaccacaacttcaaaaccatctcgatttattgaaacagcagtcacaatcagagataat

SEQ ID NO: 148926 - DNA, 430 bp, Arabidopsis thaliana columbia
ctctactcacaacgcagagcttcaatttcttcctcgcagggattcggatcagttcaatttcaagtttctgaaccactcatggatcaggcggagctgagtatagagcaggtattgaaaagggacattccatgggagacttacatgaacactaagctggtttcagctaaaggtctccagctcttaaggcgctatgataaaaaacctgaaagtgctagggcacagttgctcgatgaagatggtccagcttatgttcatctctttgttagcatcttacgtgatatattcaaggaagaaactgtcgaatatgttttggctttgatttatgaaatgctctcagcaaacccaacacgagctcgattattccatgatgaatctttggcaaatgaggatacttatgagccttttctgaggttgctttggagggaaattg

SEQ ID NO: 148927 - DNA, 432 bp, Arabidopsis thaliana columbia
  unsure (1)..(432): unsure at all n locations
ctcacagactcacaccactccagtctccggcttaactaccaccagagacgattctctcttccgtcggttctatgacttcgattctcaacactgtctccaccatccactcttccagagttacctccgtcgatcgagtcggagtcctctctcttcggaattcggattccgttgagttcactcgccggcgttctggtttctcgacgttgatctacgaatcacccgggcggagatttgttgtgcgtgcggcggagactgatactgataaagttaaatctcagacacctgacaaggcaccagccggtggttcaagcattaaccagcttctcggtatcaaaggagcatctcaagaaactaataaatggaagattcgtcttcagcttacaaaaccagtcacttggcctncactggtttggngagtcgtctgtggtgctg

SEQ ID NO: 148928 - DNA, 430 bp, Arabidopsis thaliana columbia
ggaaccctcaaagaatcatattgaccgtcgatgacacacccattagagagtttaaaaactatgagtctctcggtgtcttgtttccaaagaacaagccgatgaggatgtacgcgagtttatggaacgcagacgattgggcaacaagaggcggtcttgttaaaactgattggtctaaagctccattcatggcttcttacagaaacattaagattgactcgaaaccaaactccaattggtacactcaagaaatggattcaacaagccaagctagactcaaatgggttcagaagaattacatgatctacaattattgtactgaccataggaggtttccacagggagctcctaaagaatgcacaacaggctcatagaatctcaaattatattctatttaattatctacacttcctctctttttttatgtgaaaat

SEQ ID NO: 148929 - DNA, 426 bp, Arabidopsis thaliana columbia
ggcggatcatctcttactctctctttctcaatctctctctctcaatctcatactgatcccaaacactatccatggattaccaaatctcactaatcctagccaccagcataagctccatcttcctcttgcttatcgtcttcaccgtcgttatgatcgtatgtcgccgtcgtcctccaatccaaaaccatcctcgccggaatcgtaacttccccgaccccgatcccgatctaaacacggaaacagtaaccgaaagcttcgatccatcaatctgtgaaatatccatggcggaactcactatagcaactaaaaacttctcatcggatcttatcgtcggcgaccgaagtttcggtcttgtttattgagctcaactcttaaaccgcgtcgtagtcgccgttaaaaagctcgatcacgacgctttacaaggat

SEQ ID NO: 148930 - DNA, 428 bp, Arabidopsis thaliana columbia
aatcacttcctctctctctctctttttcttatacaacactcaagaagcgagacacagaggagagagttagtcttcttctctgtttttgtctctttggctatatatattcaaacattgtgtgaacagaacacaaatcaacacaacacacacaactttgtgttctttaagttttgtttcagagatcaatggccgggactggattgtttgctgagattcttgatggagaagtatacaaatactacgctgatggtgagtggaaaacttcttcctcaggtaagagtgttgccatcatgaacccggccacgaggaagacacagtacaaggttcaagcatgcacgcaagaagaagtgaacgcggtgatggaactggcgaaatcagctcagaaatcgtgggcgaaaactcctcttttgaaaagagcttgagctttt

SEQ ID NO: 148931 - DNA, 437 bp, Arabidopsis thaliana columbia
cgtccgggcaactttatttttaacaatcctctttgtccactgtcctcttcctcatcctccgtgtcttctttcaccgtcgcaaccgcagccacaacaaccgtcttccaccggggccaaacccatggcccatcatcggaaacctccctcacatgggcactaagcctcatcgaaccctttccgccatggttactacttacggccctatcctccacctccgactagggttcgtagacgtcgtggtcgccgcttctaaatccgtggccgagcagttcttgaaaatacacgacgccaatttcgctagccgaccaccaaactcaggagctaaacacatggcatataactatcaagatcttgtctttgcaccttacggacaccgatggagactgttgagaaagattagttctgttcatctattttcagctaaagctctcgaagat

SEQ ID NO: 148932 - DNA, 416 bp, Arabidopsis thaliana columbia
ctcatcgaaagttcgaatctttcgtcatctgattagctttctcttagggttgatttcgatttcgatttagtgttctccatcaatggcgacacccatggttagttccgctggaggattactagcaatgctcaacgagcctcatcctgttttgaagcttcatgcgctctctaacctcaacaatttggttgaccaattctggcctgagatctccactagtgtccccatcattgagagtttatatgaagatgaagaattcgatctgcatcaaagacagcttgctgctttgctggtctctaaggttttctattacttgggcgagcttaatgattcgctgtcttatgccctaggagccggtcccttatttgatgtttcagaggattctgattatgttcatacgcttcttgccaaagcaatag

SEQ ID NO: 148933 - DNA, 443 bp, Arabidopsis thaliana columbia
ccacgcgtccgcggacgcgtgggatattattaggagagacttttctttactggaacggaacagagcgaaggatatgcatctcagatcctgaacttgcaaaaactatgttgtcgaacaagttaggtttctttgtcaaatcaaaggcaagacctgaggctgttaaacttgtcggctccaaaggacttgtctttatcgaaggtgctgattgggttcgccatagaagaatcttgaaccctgctttctccatcgataggctcaagatcatgacgaccgtgatggttgattgtacgctcaagatgttagaggagtggagaaaagagagcactaaggaagaaacagagcacccgaagattaaaaaggaaatgaacgaagagttccaaagactaacaactgatataatagcaacctcttgcgttggaagcagttacgtccgaagaatcgaa

SEQ ID NO: 148934 - DNA, 315 bp, Arabidopsis thaliana columbia
aatgaatccggtggaaaaccacggggccacagttctggtttgggcgccacctgttttggtagctatgattaacgacgcagatctgatcaaggctaagtacgatctgagctcactgaaaacggtgaggtgtggtggagcgccgctgagcaaggaggtgacggaagggtttctagagaaatatccgacggttgatatactgcaggggtatgctatgacggaatccaacggcggaggggctttcacgaattcagcggaggagagccggagatatggcacggcggggacgttgacgtctgatgtggaagccaagatcgt

SEQ ID NO: 148935 - DNA, 413 bp, Arabidopsis thaliana columbia
ccacccgtccgtccagatctattatttgattctccttcgttcattgtcaacgttttcttcttttggaatgatcacagttttttttgagaatttgttcatttttttttctcatatattgattcgagttctttcttcttgaatcttgttcttcatagatctagattttgttttttactctctagatctatagaactgttgaattcacttctttaatccatctctgtgttcttgagttcctatggtctaagtcaaactcaagttcaagatctgttgaatttggaatcttgctggtgaagttagagatgaattatttcccagatgaagtaatagagcatgtattcgactttgtgacatctcacaaagacaggaatgctatatctcttgtatgccaatcatggtacaagattgaaaga

SEQ ID NO: 148936 - DNA, 406 bp, Arabidopsis thaliana columbia
aaacgatggcgtcgaactcgcttatgagctgtggcatagccgccgtgtaccctggggttgtctcttcttccaaggctaaattcgtatccgccggagttccactcccaaacgccgggaatgttggtcgtatcagaatggctgctcactggatgcctggcgagccacgaccagcttaccttgacggttctgctcctggtgactttgggtttgacccacttggacttggagaagttccagcgaaccttgagagatacaaagagtcagagctcatccactgtagatgggctatgctcgctgttcctgggattttggtaccagaagcattaggatatggaaactgggttaaggctcaagaatgggcagcactaccagggggtcaagccacttacttgggaaacccagtccc

SEQ ID NO: 148937 - DNA, 423 bp, Arabidopsis thaliana columbia
aattttcacagagtaaagagatttttatacattggacccaaagtgcaattttgagggatgtttcgctggaagagtgcttctcaaaccgaacaagagcagaaagaggcagctctcagagaggcaaagatgaaagagcttaagactctcataggtcagctttctggaaggaattcactgtattgttcagatgcatgtctgaagagatatctggaagctaggaattggaatgtaggcaaagccaagaagatgctcgaggagacgctcaaatggagatcgagttttaaacccgaggaaatccgatggaatgaagtttcaagtgaaggtgagactggtaaggtttacaaagctggattccatgacaggcatggaagaacggttcttatactgagacccggcttgcagaacacaaaatcggtggagaac

SEQ ID NO: 148938 - DNA, 417 bp, Arabidopsis thaliana columbia
agcccttgcaaaccataaccaaaccattatcatcatcatctcttggtgacagaagagaagagttgaggaacagagaaaatggcagcacaagcacttgtgtcttcttcacttacctcctctgttcagacagctagacagatatttggctcaaaaccagttgcgtctgcctcacagaagaagagttcctttgttgttaaagctgctgcaactccacctgtcaagcaaggagccaacagaccattgtggtttgcttcatcgcagagtctctcttacttggatggcagcttacctggtgactatggattcgaccctcttggtctttcagacccagaaggtactggaggattcattgagccaagatggctagcatacggagagatcatcaacggacggttcgccatgttgggtgcagctgga

SEQ ID NO: 148939 - DNA, 447 bp, Arabidopsis thaliana columbia
gattttgagacaatttgccgattcctcgatcatttcatctgctgaataacaacagtgattggctcttctgattagcaagcttcttcttttcgaaatcgcatcactttggctgatcggtggattctacgaaccatgttcaatttctggggatcaaaagaacagcaacaaggacaatctcgtccttctccagaagcttctgcaacaccgtggtattcgccgtctcttgtcacctctcctagctcatcccggcctcaaacctcagggcagattccatcacatgtttcaccaggtgaagccgccggcattattgccattttaaaagacaaaagtgtggatgagcttaggaagcttctctctgacaaggatgcgtatcaacagtttctgcactcgcttgaccaggtcactattcaaaacaatatcagagaagagcttcgcaagaaacgttac

SEQ ID NO: 148940 - DNA, 461 bp, Arabidopsis thaliana columbia
gggaatcatagcctcggaggaagaggacgtgccagttgcggtggaggagagttactccggcaactacgtcgtcgtgtttgaccctcttgatggttcctccaacattgacgctgccgtctctactggttctatcttcggtatctatagccccaatgacgaatgcattgtcgacgactccgacgatatctcagctcttgggtcagaagaacaaaggtgtatagtaaacgtgtgccagccagggaacaacttgttagcagccggctactgtatgtactcgagctcggtcatcttcgttcttactctaggcaaaggcgttttctccttcacgctcgatccaatgtacggtgagtttgtcctcacgcaagaaaacattgagatccccaaagccgggagaatctactctttcaacgaagggaattaccagatgtgggacgataaactaaagaagtacattgatgatc

SEQ ID NO: 148941 - DNA, 184 bp, Arabidopsis thaliana columbia
tcagattacaagggagcagccagatgactatgcaattcaaaagtttgagcgtggtattgctgcccaagaagctggcgccttcacatgggaaatcgtcccggttgaagtttctggaggaagaggtaggccatcaaccattgttgacaaggacgaaagtcttgggaagtttgatgctgcaaaattg

SEQ ID NO: 148942 - DNA, 444 bp, Arabidopsis thaliana columbia
cccgtccgatcgttcggaacttggaaagcagcgtaatcggtaggtagtgatttgagttttggtgaggatgtctatggttgatgagcctttatccccgattgctgtgcttatcgacgagctaaaaaacgatgatattcagcgtagattgaactctattaaacggccttctatcattgctcgtgctcttggagaggagaggacaagaaaagagttgattccatttcttagtgagaacaatgacgatgacgatgaggtgcttttggctatggcggaagagttggggggttttattctgtatgtaggaggggttgagtatgcatatgttctgcttccacctttggagactctatccactgttgaggaaacttgcgcgagggagaaagctgtggattcactttgtagaaatggtgctcagattaagcagagtgacttggttgagcattt

SEQ ID NO: 148943 - DNA, 335 bp, Arabidopsis thaliana columbia
  unsure (1)..(335): unsure at all n locations
cgttcggagtnaagnaagatagagaaaaaaaatgggaggcataggtgtgatgatggtggcgatactttgcctttgggcactctctgcaacatctgaagcagtaacagaggctgagccaggtttgatgatgaacttctacaaggacacgtgtcctcaggccgaagacatcgtccgtgaacaagtcaaactcctctacaaacgccacaagaacaccgctttctcttggctcgcgaacatcttccatgactgcgccgttgagtcatgtgatgcgtcgcttttgctggattcgacaagaagagagctaggagagaaagaacacgacaggagcttctgac

SEQ ID NO: 148944 - DNA, 418 bp, Arabidopsis thaliana columbia
gtatttttagtagaaatacttatttttccaaaaatatttgtttgtgttgatgtatatataaaaaatctgcatcagtgttttgtctacattttctcttccattagtttcgttatctttttattttctctatctatctggatattattttttcacttggggatttggagaaacctctcctctctctatctatagccatggctgctttcacttgtacctctcgtcctccgatttctctccgctccgagaccagaatcgtatcctcatcaccatcggcttcttctctctcttctcggcggatgttcgccgtcttaccggaatcatcaggtttgagaatccgtctttctctctctccggcttcgttgacctcgattcatcaacctagggtttctcgattacgaagagccgtcgtctgtgaagc

SEQ ID NO: 148945 - DNA, 485 bp, Arabidopsis thaliana columbia
gactatgatgacttagcccagaggacacgagtgctcagcgaaatggctttaaagttcatgaagcttgccaaaaagttctcacttgcggtcgtgttactaaaccaggtgaccacaaagtttagtgaaggctcgtttcaactagcgcttgctttaggcgatagctggtctcattcgtgcaccaaccgagtcattctgtattggaatggtgatgagcgttacgcatatatcgataagtccccttcacttccttcagcttcggcttcatacactgtaaccagtagaggtctaagaaactcatcctcgagtagcaagcgagtcaagatgatgtaatgacacaccacgacacagtcacaaggacatgagtaagctttctccggtttagttttggttcagttcttgattccattaaactgcatgagtatttttcggcccaattgtttcataaagcccaaatgggcaaatattcggtacaaaagaaggtcata

SEQ ID NO: 148946 - DNA, 479 bp, Arabidopsis thaliana columbia
aagaaaatcaaagcagcagttatggccgacgtagttacaaagcaccccatggaagatgaggtgaagaagacggaggcgtctagtttggtggggaagctagagacagacgtggagatcaaggcttcggctgataagtttcaccacatgttcgctgggaaaccacaccatgtctccaaagcaagtccaggcaacattcagggatgtgatctgcacgaaggcgactggggcacagtcggctctatcgtcttctggaattacgtacatgatggggaggcaaaggtggcgaaggagaggatcgaggcggtggagccagataagaacttgatcacgtttagggttatagaaggtgatctgatgaaagagtacaagagcttcttgctcaccatccaagtgacccctaagcctggaggccctggaagtattgtgcactggcaccttgagtatgagaaaattagcgaggaggtagctcacccggaaac

SEQ ID NO: 148947 - DNA, 303 bp, Arabidopsis thaliana columbia
ggcccaacccacccgtcttttagactttgagaccagcgagaacgtatgtattggttacctcgatgacgtacgtaacagtagatccgttagaaggttcggcagagaatccctacacagactagccgagcgagaaccatgtctatcatgaccccagtggacaaaacatcccaattgtagtagtgtatccgagactgctgatctactcgcgaacattaccgttggggcaactcgatcttgaagacactatgggtctgtggttggacagcatcaacatctgtaaccaccttcgatcatggccggttg

SEQ ID NO: 148948 - DNA, 424 bp, Arabidopsis thaliana columbia
atctttgtgcttcctgcaaatagctctttgctgttgatctttctcctccatcaacaaacatgggtaagacacgtggtatgggagctgggcgtaagctgaagagactccgaattaaccagaggtgggctgacaagcagtacaagaagtctcacttgggaaatgagtggaagaagccttttgctggttcttctcacgctaaaagaattggtcttgagaaaattggtattgaggctaagcagcctaactctgctatccgtaagtgtgctagagttcagcttatcaagaatggaaagaagattgctgcctttgtccccaatgatggttgtttgaactacatcgaggaaaacgatgaggtcttgattgctggatttggtcgtaagggtcacgctgtgggagatattcccggagttagggtcaaggtcgt

SEQ ID NO: 148949 - DNA, 466 bp, Arabidopsis thaliana columbia
  unsure (1)..(466): unsure at all n locations
gaggaggaggatctagagttttaagagctagaggtagtagtagaggaagaggaaggggtgttttagtaattccccatgtagcttcagattttaggaactattcgacctcttcgttggattctcatgtaaatgataagagctttgagagtatgtttgtgaagccacttgnttttaaggaagtggaaaaaactgaagggataccgaaaagggaaaggggtaatgtaggaggaggaaaagatgctaattttggaaatgtgggtgtaagaaaggaaacagaacggtgtttgagtcagactgaggttgagaaggaggcgtggaagctgcttcgtggtgccgtggtgaactactgtgggttccctgtggggactgtagcggctaatgatccaggggatacgcagactttgaactatgatcaagtgtttattcgtgattttgttccttcggcgtatgcgtttatgcttgatgg

SEQ ID NO: 148950 - DNA, 437 bp, Arabidopsis thaliana columbia
gggattctcttactcaaacaataagtctgattacataaccggtgatattaaaaccgcggttgactctcacgcgttccttctcaagtggttccaaatgtttcctgagtttcaatcaaatccttttttcatctctggagaatcttacgccggagtttatgtcccaactcttgcttcagaagttgtcatagggaacaaaaatggagtaaagccggctcttaacttcaaggggtatttggttggaaatggagttgcggatccgaagtttgatggaaatgcttttgtcccgtttgcacatgggatgggactaatctctgatgaactctttgagaacgttacaaaagcttgcaagggaaatttctatgaaataagaggactcgagtgcgaagaacagtatacgaaagttaacgatgatactaaccagttgaatatatacaaca

SEQ ID NO: 148951 - DNA, 485 bp, Arabidopsis thaliana columbia
ctcttgcatggtcggtcgttgcttcagttcaaggacgtgtacctcttgctagcgagggattaagtttagtggtgagttcatacaatggtgaagatgtactagtcgcttttggtggatacaatggacgttacaataacgaaattaatcttcttaaaccaagccacaaatcaacattgcaaacaaagactctggaagcgcctttgccaggtagtctttctgctgttaataatgccacaaccagagacattgagtctgaggttgaggtgagccaagaaggcagggtacgggaaattgtcatggacaatgttaaccctggatcaaaggttgaaggaaacagcgaacgcattattgcgactattaaatctgagaaggaagagctggaggcatcactgaacaaagagaggatgcagactctccaactaaggcaagagttaggagaagcagaattacgaaacacagatttgtacaaggaacttcaatctgtt

SEQ ID NO: 148952 - DNA, 375 bp, Arabidopsis thaliana columbia
aaaaaaaactcttcttttttctatctttcacgcgttgaagattcttgattttctttcttctccttccttacacgaccactgatatgtgtcggtgactgaaaccatctgttctcttttgcctctgatttatcgatatgttttaaagaaaaacggtgtttgaaacttttgtaatttaaggttcatcaaatactcagatcttgtctgagaaataagctgaatctgaaaatgggttgttaaatcatcttttgtatcttctatgggttcacagttagctatctagtacagttacggccaagtctcttagtgaaaacactaatatcacacagtagatctggatgaccagaccaatttgtctacagcacacatcatgacata

SEQ ID NO: 148953 - DNA, 365 bp, Arabidopsis thaliana columbia
cttttaacacttgttcttttaaggcaaaaaggctcgagccacagagatctgagtttctcttcttcgagatctgatcgccgaatctcataatctcccatcgaagcagaatggagacttttctattcacatctgagtctgtaaacgagggacacccagacaagctctgtgaccagatctctgatgcagtcctcgatgcctgccttgaacaagaccctgacagcaaagttgcttgtgagacatgcaccaagaccaacatggtcatggtctttggtgagatcactaccaaagctactgttgactacgagaagattgtccgtgacacctgtcgcgccattggatttggctctgatgatgttggtcttgat

SEQ ID NO: 148954 - DNA, 398 bp, Arabidopsis thaliana columbia
cgaaaccatggttgagccggcgaatactgttggtcttccggtgaacccgactccgttgctgaaagatgagctcgatatcgtgattccgactatcagaaacctcgatttcctcgagatgtggaggccttttcttcagccttaccatctgatcatcgtccaggacggagatccatcgaagaagatccatgtccctgaaggttacgactacgagctctacaacaggaacgacattaaccgaatcctcggacctaaagcttcttgtatctcgtttaaggattctgcttgtcgatgctttgggtacatggtgtctaagaagaagtatatcttcaccattgatgacgattgcttcgttgccaaggatccatcaagcaaagcagtgaacgctcttgagcaacaca

SEQ ID NO: 148955 - DNA, 459 bp, Arabidopsis thaliana columbia
tcgccgcgaccggacggatggccgaccacgcgaccgcgcttttggccgtggagtccagcggaaactagatatggttaatcaagatgggacgagaaacactaaacccgtgagaaggtctgtcagagactccaaatacagaccacccggaaaaaagagtcctccagcagcatcgttgaacaagaaccgggtcactcgtagtagtgtatccgagactgctgataaactcgcaaacatgaccattggagcaactggatctcgaagacactctgtgtctgtggttggacagcatcaacagctgaaaccacctccgatgaaggcaggttgggtaggagaaacacgtgacatgttccttagaccaacacaacccaccaccaatggctactttaggaaagtcgccggatgacccctaaaccaatagttactcaagcatgcctgttctgagcaaatcttttactttat

SEQ ID NO: 148956 - DNA, 337 bp, Arabidopsis thaliana columbia
cctctatttactcgagatgtggtggccttttcttcagccttaccatctgatcatcgtccaggacggagatccatcgaagaagatccatgttcctgaagggtacgactacgagctctacaacaggaacgacattaaccgaatcctcggacctaaggctttttgtatctcgtttaaggattctgctcaagactactggtggctaccaggagaatggcccggacccccatccccccctttgaaattgctctgatgatgttgggcttgatgctgacaaatgcaaagtgctagttaacattgagcaacagaacctttctgcccattgcttcctttttttcac

SEQ ID NO: 148957 - DNA, 340 bp, Arabidopsis thaliana columbia
gttaaaccagagtaaagcttgaaactttggactaaaagaatggcgtctttgggtgtgtcggaaatgcttggtactccccttaacttcagggcagtttcaagatcgtctgctccgttggcatcaagcccatccacgttcaagactgttgctctcttctctaagaaaaagccagctcctgctaagtccaaggctgtctctgagactagcgatgagctcgccaagtggtatggtcctgacaggagaattttcttgcctgatggtcttttggatagatcagagatcccagagtacttaaacggggaaagtgctggagattatggttatgacccatttggtcttg

SEQ ID NO: 148958 - DNA, 479 bp, Arabidopsis thaliana columbia
attcctcgctgtctgaactgaaaaataagatcgttttaactcaaaactctcacaaagacaaagatcttctcctccttctcttctctttttcacttttctctcttcccctctctcgaagcttgaaaggtaacaacaatggagaaccctccggatcaaacagagtcaaaggagactcttcaacaacccattacaagaagaagaacaaagggtggtcttctcactatgcccttcatcattgcaaacgaggggttcgagaaagtggcgagctatggattattacagaacatgattctttatctgatgagtgattacagattgggacttgttaaaggacaaactgtcttgttcatgtgggttgctgctactaatttcatgcctctcgttggagcttttctctcagattcatatttgggtcgctttctcaccattgtcattgcttctctctccagtctcctggggatggtggttctatggctaac

SEQ ID NO: 148959 - DNA, 484 bp, Arabidopsis thaliana columbia
aagcaaaccaataatggctaccactcgtctaactctagctcctctcctcctcatcgcagccgtactactcgcaaccaaggcaacggctcagccggcagcccccgctccagagcctgctggtcccatcaacctcactgcgatcctcgaaaaaggtggtcaattcactactttcatccatcttctaaacatcactcaagtcggtagtcaagtgaacattcaagtcaatagttcatccgaaggtatgacggtgttcgcaccaacagacaatgcttttcaaaaccttaaacccggaaccctaaaccagttaagccctgacgatcaagttaaactcattctctaccacgttagccccaaatattacagtatggatgatctcctctccgtgagtaacccggttaggactcaagcttctggccgagacaacggtgtttacgggcttaacttcaccggccaaacaaaccaaatcaatgtctctactggttat

SEQ ID NO: 148960 - DNA, 454 bp, Arabidopsis thaliana columbia
cttcttcatcttccaatttccacaaccatttctcacttcgtcttcctcgtcggtgatttctagggttttgttcttcatctttcaatctcaaccgagaagaacaaatccttcttctgagaaattaacgcttgcaaatggcgaggaagatgtctcttgaagcttttgtgtcaacaatggctccacttatagacatggagaaagaagctgagatctcaatgtctttaacctccggtgcttcaaggaacattgaaactgctcagaagaaaggcacaacgattctcaatttgaaatgtgttgatgttcaaacaggtctaatgggtaaatctcttattgagtttcaatccaacaaaggagatgtgcttcctgctcacaagtttggtaaccatgatgttgttgttttgaaactcaacaaatctgatcttggttcgtctcctcttgcgcaaggagttgttta

SEQ ID NO: 148961 - DNA, 438 bp, Arabidopsis thaliana columbia
agtttttcaaacaatgtctagtcctcttggtcactttcagattcttgtttttcttcatgctttgcttatcttctcagctgagtcccgcaaaacccaattgctgaacgataatgatgttgaatctagcgacaagagtgcaaaaggcacacgatgggctgttttagttgctggatcaaatgaatattataactacaggcatcaggctgacatatgccacgcgtatcagatactccgaaaaggcggtttaaaagatgaaaacatcattgtgtttatgtatgatgatatcgcgttttcctcggagaatcctaggcctggagttatcattaataaaccagatggagaagatgtttataaaggagttcctaaggactacactaaagaagctgttaatgttcaaaacttctacaatgtgttacttggaaatgaaagtggcgtcac

SEQ ID NO: 148962 - DNA, 446 bp, Arabidopsis thaliana columbia
ctctcttgcgttttcgattttattacaagaactttgttttgggcttcatccatcgttcaaggttcgttgaaaactatgaagaaagttgagttttttatgctccttctctgcttcatcgcagcgtcatctctagtgtctgctgatccaccaacatgtcctgctgatttgggaggcaagtgtagtgattctgatgactggcaaggtgatttcttccctgaaatccccaagattaagtatgagggaccttcgagtaagaacccacttgcttacaggtggtataacgctgaagaagagattcttgggaagaaaatgaaggattggtttagattcagtgttgcgttttggcatactttccgtgggactggaggtgatccatttggtgctgctactaagtattggccttgggaagatggtactaactctgtgtctatggctaaaagaagaat

SEQ ID NO: 148963 - DNA, 480 bp, Arabidopsis thaliana columbia
cttaagctttatttctccgttttcgttttgtctttctttatcgtctcggtttcgtcgtctgatgtcaacgacggcgatgatctcgtgatccgtcaggtggttggtggagccgagcctcaggttttgacctcagaggatcacttttctctcttcaagcggaagttcgggaaggtctacgcttccaacgaggagcatgactatagattctcggttttcaaagcgaatctcaggcgagcgaggcgtcaccagaagttggatccgtcggcgactcatggtgttacgcagttctcagatctgactcggtctgagttccgtaagaagcacttgggggttagaagtggctttaagcttcctaaagatgccaacaaggctccgattctccctaccgaaaatctccctgaggattttgattggagagatcatggcgccgttactcccgtcaaaaatcagggatcttgcggctcttgctggagtttcagc

SEQ ID NO: 148964 - DNA, 450 bp, Arabidopsis thaliana columbia
atcatcttcctctcgatcggaaaatagtcaaaagtttctataaattgttgaatcaaagcagagaagaagaagaagacgatcatgaatccagattccgattatcctcatctccctaacatcaagatccaccatccttcatctcctcgtcactctcaccaccactcttcctccactccttccgccgctactcctaccccaaccgccggtgctcgccgtaagatcggagtcgccgttgacctttccgaagaaagcgctttcgctgttcgctgggctgtcgatcattacatccgtcccggagacgccgtcgtcattctccacgtttctccaacctccgttctcttcggcgccgattggggacctctccctctccaaactcctcctcctccttccgccgctaccgatcccggagctcagccgaagcctagtcaggaagatttcgatgcgtttact

SEQ ID NO: 148965 - DNA, 479 bp, Arabidopsis thaliana columbia
cttccttttctccagggatccacatgggcaaaggccaagaacacaagttagatgcacacaagaaacttctaatcgctctcataatcacctcatcttctctaggactaatacttgtatcttgtttatgcttttgggtttattggtctaagaaatctcccaaaaacaccaagaactcagaaggtgagagtaggatttcattatccaagaagggctttgtgcagtccttcgattacaagacactagagaaagcaacaggcggtttcaaagacggtaatcttataggacgaggcgggttcggagatgtttacaaggcctgtttaggcaacaacactctagcagcagtcaaaaagatcgaaaacgttagtcaagaagcaaaacgagaatttcagaatgaagttgatttgttgagcaagattcaccacccgaacatcatctcattgtttggatatggaaatgaactcagttcgagttttatcgtc

SEQ ID NO: 148966 - DNA, 481 bp, Arabidopsis thaliana columbia
tgagagaaaaagccagaagaaccaaactcagaccgagagatagagattgagggagagctctagctctgtagaaaagaaggattcattcatcatatccagaaatggctctaaagtttaaccctttggtggcatctcagccttacaaattcccttcctcgactcgtccgccaactccttctttcagatctcccaagttcctctgcctcgcttcttcttctccggctctcagctccggccccaaggaggttgagagtttgaagaaaccatttacgccacccagggaagtgcatgttcaagtcttgcactccatgccacctcaaaagatcgagatcttcaaatctatggaaaactgggccgaggagaaccttctgattcacctcaaggatgtggagaagtcttggcaaccccaggatttcttgcctgaccctgcatcagatgggtttgaagatcaagtaagagagttaagagagagggctagaga

SEQ ID NO: 148967 - DNA, 478 bp, Arabidopsis thaliana columbia
cacagacaatcaacgactggtatgatagagatatcgacgcaattaatgagccatatcgtccaattccatctggagcaatatcagagccagaggttattacacaagtctgggtgctattattgggaggtcttggtattgctggaatattagatgtgtgggcagggcataccactcccactgtcttctatcttgctttgggaggatcattgctatcttatatatactctgctccacctcttaagctaaaacaaaatggatgggttggaaattttgcacttggagcaagctatattagtttgccatggtgggctggccaagcattgtttggcactcttacgccagatgttgttgttctaacactcttgtacagcatagctgggttaggaatagccattgttaacgacttcaaaagtgttgaaggagatagagcattaagacttcagtctctcccagtagcttttggcaccgaaactgcaaa

SEQ ID NO: 148968 - DNA, 404 bp, Arabidopsis thaliana columbia
gtcgaaaactttatcagcaatggcggttttgttgtcatctttctctccactaggaatcaacattgacatgaataagaatctgggtgtttcgtattcttctttccctcaaattcatctctttaagggttctactccactgcgtgttcgaacattcgtcgtctcgagtcgtaaaaattcaggaactggtttggcaagtgaggataagaaattgttgctggaacgatatggttatgatgctaatgatgactttgggtctcaatctaaggcgagaaggaaagaagagaaaatgagtggaaggaatagtcaacaagtagaagaagttgttgttgtacagccaagaacaactcataggttactgcaggttcttgcaggaacggcgaaactaaagaaattgctttctctta

SEQ ID NO: 148969 - DNA, 511 bp, Arabidopsis thaliana columbia
  unsure (1)..(511): unsure at all n locations
acgtcgtccgaaacgaggagacacataaaaatgntctgagaatcatgattcggtccaagnctttgtncctgatatttttgaggaaagatcatncgaaaggcttgacgctctctangatttttacccgagcaaaanattgtttcgctcagattggtaccttccgtttggaaaacatgctgtaaacgcggcctctgcgtccatggncggatcatatatagagcaaagtattatattagtacttcattgatgttgttcgatcccgacgaagacaagatttataagaatcttgtcggagtttctgacgagagctatcgtttggctagctctggaaactggctcttgatggcagattctcgtcttgatttctatattgttaacctgttaacgggcaaaaggatcaatcttccaccaatggagtctaaaattcgtggtgcacaagcgagatttgtgcaaagcaaatatttttacaagtcgaggtacatttgctttgacaaattgaaatctattcgta

SEQ ID NO: 148970 - DNA, 485 bp, Arabidopsis thaliana columbia
agaaatcaaaaccttgtaaggtttcttagggtttcaatcgaagcgggagagaaaatctcagaagagaagccatggatgaagctttgacgaacgcttctgcaatcggtgaccaacgccagaaaatcgaacagtacaaactcatcctctcctctgttctctcttccaacgatcttctccaagctcagagattcatcgatcacattctttccgatgatgtcccgttggtggtttcgaggcagcttttgcagtctttcgcacaagagcttgggagattagaaccggagacgcagaaggagattgctcaatttactcttacccagattcagcctagagttgtttcctttgaggaacaggcacttgttatcagagaaaaacttgcgggtttgtatgaatcagagcaggaatggtcaaaagcagcactgatgttgagtggaattgatctggattctggaatgagggccgttgacgacaacttcaagctttaa

SEQ ID NO: 148971 - DNA, 445 bp, Arabidopsis thaliana columbia; identical to SEQ ID NO: 130511

SEQ ID NO: 148972 - DNA, 478 bp, Arabidopsis thaliana columbia
  unsure (1)..(478): unsure at all n locations
attaactttaagtaccaaaaatggcgggctacaacctcgaagctatcgaagcggcacctttgaaagacgatctggatattgtgatcccaaccatcagaagcctcgactttctagagcaatggagaccatttttgcaccattaccacctgatcattgtccaagatggagacccttccatcaagatccgagttcccgagggttatgactacgagctctacaaccgtaatgatatcaacaggatccttggtccaagagctaattgtatctcctacaaagatggtggttgtcgctgctttggcttcatggtttctaaaaagaagtatatctacaccattgatgatgattgctttgtggcaaaggatccaagtgggaaagacatcaatgtgatagctcagcacataaagaaccttgaaacaccttcaacaccacactacttcaacactctctatgaccctnttagagatggaactgatttcgt

SEQ ID NO: 148973 - DNA, 475 bp, Arabidopsis thaliana columbia
ttctagctctgttagtgcttttaacaatcccaaaggtccaggggccagtgcatccgaaagtggctacacaagtaccatcggacaagtcattgccaagggtcgcaaggcaagagtttcttctgcaagtgcttctgccgctacaggtgaggctgcagctgcagtgactcgcaaagctgctgctgcacgtgcaaagggtaaggtagcttccgcatcaagggtgaagggttcctctgagaagaagaagaaggaccacaaaggaaaaaaggattgagcgtgaggtcatctcatattctcatgcatgcgaattcctcaaacctatatataaataatatcctaaaaactacaaactcaaaatctctatcttgttcataaataaaaccagagattgtcacctctatatattattgtgaaatgctactcattctcatgtaatggcttttttaaaaataaaataaatgcaataaatcttatactt

SEQ ID NO: 148974 - DNA, 362 bp, Arabidopsis thaliana columbia
gcatactaaccggagatcaccgggtccaatcacgtcggcagcaactcaacgccggctaaaaccggagccagaaccgacggtgaagaaattcatcaagattattctcctctcaagaatcatagaaaaaatgatgaaagttccggctagatttgtgaggtttggtcctaaactcactgacaacgtgactctccagactcctgttggtttcaagagatcaattcggattaaaagaatcggtgatgaggtttggttcgagaaaggttggagtgagtttgcagaggctcactctttaagtgatggtcactttctgttttttcattacgaaggggattcttgttttcgtgttgtgatctttgatgtgt

SEQ ID NO: 148975 - DNA, 430 bp, Arabidopsis thaliana columbia
gaagagaagaagaagacaccctttaagcaaaacagaggattttcattctctgttctgtttgaattattactaatctatcatcttgttgttctcttcgtcgacaatgtcgggaaacaaagaagaagaggatcctcgtatccatggaatcaaaactaagatccgtgtcgttccagattttcccaagaaaggaataatgtttcaagacataacaacagtgttgttggatccgaaagccttcaaagacacaattgatctgtttgtggagaggtacagagacaagaacatctcagtggttgcaggaatagaggctcgtggtttcctattcggtccaccgatcgcgctagccattggagcaaaatttgttcctctgcgcaaacccaagaaactacctggttcttatacttgcatacctttcatatgatttattttt

SEQ ID NO: 148976 - DNA, 473 bp, Arabidopsis thaliana columbia
gttgtagctccggtaacggtaagcaacggcggaagcaaaggatgttgcaagtacggtggtcctggttacgcgactcctctcgccgctatgtctggtccatcggagaaacttatctacgtaaccgccgtctacaccggaactggaatagataaaccggattatttggcgacggtggatgtagatccaagctcgccttcgtattcaagtgttattcatagattaccaatgccttttgttggtgatgagcttcatcattctggttggaactcttgtagttcttgccatggtgatgcttctgttgatagacgttatctcgtgttaccgtctcttatatctggtcgcatttatgcgattgatactaaggaaaacccgagggctccgtctttgtataagtatgttgatcctaaagagattgctgataagactggattggcgtttcctcacacggctcattgcctcgccacgggcgagat

SEQ ID NO: 148977 - DNA, 381 bp, Arabidopsis thaliana columbia
cttatctttaatcgctgtccgaattatattgtcggtttttgtgcccagacgagatctgattttgctatcaacacggcttttccgttgccgtgttcttgccgttaacacgaagtagttgttggattttccatagagaggtggaggacgtcaaacaagagacctacagatcttcaaaggagaagagaaaccaccagatctgcaaacaacaagacacatcggaaggaaacgaagaggacaaacgaaagactttatacgtgaggcgaaaccagtttggattctgcgggagaggagcggagcaacaaagagaagacaaaattcgacgccggggagacatagcttcaccggcgccagaagacggtgaatcttttggagtctcgtgta

SEQ ID NO: 148978 - DNA, 433 bp, Arabidopsis thaliana columbia
gtccgatatatcgttaccagagaaagagagctcatagatttagttagcttaatttttcttttcgttttgaaattaaggaagtgattgttatcaccggaggagagagagaaaatgttgggaattttcagtggagctatagtatcgccgccggaagagttagtggctgccggaagcagaactccgtcgccgaaaacaaccggatcaactttagtaaaccggttcgtcgagaaaaatccatccgctgtttctgtacaagtcggcgactatgttcagcttgcttacagccatcacaacgagagtcctctccggcctagatcatttggagctaaggatgaaatattctgcttgttccaaggctcacttgacaacctaggaagcttgaaacagcagtacgggcttgcaaaaaacgcaaacgaggttctcttggtcatcg

SEQ ID NO: 148979 - DNA, 384 bp, Arabidopsis thaliana columbia
gcaatctactctccacctaacattgctccgttttgactcgctcgactcggctaagtgaccacagttcctttcgagccaataaaatggctacgggacagctattttcacgcaacacacaagcgttgttctacaattataagcagcttcccattcagcgtatgcttgattttgatttcctctgtgggcgagaaactccttctgttgctggtatcataaacccaggttccgagggattccaaaagctattttttggtcaggaggagatcgccatccctgtccacgcagccattgaggcagcatgcgctgcgcatcccacagcagatgtattcatcaacttcgcatcgtttagaagtgctgctgcttcatccatggctgctttgaagc

SEQ ID NO: 148980 - DNA, 389 bp, Arabidopsis thaliana columbia
cggacgcgtgggtctgccactctcatgtgacacaattataccattttttctttgatattttgtacaaaaaacataacattattttctctctattttcattaactcatttctgtatttttcattaactataagaaagtacagaaataaatataatacgcattaaaatgaagaaataataaaacgagagaaaaggtttaaggaaagggaaagggttagtgtagtgttgacaacgccactcttgactctctttctcttcttcttctcgagatcctgaaaatgtgactgacagattcttcaacttcactctcttcttcttccattcactgaactcaaaccaccccctgtgagctatgacccaccaaacccatcagcgtcgtcgccgtcgtcac

SEQ ID NO: 148981 - DNA, 467 bp, Arabidopsis thaliana columbia
tgcttttgaatttcaaaccttcacataaaaaaaatacttttgaatccgtgtttcattcatcgaatctttttccgataactatggctgaggaaatcaagaatgttcctgaacaggaggtgccaaaggtagcaacagaggaatcatcggcagaggttacagatcgtggattgttcgatttcttgggaaagaagaaagacgaaacaaaaccagaggagactccgatcgcttcagagtttgagcagaaggttcatatttcagagccggagccagaggttaaacacgaaagtcttcttgaaaagcttcaccgaagcgacagttcttctagctcctcaagtgaggaagaaggttcagatggtgagaagaggaagaagaagaaggagaagaagaagccaactactgaagttgaggtaaaggaggaagagaagaaagggtttatggagaagttgaaagagaagcttcctggacac

SEQ ID NO: 148982 - DNA, 473 bp, Arabidopsis thaliana columbia
ctagctagtaaacagtattttctatataccaaaaatggcttcaagttccatagctcttttcttggctctcaatcttctctttttcacaacaatctccgcctgtggtagctgtactccgtgcggcggaggttgcccctctcccaagccaaagccaactcctaaaccaaccccaagccctagctctggctcgagcaagtgccctaaagacaccctcaagctcggtgtctgcgctaatgtgctcaacggcctcctggacttgacccttggcaagccaccggtcgagccatgctgcagcctcatccaaggactcgctgatgttgaggcagccgtttgtctctgcaccgctcttaaggctaacattcttggaatcaacttgaacctcccaatatctttaagtctactccttaatgtttgcagcaaacaacttcctcctggctttccatgctaaaaaccatattgatatataatttaaa

SEQ ID NO: 148983 - DNA, 481 bp, Arabidopsis thaliana columbia
aaaaaaaatggcatggcttgctagatccattgcgaattctctgaagatcgatgaggaagaatatgatcaaaaggaaacgattaagaccaattcgattgaaaattccggctcagatcaaccgtcttcgccatcggtgttgcaaacacagtctccacgaggcgtgaaggaagacatctctgaactcaccaagaccttaagaagtcagctatggggcgttgcttctttcctcgcgccacctccttcttcttccgatacggcggatcatgtggatgaggagactcggaagtcatcggatctcgcggaaggtgatgaggatctgattgctggaatcaggaacgatttcgttgagatcggaggtagatttaagactgggatctcgaaactctctggaaacttaccggtattgaagtttacaaatatggcttcgaatttcttgcaattgggatcggaaggtgtggattcgaagaaccctgatgttgcg

SEQ ID NO: 148984 - DNA, 484 bp, Arabidopsis thaliana columbia
  unsure (1)..(484): unsure at all n locations
cttccttctcatctctcttttcctctctttctttctctctctcagccctaagagagaagaaataggctctgctctgcgccttttctacaagaaattcaccaaaaaagcttgaatatttatcggaatcaaagcttgggtttttaatcctggtaaagccatgtcacatatggtgtttcagagcgttgtcgctcccaaacccttatctcctctcaaaccctgtttacctatccctcgtccactcgttactctgccttgtaagctccgtcgtggcttcgttagagcttcttcgtcctcgtttcttgtcgatgattcagtttcaggactcgagcgttgcttacagttaccttctggagttgagttaggcacatcttcctctggctctttctctgcaagtactcagatgtgtcctgtgatgaaaggcaaatttggttcggtaggagctgttactttggaaaaagggaagctngatatgacccagaagatt

SEQ ID NO: 148985 - DNA, 483 bp, Arabidopsis thaliana columbia
ctcatgtatgccgtttcggaacagagaagatgcttataagattatctttcctcttacattggaagaaatcctgaaaacgataacttcactttcacggaatccttttcctcaccaatctctaattctggcttggtcaatccgcgcgatattcctctgctatacctccagagaaagattcaaaaagctccaatgggatcacttgaaagcaaagaagctcagaagaaattgcttgacgaaaagaatcataggaaacaaatcgatcagagcattacagacattctgcggctttcagttaaacaaaccaatgtcttaaatctcttaacttccacaagaacaacaggacagcctcttgtagacgattgggattgcttcaagactctagttaatagcttcaagaatcactgcggtgcaacggtgcattacggattgaagtatacaggagcgcttgccaatatctgcaatatgggagtggatgtgaagcaa

SEQ ID NO: 148986 - DNA, 376 bp, Arabidopsis thaliana columbia
ctggatcttcgtcgctcaacgcaaatccctctccggttcattggataagcagcctggggaagatgagcattgtacctaaggaaacggttgaggtaatagctcaaagtattgggattaccaacttgttacctgaagctgctcttatgcttgctcctgatgttgagtatcgtgtccgagagatcatgcaggaagctatcaaatgcatgcgtcactcaaagagaacgactttaacagcttcggatgtagatggtgctctcaacttaaggaacgttgagccgatatatggatttgcctcaggagggccatttcgttttagaaaagctattggacatcgcgatttgttctacactgatgacagagaagtggatttcaaaga

SEQ ID NO: 148987 - DNA, 467 bp, Arabidopsis thaliana columbia
ttcaggttcttacccttgaggatgttgtctcagaagctgatatctttgtcaccaccaccggtaacaaagacatcatcatggtcgaccacatgaggaagatgaagaacaacgctattgtgtgcaacattggtcactttgacaatgagattgacatgcttggacttgagacttaccctggtgtgaagcgtatcaccatcaagccacagactgacaggtgggtgttcccagagaccaaggctggaatcattgtcttggctgagggtcgtctgatgaacttgggttgtgccactggtcacccaagtttcgtgatgtcttgctctttcaccaaccaggtgattgcccagctcgagctctggaacgagaaagcaagcggaaagtacgagaagaaggtgtacgttctttccaagcatttggatgagaaggttgcattacttcacttgggcaagcttggagccaggcttacaaag

SEQ ID NO: 148988 - DNA, 413 bp, Arabidopsis thaliana columbia
ccaaaatctccatttctctctcgctctcgctcaatctctcttcacaatgtcgacagtttcttcagatcctgctcatgcgaagaaatcgagaaacagtagaaaagcgttaaagcaaaagaatgagatcgtcgagtcatcaccggtctcagacaaggggaaagaaacgaagtcgtttgagaaagatctgatggagatgcaagcgatgttggagaagatgaagatcgagaaggagaaaactgaggatttgttgaaggagaaggacgagatcttgaggaagaaggaagttgaacaggaaaaacttaagacggagctgaagaaactgcagaagatgaaggaattcaagcctaacatgacttttgcttttagtcaatctttggcacaaactgaagaagaaaagaagggaaagaagaaga

SEQ ID NO: 148989 - DNA, 448 bp, Arabidopsis thaliana columbia
tgcagaatcaacacctcgtgggttccttctacaaccagaactcaaactcacttagattttcccaagttagtttctgttagtaactctgggataagtttgaggattcagaatagtaaacctattagccctgtctttgctcttgaagcaacttcctccaggagggttgtttgcaaagctgctgctggtgtgtcaggtgacttacctgagagtactcctaaggaacttagtcagtatgagaagattattgagcttttgacaaccctttttccactttgggttattttgggaacacttgttggcatcttcaagccatccttggttacatggttggaaacagatctctttactctaggtcttggatttcttatgctttccatgggtttgactcttacgtttgaagatttcagaagatgtttacgtaatccatggacggtgggtgttggttttt

SEQ ID NO: 148990 - DNA, 484 bp, Arabidopsis thaliana columbia
atctttcccaaagcacaatctatcatataaccacataaatggttagtcagaaagagaccgtgtgtgtaaccggcgcttcgggtttcatcggttcatggctagtgatgcgattactagaacgtggttactttgttcgtgccaccgttcgagatcccggtaatttgaagaaagtacaacatcttcttgatttgccaaacgccaagacgctactcactttatggaaggctgatttatctgaggaaggaagctacgatgatgccataaacggatgtgacggtgttttccacgtggcaacacccatggattttgaatcaaaagatcctgagaacgaagtgataaagccgacagtgaatggaatgttggggataatgaaagcatgtgttaaggcaaagaccgtacgaagattcgtatttacttcatctgccggaaccgttaatgtagaagaacatcagaagaatgtctatgatgaaaatgattggagtga

SEQ ID NO: 148991 - DNA, 478 bp, Arabidopsis thaliana columbia
ctacaaacaaacatcactaatctctgcaatttttactctcctccttcacgtcttttcctcttaattttttctaggaaaattctcaaatccatctccgcgatacgaacagagagaagaagacttagaaaaatggctgttcaacctacaagaataggtctagctggacttgctgtgatgggtcagaacctagctctcaacattgcagagaaaggcttcccaatctctgtttacaacagaactacttccaaagttgatgagaccgtcgaacgagccaaaaaggaaggcaatcttcctctttacggcttccatgaccccgagtcttttgtcaagtccattcagaagccacgcgttattatcatgcttgttaaggctggttcttccgttgaccagaccatcaagaccctctctgcttatttggagaaaggtgactgtattgtcgatggtggtaatgaatggtatgagaacactgagaggagag

SEQ ID NO: 148992 - DNA, 460 bp, Arabidopsis thaliana columbia
accgttcataacaatgatcgcgcgacggatctggcgaagccaccggtttctccgcccatgcagctcgtcatctgtttgctctgcggcgttccgggtaccggagtatctttctcagtcgtcttcctctccggcgtcgcgcccattctttgttcaccctcccactttgatgaaatggggtggaggaagtagaagctggttttcgaacgaagccatggccactgattcaaattcagggttaattgatgtgccactagctcaaactggggaaggtattgctgaatgtgagcttctcaagtggtttgtcaaagagggagattctgtggaagagtttcagccactctgtgaagttcagagcgataaagcaactatagagatcacaagtcgttttaaagggaaagtggctctgatttcacattctccaggtgacattattaaggttgagagactctggttaggttgg

SEQ ID NO: 148993 - DNA, 384 bp, Arabidopsis thaliana columbia
ctcgagagtggtttagcttttttgtaccgtacatcttcttcccagaaacatggctgaggcttgggatttgttggaatggccgaggaaggataaccgtcgttttctccatgttgtctaccgcgttggtgatcttgatcgcaccattgagttttacactgaggtctttggtatgaagctgttgaggaaaagagatatccctgaggagaagtattctaatgcttttcttggttttggacctgaaacatctaactttgttgtggagctcacatataactatggtgttagctcatatgatattggaactggctttgggcattttgccatttcaactcaagatgtttccaaactggttgagaacgtccgtgccaagggtgggaatgtgac

SEQ ID NO: 148994 - DNA, 480 bp, Arabidopsis thaliana columbia
caaaaaaaaacagaaggagaagaaacaaaaacaataatctcagcaaaaacaaatctctactcatcggggtcgaaatcaaaatatagagacgatgtcttgctccgtcgccgtatgtaattctccggtgttttcaccgtcgtcttctctattctgcaacaaatcttcgattctctcgtcaccgcaagaatctctttctctaacgctttctcatcgcaaacctcagacctcttctccttcctctccatccaccaccgtttcttctcctaaatctccatttcgtctccgtttccagaaacctccgtccggattcgctcctggtccattatcttttggatctgaatctgtttctgcatcctctcctccgggaggtgttttaaagaggaaacgacctacaaggcttgatataccgattggtgttgctggatttgtagctccgatttcttcatcggccgctgtggctgcgacgccgagagaggagtg

SEQ ID NO: 148995 - DNA, 486 bp, Arabidopsis thaliana columbia
ggaaaccaacgccgcggcggagacgatggtggtgatgatgaaggcaactcgagggacgagagatccagatctacttgggctaatgtggtttccggtgaggaagaggatcagaatcgcgcgggaggatcgtcgcacggccgtcgccagaattcagaggagaatcaatgggagaagaagggcgaaaggcttcccacaaggcattcacaatcacatgaggaggaccaggaagagaatacatatgcggctaaagtgagcgagaaacaagacttctcggagagccagcaagaggaaaatgatggttgggaaactgtgggcaaaaagaaacctgcaaggcaatcacataaggtccagaaggagcaatggcaagattacaaacgcccagcaagtgaacaacactactcagacgaagttgaaacttatggaaacctagaaccctcacaactagagctctcaggtctctcagaagcttgcaacaaactgtgggag

SEQ ID NO: 148996 - DNA, 394 bp, Arabidopsis thaliana columbia
aaagcatgagggggcaaactccatttaaccataaaaccagatcatccacaccaaataaaaaaaagccaagtcctttaattaaaataaacacatgatccaaatctttaaaattttttcaacctcaattccaaaccaagatccaccaatgaatttttataaaaaaaaaaatcaaatcaggatctgcacttaaatgaaatgcctttaataacaagttggtggtaaaaaccccaaaaacctgctccaataaatggtcccacccaaaatatccattggtcgtcccaagcgtggtccttgtttaaaataattccacctccatttttccacccacccaaacttattttttggtccttttacaaaccccaaattcccaaatttaataccaccttcctttttt

SEQ ID NO: 148997 - DNA, 483 bp, Arabidopsis thaliana columbia
cacgttttccagctcttgttctttcgattctcagagaagacttttcagaacatcctccaacttgctgagataagcaacaatggtgaaaggtcccggtctctacaccgaaatcggcaaaaaggccagagatcttctgtacaaagaccacaacagtgaccagaaattcagtatcaccactttctctcctgccggtgttgccatcacctcaaccggaactaagaaaggtgacttattgttgggagatgtcgcttttcagtcgaggcgaaagaacattactactgatttgaaagtttgcactgattctacttttctgatcaccgctaccgttgatgaggctgcacccggactgaggtcaatcttcagcttcaaggttcctgaccaaaattctggcaaggttgagctgcaatacttgcatgagtacgccggtatcagcacaagcatgggattgactcagaacccaactgtcaacttctctggtgtgat

SEQ ID NO: 148998 - DNA, 455 bp, Arabidopsis thaliana columbia
aacgagcaaaagaagaagagaaacaacaagaagtagtaatggcttcctctatgctctcctgcgcggctgtggttacatccccggctgaggccaccatggtcgctccattcaccggcttgaagtcatccgctgcattcccggtcacccgcaagaccaacaaggacatcacttccatcgcaagcaacgggggaagagttagctgcatgaaggtgtggccaccaattggaaagaagaagtttgagactctatcttacctccctgaccttagtgacgtcgaattggctaaggaagttgactaccttctccgcaacaagtggattccttgtgttgaattcgagttagagcacggatttgtgtaccgtgagcacggaaacactcccggatactacgatggacggtactggacaatgtggaagcttccattgttcggatgcaccgactccgctcaagtgttg

SEQ ID NO: 148999 - DNA, 416 bp, Arabidopsis thaliana columbia
  unsure (1)..(416): unsure at all n locations
ccggaacggaatgcccggtcggccacgcgtccatctgtgcttttcttcttcacccagaaaagtaattcaaaagtcaaaacaatggcgccgagacganataagaagcccgcgggaagaaaccagccttctagaaaccagtagaggagaaatcaaaagccgagaaagctccggcggagaagaaaccaaaagccggcaagaaactctttaaggaagccggggccggcggcgataagaagaagaagatgaagaagaagagtgtggaaacttacaagatctacatcttcaaggttctgaaacaagttcattcagatattggtatttcaagcaaggctatcggtattatgaacagttttatcaacttctttcttcaagaaattggcatcgtaatctttaaagctcgctaggtataacaagaa

SEQ ID NO: 149000 - DNA, 379 bp, Arabidopsis thaliana columbia
tcagagagattcattcagtaatggcagcctcaggcacctctgctactttcagagcctccgtttctgggctccttcctcttcttgcgcaggtgacccatttgaaatcacccttcaaagctgtcaaatatacgcctctgccatcgtctcgctccaagtcatcatccttctccgtctcctgcaccatcgccaaggacccgcctgttctcatggccgccggatctgacccggccctgtggcaacgacccgattcgttcggtcggtttgggaagtttggtgggaagtatgtacctgaaacccttatgcacgctctatctgagcttgaatccgctttctatgctcttgccaccgacgatgatttccagagagagttggctggaat

SEQ ID NO: 149001 - DNA, 404 bp, Arabidopsis thaliana columbia
  unsure (1)..(404): unsure at all n locations
gtttgcatacacttgtatatatttatattaacagtccaaaattcttcgaaattgtcccgagctgtgagcatataaaaaatgtcttggataatccatggagctggagctgctacgacgacgttatcgacgtttaattccgtcgattccaagaaactcttcgttgctccttctcgcacaaatctttcagtgaggagccagagatatatagtggctggatctgatgcgagtaagaagagctttggttctggacttagagttcgtcactctcagaaattgattccaaatgctggtgcgacgaaggaggcggatacgtctgcgagcactggacatgaactattgcttttcgaggctcttcangaaggtctggaagaagagatggacagagatccacatgtatgtgttat

SEQ ID NO: 149002 - DNA, 393 bp, Arabidopsis thaliana columbia
cggaaataccggggcgggccaaggcgtccgttcatcctttcttaacagttactataagctcgtttatggccagagacggtggtgtttcttgttggcgaaggtcggagatgatgagcgtcggtggtatccgaggaattgaatctgcgccgttggatttagatgaagttcatgtcttagccgttgatgacagtctcgttgatcgtattgtcatcgagagattgcttcgtattacttcctgcaaagttacggcggtagatagtggatggcgtgctctggaatttctagggttagataatgagaaagcttctgctgaattcgatagattgaaagttgatttgatcatcactgattactgtatgcctggaatgactggttatgagcttctcaagaaga

SEQ ID NO: 149003 - DNA, 489 bp, Arabidopsis thaliana columbia; identical to SEQ ID NO: 130514

SEQ ID NO: 149004 - DNA, 459 bp, Arabidopsis thaliana columbia
aagaaacacacatattcaaacttctccaaagaaaagaaattagcaaaaactagaatgaagaagacaggggaggatccaagcaagatcatgagaaggtcaattcacactttcctccaaaactaccaccgtgtcaccaccgcagccgccgtggccctccctttctccgccggtctcctcctctctcagcctttcttctcttcttcctcttccacccttcacatgaggcttaacatgctcttccgcggagcgggtttctcttcttctcatgacttcttcaacatcttaagccttaaactctcacaaaccctatcttcctctttattcactcttcctttctccctcacattcctccttttatccaaagcttacgtcatcaaacttctatcaaacaatcactctgcaaattcctcctctgttttctacctccggcttctcaaaacttacgtttgcaacttcttc

SEQ ID NO: 149005 - DNA, 481 bp, Arabidopsis thaliana columbia
  unsure (1)..(481): unsure at all n locations
cccggggcgagccacgcgttcggagagattcattctgtcttatggcnaatccgacttataacctcnacgcgaatccacaagggcgggaaccataagctgaaggagagggtgaanaactgaacggataccaaggtgacgatggaggagaagatgacgatggagaagacgatgacaccgagtcgaaatctcaaacgcgcgaaagcggatccagtgtagacagaatcaaggcggaatcgctattccgtcggatgcgagctgctcctgtgccggtgcgtgttcacgacgtgattatcggtggaaacgagaagactaaggaccatatcattgaagcggaagtggatgctgtgagagaggcgaccacgttgcaagagcttctcgaagcatctagggttgccaattcgaatctccgtgcgttagatatctttgattccgtcaacattacgcttgattctggtccttctgagcttcctggtactaccaa

SEQ ID NO: 149006 - DNA, 479 bp, Arabidopsis thaliana columbia
atggaaaatggtgaggtcaaaggggttcgacaactatgacttgaagagtgaaagccgatgcgggcttgcccgatccagaattactgacgaggaccatcctttaagcctagggaaggcgagtatctggaatacatacttccaggatacggagaccatagaacaaatagacagagatgtcaagcgtacacatccagacataccctttttctccggtgaatcatcgtttgcgcgttctaatcaggaatctatgaagaatatattacttgtatttgcgaagttaaaccaaggcatcagatatgttcaagggatgaacgaaattttagcacctatcttttatgtattccgtaacgaccctgatgaagatagttcagtaagtagactctttttgtttcggtgataccctttaaccaactttcaatgataacgtacacagttttaaggtaacagtgctagtctggaccctcaataatttcaagata

SEQ ID NO: 149007 - DNA, 462 bp, Arabidopsis thaliana columbia
gtcggcgccggagagagtgagatgacttggtcggttttcagatccataaatactccaacactgggcctctccaccgcacttcggtgcactcgtaccccattggtcgctgctggtgtcggctgcgcaacattcgctggtgtttctctcttcagaatgtcttctagatctcctcctttcgcttccctctctgtctctgcttcttctgtgaagaaggaagttgtgtctactgagaaagcaccagctgctttgggaccttactctcaggccattaaagccaataatctggtttttctttcaggtgttcttggacttatacctgagactggaaagtttgtttcggagagcgtcgaagatcagactgagcaggtactcaaaaacatgggggagatattgaaagctagtggtgctgattattcctcggtggtgaagacaacaatcatgttggctgatttggctgacttc

SEQ ID NO: 149008 - DNA, 451 bp, Arabidopsis thaliana columbia
caaaatcttaaaaactttctctcaattctctctaccgtgatcaagatgcagatctttgttaacgctctcaccggaaagacaatcaggctcgaggtggaaagctccgacaccatcgacaacgttaaggccaagatccaggataaggagggcattcctccggatcagcagaggcttattttcgccggcaagcagctagaggatggccgtacgttggctgattacaatatccagaaggaatccaccctccacttggtcctcaggctccgtggtggtatgcagattttcgttaaaaccctaacgggaaagacgattactcttgaggtggagagttctgacaccatcgacaacgtcaaggccaagatccaagacaaagagggtattcctccggaccagcagaagctgatcttcgccgaaagcagttggaggatggcagaactcttgctgactacaa

SEQ ID NO: 149009 - DNA, 297 bp, Arabidopsis thaliana columbia
  unsure (1)..(297): unsure at all n locations
cacttncactttcaggtcgcgttgcttcactctccattgcaaagagaggtctctgcgatttgtgcaactcacccctgaaaccttgttaatttacttcaactgccgctatacctaaaaacttgatctttctcctttgagctatgataaagattgcagaggtcactctcttcttctttatcttcggcttctatccctcgttgcctctagctgaatctcagcttcccgatctcgacccacaagacaaagcttctttattgatattcagaagatcgattcacgacctaaattgaagcttat

SEQ ID NO: 149010 - DNA, 389 bp, Arabidopsis thaliana columbia
gattccagggccatatcctgaaatcttcttctttgtctctctgttagaattttcatcattaccaaatccgacttggctcagaaatgttgcaactacaaattcttcaccaaccgtctgtgtgagtcttgcaacgacctacctgtttttgattgcttcctgcactacacttacgattcttgttcaggcaatctccaaatcgcgtatcgccacacaaagctcacccccgggaaatgggtggcatgggccgtgaatcccacatctactgtcatggtcggagctcaagccattgtggcttatccacaatcagacggcaccgttagggcttatacgtcacccattagttgctaccaaacgagtctgctagaagctgagctgagttacaacgtctc

SEQ ID NO: 149011 - DNA, 425 bp, Arabidopsis thaliana columbia
aaaaatggcattgcaaaagtttcctctcatggggctgcttttgctcctaaccatcctcgtctctgtgacaacagcggttgatgatcctgtttgcccggcgacttccaagctaagccgagcaagtttccctaatgggtttttgtttggcacggctactgctgcgtttcaggtcgaaggtgcaattaatgaaacttgtcgtggaccggctctatgggatatctactgtagaagaaatccagagagatgtagtggcgaccacgccgatgtggccgttgatttcttccatcgttataaggaagatattcagctaatgaagaatctaaacacagatgcattcagactctcaatcgcatggtcaagaatattttctcatgggagaaaggagaagggagtgagtcaagctggtgtgcaattctaccacgagc

SEQ ID NO: 149012 - DNA, 423 bp, Arabidopsis thaliana columbia
gtttccatggccgtatcctcaaatcttctcctttgtctctctcttttcatttgcatcatcaccaaatccgccttggctcagaaatgttccaactacaaattcttcaccaaccgtctctttgagtcttgcaacgacctacctgttcttgattccttcctacactacacttacgattcttcttcaggcaatctacaaatcgcgtatcgccacacaaagctcacccccgggaaatgggtggcatgggccgtgaatcccacatctactggcatggtcggagctcaagccattgtggcttatccacaatcagacggcaccggtagggcttatacgtcacccatcagtagctaccaaacgagtcttctagaagctgagctgagtttcaacgtctctcaggtgtctgccacttaccaaaacaacgagatg

SEQ ID NO: 149013 - DNA, 397 bp, Arabidopsis thaliana columbia
taccggaacggaaggcccgacccgccccacccgagaaaggtaatgaggatggccttttcataagctgtgtagcatcatcagctaatctctgggccatcatcatggatgctgggactggtttcagttctcaagtttatgaactgtcctcagtcttcctgcacaaggactggatcatggaacaatgggaaaagaactactatatcagttccatagctggtgcaaataatggaagctcgttggttgttatggctaaaggaactccttatacccagcaatcttacaaagtcagcgactcatttccattcaagtggataaataaaaagtggaaagaaggttttcatgtaacatccatgaccaccgctgggagtcgttggggtgtagtaatgtccaggaactc

SEQ ID NO: 149014 - DNA, 317 bp, Arabidopsis thaliana columbia
agaaaacatacacaaatagcaaaacatggctaacaagctcttcctcgtctgcgcaactctcgccctctgcttcctcctcaccaacgcttccatctaccgcaccgttgtcgaattcgaagaagatgacgccagcaaccccgtaggtccaagacagagatgccagaaggagtttcagcaatcacaacacctaagagcttgccagagatggatgagcaagcaaatgaggcaaggacgtggtggtggtccttccctcgacgatgagttcgatttcgagggcccccagcagggataccagctactccagcagtgctgcaacg

SEQ ID NO: 149015 - DNA, 438 bp, Arabidopsis thaliana columbia
accataaccaaaccatcatcatcatcatctcttggtgacagaagaaaagagttgaggaacagagaaaatggcagcacaagcacttgtgtcttcttcacttacctcctctgttcagacagctagacagatatttggctcaaaaccagttgcgtctgcctcacagaagaagagttcctttgttgttaaagctgctgcaactccacctgtcaagcaaggagccaacagaccattgtggtttgcttcatcgcagagtctctcttacttggatggcagcttacctggtgactatggattcgaccctcttggtctttcagacccagaaggtactggaggattcattgagccaagatggctagcatacggagagatcatcaacggacggttcgccatgttgggtgcagctggagctattgctcctgagatttaggaaaggctggt

SEQ ID NO: 149016 - DNA, 362 bp, Arabidopsis thaliana columbia
gttggttgggtgatttaagaagaatgggtcagatccagtactccgacaaatatttggaggatactttcaaatacaggcccgttgtactttcttccggaggtgctaacctttaactaaaaatggattcttcggaagggaatgggggcatcgagtgacaaagtcgggatggttcatacgccatcatgcctgaccacaatatgctcttagaggctttactaccacaggcccagctagattgtagtgagatatgcaaatctcctatcttgttatgctctcgaaacaggtttaaaactacttgatgttgtcctgagttttttatggtcatgatttctcaggggatatggagttgtagacactttatg

SEQ ID NO: 149017 - DNA, 320 bp, Arabidopsis thaliana columbia
  unsure (1)..(320): unsure at all n locations
gtttggacatacacacaaaaataaaaaagactttatatttatttactttttaatcacacggattaactcccgcgaagtatgggcggcggcttcatcttctttctccatcatcagaattttccttaaatgggagaaacccaaccaaacttccatcttctcccgtctcggggtttcctctctggcttttattgctgggaatggggaattctcaccgctcttttggtttttaggtggcggatcttttttccttgactttctatttcccaactttccttttcttttttgggattagaatatttntaagtttatttttctggggg

SEQ ID NO: 149018 - DNA, 413 bp, Arabidopsis thaliana columbia
cagacaacaagttcatcacttctgaatattcagtaaacgtacctttccttggaaaattcaacattagcctcttcagattggtgtggaggacagcttatgtggttataaccactgttgtagctatgatattccctttcttcaacgcgatcttaggtcttatcggagcagcttccttctggcctttaacggtttatttccctgtggagatgcacattgcacaaaccaagattaagaagtactctgctagatggattgcgctgaaaacgatgtgctatgtttgcttgatcgtctcgctcttagctgcagccggatccatcgcaggacttataagtagtgtcaaaacctacaagcccttccggactatgcatgagtgagtttgagatcctcaagagagtcaaaaatatatgtagtag

SEQ ID NO: 149019 - DNA, 416 bp, Arabidopsis thaliana columbia
  unsure (1)..(416): unsure at all n locations
cgaagagaaagcaaaatcaaagttgtgatgaaatctctattgatgagaaccggttcgatgccggttcttcaaaaccggttaatttcaggtggttcatcgcggaagatgacgcctatctccaggaccaactccgtcgaatcattatccagctacggcgagagattcgccggcgggaagatttcgatcgaggttaaggctaatgtagggatgcggagggtgttatcggaaagtgatgtgattagatctgagagaatgttgaaaagagttggatctaagccttcgccggcgagaatcccggaggatgatgaagcggnggaggaagaaattaggtttgcagatggttgggggtctatgatctccggtggtttacctgtggaggagaaatgtttcacgggtggcggtgttggtggtggatc

SEQ ID NO: 149020 - DNA, 437 bp, Arabidopsis thaliana columbia
gtttccatggccataccctgaaatctttttctaggtctcactgttttcatacccatcatcaccaaatacgacttgactcaaaaatgtggcaactacaaagtctccaccaaccgtctctttgagggttgcaacgacctacctgtccttgactccttcctacactacacttacgatgcttgtgcaggcaatctccaaatcgcgtatcgccacacaaagctcacccccgggaaatgggtggcatgggccgtgaatcccacatctactggcatggtcggagctcaagccattgtggcttatccacaatcagacggcaccgttagggcttatacgtcacccatcagtagctaccaaacgagtctcctagaagctgagctgagtttcaacgtctctcagttgtctgccacttaccaaaacaacgagatggtcatctacgcaat

SEQ ID NO: 149021 - DNA, 425 bp, Arabidopsis thaliana columbia
  unsure (1)..(425): unsure at all n locations
gggaattacttagaaatggagagggaagaagaaaacataagtggtaacaagaaatcttcaactaaaacaaaactctctaatttcttctggcatggtggttctgtctacgatgcttggtttagttgtgcttcaaatcaggtggcacaagttctgttgacattaccatactcgttctcacaacttgggatgatgtcgggaattttgtttcaactcttttatggattaatgggaagttggactgcttatctcattagtgttctttacgttgaatatcgaactcgtaaagaacgagaaaaattcgatttccgtaaccacgttattcaggttttattccacctctaattcttgtgactcgntataattttttatttttttggtggtattattgaattttaactttttggttttttttggttgtgtaaaaa

SEQ ID NO: 149022 - DNA, 431 bp, Arabidopsis thaliana columbia
atgaagaggagtttcattggctgataaagtactcgcctctgcacaatgtgaagaggccatgggagcaacaaaccgatcacttagttcagtatccatcaactatgctactgactgctgatcacgatgacagagttgtgccacttcactctttgaagttgcttgctgtccgtttccagactttatttctttaatgtttaatttattttcaatcttaccttaaatagccagcagattgttaaaactcgtatgtatacatctgcagacgttgcagcacgtgctgtgcacaagcttagacaatagtcctcagatgaaccccataattggtcgtattgaagtcaaggctggccatggtgctggtcgcccaacccaaaagatgattgatgaagcggctgatcggtattcgttcatggcaaagatggtgaatgcttcat

SEQ ID NO: 149023 - DNA, 436 bp, Arabidopsis thaliana columbia
cgaaaaatggatcaaacagtatcggaaaatctcattcaggtgaagaaagaatcaggcgggatcgccgtcatcacaatcaaccgtccgaaatctctcaattcactcacgagagcgatgatggttgatctcgccaaggcattcaaggatatggactccgacgaatcggtccaggtcgtgattttcaccggatcaggtcgatctttctgctctggcgttgatttgactgcggcggagtctgttttcaaaggagacgtgaaggatccggaaaccgacccggttgtgcagatggagcggttacgtaaaccgatcatcggagctattaacggttttgccatcaccgccgggtttgaactcgccttggcctgtgatattttggtcgcttctagaggagctaagttcatggatactcacgccaggtttgggatatttccttcat

SEQ ID NO: 149024 - DNA, 438 bp, Arabidopsis thaliana columbia
aaagaacaaaaatgggtctggtaacaaaagctctcaaatatctcttactcctttctatttccttgactttcatctacaccaatgcagtttcatccgcttctccaatgactccaccgtcatcgccggctaagatgagcaggagacttgtggcagttgaaggcatggtttattgcaagtcatgcaagtattccggcgtcgatactctcttggaagcatctcctcttcaaggagcgaccgtaaagcttgcatgcaacaacacaaagagaggtgtgacaatggagacaaaaacagacaaaaacggatacttcttcatgctagccccaaaaaaactcaccacctacgctttccacacgtgccgggcttggcctacgaatcctggacccacgactgcaacgatgacatgcaccgtgccgtcaaagctcaacaatggaataaccg

SEQ ID NO: 149025 - DNA, 327 bp, Arabidopsis thaliana columbia
aaaacatacacactactaataaaccatgaagcttcttatgctcgcctttgtttttctattagctttggcgacttgtaaaggtgacgagtttgtttgtgaagagaacgagccattcacatgtaaccaaactaaacttttcaacagtggcaatttcgaaaaaggcttcatcttcggtgttgcatcttctgcttaccaagtggaaagcggtagaggccgtggacttaacgtttgggatagcttcactcaccgattcccagagaaaggtggagctgatttgggaaatggagacactacttgtgactcatatactctttggcagaaagatat

SEQ ID NO: 149026 - DNA, 408 bp, Arabidopsis thaliana columbia
aaaaaaacaaaaatgagctctcaaatctgcagatctgcttccaaagcagccggatctcttctctcttcagctaaaaatgctcgcttcttctctgaaggacgagccattggtgctgcggcagcggtttcggcgtcaggaaaaattcctttgtatgcatctaactttgcaagatcatcaggttctggtgttgcttctaagagttggatcactggactcttagctcttcctgctgcagcttatatgattcaagatcaagaggttcttgctgctgagatggaacgaacttttattgctatcaagcctgatggtgtgcaaagaggactgatatcagagaacatttcttgattcgaacgcaagggattcaagctagttggtatcaaagtcattgttccttctaaagaattcgca

SEQ ID NO: 149027 - DNA, 440 bp, Arabidopsis thaliana columbia
gtttccatggccatatcctcaaatcttctcctttgtctctctcttttcattttcatcatcaccaaatccgccttggctcagaaatgttccaactacaaattctccaccaaccgtctctttgagtcttgcaacgacctacctgttcttgattccttcctccactacacttacgattcttcttcaggcaatctccaaatcgcgtatcgccacacaaagctcacccccgggaaatgggtggcatgggccgtgaatcccacatctactggcatggtcggagctcaagccattgtggcttatccacaatcagacggcaccgttagggcttatacgtcacccatcagtagctaccaaacgagtctcctagaagctgagctgagtttcaacgtctctcagttgtctgccacttaccaaaacaacgagatggtcatctacgcaattct

SEQ ID NO: 149028 - DNA, 436 bp, Arabidopsis thaliana columbia
  unsure (1)..(436): unsure at all n locations
aaaactcccaaattaattttgcttaagcagcagcagaagaagaagcatggcggaacaagaattacagagaatcaatgagaagaagccatggcaagttctcgagttctacagtggaatcggtggaatgagatactctttaatggcgtcaggcatcgtctcagaagtagtagaagcttttgagatcaatgattctgctaatgatgtttatcaacataatttcaaacatcgtccctatcaggggaatattcagagtctcactgctgctgatttagataagtataatgcagatgcttggcttctttctcctccttgtcaaccttatactagacaaggccttcagaaacactctggtgatgctcgggctntttcgtttctcaggattcttgagcttataccgcatacaacaaagcctncacaaatgttatttgtagagaat

SEQ ID NO: 149029 - DNA, 350 bp, Arabidopsis thaliana columbia
actggtcgtaggccgccagcgtagagtatagaggatccaagactactgcctgcggcatgctacgtcatatatagtgtatagtgaaaccaaaatacaggccactggccgacaacgtacaacctggggactgggaaaaccctcgcaacacaaaactcaagcagcacatagcacattcgccagttggcagctgacctaataggcaagaggcgagcaccgatcgcaacagctaacaattgtgcatggtgaatggcacacgcgacgcaccctgtcattaagcattaagcgcgtggggtgtactcgcaacgcgcacggtgaactttacagttgccaagggcctagtgctcgcgctt

SEQ ID NO: 149030 - DNA, 433 bp, Arabidopsis thaliana columbia
ttcacaattcctctttcacaatctttctttcgattttttagcttaatcctgagtagcgttaacaatggctggtaaaggagaaggtccagcgattggtatcgatctcggtaccacttactcttgcgttggagtttggcaacacgaccgtgttgagatcattgctaatgatcaaggtaacagaaccacaccgtcttacgtcgccttcactgatagcgaacggttgattggtgacgccgcaaagaatcaggtcgccatgaacccgattaacactgttttcgatgcgaagaggttgattggtcgaagatttactgatagctctgttcaaagtgacatcaaattgtggcccttcacgctcaaatctggacctgctgaaaaaccaatgatcgtcgttaactacaagggagaagataaagagttttctgctgaagaaatc

SEQ ID NO: 149031 - DNA, 394 bp, Arabidopsis thaliana columbia
cggacgcgtgggcggacgcgtgggaaaatactgtgttctttgtttcttccatcgaaatcgaaaaaagctaagatctttgcgttttgaaacgatggcggaagaacataagcatgatgaatctgtgatcgctcctgagccagctgttgaggttgtggagagagaatcgttgatggataagatatcggagaagatccatcacggtggtgattcttcttcgtcttcttcatcttctgatgatgaagacgagaagaagaagactaagaagccctcttctccttcgtcttctatgaaatcgaaagtttaccgcttgttcggacgagagcagcctgttcataaggttctcggcggtggaaagccggctgatatattcatgtggaagaacaagaagatgtct

SEQ ID NO: 149032 - DNA, 297 bp, Arabidopsis thaliana columbia
cacgcgtccgttcaaatgctcgaaaaccgagctaggaacgataaagatgacacgaaattagtctctagggggatgtatgacgatggggacgatagcgttcttacaaaagaagaaaaagatgtgaggcttcataggaagatagatgcaatgatcaaaagagaacggtccatggcctatgcttattgttaccagttatggaaaaacagtccaaagtctgctcaggacattagaacaagtgggttcccactttggtggaactgggtggaccggtagaagaatcaaaacctttctgttagg

SEQ ID NO: 149033 - DNA, 437 bp, Arabidopsis thaliana columbia
  unsure (1)..(437): unsure at all n locations
gcttctcgagccagtcttggcaacgaggaagaactcattaacccttttcatgatcagcctcctgttgatactgccaagcctaagaagctaactacggttcacagtgacaacaacaaccgcaatgagttctctcaccatcacccacactctccttctaggaggagaagaatcttcagctgcttcaactgttgcgttaaagcttaaaggtgtttacttttatttatgataataacaacaaggggtgatatttgaagacagaaatgagaaatggtagtgccaccttgttttccacatgtgtttcttcggctgcatcacaattaaaatttgtctgttggtgtttactgtgtatctaactatgtttgctaaatgtcaagtgtagtaatatatattttttgtaatttttgtttggtgtatntagacacttgatattttcatta

SEQ ID NO: 149034 - DNA, 255 bp, Arabidopsis thaliana columbia
tccttcttctgacaccgacacttatccgtctgtcaccctttaaaccctatctttttgtcaactaagcttgtgtttaatctcaccattaatcttgtcactacgcatcatctcatctccttcctttattggaaactccgactttacctggaatcgtacccgatttgatttcactcgagataaaataattagtgcaaaaaaggtctcaccatctttctccgtcttgtcggtcacgtttttgtcctcgtagcttaaaaa

SEQ ID NO: 149035 - DNA, 439 bp, Arabidopsis thaliana columbia
  unsure (1)..(439): unsure at all n locations
gtaaaatagtacaccaagccatttataaatttcttcactctcagattcaaaataatataaattagaaatgggaacagagatggtcatggttcacgaggttccttttcctccacagatcatcactttcaagccactctctcttctgggccaagggatcacagacattgagatccactttcttcaagtgaagttcactgcgatcggagtttacttagatccttcagatgttaaaacacatcttgataactggaaaggcaaaaccggaaaagaactcgccggcgatgatgacttcttcgacgcccttgcctccgcggagatggagaaggttataagagtggtggtgataaaagagataaaaggagctcagtacggagtgcagctagagaatacggtgagagatcngttggctgaggaggataagtacgaggaagaagaagaa

SEQ ID NO: 149036 - DNA, 428 bp, Arabidopsis thaliana columbia
tgctaagctccatcatcgacgacaaacctgcctcctccacttggctcaaccgcctccgattaaacagaggcctcacaaccgacgatgacgatgcttctggcaatccacttactctcgacgactttctccgccgcaaccaccacacggaaatcgccgccactagttccgcttccgattcacctccatctgctccaattccttcagatccagaattagctgaaagtccatcggaggagccagttcctggagaatggtacggcgtgatgagcgatgttctcttcgagctattcaatttcagcggctcctctaaatcttccacaattcccgggaagaagaagttaccaaggaaacaatcaaaccctaggcattgctctttagagactcctgaagacgttgttgttcccgtgggtaatcagaaaagcgacgac

SEQ ID NO: 149037 - DNA, 438 bp, Arabidopsis thaliana columbia
  unsure (1)..(438): unsure at all n locations
gtcttgttattaaaccttggaggtcctgagactttagatgatgtacaaccctttttgtttaacctcttcgccgacccggacattatacggttgccgccggtattccagtttcttcagaagccattagcacagtttatatcagtagcaagagcacccaaaagcaaggaaggatatgcatctattggtggaggttctcctcttcgccacataactgatgcacaggctgaagaattaagaaaatgcctttgggaaaaaaatgtaccagcaaaggtatatgttggtatgcggtattggcatccattcactgaggaagccattgaacagataaaaagagatggaattacaaaactagttgttctaccactntatcctcaattttctatatcaactagtggttcaagcctaagactcttggagagaatatttcgagaggacgag

SEQ ID NO: 149038 - DNA, 409 bp, Arabidopsis thaliana columbia
aacaaattcggtgaagtcacgagaatcaacgatgactgcgacgaacaagcatgtcatattgaaagactacgtgagcggtttcactacggaatccgatttcgattacactaccaccaccgtcgaacttaaggttgccgaaggtactaactttgctctagcgaagaatctctacttgtcatgcgacccttacatgagaattggcatggggaaacctgatacttctactgctgctattgctcaagctcacactaccagacagccaatacatgggtatggactgtatcgaataatacaatctggacattcagactacaagaaaagcgatttactctggggtatatccgcatgggacgagtacagtgttatcactccaatgactcacgcgcattttaagatccaacatactgat

SEQ ID NO: 149039 - DNA, 435 bp, Arabidopsis thaliana columbia
ctcacctcaaacagacaatttaattccaaaagataaaaacaatcaaaagatgaatgccacaaagtttgttgtgcttctcgtgattggcattttgtgtgccattgtcaccgcaaggcaggtcgaagaagtgtccaaagagaccaaattaggcacctctcttccaaaatctactaacaaaggcattggagctcagctttctgctgctggtcttacttacagcggcagcagtgtctctagctctgctagtgcttttaacaatcccaaaggtccaggggccagtgcatccgaaagtggctacacaagtaccatcggacaagtcattgccaagggtcgcaaggcaagagtttcttctgcaagtgcttctgccgctacaggtgaggctgcagctgcagtgactcgcaaagctgctgctgcacgtgcaaagggtaaggtagc

SEQ ID NO: 149040 - DNA, 337 bp, Arabidopsis thaliana columbia
caacaacaaatcttaaacgttttactttgtgctgcactactcaacctcaatggccgcctcaacaatggctctctcctcccctgccttcgccggtaaggccgtcaagctttcccccgcggcatctgaagtccttggaagcggccgtgtgacaatgaggaagactgttgccaagccaaagggcccatcaggcagcccatggtacggatctgaccgtgtcaagtacttgggtccattctctggcgaatcaccgagctaccttaccggagagttccccggagactacggatgggacaccgccggactttcagctgaccccgagacattcgcaaggaaccgt

SEQ ID NO: 149041 - DNA, 436 bp, Arabidopsis thaliana columbia
caagaatcagattcaagatagaagtttttcaaacaatgtctagtcctcttggtcactttcagattcttgtttttcttcatgctttgcttatcttctcagctgagtcccgcaaaacccaattgctgaacgataatgatgttgaatctagcgacaagagtgcaaaaggcacacgatgggctgttttagttgctggatcaaatgaatattataactacaggcatcaggctgacatatgccacgcgtatcagatactccgaaaaggcggtttaaaagatgaaaacatcattgtgtttatgtatgatgatatcgcgttttcctcggagaatcctaggcctggagttatcattaataaaccagatggagaagatgtttataaaggagttcctaaagactacactaaagaagcttgtaatgttcaaaacttctacaatgtgtt

SEQ ID NO: 149042 - DNA, 443 bp, Arabidopsis thaliana columbia
  unsure (1)..(443): unsure at all n locations
gtctgttcctaaacattttggaacgtcctgttcccgtagaaggccagcctgaagaccctgagcttagaaaatcctggggatggtggaaggccaagaagtggattgctcatatcttaaacaggctatacactcggtttggagatctgaaactccagaatccagataacaaagcctttgctcaaatgttccagataaactatgcagccaagatattagagtgccacctgaaattgttgaatgccattcgtataggtggatatcttccggatagagtcatcaacctaattcttcaatatctaagcaacagtatctcgaagagtagcatgtacaacttactgcagccccaccttaacactctcctatttgaaatagttttcccacttatgtgtttcaatgataatgatcaaatgctttgngatgaagacccgcatgagtatgtaagg

SEQ ID NO: 149043 - DNA, 440 bp, Arabidopsis thaliana columbia
  unsure (1)..(440): unsure at all n locations
cttcaattacaaagaatggctgcttcaagtgctgtcaccgcanactacgtcctcaagccacctccattcgcactggatgctttggagccgcatatgagcaaacaaactctggagtttcactggggaaaacatcacagagcttacgtggacaacctcaagaaacaggttcttggaaccgagcttgaaggcaagcccttagagcacattatccacagcacttacaacaatggtgatctcctccctgctttcaacaacgctgctcaggcgtggaaccacgagttcttctgggagtcaatgaaaccaggtggtggaggaaaaccatcaggagagcttcttgctttgcttgaaagagatttcacttcttatgagaagttctattaagagttcaatgctgctgcagccactcagtttggagctggctgggcctggcttgcttattc

SEQ ID NO: 149044 - DNA, 441 bp, Arabidopsis thaliana columbia
gttagtcaccaaaaaaaaaaaaaaaacacaaaaagtttcaatggccgcctccacaatggctctctcctcccctgccttcgccggaaaggctgtgaacctttcccccgcggcatctgaagtcctcggaagcggccgtgtgacaatgaggaagactgttgccaagccaaagggtccatcaggcagcccatggtacggatccgaccgagtcaagtacttgggtccattctctggcgagtcaccgagctaccttaccggagagttccccggagactacggatgggacaccgctggactttcagctgatcccgagacattcgcaaggaaccgtgagctagaagttatccacagcaggtgggctatgctcggagccctaggctgcgtcttccctgagcttttggctaggaacggagtcaagttcggagaggcggtttggttcaaggc

SEQ ID NO: 149045 - DNA, 428 bp, Arabidopsis thaliana columbia
atcaccgaccaaaattgatcggaaacctagagctcttcgtattgctccgccaccatgcatatccggcgccagatcttcgttaaatctcctgactgtcaaaaagtcgtcgctctgcaattggatcctgcgcaatctctattaactctttcgggtatcacttccttactcgaatcgtcgcagcgtatatcgttttcggcttgctcgattactctagatgggaagcttttgaatggctctacacggatccaagtatcgaagcttccttctgtatccatgctcactcttttccctcgcctccgtggaggtggaggagatggtggggcaacgggagccgagtctcgcgattgctatctcaatatgtacgcggagaagaaacctgacaggtttgatcctaatgagcagaggctctccaaatggttgaattgtgc

SEQ ID NO: 149046 - DNA, 402 bp, Arabidopsis thaliana columbia
aaagaacagagagataaggttagagcaaaacactgtctgaaacaaacaacaaaaagatggcttgctctaatctaacaacaatgtgggtttcatcaaaaccatctctttctgctgattcatcttccttatcattccgatctgttctcaagtgcccaactaacacttcctcacctccttcacgagcttcctctgtttcaccactccaagcgtctcttcgtgagctcagagaccgtatcgattcagtcaaaaacactcaaaagatcaccgaagctatgaagcttgtcgctgcagctaaagtcaggagagctcaagaagctgttgtcaatggacgaccattctcagaaaccctagttgaagttctttacaacatcaacgaacagcttcaaaccgatgatgtcgatg

SEQ ID NO: 149047 - DNA, 438 bp, Arabidopsis thaliana columbia
ctttaacctttctggagagagaagaacaaaagagggagagggagagaaatggaaggcaaagaagaagatgtacgagtgggagctaacaagttcccggagaggcaacccatcggtacatcggctcagtccaccgacaaggactacaaagagccacctcctgcgccactgttcgagcccggcgagctcagctcatggtctttctacagagccggaatagctgagtttatcgctactttcttgtttctctacatcactgttttgactgtaatgggagttaagagagcaccaaacatgtgtgcttctgttggaatccaaggtatcgcttgggcttttggtggcatgatctttgctcttgtctactgtactgctggaatttcaggtggacacatcaaccctgctgtaacattcggtctgttcttggctcggaagttatctctg

SEQ ID NO: 149048 - DNA, 222 bp, Arabidopsis thaliana columbia
gggagagagaagagaagaagaagaccccctttaagcaaaacagaggattttcattctctgttctgtttgaattattactaatctatcatcttgttgttctcttcgtcgacaatgtcgggaaacaaagaagaagaggatcctcgtatccatggaatcaaaactaagatccgtgtcgttccagattttcccaagaaaggtaactttttttcttccttctttctg

SEQ ID NO: 149049 - DNA, 358 bp, Arabidopsis thaliana columbia
gtaacggaatctattgaacttatcacacgctgaatcggcgaagaagaatcaacgatgactgacacaaacatgcatgtggtattgaaaaactacaaagagtggtttccctgaagaatccgattctgatttcaaaaccaccaccgcttacataaaactttctggagggtctaactcaactgctggtagaataatctctacttgatatgcgatccttacatgaggattctcatgtggaaacctgatactttcactggtgctcttgctcaagcttacgctgctcaggaggcaatctctgcgtatggtgagtctagagttatagaatcgagccatgcagattacatgaaacgtgacttactct

SEQ ID NO: 149050 - DNA, 423 bp, Arabidopsis thaliana columbia
  unsure (1)..(423): unsure at all n locations
atcgtcgtcctttgagtaatttagaaaatcaaaatgggtcgcaacgtcaaaaccaaggcaaagaggaagaacaagaagaaagcagaggcgtcttcttccgagataccatcgataccaactagggtttggcaaccaggtgttgatacccttgaagatggagaagaacttcagtgtgacccttctgcttataattctctccatggcttccatgttggttggccctgtctgagctttgacattttaggtgataagttgggtttgaaccgaactgagtttcctcacacactttatatggtggctgggactcaggctgagaaagcagctcataactccatagggttatttaaaatcaccaacgtatcttgtaagagacgtgatngtgtgcctaagacattttgcatggtgaggatgaggatgaggatg

SEQ ID NO: 149051 - DNA, 340 bp, Arabidopsis thaliana columbia
aggggcgggccacgcgtccgtaaaggtctcttttctctccagatttcgatttccgaggctcgagagaaaaccggagatgggttcttcgtgcagtcaatcaaccaaagatgcgtgagatttttcacatccagggtggttaatgcggtaaccagatcggagccaatttctgggaagtggtttgcgccgagcactgcatcgatccaaccggaaggtacaccggagactctgatctgcaacttgagcgcatcaacgtttactacaatgaagcgagttgcggtagattcgttcctcgtgcagtgctcattgatttggagcctgggactatggatatgttcatatc

SEQ ID NO: 149052 - DNA, 342 bp, Arabidopsis thaliana columbia
tcgctaaacccaactactctctattttttacaaacgcctgacttttacaaagacaagcgcgttttaacacactactgatcttgagaatcctctcttcaaagccatggcgttagaactatggcaaactctcaaagaaacaatccatgcttacacaggtctttctcctgttgtcttcttcactgctctagctctcgccttcgccatttaccaagtcatctcaagctgggttgcctagccgttcgatgatgttaacccacatcagagagctagatccttggctcaagaggaggagccaccgattcctcaacctgttcaagactgggagatcacggaggaggagct

SEQ ID NO: 149053 - DNA, 407 bp, Arabidopsis thaliana columbia
cccacgcgtccgcaaaaatatattctctcggttttttccagagcgtatattcaaattcttccttaaaaagtaaaaattaatctgattctctctactactactactacgatgggtgagaaaaaggaagaaacggcgacgaaacctcaaggagagaagaaacctaccgatggtggaatcaccaccgtcgttatgaagcttgatatgcattgtgaaggttgcggcaaaaaaatcaaacgcatcttcaaacatttcaaaggtgtggaagatgtgaagattgattataagagtaacaaattgacggtgatcggaaacgtagatccagtggaagttcgtgataaagtggccgacaaaattaagagaccagtcgaacttgtctctacagtagcgccgccgaagaaagagacacc

SEQ ID NO: 149054 - DNA, 435 bp, Arabidopsis thaliana columbia
  unsure (1)..(435): unsure at all n locations
agaaaaggcacggcgaacggagaaagatgcggagcacaccgttggggacgacggcggtttcaccagcttcaatcaaacacaactcttatgggtatggccgcttcgtttcctcttcaggagtctctaatttctctatccatcgtcggagacgccactcgtcgttttctatctctcaagctccttcacaaatcaactcaggagcttgcaatgcaagtcaaatagttgatctttttccagcggtttcacctgaaatcgttgttcgtgaagcacggttagaggactgttgggaggtggcagagactcattgcagctctttcttcccgggatattcgttcccgcttgatgttgttctaagagtagataggttaatggcaatggtgatgggattttctattccacctgngtgccagaggacttgtttagtggctgtgatag

SEQ ID NO: 149055 - DNA, 429 bp, Arabidopsis thaliana columbia
ggcaactaccccgagtggaaacttttcatccagaccatggatcctgcagatgaggataagtttgactttgacccacttgatgtgaccaagatctggcctgaggatattttgcctctgcaaccggttggtcgcttggttctgaacaggaccattgacaatttcttcaatgaaactgagcagcttgcgttcaacccgggtcttgtggttcctggaatctactactcagacgacaagctgctccagtgtaggatctttgcttatggtgacactcagagacatcgccttggaccgaattatttgcagcttccagtcaatgctcccaaatgtgctcaccacaacaatcaccatgaaggttttatgaacttcatgcacagagatgaggagatcaattactacccctcaaagtttgatcctgtccgctgcgctgag

SEQ ID NO: 149056 - DNA, 303 bp, Arabidopsis thaliana columbia
gaatctcccaaaggatcttagaagagatatcaaacgtcatctctgtctcgcgttagtccgaagagttccattgtttgagaatatggatgagaggctgttagatgcaatctgtgagaggcttaagccatgtctgttcactgagaagtcgtacttggttcgtgagggagatccagtcaacgagatgctcttcattatccgtggtaggctcgaaagtgtaaccactgatggcggtagaagcggattctacaaccggagtttacttaaagaaggagatttctgcagaggcggggccaccgcatgctc

SEQ ID NO: 149057 - DNA, 411 bp, Arabidopsis thaliana columbia
  unsure (1)..(411): unsure at all n locations
aagaaaaagaaaactacaaaatcaatcaaagagaagtaagagaaatggcaggttctaactgtggatgtggctcctcctgcaaatgtggtgattcgtgcagttgcgagaagaactacaacaaggagtgtgataactgtagctgtggatcaaactgcagctgcgggtcaagctgtaactgttgaagaaattatcagcatggtctcaaaccaaggaaaatgggaaaaaaatgtgttttatgctaagagatctttgtgtatgttggaataaagacttggcattgtgttgcgtaatgagtaagagtaactattaagcttgcttgacttgttcctgctgtgtaatgtttttatttgtaacctaaatcataaatagtatatgtattcttttgcgtttgtnnaaaaaaaaaatattaaa

SEQ ID NO: 149058 - DNA, 433 bp, Arabidopsis thaliana columbia
cttcgtcttcttccctgcaaatctagtttctagatcttttctttcttccgcgaaacgaaaatgagagagtgcatttcgatccacattggtcaggccggtatccaggtcggaaatgcttgctgggagctttactgtcttgaacatggcattcagcctgatggccagatgccgagtgacaagactgttggcggaggtgacgatgctttcaacaccttcttcagtgagaccggtgcagggaagcacgtcccacgtgctgtctttgttgatcttgagccaactgtgatcgatgaggtcaggactggtacttaccgtcagcttttccaccctgagcaactcatcagcggtaaagaagacgcagctaacaatttcgcccgtgggcattacaccattgggaaagagattgttgatctgtgcttggaccgtatcagaaagc

SEQ ID NO: 149059 - DNA, 351 bp, Arabidopsis thaliana columbia
aaaaccttcactttgtggagacaccagcgcttgctccaccagaggttcacattgacattgctgatcagcagaagaacgaggccgagctcttacaggctgcagctcaacccctccccgatgacgatgatgatatctttgagtaaatcatccttctagaatgtctgccgtgggaagctcttgcttgttccttttggttttctctatgttgttttgggggtacatataaatcaatcggtctttcttataacaaaaattaggtatgtatttttggatggttcttctgatggtatccaaagctaagttgtttcttcgcaagaatattaagtgattggaaaactttattctacctcc

SEQ ID NO: 149060 - DNA, 327 bp, Arabidopsis thaliana columbia
acaataccacgttgtaaagagaagagtaggatctgatgtaccagagacttctcatgtatgccgtttcggaacagaaaagatgcttaaagattatctttcctcttacattgggagaaatcctgaaaacgataacttcactttcacggaatccttttcctcaccaatctctaattctggcttggtcaatccgcgcgatattcctctgctatacctccagagaaagattcaaaaagctccaatgggatcacttgaaagcaaagaagctcaaaagaaattgcttgacgaaaagaatcatatgaaacaaatcgatcagagcattacagacat

SEQ ID NO: 149061 - DNA, 314 bp, Arabidopsis thaliana columbia
cacaatcccagagtagcagagtctgatccattctacctttctcaatactcaggcagagagaagtcaaacttgagaaaatggacgggactgtgttcacgccttgtacggaaggagtgaagcatgtcacatctgatcaaggcgagatgcttactaagccatatttagagctaagcaagaccatcttgcctgttatagataaatttggagctgctatgactctcgggaaatctgacattggtggcaacataacgagggtggagaagaactacttatcttattccgccaagatcaagttctggtacacacttgttcaa

SEQ ID NO: 149062 - DNA, 389 bp, Arabidopsis thaliana columbia
ttgacatctgagtcttgtcatcatggtatcttctctccaagccgccgcaacttttcttcaaccggcgaagattgccgcttctccttctcgtaatgtccatctccgatcaaaccaaaccgtgggcaagtcctttgggttagactcttcacaagctaggctcacgtgctctcttcactctgacctcaaagacttcgctggaaaatgcttcgacgccgccaagatcgccggttttgctctagccacctctgctctcgttgtctcgggggccggtgcggagggagcaccaaagaggctaacgtacgacgagatacagagcaagacttacatggagggtaagggtaccggtacggcaaaccagtgtccaactatcgatggtggctctgagacat

SEQ ID NO: 149063 - DNA, 435 bp, Arabidopsis thaliana columbia
cttattataaaaaaaaaaaacaggattcactgctagctacagaagctttgatcacatggaagatcgaaaagagaacaagaactcgccatggctatcagtaccacagtttggagattgggatcaaaaaggaggatcaattgattactcaatggatttctcaaagatcagagagatgaggaaactcaacaagagagatgcttctcgagccagtcttggcaacgaggaagaactcattaacccttttcatgatcagcctcctgttgatactgccaagcctaagaagctaactacggttcacagtgacaacaacaaccgcaatgagttctctcaccatcacccacactcttcttctaggaggagaagaatcttcagctgcttcaactgttgcgttaaagcttaaaggtgtttacttttatttatgataataacaacaag

SEQ ID NO: 149064 - DNA, 312 bp, Arabidopsis thaliana columbia
aaaaaaaaaaacacaaaaaaagtttcaatggccgcctcaacaatggctctctcctcccctgctttcgccggaaaggctgtgaacctttcccctgcggcatcagaagtccttggaagcggccgtgtgacaatgaggaagactgttgccaagccaaagggtccatcaggcagcccatggtacggatccgaccgagtcaagtacttgggtccattctctggcgagtcacccagctaccttaccggagagttccctggagactacggatgggacacagctggtctatccgctgaccccgagacattcgcaaggaac

SEQ ID NO: 149065 - DNA, 407 bp, Arabidopsis thaliana columbia
tgaagctaagaatctggacgttcgtgtttaaaccgacgacgtatttgaaattggctttgaaggaaaggtgaaattaatggcggaatcgtcgtcgccgtcgcctactgaagagatcgttcggttgattaagcgtttaagcgcttacgttgctttcaaaatgtcaagccttttctccactacatcgattcgaaatctggattcaagatcaattggtgcgattgcggggcttgcgattgcggtgatatttacgtggagggcgataagaacgcccggagagcaacgtcagagaaggcagccgaagcgtaggattcacaatgctgaaacgtctagtgctgctgctgctgcttctcagtcgaatctagcttcttcggttgctccggaagtttcttcgcctcgtgaggataatg

SEQ ID NO: 149066 - DNA, 436 bp, Arabidopsis thaliana columbia
gaagaaggatgggttcccacaaaaattatagctggcttcaaaagggttaaagcaatgactatggatgttgattttatagtctatgcgttggggttttctaattctgttgaagtgcagggtgaccagatacgcaagcgtgacaagtggtctgactggattcctgcatctaaaaagtcaacctctgcggagacaattggagacggtgacaaagattccccaaaaagtataacaagcggggataattttggaaacccttcaaagggttcttcaaagcctaccgtgtccgatttctcttcagagggagctcagtcatcaagaaccaataattataaaagtggtaaccttgaatcatcagcagacgaaaaaagaaatgtggaggacttgtcaaacgatttttcaaacactttcttgcttgacgaggaactagatctggagc

SEQ ID NO: 149067 - DNA, 347 bp, Arabidopsis thaliana columbia
caccggttagacacttcgtaaaccgaaccactttgatccatggaggattacatgttttagggattccaccagctgatgatgtgtaaactgatattttacaactaaatcaagaagccggtgtacaacaactcacacggccttatatatttacaacctcaaaacgaatgaagaaaggagggaacatcgagctgcgtccagtggtagaggttaacccatgattcacgcattgtggttcacactcagacttctgtttgatttgtgaatgatgggttccgatgggcgtaatattggcagaaattagttaaaaggcacccttattcaaggagctacttttgatgttcaagccc

SEQ ID NO: 149068 - DNA, 394 bp, Arabidopsis thaliana columbia
cgagagaagtcggaatcttcattgtaaactgcagcttgtttaaccctaacccatctctctcgtccatgatcgtaaaccggtacaagcttaaaaccgacgtcaaaacttacaatctctccggtatgggatgcagcgccggcgcaatctccgtcgacctcgccacaaatctactaaaggcaaaccctaatacctacgcagttattgttagtacggagaacatgaccctaagcatgtatcgaggcaacgaccggtcaatgttagtccctaactgtctattccgagtaggtggcgctgcggttatgctcttaaaccggagtcaagaccgagtccggtctaagtacgaattgactcatattgtaaggactcacaaaagctctagcgataaacactacac

SEQ ID NO: 149069 - DNA, 435 bp, Arabidopsis thaliana columbia
tggcgaatggagctaatagagtggatctcgacgggaaaccgatacaaccgttgacaatatgcatgatcggcgccggaggtttcatcggttcacatctctgtgaaaagctcttgaccgagacgccacataaggtgcttgcgctcgatgtttacaacgataagatcaaacacttgcttgagcctgataccgttgaatggagtggtcggatccagtttcatcgtatcaatattaagcatgattcgagacttgaaggtcttgttaagatggcggatctgattataaatcttgctgcgatctgtactccagctgattacaatacacgtcctcttgatactatctacagcaatttcattgatgcgcttccagttgtgaaatacttgtctgagaacaacaagcgtctcattcacttttctacctgtgaagtttatggaaaaa

SEQ ID NO: 149070 - DNA, 449 bp, Arabidopsis thaliana columbia
gtcttttcctcttaattttttctaggaaaattctcaaatccatctctgtttacaacagaactacttccaaagttgatgagaccgtcgaacgagccaaaaaggaaggcaatcttcctctttacggcttccatgaccccgagtcttttgtcaagtccattcagaagccacgcgttattatcatgcttgttaaggctggttctcccgttgaccagaccatcaagaccctctctgcttatttggagaaaggtgactgtatttgtcgaaggtggtaatgtatggtttgagaactctgagtggagagaaattgccttttttttataacgttttttttttttttgttttgtttagcttttttatattttttttatattatttatatttgattaatttttttatctcatattttctatatattattatttttatttattttagattttttttttttt

SEQ ID NO: 149071 - DNA, 472 bp, Arabidopsis thaliana columbia
cgtcactcaggatcagatcttagctaaattgtgacaagctcaaaatgagtaagcttcagagtgaggccgttcgtgaagccatcactactatcacagggaaattctaggcaaagaaacgtaactttgtcgagactattgagctccagatcggtctgaataactattaccctcaaaaggacaagctttttagttgttttttctatgttttacttattcctttttctttatttattttttttatttttgtaatttttctattattttttaatttctttttttttttcatattttatgttttattgtgttatgtatttttaattataattatatttttattatttttatatttatttattattatttattctatatatttatatttttttttatttctatattatattattttttttattttttattatttataatatatttttaaattttttttatttattatattatttatttt

SEQ ID NO: 149072 - DNA, 423 bp, Arabidopsis thaliana columbia
gtcatctgccatagattcacaagctgtgtaatattccacagcatcactatcatccctctctatgtcatctgccattgtgtcactatcatccctctttatgtcatctgatacaggtaaatcctctgccatgattgtagacgttacacgctttcttttcgtcttcttcttcaaattttctcggctaggaagcccagcaagatcagtgttgcgtggtgcaggttgtactgctttactggagccaacacctggcaagaaactggatacactaaaatcattgctgttcccatttgccataagtgatttccaggaagacttttgggaccaggaaatattgtcgattgactgctcaagatcttttgttctgctcggttcatccgatgatttatctggtaccacttcagaaggcttcttctttccacgtat

SEQ ID NO: 149073 - DNA, 440 bp, Arabidopsis thaliana columbia
attcgctgcaaacatggcaagaggtttgaagaagcatttgaagaggctcaatgctcctaagcattggatgcttgataaacttggtggtgcctttgcccccaagccgtcttctgggccacacaagtctagggagtgtttacccttggtccttatcatcaggaacaggttgaagtatgctctgacatacagagaagtgatttcgatcttgatgcaaaggcatattcaggttgatgggaaagtgaggactgacaagacttaccctgctggtttcatggatgttgtgtctatccccaaaacaaatgagaacttccgtcttttgtatgacaccaagggacgtttccgtctccactccatcaaggatgaggaggctaagttcaagctttgcaaagtgagatcgatccaatttggtcagaagggtattccctacttgaacacatatg

SEQ ID NO: 149074 - DNA, 432 bp, Arabidopsis thaliana columbia
cacctttccgtctcttcaaatccacatgcatcactctaacaaccgccgcggctctgcttttggcgaatctccatctcaaatcgccggcgattgcagctcccatcgcgcctccgccgtcagttgaaagcaaagaaaacgttaccttggaagaagaagagagagcgcttgatgagcatttgattactcacccttctgatgtcgacgctcttcgttcattgatggaggtaaagatcaaatctcgaaagcttacagaagcagtagaagtgatcgatcgtttgataaaattggaacctgaagaaaaagaatggccagttttgaaagctaacatctttacctacagtggagatctagacttggctaaaactggatttgaagagattctggctaaagatccgcttcgtgttgaagcttatcacggcttgcttatggctt

SEQ ID NO: 149075 - DNA, 424 bp, Arabidopsis thaliana columbia
gttaagtctagagtcttcttcttcttcggcgtagttttttccccggcttgaaaaatgggtctatccttcggaaagttgttcagcaagctctttgcaaagaaagagatgcgtatcctcatggtgggtctcgatgcagctggtaagactacgatcttgtacaagctcaagcttggagagatcgtgactacgattccaaccattggtttcaatgtggagactgtggaatacaagaacattagctttaccgtgtgggatgtcgggggtcaagacaagattcgtccattgtggaggcactacttccagaacactcagggacttatctttgtggtggacagcaatgatcgtgaccgtgttgtggaagccagagatgagctttacagaatgttgaacgaagatgagttgagagatgctgtgcttctcgttt

SEQ ID NO: 149076 - DNA, 332 bp, Arabidopsis thaliana columbia
agaaaacatacacaaatagcaaaacatggctaacaagctcttcctcgtctgcgcaactctcgccctctgcttcctcctcaccaacgcttccatctaccgcaccgttgtcgaattcgaagaagatgacgccagcaaccccgtaggtccaagacagagatgccagaaagagtttcagcaatcacaacacctaagagcttgccagagatggatgagcaagcaaatgaggcaaggacgtggtggtggtccttccctcgacgatgagttcgatttcgagggcccccagcagggataccagctactccagcagtgctgcaacgagcttcgccaggaag

SEQ ID NO: 149077 - DNA, 307 bp, Arabidopsis thaliana columbia
ctgctcatctacaagatagaacagttgcttgtcttcctccttcgtacggacaacttgtgaccattcttagcatcgatggtggtggaatccgtgggatcattcccggcacaatcttagcttaccttgaatcacaacttcaggaattggatggtgaggaggcaaggcttgtggattatttcgatgtcatctcaagaacaagcaccggaggtttgatagtggcgatgttgaccgcacaagaccaaagcggtggccatagccgcaacagcaaccgccctttgtttgaggccaaagaaatcgttccttttta

SEQ ID NO: 149078 - DNA, 339 bp, Arabidopsis thaliana columbia
ctctctttcactttctctctaaaaaccagaaaaaaaaaaaatggagctttcatcgagaaagccttatttcattgaggaagaagaagaatagaatttggcttcttctttatcagaaatggaagctgggttttctggtaacaataataatagtaataaccatggaaatacccaaaacggtgtcgtttgttcaagccgtttctcttacgggagattaaacagtcttaggaacagtcagaggtattattacaattaatactctggtttgtctccgcgatctgttgtgtttggtagatctcatgatttcaagatttgatatttaacagaccttattctcttgga

SEQ ID NO: 149079 - DNA, 462 bp, Arabidopsis thaliana columbia
gtaccggaacggcagggtcggcgccaggcgtcccgtccggttttcttgctccaaaaagcccctcgaagttcgttgttcttccggcaatactcgttacactaagcagagaggggcatttacatcactgaaagaatgtgcgatttcattagctttatcggttggtttaatggtttcagtaccttcgattgctttgcctcccaatgctcacgcagtggcgaatccagtgattccagatgtttcagtgttgatctccggtcctccgattaaagatccggaagctttactaagatatgcattgcctattgacaacaaagccatcagggaagtgcagaagcctcttgaggatatcactgatagcctcaagattgctggcgttaaggctctagattctgttgaacggaatgtgaggcaggcaagttgaacatttgcagcagggaaaagtataattgtggcaggttttgc

SEQ ID NO: 149080 - DNA, 397 bp, Arabidopsis thaliana columbia
ataaaatcagaattacaaacaaaaatggttttgcaaaagcttcctctcattgggctgcttttgctcctgaccatcgtcgcctctccagcaaatgcagatggacctgtttgcccgccgtctaacaaactaagccgggcaagtttccctgaaggttttttatttggcacggttactgcggcataccaggtctaaggtgcgattaatgaaacttgtcgtggaccaaccttatgggacatctactgtagaagatattcagagaggtgcaataacgataacggcgatgtggccggtgattttttcatcgttataaggaagatattccactaatgaagaaatctaacacagacgcctttagaatgtctattgcatggccaagaatatttcctcatgtgagaaa

SEQ ID NO: 149081 - DNA, 389 bp, Arabidopsis thaliana columbia
caatctcttgtgaaggctttgttgaagaacacgaacaatccgagattagcatggagaatcttcaagaggatattctcttctccttcagaagaaagccatggcatttctttagatgcgactcctacaatcgctcgtatcctggttcgagccaaaatgcacgaagaaatccaagagcttcacaatcttatactctcttcttcaatccaaaagacgaaactttcgtctcttctctctgttgtatccatcttcgcgaaatcgaatcacattgataaggcgtttccgcagtttcagttagtacggtcgcggtttcctgagaacaaacctagcgtttatctgtataatttgttgcttgaaagttgcataaaggaacgacgtgtggagttcgtttc

SEQ ID NO: 149082 - DNA, 384 bp, Arabidopsis thaliana columbia
gaacaatggcttcctctatgctctcttccgctactatggttgcctctccggctcaggccactatggtcgctcctttcaacggacttaagtcctccgctgccttcccagccacccgcaaggctaacaacgacattacttccatcacaagcaacggcggaagagttaactgcatgcaggtgtggcctccgattggaaagaagaagtttgagactctctcttaccttcctgaccttaccgattccgaattggctaaagaagttgactaccttatccgcaacaagtggattccttgtgttgaattcgagttggagcacggatttgtgtaccgtgagcacggtaactcacccggatactatgatggacggtactggacaatgtggaagc

SEQ ID NO: 149083 - DNA, 367 bp, Arabidopsis thaliana columbia
acccacgccgtccggcagcattttagtatattttttcaacaattcgcttttttttttctcgatctccgtgaagctctcgaatctctggttttgagttttggagaatggtgtttttccgcagcgtatcggcctttactaggctgaggtctggcgtcggccaccatttttaattaacaattcttgcagaaggattcaaatgccgagctcttcccacctggacctggagtcgcagctgcaagagttaattcccgaacaccaagaccgcctgaagaaactgaagtcacaacatggggaggtccaactgggaaacatcactgttgatatggttattggtggaatgagagggatgaccggattgctttgggaa

SEQ ID NO: 149084 - DNA, 398 bp, Arabidopsis thaliana columbia
tgtctttgaagctatcttcttggattgtgtttaggagttaaaaacttgctttggtccatcatgagattgcttcttagtctcttgtttctcttggctttaaccacctactcaagtgcaacttattgtctatgtagagatggtgttggagagaaagatcttcaaacatcgatagattatgcatgtggagttttaaaagattgtaatcctattcatgagaaaggtccttgttatcaaccaaacaccatcaagagtcattgtgattgggcggttaatacttatttccaaagatttggtcaaatctctggaagctgtaatttctcaggaactgctactaccagccaaaatcttccttcaactgtggttactggttgcttatatccttcaagtccaggaagtgc

SEQ ID NO: 149085 - DNA, 404 bp, Arabidopsis thaliana columbia
cttttgcattcacgcaggaggcagagcggtgatcgacgagctccaaaagaatctacaactatcaggagaacacgttgaggcctcaagaatgacactacatcgttttggtaacacgtcatcttcatcgttatggtacgagcttagctacatcgagtctaaagggagaatgaggagaggcgatcgcgtttggcaaatcgcgtttgggagtggtttcaagtgtaactctgccgtgtggaaatgtaaccgtacgattaagacacctaaggacggaccatggtccgattgtatcgaccgttaccctgtctttattcccgaagttgtcaaactctaaactgaaaacgtctttgaacggtttagtaacggtttgattttgtgttacggtttaggtttatttggtctcggga

SEQ ID NO: 149086 - DNA, 400 bp, Arabidopsis thaliana columbia
tgcaaacgtgctgaacttggttacaactacggtgtcatactgattccagaaggtctgatcgactttattcctgaggtccaagagctcattgctgaactgaatgaaattctggcaaatgaggttgtcgatgaaaatggtttgtggaagaagaagctcaccgagcaatccctgaagctgtttgatcttctgcctgaagcaattcaggaacagctgatgcttgagagagacccacacggaaatgtccaggttgctaagattgagactgagaagatgcttattcaaatggttgaaactgaattggagaaaagaaagcaagctggtgcatacaagggacaattcatgggacagtcacatttcttcgggtatgaaggaagatgcggcttgcccacaaattttgatg

SEQ ID NO: 149087 - DNA, 399 bp, Arabidopsis thaliana columbia
gttgagttcatggctccttctcctcattcttttccacttcatcctttggatcatttgagacactatgatgattcctcaaacaacatgtggggttttgaagcaaatagtgagtttcaggcattttcaggtgtagttggtccaagtgaaccaatgatgtctacattctgtgaagaagatttcccgttgctaatttcgaataaaagaaacaatgagctttcattgagtcttgcatcagatgtttctgatgaatgctcggagataagtctttgtgcagctacaagattagcctcagagcaagcttcttgcagcagcaaagacatttctaataacgttgttactcaaggtttgtctcaacttatatttggctcaaaataccttcactctgttcaagaaatacta

SEQ ID NO: 149088 - DNA, 407 bp, Arabidopsis thaliana columbia
ctcatttcgaaaccatggttgagccggcgaatactgttggtcttccggtgaacccgactccgttgctgaaagatgagctcgatatcgtgattccgactatcagaaacctcgatttcctcgagatgtggaggccttttcttcagccttaccatctgatcatcgtccaggacggagatccatcgaagaagatccatgtccctgaaggttacgactacgagctctacaacaggaacgacattaaccgaatcctcggacctaaggcttcttgtatctcgtttaaggattctgcttgtcgatgctttgggtacatggtgtctaagaagaagtatatcttcaccattgatgacgattgcttcgttgccaaggatccatcaggcaaagcagtgaacgctcttgagcaacacatc

SEQ ID NO: 149089 - DNA, 404 bp, Arabidopsis thaliana columbia
ggaaactccggattaaatgacacttctgtaacttcctatatttactaaaatgccatctcgcctctctccgccagatattccgccgctgcaaccgacgcctacggttagtgacggccatcatcgtttccagactcttccacttatcatagccggttctctgactttaaccggagttttactcatcctcgtcactttacttatttaccgaagactctaccgaaaccgtacggctccttcagatcttatctccaactccaagtctcctcaacactaccaatgtcgacgcttctcttactctcagctccgccgcgctacaaactctttctccgagtcgactcacctcggtcacggcggattcggctctgtttacaaagctgatttcccgagtggcggcgattcactcg

SEQ ID NO: 149090 - DNA, 406 bp, Arabidopsis thaliana columbia
cttatgttctctctgagtccagtctctttatcttcccgtacaagatcgtcatcaagacttgcggtactactaagctcctcctctctattgagcctctcttgaggttagccggtgagctttctcttgacgttaaggctgtgaggtacactcgtggaagtttcctctgtcctggaggacaaccattccctcaccgcaacttctctgaagaagtctctgttcttgatggtcactttgctaagcttggtttaagcagtgttgcctacttgatgggcaatgacgatgaaaccaagaaatggcatgtttactctgcttcttctgccaacagcaacaacaagaacaatgtctacacgcttgagatgtgtatgactggtctagacaaagacaaggcatctgtcttctacaagaa

SEQ ID NO: 149091 - DNA, 268 bp, Arabidopsis thaliana columbia
cactcttcctctttctatctctctctcgccgatcggaagcagatttttctcaaaaggatggattcaacgaagcttagtgagctaaaggtcttcatcgatcaatgcaagtctgacccttcccttctcactactccttcactctccttcttccgtgactatctcgagagtcttggtgctaagatacctactggtgtccatgaagaagacaaagacactaagccgaggagtttcgtagtggaagagagtgatgatgatatggatgaaactg

SEQ ID NO: 149092 - DNA, 403 bp, Arabidopsis thaliana columbia
aacaaaaccaagaatcatacaaaacaagcatcctccaatatgatgaaacaatcaccattctcacttttaacatcaatctttctcatagctgctctttttactgcaactaccgcactcgatcctgcacccgaagacccgatttttgaattgtacatgcacgatatacttgggggaagcagtcccacagcaagacccattacgggtttgcttggaaacatctacaacggtcaagtaccgtttgctaagcagatcggttttgttccaccgcaaaacggtgtagccatacccaacgcaaatggggcaatgccaacggttaacggtatcaacggtattccattaggtactggtttgtctggaacaagcgtttctggtcagaatctaaatgggattcagactcagttgg

SEQ ID NO: 149093 - DNA, 389 bp, Arabidopsis thaliana columbia
ggagaatataacggagatggaggagcaattcggcgggagcgatgagagatggaaaggatcattggagaatataacggagatggcatcgaatctcgattcgcttcagaaacttctcctcaagaaagcagtcttcgttgaagaagacactttctctagagcttctctcgtctccgagcaagcccgaacaatcaaggttcttgagcaaagagtacaaacactagaaagagaactagatgctgccattacagctgctgctcatgctcggtctgagaaacgccaagctgagtcctctcaaaaggctgctgaatcacgtgcccaagatgtcacaaaagagcttgaaaacaccacaaaggttttcaagctgcatatggaagagcttcgaggaatgc

SEQ ID NO: 149094 - DNA, 390 bp, Arabidopsis thaliana columbia
cacatcttcaaactcttcttcttttcccgctacaagttgtgccattgctcctgaaaggatcaggtttactaagggtgctttttactacaaaagcaacaatgtagtgacaggtaaaagagtgttttccataaaagcacaaatcacaacagaaacagatactcctactcctgcaaagaaagtagagaaagtgtcaaagaagaacgaggaaggtgtgattgttaacaggtacagaccaaaagagccttacactggaaaatgccttctcaacaccaaaatcacagctgatgatgcttctggagagacctggcacatggttttcagccatcaaggagaaattccgtacagagaaagacaatctgttggtgtgattgcagatggaattgacaagaa

SEQ ID NO: 149095 - DNA, 403 bp, Arabidopsis thaliana columbia
cggacgcgtgggcggacgcgtgggagacgaagtggagagagaaagctcccactctctcacaccccaaagcttcttcttcttcttcctcttcttcctcttcctcttctctaatctgaatccaaagcctctctctttatgacacaagatcgctcagaaatgtctgaagatgacgatgaccaacaatctccaccgttggatctaccctctaccgccatagctgatccttgctcatcttcctcttcaccaaacaaatctcgtaactgtatctcaaattctcaaactttccctgaccatgttctcgaaaacgtacttgagaacgttcttcagttcctagattcaagatgtgaccgtaacgctgcttctctagtttgcaaatcttggtggcgtgttgaagctttgactc

SEQ ID NO: 149096 - DNA, 403 bp, Arabidopsis thaliana columbia
caaatctcaacattcgaatttttaaaaattcttcaaaatctcttcttcaatggcgacgggaaagagttactacgctaggcctagctatcgatttctcggcaccgatcagccgtcttacttcaccgcttccgattcaggtctcgaattcgacgaatccgatctcttcaatccaatccactccgattcaccagatttttgccgtaaaatctcttcatcagtcagatccggtaaaaaatcgtcgaatcgtccctccgccgcttcctccgccgcagcagcgtcgtcgcttcctgttaacgtgccggactggtccaagattctccgcggagaataccgcgataaccgacggagaagcatcgaggataacgacgacgatgacgatgataacgaaaacggtggcgattgg

SEQ ID NO: 149097 - DNA, 401 bp, Arabidopsis thaliana columbia
gggttccagatttactcttcgtcttcctctcttcgcttcttccccactgggattttccttttcttctccttttttctctacccatcgatctacacatcctgatcttcttagaagccccaatccttatacattccgggaacaaaaaacctagctttttttttattccggcttaaccagttttcgaaaaaccctagcttccatggcgaaaactcgacctggtgtcgcctccaaaattaagacgggaaggaaggagctggactcttataccatcaagggcaccaacaaagttgtgagagcgggagattgtgtgttgatgcgcccatcagatgctggtaaaccaccatatgtggcccgtgttgagaagattgaagctgatgcgaggaacaatgtgaaggtgcact

SEQ ID NO: 149098 - DNA, 408 bp, Arabidopsis thaliana columbia
gaaaaacgtttcattcttgttttatgtgtgattgttgttctgtttttgatttgagaaacaaaaacgatggagatgatgaagattgatcctttattcgatcgggccagtgagcttaaagctttcgatgaaacgaaaacgggtgtgaaaggactcgtcgacttcggaggttcacaaggtccacgcatttttcattattcaactggcaaattattaaccccaaaaccactttccttggacctggtacattttaagacgatcccaacgatcgatcttggaggacgggactttcaggacgcgattaaacgccataacccgattggagaggttaaaggagccgcagcgaagtgggggttctttcaaggggtccaccatggaggtttggttggacctcttggggaggatgaaaaa

SEQ ID NO: 149099 - DNA, 408 bp, Arabidopsis thaliana columbia
cccaaaattgttgccttccttcgtctccgatcattttcgtggtgtctgtaaccccaattacaattcgaatccattagcgaaagaaagagacttcctttgaaagagaagagtctcgttggctcggttttctgttcaaatcagcggatttcctcacatttaattgttcaatcatggcggctaccaatgtcatgcggcgagacgagagccttcttattgatccccaaagaggagatacaagtgtttctcgtggcctctcgcttgagaagaaaattgaggcccttgagagcctggccggacaagttagtaacaggcgatctcggagatggttaaatgatcgtattctgatggaacttgttcctcgtttggatgcccaagaaatcagaggcttgtttgctccaccaccgtggg

SEQ ID NO: 149100 - DNA, 403 bp, Arabidopsis thaliana columbia
cttccctgggttccctgaaggtattctcggtattgatatcgttgagaaattcagaaaacaatcggagagatttggaactacgatcttcacggaaactgttaacaaagttgatttctcatcgaaaccgtttaagctattcactgattcgagaactgttctcgctgattctgtaatcatttctactggagctgttgctaaacgtcttagcttcactggatctggtgaaggtaatggtggtttttggaatcgtggtatctccgcttgtgctgtttgcgacggagctgctccgatttttaggaataagcctcttgtggttattggtggtggtgattcagctatggaggaagcgaattttctgactaagtatggatctaaagtttatattattcataggagggatacg

SEQ ID NO: 149101 - DNA, 406 bp, Arabidopsis thaliana columbia
caaaaaaatgggatcttcaccaccgaagaagacgactctgcaacggtacttgtcacagcttcaacaacatcctttaagaacaaaggcaataactgctggagttttgtctggtgttagcgatgttgtatcacagaagctctctggcatacagaagattcagctgagaagggttcttctcaaagtgatatttgctggtgggtttcttggaccagcagggcatttctttcatacatatttagataagttttttaaagggaagaaggatacacagactgttgcaaagaaagtaattctggagcaattgacattgtcaccattgaaccatttgcttttcatgatctattatggagtagtcatagaaaggactccctggacccttgttagagaaaggatcaagaagacttat

SEQ ID NO: 149102 - DNA, 392 bp, Arabidopsis thaliana columbia
agccgcaagactcctttcagattcttacttgcagctatgggtaaagagaagtttcacattaacattgtggtcattggtcatgttgattctggaaaatcgaccacaactggtcacttgatctataagcttggtggtattgacaagcgtgtcatcgagaggttcgagaaggaggctgctgagatgaacaagaggtccttcaagtacgcatgggtgttggacaaacttaaggccgagcgtgagcgtggtattaccatcgatattgctctatggaagttcgagaccaccaagtactactgcacagtcattgatgccccaggacatcgtgatttcatcaagaacatgattactggtaccttccaggctgattgtgctgttcttatcattgacttcac

SEQ ID NO: 149103 - DNA, 405 bp, Arabidopsis thaliana columbia
cccacgcgtccgcccacgcgtccgagcgcgaggagcttccacgtgttactacacgaatcttgtttagtaaaaagcgcagctgcaaaaaaaatcgagtagagaagaagtaggcagacaaagaagaagaagaagaagttctcggcgtgcttcaatggcgatatcagtagcagcttcgtcctctatggccgtgatggttccacgtgttcccgccgtatccacccgttgctccgccgtcccttatcttcctcctcgctcctttggccgatcctctttcaccgttccgttgaagcttgtttcaggtgacggatttatttacataatctctctttctgggttcaatggaatctatacattcccgagaaattgtctgaattgtcacaaattgcctcaaattagaatattccg

SEQ ID NO: 149104 - DNA, 412 bp, Arabidopsis thaliana columbia; identical to SEQ ID NO: 130524

SEQ ID NO: 149105 - DNA, 414 bp, Arabidopsis thaliana columbia
gtttcaccgccgtctctctctatatcaaaatgggtcgccgtagctcaggaggaagatctgcccctcgccctcgtcctgctgctgcacgcagcccagctcctcaacctgtacaccgtgcacctcctccagctccagctcaggccagcggtggtggtggtggcatgttctcaggcattggttcaaccattgctcagggtatggcttttggtactggaagtgcagttgcacacagggctgttgattctgtgatgggtccacgaaccattcagcatgaggctgttgaggctgcttctgcatctgcagcccctgctggaagcgccatgctttctagcacctgtgacattcatgctaaggctttccaagattgcatcggcagctatggaagcgagattagcaaatgtcagttctacatgg

SEQ ID NO: 149106 - DNA, 400 bp, Arabidopsis thaliana columbia
cttcgccggaaataatggctttcccgcgatttctttctctcctcgccgtcgtcactctctctcttttcctcaccaccactgatgcttcctctcgctctctatccactccacctaaaacgaacgtactcgacgtcgtttcatctctccagcaaacacaaactatcctctcactcgacccgactcgttcctcactcaccaccaccaaacccgaatccctatccgacccggttttcttcaattcatcttcaccactatctctagagcttcactctcgagacactttcgtcgcgtcacagcacaaagactacaaaagcttaacactcagtcgactcgagcgcgactcatcccgagtcgccggaatcgtcgcgaagatccgtttcgccgtcgaaggagtcgatag

SEQ ID NO: 149107 - DNA, 398 bp, Arabidopsis thaliana columbia
gagagagagactccattgttgaagtgtgttcactgaactcctcctcaaacaacaatggcgacgacggttacactcaaatccttcaccggacttcgtcaatcatcaacggagcaaacaaacttcgtctctcatgtaccgtcatcactttctctccctcaacgacggacctctctccgagtaaccgcagccagagccactcccaaactctccaaccgtaaactccgtgtcgccgtcatcggtggtggaccagcaggcggggcagctgcagagactctagcacaaggaggaatcgagacgattctcatcgagcgtaagatggacaattgcaagccttgcggtggcgcgattcctctctgtatggtcggagaattcaacttgccgttggatattattgatcg

SEQ ID NO: 149108 - DNA, 337 bp, Arabidopsis thaliana columbia
gagagagagactccattgttgttttgttttcactgaacttctcctcaaacaagagtggcgacgacggttacactcaaatacttcaccggtacttcgtaattatcaacgtagcatacatacttagtctctcatgttccgtcatcactttctctacctcaacgacggacctttcttcgagtaactcgtacctgagccactttcaaacttttcaaccgttaactccgtgttgccgtcattgattgtggaccagcaggcggtgcagcttgtgagtctttagcacatggaggaatcgtgacgattctaatctagtcgatgatggacaattgcaagcctttgc

SEQ ID NO: 149109 - DNA, 413 bp, Arabidopsis thaliana columbia
gccaagaatgccacggctgagataacagtggaccagtatcaccgttacaaggaagatgtggatttgatgaagaaactgaacttcgatgcttacagattttccatttcatggtccaggatattccctgagggaagtggtaaagtcaactggaaaggagttgcttattacaatagattgattgattacatggttcaaaaagggattacaccttatgctaatctgtaccactacgatcttccattggctttggaaaacaagtataaaggcttgcttggtagacaagtagtgaaagattttgcggattacgctgagttttgttacaagacatttggtgatagagtgaaaaattggatgacgttcaacgagccgcgtgtggtagctgctttaggttatgataatggtattttcgcacc

SEQ ID NO: 149110 - DNA, 412 bp, Arabidopsis thaliana columbia
gccaataatgccactgttgatataacagtgttccagtatcaccgttacaaggaagatgtggatttgatgaagatactgaacttcgatgcttacagattttccattttatggtccaggatatttcctgagggaagtggtaaagtcaactggaaaggagttgcttattacaatagattgattgattacatggttcaaaaagggattacacctctatgctgatctgtaccactacgatcttccattggctttggaaaacaagtataaaggcttgcttggtagacaagtactgaatgattatgcggattacgctgaggattgttacaagacattaggtgatggagtgtaaaatcggatgacgttcaacgagccgcgtgtggtaactgtttcaggttaatgattatggtattttcgc

SEQ ID NO: 149111 - DNA, 373 bp, Arabidopsis thaliana columbia
ctttgcccatctctcatctccactcttctcattccgtaagtaaaaaaacaaaaaacaaacaaaaatggcttcccacattgttggatatccacgtatgggacctaagagagagctcaagtttgcattggagtctttctgggatggcaagagcagtgccgatgatttgcagaaggtgtctgctgatctcaggtctgatatctggaaacagatgtctgctgctgggattaagtatatcccaagcaacaccttttctcattatgaccaggtgcttgacaccaccgccatgcttggtgctgttccatctagatatggatttaccagtggtgagatcggtcctgatgtttacttctccatggctagaggaaatgcctct

SEQ ID NO: 149112 - DNA, 401 bp, Arabidopsis thaliana columbia
ggagaatataacggagatggaggagcaattcggcgggagcgatgagagatggaaaggatcattggagaatataacggagatggcatcgaatctcgattcgcttcagaaacttctcctcaagaaagcagtcttcgttgaagaagacactttctctagagcttctctcgtctccgagcaagcccgaacaatcaaggttcttgagcaaagagtacaaacactagaaagagaactagatgctgccattacagctgctgctcatgctcggtctgagaaacgccaagctgagtcctctcaaaaggctgctgaatcacgtgcccaagatgtcacaaaagagcttgaaaacaccacaaaggttttcaagctgcatatggaagagcttcgaggaatgcaagaacagatat

SEQ ID NO: 149113 - DNA, 405 bp, Arabidopsis thaliana columbia
cgaaatcggagaattagccaaacgatggccgccgacggaatattccgcagcatcttcgagggttgtatctccggccttgattccgccatcgaacggcgtccttaccacaaaaactgcggatgtgctcttcacgataaatcaagtggcgctgggaaaaatcaaaatcagcgacggccgccgtcttgtcgccgccacggaagctcagagagcatctcgttcccgatccgaaggtcttggagcgaaggcaacatcatggctatgaatctcttctcctcatcgtcgtcttcttctaatctccaatcgctttcttcgtcttcttcgctctcaaatctggcatcagatttaccggtggataatgctgcgacggaggaaccgagcagatctaataaacagctacgatggacg

SEQ ID NO: 149114 - DNA, 409 bp, Arabidopsis thaliana columbia
aaagaaaacacaaaaacaaagattataatggcttcctcaaccatggctttgtcctcccctgccttcgccggaaaggctgtgaagcctgccgcatcagatgtcctcggaagcggccgtgtgaccatgaggaagactgtcgccaagccaaagggtccatcaggcagcccatggtacggatctgaccgagtcaagtacttgggtccattctccggcgagcccccgagctaccttaccggtgagttccccggtgactacggatgggacaccgctggtctatccgccgacccagagaccttcgccaggaaccgtgagctagaagttatccacagcagatgggccatgctcggagccctaggctgcgttttccctgagctattggctaggaacggagtgaagttcggagaagcgg

SEQ ID NO: 149115 - DNA, 411 bp, Arabidopsis thaliana columbia
gggaaaagcaggtttacttggctaagctctccgagcaaaccgaaagatacgatgaaatggtggaggcgatgaagaaagttgctcagcttgatgtggagctaactgtggaagagaggaatcttgtatctgtagggtacaagaatgtgattggtgcaaggagagcatcatggagaatactatcttccattgagcagaaggaagagtccaagggaaatgatgaaaatgtcaagaggcttaagaattatcgtaagagagttgaagatgagcttgctaaagtttgtaatgacatcttgtctgtcattgataagcatctcattccatcgtctaacgctgtggagtcaactgtctttttctacaaaatgaaaggagattactatcgctatcttgcggagttcagttctggtgctgaac

SEQ ID NO: 149116 - DNA, 411 bp, Arabidopsis thaliana columbia
ctccatgcttatgcttcatcgcaaccacataaggtattctcccagaagcgtctcgttgaagacgatcagcaccccaagcaagcaactttctgacacaatctatagatccacttctagctgctaaatgaagaggtgtgcttcctggagaaccatatacactagtagatgcacaaacaagagaaccactatccaacaaaacattcacacattcaggtcgtctctgtcgagcagctaaatgcaacggagtcgctcctttatcatctcttatgttcacaaatctcgcatatccccaatggacagcaacaggacttgattgagcagcagagagaatagcttgaacacaattagcatgtccataataagcagcgtaatgcaaacatgttcttcgattcacagaatcaaacatcaaaa

SEQ ID NO: 149117 - DNA, 411 bp, Arabidopsis thaliana columbia
cttgcttttgatttttggaatctacccgccgagtcgttaagcggcggtaggatcgccattttcacgacggttaaggttccggcgggagctgatagtgtgaatcaggtatggcagatcggcggcaatgttaccaacggtcgtcccggtgtacatcctttcggtcctgataatttgggctcccaccgtgtgttgagtttcacagaagatgcagcaccgggctctgctccttcgccgggatctgctccggcgccgggcaccagtggctcgactaccccaggaacagcggcgggaggtccagggaacgcggggtcattgacgaggaacgtaaattttggggtcaatttgggaattttggttttgttgggttctatttttattttctgaatggggatctctctctagtctctcttc

SEQ ID NO: 149118 - DNA, 403 bp, Arabidopsis thaliana columbia
gcgcaaggctggtcacttgcgccttattaagccatatatggttgcagttcagagcaataatgtatctgctgtaaatgaagctctgaatgagatatatgcagaagaagaagactatgacaggttgcgcgagtctattgatttgcatgacagttttgaccagataggtctcgctcagaagattgagaaacacgagcttgttgaaatgagacgtgtggctgcttatatctataagaaagctggtagatggaagcaatcgattgctttgtcaaagaaagataacatgtacaaggactgtatggaaactggttcgcaatccggcgaccatgatcttgcagaacaacttctcgtctacttcattgaacaggggaaaaaggaatgctttgctacatgtctctttgtctgg

SEQ ID NO: 149119 - DNA, 404 bp, Arabidopsis thaliana columbia
aagaacaacaacactaagcaaaaaagaaaagctcaagccgagagagacaatggcatcaacattcacgagctcaagcagtgttcttaccccaacaacattccttggccagactaaagcctcaagctttaacccccttcgtgatgttgtctctctcggatctcccaagtacactatgggaaatgatctttggtatggacctgacagagtgaagtacttaggacccttttccgttcaaactccgtcttacctcaccggagaattccctggcgattatggttgggacaccgccggtttatccgcagaccctgaagcctttgccaaaaacagagctcttgaggtgatccatgggagatgggcaatgttgggagcttttggttgcataacccctgaagttcttcaaaagg

SEQ ID NO: 149120 - DNA, 412 bp, Arabidopsis thaliana columbia
aaaaaaaaatggctcaagcagtgacttcgatggctggcttacgtggagcatctcaggctgtccttgaaggaagtttacagatcaacggctcaaaccgtttgaacatctcaagagtctcggttgggtctcagagaaccggacttgtgatcagggctcagcagaacgtgtcagtaccagaaagtagtcgccggtcagtgattggactcgtggcggctggtttagccggtggttcattcgttaaagctgttttcgccgaagctattccgatcaaagttggtggtcctccacttccttccggtggcctacctggaacagataactcagaccaagcaagagacttttcattggcattgaaagatagattttacatacaaccattgtcaccaacagaagctgcagctagagccaaaga

SEQ ID NO: 149121 - DNA, 415 bp, Arabidopsis thaliana columbia
cagatctcgttaaacctagaaacctcgagaaaaaccgtatcaatggcgccgaaagcagagaagaagcccgctgagaagaaaccagcttccgagaagccggtggaggagaaatcaaaagccgagaaagctccggcggagaagaaaccaaaggccggaaagaagctcccgaaggaagctggtgccggaggcgacaagaagaaaaagatgaagaagaagagtgtcgagacttacaagatctacatcttcaaggtgcttaagcaagttcatcccgatatcggaatctccagcaaagcgatggggatcatgaacagtttcattaacgatatcttcgagaagcttgctcaagaggcgtcgaagcttgcgaggtacaataagaaacctacgatcacttctcgggagattcagactgctgtga

SEQ ID NO: 149122 - DNA, 407 bp, Arabidopsis thaliana columbia
  unsure (1)..(407): unsure at all n locations
aaaaaaacacatcaaaacgatgccgtctgaagcggagagctcagcgaattcagctccggcaactccgccaccaccaccgaatttctggggaaccatgccggaggaagagtactacacttcacaaggagtacgtaacagcaaatcatacttcgaaacaccaaacggcaagctcttcactcagagcttcttaccattagatggtgaaatcaaaggcactgtgtacatgtctcatggatacggatccgatacaagctggatgtttcagaagatctgtatgagtttctctagttggggttacgctgttttcgccgccgatcttctcggtcacggccgttccgatggtatccgctgctacatgggtgatatggagaaagttgcagcaacatcattggctntcttcaagcatg

SEQ ID NO: 149123 - DNA, 379 bp, Arabidopsis thaliana columbia
aaaatggagtataggtttcatatctctcgcttttctcttcatcacttcctcttcagctgagttcatcattcaacaggtcacaaagggcagaggaatagagtacaacagttcttacagtctcgaggagaatcttggagtgacaagagagttgagagaagagcgaccatcgagtaagatagtgacaataacaagcttctcagtgattaaaggcagaggagaaccctatgaatcctctgtttttgaggctgctggttacaaatggagattggttttgtacgtgaatggtaataaaaacgacggtggaaatgatcatatttccctttacgcaaggatcgaagagacaaactctcttccattaggttgggaagtgaatgttgat

SEQ ID NO: 149124 - DNA, 399 bp, Arabidopsis thaliana columbia
aaagcaactcaaagctcaaatcgaaatttctagtttctctttatcattcacgctaagtgttcaatcgaatcaagattaagtatggcagaagagtacaagaacaccgttccagagcaggagacccctaaggttgcaacagaggaatcatcggcgccagagattaaggagcggggaatgttcgatttcttgaagaaaaaggaggaagttaaacctcaagaaacgacgactctcgcgtctgagtttgagcacaagactcagatctctgaaccagagtcgtttgtggccaagcacgaagaagaggaacataagcctactcttctcgagcagcttcaccagaagcacgaggaggaagaagaaaacaagccaagtctcctcgacaaactccaccgatccaacagc

SEQ ID NO: 149125 - DNA, 410 bp, Arabidopsis thaliana columbia
ggcagaaactttgtggatctagaagaacacactaatcagaagagtgaaaaagatgaacgacttgatgacgaaatcgtttatgagttacgttgacttgaaaaaagcagcgatgaaggatatggaagcaggacctgactttgatcttgagatggcttctacgaaagcagacaagatggatgagaatctgtcatctttcttagaagaagcagagtatgtgaaagcagagatgggtttgattagtgagacgctggctcggatcgaacagtaccatgaagagagtaaaggtgttcacaaggcagagtctgtgaagtctcttcgtaacaagatctctaacgagattgtgtctggtttgaggaaggcgaaatcgattaagtcgaagctggaagagatggataaagccaacaaggaga

SEQ ID NO: 149126 - DNA, 412 bp, Arabidopsis thaliana columbia
ctcgtcggctaatatctcagacgagaaatcgacgccggagaaaaagcaatttagttctctttcatctaccaaaatgacatcttctctgtcacttcactcctccttcgtaccttccttcgctgatctctccgaccgaggtttgatcagtaagaactctccgaccagtgtttccatttccaaggttccaacttgggagaagaagcagatctcaaatcggaactctttcaagctgaattgcgtgatggagaaaagtgtcgatggtcaaactcattctaccgttaacaataccactgatagcttaaatatttttgcagctatgaatatcaaagaagaagctagcgtctctacattattggtgaacttggataataaatttgatccctttgatgcaatgagcactccgctttaccaa

SEQ ID NO: 149127 - DNA, 400 bp, Arabidopsis thaliana columbia
aaaaaaatcaaatctctctctttctctctctaatggcggcgacattaggcagagaccagtatgtgtacatggcgaagctcgccgagcaggcggagcgttacgaagagatggttcaattcatggaacagctcgttacaggcgctactccagcggaagagctcaccgttgaagagaggaatctcctctctgttgcttacaaaaacgtgatcggatctctacgcgccgcctggaggatcgtgtcttcgattgagcagaaggaagagagtaggaagaacgacgagcacgtgtcgcttgtcaaggattacagatctaaagttgagtctgagctttcttctgtttgctctggaatccttaagctccttgactcgcatctgatcccatctgctggagcgagtgagtc

SEQ ID NO: 149128 - DNA, 397 bp, Arabidopsis thaliana columbia
taaaaagctcttaaactattcttccagcgaccggaagaaacgaataatcggaatcgaaaaattcgaaaaaggaactgagaagaaacagatctgaagatggagtgtgtatttggtctagttgggaatggattcgctatcgtggcggcggatacatcagcagttcacagtattcttcttcacaagaacaaagaggacaagatcatgactcttgactctcacaagctcgtcgccgctagtggtgagcctggtgaccgggttcagtttacggagtatgttcagaagaatgtgtcactgtatcagtttcgtaatgggattcctttgagtactgctgctgctgctaacttcactcgtggagaacttgccactgctttgagaaagaatccatattcggtgaaca

SEQ ID NO: 149129 - DNA, 406 bp, Arabidopsis thaliana columbia
cttcggtcgatacaagactctaagtgtcgcggtcatcgcatgttttcttggatcatttgtgatactattgactgcagcagtgccacaactgcatccagctgcatgtggaacagcggcggatagcatatgtaacgggccaagtggaggccagatagcgtttctactgatgggtctcgggttccttgtagtgggagcgggcggtattagaccgtgtaacttagcttttggggctgatcagtttaacccgaaaagcgaatcagggaaaagagggattgacagtttctttaattggtatttctttaccttcactttcgcgcagatcctgtcgctgactctagtcgtctacgttcagtctaatgtcagttggacgatcggtctaaccatccctgccgttctaatgtttttg

SEQ ID NO: 149130 - DNA, 408 bp, Arabidopsis thaliana columbia
gacaaatccaaaagtatgagaaggaagcaaaagacaaaagtagagaaagctggtatatggcatatataatggatacaaatgaagaagagaggcttaagggcaaaacagttgaagttggaagggctcactttgaaacggagagcactagattcactattttagatgctccggggcacaagagttacgtacccaatatgattagtggagcatctcaagcggacattggtgtgctggtgatttcagctcgaaaaggtgaatttgaaacaggatatgagaggggtgggcagacacgtgaacatgttcaacttgccaaaacattgggtgtctctaaactgattgttgttgtgaacaagatggatgacccaactgaactggtcgaaagaaaggtacgatgaaatagaacaaaaa

SEQ ID NO: 149131 - DNA, 407 bp, Arabidopsis thaliana columbia
ctcggcatttggtgaatcactatgacaggctgagacaagaagtcgaagctcaggcaactgatgtactgaggagaagatcaaagttgaaggaatctgatatttctgaagaagcctacataaaacttaagaattctgaatcgagattggctgagctcaaatcaagtatgaaaactcttggtaaagaagctactaaggccatgttggaagtcgacgatcagcagcagaacgtaacttctcagcgcctccgtgctctggttgaagctgaaagatcatatcatcgtaatgctcttgatatcctcgacaagctacattccgagatgattgctgaggaagaagctataggatcatcaccaaagtcactacctttacatatagaggatagtgcttctcttccccaacaagaaccg

SEQ ID NO: 149132 - DNA, 404 bp, Arabidopsis thaliana columbia
cgtattcgtatcaaccttctctaaaccctcatgaaacttctgctacaagtttctgcaaaaacacaccatatccagatgcatgttttacctccttaaaactatccatctccatcaacataagccccaacattctctctttcctcctccaaaccctccaaacagctctttccgaggctgggaaactcaccgatctcctttctggcgctggggtctccaacaacctagttgagggacaacgtggctctcttcaagactgcaaagatcttcaccacatcacttcttctttcttgaaacgatcaatctccaagatccaagacggtgttaacgattcacggaaactagccgacgctagagcgtacctaagcgccgctctcaccaacaagatcacatgcttggaaggtctt

SEQ ID NO: 149133 - DNA, 408 bp, Arabidopsis thaliana columbia
caaaaacagttgggggaagaagaagaagatgaaacgacgaagaacccttttataaagtctcaatcttctaatccaagatctgccctttttcagattctatctcaaagctttcctcgatcttgtgatgtattgaagccggagactgagagagatgttgtgcttcaaaggctcggttaagcggaagaagcaatccggttctgttccggtttatctgaatgtctacgatctaactcctatgaatgcttatggttattggcttggacttggtgtttttcattctggtgttgaagttcatggagttgaatatgcatttggagcacatgaatcatcaagcacaggtatttttgaagtggaaccaaagaagtgtcctggtttcacgtttaggaaatcgattcttgtggggaaaac

SEQ ID NO: 149134 - DNA, 406 bp, Arabidopsis thaliana columbia
gaaagaccacaccggatctatgctaagatcatttatttacaacggaatggtatacaaagtcaacagatcgtaatgaatacaaaataagatttatggctacacaaactgttgaagatagttctagatctggtccaagaagcactactgtagggaagttattgaaaccattgaattccgaatatggtaaagtagctcccggatggggaacgacccctttgatgggtgttgcaatggctctatttgcggtattcctatctattattttggagatttataattcttctgttctactggatggaatttcagtgaattagactgagaagaatcttgaagttctagcttttagctcgatacaaaaaagtaaagtatgcaggtctaacaattttagcctattctcctttggtag

SEQ ID NO: 149135 - DNA, 407 bp, Arabidopsis thaliana columbia
gataaactctaaatcctcacagcagatcacgtgctaatcacatggctccggggcttactcaaaccgctgatgctatgtccaccgtgacgataacaaaaccgtcactgccatcagtccaagacagcgatcgagcttacgtgacgtttcttgctggaaacggtgattacgtgaaaggagtcgttggtttagccaaagggttaaggaaagtcaaatcggcttatccactcgtagtagcgatgttacccgacgtcccggaggaacaccgtcgtatacttgtggatcaaggatgcatcgtccgtgaaatcgaacccgtttacccacccgagaaccaaactcagttcgccatggcttattacgtcatcaactactctaaactccgtatctggaagtttgtggagtatagtaaa

SEQ ID NO: 149136 - DNA, 409 bp, Arabidopsis thaliana columbia
ttaattattatcatacaataacagcgtttcaccattctcttttcaatattttcagttactttctataagaaccattcacttattcttttttctctctatctgtgattatggcttcctctatttccgctgctgaagtgaaagttgtcccagaagagtataatttcttgcaaaaacatgtcgccttcttcgacagaaacaaagatggtatcgtttatccctcggagacatttcaaggatttagagcaatcggatgtggatatttgttgtcaacattcgctgctgttttcatcaacatcagtctcagcagcaaaactcgtccggggaaaggattctcattctcgtttccgatagaggttaagaatgtccgcctagggatacatagcagcgattcaggcgtttacgacaagga

SEQ ID NO: 149137 - DNA, 402 bp, Arabidopsis thaliana columbia
gcaaaagaagaagagaaacaacaagaagtagtaatggcttcctctatgctctcctccgccgctgtggttacatccccggctcaggccaccatggtcgctccattcaccggcttgaagtcatccgctgcattcccggtcacccgcaagaccaacaaggacatcacttccatcgcaagcaacgggggaagagttagctgcatgaaggtgtggccaccaattggaaagaagaagtttgagactctatcttacctccctgaccttagtgacgtcgaattggctaaggaagttgactaccttctccgcaacaagtggattccttgtgttgaattcgagttagagcacggatttgtgtaccgtgagcacggaaacactcccggatactacgatggacggtactggaca

SEQ ID NO: 149138 - DNA, 404 bp, Arabidopsis thaliana columbia
cgaagtaagaaaagaaaatggagattttgacgagcatagctattacagtagcaacaacgatcttcatcgttttgtgtttcactatctatcttatgatcagaatctttaccgggaaatcaagaaacgacaagagatatgctccagtgcatgccacggtctttgatcttctcttccacagcgacgagttatacgattacgagacagagatcgcgagagagaagccgacttacaggtttttgagtccaggacagagcgagatattaactgcagatcctcgtaacgtggagcatattctcaagacaagattcgataactatagtaaaggacacagtagtagagagaatatggcggatcttctaggacatgggatctttgctgttgatggagagaaatggagacaacag

SEQ ID NO: 149139 - DNA, 411 bp, Arabidopsis thaliana columbia
ggagaagcctaagtctgatcccggaatgtctgtctccgagctcaaagaacgccacgccgtcgctacggagaccgttaataacctccgtgaccagcttagacagagacgcctccagctcctcgataccgatgtggcgaggtattcagcggcgcaaggacgtactcgggtgagcttcggagcaacggatctggtttgttgtcgtactcttcagggacacaccggaaaggtttattcattagattggacaccggagaggaaccggattgtcagtgcatctcaagatgggagattaatcgtgtggaatgctctaacgagtcagaaaactcatgctattaaactcccttgtgcatgggttatgacatgtgctttctctccaaatggtcagtcggttgcgtgtggtggattagacag

SEQ ID NO: 149140 - DNA, 407 bp, Arabidopsis thaliana columbia
  unsure (1)..(407): unsure at all n locations
cgagagaaggagangagtcttaatcgccattgaaatggctctcaaagcttcacctgttaccggattattccctcctctccgtcctactgcttcttcttccccttcgacttcttctaatcgcccttgttccctcaggattctccctctcagaacatctttcttcggtaactcaagtggagcgctgagagtgaatgtgttgagattagcttgtgataatagactcaggtgcaatggtcatggtgctactatgaatctttttgaacgattttcttgngtggtcaagtcatatgcaaatgcgctcataagctcttttgaagacccggagaaaatcctggagcaaactgtcattgaaatgaatagtgatttgacaaagatgcgtcaagccactgcacaggttttagcatcac

SEQ ID NO: 149141 - DNA, 406 bp, Arabidopsis thaliana columbia
agaagcttgcgggtgttcttgatgtctacgaggcacatctctcaaagagcaagtacttggccggtgacttcgtgagcttggctgatttggctcacctcccgttcactgattacttggttggtccgattgggaaagcttacatgatcaaagataggaaacacgtgagcgcgtggtgggatgatattagcagccgtcctgcgtggaaggagactgttgccaagtattcattcccagcttaagatgtgttcatcttcttggtgatgtggtttgtgttttatgagaggtttaataaaagtggaactaaatgtacctcttaatgtaatgttgccacctctgtgttctctttccttttgtagtttaataagtatctttatggctttgtgaggcttttcaatttaaagaaaaa

SEQ ID NO: 149142 - DNA, 407 bp, Arabidopsis thaliana columbia
cacattttaagaaagaaaaaaaaaaattgaaagttgagaaaagttcctagagtttgaagacatgaagttcacggcgcttgtgttcattgtgttcgtggtgggtgtcatggtttctccagtttcaatcagagcaactgaggtcaaactttctggaggagaagctgatgtaacgtgtgatgcagtacagcttagttcatgcgcaacaccaatgctcacaggagtaccaccgtctacagagtgttgcgggaaactgaaggagcaacagccgtgtttttgtacatatattaaagatccaagatatagtcaatatgttggttctgcaaatgctaagaaaacgttagcaacttgtggtgttccttatcctacttgttgatttttgagatattgctaaaaaaagttgttaatga

SEQ ID NO: 149143 - DNA, 406 bp, Arabidopsis thaliana columbia
ctaattcctctcttcagcttcttgtgttgtgacgcatactcgtcgcagtcttgagatatggccgccgcagtttccaccgtcggtgccatcaacagagctccgttgagcttgaacgggtcaggatcaggagctgtatcagccccagcttcaaccttcttgggaaagaaagttgtaactgtgtcgagattcgcacagagcaacaagaagagcaacggatcattcaaggtgttggctgtgaaagaagacaaacaaaccgatggagacagatggagaggtcttgcctacgacacttctgatgatcaacaagacatcaccagaggcaagggtatggttgactctgtcttccaagctcctatgggaaccggaactcaccacgctgtccttagctcatacgaatacgttagcc

SEQ ID NO: 149144 - DNA, 402 bp, Arabidopsis thaliana columbia
ggcatcatctctttgtgcttcttctgccatcgctgccatttcttctccaagtttcttgggtggtaagaaactgaggctgaagaagaagttgactgttccagctgtgtccaggccagatgcgtcggtgcgcgccgtcgcagctgatccagatagaccaatctggttcccgggaagcactcctccagagtggctagacggtagcctccctggtgacttcggatttgatcctcttggtctttcatcggacccggacagtctaaaatggaacgtacaagccgagatagtccactgccgatgggctatgctaggagccgccgggatattcatcccagagttcctaacgaagatcggaatcctcaacactccgtcatggtacacggcgggagagcaagagtatttcac

SEQ ID NO: 149145 - DNA, 406 bp, Arabidopsis thaliana columbia
aaaatctctaatagattatcctaagatcaaacaatggcaacaaacgcttgcaaattcctttgcctagttctcttatttgcctttgtcacccaagggtatggggatgattcttattctctcgagagcttatctgtgatacaatcgaagaccgggaacatggttgagaacaaaccggagtgggaagtgaaagtgctgaattctagtccctgctatttcactcacacaacgttgtcatgtgtccgtttcaaatcggtcacacccatcgacagtaaggttctatctaaatccggtgacacgtgtctcctcggcaacggcgactctatccatgatatcagtttcaaatacgtatgggacacaagcttcgacctcaaagttgtcgacggctacatcgcttgctcttaaaccc

SEQ ID NO: 149146 - DNA, 323 bp, Arabidopsis thaliana columbia
cttctctcatcgctcgtctctccaacacgcttctcgacggtcgttccttcaccctcaagtaccagttacctagcgaagaccttgactctctcatctccgtcactaccgacgaagatctcgacaacatgatcgaagagtatgaccgtaccatttccgcttccaattccaccaaaccttcgcgtctccggttgtttctattcacctccaagcctgaggctactcaatctatgggtcagatccttgagagctctgccaagagcgacgattggttcctcaacgcactcaatagcgccggtcttctcaatcgaggattctcagattct

SEQ ID NO: 149147 - DNA, 388 bp, Arabidopsis thaliana columbia
ctcattccacacatattttcccattaaacacacaaaaacgagttacaattacttaacacggcaacgaggttgctttctccttctgttcgtctcactgtacagttaaaaatggctctatggactgtgcaagttctttagctgctcaaccacatcaagagtattgcttagctgatgataatcggagcgatgaagagcgtttatttgtcccgaggttttggttccatcattgaaatggttctttgcaggtccaccacgagggcagtgacgcacacggattctatgctttcttgtctcagtcgagaaccttccgtggaccacgaggaccaatatgacttccttgtctcttgtgtcttcacaccaagagttctgagcaacaccgtccacaaac

SEQ ID NO: 149148 - DNA, 404 bp, Arabidopsis thaliana columbia
ggaaaattcttcgcagcttgagagtaccagggacctaattatgggtgcagcaaatactaatgaagggagaggtttaggatccggcttgtttggttctgctaaggtttctgcggctgttcggatctctaagaaaccaagcagtggtttaggagctttgctgggaaatgcagcctccaagaagaaatctcgaactgatgagaaggtgaaggaagatgtgaagctcgaacagataagatcatctgtaaacctgtcattccattcgtttacagagaaagttcctgactcaaagtcaacttctgaaacatctccgaaagtttatgggaagcctgaagagatgtccagtactatgccagcctctgtttccaaggaagatggtgtgaaagagttgaaagatgattcagaag

SEQ ID NO: 149149 - DNA, 376 bp, Arabidopsis thaliana columbia
gaagaatcatgggacaaggaccatcgggaggattgaatcggcaaggagatcggaaacctgatggtggagataagaaagagaagaagtttgagccggcggcaccaccggctcgtgtagggaggaagcaaaggaagcagaaagggccagaggcggcggcgagacttccgacggtgactccgtctactaagtgtaagctccggttactgaaattggaacggatcaaggattatttgttgatggaggaagagtttgtggcgaatcaagagaggttgaaacctcatgacgagaaagctcgggaagatagatctaaagttgatgatcttcgtggtacacctatgagtgttgggaatttggaagagttgattgatgagaatca

SEQ ID NO: 149150 - DNA, 344 bp, Arabidopsis thaliana columbia
ttcgtctactagatcagatccaaagcttccttttccagctatggctgcttcagtacactgtaccttgatgtccgtcgtatgcaacaacaagaatcactctgctcggccgaaacttccaaactcggctttgttacctggattcgacgttgctgtttaagctgctgctactcgattcaagaaggaaacatcaaccacaagagccactttgacgtttgatccaccgaccactaattctgagagagctaagctgagaaaacacaccattgatccttcttcttctgatttgcaaccaattgcattttttgaagaatgctgttctattagctctaaagaacacatttttt

SEQ ID NO: 149151 - DNA, 349 bp, Arabidopsis thaliana columbia
gcggcagcggggctaccgcggtgattgtagatggaagtacggccaaaggagctttctctatctcctcaaagcctcacttcttcaacccttttactaacccatctgcagcttgttgaatagtagtaattcgtttaattttattacttaaaatattaattttcttttttttttgggtggcattttaactagtaggaagaacacaaaaactatgttagaaagggtaagatgcgtatagatggtctcttctacaattcccactttgtttttcagtgggattgctggtttgagaaaaagaatagtttgtaattattattttatttgtagaaaaaggtaaaatagtcttcacttt

SEQ ID NO: 149152 - DNA, 407 bp, Arabidopsis thaliana columbia
cttaaatacaccacatctgtcatatccgacggccaccatccacggccatccacaagccgcgggacacaacgtctatacattcgtctcaacacattacatttcctaagctcacatatccactccttaaacaaaacactctctttaaacccgaggatacttccggcaactcgaaaacgttaccgccatagaaacaacaattcatcttcttatttcgatttcacatacgctggaatcgaatccgcttgccaacacgtttcagaggtcgcggcttaccgtttgattttcctcgattcaaactctgttttgtacgagagcctctacgtaggagaagttgcgaacgcgaggatcagaccagcgttacgaatcatgaaacagaacttaacattgatgtcagcgattcttgcgga

SEQ ID NO: 149153 - DNA, 407 bp, Arabidopsis thaliana columbia
cttttaacagaatcttctttatctgaaaatatctaaagaaaatggtattgaactttagagataagtcctgcatttttctggcaattctttgttgtttatcattgagttgtatagtaaaagcatcagtctcttatgatcgtaaagctgtgatcatcaatggacaaagaagaatccttctctccggttccattcactatccacgaagcacccctgagatgtggcctggcctaatacagaaagccaaagaaggaggcttggatgttattgagacttatgttttttggaatggccatgaaccttctcctggacaatattattttggagacaggtatgatttggttaagttcatcaagttggtgcaccaagctggtctctatgttaatctcagaattggcccttatgtttgt

SEQ ID NO: 149154 - DNA, 408 bp, Arabidopsis thaliana columbia
attgagtgaaaatatttttttttaaatggttgtggtgaacaaaacgaatctcttattgcttcttctctctctatgtctcaccctcgacctctcctccgcacaactccgccgtaacttctacgccggaagttgtcctaacgtcgaacaaatcgttagaaacgccgtacagaaaaaagtccaacaaactttcaccaccattcccgccactctacgcctctatttccatgattgtttcgtcaatgggtgtgatgcatcagtgatgatagcgtcaacaaataataataaggcggagaaggatcatgaggaaaattttatcgttggccggagatggattcgacaccgtcattaaagctaaagaagctctcgatgccgtcccaaattgtcgtaacaaagtttcatgcgctgata

SEQ ID NO: 149155 - DNA, 342 bp, Arabidopsis thaliana columbia
gaagaagcaaaatggccacaagcgcatcagctttgctctcaccaaccacattctccactgcaatctcccacaaaaaccctaactccatctcattccatggccttcgtcccctccgtctaggtggctcctcctccgccctacccaaactatcaaccaccgggagaaaatcctcctccgctgtcgtgagagctgagctaagcccttccatcgtcataagtctcagcacaggtctctccctcttcctcggccgtttcgtcttcttcaacttccagagagagaacgtagcaaaacagggcttaccggagcagaacggaaaaacccatttcgaagctggagatgatc

SEQ ID NO: 149156 - DNA, 406 bp, Arabidopsis thaliana columbia
gaaaacgttaaatgatcttctcctccgatcattagtctctttaatctttctcagcctcttcttgttcgtgatctctcttcctccggaaaaagatgtcggccggtaacggaaatgctactaacggtgacggagggtttagtttccctaaaggaccggtgatgccgaagataacgaccggagcagcaaagagaggtagcggagtctgccacgacgatagtggtccgacggtgaatgccacaaccatcgatgagcttcattcgttacagaagaaacgttctgctcctaccacaccgatcaaccaaaacgccgccgctgcttttgccgccgtctccgaggaggagcgtcagaagattcagcttcaatctatcagtgcatcgttagcatcgttaacgagagagtcaggacc

SEQ ID NO: 149157 - DNA, 386 bp, Arabidopsis thaliana columbia
cttgcaaaccataaccaaaccatcatcatcatcatctcttggtgacagaagaaaagagttgaggaacagagaaaatggcagcacaagcacttgtgtcttcttcacttacctcctctgttcagacagctagacagatatttggctcaaaaccagttgcgtctgcctcacagaagaagagttcctttgttgttaaagctgctgcaactccacctgtcaagcaaggagccaacagaccattgtggtttgcttcatcgcagagtctctcttacttggatggcagcttacctggtgactattgattcgaccctcttggtctttcagacccagaaggtactggaggattcattgagccaagatggctagcatacggagagatcatcaacgga

SEQ ID NO: 149158 - DNA, 396 bp, Arabidopsis thaliana columbia
acgatactacgccgcaagtaccgaccacatctcacaatggccgttatgattccgttctttcaacagctaaccggaatcaatgtgattatgttttacgctccggttttgttcaacaccattggtttcacgaccgatgcttctctcatgtccgctgtggtcactggctcggttaacgtggccgctacgcttgtttctatctacggtgttgacagatggggacgtcggtttctctttcttgaaggtggtacacaaatgcttatatgccaggctgtggttgcagcttgcataggggccaagtttggggtagacgggacccctggtgagctaccaaagtggtatgctatagtggttgtaacgttcatttgcatctatgtggcgggttttgcgtggtcgtgg

SEQ ID NO: 149159 - DNA, 396 bp, Arabidopsis thaliana columbia
tgaagaaagaagaagagatgggagttttctcattcgtgtgcaaaagcaaaggcggagaatggaccgcaaagcaacacgaaggagatcttgaagcttcagcttcttccacctacgatctccagcgcaagcttgttcagactgctctctccgccgattcatctggcggcgttcagtcttctttctctcttgtctctcctacctccgccgtcttcgtggtggtcattggtggtggtggtggtggaggatttgctgccggaggaggtgcagctgctggaggtggtggtggtggtgaggctgccgcagccacaaaggaggaagagaagaagaaggaagaatctgaagaggaagagggagactttggatttgatctctttggttaagagacctaaaacaact

SEQ ID NO: 149160 - DNA, 365 bp, Arabidopsis thaliana columbia
aactcgaaacttcccttttatttatgagaagaaagtgttattacaagtgaggtgccgcagacacatattttacacgtacgttaaaggtaaagggacgtgattacaaactgaccatactttattaagaaaaagaaaaacgttttgatttaagcctcgacaatctcctcgatcaactgttgttgttgcctaccggcagcgcgggtcaaagtggtctcaagtgtgttgaacttgatcttcctagcttcctcgggagagatctggaaaccatttgatatgacctccaatggcaatgccctcaagagcgaggttctacccgccaaagtgctgatcattgcgttttcattagttttgaaagagatccactc

SEQ ID NO: 149161 - DNA, 404 bp, Arabidopsis thaliana columbia
gctgtggaacgaatcttcgaagtcgaaactgcgtgtctacggattgaatctctgcagcagcttacgaccactgacccttttgcttttgattcaatcgatagacgacggatacaagttctcgctatcgccgagccggagccggagtctgagctgaagccctgtatctgtaactcttccaacagtggacataccttgagagatgaagatcgttcgcagggattttgttcgtaatggacccggaagcgttaagatggtggcagaggactctgatgatctctggtatgcttataacttgattgctgtgggcgatagtgtaatggctgtcactttcagaaaagttcagagagagatacctggtgggggaagagactctgaacgtgttaaactgaagctggaagtacaag

SEQ ID NO: 149162 - DNA, 309 bp, Arabidopsis thaliana columbia
aaaaataaaaaaaaaaaaaacaaaccataaatttaaaaaaaaaaaaaaaaaaaaaaaaaggagaggtgggttacaggaaaaaaaggctacacacgcacttgtgtggggggccagtttcttattttgtttcgcccgattgacagttatttggctgagaaccagtttgggtgtgcctcacaaaagaagagtttctctgatgttaaagctgctgcgactccacctgtcaagcaaggagccgactttcttgaaggtggtacacaaatgcttatatgccaggctgtggttgcagcttgcataggggccaatttt

SEQ ID NO: 149163 - DNA, 384 bp, Arabidopsis thaliana columbia
ggattctactgtgcaccataaaatagaagatgagagaaatccttcacattcaaggtggtcaatgtgggaaccagattggttccaagttctgggaagttgtatgtgatgagcatggtattgatcccactggtcgttacgttggaaactctgatctgcagttggagcgtgtcaatgtttactataacgaggcatcctgcggaagatatgttccccgtgcaattctcatggatcttgagcctggtactatggacagtgtcagaactggaccttatggtcaaatcttcaggcctgacaactttgttttcgggcaatctggtgctggaaacaactgggctaaagggcattacactgaaggagctgagcttattgatgctgtactcgatg

SEQ ID NO: 149164 - DNA, 403 bp, Arabidopsis thaliana columbia
caagttgatcctaagaagtaccacaagatgaaggagagacttgttggtgtctctgaggaaactaccactggtgttaagaggctttaccagatgcagcaaaatggaactcttttgttccctgccattaacgttaacgactctgtcaccaagagcaagttcgacaacttgtatggttgccgtcactcactccctgatggtctcatgagggccactgatgtcatgatcgctggaaaggttgctgttatctgtggatatggtgatgttggaaagggttgtgctgctgccatgaagactgctggtgctagagtcattgtgactgagattgatcccatctgtgcccttcaagctttgatggaaggacttcaggttcttacccttgaggatgttgtctcagaagctgata

SEQ ID NO: 149165 - DNA, 399 bp, Arabidopsis thaliana columbia
taacgataacggcgatgtggccgttgatttcttccatcgttataaggaagatatccaactaatgaagaatctaaacacagacgcctttagaatgtctatcgcatggccaagaatatttcctcatgggagaaaggagaaaggagtgagtcaagctggtgtgcaattctaccacgacctcatcgacgagctcataaaaaatggtataactccattcgttactgtttttcactgggacactccacaagatttagaagatgaatatggcggctttttaagcgaaaggattgtgaaggatttccgagagtatgcagattttgttttccaagaatacggtggaaaagtgaaacattggatcactttcaatgagccatgggttttctcgcacgctggctatgacgt

SEQ ID NO: 149166 - DNA, 404 bp, Arabidopsis thaliana columbia
cttagatcggagcaaaacaatggcggagatggcggataaggcgaaagtggaggagatggattgggaaggtattgatggagttcgtatgacttggaacctttggcctcgcactaaggttgaagcaagcaagtgtgtgattcctctcgccgcttcaatttcaccgatccgtcgtcacccccttatccttgatctcccttatgctcctctcgattgcaagacttgtaaagctcttctcaacgccttcgctcgtgttgatttcgccgctatgaactgggtctgtcctttttgctatcataggaatcatttcccttctcattaccattcgatctctgagattaatctccctggtgagctttatccccagtacactactgttgagtacacgttgcctcctgatccgtctc

SEQ ID NO: 149167 - DNA, 358 bp, Arabidopsis thaliana columbia
cacaacttcggagcgaatctatactttatctttttcttcttcttcttcttcttcttcctccgtttttttcatcttcttctctgtttcgagagatccactagtgaaagagtcagcaccatggccatggtcaaagagaaagaacaaaacactaaagacaaaaaactcctcgtcggcgtcatttggaacttctccgccgagctcaagctcactttcatggcgttacttgttctctgcactttagctactctcttacctttcataccttcttcattctctctctccacttccgattttcgcttctgcatcttacgcttttccttcgccgtccctctcaacaccaccaccaccgtagaagaat

SEQ ID NO: 149168 - DNA, 417 bp, Arabidopsis thaliana columbia
cttgacctctctgcttcccttcgtgctttttctctctctcactatcctctctctttctagtgtttgtttgatcctctgcgtactctgttcttcttctctcttcagataaaacaagtcctgcatattgaagatctgatgtcttatcgattgctaagtgtggataaggatgaactggttacgtcaccttgtttgaaagaacgtaactacttgggtctctctgattgttcctctgttgatagctcaactattcccaatgttgttgggaagagcaatctcaatttcaaagctactgaactgaggctaggtcttcctgagtctcaatctcctgagagagagactgatttcggtttgctgagtccgagaacacccgatgagaagcttctcttcccgttgctaccttctaaagacaatggttct

SEQ ID NO: 149169 - DNA, 284 bp, Arabidopsis thaliana columbia
ctctttcaatcgtgcaagcaagattgtttggattagctcacttttctgtaggttatatattcacttatgcggctttcttgattgcctccacatcgggcaaattcggttaattatttatgtattctatccgcaatcatatattttttttaataaaaaaaatataggtatgcactcttatatttatttctacatctaggatccgatttgtatcattatcattgataataacaggaactgaagcattatggcaaagaaaagtttgatttatagggagaagaagaggc

SEQ ID NO: 149170 - DNA, 434 bp, Arabidopsis thaliana columbia
gtcatctctaacaggtcggacgagagatagagagagagagagaggaagaggaaggatagatttaccgcatcggcgttccaaaaggcagacgaactcggagagacagatagcgatagcgagacatggtttctcattgatttttgtttgacaatcctttcttttcttttttttttgttctttcgaaaaacgaaaattttcgttggttccctccgatttggcctgctggtgaagatatggccggagctaaagattcgggttgcgatgatgatctccgaattgctggtggatgtgaccctggaaaacgcgggaacccggaggattcctcgtctcctgtcgaagtctcgtgctcgatttgcctcgaatcggtgctcgatgatggtaccagatccaaggctaagctccaatgtggtcaccagttccatttggattgcatt

SEQ ID NO: 149171 - DNA, 434 bp, Arabidopsis thaliana columbia
tgccgtttcgttttttcctttctcattcaattcaagaagaagaagaaaatctccgcccaaaaagtttcttcctttgaagtctttaagccctaatctatcactgtctgtgaatcaacgcctccctgcgtttgtttctcagttgaaaaaaaaaagataatgatcgcaaaaaacttcctccttttgctctgtttcattgccttggtgaacgttgaatcgagccctgatgaggcggtcatgatagctctgagagactccttgaagctatctggaaatccaaactggtccgggtcggatccttgtaagtggtctatgttcataaaatgcgacgcaagcaatcgggtcaccgcgatccaaatcggggacagaggaatctcaggaaagctacctcctgatctcggaaagctaacatctttgacgaagttcgaggtcatgag

SEQ ID NO: 149172 - DNA, 420 bp, Arabidopsis thaliana columbia
gttgtgtagaagccaatgaaacaattttaagcatgtaaaaaagtccggttgttgcaagccaccaacagattgcggtttttcatatgtgaatgagaccggatgggacacgagaggagggatgataggaccgaaccaggactgtatggtgtggagcaacgaccagagcatgctctgttatcagtgtagttcttgtaaagctggtgttcttgggagtttgaagaagagttggagaaaagtatcggtgatcaacattgtggtacttatcattctagttatcttttacgttatcgcttatgcagcttataggaatgtcaagaggatcgataacgatgaaccggctggtgaagctaggatgacaaaatcacattctagtcatttccatctttgatcaaaatttggaacagttcaaaaaaatgtatc

SEQ ID NO: 149173 - DNA, 426 bp, Arabidopsis thaliana columbia
gtttctgattaccaaacgtcgtcaatacatttcttcaaattacgtttcttttattctttcgttactctcaacaaattttgatatctgattggtgttgattccaagtaagaaagatcaaaactttaggtaaagtatggatatgggtttccatgaaaatgagcaaaatcaagaatttgcgaatctaatggagattggatctgggcattacgggtgttcacattatagaagacgatgcaagattagagcaccatgttgtgatgagatttttgattgcagacattgccacaacgaagctaaggattctcttcatattgaacagcatcatagacatgagcttcctcgacatgaagtttcaaaggtcatatgctcgctttgtgagacagaacaagacgttcagcaaaactgctccaattgtggtgtatgtat

SEQ ID NO: 149174 - DNA, 416 bp, Arabidopsis thaliana columbia
atcaaatctctctctttctctctctaatggcggcgacattaggcagagaccagtatgtgtacatggcgaagctcgccgagcaggcggagcgttacgaagagatggttcaattcatggaacagctcgttacaggcgctactccagcggaagagctcaccgttgaagagaggaatctcctctctgttgcttacaaaaacgtgatcggatctctacgcgccgcctggaggatcgtgtcttcgattgagcagaaggaagagagtaggaagaacgacgagcacgtgtcgcttgtcaaggattacagatctaaagttgagtctgagctttcttctgtttgctctggaatccttaagctccttgactcgcatctgatcccatctgctggagcgagtgagtctaaggtcttttacttgaagatg

SEQ ID NO: 149175 - DNA, 430 bp, Arabidopsis thaliana columbia
ctctttccaccactcatctcctgttccacatcccatgactgctggaaacgcaacgttattggaaaacattatcctctgtgtcgtagctggtgttccattgattggatgttgcttgtttggtgttggatcattaagtgcgatctacggttacgctgttatgtttgatttcatgaggtgtttaggacattgtaacgttgagatattctctcacaagctgttcgagattcttccagtcttacgatatctcatctatactccaacgtaccatagtctgcatcatcaagaaatggggaccaacttttgtctatttatgcctctctttgatgttttgggcgatacacaaaacccaaactcatgggaactccaaaagaagattcgtttgagtgcaggggaacggaagagagttgccgagtttgtgttcttagctcac

SEQ ID NO: 149176 - DNA, 436 bp, Arabidopsis thaliana columbia
cggacgcgtgggggcttttgaagctctctgcataaacatgactttcaagcgcaggaatggtggcaggaacaagcataaccgtggtcatgtgaaaccaatcaggtgttccaactgtggaaagtgttgccccaaggacaaggcgattaagagatttatcgtaaggaacattgttgagcaggctgctattagagatgttcaagaagctagcgtctacgaaggttacactctcccaaagctttacgctaagacgcagtactgtgtctcgtgtgctatccattctcacgttgtgagagtccgatcccgcaccaaccgtagagttcgtaccccaccacctcgttttgccagacgcaaggaggatacacccaagcctgcacaacctggtcaggctcctcgccctgccggtggtgctcctgctgctcctcgtgcctgaagactt

SEQ ID NO: 149177 - DNA, 415 bp, Arabidopsis thaliana columbia
  unsure (1)..(415): unsure at all n locations
gagaatttgggcgcttgggagtccctgtttattaaataaaccaaggattttaccatgactgcaattttagagagacgcgaaagcgaaagcctatggggtcgcttctgtaactggataactagcactgaaaaccgtctttacattggatggtttggggttttgatgatccctaccttattgaccgcaacttctgtttttattatcgcattcattgctgctcctncagtagatattgatggtattcgtgaacctgtttctggatctcttctttacggaaacaatattatttccggtgccattattcctacttctgcagctattggattgcatttttacccaatctgtgaagctgcatccgttgatgaatggctatacaacggcggtccttatgaaactaatgttctacactttttac

SEQ ID NO: 149178 - DNA, 382 bp, Arabidopsis thaliana columbia
ggagacgaaaatatggtgcacgtttgctactaccgcaactatggaaagaccttcaagggaccacgtcgtccttacgagaaggagcgtcttgattctgaattgaagctggttggtgagtatggtctgcgtaacaagcgtgagctctggagagtgcagtactctcttagccgtatccgtaatgctgctagagatcttttgactcttgatgagaagagtccaagaaggatctttgaaggtgaggctttgctccgtaggatgaaccgttacgggcttcttgatgagagccagaacaagctcgattacgtcttggctttgactgttgagaactttcttgagcgtcgtcttcagactattgtgttcaagtctggtatggctaagtcta

SEQ ID NO: 149179 - DNA, 418 bp, Arabidopsis thaliana columbia
agcaatcatgggaaagtaaataacagagagcggttattgatgccaaaaagagagtcaatgcttccgagagaatgggagaggaacaatgatgagccatacaaagccagagtagtttccattcacacaggagaaatgactcagatggattggtttgacatggaactccctaaggctgaagttttgatactacacttctcttctgacaagtatgtattgcctcctttcattgctaagatgggcaagcttacagcgctcgtgatcatcaacaatggtatgtctcctgcgcgtctacatgacttctccatctttaccaatttggccaaactcaagagtctctggcttcagagggttcatgtccctgaactctctagcagtacagtgcccttgcaaaacctccacaagctgtctctcatattct

SEQ ID NO: 149180 - DNA, 395 bp, Arabidopsis thaliana columbia
gtgccaacaacaaaccaaaaccgttcctttctttttccatttttcttgtttttttttgttttgtttttggagttgtgtttcacctgttgttggttctttagttcgtcttctgggttaaacaaagaagatcggttctgtttttatttttattttgaaacaagaagaagaaagcaagctacgatgatgtttcttgctgacgccaatagataaagacacgacttttacaaagcttaggacctgcattctcaccgtaattagctcttcttctcaatttctccaaataaatttgtgtgtttttaaagtgtgtggtgcaagttatcaaaaaatgtcgatctttctgcaagaactggacgagaccattcaccgtatgacaacaacttctatttgtttctggt

SEQ ID NO: 149181 - DNA, 416 bp, Arabidopsis thaliana columbia
tctctttctactcgtgactgatgaagagaaacagagagcataactttatatccagccgattttttttcaaatttcttaccttttgctctcactaaagccatgttcttacctttatagtgagtgttatctaaactcttttgggtcttttgcaaaagaaaccagttttcaaagttcaaaattttgtttttaaaaatggagaatttagtgaagagctgcgcagggatcgagaagaaaagaagcaatttgactccatcgatggaagatatacttacagagtcaaaggagagaagcagcactagcggagcgagctacgaaagctccttcaccaccaccgtcgcttcgtcttctccaccaccaccaccgtcgcagattctgggttggccgattagaaaagcttcatttcggaaaaattcgaa

SEQ ID NO: 149182 - DNA, 413 bp, Arabidopsis thaliana columbia
acggtcatcatctcctccgccattatcgtcttctctctctctctctccgccacctctcttcaattctgacgcttctcagatcctccgatccggcggcgttacttttgctgatacacttctctccatttcttctttttgttcgccgagaagctaaggagaattcttcctgaaaacgcgttgatggatctgatgtatagctacggattagaattgtgtaattctctctaaaatctgttcgttgaccagctcgaacgaggtttgattgggtttctctgtttatgctcatcaggggttttgttttgtgtatgccttccgatcactgtttgtcgtctgtttcgtccgcggaactcaagagcagagagattgttagtgtacggatatgcagaagagtggtgttaatcggaacccttctt

SEQ ID NO: 149183 - DNA, 419 bp, Arabidopsis thaliana columbia
cttctctctcccattcgtctccaaagagattacagttttgagcatttctcatctctcgaagctcttctctgtgtgtgtggcgatggctgctaattcgataatggcttcctccaaacccctaatctccctgtcatccaaccaacaaccaaaccgagtccaaattcccaaattcgccaaacttccccaaattcccaaatccctcacttcctccaccgatctccgtagcaaagcactatcactctcctccgccaccgccaaatccttagctttaatcgccgctttcgctcctccgtcgatggcggaggcgatggagaaagcacagctcttcgatttcaatctcacgcttccgatcatcgttgttgagtttctcttcttgatgttcgctctcgacaaggtctattactctccgcttggtaact

SEQ ID NO: 149184 - DNA, 416 bp, Arabidopsis thaliana columbia
ctttctctctctctttttctccgcggaaggaatctcttcttctggttgcgtttgagtccgtacgaaaacaaaagaaaagagagagatggcggaagagaagaaagctccaatcagtgtctggactaccgtgaagcccttcgtcaatggcggtgcctctggtatgctcgctacttgcgttatccagccgatcgacatgattaaggtgaggattcaacttggtcagggatctgcagccagtataaccaccaacatgcttaagaatgagggcgttggtgccttctacaagggattatctgctgggttgctgaggcaagcaacttacacgacagcccgtcttggatcattcaagttgctgactgcaaaggcaattgagtctaatgatggaaagcctctaccgctgtatcagaaggcactat

SEQ ID NO: 149185 - DNA, 310 bp, Arabidopsis thaliana columbia
aaaaatacatcgtgcattcactatttatagtcttaaagaagaccagaattgcaaaggggtcaccaaagaatcagagatgggtgatattcaaagaaatgtgataaaaattggatgaaaagttggtcttccccctaatgttgaaactattggaagagctctgttttgctccttcttcttgctttttttttggcatgattacatggtgctcagattcaactggaatggaacacagtattaatggtgcccaaagttttgctaattagggtacctgattaagcattattatgacagataatatcatagttagatc

SEQ ID NO: 149186 - DNA, 421 bp, Arabidopsis thaliana columbia
caagaaacacacatattcaaacttcttcaaagaaaagaaaatagcaaaaactagaatgaagaagacaatggaggatccaagcaagatcatgagaaggtcaattcacactttcctccaaaactaccaccgtgtcaccaccgcagccgccgtggccctccctttctccgccggtctcctcctctctcagcctttcttttttttttcctcttccacccttcacatgaggcttaacatgctcttccgcggagcgggtttctctttttctcatgacttcttcaacatcttaagccttaaactctcacaaaccctatcttcctctttattcactcttcctttctccctcacattcctccttttatccaaagcttacgtcatcaaacttctatcaaacaatcactctgcagattcctcctctggtttc

SEQ ID NO: 149187 - DNA, 421 bp, Arabidopsis thaliana columbia
ctgaaatcaccatgagtatggaagcaacggagtctacaagatctctctgacgacgccgattacgccgcttctcaacaacaaggatcggctagtatgatgcgtagcgatagcggaaagagaagtttacaaagtgaacacgaagacgctgtattgatttatttgaaagataacgttgcaattcatcctacacagttcgcatctgagaggattagtggtagattgaagttgactaagcaagactctgttctctttctgtcgtggattccgtacaagggacaaacatcaaatgcaaagctatcagagaaagacaggagtctttataccatcaccgcggttctcgttactgaagtgaggtccattaggagacacactcctgctctcggatggcagtatgtaattgttggcctgtcttctggacttg

SEQ ID NO: 149188 - DNA, 420 bp, Arabidopsis thaliana columbia
ttttcgttctttcagctccttgccttacttttaagctaactcttttttttaactactctcgggtcaggttccaagaccccccgattcaagtattcgttggagaagcctcaccacccacttgacccactaacgacacctgaaataaagagagtccaaaccatcctctcgggtcatgatccgggtttcgggtccgggtcaaccatcattcacgccatggctctcgacgagccggataagcaacgtgtcattcggtggaagaaaggtgatcgtctcccgccgcgaagagcggagattcttgctatgtctaacggcgagagtcacgtgctcacggtggatcttaaatccggtcgggttgtttctgatttggtcaacccgacttttggatacccgattcttactatgaaggatatcatcgcagtc

SEQ ID NO: 149189 - DNA, 419 bp, Arabidopsis thaliana columbia
aaaaggatcctcgatgtcttacacacatgtttgctgctgagatttttatgcacaggttccttttatctagtcctgttcgaacgcgtaatcctgatgaagctgattggttttacacgccaatttatcctacttgcgacctcactcctaccggcttgccattaccgtttaaatcgccgcgtatgatgagaagttcgatacaactaatctcatcaaattggccttattggaatcggactgaaggagctgatcacttctttgttgtgccccatgactttggagcttgcttccattatcaggaggaaaaagccattgaaagagggatacttccactactccagcgtgccactttggttcagacatttggtcaaaggaaccatgtctgtttggacgaaggctcgatcactattcctccttttgca

SEQ ID NO: 149190 - DNA, 451 bp, Arabidopsis thaliana columbia
  unsure (1)..(451): unsure at all n locations
ggacccggcccggaattccggggcggccccagccgtccggttaatcctggggatcaaatccggttggctataagaactccggtgaagccgattgttcgatgacgaagtttcgaatttccagagaagcgggtgaggtcttcaattacggcggacgaggcgaaagaggattgattactcaacatcacagaagaaaaaaggcagtcctgcatgcgaagaagaggtgtgatcgcgattttttgttttatcaaattggttacaaaggagagaagatgcgtcaacagagattcggatatcgaaaaacagagattctatcatcagattcgtcaatggagatacctgtttgtcgaggtctggaagctgattttagaggtaaggaagatggcgaatgaaacggngttggacttcactgagcagattattactttggagaacangtatagacaggcaccgg

SEQ ID NO: 149191 - DNA, 410 bp, Arabidopsis thaliana columbia
gagccacacactcacaaattaaaaagagagagagagagagagagacagagagagagagagattctgcggaggagcttcttcttcgtagggtgttcatcgttattaacgttatcgcccctacgtcagctccatctccagaaacatgggtgcaggtggaagaatgccggttcctacttcttccaagaaatcggaaaccgacaccacaaagcgtgtgccgtgcgagaaaccgcctttctcggtgggagatctgaagaaagcaatcccgccgcattgtttcaaacgctcaatccctcgctctttctcctaccttatcagtgacatcattatagcctcatgcttctactacgtcgccaccaattacttctctctcctccctcagcctctctcttacttggcttggccactctatt

SEQ ID NO: 149192 - DNA, 426 bp, Arabidopsis thaliana columbia
ccaaatcttatcactactctaaaagaatcttcatcatggcctcagtaacctcagccaccgttgcaatcccatctttcaccggccttaaagcctcaaccatcaaatcatccgccaccgtcagaatccaaactgctgctgttgcatcaccgaagcttacagtgaagtcatctctaaagaacttcggagtcgcggccgtagcggctgcagcttcaattgctttggccggaaacgccatggcaatagaagttctcttgggaggaggggatgggtcgttagcttttattcccaacgacttctctatagctaaaggagagaagattgtgttcaagaacaacgctggatacccacacaatgttgtcttcgatgaagacgagatcccaagtggcgtcgacgtggccaagatctcgatggacgagcaagatctac

SEQ ID NO: 149193 - DNA, 385 bp, Arabidopsis thaliana columbia
gttccgctcactgctgaatccaagtattctgctcttggagccgattctctcgacgggggggagatagtgatggcgtgggaggaaaagtttaacataagtgtggaggaatctgatgctcaaaacattacgaccatccaagaggcggctgatttgatagaggaccttgatcaaaagaaacccgcggcggaaacttcctgaaccggctgtcttttctttcctgacctattcttgccttcagagcgttttattacggtatattagaccgtttgttatttttatttatttcggaagctaagattgggtgttgacaatgagacaactatggtacctttgagattgtatctttgtggtgatcgtgcttattactgtatttatattttatttt

SEQ ID NO: 149194 - DNA, 423 bp, Arabidopsis thaliana columbia
caaaaaaaaaatggcaagcgcgaatccagaaaccgccaaacccacgcctgcaacggtggacatggctaatccagaggagcttaagaaagttttcgaccagtttgactccaacggcgacggcaagatctcagtcctcgaactcggcggtgtgtttaaggctatggggacttcctacacagagacggaactcaaccgcgtgctcgaagaagtcgatacagatcgcgacggttacatcaacctcgacgaattctcaactctctgtcgctcgtctttcttcgccgcagagatccgtgacgctttcgatctctacgatcaggacaaaaacggactgatctccgcctctgagcttcaccaggtgcttaaccgtctcgggatgtcttgctctgttgaagactgtactcgtatgatcggacctgtggatgc

SEQ ID NO: 149195 - DNA, 423 bp, Arabidopsis thaliana columbia
ggaatcagcgcagcccgtggcaaatgaggagatagttgcacagctagtctcaatgggatttagccagcttcactgccagaaagctgccatatacttccaatgctggggttgaagaggcaatgaactggttactttctcacatggatgatccagacatcgatgcaccaatctcccaccagacatctgacattgatcaatcaagcgttgataccttactctcctttggttttgctgaagatgttgctcggaaggcactaaaagcctcgggaggagacattgagaaagcaacagactgggtattcaacaaccctaatgcatctgtttcagacatggatgtatcctctagcaattcagcgcagactccggctcaaagtggattaccagatggaggagggaaatacaagctgtttggaatagtaagtc

SEQ ID NO: 149196 - DNA, 424 bp, Arabidopsis thaliana columbia
cttgggcagaggaaaaagtttatagcgactcttttcctctaaaagggtctgtctcttccttcttctctcttcagatctccatttcacggatcaatcctgtgtttgaaacaatgggtgttgaagttgtaaactctggtggatttgaggttgctccggctcctttcgaggggaaacctgagaagaacgggaagctggaccaaggaaaaggagatgatgcccccatcaattttggttcagtcggtgagctaccaaagaatgccgaagagaataataacaaagtggtcaactctgatgcacccaaaaatgcagcagaagagtggcctgtggctaaaccgaatccactctttctaccttgttaaataccgttcttacgctgaccccaaaattaaagctaagcttgatctagctgataaagagcttgaaa

SEQ ID NO: 149197 - DNA, 424 bp, Arabidopsis thaliana columbia
cttatattccctgaggaggttctaccacgtggaaacgctctttaatggaactttagctttagctggtcgtgaccaagaaaccaccggtttcgcttggtgggccgggaatgcccgacttatcaatttatctggtaaacttttgggagctcatgtagcccatgccggattaatcgtattctgggccggagcaatgaacttatttgaagtggcccattttgtacctgaaaagcccatgtatgaacaaggattaattttacttccccacctagccactttaggatggggggtaggtcctgggggagaagttatagacacctttccgtactttgtatctggagtacttcacttaatttcttctgcagttttgggctttggcggtatttatcatgcacttttgggacccgaaactcttgaagaatctttt

SEQ ID NO: 149198 - DNA, 383 bp, Arabidopsis thaliana columbia
gtcactgtcaagggtcgcaaggcaagagtttcttctacaagtgcttctgccgctgaaggcgatgctgcagctgcagtgactcgcaaagctgctgctgcacgtgcaaacggtaaggtagcttccgcatcaagggtgaagggttcctctgagaagaagaagggcaaaggaaaaaaggattgagcgtgaggtgctctcatattctcatgcatgcgtattcctcaaacctatatattaataatatcctaaaaactacaaactcacaatctctatcttgttcataaataaaaccagagattgtcacctctatatattattatgaaatgctactctttctcatgtaatggcttttttaaaaataaaataaatgcaataaatcttatact

SEQ ID NO: 149199 - DNA, 383 bp, Arabidopsis thaliana columbia
ctatttacgaggtaatggtggtcttcctccttggagaaactcggtcacacacgacgttcctcatttgtctgctactcaggattcgatttcttgggatgttgatgttgttgagatcttgactgattccgaattcaagacggagtctgcgaaagcgccgccaccgaagacgacgtctccaccgccgcatcggagaccgacgagttcgccgttgtcggctgagtctccaaggacttcgtcttctctttcagacagatccgattcagattcggttgagtcttcgcctaaatctgatggacgaaccatatattaccatgtcgctgactaggaaggacacgtggaagatgaaacaactgttggatatgctttcacgtttaaaggaaata

SEQ ID NO: 149200 - DNA, 424 bp, Arabidopsis thaliana columbia
ccgactagatccagctgttctttctcgtctcaagcaattctctgcaatgaataaactaaagaagatggctttgaaggttatagctgagagtctctcggaagaagagatagctggtttaagagaaatgtttcaagcaatggatactgataacagcggggcaatcacatttgatgaactcaaagctgggctgagaaaatatggatctaccttgaaagacacagagatccatgatcttatggatgcggctgatgtagacaacagtgggacaatagattacagtgagttcattgcagcgacgatccatctcaacaaactagagcgggaagagcatcttgttgcagcgtttcaatattttgacaaagatggaagcggtttcataacaattgatgagctacaacaagcgtgtgttgaacatggcatggct

SEQ ID NO: 149201 - DNA, 420 bp, Arabidopsis thaliana columbia
gaaaccgtcaccctaccagtagtctcgacatcatgaaagttccagaagagctcacaagtgattctctacgagatgtcgatgacatatctttgagattctccacagaaggagatttcactctcaacggagaactagatgcaggtaccagacagaagaaactagtcgatgccataagtcaaatgaattcaatgaaaggttgctcagctgctatctacagccctggtagaaggcagatgctctttgtggttgctgttgattcctatgatgacaacggaaacatcaaagcgaatttgaacgaaatcatcaagaatatgataaaagctgcagatttgacatcgggtaaaggaaaaataggttttgtgctagcctcaggttcaagcttacaagaagttgtggatattacgcaaaaaaacctgatta

SEQ ID NO: 149202 - DNA, 424 bp, Arabidopsis thaliana columbia
  unsure (1)..(424): unsure at all n locations
aatgtcttcttcttcttccgtaagaatctctctctccttcattttcttggctctgctaatctcaccggctgtgtcacaaacatgtaagtcacagactttttccggcgataaaacttaccctcactgccttgacctccctcaactcaaagccttccttcattattcctatgatgcctctaacacaactctggccgtcgtcttctctgctccgccggcaaagcctggcggatggatcgcgtgggcgattaatccaaaggctaccggtatggtcggatctcaaacccttgtcgcttacaaggatccaggtaatggtgttgccgtggtgaagacgctaaacattagctcctatagctcgctgattccgtcgaagctggcgtttgatgtttgggatatgaaagccgaggaggcggcnagagatggagga

SEQ ID NO: 149203 - DNA, 421 bp, Arabidopsis thaliana columbia
ggagccctttgtttctctacacacatctcacatccccctatctctctctctcttcaaacgttttagttccccaaaaaaatatcaaaagaactaaaagaaaaaccctagaagccgaagaatctcctactcgttgtcgatcggatcacctaactaattactcgttgataatcattatatcgagaaatatgattaattttgaggccacggagctgagattagggctaccgggtgggaatcacggaggagaaatggctggaaaaaataatggtaaaagaggattttctgagactgttgatctcaaactgaatctttcatcgacggctatggattcagtttccaaagtcgatttagagaatatgaaggagaaggtcgtaaaaccaccagccaaggcacaagttgtgggatggccaccggtacgatc

SEQ ID NO: 149204 - DNA, 415 bp, Arabidopsis thaliana columbia
  unsure (1)..(415): unsure at all n locations
aatattgcacccgcaccggtacctcnngttctgagcgannttcgttgaagcccgtgannatctggnnaagtaagggttcaaatcatggnntaatatctcaagnncttccannaggctgnnttgctgatantnncattcgtaccaacaatatgggtcccctcgttctatnggttgaagatnngcttcttgatgcctggtggaagggattggttgttacctaattgatgggaatgctattcttcgtgaggctagatgtncgctcatctctgcagcttatagtcaatgattgagnttgagcccgtaccgcaaagatgaagaagttggtgattgggaccaacgtcttgttattgttctagctggntgaaatgcttcacgttgcagaagcgtttcttgagaagaattaccatcccacagt

SEQ ID NO: 149205 - DNA, 424 bp, Arabidopsis thaliana columbia
ccggaaaaaaaatctcaccggagaaaaaataaatctcaccgacgacgaattcgatcatggaggtgttatctacttcctcacctctaacgcttcactcccaccgactcctctctgcttcttcttcttcttcacatgtcacctccatcgccgcttcttcactttcttcattcgcttcttcatatctcggaatctccctttctaaccgcacgatccaccgcttctccacaactccgacgaacttaagacgatttcctcaaagaaaacggaagaaattcactccgatttcagcggttttcgaacggttcaccgaacgagcgatcagagctataatcttctctcagaaggaagctaaatcgttgggaaaagatatggtttacacgcagcatcttctcttaggtttgatcgctgaggatcgtgatcctca

SEQ ID NO: 149206 - DNA, 422 bp, Arabidopsis thaliana columbia
ggtaatttggtccatgattctgttccagttgataaggacgaggctaataatcttgtgattaaactgtggggtgaaaagcggttttctacgcctggtctgaagctgaaaaaccatgtggatcttgttgagcttctcggtattgcagataccaaaagaggtgctgaaatcgctggagcaagaggctttttcttgaaaggagatggtttgatgcttaaccaagctcttatcaactttgggttaactttcttgaaaaagagaggattcacaggattgcaacctccttttttcatgaggaaggatgttatggccaagtgcgcacaattggcacagttcgatgaagagctttacaaggtgactggtgaaggagatgacaaatacctcattgcaactgctgagcagcctctttgtgcgtaccatattga

SEQ ID NO: 149207 - DNA, 424 bp, Arabidopsis thaliana columbia
aaaaaaaagaaaacacaaaaacaaagattataatggcttcctcaaccatggctttgtcctcccctgccttcgccggaaaggctgtgaagcctgccgcatcagatgtcctcggaagcggccgtgtgaccatgaggaagactgtcgccaagccaaagggtccatcaggcagcccatggtacggatctgaccgagtcaagtacttgggtccattctccggcgagcccccgagctaccttaccggtgagttccccggtgactacggatgggacaccgctggtctatccgccgacccagagaccttcgccaggaaccgtgagctagaagttatccacagcagatgggccatgctcggagccctaggctgcgttttccctgagctattggctaggaacggagtgaagttcggagaagcggtttggttcaa

SEQ ID NO: 149208 - DNA, 414 bp, Arabidopsis thaliana columbia
ggcagactgaaaaatgaacgcagcgcttgcaacaaccaccgccacaactcccgtactccgccgtgagacgcctcttcttcattattgttctctcacaacaaaatcgccggtttaccaaatcaacagagttagattcggatcttgcgtgcaaacagtcagcaagaaattcttgaaaatctcggcgagctctcagagcgcttcagcggcggtcaatgtcacggcggatgcttcgattccgaaagagatgaaggcgtgggtgtatagtgactacggcggagttgatgttctgaagctggagagtaacattgttgtgccggagattaaagaagatcaggttttgattaaagttgttgcggcggctcttaatcccgtcgatgctaagagacggcaagggaaatttaaagccactgattc

SEQ ID NO: 149209 - DNA, 418 bp, Arabidopsis thaliana columbia
aaaaaagcaaatatttattcgtaaatataacttcagaaccctttcaacaaaactctctctgttctttctccgtggagaagttaaagatgacgatgtcggagaactcaagaaacttggaagctggtttgctactgaggaagaaccaaaacgacatcaacgaatgtcgtatcactgctgttgtacttttcagtactttcgtttctgtttgtggctctttctgcttcggttgtgcggcaggttattcatcagttgctcaaacagggatcataaatgatttaggtctctctgttgcacaatactccatgtttggttcaatcatgacttttggaggaatgattggtgccatcttcagcgggaaagttgcagatctcatgggtcgaaaagggactatggggtttgctcaaattttctgcatctt

SEQ ID NO: 149210 - DNA, 418 bp, Arabidopsis thaliana columbia
caaatcttaaacgttttactttgtgctgcactactcaacctcaatggccgcctcaacaatggctctctcctcccctgccttcgccggtaaggccgtcaagctttcccccgcggcatctgaagtccttggaagcggccgtgtgacaatgaggaagactgttgccaagccaaagggcccatcaggcagcccatggtacggatctgaccgtgtcaagtacttgggtccattctctggcgaatcaccgagctaccttaccggagagttccccggagactacggatgggacaccgccggactttcagctgaccccgagacattcgcaaggaaccgtgaactagaagttatccacagcaggtgggccatgctcggagccctaggctgcgtcttccctgagcttttggctagaaacggagtcaag

SEQ ID NO: 149211 - DNA, 415 bp, Arabidopsis thaliana columbia
gcttcgtacatttcgcctagctttcttcgttctagggtttcggatcttacttaattacccaaaacccttgaatccattactctgtgtgagcttaaatctcttaccttttatcactttcaatcgattgggtattaagttgtaaaggaaggaacttggaatcatgaagcttgggcttttcactctctcgtttcttctgatcttgaatctagcaatgggtagattcgttgttgagaagaacaatctcaaagttacatcacctgattcgatcaaaggtatttacgaatgtgccattggtaatttcggagttcctcaatacggtggtactttagtcggcaccgtcgtctatcctaaatccaatcagaaagcttgtaaaagctactccgatttcgatatctccttcaaatccaaacctgga

SEQ ID NO: 149212 - DNA, 417 bp, Arabidopsis thaliana columbia
  unsure (1)..(417): unsure at all n locations
cgaagcaggattcagcgacggaggaggagaaaatgtgatcggaaaggattcgttctccgttgaacagagtggtgattgctactctcgcaacaatcacccatattttgatcttcttctccagaatctcccattccagtttctgcatctgtgtagaggttagcttctcgaaccctagatgagacaatgtgtcgacgatgatctttttgcgaaacttcttgtagattttaacacaatccttctcgtaaccagaggagatcatgcaatttgctatcatcttcaaatcaacaatagcatcagaattccctcctcctcctatgtctntacctaattccgatgaggattcagagtaaagctctccatctgatgaagaatccgaagcggttccacttgatctcgaaggtatgttggattcagaag

SEQ ID NO: 149213 - DNA, 426 bp, Arabidopsis thaliana columbia
atttttattcagggttttgctacttcaggtcttttaaacaaaatgcctcagtctgcaatattagtaccagctctccagtcccagtggttaatgatgcacgtaagtatgatgatattaggctatggcgctctgttatgcggatcattattatcaatagctcttctagtgattacatttcgcaaagtcggacctactttttggaaaaagaatataaaaaaaaattttttattaaatgaattattttcttttgatgtactttactacataaatgaaagaaattctattttactacaacaaaacattaattttagtttttctagaaattattataggtatcaactgattcaacaattagatttttggagttttcgtattattagtcttggatttatctttttaaccgtcggcattctttcaggagctgtc

SEQ ID NO: 149214 - DNA, 421 bp, Arabidopsis thaliana columbia
caaaaagaacaatggcagcgagtgcatctccaatggcgagccagctaaggagcagcttctcctccgcttctctttctcagcgtctcgccgtcccgaagggcatctccggtgctcctttcggtgtttctccgaccaaaagagtctcttccttcactgtccgagctgttaaatccgacaagacaacattccaagtagttcaaccaatcaacggtgatccattcatcggaagtttggaaactccggtgacatcaagcccattgatcgcgtggtacctttccaacctccctggataccgtaccgccgtcaaccctcttcttcgcggtgtggaagtgggcctggcccatggtttcttcttagtgggcccattcgtcaaagctggcccattaaggaacactgcttacgccgggtcagccgggtcttt

SEQ ID NO: 149215 - DNA, 421 bp, Arabidopsis thaliana columbia
ctttcttattcgtaacaaagttattgtaaacttatagaatggttgtgaaactatatggacaggtaacagcagcttgtccacaaagagtcttgctttgttttctcgagaaaggaattgaatttgagattattcatatcgatcttgatacatttgagcaaaaaaaaccagaacatcttcttcgtcagccatttggtcaagttccagccatagaagatggagatttcaagctttttgaatcacgagccatcgcgagatactacgctaccaagttcgcggaccaaggcacgaaccttttgggcaagtctctagagcaccgagccatcgtggaccagtgggctgacgtggagacctattacttcaacgttctggcccaacccctcgtgattaacctaatcatcaagcctaggttaggcgagaaatg

SEQ ID NO: 149216 - DNA, 421 bp, Arabidopsis thaliana columbia
gcagaaatagctagagttgatgcaagttgttcgactttcattttggtgcattcttctttgggcatgctcactattgcactctgtggatcagaagcacagaaggagaagtatttgccttctttggctcaattgaatactgtggcttgttgggctttgacagagcccgacaatggaagcgatgcaagtggtctaggaacgactgcaacaaaggttgaaggaggttggaaaattaatggacaaaagcgttggattggaaacagcacctttgcagatctgttgatcatctttgcgaggaatacaacaactaaccaaatcaacggattcatagtcaagaaagatgcgcctggcctaaaggctactaagatcccaaataaaataggtttacgtatggttcaaaatggagatattctactacagaatg

SEQ ID NO: 149217 - DNA, 425 bp, Arabidopsis thaliana columbia
aaagaagatagatagagagagagagagagagtaaaaacctaaagggtgatatacttatataaaaattaatttaagattgtgattaagtggttcactatatttaagttactttgaggagctactaatcatgggtcatcactcatgctgcaaccagcaaaaggtgaagagagggctttggtcaccggaagaagatgagaagcttattagatatatcacaactcatggctatggatgttggagtgaagtccctgaaaaagcagggcttcaaagatgtggaaaaagttgtagattgcgatggataaactatcttcgacctgatatcaggagaggaaggttctctccagaagaagagaaattgatcataagccttcatggagttgtgggaaacaggtgggctcatatagctagtcatttaccgggaagaa

SEQ ID NO: 149218 - DNA, 426 bp, Arabidopsis thaliana columbia
gaagaggaagaagaagaaggataagaagtaagccaactactgaagttgaggtaaaggaggaagagaagaaagggtttatggagaagttgaaagagaagcttcctggacacaagaaacctgaagacggttcagccgtcgctgcggcaccggtggttgttcctcctcctgtggaagaagcgcatccagtggagaagaaagggattcttgagaagattaaggagaagcttccaggataccaccctaagaccaccgtagaggaggagaagaaagataaagaataagaagattatcattaaagatattaagaataatgatggttgatttgctttgattttttttttttttttattgtgatgattgatcatcttttgcttttgtgatgtgtaagtttgttggcttttttgttgattacaatttcttattttt

SEQ ID NO: 149219 - DNA, 420 bp, Arabidopsis thaliana columbia
atcagatctagatctaaaagaagagcgtcttcataaacgcccttcttcttcttcgtcttcttccctgcaaatctagtttctagatcttttctttcttccgcgaaacgaaaatgagagagtgcatttcgatccacattggtcaggccggtatccaggtcggaaatgcttgctgggagctttactgtcttgaacatggcattcagcctgatggccagatgccgagtgacaagactgttggcggaggtgacgatgctttcaacaccttcttcagtgagaccggtgcagggaagcacgtcccacgtgctgtctttgttgatcttgagccaactgtgatcgatgaggtcaggactggtacttaccgtcagcttttccaccctgagcaactcatcagcggtaaagaagacgcagctaacaatttcg

SEQ ID NO: 149220 - DNA, 378 bp, Arabidopsis thaliana columbia
catggaaattcttacatgagtgccctctttttcgccctcattatacttcttgttgacggattcccagagttgtctatgacggctcaacgtctagccgtgttttataagcagaagcagttgtgtttctatcctgcatgggcgtatgcaatccctgcaacagtgttaaaggtccctctctcgttctttgaatctctcgtttggacctgcctctcatactatgtcattggatacacccctgaagcatccaggttcttcaagcagttcattctactctttgctgttcacttcacctcgatatccatgttccggtgtctagctgcaatcttccagacagtagttgcttcaatcacagctggcagttttggtatattattcaca

SEQ ID NO: 149221 - DNA, 405 bp, Arabidopsis thaliana columbia
tcgatctctctttcatatacaccatattaaacgaaccagttaattatgggtttaatgtccgggaaggtgtgtgtgtttatctttgtattcgctctagtcgctgaattttcgttcggaaatgttgaggttaacgacgacaaacactttttccacaaacctcgtccatttttacacaaacctcgtccattcctccacaagcatggcatttacaagaaaggtttcggtaagggtttgggcggtggaggcggtctatgcggcggaggtggtctaggaggcggtggtggcctaggaggcggtggaggtttaggcggtggtggaggtttaggcggcattggtggtggaggaggtcttggaggaggttatgttggttggggccattacttgatgagtggtgaggctcatgct

SEQ ID NO: 149222 - DNA, 422 bp, Arabidopsis thaliana columbia
gaagaaggtacttttgtcggccggcgcaaaaaccagatctcttcttcacgagtaaaaaccttctctagatcagtttattaagcaaccacccttttgctctgtttctaacaaaccagaagaagaaaaaagtttcaatttttcttgaagatgacggagtatgagaatgggaagaagaggaaagtacgaaacaaacaacaagtaaaagtacagttcttgtctcaaaggtatctaatcttatgcttttgttgtttcttcgtcttgctcttcttcttatcttccgaccgaatctccacactctctgttcgttccgattctctgagaccgtctcttcgtgttcctactctctccgttttatcatcatccatggattcgtttcaccgtggtagattccctccgttgagtgttgaagacagagttcaatt

SEQ ID NO: 149223 - DNA, 379 bp, Arabidopsis thaliana columbia
agcaggtgaaaaaatggcgaatcggaagttagagaagatggcatcgattgatgttcatcttcgtcaactggttcctggcaaagttagtgaagacgacaagcttgttgagtatgatgctttgcttctagatcggtttctcgatatcctccaggatttgcacggtgaagatctccgtgaaactgttcaagagctttatgagcattctgcagaatacgaagggaagcttgaacctaacaagctagaggagctagggagttttctaaattgttttagtccaggatattttctttggtatcttttagttttttattatatttttatttttcttatttttcttgtttagttttatttgttttttctctttttttctcattctttt

SEQ ID NO: 149224 - DNA, 414 bp, Arabidopsis thaliana columbia
atcagattctcaaagacttttcgcgaagagtctctgatccttaaatcgcttctctctcgcttgacctcatttcgtcgtcgaaatcagatccttgtgaaaatgccgaaacaggatatggagaagatggagcttcgtaagaacttccgtaatgtttggcataccgatcttacccacagtatccagaacgatactccttattgttgcttcgcgttgtggtgtgccccttgtgcatcatacttgcttcgcaagcgtgcgctttacgatgatatgtcaaggtacgtctgctgtgccggttacatgccttgtagtggtaggtgtggagaagccaaatgtcctcaactttgtcttgccactgaggtcttctgctgctttgcaaactctgtggcctcaactcgctttcttctgcaagatgag

SEQ ID NO: 149225 - DNA, 423 bp, Arabidopsis thaliana columbia
cggacccgtggggaagatagtttggggattgttttctataaaaagtgcagatattttctttgtcctagagaaagaggtgataggaaaaatgggtctccaagagcttgacccgttagcccaaatgagcttaccgcccggttttcggttttatccgactgacgaagagctgatgggtgaatatctctgtagaaaagccgccggtcacgacttctctctccagctcatagctgaaatcgatctctacaagtttgatccatgggttttaccaagtaaggcgttattcggtgaaaaagaatggtattttttcagcccgagggataggaagtatccaaacgggtcaagacctaatcgggttgccgggtcgggttattggaaagccaccggtacggataaagttatctcgacggagggaagaagagttgg

SEQ ID NO: 149226 - DNA, 414 bp, Arabidopsis thaliana columbia
gtacaaggaaaaagagagtgagcattctagtttggtggagttacataagacccatgagagagaatcatcaagtcaggtgaaagaattagaagcacacatagaatcatcagagaagttggttgcagatttcacccaaagcctgaacaatgcagaggaagagaaaaaactgctatctcagaaaatagcagaactctctaacgagattcaagaggcgcagaacaccatgcaagaactcatgtctgagtctgggcagttgaaagagagccacagtgtgaaagagcgagaacttttcagtttgagggacatccatgagattcatcaaagagactcatccaccagagcaagtgaattagaagctcaactggagtcctcaaaacagcaggtctcagatttgagtgcgagtctgaaagctgc

SEQ ID NO: 149227 - DNA, 404 bp, Arabidopsis thaliana columbia
atacagtggagatagtggccagaaagttcctttttcagaggcaaccggcaacgtaaccactccttacctgctgcggctcacaaacttaatccaccaattttaccatgctttagaaccttgggcatatatcaatggagaagcgagtcaaatacaagagctttgtgaaggatccaggaactcttggatccctcgaattaagtgaagtgatgctgctctttgtcccaaatgatcctaaatcagatttgaagcttaaagttcagactcacaacatcaaaagtcagaaatataccaaagaaggatcaaataaaccttcttggctcaatctgaccagcaagcagggaaggagtcatatctttgagttttgaaaataatcctgacatgcatgcttgtcgtgatttcatcac

SEQ ID NO: 149228 - DNA, 421 bp, Arabidopsis thaliana columbia
catcgatactcttactcgacgaagcaacaagtgctttagacgcagagtcggagaagagcgtgcaagaagcgctggatcgagtgatggttgggagaacaacggtggtggtggctcacagactctcaacggtaagaaatgctgacatcatagcagttgtacacgaaggtaaaatagttgagtttggaaaccacgagaatctgatatttaatcccgacggagcctactgttctcttcttcgtcttcaagagactggctcattgcagcgtaacccttccttgaatcgcacgctaagcagaccacatagtataaaatactcgcgggaactatcaagaacaagatccagcttctgttcagagagggaatcggtaactcgaccggatggggctgatccatccaaaaaagtgaaagtaacggtgggacg

SEQ ID NO: 149229 - DNA, 407 bp, Arabidopsis thaliana columbia
tctctctctaagagattatgtaggtgttaatcatttagtttgacaaaatggtgaagcttacagctgatgagctacgaaggattatggactacaaacacaacatccgtaatatgtctgttattgctcatgtcgaccacgggaaatccactcttactgattctttggttgctgctgctggtatcattgcccaagaggttgctggtgatgttcgtatgactgataccagagctgatgaggctgaacgtggtatcactatcaatgtcactggtatttctctctactacgagatgactgatgaatccttgaagaggtttactggagccagagccggaaacgagtaccttattaatcatattgtatcacctgggcacgtttgaatttttcttcttaggttactgctgctcttc

SEQ ID NO: 149230 - DNA, 407 bp, Arabidopsis thaliana columbia
aaaaaatttgagataatggccagaaagttcttcttcggaggcaactggaaatgtaacggaactgctgaggaggtgaagaagattgtgaacactcttaatgaagctcaggttccttcacaggatgttgtagaggttgtggttagccctccatatgtttttcttcccctggttaagagcacattgaggtctgacttttttgttgcggcacaaaactgttgggttaagaaaggaggtgctttcactggtgaagtgagtgcggagatgcttgtgaacttggatattccatgggttatccttggtcactctgaaaggagggcaatccttaatgaatcaagcgagttcgtcggagacaaggttgcctatgcacttgctcaaggtttgaaagtgattgcttgtgttggtgagac

SEQ ID NO: 149231 - DNA, 422 bp, Arabidopsis thaliana columbia
atcaccgattcagagagaacaccgaatatgaccgccgattcaaccgtcgcactcgttcatagcgtcgtttctaacggtgatgtctccaacggaaacacctccgcttcctctaagaaatctcgtgagattgaccgtcgccgccgcagacggaagcagaagaagaacaacaaagcatcccaagccgatgtagatgcatcggacgtttctgctgcttctgaatccaaagagaatacagatccccagccacaggtttgtgagcagattgtgatagagtatgttccagagcaagctgaatttgaagatggttttaacgatgagtttaaggaaatcttcgagaagttcaacttccgcgaacctcttgcctctgaagaagacggtacgaaagatgagtctgaggagaaagaagatgtcaaaaagaaggg

SEQ ID NO: 149232 - DNA, 417 bp, Arabidopsis thaliana columbia
cggacgcgtgggatctcttcttcatttctgtttggttgccgagaaaacgcaggaaacttttctgcaaaaaaactcggtgaccatattcaaaactttcccacgttaattctctcttctttgttttgtttcagattcattacttttctccaaaaaactttcttcaagatctgttcttttaaataattatggcggaagaacatcgatgcgagacgcctgaaggtcaccgtctctgcgttaacaactgcggtttcttcggaagctcagcgacaatgaatctatgttcaaactgttacggcgatctctgtctcaaacaacaacaacaagcttccatgaaatcaaccgtcgaatcatctctctctccggtgatcgcacctgttctcgaaaactacgcggcggagttagagatcccgacgacga

SEQ ID NO: 149233 - DNA, 410 bp, Arabidopsis thaliana columbia
  unsure (1)..(410): unsure at all n locations
cgattccattagcgttttctctccattaccgctgctttttatctccgatcttggagttatcagtagtacacacactatcctcgccgttgattactactcctcagctgcttccgccgtctctgccatctctcgtgccatcttggacaatgtctctgtcgcggtggttggtaaaggatgtgatcaagaagatccatgtatggttntgataggcgagatttcaccgatgacactcgcttgctgcgatgaaactgccgtagcagcggttgctacactctctgccggagatttaatgtcctatatcgacggtagtggtccgccggagagtctagttggagtagttaggaatcgnttggaagataaagggatggttggattaatctcactcattgattctttgtcgtgtcggcggg

SEQ ID NO: 149234 - DNA, 376 bp, Arabidopsis thaliana columbia
  unsure (1)..(376): unsure at all n locations
atttaaagcccattcgatatcctatttcacngtancatcaaaaaacacctcaaagaattattcattcaggcatcttctcaaatttttgtttgtgaaaaaaacccacatcaaaagatctctcatttattcgtttcgtttctgctgttttgagtgtcgggttcgttttagctgtaatctttttttccggcgttcgatttgaaaaaatccggggaacaggtgatcggaatcacggctatacacgggatatcacggggtgttagctcacatgtccatattgtccgacagaagggttgtttaatcgaaactaatcctttgccgcacggaggacgtggagctctgccgtctgaaggcggcagcccttccgatctcctctttc

SEQ ID NO: 149235 - DNA, 244 bp, Arabidopsis thaliana columbia
  unsure (1)..(244): unsure at all n locations
ctttctctctcattcncnnnnnagcttttccctggatatagnacacgnncgaagaagaccggtcgtgttcaaaaacatgaggtgtagagcacttaacattcgtagaagaaagagagtgatggttaatgtgagcgtaaggaagctcatgacccgtctacagcgaatgtgtgctccggagaccagttttttcggcgaggttgacggtgctacactttatcgactcacgggtgatcacattttttta

SEQ ID NO: 149236 - DNA, 400 bp, Arabidopsis thaliana columbia
  unsure (1)..(400): unsure at all n locations
gttttctacagccgcatcatccttctccctttgcgttttcttttgcgtgagattngtctgagaagtagctaaccatgggtaaagagaagtttcacatcaacattgtggtcattggccacgtcgattctggaaagtcgacaaccactggacacttgatctacaagttgggtggtattgacaagcgtgtgatcgagaggttcgagaaggaggctgctgagatgaacaagaggtccttcaagtacgcatgggtgttggacaaacttaaggctgagcgtgagcgtggtatcaccattgacattgctctctggaagttcgagaccaccaagtactactgcactgtcattgatgctcctggtcatcgtgatttcatcaagaacatgatcactggtaccttccaagc

SEQ ID NO: 149237 - DNA, 439 bp, Arabidopsis thaliana columbia
aatccatgctggagttttgctgcgttacattctcttttttgccaagcgtttgaccgggatcgtttcgcgtggaggatccattcatgctaaatggtgcttagcttaccacaaggagaactttgcttacgagcactgggatgacattctagacatctgtaaccagtatgatgtggctctttccattggagatggtctgagacctggctccatttatgatgctaacgacactgctcagtttgcagagctccttactcaaggtgaactaactcgccgagcgtgggaaaaagatgtgcaggtgatgaatgaagggccagggcatgtcccaatgcacaagattccagagaatatgcagaagcagttggagtggtgtaacgaggcaccattctacacccttggtcctttgactactgatattgcccctggatatgatcacattacc

SEQ ID NO: 149238 - DNA, 389 bp, Arabidopsis thaliana columbia
atttaaagcccattcgatatcctaaaacactctgtctgtaatttatcaccgcaaagaacattcattcaggcatcgttctaaaatccttgtgcgcgcaaaaaacccacatcaaaagatctctcatttattcgtctcgtttctgctggtctgagtgtcgggttccgtttagctgtaatctctttttccggcgttcgatttgaaaaaatccggggaacaggcgatcggaatcacggctatacacgggatatcacggggtgttagctcacatgtccatattgtccgacagaaggagtgttcaatcgaaactaatactttgccgcacggaggacgtggagctctgccctctgaaagcggcagcccttacgatctcctctttctcgccggcggcg

SEQ ID NO: 149239 - DNA, 434 bp, Arabidopsis thaliana columbia
  unsure (1)..(434): unsure at all n locations
cagaaaaaaaaaaanaggagcnntcatcgatatgtccttatnncattgaggaagaagaagaagagaatttggcttcttctttatcagaaatggaagctgggttttctggtaacaataataatagtaataaccatggaaatccccaaaacggtgtcgtttcttcaagccgtttctcttacggtagattaaacagtcttaggaacagtcagagttattattacaatcaatactctgtttcgtctccgagatctgttgtgtctggaagatttcatgatttcagattcgatattcaacaacctcatttcttggactcgtgtttcctctgtaagaaacctcttggtgataacagagacatctacatgtacagaggagatacaccgttttgcagtgaagagtgtagacaagaacagatagagagagatgaagcaaaagag

SEQ ID NO: 149240 - DNA, 395 bp, Arabidopsis thaliana columbia
  unsure (1)..(395): unsure at all n locations
gggaaggtggtgaacangaaggttctttccgtattatcaagctcagnctcagggactataccagcctcttgaatgcaatccaactctgcaaatggggtatgataatccggtatgctcagagcaaataactgcgacaacccaagctcaggcgcagcagggaaacggttacatcccggggtggatgctctgagagtcatgtgctgtgttaaagctcaccaacaaaagatcttttatatatataaaagtatagacacaagactttggatttgtagacataagtggctatatataatggtcctgaggatcttcaagacatttgtatcttttgggaatccttgcttatattaagaattcaaatgtgtggaacttgttttaacactgaaccatgacactgg

SEQ ID NO: 149241 - DNA, 385 bp, Arabidopsis thaliana columbia
  unsure (1)..(385): unsure at all n locations
cactactctcactgnaatcccttagttcttcttttcaaatttcaanggcgtccggtgatgttgagtatcggtgcttcgttggaggtctagcatgggccactgatgacagagctcttgagactgccttcgctcaatacggcgacgttattgattccaagatcattaacgatcgtgagactggaagatcaaggggattcggattcgtcaccttcaaggatgaaaagccatgaaggatgcgattgagggaatgaacggacaagatctcgatggccgtagcatcactgttaacgaggctcagtcacgaggaagcggtggcggcggaggccaccgtggaggtggtggcggtggataccgcagcggcggtggtggaggttactccggtgga

SEQ ID NO: 149242 - DNA, 345 bp, Arabidopsis thaliana columbia
ctgtgaactgttcgctcacacgcctaaacatctcctggtttgaggttgagttaccaatgaaagtggacgccattttcaaaccctttggtgcaatatcacagacactggacttgacgttgtttgggatccattccacaaagtaggatgagttcttgttctgaatgttcatcatctgctcgtcaacctctttggtgctcagctttccacggaacacagcggatgcagtcaagtaacgtccatgacgagggtcagcagcacacatcatgttctttgcatcccacatctgctgggtcagttcaggaacactcaaggcactgtattgctgtgatcctctcgatgtcaatg

SEQ ID NO: 149243 - DNA, 383 bp, Arabidopsis thaliana columbia
  unsure (1)..(383): unsure at all n locations
catctttctcctttggtggcaaacacttcgactgatagagagaaacganggcgtcgaactcgcttatgagctgtggcatagccgccgtgtacccttcgcttctctcttcttccaagtctaaattcgtatccgccggagttccactcccaaacgccgggaatgttggtcgtatcagaatggctgctcactggatgcctggcgagccacgaccagcttaccttgacggttctgctcctggtgactttgggtttgacccacttggacttggagaagttccagcgaaccttgagagatacaaagagtcagagctcatccactgtagatgggctatgctcgctgttcctgggattttggtaccagaagcattaggatatggaaaccgg

SEQ ID NO: 149244 - DNA, 322 bp, Arabidopsis thaliana columbia
  unsure (1)..(322): unsure at all n locations
cgaagatgaaccacctcgntcgnaattgctccttctgttactccgccttgaggtccgtttcgtgacctccgtcaatctgccgttacctctccacctccgattttctccgccgccgcttcaaccgttcgccagttcacttccgccggctatccttccaacagttttcaattgacgccgccgacgaattggggaatccggatagttccggagaggaaggcgtttgtgattgagcgattcggtaaatacgctacgacgttgccgtcggggattcatttcctcattcccgttcgtgggatcgtaatggcttatgttcatttctctc

SEQ ID NO: 149245 - DNA, 389 bp, Arabidopsis thaliana columbia
  unsure (1)..(389): unsure at all n locations
cggacgcgtgggcgttgactncgattttgtatatgataaggagattnngacgagcatagctgttacagttgcaacaacgatcttcatcgttttgtgtttcactatctatcttatgatcagaatctttaccgggaaatcaagaaacgacaagagatatgctccagtgcatgccacggtctttgatcttctcttccacagcgacgagttatacgattacgagacagagatcgcgagagagaagccgacttacaggtttttgagtccaggacagagcgagatattaactgcagatcctcgtaacgtggagcatattctcaagacaagattcgataactatagtaaaggacccagtagtagagagaatatgggggatcttctaggacatggga

SEQ ID NO: 149246 - DNA, 441 bp, Arabidopsis thaliana columbia
aaaacatcgatatatgcaaatgggtggggatttctgtgtttgcagtccagctactgtcattgctactagccatggttctcagagcgatggtttcaaccccgaaacccgaacttgacgaagaggaagatgatgagaacccaaggagtagaacttgggacccacttcttggtccgcaaggaaaccaagcgcctgctggctcaagcaagattgaaaactggagctcccgaatcagagaaaagtatggtttgaaccagagtccaccggtgaacccgaaaggttgatgaagccaaataatcatgtttctaaaactgcatgtgtccatatggtctctgtgaagctctctttctctatgttttgctctttgcaacttctcgagtgtgcataaacatttactcaaaacagtgctgtattgtgtttacacaaacggcataagcatcttcg

SEQ ID NO: 149247 - DNA, 438 bp, Arabidopsis thaliana columbia
agaaaacatacacaaatagcaaaacatggctatctgtctcttcctcgtctgcgcaactctcggcctctgcttccttctcaccaacgcttccatctaccgcaccgttgtcgaattcgaagaagatgacgccagcaaccccgtaggtccaagacagagatgccagaaggagtttcagcaatcacaacacctaagagcttgccagagatggatgagcaagcaaatgaggcaaggacgtggtggtggtccttccctcgacgatgagttcgatttcgagggcccccagcagggataccagctactccagcagtgctgcaacgagcttcgccaggaagagccagtttgcgtttgccccaccttgaaacaagctgccagggcagttagcctccagggacagcacggaccattccaatccaggaaaatttaccagtcagctaagta

SEQ ID NO: 149248 - DNA, 453 bp, Arabidopsis thaliana columbia
aaacggtggaggcagctgaaaaagcggcagcttcatttaataatgagcaagactggagaaatgggttgcgtgttaagcttcttgaacaagcagcaggaaagtttgcacagagaagaccagctcggagggaagtcgataaagaaaaggacactacaggcagagttcatgatcaaactggaggagagaaaaacaaaaagacgcgtgaacatcaaaatcaccgtctccatcattctgataatcctgctgatgatgacggtggcaatcatcagaaggataaaaatggaaacaaaggcagagttgtaggacaaggaagacgacagaatcatcaaggcggcaacggcattggacatggaacagcttcatcatcttctcatcctaattatcatcctgttgaggtctcaaagcgtccacctggcccgagaatgcctgatgggacgagagggttcacaatgg

SEQ ID NO: 149249 - DNA, 396 bp, Arabidopsis thaliana columbia
ctgactttctctctacgacagaatttttgatgtttttctctgcttatcgacacgatggttctcgaggcgactatgatatgtatcgacaactccgagtggatgcgaaacggagattactctccgtctaggttacaggcgcaaacggaagctgttaatcttctttgcggagccaaaacccagtcgaatccggagaatacggtggggattttgacaatggctggcaaaggagttagagtattgactactcctacctctgatcttggcaaaattctggcctgtatgcacggccttgatgtgggaggagagatcaacttaaccgcagctatccagatcgcccagctagctcttaagcatcgcccaaacaaggatcaacgcccaaggattattggttttggt

SEQ ID NO: 149250 - DNA, 419 bp, Arabidopsis thaliana columbia
  unsure (1)..(419): unsure at all n locations
ctcagatattataaggcacaaaaattttttcctctttataaacagacgcgaaaacngaactcggtgaaatgttacaatagctcatcagttctctcaacgatatactacccattcttgtacaaacaacaaccaatctccgctcttcaaccaacctcaatcccaacaactatgtcttacccaacccgatacgcgttctcctgcacccgcatccaatgttgaataacccactactatgcagtgaaacaatcggacgactcatccttctacgatctactgggcgacaccgaatgagtcacactcccagaaatcaaacaagcttatggacaactagctcgaaaatatcaccccagtgtgtgtcccccggatcgtggcgatgtatacacagaccggatgattcgggttcaagaagcttacgaaac

SEQ ID NO: 149251 - DNA, 397 bp, Arabidopsis thaliana columbia
atttgtctctctactttcataacactttttcctacggaatggcatagccactgctaacgtttgtgacatctgacgacatgcttaacggtctctggatgaggtctacctctctgtcattcatgaagaggagctgaaagaagcaatggcgtccatttcttggcgcaagagaagggcatcaatgaacatgtgcagattctgtccctgcatcatatcctgaatggcatggtgagtgattcccacactgtgatccgatactcgcccttagggaaaattgtatgtacggattcgtgcagaacggtctccgatgacaatctgttcatgggatttagacattgataatgcacgattgactgaaacatgagaaaaagatctgttgacacgttcaatatgcttcggg

SEQ ID NO: 149252 - DNA, 445 bp, Arabidopsis thaliana columbia
  unsure (1)..(445): unsure at all n locations
gcgagcaataatgagggtttctcattctctattcctttttgccataattgctttgggcctttgctttgtcaatgcttatgatccaagtccactccaagacttctgtgttgccattgatgacctaaaaggcgtttttgtgaatggtaggttttgtaaagacccggagcgagtcgatgcaaaagattttttcttctcaggtctcaatgtgcccgggaacaccaataatcaagttggctctaatgtgaccactgttaatgttgatcagatccccgggctaaacaccatgggaatatcattggtccgcatagactacgcaccgcatggccaaaatccacctcacacgcaccctcgtggctcaaagatccttgtccttgtcgaaagaacattatacgtcgggtttgtctcttcaatcaagataacaaccggntattcgccaaagtattgg

SEQ ID NO: 149253 - DNA, 409 bp, Arabidopsis thaliana columbia
  unsure (1)..(409): unsure at all n locations
atttcgagatcctctcggcttgttcgnnncttttgaatgatcccatctattggttctcgctagtctgagattctactaacttggatatctccgatactgaagaagcctccttcttctttttccgctcttcccgatgccgatcgataagatcttcaaagatgatgctagtgaagagaagggagaacgtgcgaggatggcatcatttgttggtgcaatggctatcagtgatctggttaagtctactttagggccaaagggcatggataaaatcttgcaatctactggtagaggtcatgcggtcactgttactaacgatggtgctactattctcaagtcacttcacatagacaaccctgcagctaaagttcttgttgacatctcgaaagttcaagatgatgaggttggtgat

SEQ ID NO: 149254 - DNA, 328 bp, Arabidopsis thaliana columbia
  unsure (1)..(328): unsure at all n locations
agaaactattcataaatgctngncttattntttgtgcatgattcaattcttaatttatgtttacacaccataaattgtttttttttctaaataagtttttgtctatccatagttgctaacgtggttttgcatttttataaatagctaataattccattttctattatcttatccgtcaccccttctctctatataaaaccattttcactttcctataaacgtacgtgataacccctatatatatctcaatggccggttcggttatggttccgtccgtttcaatcggtttagccttatctgtcttaatcttcttcgctcttccctcaag

SEQ ID NO: 149255 - DNA, 436 bp, Arabidopsis thaliana columbia
  unsure (1)..(436): unsure at all n locations
acatcctccaactttctcagataagtttcatcggttaaaggtcccggnctctacaccgaaatcttcaaaaaggccagagatcttctgtacaaagaccacaacagtgaccagaaattcagtatcaccactttctctcctgccggtgttgccatcacctcaaccggaactaagaaaggtgacttattgttgggagatgtcgcttttcagtcgaggcgaaagaacattactactgatttgaaagtttgcactgattctacttttctgatcaccgctaccgttgatgaggctgcacccggactgaggtcaatcttcagcttcaaaggtcctgaccaaaaatcttgccagggtgagcctgaatacttggatgagtacgccggtatcagcacaagcatgggattgactcaaaacccaactgtcaacttctctggtgtgattg

SEQ ID NO: 149256 - DNA, 348 bp, Arabidopsis thaliana columbia
ctgtgtcgttgcatacagagagatgtcctcattttctacactcagcaattctctagcgctgttgctctctctatctcttctgtgctccctcttcatcctgtcaccacacatgcttctatcttcctctaccctcatttacaccgtcgatgacctagacgacctctctctcttccaccgcgccgtcgactcttactacaccaacaacaaccggcgtctcatctccctctctacaaatccacccgcaaagatcgctttgctgttactaacaaactccgatctaaccttcttacctctctgggaaagcttcttgcaagggcaccaagatctctacaacggttacatccacgc

SEQ ID NO: 149257 - DNA, 404 bp, Arabidopsis thaliana columbia
  unsure (1)..(404): unsure at all n locations
gagaaaccagcatagttgtaatcttgaggatttgctatctttctgaaggatattnggcctaatttcgaaactcaaggtacttaggaaacgctgtagaagatggctattgtgtcgttgcgcgatgtggccatggtgatggtgacagtgcaggtgtttgcacgagggtatccggaaacagatttggttgtgaggcttcctggtcaaccaaaggttgtattcagacagtacgcagggtatgttgatctcgacttgaatgctggccgtagccttttctactacttcgtggaagctgaaaaacaccctgacacaaaaccgttaaccttgtggctcaatggaggtccaggttgttcttctgttggtggaggagctttcactgagctaggtccattttaccccacaagata

SEQ ID NO: 149258 - DNA, 380 bp, Arabidopsis thaliana columbia
  unsure (1)..(380): unsure at all n locations
ctcctcaagaaaatcaaagcagcagnnatggctgtcttttcatcaaagcaccccatggaagatgaggtgttagaagacggaggcgtctagtttggtggggaagctagagacagacgtggagatcaaggcttcggctgataagtttcaccacatgttcgctgggaaaccacaccatgtctccaaagcaagtccaggcaacattcagggatgtgatctgcacgaaggcgactggggcacagtcggctctatcgtcttctggaattacgtacatgatggggaggcaaaggtggcgaaggagaggatcgaggcggtggagccagataagaacttgatcacgtttagggttatagaaggtgatctgatgaaagagtacaagagct

SEQ ID NO: 149259 - DNA, 375 bp, Arabidopsis thaliana columbia
  unsure (1)..(375): unsure at all n locations
gaaaacatacacaaatagcaaaacagggctaatatgctttttctcgnctgcgcaactctcgcgctctggttcctcctcaccaacgcttccatctaccgcaccgttgtcgaattcgaagaagatgacgccagcaaccccgtaggtccaagacagagatgccagaaggagtttcagcaatcacaacacctaagagcttgccagagatggatgagcaagcaaatgaggcaaggacgtggtggtggtccttccctcgacgatgagttcgatttcgagggcccccagcagggataccagctactccagcagtgctgcaacgagcttcgccaggaagagccagtttgcgtttgccccaccttgaaacaagctgccagggca

SEQ ID NO: 149260 - DNA, 354 bp, Arabidopsis thaliana columbia
cctctttgttctttcatcttctctaactcttttcttttctacgcttctgctaagctattgtaagtgttgccagactagcaataaacccttcattttaagcattctgtttccttcttgagaaacctagatattttggtttcttgtatccggtgatgaagatacagtgtgatgtgtgtgagaaagctccggcgacggtgatttgttgcgccgacgaagctgctctctgtcctcaatgcgacatcgagattcacgccgctaacaaactcgctagcaagcaccaacgtcttcatcttaattccctctccaccaaattccctcgttgcgatatctgccaagagaaggcagctttcattt

SEQ ID NO: 149261 - DNA, 445 bp, Arabidopsis thaliana columbia
  unsure (1)..(445): unsure at all n locations
caacaatgtctctgctgttaatgatgttctgttctagatatacgnggaagaagaagactacgataggttgcgagagtctattgatttacatgacagctttgaccagattggcctcgctcagaagatcgagaaacacgaacttgttgaaatgagacgtgtggctgcttatatctacaagaaagcgggcagatggaagcaatcaattgcattatcaaagaaagacaacatgtacaaggactgtatggaaacggcttcacaatcaggcgaacatgaacttgcagaacaactactggtgtatttcattgaacagggcaaaaaggaatgctttgctacatgtctctttgtatgttatgacttaatccgaccagacgtggctctagaacttgcctggatcaacaatatgatggactntgccttcccgtatctcctccagtttatccgagag

SEQ ID NO: 149262 - DNA, 410 bp, Arabidopsis thaliana columbia
  unsure (1)..(410): unsure at all n locations
aaaaaaaaaaaacacaaaaaagnntctttggctgcctcaacaatggctctctcctcccctgctttcgcctgaaaggctgtgaacctttcccctgcggcatcagaagtccttggaagcggccgtgtgacaatgaggaagactgttgccaagccaaagggtccatcaggcagcccatggtacggatccgaccgagtcaagtacttgggtccattctctggcgagtcacccagctaccttaccggagagttccctggagactacggatgggacacagctggtctatccgctgaccccgagacattcgcaaggaaccgtgagctagaagttatccacagcaggtgggccatgctcggagccctaggctgcgtcttccctgagcttttggccaggaacggagtcaagtttggaga

SEQ ID NO: 149263 - DNA, 439 bp, Arabidopsis thaliana columbia
  unsure (1)..(439): unsure at all n locations
tggctcaaaggtctagactngncgttttagctcatcagagtgaggagacttctcgccggtccgtgattgtgcttgttgctgctggtttagctggtggctcgtttgttcaggctgtcctcgccgatgctatttcgatcaaagttggccctcctccagctccttccggtggccttcctgggacagataactcagaccaagcaagagactttgcattggcattgaaagacaggttttacttacagccattgccaccaacagaagctgcagctagagccaaagaatctgcaaaggatatcataaatgtgaagccattgatcgacaggaaagcttggccatatgttcaaaacgatcttcgttccaaggcttcttattttcggtatgatcttaacacaatcatttcctccaaacccaaggatgagaagaagtcactcaaggatct

SEQ ID NO: 149264 - DNA, 163 bp, Arabidopsis thaliana columbia
  unsure (1)..(163): unsure at all n locations
attgttgttcatctctcaatcgnctctntctatattttctcaggaaaatctttacaacatccgtggagaagcatcaccagaatccgaattcagcgatggatccagcgcgggaatgcgaaggcaaaggagcttgcgaattgaaatcgaacaagcgatttgctga

SEQ ID NO: 149265 - DNA, 341 bp, Arabidopsis thaliana columbia
  unsure (1)..(341): unsure at all n locations
ccgatatatcgttaccagagaaagagtgcnctgatatttagttagcttaatttttcttttcgttttgaaattaaggaagtgattgttatcaccggaggagagagagaaaatgttgggaattttcagtggagctatagtatcgccgccggaagagttagtggctgccggaagcagaactccgtcgccgaaaacaaccggatcaactttagtaaaccggttcgtcgagaaaaatccatccgctgtttctgtacaagtcggcgactatgttcagcttgcttacagccatcacaacgagagtcctttccggcctaaatcatttggagctaaagatgaaatattct

SEQ ID NO: 149266 - DNA, 198 bp, Arabidopsis thaliana columbia
  unsure (1)..(198): unsure at all n locations
caacaaaaaaaaagaaaggagaaatggttgtgatcctatcatagaanggngagtgtcaatggcataacaatgcacattgccgagaaaggtcccaaagaaggacctgtggtgcttctcctccatggattccctgatctctggtacacgtggcgtcaccagatntagtggttatcatctctaggttaccgcgctgtagct

SEQ ID NO: 149267 - DNA, 354 bp, Arabidopsis thaliana columbia
  unsure (1)..(354): unsure at all n locations
gaaagatgaaaatgcgtttaattgctgggtagtcttctttttcgcgannnaaatnnctgggtgtctctctgtttaagcttcttcttcttcatcttctgcttacgtttcttcttcaaggagctttcggattcttaaagagtcattgttctcttgagtgggaaaccttgaaaccattcctatgggaaatagcagcgaggaaccaaagcctcctaccaaatcagataaaccatcttcacccccggtggatcaaacaaatgttcatgtctaccctgattgggcagctatgcaggcatattatggtccaagagtagcaatgcctccttattacaattcagctatggctgcatctggtca

SEQ ID NO: 149268 - DNA, 382 bp, Arabidopsis thaliana columbia
  unsure (1)..(382): unsure at all n locations
gatcaaaagagttggagagatgngttttgcctactcaggagtttaggatgaacagaggaaagattgattgggccatggcaggaatcatggtcggtgtattctccaaaaccagtaggattgatgagctaatgaggctgttgcaggacatgaaagttgaaggaaccaggcttgatgctaggctttattcctcagctttgaatgctctgcgtgatgctggtctcaattcccagatcagatggctacaggaaagctttgacgctgcacaaactagtacttcaaaatattcgaatacaaagaacacaggaactttaagttgaaagggaaaactgtacaagccaagattatttttcttgtaattaaatgtactatattgccaatngna

SEQ ID NO: 149269 - DNA, 385 bp, Arabidopsis thaliana columbia
  unsure (1)..(385): unsure at all n locations
gtcaaatcgaagcggcggcgataattgtgcattcctcgacggaagctcgnacatgaaattagctcagaagcttcacgagatggatccgttacagaaacctaaacaagatcgttacgctcttcgtacttctcctcaatggttaggtcctcaaatcgaagtgatccgttacgcaacgaaatcgatcgagcgtgagattaactccgtcaacgataatccgttgatcgatgtttcgaggaacaaggcgattcacggtggtaacttccaaggaacaccaatcggagtttcaatggataacacgagattggcgatagcagcgattggtaaactcatgtttgctcaattctcagagcttgtgaatgatttctacaacaatggtttaccctcg

SEQ ID NO: 149270 - DNA, 388 bp, Arabidopsis thaliana columbia
  unsure (1)..(388): unsure at all n locations
cttcgccgtcgagagcatccatgggtcgtgncttctgtttctcaacgtaagggtgcgggttccgtcttcaaatcccacactcaccaccgcaaaggtccggctaagttccgtagcctcgatttcggcgagagaaatggttacctcaagggcgtcgtgacggagatcatccacgatcctggtcgtggtgctcctcttgctcgtgtcactttccgtcatcctttccgtttcaagaaacaaaaggagctcttcgtcgccgccgaaggtatgtacaccggtcagttcttgtactgcggtaagaaagctactctcgtcgttggaaatgttctccctcttagatctattcctgaaggagctgttgtctgcaacgtcgagcatcacgtcggtgatc

SEQ ID NO: 149271 - DNA, 418 bp, Arabidopsis thaliana columbia
  unsure (1)..(418): unsure at all n locations
gaagctctggattaaccatntatcttcttggttcttcgtcgtcttattgatctgtgaagatgtattcgggtcagaacaagatccacaaggataagggtgttgcaccaacagagtttgaagagcaagttactcaggctttgtttgacttggagaacaccaaccaggagttgaaaagcgagttgaaagatctctacattaaccaagctgttcagatggatatttctggcaaccgcaaagctgttgtgatctacgttccattcaggctgaggaaagctttccgcaagattcatcttcgtctggtcagagagcttgagaagaagttcagtggaaaagatgtgatctttgttgctaccagaagaatcatgcgcccaccaaagaaaggctcagctgttcaaagaccacgcaacagaactcttac

SEQ ID NO: 149272 - DNA, 411 bp, Arabidopsis thaliana columbia
gagttttctcaggtttctatctctttcgtcttcacaacgaaagacattgaaactgagagaaatggctcttaagacattgcaagctctgatctttcttggtctatttgccgcctcatgtctagctcaagctccggctccggcacctatcacgtttctccctccggtagagtctccttctccagttgttacaccaactgcagaaccaccggctcccgttgcttcaccccctattccagccaacgaacccactccggttccaacaactccaccaaccgtctcacccccgaccacgtcgcccacaacttcccctgtcgcttctcctcctaaaccatatgctttggctccaggcccatcaggtccaacaccagctccggcccccgctcctagagcagacgggccggtagctgactc

SEQ ID NO: 149273 - DNA, 397 bp, Arabidopsis thaliana columbia
  unsure (1)..(397): unsure at all n locations
cggacgcgtgggcggacgcgtgggtctctaatanccttctgagaaattcgccggagctaggttttgttgtttaccgatcaatcctttaatcaatggcaatggctgttttccgtcgcgaagggaggcgtctcctcccttcaatcgccgctcgcccaatcgctgctatccgatctcctctctcttctgaccaggaggaaggacttcttggagttcgatctatctcaactcaagtggtgcgtaaccgcatgaagagtgttaagaacatccaaaagatcacaaaggcaatgaagatggttgctgcttccaagcttagagcagttcaaggccgagctgagaactcccgtggactttggcagccatttactgcacttctaggagataatcccagcattgatgt

SEQ ID NO: 149274 - DNA, 386 bp, Arabidopsis thaliana columbia
  unsure (1)..(386): unsure at all n locations
ctccatttcacggatcaatcctgtgttggaataatgttgttgaagnngnaaactctggtggatttgaggttgctccggctcctttcgaggggaaacctgagaagaacgggaagctggaccaaggaaaaggagatgatgcccccatcaattttggttcagtcggtgagctaccaaagaatgccgaagagaataataacaaagtggtcaactctgatgcacccaaaaatgcagcagaagagtggcctgtggctaagcagatccactctttctaccttgttaaataccgttcttacgctgaccccaaaattaaagctaagcttgatctagctgataaagagcttgaaaaagtgaacaaagctcggactggagttttggacaagttgaga

SEQ ID NO: 149275 - DNA, 369 bp, Arabidopsis thaliana columbia
  unsure (1)..(369): unsure at all n locations
tttcttggaatagattatngacatggtaattgtatgtaccacaataaatacatctatataatatttcgaaatgtcttggaaatcgtcaactttatagtgggcattttgcgagaggtaaaatcaaccagtgttaatcttacatagacatatgtgtactctaattatagcttggcctggaccacaaatacacatcttttccatgctactccccatctccatctccatctccactattagttgtgaagaacggagtcagaaagtttttgtccaacgcggtgaatgatgtagtggttttgtgaaactccttcagcttcatcttgaacccgcttcctgatgatgatgtatcctcgtcagatgaagctccaatgc

SEQ ID NO: 149276 - DNA, 372 bp, Arabidopsis thaliana columbia
  unsure (1)..(372): unsure at all n locations
atctattggaactcttactagctcattcancttctgcctgtgaattgngtttctgaagtttgcccaatggctgcttttggagatgacattgtgattgtagcggcatatcgtaccgccatttgcaaagcgagacgtggaggtttcaaagacactcttcctgatgatcttcttgcttctgttcttaaggctgtagtggaaagaacatctttggatccaagtgaagttggtgatatcgttgttggtaccgtgatagcgcctggttctcagagagcaatggagtgtagagttgcagcttattttgctggttttcctgactccgtgccagttagaactgtcaatagacaatgctcatcaagactacaagcagttgct

SEQ ID NO: 149277 - DNA, 349 bp, Arabidopsis thaliana columbia
  unsure (1)..(349): unsure at all n locations
ccgactagccgaatccgccatgaactctgtgtagttgtcgagnnccttggaaacgtccctggactcttgaaattaccgagctcttctctgaagaaaattgctcaagttgttgtgccgaaacgttacgggaaaggggattatgtggttcgtgaagatcaaacttgggatggatgttattttattttgcaaggagaggctcaggtttccggaccagacgaagaagataaccgttccgaattcctcttgaaacagtatgattacttcggcgttggtttatctgggaacgttcattcagcagacattgttgctatgtcccagcttacgtgtttggtgttgccgcgtgatcact

SEQ ID NO: 149278 - DNA, 381 bp, Arabidopsis thaliana columbia
gagagcagctctagaagcttctgataaaaatttcttttatgtaatgtagaggcttcttctcggttacggatacttgctgaactccagtctgaattaaagattgctaaatctgagatagacgagctaaaggcgaggttgatggacaaagaaacagaattacagtttatttcagaggaaagagataactttagcatgaaactgatgaagaaccagaaagaaatagatgttgaagctgagctgaagaaactaagggaggcgatcgagaatttaaaggcggatttgatggataaagaaacagaactccagatcgtttcagatgagaacgagacattgaagtcagatatccacaagagcgagacagatgtacaagacgcgttcctg

SEQ ID NO: 149279 - DNA, 346 bp, Arabidopsis thaliana columbia
  unsure (1)..(346): unsure at all n locations
tctccttccaatctctctagggttctctttataacggcgaaaagacgntcggtagaggaccctcgaagaagagcgacaacactaagttctacgagatcttaggtgttcctaagagcgcttcaccagaagatctcaagaaagcttacaaaaaagccgctatcaagaatcatcctgataagggtggagatcccgagaagtttaaggagttagcacaagcttatgaagtgcttagtgacccggagaagcgtgagatttatgaccagtatggagaggatgcactcaaagaaagaatgggtggtggaggaggtggacatgatccatttgatattttctcaatcctttttgg

SEQ ID NO: 149280 - DNA, 431 bp, Arabidopsis thaliana columbia
ctgttttcgaacatttacaccctctttatacctccttcatgtgtggaggagctataatatccgatttcattccaccgccgaggtctcgccgtgttactagcgagtttatttggccggatctgaagaagaatttgaaaggatcgaagaaaagctcgaagaatcgttcgaatttcttcgattttgacgctgagttcgaagctgatttccaaggtttcaaagatgattcgtctatcgattgcgatgatgatttcgacgtcggtgatgttttcgccgatgtgaaaccattcgttttcacttcgactccaaaacccgccgtctccgccgctgcggaaggttcagtttttggtaagaaagttactggctcggatggggacgctgagaaatctgcaaataggaagaggaagaatcagtaccgagggattaggcaacgt

SEQ ID NO: 149281 - DNA, 401 bp, Arabidopsis thaliana columbia
  unsure (1)..(401): unsure at all n locations
gaagttcaacgttgcgaatccaactctggttgcagaagaagctcgagatcgacgatgaccagaaactacgtgcgttttacgacaagagaatctctcaagaagtcagtggagatgctttgggcgaggagttcaaaggatacgttttcaagatcaagggtggttgcgataagcaaggtttcccaatgaagcagggagttttgactccaggccgtgttcgccttttgcttcaccgaggaactccttgcttcagaggacatggaaggagaactggtgagaggagaagaaagtctgttcgtgggtgcattgtgagccctgatctctctgttctgaaccttgtcattgtgaagaagggtgagaacgatncttctgggcttaccgatactgagaagccaagaatgaga

SEQ ID NO: 149282 - DNA, 363 bp, Arabidopsis thaliana columbia
  unsure (1)..(363): unsure at all n locations
cggaaatgcttggtactccccttaacttcactcagtttcaagatcgnctgctccgttggcgtcaagcccatccacgttcaagactgttgctctcttctctaagaaaaagccagctcctgctaagtccaaggctgtctctgagactagcgatgagctcgccaagtggtatggtcctgacaggagaattttcttgcctgatggtcttttggatagatcagagatcccagagtacttaaacggtgaagttgctggagattatggttatgacccatttggtcttggaaagaagcctgagaactttgctaaataccaagcttttgaattgatccatgcgagatgggctatgttaggagcagctgggtt

SEQ ID NO: 149283 - DNA, 397 bp, Arabidopsis thaliana columbia
gtgttaaaccagagtaaagcttgaaactttgttctattttaatggcgtctttgggtgtgtcggaaatgcttggtactccccttaacttcagggcagtttcaagatcgtctgctccgttggcatcaagcccatccacgttcaagactgttgctctcttctctaagaaaaagccagctcctgctaagtccaaggctgtctctgagactagcgatgagctcgccaagtggtatggtcctgacaggagaattttcttgcctgatggtcttttggatagatcagagatcccagagtacttaaacggtgaagttgctggagattatggttatgacccatttggtcttggaaagaagcctgagaactttgctaaataccaagcttttgaattgatccatgcgag

SEQ ID NO: 149284 - DNA, 373 bp, Arabidopsis thaliana columbia
cgctgttgtttctcctccatttctctatctttttctctcgctgcttctcgaatcttctgtagcatcttcttcttcttcaagtgaaaaatggccgatggtgaggatattcagccacttgtctgtgacaatggaactggaatggtgaaggctggttttgctggtgatgatgccccgagagcagtgttcccaagtattgttggtcgtcctaggcacactggtgtcatggttggtatgggtcagaaagatgcttacgttggtgatgaagctcagtccaagagaggtatcctcactctgaagtatccaatcgaacatggtattgtaagtaactgggatgacatggaaaagatatggcatcacactttctacaacgagc

SEQ ID NO: 149285 - DNA, 404 bp, Arabidopsis thaliana columbia
  unsure (1)..(404): unsure at all n locations
agccgctttactctcttgcgatatctctgtgtcntgttttacagtctctaaccatgggtaaagagaagtttcacatcaacattgtggtcattggccacgtcgattctggaaagtcgaccaccactggacacttgatctacaagttgggtggtattgacaagcgtgtcattgagaggttcgagaaggaggctgctgagatgaacaagaggtccttcaagtacgcatgggttttggacaaacttaaggctgagcgtgagcgtggtatcaccattgacattgctctctggaagttcgagaccaccaagtactactgcactgtcattgatgctcctggccatcgtgatttcatcaagaacatgatcactggtacctcccaggctgattgtgctgtccttatcattgac

SEQ ID NO: 149286 - DNA, 386 bp, Arabidopsis thaliana columbia
  unsure (1)..(386): unsure at all n locations
aaaagagagaagctttgagaaagaaagaaagatttgacttagtgtgtatcaanctctgtactttcacaagcttccaagctctcttatcattcactgatttttggttctcgagaaaaaagtgaagatttttgagattctctttcgatggattacgaacgaatcggaaagacccaggttactagtagcggcggcggattttctccggggaagttaaggagtatgcttcttctaggtgttgatagaaagaagaatgaagaagaagaatcaactcctacaatgagatctgggtctaatcaaattgatgaccctagggtttatgttgctagtggattagatgattgcaaagatgttgatgttgtgagtgagattactgattgttctacttc

SEQ ID NO: 149287 - DNA, 356 bp, Arabidopsis thaliana columbia
  unsure (1)..(356): unsure at all n locations
gagatcttaagagtaaagacaattttactcggcgtctctcaaagncccaagcaatgtggctctttttgaagatgacgccgagcaactccacaaggctttttcaggatggggtaccaacgagaagctgatcatatcaatactagctcacaggaacgcagcacaacgcagcttgatccgcagcgtttatgcagctacctacaatgaggatcttctcaaagcattagacaaagagctttctagcgactttgagagagctgtgatgttgtggactcttgatccaccagagagagatgcttatttggctaaagaatccaccaagatgttcaccaagaacaattgggttcttggtggaaatc

SEQ ID NO: 149288 - DNA, 345 bp, Arabidopsis thaliana columbia
aaaaaaaaaaaaaatgaacaacttattttgctttctcgaactcacatctcttacacttgaagacccatggcctgctttctagcctaaatttcctcgagaaaacaagcaaaaaaacacaagaaagctagaatcttattttcttcttggtctttcttggtttcttcaactttttcttaaaaacgttttcaaaaaatcatgggcaccggagaaaaaaccctgaagagcttccagttacatcgcaaacaatcagtcaaagtcaaagatgttccaaaagggtgtttagcgatcaaagtgggatcgcaaggagaagagcaacagagatttatcgttcctgttttgtatttt

SEQ ID NO: 149289 - DNA, 372 bp, Arabidopsis thaliana columbia
gagaattaaagtcattcattatttggggaacgtagattatagctcctttcctacagacgccatcattaacaacatcctcttaagcttctgcgattctctccgtttgtcggaagatttcacgacgattcttcaatccttatccgaaccggagaaatcatgtcggacgctttgatcaatggattggctggagctggtggtgggatcattgctcagcttctcacttatcctcttcaaactgtaaatacgcgccaacagacggagcgggatctgaagagggagaagaggaaacttggaactatcgaacacatgtgtcaggttgtcaaacaagaaagatgggagaggttatatggtggattggcgccgtctcttgct

SEQ ID NO: 149290 - DNA, 436 bp, Arabidopsis thaliana columbia
  unsure (1)..(436): unsure at all n locations
ctacagagaacttgattattnnttttgtatcctagtaaaaaaaanggcgaatggagctaatagagtggatctcgacgggaaaccgatacaaccgttgacaatatgcatgatcggcgccggaggtttcatcggttcacatctctgtgaaaagctcttgaccgagacgccacataaggtgcttgcgctcgatgtttacaacgataagatcaaacacttgcttgagcctgataccgttgaatggagtggtcggatccagtttcatcgtatcaatattaagcatgattcgagacttgaaggtcttgttaagatggcggatctgattataaatcttgctgcgatctgtactccagctgattacaatacacgttctcttgatactatctacagcaatttcattgatgcgctttcagttgtgaaatactgttctgagaacaac

SEQ ID NO: 149291 - DNA, 418 bp, Arabidopsis thaliana columbia
gctttatttctccgttttcgttttgtctttctttattttctcggtttcgtcgtctgatgtcaacgactgcgatgatctcgtgatccgtcaggtggttggtggagccgagcctcaggttttgacctcagaggatcacttttctctcttcaagcggaagttcgggaaggtctacgcttccaacgaggagcatgactatagattctcggttttcaaagcgaatctcaggcgagcgaggcgtcaccagaagttggatccgtcggcgactcatggtgttacgcagttctcagatctgactcggtctgagttccgtaagaagcacttgggggttagaagtggctttaagcttcctaaagatgccaacaaggctccgattctccctaccgaaaatctccctgaggattttgattggagagatcat

SEQ ID NO: 149292 - DNA, 384 bp, Arabidopsis thaliana columbia
  unsure (1)..(384): unsure at all n locations
aaatcggcgaatctgagaactaagcatcaactttctgtcattgagagcgaagtggaagaagaagcgcatgaggtgattaaagaggaagcgtcgaaagatgagacagcgatccaagtagactccaagttccttccccaaataactatcggctctctgtgattctctttttagttttgtcttgaaactttttctttcttctagcaaaccttttttattttgattatggaagttttgaacattctgtgatgtatgtaaaacttgctcttgtgctcttatctatctaatcacagatcctttatctnaaaaaaaaaaaaaaaaaaaaaaaaaaaaaaanaaaaaaaaaaaaaaaaaaaaaaaaaaatgaaaaaaaaaaanaaaaggggg

SEQ ID NO: 149293 - DNA, 384 bp, Arabidopsis thaliana columbia
  unsure (1)..(384): unsure at all n locations
ctgaatttcgatttcaatggagtcacgcgtgttgntatgcgccaccgcgaatgtcgntggaattccgaaattgagacgaccaatcggagcgatccaccgtcaattcagcactgcatcgtcttcctcgttctcggttaaaccaatcggaggaatcggagagggagcgaatctgatctccggtcgtcagcttcgtccaattcttcttctcgattcgtcggcgatcaacggaggagagaaaagagaaattctcaaaccggttaaagccgccgctgctgaaggtggagataccgctggggatgctaaagttggattcctcgccaagtatccatggctagtcactggattcttcttcttcatgtggtacttcttgaatgtgattttcaa

SEQ ID NO: 149294 - DNA, 346 bp, Arabidopsis thaliana columbia
  unsure (1)..(346): unsure at all n locations
aaaggatctatcactgtgccacagcaggattttgttggtatcttgtacgangaaactaaatgcaacaactgaaatgatgccagtcacatggccaagtttcactgacattcacccttttgctcctgttgaacaagcacaaggttatcaggaaatgttcgaaaatttgggtgacctcttgtgtacgatcactgggtttgactctttctcgttgcaacctaatgctggtgctgctggtgagtatgccgggcttatggttatccgcgcatatcacatgtcaagaggagatcatcaccgtaatgtgtgtatcatacctgtctctgcacacggtacaaaccctgcaagtgct

SEQ ID NO: 149295 - DNA, 309 bp, Arabidopsis thaliana columbia
  unsure (1)..(309): unsure at all n locations
gccgtctggatctaacagctttgggaggatttatgtgtgtatgggaaacacgnggngggaagtcccgtggcgattagctggacatagtcgtaaattatgagaaatgaaaggggttttatggaaaagaaaaggtgtttacagatttattgtaatgccgtttttagatacgaagaaacctctgtttagcaaaaacgacatgcagtctgttaagacttgcctagtttgtttttgggatgtcttgctgtttttaattttaaaaagaaatatattctccggctacaacagtagctgggtctctctaggtgtttt

SEQ ID NO: 149296 - DNA, 372 bp, Arabidopsis thaliana columbia
  unsure (1)..(372): unsure at all n locations
cggatgcgtattgtacggataggatataggttctgagttggnngncgancactcaggcggagataccttttgctccgagtgcggcctggttctggaatctcactccattgatgagacctctgagtggcgtaccttcgctaatgaatcttccaacagcgatcccaatcgtgtcggtggtccaaccaacccgcttctcgctgatagtgctttaaccactgttatcgctaagcccaatggttcatctggtgatttcttgtcttcttctctcgggaggtggcagaatcgtaactccaatttccatcggggtttgattcaagcttttaaaaccattgctaccatgtctgaaaggttgggacttggtgcaactatcaa

SEQ ID NO: 149297 - DNA, 378 bp, Arabidopsis thaliana columbia
actcttctagcatcttgaagcttatatctcattcttccgatcatgccgatcagaaacatcgccattggccgtccagatgaagccacccgtcccgatgccttaaaggcggcgttggctgagttcatttcaactttgatctttgtcgtcgccggttcaggctctggcatggctttcaacaagctcactgaaaacggagccaccactccttctggtctcgtagctgctgcagtggctcatgcctttggactcttcgtcgctgtctcagttggtgccaacatctctggtggacacgttaaccctgccgtcactttcggtgctttcattggtggtaacatcactcttcttcgtggtattctctactgggttgctcagcttctc

SEQ ID NO: 149298 - DNA, 355 bp, Arabidopsis thaliana columbia
  unsure (1)..(355): unsure at all n locations
cgaaaaaaagaaaacacaaaaacaaagannatatttgctttctcaaccatggctnngncctcccgtgccttcgccggataggctgtgaagcctgccgcatcagatgtcctcggaagcggccgtgtgaccatgaggaagactgtcgccaagccaaagggtccatcaggcagcccatggtacggatctgaccgagtcaagtacttgggtccattctccggcgagcccccgagctaccttaccggtgagttccccggtgactacggatgggacaccgctggtctatccgccgacccagagaccttcgccaggaaccgtgagctagaagttatccacagcagatgggccatgctcggag

SEQ ID NO: 149299 - DNA, 342 bp, Arabidopsis thaliana columbia
  unsure (1)..(342): unsure at all n locations
gatagagagaggtttagcgaaaaatgcngtttccatggctctncgaaggctttgtgcttcggttgacaaacccattcgtcctcttattcgatccacttcatgttacatgtcttctttgcccagtgaagctgttgatgagaaggaaagatctcgtgtcacttggccaaaacagcttaacgcacctttagaggaggttgatcctgagattgctgacattattgagcatgagaaagctagacaatggaagggacttgaacttattccatctgagaacttcacatctgtgtcggtgatgcaagctgttgggtctgtcatgactaacatatacagtgaaggctatcc

SEQ ID NO: 149300 - DNA, 261 bp, Arabidopsis thaliana columbia
  unsure (1)..(261): unsure at all n locations
agagacaagaggaacagggangattcttgggtcttagngcgcagacaaagcnngggtgngacagatacatcattaagccagatcttgtgaccttagctaaggcactgtcttcagcatatatgccgattggagccattcttatgagccaagaagtggcagatgtcataaattctcatagcagcaagctaggcgtgttctcccatggatttacttattctggtcatccagtttcgtgtgctgtagcaattgaagcgttaaaga

SEQ ID NO: 149301 - DNA, 343 bp, Arabidopsis thaliana columbia
  unsure (1)..(343): unsure at all n locations
tgctttggctgcaatggaggaaattctaaaatagtttgatgangaagggaagaacaaccaacgagcagtgtacagtcgaatcgctctacgaagaatgggaaaagagatcaaaagccacagaagacaaatggtgctaaacgatcttcagagcaagaaagactcaaagctactaaggaggaatctaatgtctcagtagtagtagatgatacaactacacaatcaaagctctctgatgatgatgatcatgcagtgaatgactcttcagagaaaactgagaaggaagagactataaatggcttggcttgtgatgatgaaaatgaggaggagaaggaagaaagccaag

SEQ ID NO: 149302 - DNA, 389 bp, Arabidopsis thaliana columbia
gcggttgttgatatctctgtaccacgtatcaatgctttgatacagtgacacgcttccgatttacgagcctggtcttgatgatgttgtgaagcaatgccgtggcaagaaccttttctttagtactgatgttgagaaacatgttagggaagctgatattgtgtttgtttctgtcaacacaccgactaagactagaggtcttggtgctggtaaagctgcggatcttacgtactgggagagcgctgcgcgtatgatcgctgatgtttcggtatcggataagattgtcgttgagaaatcgactgttccggttaaaacagctgaagctattgagaagattttgacacataacagtaaagggattaagtttcagattctttcgaatcccgaggttt

SEQ ID NO: 149303 - DNA, 446 bp, Arabidopsis thaliana columbia
  unsure (1)..(446): unsure at all n locations
atagaatcaagcgatgatgaatcttagggtnttgntcttctctctccttctccttgcatctcctctgcttcaagttgctagatgtcaatcggatgccgaggatcattcaagtcttgttgacgatgttgtgggagaaaacactgatgatgcggttgaggaagatgaccatgatttggatatgaacttgtcctcatttccaggagttgagactgtttgtgttttccccaaaaacagtgccaaattggttccagctggagaagagactgagctccttgttggtcttaaaaatgaagggaaaactagagtaggtgtgatgggaattagggccagcgttcatcttccttatgatcataagttgttggttcagaatctaaccatgttgagacttaacaatgcatncatcccaacgtctctttaagcaacattcccatacatttttgcagtca

SEQ ID NO: 149304 - DNA, 364 bp, Arabidopsis thaliana columbia
  unsure (1)..(364): unsure at all n locations
acgccacgcgtcacggtttgatcggntcttccttattcncagcnaacttatgaagtttcttcaangagccnnaagcaaccagaggcgagagtagaactttaccagaatgcgcgggacaacaccccncncataccaaagaactcaagaagaagnctcaagncttatggagccacgatagcgtcgagaaatcgtccaaataaaccgttcgagatccgattccaattctgtcgacacagatccaacggttggtatgaccaaggaagagcttgatttcattagtcttcttgaagatgagcttgagaaattcaattccttcttcgttgagcaagaggaagagtatatcattagattgaaggaattgaag

SEQ ID NO: 149305 - DNA, 350 bp, Arabidopsis thaliana columbia
  unsure (1)..(350): unsure at all n locations
acgcaactatcacgagcctctctgcgntattatgactcntcagngnnncncngannngggaaagaatcaaacttttgaatgtgaaggcgcttctttcgnctcaagatctctctttatctctctatctgtttgattggaactcgagcattggttataaacgaaaccatagtctatggcagctcagaagttcatcatttcgtgctaaatctgtgatatttcattgttcatcgtccttaagacagtcaccatctaatgtggaggagatagatgataatccttcggtatcattagaggatgaatcagcacatgcgatgcaagtcaagtggtctgattttaggattcttgatcgt

SEQ ID NO: 149306 - DNA, 390 bp, Arabidopsis thaliana columbia
  unsure (1)..(390): unsure at all n locations
cggacgcgtgggttgctctgcaacttttacgctcatgaatgcagcnnggncnctcacagcttggaactcttctacttttgccgctacaagctgagccattgctcctgaaaggatcaggtttactaagggtgcttcttactacaaaagcaacaatgtagtgacaggtaaaagagtgttttccataaaagcacaaatcacaacagaaacagatactcctactcctgcaaagaaagtagagaaagtgtcaaagaagaacgaggaaggtgtgattgttaacaggtacagaccaaaagagccttacactggaaaatgccttctcaacaccaaaatcacagctgatgatgctcctggagagacctggcacatgggtttcagccctcaaggagaaat

SEQ ID NO: 149307 - DNA, 398 bp, Arabidopsis thaliana columbia
  unsure (1)..(398): unsure at all n locations
cttagagtttgtctcaagcnncnccttttttgtcattttgtctnaagcttccttgcttctctgtcttcttcttctctactctttctctctatttcaaaccttcgttttctttccttttttgtataaaatcttaaaatcaaccaagacaatggaaatgaaattgctctttacatcggctttcacccaaatgttcggctactcgaaccatatggatcaagccagcaactgccaaagcacccgcaacaaaattattaagatgatgaagaaagaagaattcccaagtggattccaagtccctcttcactaccctaaatactccaagtctgattacgaaggtatggatgatctccgccttgacttgctcctcaaacaatatggattctcctttgaaggatctc

SEQ ID NO: 149308 - DNA, 70 bp, Arabidopsis thaliana columbia
aacgatgcagcggcgcgtggtgtgcgcaaccagctacaagactgtggcggtggaggtggtgaggcttttt

SEQ ID NO: 149309 - DNA, 462 bp, Arabidopsis thaliana columbia
gttcgagcgattgttactgaatggcttggtcacattgcgtggaaaactctctctagatctacacgctacacgagttttgttgattcggcagggggatcgacgacggagatggcgattctgtacgccctcgtggctcgtggcacggtggttctttctgagttcaccgccacctctacgaatgcgagcaccatcgccaaacagatcctcgagaaggtccctggagacaacgacagcaacgtctcctactctcaggatcgttacgtcttccacgttaaacgcaccgatggcctcaccgttctctgtatggccgaagaaaccgccggaaggagaattccttttgcctttttggaggatattcaccagagattcgtacggacttatggcagggctgttcatacagcactagcttatgcaatgaatgaagaattctctagagttctcagtcagcaaattgactattac

SEQ ID NO: 149310 - DNA, 372 bp, Arabidopsis thaliana columbia
gaagaagcagagcaacttgttgtgaaggcggttttactagccatcgcccgtgatggagtcagtggtggtgtcgtacggactgtcataatcaactcagagggagtgacgagaaacttttaccctggagataagttgcagctttggcacgaagaattggagccccaaaactcactcttagacattctgaacgctgctggtcctgaaccaatggccatgtgatctgcaaacaacgatcattatcttactctgttgggcaaacattttagatatttcattacagtttccagtgtctttaagactttaaactctgtttgaggttctgttgtaatgaatgacccgatctttctgttttaaacggatattgtgtttctt

SEQ ID NO: 149311 - DNA, 429 bp, Arabidopsis thaliana columbia
cggacgcgtggggtttgttttctctagtagtggctctattcgcaatcatacgaacacgaaacattttgcaggaggaaggccagaaacagtacatgaacactatgttccctctttacagtttgttcgggttcgtcgttctgcacatacttatgtatgctggtaacatatactactggaggcggtatcgagtgaattactctttcatatttgggttcaagcacggtactgaacttggttatagacaagttctatttgtgggattaagcattggagtctttgcacttctttgtattcttgccaatcttgacatggaggttgaccccgaaactaaagattatcaagcattaaccgaacttcttcctcttttcctgctcactggtatgtttgtagttctagtcttaccattcaacatcttctaccggtcgagtc

SEQ ID NO: 149312 - DNA, 288 bp, Arabidopsis thaliana columbia
gtaaattctgagaagaaactggtgtagcatctgtaacagtcattgatcgccctgactctaacacccggaacgatgggctacaggtcctccaagatttcttgtgcgagaggattcccttagacgacgatgcgcattgttctaagactgtctcatgacaacggacaactgacaaaatagcagcgctccgttgagtcttagaaactaaatggagaggccatgagattgcccagtacagagacgcccatgtgcctgtgctgaattttggacctaactgtgtaacgctcacag

SEQ ID NO: 149313 - DNA, 252 bp, Arabidopsis thaliana columbia
  unsure (1)..(252): unsure at all n locations
ccgggccgacccacgcgttcgagcgattctcactaaaaccctcgaacacatcgcctttatctctttctctagatctactcgctatggctactatcaccgntgttaaggctagacagatcttcgacagtcgtggtaatcccaccgttgaggttgatatccacacgtcaaatggtattaaggttacagcagctgttccaagtggagcttccactggtatctatgaggctcttgagctgagggatggaggatctg

SEQ ID NO: 149314 - DNA, 438 bp, Arabidopsis thaliana columbia
acgctttgtgagagagacctctctactgtgattttctcttcatatttctctctctctctctctctatagttggtgaagtctctatctttatctctcttaagatctgtttctctcttggcttatctgactctaaccagaattgtgtcgatttcaaggatggatgatactacgtataagccaaagaacattctcattactggcgctgctggatttattgcttaccatgttgccaacagattaatcccgcactatcctgattacaagatcgatgttcttgacaagcttgattactgctcagatctgaagaatgttgatccttctttttcttcaccaaatgtcaaggttgtcaaacgagatatcgcgcgtgatgatctcgctaactacctactcatcactgaaaacattgctacgacaatgcattatgctgctcaaactcat

SEQ ID NO: 149315 - DNA, 427 bp, Arabidopsis thaliana columbia
ctctcttatctcctttcctttcattgtagttaacgaaaagattacgataatggcaacatcagctatccagcaatcctccttcgccggccaaacggctctcaagccctccaacgaactcctccgcaaggttggtgtatccggtggtggccgtgtgaccatgcgtcgtaccgtcaagtctactcctcaaagcatctggtacggaccagaccgtcccaagtacttaggaccattctcggagaatacaccgtcctacctaaccggagaataccccggagactacggctgggacaccgctggactctcggctgacccggagacattcgctaagaaccgtgagcttgaagtaatccacagcagatgggctatgttgggtgctctcggatgcacattccctgagattctctccaagacggtgttaaattcggag

SEQ ID NO: 149316 - DNA, 427 bp, Arabidopsis thaliana columbia
  unsure (1)..(427): unsure at all n locations
agagatagatcatctccgttaaaccctagcgattggattacggatatactccaaatggctttcttaagtaaagttggaaggttattcagtcagaccagcagccatgtcactgcctctagctcgatgctacagagcatccgttgcatgtcttcatcaaaaatctttgttggaggtatctcctacagcactgatgagtttggcttaagagaagcttttagcanatatggagaagttgttgatgcanagattattgtggaccgtgaaacaggcagatctaggggctttgctttcgtaacatttacttcgactgaggaggctagtaatgccatgcaattggatggacaggaccttcatggtcgaagaattaaggtgaattatgcaactgaaagaggaagtgggtttggaggaaggggattcggtggtcctg

SEQ ID NO: 149317 - DNA, 397 bp, Arabidopsis thaliana columbia
acacaatctaatccaaaaaatcaaaagatgaatgccacaaagtttgttgtgcttctcgtgattggcattttgtgtgccattgtcaccgcaaggcaggtcaaagatttgtccacggagaccaaattaggggcctctcttccaaaaactactaccaaaggcattggagctcagctttctgcaactggcacaacttacagcaccagcagtgtcgttagctatgctaatggttttaacaatcccaaaggtccaggggccaattcattcgaaagtgccaacacatttaccagcggacaagtcactgccaagggtcgcaaggcaagagtttcttctacaagtgcttctgccgctgaaggcgatgctgcagctgcagtgactcgcaaagctgctgctgcacgtg

SEQ ID NO: 149318 - DNA, 405 bp, Arabidopsis thaliana columbia
cccagatcagcaagaagagaaagttcgtagccgatggtgtgttttacgctgaactcaatgaggggctaaccagagagcttgctgaggatggttactctggtgttgaggttcgcgtcactcctatgcgtactgagatcatcattagagccactcgtactcaaaacgttctcggtgagaagggaaggaggattagggaattgacatctcttgtacaaaagagattcaaatttcctcaggacagtgttgagctttatgctgagaaggttgctaacagaggtctttgtgctattgctcaagctgagtctcttcgttacaagcttcttggtggtcttgctgttcgtagggcgtgctatggtgttttaaggttttgtatggagagtggagcttaaggatgcgaagtcattt

SEQ ID NO: 149319 - DNA, 437 bp, Arabidopsis thaliana columbia
gagagattgtgaaagaagaaaacagagacagtttcttcgctgaaaagaaaaaccaaatcagctaaatccctaaaagtttccgtcaatgtcttctcgccggagagttcttctcaaggttatcattctcggtgatagcggtgttgggaagacttcgttgatgaatcagtttgtaaatcgaaagtttagtaatcagtataaagctacgattggagcagattttttgactaaagaggttcaaatagatgacagaatcttcactttacagatttgggatactgctggacaagaaagatttcaaagtttgggagttgcgttttaccgaggagcggattgttgtgttcttgtctatgatgtcaatgttatgaaatcttttgataatcttaataactggagggaagagttcttgattcaggctagtccttcagatcctgaaaact

SEQ ID NO: 149320 - DNA, 223 bp, Arabidopsis thaliana columbia
ccaaaggaaaatttatttttgttggatcatgaccaatgatgaaccaattccacatcgtatttttaagaaagaaaattggtgggaaaggtaacacacaaaaaaaaagggtgggtaatggaagaatgaaatgacaggccaaagatttcttcttttagaaaagcaaattcttacacccaaagaacaaacccttacccaaaattatactaaaattcttcacttttat

SEQ ID NO: 149321 - DNA, 446 bp, Arabidopsis thaliana columbia
aaaaaaaattgaaagttgagaaaagttcctagagtttgaagacatgaagttcacggcgcttgtgttcattgtgttcgtggtgggtgtcatggtttctccagtttcaatcagagcaactgaggtcaaactttctggaggagaagctgatgtaacgtgtgatgcagtacagcttagttcatgcgcaacaccaatgctcacaggagtaccaccgtctacagagtgttgcgggaaactgaaggagcaacagccgtgtttttgtacatatattaaagatccaagatatagtcaatatgttggttctgcaaatgctaaaaaaacgttagcaacttgtggtgttccttatcctacttgttgatttttgagatattgctaaaaaaagttggtaatgataataatatttaacaaacataagcccaaattatttttttttattctttttctttttt

SEQ ID NO: 149322 - DNA, 429 bp, Arabidopsis thaliana columbia
aaattcttcatcgtctcttttcttatcatgtctctcttctcatacgatccacaagattcgtgatcgaagaggtgtcagaaaatccaccggaagagctactcttaccggctttgctgaggtcaacgatgtggcgctgtttttcggtggattggttagaatgttgatgctcataggatcctgcttgtgggttcgtctgctggttgaatttgatggcaagttaaagtctggtgcttttgatctgacttaaataatgcttccaccttctctaaatcactccagtgccgacattacttgtataaaagagaccacatgttttaagtcaccacaagtttgtactttggtttgaatgcttgtacaccacaaaataatattccgaaaacactagttcttattgtgtattctatgacatcacttgtatgctaaacaata

SEQ ID NO: 149323 - DNA, 439 bp, Arabidopsis thaliana columbia
acaccttcttcttcttcttcttctctctctatcacaagagagtcaaatccatggcttctacttcttccctcgctctctctcaagctctcctagctcgtgcaatctctcaccatggttctgaccaacgtggatctttaccagctttctctggactcaaatccaccggttcacgcgcctcagcttcgtctcgtcgacgtatcgctcaatccatgaccaaaaaccgatctctccgtcctcttgttcgcgctgcagctgttgagactgttgagccaaccactgattcgtcgattgtggacaaatcggtcaactcgattaggtttttggctatcgatgcggtggagaaggccaaatcaggtcatcctggtcttcctatgggttgtgctccgatggctcacattttgtatgatgaggtcatgaggtataaccccaagaaccctta

SEQ ID NO: 149324 - DNA, 438 bp, Arabidopsis thaliana columbia
caagaatcagattcaagatagaagtttttcaaacaatgtctagtcctcttggtcactttcagagtcttgtttttcttcatgctttgcttatcttctcagctgagtcccgcaaaacccaattgctgaacgataatgatgttgaatctagcgacaagagtgcaaaaggcacacgatgggctgttttagttgctggatcaaatgaatattataactacaggcatcaggctgacatatgccacgcgtatcagatactccgaaaaggcggtttaaaagatgaaaacatcattgtgtttatgtatgatgatatcgcgttttcctcggagaatcctaggcctggagttatcattaataaaccagatggagaagatgtttataaaggagttcctaaggactacactaaagaagctgtaatgttcaaaaactctacaatgtgttact

SEQ ID NO: 149325 - DNA, 465 bp, Arabidopsis thaliana columbia
ttgtttttgacgaacccaccaagctcgagtagatcggttttagatccatcttaggtttctctaatttctctcaattcactccaaaattttgattatttcttctttctggcttgtcaattttagtcatttgtaatccttgcttttgcgatcggaatcgtaaaaatccgatctttcttttagattcgttttgtttttgattccaaatcggaaaaatgggtaaagtagctgttggagcgactgttgtttgcacggcggcggtttgtgcggtggctgttttggttgttcgacgacggatgcagagctcagggaagtggggacgtgttttggctatcctcaaggcctttgaagaggattgtgcgactccgatctcgaaactgagacaagtggctgatgctatgaccgttgagatgcatgctggtcttgcatccgacggtggtagcaaactcaagatgcttatcagctacg

SEQ ID NO: 149326 - DNA, 413 bp, Arabidopsis thaliana columbia
cggacgcgtgggtttactcatctcatctccaaagtctcaacctttcttctctaatggagatctgcacttacttcaaatcacaacccacttggctcctcattctcttcgttctggggtcaatctcaatcttcaaattcatcttcaccctcctcagatctttctacatctacttcctccgaccatccaaaaacctccgccgatacggttcatgggcaatcatcaccggaccaacagacggaatcggtaaagctttcgcctttcagttagcccagaaaggtcttaaccttatactcgttgctcgtaacccagacaagctcaaagatgtctctgattccatcagatctaagtatagtcaaactcagatcttgaccgttgtgatggatttctctggagatattgatgaaagtgtgaaa

SEQ ID NO: 149327 - DNA, 310 bp, Arabidopsis thaliana columbia
atcaaccttctatcatcaccatggatccttacaagtatcgtccttcaagcgcgtacaacgcccgattctacaccacaaacggtggtgctccagtctccaacaacatctcttccctcaccatcggagaaagaggtccggttcttcttgaggattatcatttgatcgagaaggttgctaatttcaccagagagaggatccctgagagagtggttcatgctagaggaatcagtgctaagggtttctttgaagtcacccatgacatttcaaacctcacttgtgctgattttctcagagcccctggtgttcaaac

SEQ ID NO: 149328 - DNA, 448 bp, Arabidopsis thaliana columbia
gtggcaaagactcaacatttaagatgagaggtgggagtctatggcagctagggcaatcaataacccgtcgtcttgctcaatctgacaagaaggttgtgtcacgtcgctactttgcctctgaagctgacctgaaaaagactgctctttacgacttccatgttgcccatggaggaaagatggttcctcttgctggttggagtatgccaattcagtacaaagattcgattatggactcaacggttaactgcagggaaaatgggagtttgtttgatgttgcacatatgtgtggtttgagccttaagggtaaagattgtgttccttttcttgagacacttgtggttgctgatgtggctggtttggctcctggaactgggagcttaactgtgttcacaaacgagaaaggaggtgccattgatgactcggtgattaccaaagtgacagatgaaca

SEQ ID NO: 149329 - DNA, 467 bp, Arabidopsis thaliana columbia
  unsure (1)..(467): unsure at all n locations
cagcttttagatgtgattgtggatcagattctcaaagacttttcgcgaagagtctctgatccttaaatcgcttctctctcgcttgacctcatttcgtcgtcgaaatcagatccttgtgaaaatgccgaaacaggatatggagaagatggagcttcgtaagaacttccgtaatgtttggcataccgatcttacccacagtatccagaacgatactccttattgttgcttcgcgttgtggtgtgccccttgtgcatcatacttgcttcgcaagcgtgcgctttacgatgatatgtcaaggtacgtctgctgtgccggatacatgccttgtagtggtaggtgtggagaagccaaatgtcctcaactatgtcttgccactgaggtcttctgctgctttgcaaactctgtggcctcaactcgctttcttctgcaagatgagttccaaattcaaacgacanaatgtgacaact

SEQ ID NO: 149330 - DNA, 366 bp, Arabidopsis thaliana columbia
ggaaaaaaaaacttttccatggggctcgtaattttcttggcactaattgtcttaatccttattattgggctcaggatattcaaagcttttatgattcttgtttggcatccatttgtgttgaccagaagactcaaaaaccaaggaatctcaggcccaaattacagaatcttttacggaaacctcagcgagataaagaagatgaagagagaatctcatctttcgattcttgatcctagctccaatgatattttccctcgtattcttcctcattatcaaaaatggatgtctcaatacggagagacttttctttactggaacggaacagagccaaggatatgcatctcagatcctgaacttgcaaaaact

SEQ ID NO: 149331 - DNA, 470 bp, Arabidopsis thaliana columbia
aattaacaaagaacgagttaatcggattatttacatcgattgccgtcctcatatacgttacatgtctgttctacaccaaacgatgtcgtacgagactacctccgggaccaaatccatggccggtgattggaaacattttccagctcgctggtttaccgccacacgactcattgactaaactttcacggcgtcacgggccaatcatgactttacggatcgggtcgatgctgacggttgtgatctcttcgagtgaagtggctcgggagatcttcaagaagcatgacgcagctttggctggccggaagatttacgaggcgatgaaaggagggaagagtagtgacggctcgctcatcacggctcagtatggtgcgtattggcggatgctgcggaggctttgcaccactcagttctttgtcacgcgccgtcttgatgctatgagtgatgtacgctctaggtgtgttgatcagatg

SEQ ID NO: 149332 - DNA, 156 bp, Arabidopsis thaliana columbia
tccgtcaggatttcgttgaaccggcgtttttgagtttcatggaagctaacgcgaaaaaatcgtatgcccgcacgtttactgtagacgcgtggaatccttctggatctaacagctttgtgaggtttgaatggtccgatgggaaacacgtggtgggaa

SEQ ID NO: 149333 - DNA, 445 bp, Arabidopsis thaliana columbia
ctcgccgacattagccgagatcgctgctcacgccggttacgattacgtcgtcgttgatatggaacatggtcccggaggtataccggaagctttggattgtattcgagctcttaacgccgccggaacatcagccattctccgattaccggaaaactcaccaacctgggctaaaaaagctctagatctaggtccacaaggaatcatgttcccaatgatcgaatctcgtaaagacgctaccaaagcggtgtcgtattgccggtttcctcccgacggtatccgtggatcggcgcacacggtggtgagagcttctaactacggaatcgatgaagggtatttaagtaattacgcagaggagattctgattatgtgccaggtggaatcaggtgaaggagtgaagaaagctgatgaaatcgcagacgttgatggtgttgactgtgtgcaaatg

SEQ ID NO: 149334 - DNA, 394 bp, Arabidopsis thaliana columbia
ttaagagcgagcaataatgagggtttctcaatctcttgtcccttttgccataattgctttggtcctttcctttgtcaatgcttatgatccaagtccactccaagacttctgtgttgccattgatgacctaaaaggcgtttttgtgaatggtaggttttgtaaagacccgaagcgagtcgatgcaaaagattttttcttctcaggtctcaatatgcccgggaacaccaataatcaagttggctctaatgtgaccactgttaatgttgatcagatcccagggctaaacaccatgggaatatcattggtccgcatagactacgcaccgtatggccaaaatccacctcacacgcaccctcttggctcatagatccttgtccttgtcgaaggaacatta

SEQ ID NO: 149335 - DNA, 393 bp, Arabidopsis thaliana columbia
gttttctagtctagtgtttccgggagcagcctgagcaggaggaagaagacgaagaagaagaggagcagctactaccatggttctcaagacggagctttgtcgtttcagtggacagaagatttacccaggaagaggaattaggtttatccgatctgattctcaggttttcttgtttcttaactcaaaatgtaagaggtacttccataacaagttgaagccatccaagcttgcatggactgccatgtacagaaagcaacacaagaaggatgcagcacaagaggctgtgaagagaaggagacgtgccaccaagaagccatactcaaggtccattgttggtgctaccttggaagtaattcagaagaagagagctgagaagcctgaagttcgtgatgc

SEQ ID NO: 149336 - DNA, 353 bp, Arabidopsis thaliana columbia
caaaactaaaaaataggatattcgctggccgaatcgcgtcgatccacatcgcaggtgagggttgctgcaatttatccctcggggtctctgaatctcagatcgtcgtcaacgaatcctccattttctgaatcaaaattttctggaaacaatggggagcttggggacgatgctgagatatccggatgacatatatccgctcctgaagatgaaacgagcgattgagaaagcggagaagcagatccctcctgagccacactggggtttctgctattcgatgcttcacaagggttctcgaagctttttttttgttattcagcaactcaacaccgagcttcggaaacgccggggggggg

SEQ ID NO: 149337 - DNA, 359 bp, Arabidopsis thaliana columbia
aaacgctcttcttcttcgatctcttttttttttttttttattacttctctgaagccataagaggggaagaattcaaaggagggatctgactataaacagaaacttccagagcttggtgaaggagcagccaccctaacttttcaatccctaaaggagcaaaaactctgattttggagcatcggtagggttggtctcttcccatattgttaaaacgacttcgtttggttgaagaaaaagcttcctggggttgaaggctctttgctcaacctaagagatgaaaatagtcaaggcaaatgcaggagcactgacccatttcgaagggcttgactttcttaacttgagaggggcattaaaagata

SEQ ID NO: 149338 - DNA, 466 bp, Arabidopsis thaliana columbia
  unsure (1)..(466): unsure at all n locations
canctctctctcccattgatcnttcttcctcggctacatctttccgnacgcctctctctcgttccgaggtgtggtttaatatttgatgggaacatcatctggttcgaatcatcctcaccaaatgttaccaccacgtcaacaacaacgaagtggaggaggacttgaaacagctctttcactagtctcttcagatcaagagccgcgtcgcgagtcttcagcggagagtgcgagttctcaagaaacatggccactaggagacactgttgctgggaagaagtcaatgagtcaaaagacagagcctgattctatggaacaaactgtgaatgtgatgcaccatgtttcgaatgcggacaaggtatcggtacgggatatcgctagggaaagagttgagttagttgcaaagagaatgcatcgatttccggatgagtttctcgacgagttaagaacggtttttagtctattcttg

SEQ ID NO: 149339 - DNA, 398 bp, Arabidopsis thaliana columbia
gtttgatcatcttgtgagaaaaataatggctgcttcagtgatgctatcttcggtgacattgaaaccagctggtttcacggtggagaagacggcggctagaggattaccgtcgctcacaagagctcgtccctccttcaaaattgtcgccagtggcgtcaagaagatcaagaccgacaagcccttcggaattaacggcagcatggacttgagggacggcgtcgacgcctccggcagaaagggcaagggatacggtgtttacaagtacgtcgacaagtatggagctaacgtcgatggatacagtcctatttacaacgagaacgagtggtcagcgagtggtgacgtgtacaagggaggagtcaccggattggcaatttgggcggtaactctcgccggaattc

SEQ ID NO: 149340 - DNA, 375 bp, Arabidopsis thaliana columbia
gtttcattcacaggttacttacttttctcatctgatgcgacaaagggacattaaatgtgcaactatagtggtggacgccaatggcaccgtcaaacttgcagattttggattggcaaaggtgtcaaagttaaacgacattaagtcccgcaaggaaactctattttggatggctccagaggttattaaccggaaggataatgatggttacagaagtccagctgatatatggagcctcgggtgcactgtgctggaaatgtgtactggtcagatcccatactctgatctagaacctcgtgaagccctgtttaggatcagaaagggtacgctttcggaagtacctgatactttatcactagacgctcggcatttcatact

SEQ ID NO: 149341 - DNA, 381 bp, Arabidopsis thaliana columbia
ccttaacttggattctttctggtcaccatggcttcggttactttctctgtccccaagggtttcactgaattctcaggattgcgaagctcctctgcttctcttcccttcggcaagaaactttcttccgatgagttcgtttccatcgtctccttccagacttctgcaatgggaagcagtggtggatacaggaaaggtgtgactgaggccaagcttaaggtggccattaatggattcggtaggatcgggaggaacttcctgagatgttggcatggtcgcaaggactctcctcttgatatcattgccattaatgacactggtggcgtcaagcaggcttcgcatttacttaaatacgactctactctcggaatctttgatgcttga

SEQ ID NO: 149342 - DNA, 461 bp, Arabidopsis thaliana columbia
cttatctcctttcctttcattgtagttaacgaaaagattacgataatggcaacatcagctatccagcaatcctccttcgccggccaaacggctctcaagccctccaacgaactcctccgcaaggttggtgtatccggtggtggccgtgtgaccatgcgtcgtaccgtcaagtctactcctcaaagcatctggtacggaccagaccgtcccaagtacttaggaccattctcggagaatacaccgtcctacctaaccggagaataccccggagactacggctgggacaccgctggactctcggctgacccggagacattcgctaagaaccgtgagccttgaagtaattcacagcagatgggctatgttgggtgctctcggatgcacattccctgagattctctccaagaacggtgttaaattcggagaaaccgtgtggttcaagggcaggtcttcagattttt

SEQ ID NO: 149343 - DNA, 426 bp, Arabidopsis thaliana columbia
gtgtgtttggagaagaagaagaacagatcaaatacgaggagagatctctaaagagatttatcgtttcaaatttgttcacgttgagaagtttaatttagattaaacaacaaaaagatgggttactggaattccaaggttgttccaaaattcaagaagttattcgagaaaaatagtgctaagaaggctgctgctgctgaagctaccaagacctttgatgaatctaaggaaacaatcaacaaggaaattgaggagaaaaagacagaactccaaccaaaggtcgtggaaacctatgaagccacgtctgcagaagtcaaggctttggtgagagaccctaaggtggctggtttgaagaaaaactcagcggctgtgcagaagtaccttgaggagctagtcaaaattgaattctccggatcaaaagcggtgagt

SEQ ID NO: 149344 - DNA, 441 bp, Arabidopsis thaliana columbia
aaaaaaaattaaaagaacgaataaaaaatcaactgagatatatataaaaaaaaaactggaagaagaagaaggaccgcgagctttggatcgaatttgttaaatttttcttctctcgataataaaaacaacaaatgatcgttgatcgtttttctctagattcgattccgattccaaagaactagtctccggcgtgtaatctctgatcgttgaagatccaagctacgccgcatcttactcgccggcggcttgaatcatggctgataggagaaacaggtgtaaccagatcctccttttagcataccagagttttggcttagtgtttggagatttgagtatttctcctctctatgtgtataaatgtacattctacggaggattgagacatcaccaaacagaagatacgatatttggcgcgttttctttgatattttggaccatcac

SEQ ID NO: 149345 - DNA, 466 bp, Arabidopsis thaliana columbia
ggtcaatacacaaaattctggaacgagtttggcaagtctgtcaaactaggtatcattgaggatgctgctaacaggaaccgcttggcaaaacttcttcgttttgagacaacaaagtccgatggaaaattgacttccctggatcagtacattaagagaatgaaaaagagccaaaaggacatattttacatcacaggaagcagcaaggaacagctagagaaatctccattcctggagaggctcatcaagaagggctatgaggtcatcttcttcacagacccagttgatgaatacttgatgcaatacctgatggattacgaagacaaaaagttccagaatgtgtccaaggaaggactgaaggttgggaaagattcaaaagacaaggagctgaaggaagcattcaaggagctaacaaagtggtggaaaggaaatctcgctagcgaaaacgtagacgatgtcaaaatcagca

SEQ ID NO: 149346 - DNA, 433 bp, Arabidopsis thaliana columbia
gaagaagaagaagagtcagtgagctgcaatggctgattctcactcagtcaacaatcagctctcgggacacacttccattttgggtttacgtttatgggttgttctcggcgtttgcgttggagccgcgatcgttcttttactcgttctcatctctctctggttcatttaccgacgaagcaacaagaacaaatctcttgagtcttcttctaaatctaaccatacgattgttcccgttgtttccaaggagattcaagagattcgacctccaattcaacccgacccaacaccggagccacaccaaaaccaacaaagagaagacgattacaaaattcacatcgaaattggtaaagatcatcggattgcgtacccggaacgaggaggttggactggtttccggtctgggttcgggtcgggtgatcagggtttacttatg

SEQ ID NO: 149347 - DNA, 431 bp, Arabidopsis thaliana columbia
caaccctcgcaactctatttaaacatttatcttgtgacgtttcacataacaagatatatctacggtaaccccaagaaatttaacagaatgaaagtaattacttccctaatctcttctattttgcttaaattcatccacaaagacttccatgagatttatgcaagaatgtccctcctcgatcggtttcttcttcttatcgtgcatggagtggataagatggttccatggcataagcttccagtattcttggggttaacctatcttgaagtacgaagacatcttcaccaacaatacaatcttttcaacgtcggtcaaactccgactgggatccggtttgatcctgctaattatccgtaccggactgctgacggaaaattcaatgatccctttaatgaaagcgtcggcaggtaaaatagttttttcgggagaaa

SEQ ID NO: 149348 - DNA, 144 bp, Arabidopsis thaliana columbia
acgatctttcttctccactgtaacctcccaatttatatatcaattataaaccaaacttgattgatagatatttttttatcatgagcgtttttgaaatgcatgatattcatgatttctccatgaacggagttggtggtgggggag

SEQ ID NO: 149349 - DNA, 446 bp, Arabidopsis thaliana columbia
ccctaggagagataaaaacaaaaatctagacggagatttatggcgacagcgaatcctggccgtggaggtggtagaagaggcggtggagctatggatgacgataagttggtcttcgagactaccgatggaattgagcccatcacgagcttcaatgatatgggcattaaggaagatgtgcttcgcggtgtctacgaatatggattcgagaagccttccgcgattcagcagagggctgttatgccgattcttcaaggacgtgatgttattgctcaagctcagtccggtaccgggaagacatctatgattgctctctccgtttgtcaagtcgttgatacttcttctagagaggttcaggccttgatattatcctcaacaagagagctggctacacaaacagagaagacgatacaagctattggattacatgccaatattcaagcacatgc

SEQ ID NO: 149350 - DNA, 434 bp, Arabidopsis thaliana columbia
ctcaggaagaatctagttgcggttatcttcagcctaaagagtaaagacccatccatccgttgctgaagctgctgctttgatcgaaaatgacgtcgtcctctccaacacagcgtactcacgtctcaattcctcctgaaccaggaggaaagtcactaacacaagaagctaatgagccaccagttccgatatcagtttcctcgccgtgcgggaaacgaaccagagatcccgaagacgaggtctatctcgataaccttcgctctcagaaacgttatcttagcgagataatggcttgtagtttaaacggactaacagtaggagactcacttcctgtcaacatgttagagtcttcagcacggtctgagagctttctttatcacagggatgatttatcattacaatactctcccatgtcagaagactcggacgaagcgaga

SEQ ID NO: 149351 - DNA, 445 bp, Arabidopsis thaliana columbia
cgactacatcaacatcctctgctttcgattggaaaacccaacagactctgttccgagtagccacagaaatatcttcaattctcttacaacgtcgtaactggatcactcatctccaatatgttaaatccaagctcccaaggtcaacacttacttcacctgtattcctccagatcctccgtgaaactcgaaaatgccctaaaaccactcttgatttcttcgattttgccaaaacccatcttcggttcgagccggatcttaagtctcattgtcgagtaattgaagttgctgctgaatcaggtctcttggaacgagcagaaatgctcttgcgtcctctggttgaaaccaattctgtgtctttagttgttggagaaatgcatcggtggtttgaaggtgaagtttcactgtctgtctcgcttagcttagtgcttgagtattatgcccttaa

SEQ ID NO: 149352 - DNA, 232 bp, Arabidopsis thaliana columbia
ggagggttagaccagggagatttagttgttgtgtatttaaagctgtgtgagaagcatccgggtccatggaggatgattcgatctcacgttcataagatgttgggagaatggtttagaattcatccacaagttagagagcaacttaatgctcaaaacatattgacgtttgagtttctatacggacttgtggatcagcttagagagcttggacgtagagttccactctacatga

SEQ ID NO: 149353 - DNA, 371 bp, Arabidopsis thaliana columbia
cttttgttcgttctctggcggccgatcccgtcgctcgctaccttttaagatattttttttatctaatgaacctgaaattgtaattaggcatataattggggattatttgctgaaattctcatttctagatcgaaaaaagcgaataattcgttttcatttgattcttgcctaatcttagggtgtctttatttatctacccaaaagaatgtctaattatcgaggagatgatgctgagtacatggaagacgtagatgatgagatggaagatgttgaagatgatatggatgaggagtttcgtggtgatgatcttggtgcttcagattctgacgttgaagaatttgactattcgaacaataaagtagctgatacca

SEQ ID NO: 149354 - DNA, 413 bp, Arabidopsis thaliana columbia
aattaatcttgctaagccagctagggcttatagaaatggagggtggtgcgagtaatgaagtagcagagagcagcaagaagatagggagagggaagatagagataaagaggatagagaacactacgaatcgtcaagtcactttctgcaaacgacgcaatggtttactcaagaaagcttatgagctctctgtcttgtgtgacgctgaggttgctcttgtcatcttctccactcgaggccgtctctacgagtacgccaacaacagtgtgagaagaacaatagaaaggtcaagaaagcttgctccgacgccgttaaccctccgaccatcaccgaagctaatactcagtactatcagcaagaggcgtctaaactccggagacagattcgggacattcagaatttgaacagacacattc

SEQ ID NO: 149355 - DNA, 464 bp, Arabidopsis thaliana columbia
tgatttgctagcttctcttgctggaaagttgttggaagaaagtgaaagttcctcaacgtctacctatgcatctgaagctgataatcttgatcatttgggtggactgattaagcaagaacttgaagatggctatactactaagccttgtaaatccgagtttttcgatccaggaaaccctgcttcaaagtctactagtgaaaatactagcgtgacttgtttgccattttcgtctttcgaaaatgattgcattttggagcaaacaccggtttctgattgtaagagggcatctggtttgaagtccctggtagggagcatcactgaggagacatgtgttgttaatgaggatgccggatctgaacaaggtgctaatactttcagcttaaaggatccaagtcaattacattcgcagtctccagaatcggtccttctggatggcgatgtgaaattagcaccatgcacggatc

SEQ ID NO: 149356 - DNA, 419 bp, Arabidopsis thaliana columbia
gcaaagcttgatgattagaggctctctctctactagggtttgctgatttgagttttctatgccgactatacgagttcttcgattctactgggatttttttttgaaaaagggaatagaagaagaagttgctgaattctacgatatggaatccataatggagcgaagctgatcgttacattgaggatgtattagtggcatgagcggtgagcgattgcaagacagaagatacttcagcggaagggaaaagcttcggaattggcagaagaagctgacaaggaaaagctcgctgacgctacacctagtttacttgttcaagcaactcagctcaagcgagatgtacccccaagctagtgctactgagcaaacttatttacaagaaaaagagaatgtggagcatttatctcgatagaggacgctta

SEQ ID NO: 149357 - DNA, 472 bp, Arabidopsis thaliana columbia
  unsure (1)..(472): unsure at all n locations
gttaaacaaagattacgattatggccacatcagctatttaacaatcctccttcgccggccaaacggctctcaagccctccagcgacctcatccaaaaggtgggcgtcttgggcggtggccgtgtgaccatgcgtcgtaccgtcaagtctactccccaaagcatctggtatggaccagaccgtcccaagtacttgggaccattctcggagaacacaccgtcttacttaactggagaataccccggagactacggctgggacaccgctggactctcggctgacccggagacattcgctaagaaccgtgagcttgaagtaatccacagcagatgggctatgttgggtgctctcggatgcacattccctgaaattctctccaagaacggtgttaaattcggagaagccgtgtggttcaaggcaggctctcagattttctcagaggaggtctngattacctcggaaaccctaacttg

SEQ ID NO: 149358 - DNA, 420 bp, Arabidopsis thaliana columbia
atggcaatgagtttgattctacagagattctccttcgagctttctccttcctatgttcacgcgccttacacaatcatcaccctttacccacagttcggagctcatcttatgctgcacaagctctaatcacataaccccttgttttgttatcaaataaactcattatctttttatgtatccaagtcagaactcgtgtcatagtttaataaaacccttcaagatgtgtcaaaaaaaaaaaaaaaaaaattaaaaacataaaataaaaaaaaaaaaaaaaaaaaaaaaatataaaaaatattaaatttaataaattattttgctcctttcatttaaactttttcaaattttctatccctttaactcaacctatcttctttttttttttcttatcctaaaattaaattatttttaaaaaggggg

SEQ ID NO: 149359 - DNA, 391 bp, Arabidopsis thaliana columbia
tttagggtttgatttttgtaatgtgagaaaggtttcgttatgttaaagaggcactctatcgccgttggctccagaatcgcaagcttcgattcccataaaacccttatgtcttcctttaccgatcccctttatctgcgatcgctttactctcctcgatccatcgccatcagatttcatggagattttgctcatagactctacaatcccattcaaatttacaacaacaacaacaacaacagtggctcttgtaatggtttgttcaaggttaaaggtggaggaggaaagccgaaaggattcaccttgcgaagttgttttgattctcataagaaacctgatcaaaaggctcgagctttaactcaacatcgccggttttttccatgatctgggatct

SEQ ID NO: 149360 - DNA, 326 bp, Arabidopsis thaliana columbia
gaacaatcttgaacgagacttagctagtgtgttcaaagtgggattctcgctcttgctctgtgggagagaccaactggccctgatgcatttagactgcttggagaacaaaattatgaacttaacaactatgtaagcaacatcgatggatacaaaatttctgtaaagggagataaagggattgatcttgaagttacacgaggcctcattggtgcgtatttagatgtcaagaaaccagacgaggacggtaaattatttttagtcaattctgaacgtcagaattccaaagaaacatgctccactgtcagcgctacacgtgctacaaattt

SEQ ID NO: 149361 - DNA, 387 bp, Arabidopsis thaliana columbia
ccgctctcttcgcacctactcttggggcggtccctcctgggagaaacgcgtccgatcctgcgctcgtgtccgcacccgcaacggcgtctccgttctcgtcaccggggccgccggtttcgtcgggactcacgtctctgccgctcttaaacgacgcggcgacggcgttctaggcctcgacaacttcaacgattactacgacacctctctcaagagatctcgacaagccctcctcgagagaagcggagtgttcatcgttgaaggagacatcaacgatctgtctctcctcaagaaggctttcgaggtcgtccctttcactcacgtcatgcatcttgccgctcaagctggtgtcagatacgccatggagaacccccggcttctacgttcaca

SEQ ID NO: 149362 - DNA, 484 bp, Arabidopsis thaliana columbia
  unsure (1)..(484): unsure at all n locations
acttctcgaattccttctcttcaaaatcacgaaatggtctcaagtcggttgggctaccacggtcaattcaagggctcgatgnttatctcccaacgcgtggatctgtgtctacaagatnctcgagaagctattgaaactcagcgagttttgcagtgaagggttcttggcaaccgaagcannaagagaagtggaaagagtcttctgtaaagaaagcagaagagtnggttgatacttactgtgagatccgctcgtgttgagactgaagtcattcctgtttctcctgaagatgtgcctaacagagaggagcagcttgagaggttgttggaaatgcagcagtttggtgatacatcggtagggatgtggtcgaagccgacagtgaggaggaagacaaagattgtttgcaccccgtggtccgtcgaccaacacacgagaaatgatatggaaattggctgaagctgggatgaatgttgctaggatgaatatg

SEQ ID NO: 149363 - DNA, 478 bp, Arabidopsis thaliana columbia
gtcaaataacgataaccacaactttgatgaacgagatactctcttcttaaaacctcatccaccgaaacacaaatgtcttggaatccttctcttatctttctccttgtgattcctttttatattcctctgatattttctctcagtttgatctcatttgctctgcaatggcgactaccatgaatgctgctgtttctctcacatcttcaaactcttcttcttttcccgctacaagttgtgccattgctcctgaaaggatcaggtttactaagggtgctttttactacaaaagcaacaatgtagtgacaggtaaaagagtgttttccataaaagcacaaatcacaacagaaacagatactcctactcctgcaaagaaagtagagaaagtgtcaaagaagaacgaggaaggtgtgattgttaacaggtacagaccaaaagagccttacactggaaaatgccttctcaacaccaaaatcacagc

SEQ ID NO: 149364 - DNA, 446 bp, Arabidopsis thaliana columbia
  unsure (1)..(446): unsure at all n locations
cttctcccatttctccattgacgacagcgaagaaacgtcccaacgagctcagagagccacaccgatcctcctttttcttcttgttcttcctcctgcatttttggttttggtggcgttgagacatcatcatgtctagcgcagaggatgtgaaagagcaaggaaacctcaccaacgaggcagagaagtcaatgccatcatcacagcaggaggaggctgttgtaaagaagaagtatggagggctcatgccaaagaaaccacctctcatttccaaggatcatgagcgagcatactttgactcagctgattgggctcttggaaagcaaggtgttgcgaagccaaagggacccctggaagcccttcgtcccaagttacagccaacgcagcagcagacacgttacaggaagtctncatgtgctccatctgagggtggtgaagatggaggagct

SEQ ID NO: 149365 - DNA, 470 bp, Arabidopsis thaliana columbia
acaaatcttaaacgttttactttgtgctgcactactcaacctcaatggccgcctcaacaatggctctctcctcccctgccttcgccggtaaggccgtcaagctttcccccgcggcatctgaagtccttggaagcggccgtgtgacaatgaggaagactgttgccaagccaaagggcccatcaggcagcccatggtacggatctgaccgtgtcaagtacttgggtccattctctggcgaatcaccgagctaccttaccggagagttccccggagactacggatgggacaccgccggactttcagctgaccccgagacattcgcaaggaaccgtgaactagaagttatccacagcaggtgggccatgctcggagccctaggctgcgtcttccctgagcttttggctagaaacggagtcaagttcggagaggcggtttggttcaagggcggttcacagatctttagcgatgga

SEQ ID NO: 149366 - DNA, 476 bp, Arabidopsis thaliana columbia
aaatctctctcgatctcaatttcgcaaaatggctgacatgaagatcagaatcggaatcaacggtttcggaagaatcggtcgtttggttgctagagttgttcttcagagggatgatgttgagctcgtcgctgttaacgatcctttcatcaccaccgagtacatgacatacatgtttaagtatgacagtgttcacggtcagtggaagcaccatgagcttaaggtgaaggatgacaaaactcttctcttcggtgagaagccagtcactgttttcggcatcaggaaccctgaggacatcccatggggtgaggctggagctgactttgttgttgagtctactggtgtcttcactgacaaagacaaggctgctgctcacttgaagggtggtgctaaaaaggttgtcatctctgccccaagcaaagatgcgcccatgttcgttgttggtgtcaacgagcacgagtacaagtctgaccttgaca

SEQ ID NO: 149367 - DNA, 420 bp, Arabidopsis thaliana columbia
  unsure (1)..(420): unsure at all n locations
aaaaaaagcaaagaacacttgaacgttttctagattgatatggaagggaaagaagaggatgttcgacggcgagctaacaaggtcgcggagaggcaaccgataggtacatcggctcanacggacaaagactacaaggagccaccaccagctccatttttcgagccaggcgagctgagttcgtggtccttctacagagccggaatcgccgagtttatagccaccttcctgtttctatacataacagtattgacagtgatgggagtgaagagagcaccaaacatgtgtgcctctgttggaatccaaggcattgcttgggctgtcggtggcatgatctttgcccttgtctactgtactgctggaatttctgttgggcacataaacccagcggtgacattttggtctgttcttggcttgtaagct

SEQ ID NO: 149368 - DNA, 360 bp, Arabidopsis thaliana columbia
agaaaaagagagagagagagagagaggtttgaattttggagatgaagttcgacttcatcagggtagctcttgtaatggtatctggtgtagctcttttaatggtgtccggtgagatttcaactgaagaaatttcaccggcgattgagcattcgtcgtctctgccgcaatcagaaaccgaaatgtctccatctccgacgatgtctaatgattacgattatccgtcatcgtctcaacttacggaatccaatgatctcaactacactgatagtaccagaccgggaggcgaagaagcattcgtaggtggtgaaaatggcggaggaggaggaaagaaaaccggaatcgctgttcgtggatcgattg

SEQ ID NO: 149369 - DNA, 301 bp, Arabidopsis thaliana columbia
ctaactctcactcttagtacaaatattttcatgaatggtttctccttctttttcaaccaagcggggcttctttgcttgcgtgtggtctgttcacattctcacacaaactcgtgacaggagaatccgacaaagttgagctcaatctttactacgaatcactttgacccggttgtcagagtttcatcgtcgatgaactagtcaaagtctctgactcctatctcgatacaatcaccgatgtcaagcttgttccatcctagtacgccaaaatctctcaataattctgaccgtcatttgccagcat

SEQ ID NO: 149370 - DNA, 381 bp, Arabidopsis thaliana columbia
agagaccaatgaagagatctacggtgttatgtcttttgttttctggactttaactttggttcctgtgcttaagtatgtctggattgtcctccgagctgatgataacggagaaggtggaacttttgctttgtactcattgatctgccgtcatgtcaaagttagcctcctcccaaaccgacaagtctctgatgaggcactgtccacttataagctggagcatccaccggagaagaaccatgactcgtgtgtgaaaagatatctggagaaacacaagtggttacacactgctttgctgcttcttgttcttcttgggacttgtatggttattggagatggacttctcactccagctatctccgttttctctgctgtgtcaggtct

SEQ ID NO: 149371 - DNA, 440 bp, Arabidopsis thaliana columbia
cttttcatttctctctgatttctcgatctctccgtccaactatgtctgccttcacaagcaaattcgccgatgagttgatcgccaacgctgcctacatcggcacacctggaaaaggtattttggctgctgatgagtccactggtaccattggaaagcgtcttgcgagcatcaacgtcgagaacgttgagaccaacagacgtaacctccgtgagcttctcttcaccgcccctggtgctcttccatgcctcagtggtgtcatccttttcgaagagactctgtaccaaaagagttccgatggtaagcttttcgttgatatcttgaaggaaggaggagttcttcccggtatcaaggttgacaagggtaccgttgagctagctggaaccgacggtgagaccaccactcaaggtcttgacggtctcggtgacagatgcaagaagtac

SEQ ID NO: 149372 - DNA, 457 bp, Arabidopsis thaliana columbia
  unsure (1)..(457): unsure at all n locations
cggacgcgtgggttcttactctcctcctcctcctccgccatcaagctccggtggcggtggatcgtattattactctcctcctcctccttcaagctccggtggtgttaaatacccgcctccgtacggcggcgacggctacggtggctattatccgcctccttactacggcaattacgggacaccaccaccaccgaatccgatcgttccttattttccgttttactatcatactcctcctcagggatattcaggctcggctcgtttacagaattctctcctctttgctctgttcgccgtcttgctctgttttgtgtgacggcgattcatctgtatttggccgggaaaagtgtacggtgtaaaactgaaatatcttggttacttatttaactttttttacatttttggtgacaattntgatttattatatcttnttcaataattaagaacatttattact

SEQ ID NO: 149373 - DNA, 407 bp, Arabidopsis thaliana columbia
gaaaaatgggtcgagtctcatctattatctctttctctttgacactcttgatcctcttcaatggctacactgcccaacagtggcccaacgagtgccagctcgatcaactcaatgcgctcgaaccatcccaaatcatcaagagcgagggtggtcgcatcgaggtctgggaccaccatgcaccccagctccgttgctccggctttgcctttgagcgtttcgtcattgagcctcagggtcttttcttgcccactttcttgaacgccggcaaactcacgtttgttgttcacggaaggggtctaatgggaagagttattccgggatgcgccgagacgttcatggagtcaccggtatttggagaaggtcaaggtcagggtcagagtcaagggttccgtgacatgcaccagaaa

SEQ ID NO: 149374 - DNA, 454 bp, Arabidopsis thaliana columbia
  unsure (1)..(454): unsure at all n locations
agaagagtcaagtcactaaaataactttcacagtctttgattcgaagatctttgtcgccgagagatatccactctgatttgagttctgaactattctctggaggaggttgaggtctgaaatcatggaacaacttggttagagtgtggaattttagctgatttgatctttgattcatctgtgatcataataactatgaagatggacaaaaagactatagtttggtttagaagagacctaaggattgaggataatcctgcattagcagcagctgctcacgaaggatctgttnttcctgtcttcaatttggtgtcctgnagaaagaaggacagttttatcctggaagagcttcaagatggtggatgaaacaatcacttgctcactaatctcaatccttgaaggctcttggattgacctcactttaatcaaacccacaacacgatttcagcgatcttg

SEQ ID NO: 149375 - DNA, 467 bp, Arabidopsis thaliana columbia
ggaaatttccgtttatccgattcgttctcacgagatgatggctcgttaccacaggagatcgatgatcttgtgcttagttctgctctcattaagcatatcgccgagccaaggcttcctagggacagaggaaaagatcaaatccgctgtcttttactcaccaaaacttgtgatgaatccaggatcagttgcaaatccttacttattcgacatcgatttcccaagaggtcatatcggcctcaaagctttcgatgctgaagtggttgacgaagcgggcaaacccgttcctctacacgagacctatctccaccattggattgtcgagccatactatgtacgtaaaggttccaagcttccacagagagaaatgttcaggaatcatggattttccaagggaagatcctgaaagcaatcttgattccaagtcagatattattcttgtgaaaaatggagggttgtgcaggagttta

SEQ ID NO: 149376 - DNA, 385 bp, Arabidopsis thaliana columbia
gagagtttctcaagtctatcaaacgatactacagcaatacctacactgatggcgaaaagcaagacgccataaacttattcttgggctactttcaacctcaggaagggaaacctgcgctctgggagctggattctgattactatctccatgtttcagggattggagatgatattttcccagatatcggggtccagtccattgctaaacctatgagtggtattggagtcaatcttgcaccagtgccagctttcagagacgacttctcgcggaagaagctgacatcgtttgacaaactgatagagcagacatgcagttcaataaagaacgtgaggctttgtagtgagacagaccaaaggccaggtggcaacactggaagcactggtgt

SEQ ID NO: 149377 - DNA, 397 bp, Arabidopsis thaliana columbia
cttcttctgatcctcctcttagccccagttttgatttcgcattccttctgtgatttcgtttctagtagatctgtaatttcatgattatcaaattcacaatgcggatctgagatttcgtggataattctagtaacagattcgataatgggaggaggatttagagttttgcatttggtgaggccattcttggcttttcttccagaagtgcaaagtgctgacaggaagattccatttagaggggaaagtgatcctacactgtcatctccctcttcattttccttggttgtagtcagcttcctctctatgggatccattctaccaccggtgctgatccgttctattggatgcgtgtcattctcgcatcgaatcgtggaacggtgatggagcttggtattac

SEQ ID NO: 149378 - DNA, 380 bp, Arabidopsis thaliana columbia
ctgctctgcgatttcaatggcgagccgttggttgagacctgaggtgtatcctttgttcgctgctaccggagttgccgttgggatctgtgcgttttccttgatcagaaacatcaccggaaaccctgaagtcagatgcaccaaggagaacagggctgctggaattttggataaccatgcagagggagagaagtataaggaaaatttcctgaggaagtttgttcgcaacaagaaacctgaaatcatgcctggactcaacaagttcttcactgatcctacatactgaaaccatctttgcacaccgctttgtcgtattgtttctggaattgaatctctttgtgatataaaaccgcatttgtcaatttcacattgttgatgtattc

SEQ ID NO: 149379 - DNA, 454 bp, Arabidopsis thaliana columbia
  unsure (1)..(454): unsure at all n locations
aagagcgaaaatggctggaagattgagcggagttgcgtcacgaatcatgggtggaaacggcgtcgttgcccgatccgtcggttcttctctccgtcaacgcgccggaatgggtctccccgtcggcaaacacatcgtccccgataagccgctatcggtaaacgacgagctgatgtgggacaacgggactgcgtttccagagccttgcatagatcggattgctgataccgtcggaaagtatgaagcattggcatggttgagtggcggattagggttctttagtggtctcggtctgctcgctgttttgaacgacaaagcttctaaggttccatttacaccgagagtgtatccatatgacaacctgagagttgagcttggaggagagccatagagacccatctaagtgatctgctcatcaaaacaagaagcgngtttcttcactgctttggtctttaaa

SEQ ID NO: 149380 - DNA, 304 bp, Arabidopsis thaliana columbia
gtttcattttagcggcagacgagagagctaaagcaaggagcaaccctaaccatggcgactcaaccagctactgaatctgtgcaatgcttcggaaggaagaagaccgcagtggccgtcactcactgcaagcgtggatctggtttgatcaagctcaacggttgcccaatcgagcttttccagcctgagatcctccgattcaagatcttcgagccggttcttctcctcggaaagcaccgtttcgctggtgtgaacatgaggatccgtgtcaacggtgggggcaacacatccaaggtttacgccatcc

SEQ ID NO: 149381 - DNA, 423 bp, Arabidopsis thaliana columbia
caactccgaccgccagagacagcgagtttcagatcaaagatgtcggcgacgcttacaggatcgggaactgctttggggttttcgtgttcctcgaagatctcgaaaagagtttcttcttcaccagcttctaaccgatgctgcatcaagatgtctgtttccgtcgacgagaagaagaaaagtttcagtcttcagaaatctgaggaagctttcaatgctgctaagaatctaatgcctggaggtgtgaattcccctgttcgagcattcaaatccgttggtggacaacctgttttgattgattctgttaaaggctcaaaaatgtgggacattgatggaaatgagtatattgactacgttggcttcttggggacctgctattattggccatgctgatgacgaggttcttgcggctctagctgagacgat

SEQ ID NO: 149382 - DNA, 370 bp, Arabidopsis thaliana columbia
ggcaaactcgatttcgcctagcttcttctgagcattcgccgcttccgtctacagaatggattctcaaatcaaacacgccgtggtcgtgaaggtcatgggtaggactggttctcgtggtcaggtcactcaggttagagtcaaattcactgattcagaccgtttcatcatgaggaacgtgaaaggacccgtcagagaaggagatgtcctcactctcctcgagtccgagagagaagctagaagactccgttgattccaccatatcccaattctctttcaaaagtcttaccaagatttacattttgatggtctcttgtttcttggcattgtagtcaagttctcttttctttttctactgctttagtttaattac

SEQ ID NO: 149383 - DNA, 400 bp, Arabidopsis thaliana columbia
gcacttgctttaccagatcagacgtcaatttcaactcttcatttaagagatttctttcaccgaattttctactccgatcgatcaattgaagattgaaatggaagctaattcaggcggctgaggaggagctgaaggcggaagagcggtaaccggaggaggaggaggaggaggagggagcgatgtggaattggtgagcaagacgttgcatgtggagcataagctattctattttgatcttaaggagaatcctcgaggaaggtatctaaagatatcggagaagacgtctgcgacgaggtcaaccatgattgttccttcctccggcatctcttggatccttgatctcttcaactactatgtcaattctgaggaacacgagccttttagcaaaaaattgcagctt

SEQ ID NO: 149384 - DNA, 485 bp, Arabidopsis thaliana columbia
tgatttcgtccgtggataccctttcagtctccgtgaaggtgtttccactgctgtttcccatggtctttggctcaacatccctgactacgatgccccgacccaactcgggaagcctaaggagaggaacaccaggtttgtggatgctgtcatgaccatcccaaagggaacacttttcccaatgtgtggtatgaactaggcttttgaccgtgatttgattggcccggctatgtactttggtctcatgggtgatggtcagcctattggtcgttacgacgatatgtgggctggttggtgcatcaaggtgatctgtgaccacttgagcttgggagtgaaagaccgtttaccgtatatctaccacagcaaagcgagcaacccttttgttaacctgaagaaggaatacaagggaatcttctggccaggaagagatcaatccgttcttccagaacgcaaagctatcgaaagtagcagtaactgttcagcaatgc

SEQ ID NO: 149385 - DNA, 480 bp, Arabidopsis thaliana columbia
tgagggtttctcaatctctagtcccttttgccatatttgctttggtcctttcctttgtcaatgcttatgatccaagtccactccaagacttctgtgttgccattgatgacctaaaaggcgtttttgtgaatggtaggttttgtaaagacccgaagcgagtcgatgcaaaagattttttcttctcaggtctcaatatgcccgggaacaccaataatcaagttggctctaatgtgaccactgttaatgttgatcagatcccagggcttaacaccatgggaatatcattggtccgcatagactacgcaccgcatggccaaaatccacctcacacgcaccctcgtggctcagagatccttgtccttgtcgaaggaacattatacgtcggttttgtctcttccaatcaagataacaaccggttattcgccaaagtattgcaccccggggatgttttcgtgttccccataagaatgatccattttc

SEQ ID NO: 149386 - DNA, 349 bp, Arabidopsis thaliana columbia
agccacgcgtccgtggtttcttcttctttaaccaagcttgtgttctttggttgtctcctcctgctcacattcacggacaaccttgtggctggaaaatctggcaaagtgaagctcaatctttactacgaatcactttgtcccggttgtcaggaattcatcgtcgatgacctaggtaaaatctttgactacgatctctacacaatcactgatctcaagctgtttccatttggtaatgccgaactctccgataatctgactgtcacttggcagcatggggaagagggatgcaaaccttaacgcccttgaagcttgcgcattaagaacttggcccgatcagaaatcacaatac

SEQ ID NO: 149387 - DNA, 477 bp, Arabidopsis thaliana columbia
  unsure (1)..(477): unsure at all n locations
tgcaaaccaacgtaaaacactaactaagagatcaatatggctggagtgatgaagttggcatgcatggtcttggcttgcatgattgtggccggtccaatcacagcgaacgcgcttatgagttgtggcaccgtcaacggcaacctggcagggtgcattgcctacttgacccgaggtgctccacttacccaagggtgctgcaacggcgttactaaccttaaaaacatggccagtacaaccccagaccgtcagcaagcttgccgttgccttcaatctgccgctaaagccgttggtcccggtctcaacacttgccgtgcagctggacttcctagcgcatgcaaaggcaatattccttacataatcagcgccagcaccaactgcaacaccgtgaggtgatgagcgacggtcaaatgaagctactaagcgatgtttcgaatattatataatcgatgagataatnataaataaagatgttcgaat

SEQ ID NO: 149388 - DNA, 359 bp, Arabidopsis thaliana columbia
ggatttagcaagagaggatttagcgagagagagactttgaagaagatgactagtggaggaggatacggagatccgtcgcagaagattgattatgtgttcaaagtggtgttgatcggcgattccgcggttgggaaatcacagatactggctcgttatgctagagacgaattcagtttggattctaaggccaccatcggcgttgagtttcagactcggacgcttgttatcgatcacaagagtgttaaggctcagatctgggataccgccggccaagaacgatacagagcagttacaagtgcatattaccgaggagcggttggggcgatgttggtgtatgacataaccagacgccaaacctt

SEQ ID NO: 149389 - DNA, 370 bp, Arabidopsis thaliana columbia
gtttcttcattatattttgttaagtccactcttctttctcatatcttctaaccaaaacagagtcacaaggggctcttaagcccttccaactaaattcttttcttttgttctcttgaaactgaatccaccagacaaaaaaatgggggttgatggtgaactgaaaaagaagaaatgcatcattgctggggttatcacagccttgctcgttctcatggttgtcgctgttggcatcacaacatcaagaaacaccagtcattcagaaaaaatcgtccctgtgcagattaaaacagccaccacggcaagtgtagcagtttgtgcacctactgatttcaaagagacttgtgtcaatagtctcatgaaagctttttct

SEQ ID NO: 149390 - DNA, 482 bp, Arabidopsis thaliana columbia
  unsure (1)..(482): unsure at all n locations
cgccttcaaaaattcccaatttgttctttcaaacaaacttgctcagatcctcttcttcttagggagcaatcttcaaatcaattgttgttaaaataaatgggattaaagcgaccttatgatgctgaagagatgcaaaagtgcaatgctaagcatgcaagacagcttagttacaaaaaccataaccaatttgacgaagctattccatatcatcatgcttctatggagaagaagacatatgttntagaggatctgattggtctctgtgagaatcctacgcggactaatgatgcaaatcacgttgacaagggttttgaaacaaccggtttgtgtcaggaagattctcagtctggagtgacgactcagtcagatctttctcatcaatcttctggttcagatttcacctggaagccagtggaagatgtttatacttgtttgatgaatcaacctcctaggaaacaagttcttagtgggtctaatcatca

SEQ ID NO: 149391 - DNA, 434 bp, Arabidopsis thaliana columbia
gcggaagctaaggagaggcgaattcgaatcgagaagatggtgtctgggtcagggatatgttcaaagcgtgtcgttgttgacgcacgtcaccatatgtgtggtcgtcttgcttcgatcatagctaaagagttgctcaatggacagagtgttgttgttgtccgatgtgaggagatttgtttgtctggtggtttggttcgtcagaagatgaagtacatgaggtttcttaggaaacgcatgaacactaaaccttctcatggtcctattcatttccgtgctccgtctaagatcttctggcgtaccgttcgtgggatgattccacacaagaccaagcgtggtgctgctgctcttgcacagttgaaggtgtttgagggagtaccaccttcttatgacaaggtcaagagaatggtcattcctgatgctctcaaggtgttgag

SEQ ID NO: 149392 - DNA, 477 bp, Arabidopsis thaliana columbia
ttctccacgaactgactaagagaggtaccaagaagaaaaccagagaagaatcttctttagagagatgggtgtggtagaagaagctcacaacgtgaaggtgattggttcaggagaagccacgatcgtgttaggtcacgggttcggcacggaccagtcagtatggaaacacttggttccacatctggtcgacgattaccgcgtcgtcctctacgacaacatgggagccggtacgaccaaccctgactatttcgacttcgatcgttactcaaatctcgaaggctactctttcgatttgattgcaatcttggaagatctcaagattgagtcttgtatctttgttggccactctgtttctgccatgattggagtcttggcttctcttaaccgttctgatctcttttccaaaatcgtcatgatctctgcttcttcgagatacgtaaacgattgttgttaccaaggtggattcgaacaagaaga

SEQ ID NO: 149393 - DNA, 281 bp, Arabidopsis thaliana columbia
agaggttctctcaatctctagccctttctgccatatttgctttggtactttcctttgtcaatgcttatgaggcaagtccactacaagacttttgtgttgccatcgatgtcctaaaaagcgcatatgtgaatggtaggttctagcaagacccgaagcgagtcgatacaatagactgtttcttatcaagtcgcattatgcgcgaggacagcaataatcaagtcggctgtaatgtgaccactgttaatgtggatcagatgccatggcttaacaccatgggaata

SEQ ID NO: 149394 - DNA, 248 bp, Arabidopsis thaliana columbia
tcatcagagaagccaaccaaagattcacttctcgctccagtagctcgcaaaatgaagattgccaagatgaagggtcgtcactctggatacggtaagaggaagggtacccgtgaagctaggttgccaacaaaggttctgtggatgcgtaggatgcgtgttcttaggcgtctgtcgaagaaatacaaaaagacgaagaagattgacaagcacatgtaccatgacatgtacatgcgtgtttagggttatag

SEQ ID NO: 149395 - DNA, 312 bp, Arabidopsis thaliana columbia
  unsure (1)..(312): unsure at all n locations
atctttctcctcgataacccatgaggatctcccccaatgttccctttctagctccaatagccgctcctagtgctcccaaagtcagatttttctcctccgaatccggtgagaactcgactacggnccctgagtcttcgncgactgattcacccgagaagaaagatctcgttgtagaagatgtaagcaacaaagagcttaaaagccgtatagagaagtatttcaatgagggtaatgaagatgctttacccggagttattgaagcacttctacagagaagacttgtagacaaacacgcagagactgatgatgaat

SEQ ID NO: 149396 - DNA, 405 bp, Arabidopsis thaliana columbia
ccttcctcgaaacaagagcttagctaagatgacgatgaactacccaaccgtgagcgaagattacaagaagggtgttgagaagtgcaggaggaagctcataggtttgatcgctgagaagaactgtgcacccatcatggtccgactcgcatggcactctgctggaactttcgattgtcaatcaaggactggaggtccattcggaacaatgaggtttgacgctgagcaagctcatggagccaacagtggtatccacattgctcttaggttgttggaccccatcagggagcaattccctaccatctcttttgctgatttccatcagcttgctggtgttgtggccagtgaagttactggtggccctgacattcctttccaccctggaagagaggacaagccccaaccacc

SEQ ID NO: 149397 - DNA, 482 bp, Arabidopsis thaliana columbia
cttttccccactgatagagaagcttatcttgaacaactcgcatcgtgttaccatagagatgcagcctgatcctgaaaaagctactcaagaggaagtggaagagaaaaatatcctggaaaaagttaaagcagctatgacagaagaagatcttgcagagctagcacgtgctacagaggagctgaaattgaaacaagaaactcctgaccctcctgaagcattgagatgtgtcccaagtttgaacttgggtgacattccaaaagaacctacttatgttcccaccgaggttggagatattaatggtgtgaaggttttgcggcatgaccttttcaccaatgatattatctatactgaagtagtctttgatattggttcgctgaaacatgagcttcttccactagtaccacttttctgtcaatcattactggagatgggcacaaaaagattgacttttgtcaacttaatcaagtgattggaaggaaaac

SEQ ID NO: 149398 - DNA, 455 bp, Arabidopsis thaliana columbia
gcaaccgttgaattacgccagaaattacttggcggatctgctcgagccttgcgttaagcgagtgatctacttggattcggatctcgtcgtcgtcgatgatatcgtcaagctttggaaaacgggtttaggccagagaacaatcggagctccggagtattgtcacgcgaatttcacgaaatacttcaccggaggtttttggtcagataagaggtttaacgggacgttcaaagggaggaacccttgttacttcaatactggtgtaatggtgattgatttgaagaagtggagacaatttaggttcacgaaacgaattgagaaatggatggagattcagaagatagagaggatttatgagcttggttctcttcctccgtttcttctggtatttgctggtcatgtagctccgatttcacatcggtggaatcaacatgggccttggggtgataatgttagag

SEQ ID NO: 149399 - DNA, 481 bp, Arabidopsis thaliana columbia
  unsure (1)..(481): unsure at all n locations
tttttgtgtgtgagcagctggaacagatatctcataccaagcaagnnncttttcattggcatggggagatagattttacatacaaccattgtcaccaacagaagctgcagctagagccaaagattctgctaaagagatcatcaacgttaagtcatttatcgacaaaaaagcttggccctatgttcagaacgatctccgtttaagagcatcgtacctccgttacgatctcaacaccgttatctccgctaagcctaaggaagagaagcaaagccttaaagatctcaccgcaaagcttttccaaaccattgacaacgtaagttttttctttctttagggttttgttttctaagcggttcttggtaaagaagttagagtgtgcatagattttttttatgcacaagattcttcctaagtttgggttaatctgaaaatgttgttttgtagattttcttatggtgaagttggactatgccgcgagatc

SEQ ID NO: 149400 - DNA, 477 bp, Arabidopsis thaliana columbia
cttattcacacatctaattaactttaagtaccaaaaatggcgggctacaacctcgaaggtatcgaagcggcacctttgaaagacgatctggatattgtgatcccaaccatcagaagcctcgactttctagagcaatggagaccatttttgcaccattaccacctgatcattgtccaagatggagacccttccatcaagatccgagttcccgagggttatgactacgagctctacaaccgtaatgatatcaacaggatccttggtccaagagctaatagtatctcctacaaagatggtggttgtcgctgctttggcttcatggtttctaaaaagaagtatatctacaccattgatgatgattgctttgtggcaaaggatccaagtgggaaagacatcaatgtgatagcttagcacataaagaacctctgaacaccttcaacaccacactacttcaacactctctatgaccctttagag

SEQ ID NO: 149401 - DNA, 476 bp, Arabidopsis thaliana columbia
tggactcatagtttggtgccaagtgacccaaaaaaaaaaaaaaaaagtcgatcttgaagatttcatactttttctggcaattctgtttggtttcagaggaaggagtcaaaacaatggggatcgtttcagaagaagccattgatgaattccaagagctgatggatcaagttgaggagccactgaagaaaacttatgagagaagccatcagggatatctaagggagaatttgggtcgttttctgaaagcacgagactggaacgtatgcaaagctcacacaatgctggctgagtgtttgcgttggagggtggataatgaaattgacagtatcctatctaaaccaattgttcctactgagttgtatagtgatgtacgagattctcaactcataggaatgtcaggttacaccaaagagggctttgcggtctttgctattggcgtcggcctcaacacatttgacaaagcttctgttcactac

SEQ ID NO: 149402 - DNA, 491 bp, Arabidopsis thaliana columbia
  unsure (1)..(491): unsure at all n locations
agaaactggaagctatcagcttaggaagacgaactcgagcaagcctcaaggttttgtcgatgtgtcgatgcgtatatctgcagagcgagaggattttgggggttttactggagattttggaggagtcatgctctcgaacaactcagattacaacacttcaggacaggattacatggctggttcatcgcagtatccatttgctccaatggaccagtcaaacccattctcagttcccccatcatataaccaccactcatcaatgcctaaccctccaatgaccaacaccaacccacaaatgcaacaaccttactatcctncaccgatgcagccaccaccaccacctatgaactcagggtacatgcctacatacatncccaaatctgtgaatgactcatcaatgcctaaccctccaatgaacaacaccaacccacatatgcaacaaccttactatcctcaccaatgcagccagcaccaccacctatgaactcagg

SEQ ID NO: 149403 - DNA, 462 bp, Arabidopsis thaliana columbia
  unsure (1)..(462): unsure at all n locations
ctcgatgagataggaatggtggtttcatggtgtgatcagtttagggttttgaatcatagatcgataggttgtttcgtgacgcattgcgggtggaactctacgctggagagcttggtttcaggagttccggtggtggcgtttccgcaatggaatgatcagatgatgaacgcgaagcttttagaagattgttggaaaacaggtgtaagagtgatggagaagaaggaagaagaaggagttgtggtggtggatagtgaggagatacggcggtgcattgaggaagttatggaagacaaggcggaggagtttagaggatatgccacgaggtggtaggatttagcggcggaagctgtgagagaaggaggctcttnctttaatcatcttaaagcttttgtcgatgagcacatgtgattttggtatcagaaattttatcaacacttcgcttttctgttcttccttgctctg

SEQ ID NO: 149404 - DNA, 304 bp, Arabidopsis thaliana columbia
atatcttcaccgcctgccgatctctctcaatctcctttcattcatgagcaaaggcccaggacgagagacggatatcggcaagatagccaaagatctctttacgagagactacaattccgatcagaagttcagtatctccacttacagtgcctccggcgaggcccttacgtctactgctctgaagaaaggaggagttcatgctgctgatgttgccacccaatacaagtacaagaatgctttgtttgatgttaaaatcgacactgattctagtgttttgacaacagtcacacttaccgagatcctt

SEQ ID NO: 149405 - DNA, 318 bp, Arabidopsis thaliana columbia
gctctctcaaaagtcgaatatcccaaattcgatccgttttccggcgataatctccgatctagatggcgtggcggaaagaaccagttcgtgtgctcgttactggagctgcaggacaaatcggatatgctcttgtacctatgattgcaaggggtatcatgcttggtgctgaccaacctgttatcctccacatgttggatattcctccagctgctgaagctttgaacggtgttaagatggagttgatcgatgctgctttccctcttcttaaaggtgttgttgctacaactgatgccgttgagggatgtactggagtcaatg

SEQ ID NO: 149406 - DNA, 482 bp, Arabidopsis thaliana columbia
ggagcctgcgaaggaccaagcttctggcaagaagtcaaaggggaactcgaaaaaaaaggctgaaggaggtgataaagcgctctctggttcagggaacgatggtgcctctcatagtgatgaaagtgtcacagcgggttcatctgatgaaaatgatgagaatgccaatcaacaggaacagggttcaattcgaaagccaagctttggacagatgcttgctgacgcaagttctcaaagtacgactggtgaaatccaaggttcggtgcccatgaagccggtagcccccggagactaatctgaatatcgagatggacttatggtcttcccaagctggtgtaccagtgaaggatgaacgagagctcaagcggcagaagaggaaacaatctaaccgtgaatccgctaggcggtctagattgcggaagcaggccgaatgcgaacaacttcaacaaagagtagagaggttgtcgaacgagaatcaaagcctg

SEQ ID NO: 149407 - DNA, 426 bp, Arabidopsis thaliana columbia
  unsure (1)..(426): unsure at all n locations
ctcatttctcggagatattcaccagagcaataaccatggacgctaaagaaacctctgccaccgagttgaaaagaccgagagaagaggatgataacggcggcgccgctaccatggagacggagaacggagatcagaaaaaggaacctgcttgtttctccactgttattcctgggtggttctctgaaatgagtcctatgtggccaggagaggcacactcattgaaggttgagaaagttttgtttcaagggaaatcagattatcaggatgttattgttttccagtctgcaacatatggaaaagttttgagtttggatggagtaatccaacttacggagagagatgaatgtgcttatcaggaaatgatcactcatcttnctttgtgttctatccctaaccctaagaaggttttggtcattggaggaggag

SEQ ID NO: 149408 - DNA, 456 bp, Arabidopsis thaliana columbia
gccttattcgtcttcttcgttctctagttttttcctcagtctctgttcttagatccctggtagtgttccaaatcttccgataaaaatgtcgggtaaaggagaaggaccagctatcggtatcgatcttggtaccacttactcttgcgtcggagtatggcaacacgaccgtgttgagatcattgctaatgatcaaggaaacagaaccacgccatcttacgttgctttcaccgactccgagaggttgatcggtgacgcagctaagaatcaggtcgccatgaaccccgttaacaccgttttcgacgctaagaggttgatcggtcgtcgtttctctgacagctctgttcagagtgacatgaatatgtggccattcaagattcaagccggacctgccgataagccaatgatctacgtcgaatacaaaggtgaagagaaaagagtcgcagctgaagagatttc

SEQ ID NO: 149409 - DNA, 342 bp, Arabidopsis thaliana columbia
  unsure (1)..(342): unsure at all n locations
aaactctaaaatcaatctctcaaatctctcaaccgttatcaagatgcagatcttcggtaagactgtcaccggaaagactatcaccctccatgtggaaagctctgacaccatcgacaacgttaaggccaagatccaggataaggaaggtattcctccggatcagcagaggcttatcttcgccggaaagcagttggaggatggccgcacgttggcggattacaatatccagaaagaatccaccctccacttgattctcaagctccgaggaggtatgcaaattttcgttaaaaccctaacnggacagacgattactctggatgagagagctctgacaccattgac

SEQ ID NO: 149410 - DNA, 375 bp, Arabidopsis thaliana columbia
gccaattccaacaaacaaacgtgctaaagctgctgagatcttcagtaacaagaaagtctctggcgaggttccatggttcggcattgaacaagagtacactttacttcagcaaaacgtcaaatggcctttaggttggcctgttggagcgttccctggtcctcaaggtccttactactgtggagttggagctgacaagatttgggggcgtgacatttcagatgctcattacaaagcttgtttatatgctggaattaacattagtggtactaatggtgaagttatgcctggacagtgggagttccaagttggcccgagcgtaggaattgatgcaagtgatcatgtttggtgtgctagataccttctagagagaatcac

SEQ ID NO: 149411 - DNA, 425 bp, Arabidopsis thaliana columbia
  unsure (1)..(425): unsure at all n locations
ggcaaactcgatttcgcctagcttcttctgagcattcgccgcttccgtctacagaatggattctgaaatcaaacacgccgtggtcgtgaaggtcatgggtaggactggttctcgtggtcaggtcactcaggttagagtcaaattcactgattcagaccgtttcatcatgaggaacgtgaaaggacccgtcagagaaggagatgtcctcactctcctcgagtccgagagagaagctagaagactccgttgattccaccatatcccaattctctttcaaaagtcttaccaagatttacattttgatggtctcttgtttcttggcattgtagtcaagttctcttttctttntctactgctttgttttaattacttgaggttttgttaaagacaatggttgaaatctaggaatgaatcttttatgacgc

SEQ ID NO: 149412 - DNA, 460 bp, Arabidopsis thaliana columbia
gaaaggttgtgagaatggcggctacagcagcttcaagcttacaaattgctacacgaaggccgagcatgtgttcgcctagcaaaattcttaaagcaggaacctacattgttggtgccaatcctggaaacgcttcatgggataaactttcatgcactcgccaattatcaaaccttggatgtttgagaaaccacagtgctgttccaacttgtaagagacccttttctttttccacaagggcaatgtctgaatccagtgaaaacaaggctccttcagggcttccaattgatttgagagggaaaagagctttcattgctggtatagctgatgataatggctatggttgggccatagcaaaatctctagctgctgctggagctgaaatattggttgggacttgggttcctgcacttaatatatttgagacaagcttgagacgtggaaaattcgaccagtcacgagt

SEQ ID NO: 149413 - DNA, 486 bp, Arabidopsis thaliana columbia
tttcaggtcgaccacgcgtccgaaaaaacataaaatctgttcttcttcttcggctgagagacattggcggaggagcaaaagacgaggaagggtgacgtagaatctccggctgttttagctccggcgaaggaaccgactcctgctccggtggaagtcgcggatgagaaaattcataatccacctcccgtcgagtccaaagctcttgccgttgtagaaaaacccatcgaggagcatacacctaagaaagcttcatctggttcggccgatagagatgtgatacttgccgacttggaaaaagagaagaaaacgtcattcatcaaagcatgggaagagagtgagaagtcaaaggctgagaacagggcacaaaagaagatctctgatgtgcatgcttgggaaaatagcaagaaagcagccgtagaagctcaacttatgaagatcgaggaaaaattagagaagaaaaaagcgcagtacggtgagaaaatgaag

SEQ ID NO: 149414 - DNA, 251 bp, Arabidopsis thaliana columbia
attttcgtagccgcaagactcctttcagattcttacttgcagctatgggtaaagagaagtttcggattaggattgtggtcattggtcatgttgattctggaaaatcgaccacaactggtcacttgatctataagcttggtggtattgacatgcgtgtcatcgagaggttcgagaaggaggctgctgagatgaacaagaggtccttcaagttcgcatgggtgttggtcaaacttaatgccgagcgtgagcgt

SEQ ID NO: 149415 - DNA, 443 bp, Arabidopsis thaliana columbia
  unsure (1)..(443): unsure at all n locations
cgattctcactaaaaccctcgaacacatcgcctttatctctttctctagatctactcgctatgggtactggcaccgttgttaaggctagacagatcttcnacagtcgtggtaatcccaccgttgaggttgatatccacacgtcaaatggtattaaggttacagcagctgttccaagtggagcttccactggtatctatgaggctcttgagctgagggatggaggatctgactaccttggaaagggtgtatctaaggctgttggcaatgtgaacaacatcatcgggccagcacttattggaaaggacccaactcagcagactgctattgacaacttcatggtccatgaacttgacggaacccaaaacgagtggtggtggtgcaagcaaaagcttggagccaatgcgattcttgctgagtctcttgctgtctgcaaagctggggc

SEQ ID NO: 149416 - DNA, 427 bp, Arabidopsis thaliana columbia
attaattcattaaatttttcctttctctaagtagagagactctagagtggtgctaggtttcgagctccttttgactcttcttggattccttcttccttgtgtgtttttcttctttctcgtacttttgtttgctgaatttctgctccttttactttcttctccttcttcttccgtcaatttcatttcttcactctcttgcctaaagctctaaactttttttttgctttctctcaaagtttccatttttgagctctctcttctttgatctgcttcaagttcttgcctagttcgttacttctagggttttataatgagcttaaaaacaaacccttttcgccgaatctcctaaatctttagcttattttgaaatgcatttctctctgtggaaacaaattcatcactgcgcttctctgatcttagacatgag

SEQ ID NO: 149417 - DNA, 469 bp, Arabidopsis thaliana columbia
ggaacacttacccgtttatataatagatcttatggtaggacataaattaggagaattttcacctactataaattttcgaggacatgccaaaaatgataatagatctcgtcgttaattaaataaattaaaaaaaatgaatatagattttttttgagtgagaggtaaaccttatgataaagaagagaaaaaagaaatcatatacggaagtatatgctttagggcaatatatatctatgtctgcccataaagcacggagagtaattgatcaaatacgtggacgttcctatgaagaagcacttatgatattagaacttatgccttatcgaggatgttatcccatttttaaattggtttattctgctgcagcgaacgctagtcacaataagggtttcaaagaaaccaatttagtcattagtaaagctgaggtgaaccaagggaatactgtgaaaaaattaaaacctcgtgcccg

SEQ ID NO: 149418 - DNA, 465 bp, Arabidopsis thaliana columbia
agacaatttaattccaaaagataaaaacaatcaattgatgaatgccacaaagtttgttgagcttgtcgtgattggcattttgtgtgccattgtcaccgcaaggcaggtcgaagaagtgtccaaagagaccaaattaggcacctctcttccaaaatctactaacaaaggcattggagctcagctttctgctgctggtcttacttacagcggcagcagtgtctctagctctgctagtgcttttaacaatcccaaaggtccaggggccagtgcatccgaaagtggctacacaagtaccatcggacaagtcattgccaagggtcgcaaggcaagagtttcttctgcaagtgcttctgccgctacaggtgaggctgcagctgcagtgactcgcaaagctgctgctgcacgtgcaaagggtaaggtagcttccgcatcaagggtgaagggttcctctgagaagaagaagaa

SEQ ID NO: 149419 - DNA, 399 bp, Arabidopsis thaliana columbia
caacaacaaatcttaaacgttttactttgtgctgctctactcaacctcaatggccgcggcaacagtggctctctcctcccctgccttcgccggtaaggccgtcaagctttcccccgcggcatctgaagtccttggaagcggccgtgtgacaatgaggaagactgttgccaagccaaagggcccatcaggcagcccatggtacggatctgaccgtgtcaagtactagggtccattctctggcgaatcaccgagctaccttaccggagagttccccggagactacggatgggacaccgtcggactttcagctgaccccgagacattcgcaaggaacccgggactagaagttatccacaggaggtgggccatgctcggagcctaagctgcgtctccctgagc

SEQ ID NO: 149420 - DNA, 407 bp, Arabidopsis thaliana columbia
acttatataaaggcactctttctacctttctttttttcctaacaacccattttattggttcagcattaccaaatcatcaacttaatcgtttctctcaaatttagggttttctcttttctcgaaagtcttgcggttttctgaatcatctctatctggtttgagggtttcgtttgatatctggagaaaggggtttctggaaacaaggagttcataattcgcgatcttgatctatcgatcttcatttatatataaaagcgtgaatgagattatgatggagtcgaaaggtggtaaaaagaagtccagcagtagtagttccttattttacgaagctcccctcggttacagctattgagacgttcgtccaaacggtggaatcaagaaattcaaatcttctggctactcaaact

SEQ ID NO: 149421 - DNA, 439 bp, Arabidopsis thaliana columbia
cgcaaactacgtcctcaagccacctccattcgcactggatgctttggagccgcatatgagcaaacaaactctggagtttcactggggaaaacatcacagagcttacgtggacaacctcaagaaacaggttcttggaaccgagcttgaaggcaagcccttagagcacattatccacagcacttacaacaatggtgatctcctccctgctttcaacaacgctgctcaggcgtggaaccacgagttcttctgggagtcaatgaaaccaggtggtggaggaaaaccatcaggagagcttcttgctttgctagaaagagatttcacttcttatgagaagttctatgaagagttcaatgctgctgcagccactcagtttggagctggctgggcctggctagcttattcaaatgaaaaactcaaagtagtgaaaactcccaatgct

SEQ ID NO: 149422 - DNA, 468 bp, Arabidopsis thaliana columbia
tcaggatcagagattcgtgacctgagaagacactcaatatgagtaagcttcagagtgaggctgggagagagagccataacgactatcaagggaaaatctgaggagaagaagcgtaactttgttgagacagaggagcttcagattggtctgaagaactatgacccacaaaaggataagcgtttcagtggatctgagaagctcccacatattcctcgcccaaaaatgaagatctgtatgcttggagatgctcagcatgttgaggaggcagagaaaatgggacttagtaacatggatgttgaggctttgaaaaagcttaacaagaacaagaagcttgttaagaagcttgctaagtcttaccatgctttcttggcttctgagtctgtcattaagcagattcctcgtcttctaggtcctggtcttaacaaggcaggaaagttcccaacacttgtgagtcaccaagagtcattg

SEQ ID NO: 149423 - DNA, 478 bp, Arabidopsis thaliana columbia
cggacgcgtgggatattattaggagagacttttctttactggaacggaacagagccaaggatatgcaggggagatcctgaacttgcaaaaactatgttgtcgaacaagttaggtttctttgtcaaatcaaaggcaagacctgaggctgttaaacttgtcggctccaaaggacttgtctttatcgaaggtgctgattgggttcgccatagaagaatcttgaaccctgctttctccatcgataggctcaagatcatgacgaccgtgatggttgattgtacgctcaagatgttagaggagtggagaaaagagagcactaaggaagaaacagagcaccccgaagatttaaaaaggaaatgaacggagagttccaaagacttacagctgatataatagcaacctctgcgtttggaagcagttacgtcgaaggaatcgaagtgtttagatcacatatggagcttaaaaggtgttatacaacttc

SEQ ID NO: 149424 - DNA, 244 bp, Arabidopsis thaliana columbia
cggtcccgttgattgttttttatatatatttccgattttctcttacgccttaaaaggttctacgagatttagtaaaaattggcaacggattgcgttcctccctcccctcaaattttcagtgaaaccaaaaccaaagaggattcttcgatcttcgatgcaaagctccttaatcagcactcgcaccacataccttaacagttcgtatggcccgaccacgagaaaccttctccggatgttcaacctc

SEQ ID NO: 149425 - DNA, 457 bp, Arabidopsis thaliana columbia
cttcttcttatttcttctataccgtcgtcgaaaagtctttaccaaaatctcacgcccccgacgaggcatcgggatttgagtttgcactaaacccacaatggtttcctatcgtgctaccacagagacgatttccctggctttagaagccaacagctcggaggctattacgatactgtaccaggttttggaagacccttcttcatctcctgaggctatacggatcaaggagcaagcgattacaaacctttgtgatcgattgactgaagagaagagaggtgaggatctccggaaactgttgaccaagttgaggcctttcttttccttaatccccaaggcgaaaactgcgaaaatcgtcagaggaatcattgatgctgtggcaaagattcctggaaacaactgatctccagatcactctctgcaaagagatggtcgaatggacccgcgctgagaagcgtac

SEQ ID NO: 149426 - DNA, 419 bp, Arabidopsis thaliana columbia
gtctatccatcactctcgtgtcctcatcaggcagtggcatatcaaggttggaaagcaatgggtgaacattccatcattcatggggagacttgattcacagaagcacattgactttgccctcaccagtcccttcggtggtggccgtccaggaagagtgaagagaaggaacgagaagtctgcctccaagaaagcctcaagtggcggtgatgcaaacggtgatgacgaagaggcaatctgaagtcgcaccggtttagctatgaatcaatctgctttttgatattttggagtaagcaactttgttggtcgttttcaagagcatggttttatggttacttccttttactctcgagaatgctaaacctgtggttatcatctattctcacaattatcttttaaattgaacctggcttaaacaaggg

SEQ ID NO: 149427 - DNA, 408 bp, Arabidopsis thaliana columbia
gagagaacagagagacggaggagagagataggcttttctagacaatttcttcaatctctggaagagagaagttggtctgagccttcgtcaacgttgttctttcgggaatgggcactgaaacagtttcaaaacctgtgatggataatgggtctggagacagtgatgatgacaagcctttagcgttcaagaggaataatacagtggcttctaattcgaatcaatctaaatccaattcccagagaagcaaggcagttcctaccaccaaggtatcacctatgagatcacctgtgactagcccaaatgaaccactccttcgaataaaacttctatagtgaaatcctctatgccatcatcttcttctaaggcttcaccagcaaagtcaccattgcggtatgatatgccctctac

SEQ ID NO: 149428 - DNA, 412 bp, Arabidopsis thaliana columbia
gaagattttgtctcgtcggcattgaagatccagggtttgtctttcgaaattcagagagaaaatgggtgatgaggcagagatcaaggaacatttaaagccacaagcttcatctgaaacaatggacaagaaacataatgtgaaagggaagaggttatggcagaaagtcaagtatcaattggtggagtttcattcattgcctgcttatttaagagacaatgagtacatcattggtcattaccgatccgaatggccgatcaaacagattcttctcagcatctttaccattcataatgagactttgaatgtttggacgcacttgattgggtttttcctgtttttggcgctcactatatacactgcaacgaaagtaccgagtgtcgtggatcttcattcgcttcaacaccgtttaccc

SEQ ID NO: 149429 - DNA, 473 bp, Arabidopsis thaliana columbia
attattaaataaaccaaggattttaccatgactgttattttagagagacgcgaaagcgaaagcctatggggtcgcttctgtaactggataactagcactgaaaaccgtctttacattggatggtttggtgttttgatgatccctaccttattgaccgcaacttctgtttttattatcgcattcattgctgctcctccagtagatattgatggtattcgtgaacctgtttctggatctcttctttacggaaacaatattatttccggtgccattattcctacttctgcagctataggattgcatttttacccaatctgggaagctgcatccagtgatgaatggctatacaacggcggtccttatgaactaattgttctacactttttacttggtgtagcttgttatatgggtcgtgagtgggatactagtttccgtctgggtatgcgtccttggattgctagtgcatattcagc

SEQ ID NO: 149430 - DNA, 375 bp, Arabidopsis thaliana columbia
gcaaatttcaagtttatttcattcaatttcgatcctagtatccttggagtgtagatcattggatctgacgattttttctgcggaggatctcaaagaccttcaattgatcggtaaacaagacttgtacgccgtcgtttccatcaacggcgaccctaggacgaagcagaagacaaaggttgataaagatggcggcaccaaacctaaatggaagcatcaaatgaagctcaccgtcgatgccgcatcggcgcgtgacaatcgtcttactcttgttttcgagatcgtggcggatcgtcccatcgctggtgataaacctgtcggtgagattagcgttccggtgaaggagcttttgatcagaataaagtgacgaggagaaac

SEQ ID NO: 149431 - DNA, 474 bp, Arabidopsis thaliana columbia
attttatctttaatcagccggaaaaaatggagaaagcgatcttgagacaacgcgttcttctagaggatctgcgaccttcttcttcttcttcgcacaattacgaggcttctctatctgcttctgcttgcttggctggggacagtgctgcatatcagaggacctctctctatggagatgatgttgtcattgtcgcggcacataggactccactatgcaagtccaaacgtggcaatttcaaggatacatatcccgatgatttgctcgcacctgttttgagggcattgatagagaagacgaatctaaacccaagtgaagtaggtgacattgttgtgggtactgttttggcacctggatctcagagagccagtgaatgcaggatggctgcgttctatgctggtttccctgaaaccgtggctgtcagaactgtgaatagacagtgctcatctgggcttcaggctagtgctgatgtagccg

SEQ ID NO: 149432 - DNA, 273 bp, Arabidopsis thaliana columbia
  unsure (1)..(273): unsure at all n locations
gaagaacagatcatatacgaggagagatctctaaatagatttatcaggccaaatttgttcacgtggagaaggttaatttagattaaacaacaaaaagattcnttactggaattccaaggttgttccaaaattcaagaagtcattcgagaatattagtgctaagaaggctgctgctgctgaagctaccaagacctttgatgtatctatggaatcattcaacaaggaaattgaggtgatatagacagcactccaaccaaaggtcgtggaaaccta

SEQ ID NO: 149433 - DNA, 498 bp, Arabidopsis thaliana columbia
  unsure (1)..(498): unsure at all n locations
aattnttgggtagacgcacgcgtgcagaaaatcttaaaaactttctctcaattctctctattttgatcttgatgcagatctttgttaagaggctcaggggaaagacaatcagcctcgaggtgtaaagctccgacaccatcgacaacgttaaggccaagatccaggataaggagggcattcctccggatcagcagaggcttattttcgccggcaagcagctagaggatggccgtacgttggctgattacaatatccagaaggaatccacccttcacttggtcctcaagctccgaggtggtatgcagattttcgttaataccctaacggtaaagacgattactcttgaggtggagagttctgacaccatctactacgtcaaggccaagatccaagacaaagagggtattccttccggaccagcaaaggctgatcttccccggttagcagttgtaggatggaagaacttttgctgactacaatttccaaaagagtccacct

SEQ ID NO: 149434 - DNA, 373 bp, Arabidopsis thaliana columbia
gtgtgaccatgcgtcgtaccgtcaagtctactcctcaaagcatctggtacggaccagaccgtgggaagtacttaggaccattctcggagaatacaccgtcctacctaaccggagaataccccggagactacggctgggacaccgctggactctcggctgacccggagacattcgctaagaaccgtgagcttgaagtaatccacagcagatgggctatgttgggtgctctcggatgcacattccctgagattctctccaagaacggtgttaaattcggagaagccgtgtggttcaaggcaggttctcagattttctcagaaggaggtcttgattacctcggaaaccctaacttgatccacgcgcaaagcatctt

SEQ ID NO: 149435 - DNA, 478 bp, Arabidopsis thaliana columbia
ggaaaatcgtcgagagagagagagagagagagaatgtcgtatcttcttccacatctgcactccgggtgggctgttgatcagtcgatgctggccgaggaagagcgtctcgtcgtcattcgtttcggccatgactgggatgagacctgtatgcagatggatgaggtgcttgcgtctgttgctgagacgattaagaactttgcagtcatttatctggtggacatcactgaggttccagacttcaacaccatgtacgagctgtacgatccttctacggtcatgttcttcttcaggaacaagcacatcatgatcgatcttggaactggtaacaacaacaagatcaactgggctctcaaggacaagcaggagttcattgatatcattgagactgtctaccgtggtgcaaggaagggtcgtgggttggtgattgctccaaaagattactccaccaaataccgttactaatcgagcttcccaacac

SEQ ID NO: 149436 - DNA, 356 bp, Arabidopsis thaliana columbia
  unsure (1)..(356): unsure at all n locations
ctctctctctttctctctccatgagaactctaatctctcaccggcaatgtgtgacgtgagcggttcttatctccgccgcatctccaccgtttcctggccggagctttaagttatcctcctttactcctccacgtcataggcagttttcttctctctcgatcagaaacatttcgcatgaatccgccgatcagacttcttcttctaggccgcgaactctttatcctggtggttacaagcgtcccgaactcgccgttcccgggttacttctccggctagacgccgacgaggttatgagncggaatcgtgaagagactctngatttggtcgaccgagccttagctaaatcggttcaaatc

SEQ ID NO: 149437 - DNA, 250 bp, Arabidopsis thaliana columbia
gacccacgcgtccctctttctgcaaaaaataataacacatcaaatactttgagtattctctaaagagacttatccgagcgaatttgttcacgctgagaaggctaattcaaatccaacatcaaagagatgggcttctcgaattccaaagatgttccaaaattcaagaagatattctagaaactctgagctaagaaggctgctgctgctgtagctaccatttcctttgatgcatttaatgacacaatcaaca

SEQ ID NO: 149438 - DNA, 359 bp, Arabidopsis thaliana columbia
  unsure (1)..(359): unsure at all n locations
gtgtgtttggagaagaagaagaacagatcaaatactatgagttatctctaaagagatttatcgggtcaaatttgttcacgttgagaagttcaatttanattaaacaacaaaaagatgggttactggaattccaaggttgttccaaaattcaagaagttattcgagaaaaatagtgctaagaaggctgctgctgctgaagctaccaagacctttgatgaatctaaggaaacaatcaacaaggtaattgaggagaaaaagacagaactccaaccaaaggtcgtggaaacctatgaagccacgtctgcagaagtcaaggctttggtgagagaccctaaggtggctggttagaaaataactca

SEQ ID NO: 149439 - DNA, 481 bp, Arabidopsis thaliana columbia
tctgtctccaaaatcgaatcaaaatctctaaagtttcaatttttttgttctgttctttttatttgtttaaagaatggcttcaatttgtgcaactttgccttcgccattgttactcacacagagaaaatccaatctcacatcgattcaaaaactcccattttctctaactcgaggtacgaatgatctttctccattatctcttactcgaaaccctagcagcatcagtctgatggtgaaagctagtggagaaagctcagattcatcgactgatctcgacgttgttagtacgattcagaatgtttgggataagtctgaagataggttaggtcttattggtttgggttttgctggtattgtagctctttgggcatcattgaatctcatcacggcaatcgacaaattgcccgttatctcgagcggattcgaactagttggtatcttgttctccacgtggttcacatatcgatatctcttgttcaaa

SEQ ID NO: 149440 - DNA, 424 bp, Arabidopsis thaliana columbia
ccacccgtccgcttttttaaaaagagatcaccacggttacactcctgtgaaggcgtccacgtgctaacgcgcctatctaactaacatctccgcctaattctctaatccggcgcacttttttttccgccatggccacaaccgcctccttttcctggctcctcccttccatatctctcaccaatctctcctcctctaaaaaggcctccttgggctccgccgccaagaatctaacccgatctaggatttctatgagcgtctctgctggatctcagagtactactgttcacgattctctgttcgctgattacaaacacacctctgcttttcttctttcccggtcaggggagctcaagcagtaggaatgggaaaagagtctcagagtgttggagcagctggagagttgtataagaaagctaatgatatc

SEQ ID NO: 149441 - DNA, 351 bp, Arabidopsis thaliana columbia
agcgtgcggcagcattgcaaggaacagaatattaagtattgctatgatatcactgaccttggaaggtttaaggctaatcctgactacaaaggtgtctgccatgttacacttgcacaagaaggtcattgcaggccaggagaggttttgttaggaacagactcacacacttgtactgctggagcatttggtcaatttgctacagggattggaaacactgatgcaggttttgtgttaggcactgaaaaaatccttcttaaggttccaccaacgatgaggtttatcttggatggtgagatgcctaattatttgcaagcaaaggatctgattttacaaattattggtggaatatct

SEQ ID NO: 149442 - DNA, 486 bp, Arabidopsis thaliana columbia
  unsure (1)..(486): unsure at all n locations
cagctgcctccttttcgtttgccactttttgatctatcgaaactccaaaacacagaggcatggggccgaagttggacccgagccagatcgtcnatttgtacgttcgtgtaaccggaggagaagtgggagccgccagttctctagctccaaagatcggtcctctcggtctcgcaccaaataagatcggagaagacatcgcgaagagacggccaaagaatggaaaggacttcgtgtcaccgtgaagctgacggttcagaatcgtcaagctaaggtaaccgtggttccatctgctgcagctctcgtcatcaaggcgttgaaggagccagagagagaccgtcagaaggtgaagaacattaagcattacggtgacatctctttcgatgatgtgactgagattgctaggattatgaggcctagatctattgctaaagagctgagtgggactgtgagggagattttctggacgcgtgtctctgtgggatgcac

SEQ ID NO: 149443 - DNA, 409 bp, Arabidopsis thaliana columbia
acgaggtatatgtgcgttgcacacgtacggctccacctttcttagtagatccttctgagaccatcgggccaccaccaccaccgcatacgaaactgcattccacaccacaaatcttactaaaacacgagaaaagtccattacctccatctgtgtgacggcggttatgctttttcgtcgtcggagttttccgtcttgaactcattcctcccccggcagttgcagctggaacgctcgcgccatcgtaatcagtgctacttatatggcttgatcctatgtcggacaacggaggaagctctgttcgccatctctcgagttttgatcgcaatccttcgatgctagattcatcgatgctccattcgctgagtattgaaccttccgtgtcgtgcgatctatctttcgccaatttgtc

SEQ ID NO: 149444 - DNA, 477 bp, Arabidopsis thaliana columbia
ccctaatcacattttgtaacaataatacaattatactttatttctctccgacgatgcctcaggcaccgatgccagatttctctagctcggagaagctcaagtacgtgaaacttggttaccaatattcggttaaccatttcttgagttttcttttgatcccgatcatggctattgtcgccgttgagcttcttcggatgggtcctgaagagatccttaatgtttggaattcactccagtttgacctagttcaggttctatgttcttccttatttgtcatcttcatctccactagttacttcatgtccaagccacgcaccatctaccttgttgactattcttgttacaagccacctgtcacgtgtcgtgtccccttcgcaactttcatggaacactctcgtttgatcctcaaggacaagcctaagagcgtcgagttccaaatgagaatccttgaacggtctgggcctcggtgaggagact

SEQ ID NO: 149445 - DNA, 302 bp, Arabidopsis thaliana columbia
aagaaaacgaaactcatctaattttgttatcacccttaaagattttcaaacacaatggctttagcgttgagggtcttcacatgcctagttttaaccgtcttcatattcgcatcagtcgatgctgcaatctcatgtggcacaatgtcaggtagctagactccatgtgcaacctatctatcaaaaggtgggttggtgccaccttcatgttgagcaggagtcaaaactttgaacagtttggcttaaaccacaccagaccggcaacaagcttgcagatgcattcaatgcactgccaaatagcattt

SEQ ID NO: 149446 - DNA, 458 bp, Arabidopsis thaliana columbia
ctctctctctctctcctctgttctaattctctaggtacagagtaaaagactttggctcagcttgtgcctctccaatggcggttcttccgacatggcttttagcaatgatgtgtttactcttcttcgtcggagctatggagaacactacacacgacaacatctcttctctccctagatccgacgaaaccgaatggaaccaacacgcagtgacgaatccagatgaagtagcggacgaagttctcgccttgacagaaatgagtgtgagaaaccataccgagaggaggaaactaggttactttacttgcggaacaggaaaccctatcgacgattgttggcgatgtgaccccaattggcacaagaaccgtaaacgcctagcggattgcggtatcggatttggaagaaacgcgatcggtggtcgtgatggacgattctacgtagtcactgacccaagagacgac

SEQ ID NO: 149447 - DNA, 308 bp, Arabidopsis thaliana columbia
  unsure (1)..(308): unsure at all n locations
catgggttttaccagccgccgnttacgacttcgttttctcattctctacctcttcatctggggggggtctgcttttcgctatttcctattctctccaaattcaccatttccttccaccactcatagatctgcccttcttattagctatgtctttttctaacacgccattttttagcgccgtctctgtcggatcgatagattctcccgccgtccggtttaattcctagtgacccaattattcgtaatttactcaacatgagctctttgcttgctaaccaattcttactcctggttgcgttattcaacgt

SEQ ID NO: 149448 - DNA, 438 bp, Arabidopsis thaliana columbia
actttgctgcggccgagatatacaacgcaatccgtatctttattgctgcttatgttgggatggctggttttggaaacttgtcttactactatgtcagaaaggatttctctgttgcacgttttgcgcagatgatgtggaggctgaacttctttgtagcgttttgctgtattgttctcaacaacgactatatgttatactacatctgcccaatgcacactcttttcaccctaatggtatatggagctctgggtatcttcagcaagtacaatgagataggatcggtgatggctctgaagatattttcatgcttcctcgttgtctttttgttgtgggaaattcctggagcttttgaaatattttggggtcccttaacatttttgcttggttacaatgaccctgccaagcccgatcttaatcggctgcatgaatggcacttta

SEQ ID NO: 149449 - DNA, 282 bp, Arabidopsis thaliana columbia
ctccgatattgatattcatgatatttctttcattttatatcatcgcaatctaattcgtctggggaagtttacaagcgagggatttctcatctctatgggattaaatcccgagatattccaaagaaaaaaaaaataataataataaacgattaaattatggaagtaaatattcttgcatttattgctactgcactcttcattctcgttcctactgcttttttgcttataatttacgtaaaaaccgttagtcaaaatgattaatttgaataaaattttactatc

SEQ ID NO: 149450 - DNA, 437 bp, Arabidopsis thaliana columbia
cggacgcgtgggctcaaattgaagtttccatgggttgtcactttaggtttcagcaaccaacgccggtcctgcgccacatgggtctgtgatttccgtgcttcagctctccgatctaaatcactgccccctccgtcctcgcagactgccgttcgctccacctctggcgactctctggttcgtcgcctcggccttttcgacctcatactgttgggcgtcggcgcttccatcggcgccggtgtcttcgtcgtcaccggaaccgtcgctcgcgatgctggacctggagtcacaatcagcttcttgctagctggagcatcgtgtgtgttgaacgctctttgttttgcttaactttcatctcgtttcccttgctgttgttggtggagcttacatgtactcttacttagctttcaatgagatcacagcttttcttggtttcgttc

SEQ ID NO: 149451 - DNA, 303 bp, Arabidopsis thaliana columbia
ttcttctgcagcagcaggcaagtctctaactctcttctgaccaccactctatataggctacttttaccaaatccctaaaacctacatttccgattcaaaactcgtctccggcagagtctcgaagccgctttctgtctctctctagctagcgactctaccgattctatcattctaaggagagaaggacggtgagacgtatctagacctcaaagcggcgccagaagatactcggcttgccgatgtgtaccgagccatcgtgacggacctgaataacatgctgcgaggtactgattccacactgac

SEQ ID NO: 149452 - DNA, 208 bp, Arabidopsis thaliana columbia
ttttgattctgcattgtcaatgacgaattcgggtttcaatgtaaagatctgaggaaaaagtttcgatctttagattttgacttggaggtttcttcgattggtggatttgaagaagatggggaaaagacttgtgggtcttgtgtcaatgatgtaattttagcagaaagttgtttgcttttgagaagaaaatgggatctggccggagcaa

SEQ ID NO: 149453 - DNA, 413 bp, Arabidopsis thaliana columbia
tttgagttacaacaacattttctttatttttctcttccattgaagaatcgtcaaagccatggttaggaaaccgtcgtcgaagatttattcggtggcagcagctgcgttggtgatcgttatatatgttgttttctgctccgtgtttgatcgtcaattgttacaatcgtcaagtttatatcaaggtacgttacaacaaccatgggaatctagaagaatcaagcaggccccacaccaaccgcaagagactacttcggcaacaatcacatgtgaccgatcccacactaattacgatctctgctcaatcaacggctcatgtaatctggaccttaaaaccggaactttgactctaatggacccaacatcagcaccacttgtcgaaaagatcaggccttacccaaaaaaggctggcaact

SEQ ID NO: 149454 - DNA, 448 bp, Arabidopsis thaliana columbia
  unsure (1)..(448): unsure at all n locations
cggacgcgtgggcggagatcaacaagaaccttaactaagcagagttcgaggctctgcttcaagagttcaagaccgattacaaccagacacatttcgtgaggaacaaggagtttaaagaagctgcagacaaattgcaaggacctctccgacagatcttcgttgagttccttgagcggtcttgtactgctgagttctctggtttccttctctacaaggagcttggtcgaagactcaagaaaacaaaccctgttgtggctgagatcttctctcttatgtctagagatgaagcaagacatgccgggttcttgaacaagggattgtctgatttcaacttggctcttgatttgngtttcctgacaaaggcaaggaaatacactttcttcaagccaaaattcatcttctacgcgacttacttattcgagaaaatcggttactggagatacaatac

SEQ ID NO: 149455 - DNA, 102 bp, Arabidopsis thaliana columbia
ccaaaatgtaatatgtgtttatgtagctattggttttaaagcttcttccgtggctcaggtagtggccagtttacaggaacgagggggcaatggaatccacta

SEQ ID NO: 149456 - DNA, 331 bp, Arabidopsis thaliana columbia
gcgattatcatttgagttcgaggagttgccacgatcgcagctctagcatcagttggagaacaagaatggtacttctttagtccacgagatcggaagtatccaaacggagcaagaccaaacagagcggcgacttcaggttattgtaaagcgaccggtacagataaaccggtacttgctttcgacggtaaccaaaaagtgggcgtgaagaaagcactagtcttctacagtggtgaaccaccaaaaggcgttaaaagtgattggatcatgcatgagtatcgtctcatcgaaaacaaaccaaacaatcgacctcctggctgtgaattcggcaacc

SEQ ID NO: 149457 - DNA, 171 bp, Arabidopsis thaliana columbia
atatgtaccataaggacataaaccaggacaacatggttctaggtaagattcgaacggaaccagagaggggggacatatgctctacatggacaggtccaagatcgtgttgagattgagtcactctttgatggtggtgatttttctgagccactaaccaaaactcgattcaag

SEQ ID NO: 149458 - DNA, 302 bp, Arabidopsis thaliana columbia
  unsure (1)..(302): unsure at all n locations
tattacaaatatctatcctctcctctcgtttttttccattaaaaaaagctcatcnaccaacgaacggtggcatatagaggcgggggcggtggctgttatccgcctatggatctgatgctttcatagacgattcaatttgttcagttatattgttcccatgtaatctgttcattttaccgtcttttaccttgtagatcttggccttgttcaatttaaagactttaattcagttaaaagcctattttaatctacttactcagctcagtttaaaagatgtcgataaattgcactttaaatacttt

SEQ ID NO: 149459 - DNA, 422 bp, Arabidopsis thaliana columbia
ggaggctatggcgacgacggcgaagaatttgaagggtttctacaagcagactaaaagcaatatcaccggaggtatctccaagtccaagccttcttcccggaaagtggctcccaaacacgcggcggctcaaggttctgatgttacccagcccgccgcattgatttcacacggctccgtcgatctcaacgaggattatgacaaggaggaggagatgcttagacaatttgacatgaacatcacttatggtccgtgcctgggtatgacgagacttgatcgttgggagcgtgcagtgcgtcttgggatgaaccctcccaatgaaatcgagaagcttttgaagaccgggaaagtccagcaggattgtctgtggcaaggtcgtgtctagataggggttctttaatcctttatctatgcccttgtatgat

SEQ ID NO: 149460 - DNA, 191 bp, Arabidopsis thaliana columbia
gttgcttcttcgcaacgttctctctcaaactcgcagagtaacagattcgataatgggaggaggatttagagttttgcatttggtgaggccattcttggcttttcttccagaagtgcaaagtgctgacaggaagattccatttagagagaaagtgatctacactgtcatctccctcttcattttccttggtt

SEQ ID NO: 149461 - DNA, 447 bp, Arabidopsis thaliana columbia
taccgatcctggattcccgccacgcgccccgcgttacgggcccgtgtccggtatagggacacctgatatatcgtttttcctctacgccagctgtatgcagtggggcggctatcttcttcttcgtgaagtgaaaaatggccgctggagaggacattcacccactcgtctgagacaatggaactggaatggtgcaggctggatttgctggcgatgatgccccgagagcagtgttcccaagcattgttggtcgtcctaggcacactggtgtcatgtgtggtatgggtcagaaagaagcttacgttggtgatgacgctcaatccaagagacgtatcctcactctgaagtatccaatcgaacatggcattgtaagtaactgcgctgacatggaaaagatatgcgatcacactctctacaactagctttgtgttgcccctgaggagcccccag

SEQ ID NO: 149462 - DNA, 453 bp, Arabidopsis thaliana columbia
ctttgagcccaaacgaagaggacattccacatggtttcatatttgcaacattcatgctggctgcgatgcttggtagctccattgcctctcgtttgttggcacattcgtctccaaaagtagagagctatatgcagatcgtatttgtgatatcttctgctgctctaatgcttcctgttgtaacaagcttcttggtggcgccctcaggtgtaaaaggtggaagcatatccttctctggatgcattcagttaatgggtttctgcacatttgaagcgtgtgtaggaatcttctggccatctataatgaagatgagatcgcaatacattccagaggaagctagaagcaccatcatgaattttttccgcatcccactcaacatctttgtctgccttgtattatacaatgttgacgcgtttccaatgaccgtgatgtttggaatgtgctctgtattctttt

SEQ ID NO: 149463 - DNA, 422 bp, Arabidopsis thaliana columbia
cacgcgtccgcggcgccgttttcaccaccgccaacactctcaattcttcctttgaaatctccaaacagattgggcgcgggatccaactctcgggggcactacgcgccagctggcaccaaaactccccgtcgctatctccgtcgttctcaccgacgacgaagtttaccaggagctcactagcgcaatcagagtcgttgggattttaagcgagatggtgaagaaagaaccgagtgggcaacgagtcagggaccgagtcaaccaggacgacacggcgatgatgctttactcgtcgggaaccacgggaccgagcaaaggagtgatctcgtctcaccggaatttaacagctcacgtggctagattcatatcggatgatttgaaacgagacgatattttcatctgtaccgtcccgatgttcacaccta

SEQ ID NO: 149464 - DNA, 151 bp, Arabidopsis thaliana columbia
gaaatattccaaactcataaaatctcaaatggctaataaataagaacattgtgagtcactctcgctgtttctcatctcctgatctttttatcttctttgattgatccacatggcttccgctgccgcaagttccgccttttcactccttaag

SEQ ID NO: 149465 - DNA, 173 bp, Arabidopsis thaliana columbia
ctctcatttactccctctaaagtttcacggcgacatagttcaccggaaatcgtagaataaatgagattctttctttttagtatgtatcaaagggtttgatctcaagaacaattgacatgagcggggcttgtgtgagtataccactctgaagttgggtaaaaccctggttagaa

SEQ ID NO: 149466 - DNA, 421 bp, Arabidopsis thaliana columbia
ccaagaatggtacgttccctgacccgacctctactgataattccgagtttcagatcgtcctgggtattggcaaagacggtcttcaagttgatcccaagaagtaccataagatgaaggagagattggttggtgtctctgaggagactactactggtgttaagaggctttatcagatgcaggagactggagctctcttgttccctgccattaacgtcaatgactctgtcaccaagagcaagtttgacaacttgtacggatgccgacactcgcttcccgatggtctcatgagggctactgatgttatgattgctggaaaggttgctgttatctgtggttatggtgatgtaggaaaaggttgtgctgcagcaatgaaaaccgcgggtgctcgtgtcatagtgactgagattgatccaatctgtgc

SEQ ID NO: 149467 - DNA, 457 bp, Arabidopsis thaliana columbia
gcgattatcatttgagttcgaggattcgtccgatgcagctctagcatcaggaggggaacaacgaatggcacttgttataggtcactggagcgaagatcaacaaacaagacgcggccaaaaagactgcacaaaagagcaagaccattttgacggatatcgaaaggtggcaaaagggagttgccagctcagatgtgtttggtgttgcgattgagatcactgtccagcggcaggagtcaagcaggcctattcctctgatactagttaaatgcgcagattatctcatattaacaggacttaattcaccgaacttgttcaaggccgaaggagatagaaagttgattcaacaattggtttctgcttacaatcaagatcctagggcgtcaatacctgagggtgtgaatccagttgatgtcgctgcactcttgaaatactatcttgctagccttccgacaccact

SEQ ID NO: 149468 - DNA, 405 bp, Arabidopsis thaliana columbia
  unsure (1)..(405): unsure at all n locations
atacagtttatgaggtagagactgaagcatctaaagaggcttaatgctcctaagcattggatgcttgacaaacttggtggtgccttcgctcccaaaccatcttctggacctcacaagtcgagggagtgtcttcctcttgtcctgatcatcaggaacaggttgaagtatgctttgacttaccgtgaagttatctctatcttgatgcaaaggcatatccaagttgatggcaaagtcaggactgacaagacttaccctgctggtttcatggatgttgtatccatccccaagaccaatgagaacttncgtcttctctacgacaccaagggacgttttcgtctccactccatcaaggatgaggaagcaaagttcaagctttgcaaggttagatctattcagtttggtcag

SEQ ID NO: 149469 - DNA, 416 bp, Arabidopsis thaliana columbia
gtttcttcttctttaaccaagcttgtgttctttggttgtctcctcctgctcacattcacggagaaccttgtggctggaaaatctggcaaagtgaagctcaatctttactacgaatcactttgtcccggttgtcaggaattcatcgtcgatgacctaggtaaaatctttgactacgatctctacacaatcactgatctcaagctgtttccatttggtaatgccgaactctccgataatctgactgtcacttgccagcatggtgaagaggaatgcaaactaaacgcccttgaagcttgcgcattaagaacttggcccgatcagaaatcacaatactcgttcatacggtgcgtcgaaagcgatacgaaaggctgggaatcatgtgttaaaaactctggacgtgagaaagcaatcaatga

SEQ ID NO: 149470 - DNA, 406 bp, Arabidopsis thaliana columbia
atcactcatcaccagcttcgcatcttcttctccggcttgatcttctctcgtttctagatctcggacgatcggaatatcaaatccgatcgattaattctgtcaatcacacaaaaaccgaaaaccaaaaaaaaaccatggcgtttgagaagatcaaggtggcaaatcccatcgtcgagatggatggtgatgaaatgaccagggttatttggaagtctatcaaggataagcttattactccttttgtggagttggatatcaagtacttcgaccttggtcttcctcaccgtgatgctacggatgacaaagttactattgaaagtgctgaagctactaagaagtacaatgtggcgatcaagtgtgccaccatcactccagatgaaggccgtgtcacggaatttggcttgaa

SEQ ID NO: 149471 - DNA, 298 bp, Arabidopsis thaliana columbia
ttagctcaaccttcataactaatcttttttttttgtttctttcgtgaatcagatcggagaaatttaatctattttggcacatctgaatacttcaacgagggacattccgacaagctttgtgatcagatcttcgactctatccttgatgcttgccttgaacaagaccctgagagcaaagtttgcttgtgagacttgtaccaagactaacatggtcattggttttttgtgaaatcaccaccaaggctaacgttgattactagcagattgttcgtaaaacatgccgtgagattggtttctt

SEQ ID NO: 149472 - DNA, 451 bp, Arabidopsis thaliana columbia
gttttactttgtgctgcactactcaacctcaatggccgcctcaacaatggctctctgctccggtgccttcgccggtaaggccgtcaagctttcccccgcggcatctgaagtccttggaagcggccgtgtgacaatgaggaagactgttgccaagccaaagggcccatcaggcagcccatggtacggatctgaccgtgtcaagtacttgggtccattctctggcgaatcaccgagctaccttaccggagagttccccggagactacggatgggacaccgccggactttcagctgaccccgagacattcgcaaggaaccgtgaactagaagttatccacagcaggtgggccatgctcggagccctaggctgcgtcttccctgagcttttggctagaaacggagtcaagttcggagaggcggtttggttcaaggccggttcacagatcttcagc

SEQ ID NO: 149473 - DNA, 455 bp, Arabidopsis thaliana columbia
  unsure (1)..(455): unsure at all n locations
tccactcttttcatcttcttctctgccgtcgtcgctcggagctcgcgaagctctctcatcagaaatcaaaaaccctaaaaaaagtcctttctgattcatctatacagacacatactgtattctcaaaacaatggagattccttctctgaataagcagcaagagttcactctcgcctccgtcactgatctcacttctccttcctcatctctttcgtcctctcctgttgtagctacgttttcatgcgttaatgaagtcaaggaactccgatttcaggaatcgaaatcgtctgatggtttcagttttgatcttagttcgactcagttgttcaagttggggccacttcagttcacttgtgtatctgatggttcgatntcttctgcaaagggagaaatcgtcatttttctcgaggaagtgtaataaaaatttagagatgagaaggatagcaaggagtttt

SEQ ID NO: 149474 - DNA, 421 bp, Arabidopsis thaliana columbia
atcgtcttcttcttcatctattcaggatcgatccgtcttgagatttattacaaattcgtccttgtatgtgctccaaaagttcgacaatttcgtaggggcaaagatggacgctgattccaagagatttctagctacgcttcgatcccgatctgaaatgttaatgggctttgaagaaatagatggagatgatgatttccaggaggagtttgcttgcccgttctgtgcagaatcgtatgatatcatcgggttgtgctgtcacatagatgatgaacatactttagagtcgaagaacgcggtatgccctgtttggtctcttaaagtgggagttgatatcgtagcacacataacgcttcaccatgggagtttaattaagttgcagcgaaagagaaagtcacgaaaaagcggtaccaattcgacactt

SEQ ID NO: 149475 - DNA, 457 bp, Arabidopsis thaliana columbia
gatgtatccgagaaacataggcttccaatgtggatgccaagtatgacaatgaaggaacgtgagcgtatgaagcaaaagaggtctatcccatctaacaaaggcattgctgttacaagagcaggtcaagttttggttgtctttacgtacgatttaggtacctctgaaagtcacaggatgttccatctgtacaagagggatcctaaagatcttgacccgaaaaccctcgacacccggcttcttgaggtacattctctaggtgatgaggccctcttctatgatttgggtattaccgtgcctgctgaccatacccttggaattgagcctaactccatttatttcactcgtgatgatcgtatctgtcacaataaattgtcatgcctcgacatcggtgtcttcaatcttgcaacaaagaccgtcaaacgctttcacggtctctccaacttcaacttcaacgatg

SEQ ID NO: 149476 - DNA, 271 bp, Arabidopsis thaliana columbia
ctttgtgattggattctccactcactgctccagatttgaattaacacaacctaaacaaatcgagagagtcagatatggcggcaacgaagtggcgtgacatcgatgatcttcccaagattccggccaactacacggcgttgactccgctttggttccttgatagggctgccggggttcatccgaccagaaaatctgtgattcacggatcgcgagaggacaacgggcggcagacttatgaccggtgtcggcgactcggcttcggttttggcga

SEQ ID NO: 149477 - DNA, 428 bp, Arabidopsis thaliana columbia
  unsure (1)..(428): unsure at all n locations
gaaaaatgggattacctcaaaataagctcagttttttctgcttcttcttcctcgtctctgtacgaactcttgccccattggctttctccgagatcttcttagaggagcatttcgaaggtggatggaaaagtaggtgggtcttgtctgattggaaaagaaacgaaggcaaagctggaacctttaagcacactgccggtaaatggcccggcgatcctgacaataaaggtattcagacttataatgatgccaagcattatgcgatttctgcaaagattcctgagtttagcaacaaaaaccggactcttgttgtccagtactcagtcaagattgaacaagacattggatgtggtggtgcttacattaagctcctgtctggctatgttaaccagaagcagtntggggggatactccatacagtctaatgtttg

SEQ ID NO: 149478 - DNA, 393 bp, Arabidopsis thaliana columbia
aaacgagtaagaatacaaacacaaatagcaaaaaaatggcaaacaagctcttcctcgtctgcgcgactttcgccctctgctgcctgctcaccaacgcttccatctaccgcactgttgtcgagttcgacgaagatgacgccagcaaccccatgggcccaagacagaaatgtcagaaggagtttcagcaatcacagcacctaagagcttgccagaaattgatgcgcatgcaaatgaggcaaggccgtggtggtggtccctccctcgacgatgagttcgatttggaagacgacatcgagaacccacaaggcccccagcagggacaccagatcctccagcagtgctgcagcgagcttcgccaggaagagccagtttgtgtttgccccaccttgagac

SEQ ID NO: 149479 - DNA, 444 bp, Arabidopsis thaliana columbia
  unsure (1)..(444): unsure at all n locations
gtttttgacactaaaaatccgatctcgtgaagtgtgttttgcatcgaatcggaaaatatgagagaagggaaatcatcgaagtcgtcgagtcaacaagagcagcatgaacagatttatcatcaaaacagtcacttgggttctttcaacttcgccaaattgtttgattctgaagcttcctgggacaaggatcaactgggagatgtgttgcattggatcaggcaagtagttggtttactctgcggattgttgtggggtgcgatacctttggtaggaggcatatggcttcttctatttcttgcaatctcctctggcatagtatatggttactatgcattggttctaaagatcgatgaagaagacttcggtggtcacgcagctttgctccaggacggtctatntgcttctttaagtttattcctgcttgcgtggattctggtgtatagc

SEQ ID NO: 149480 - DNA, 420 bp, Arabidopsis thaliana columbia
ccggcttttctgaaatggtacagagaggctgagctgatccatggccgatgggcgatggcagcggttcttgggatcttcgtcggccaggcctggagcggtgtggcatggtttgaagctggagcccagccagacgcgatcgctcccttctcgttcgggtcgcttcttggaacccaattgcttctcatgggttgggtggagagcaaacgatgggtcgatttcttcaacccggattctcaatcggttgagtgggcaacgccatggtcgaagaccgccgagaatttcgcgaactataccggcgatcagggataccccggtgggagattcttcgatcctgtgggtctcgccgggaaaaaccgcgacggtgtttatgagccggactttgagaagctggagaggcttaaaatggcagagattaagcac

SEQ ID NO: 149481 - DNA, 367 bp, Arabidopsis thaliana columbia
ttctcttccttccttggaatccaccacactccatttgcttcttctgagatctgatctctctggtaggtgatgcgctgcggagatggcgaatcttgtccccggcgttttactcaagcttctccagcacatgaacaccgacgtcaaaatcgccggcgaacacaggtcctctcttttacaagtcatcagtattgttcccgctttagccggaggtgagctattcccgaatcaaggcttttatctcaaagtctttgattcctctcacgccacttatgtctctttacctgatgaacacgatgatttgattcttagcgacaagatccaattaggtcagtatattcatgttgatagagtcgaatcttcttcccct

SEQ ID NO: 149482 - DNA, 424 bp, Arabidopsis thaliana columbia
ataaggttcagagcaaatcggagagagagagatggtgacgaaaacggaggagatacagttaaaccaactcgagaatcaagttgagaatggaggaggaggtgtttgggagtatctgtgcctcgttcgtaagctcaaggttcgccgatcagagattgtgctcaagcatggtctctcgatcttgaacgattcgggaaagcgatccgctcttggtccagatgaatggaccctgtatgagcaggtagcaattgcagctatggactgtcaatctctcggtgttgcacagaattgcatcaaggttctaaagaagaaatttccggagagcaaacgtgttggcaagctggaggctctgctgctagaagcaaagggaatgtgggaagaggcttgaaaagcatatacaagcctttttgaggataatccacttgat

SEQ ID NO: 149483 - DNA, 297 bp, Arabidopsis thaliana columbia
ccgagatttttttcctctgttcggtcggccattgaattgttgttgattcattggctctaaaacgaaagtgggaattctcaacgacgacgccgttttaatcgaaccgggaaaaatctccggagatcccaccgtcgttaccgtcaattgtcctgatgaatccggtctcggttcaactctgtgtagaatcatcctcgaatttggtctttccattacccgagcagatttttcaacagatggaagatggtgttatatagtgttttgggttacttcagatattagctcttctaaaattgattg

SEQ ID NO: 149484 - DNA, 256 bp, Arabidopsis thaliana columbia
cacagttcctgaatcgaccactcgtccgacccattcggtataattcaaaccggagattttgtttttcgatttttaccggacaacttttttccgcggggagcaaataatttgaaaggttttttttgccatttaaggtagaataaacagaaatggaatccttgaggaggttaaggggaaccctcaaggaagaagaagaaggaaggggatgaatgttggaaccgatttttgatttcaataaacgttcaacgaagatggg

SEQ ID NO: 149485 - DNA, 456 bp, Arabidopsis thaliana columbia
gtaaagcaaaaatagtgaagcagagccgcaaaaacacttttcccaaaatcaacgaagatagattcagatcggaagcgaaagaacgattcggtctcctccacagatcgaacatcgaaggagaagaaagaccatcatcacaacaagcatcgaaagaagagcaagatggcgtcgagagaccaagttaaggcatcgcacattttgattaagcatcaaggttctcggaggaaagcgtcgtggaaggatccagaagggaagattattctgactaccactagagaagccgccgttgagcagcttaaatcgatccgtgaagatattgtctccggcaaggcgaatttcgaagaagtggcgactcgtgtttctgactgtagctctgctaaacgcggcggtgatcttggttcctttggtagaggtcaaatgcagaaaccatttgaggaagcaacttacgcgctcaag

SEQ ID NO: 149486 - DNA, 358 bp, Arabidopsis thaliana columbia
ctgatcctcagaaatctgagcctggaacaatccgaggagatcttgcagttactgttggcaggaacataatccatggaagtgatggaccagagactgcaaaggatgagatcagtctgtggtttaagcctcaagaacttgtttcttacactagtaactctgagaagtggctctatggtgacaactaaatccctcttcctcttgtcttttgaaatcaaatcacattggtttttcttttcttttcttacccatacaataaaaacaagaaacagttgttacggatacaaacacattccgggttttgatttttccccggtgaactcagtaaacagagcataagcaataagtatgggatgtttga

SEQ ID NO: 149487 - DNA, 446 bp, Arabidopsis thaliana columbia
  unsure (1)..(446): unsure at all n locations
ctcgaaaggatctcaaaggacacacacggttacgtcggtgctgatcttgcagctttgtgcacagaggccgccctgcaatgcatcagggagaagatggatgtgattgatctggaagatgactccatagacgctgaaatcctcaattccatggcagtcactaatgaacatttccacactgctctcgggaacagcaacccatctgcacttcgtgaaactgttgtggaggttcccaacgtctcttggaatgatattggaggtcttgagaatgtcaagagagagctccaggagactgttcaatacccagtcgagcacccagagaagtttgagaaattcgggatgtcttcatcaaagggagtccttttctacggtcctnctggatgtgggaaaaccctttggccaaagctattgccaacgagtgccaagctaatttcatcagtgtcaagggt

SEQ ID NO: 149488 - DNA, 351 bp, Arabidopsis thaliana columbia
  unsure (1)..(351): unsure at all n locations
ttnttnnnaaaccacagggtggaaacttggcaattgggggattttaattttttgacacttcttcaaacattacaaactaaacaataaaccattccataaaaaacatgaaaatccctttaactttactttttttgcttttggccgctacggttttggcattcgttccagggcttattgaacttttgttttgaaaaccattttttggaaccttacccaacttttaaagaaagaaaaaatttttataaacttccccaactttaaaagcttgccccttggttttgagacctttaaacatattaacttttacaacgggccctcaaattgtaaaaactttttttaaaactttttttt

SEQ ID NO: 149489 - DNA, 311 bp, Arabidopsis thaliana columbia
ccgggcgacccacgcgtgcgctccggcaagaaaagatgcctatgaagtcgttgagtaatgaccatggaacccttaaggccatgatcggagcccattttaacgagctgactatcgcttcttaaaacctaactacacacgccttcacacttactggtttaagctttggtacctttttccttcaatgggttgcttcaatcgccgccatatacttggtggtgttggatccaaccaaatggaagaccaatattctcacatcacttctcattccttacattctcttcagtcttccttccttgatctttggtattttc

SEQ ID NO: 149490 - DNA, 445 bp, Arabidopsis thaliana columbia
caatttctcaaaatcttaaaaactttctctcaattctctctaccgtgatcaagatgcagatcgttgttaagactctcaccggaaagacaatcaccctcgaggtggaaagctccgacaccatcgacaacgttaaggccaagatccaggataaggagggcattcctccggatcagcagaggcttattttcgccggcaagcagctagaggatggccgtacgttggctgattacaatatccagaaggaatccaccctccacttggtcctcaggctccgtggtggtatgcagattttcgttaaaaccctaacgggaaagacgattactcttgaggtggagagttctgacaccatcgacaacgtcaaggccaagatccaagacaaagagggtattcctccggaccagcagaggctgatcttcgccggaaagcagttggaggatggcagaac

SEQ ID NO: 149491 - DNA, 447 bp, Arabidopsis thaliana columbia
aaagactatatggcctcccattgctccatgagagtaatcctcctcagattctccaatggcgtgtgttccagatccattctgaactccactaaccatcgtcttcttagtcttaccatgaccaacactctctcgtctctttcctcaatctctccccacactactacttcgcatttcacggctgcgtcacaacaatcagatgaccagaactgcttccgcaagcttcaactcagaaagatttcgatttcaactcctctttgtatgggtcgtcgttcttccaaaatcgctggtcgaaagggcgctcaagattcaaagaaggcgaagctatactgtagaattggcaaggaggttgtatctgctgtcaagaaagggggtccaaacccagtttcaaatacgactctagctactattcttgacaaagctaaagaactggatgtaccgaaagacatt

SEQ ID NO: 149492 - DNA, 447 bp, Arabidopsis thaliana columbia
  unsure (1)..(447): unsure at all n locations
gggcactaagcctcatcgaaccctttccgccatggttactacttacggccctatcctgcaccgccgactagggttcgtagacgtcgtgttcaccgcttctaaatccgtggccgagcagttcttgaaaatacacgacgccaatttcgctagccgaccaccaaactcaggagctaaacacatggcatataactatcaagatcttgtctttgcaccttacggacaccgatggagactgttgagaaagattagttctgttcatctattttcagctaaagctctcgaagatttcaaacatgttcgacaggaagaggttggaacgctaacgcgggagctagtgcgtgttggcacgaaacccgtgaatntaggccagttggtgaacatgtgtgtagtcaacgctctaggacgagagatgatcggacggcgattgttcggcgccgacgccgatca

SEQ ID NO: 149493 - DNA, 163 bp, Arabidopsis thaliana columbia
cggccccttgggactaattcaacctctcctcctccttcttttcctttacctccttctcttccggctccatctcctcctggagctttaactcctccttttcctaaaccttccccctccgttcccatcactccttttccaccgtttcccaccacaaccttaaaac

SEQ ID NO: 149494 - DNA, 413 bp, Arabidopsis thaliana columbia
gcttaaagtctctattattctctaatctcttcttcgccgactacttctctcaccaaggcgacgttttgagcaggcgatgatgagtatgccaatggagttaatgtctatcagaaaccctaattccaccttgctctatagagctcactctcgtccgcctgtgaagctctgtgctccacctcgttctctcctccctagccgacgccatttcagtgctccttgagctgttgtttcgtatccaggaatacgtttcggctttacctcgccggaagtcttgcttaatcgatccgtcgttgctttcgctgcatcccacgaggattcgggagaatcaggtgttgaggtggggaaggagaagagtgatttagatgttgaagatgatacatttaaggaagcatgggaacaaactcttgggtctt

SEQ ID NO: 149495 - DNA, 440 bp, Arabidopsis thaliana columbia
gaagataacaagattattatagcatcaggatcgagattgttcgtcgtccattgaagcagcattgtccttgttcaaagatcgcttttggttcttctcgctgttttcgttttctaatcgcttgcaacaatttcaacgtttcacatattaaggagaaatggatcctcggagaaacttccaaccaggtggctatgactctcggaataccttcacttcaggatcttttgggcctccagattttggtgaaagtgatgaagcagagttggtttctgtttcttggaatcaggattacagttgttttgctgctggcactagccatggttttcggatatataactgtgaaccgttcaaggaaacttttaggcgagagctgaaggatggagggtttaaatattgtgagatgcttttcccggagttatttcttgtcgtctgttggtggtggt

SEQ ID NO: 149496 - DNA, 420 bp, Arabidopsis thaliana columbia
ccatgagattcttagaaggttggcggagagacgacggagaaaacgacttaacgatcgtctttgtatgctccgatccatcggcccaaaaatcagtaagatggacaggacatcgatattaggagatgccatagattacatgaaagagcttttagacaaaatcaacaaattacaagatgaggaacaagaacttggaaatagcaacaattcacatcactctaagctcttcggtgatctcaaggatcttaatgcgaacgaacctctggtcagaaactcaccaaagtttgaaatagatcgtagagacgaggatactcgagttgatatatgctgctcgccaaaaccgggattgctactatctactgtgaatacattagagactctaggcttggagattgaacaatgtgttataagctgctttagtga

SEQ ID NO: 149497 - DNA, 429 bp, Arabidopsis thaliana columbia
ccgctctcatttcctcaattctccgtccgtcgaagaagcgaatcgctcgaaattagggtttcgactgagagaagatgcgagaaatcataagcattcacatcggacaagctgggatccaggtcggaaattcgtgttgggagctttactgtctcgaacatggaatccagccggacggaatgatgccgagtgatactacagttggtgttgcacacgatgcgttcaatactttctttagcgagactggtgctgggaagcatgtccctagggctgtcttcgttgatctcgagcctaccgttatcgacgaagttcgtactggtacttaccgtcaacttttccatccagagcagctcatttctgggaaagaagatgctgctaacaacttcgctagaggacattacactgttgggaaggaaattgtgggtctatgtc

SEQ ID NO: 149498 - DNA, 324 bp, Arabidopsis thaliana columbia
gtcacatcgaactctaaaccacactgagatggcgaaatggtggcgaggcctgagatccgtgacggcggaggtggctgatcttccggcttcttcattcggtcgatcgattcgatgtattcatcagtatcagacgatccaggcgattccacgtgaagctacgggtcgaggagtatcggctcgggatcggacgattggtcgtattcccgccgtcgttttcccgcaatcgcttctagatactgatgcttcgaagcgaggcgtgtcgaggaagcagctattgacggcggataagaagcagatcaagtctattattgactctgttggtct

SEQ ID NO: 149499 - DNA, 451 bp, Arabidopsis thaliana columbia
ctcatctctctcatttcgaaaccatggttgagccgtctaatactgttgatcttccggtgaaggtgactccgttgctgaaagatgagctctatatcatgattccgactatcaaaaacctcgatttcctcgagatgtggaggccttttcattcagccttaccatctgatcatcgtccaggacggagatccatcgaagaagatccatgtccctgaaggttacgactacgagctctacaacaggaacgacattaaccgaatcctcggacctaaggcttcttgtatctcgtttaaggattctgcttgtcgatgctttgggtacatggcgtctaagaagaagtatatcttcaccattgatgacgattgcttcgttgccaaggatccatcaggcaaagcagtgaacgctcttgagcaacacatcacgaaccttctgtgcccatcgtctccctttttct

SEQ ID NO: 149500 - DNA, 380 bp, Arabidopsis thaliana columbia
cgcgtccgaagaatagtttgatcatcttgtgagaaaaataatgtctgcttcagtgatgctatcttcggtgagattgagaccagctggtttcacggtggagaagacggcggctagaggattaccgtcgctcacaagagctcgtccctccttcaaaattgtcgccagtggcgtcaagaagatcaagaccgacaagcccttcggaattaacggcagcatggacttgagggacggcgtcgacgcctccggcagaaagggcaagggatacggtgtttacaagtacgtcgacaagtatggagctaacgtcgatggatacagtcctatttacaacgagaacgagtggtcagcgagtggtgacgtgtacaagggaggagtcaccggat

SEQ ID NO: 149501 - DNA, 466 bp, Arabidopsis thaliana columbia
acgcgtccggtatctgaagagaccgatatggagcgatggcgcgtcagcaacgccggagaatccatcagaatcggagacgcggagaagaatcagacgcggcgtcgatggtagtcgaagagctggtgacttctctcaatacacagagactttacagggagctgacactatccctcaggaccggtttacgcgatgcttgcgctgaattctccttccttcgcatccgtggtcttagatctcttctcaaaactctccgaactgtcgctgattcagattcaatcattcgtctcttctctcatacccaaaccatttccgatctccaactggttccggtgctttttcaacattcattgaaagaagcggaggatgataaagtgacgagcttggatcatatattcagtgtggagccgatgaagataacaagtccttctacggatgctgagggtgctgttgctcttagagttctcga

SEQ ID NO: 149502 - DNA, 472 bp, Arabidopsis thaliana columbia
cgccccacgcgtccgtcagattcaagatagaagtttttcaaacaatgtctagtcctcttggtcactttcagattcttgtgtttgggcatgctttgcttatcggctcagctgagtcccgcaaaacccaattgctgaacgataatgatgttgaatctagcgacaagagtgcaaaaggcacacgatgggctgttttagttgctggatcaaatgaatattataactacaggcatcaggctgacatatgccacgcgtatcagatactccgaaaaggcggtttaaaagatgaaaacatcattgtgtttatgtatgatgatatcgcgttttcctcggagaatcctaggcctggagttatcattaataaaccagatggagaagatgtttataaaggagttcctaaggactacactaaagaagctgttaatgttcaaaacttctacaatgtgttacttgggaatgaaagtggcgtcacagg

SEQ ID NO: 149503 - DNA, 435 bp, Arabidopsis thaliana columbia
tttcaacttttttttttcctctccagtgcactaggaaacaaaaaaaacccaagatctatagttcgatcgggtcgagagaagctcgaaaatggcgctggcgttcgatgagttcgggcgtccgttcattatactgagagagcaagatcaaaagactcgtcttagaggaatcgatgctcagaaagccaatatcgccgctggtaaagccgtggctcggatccttcgatcctctcttggacccaaaggaatggataagatgcttcaaggacctgacggagacatcaccatcacaaacgatggtgctacgatattggagcaaatggatgttgacaaccagattgcgaaactaatggtggaactgtcgcggagtcaggattatgaaattggtgatggaacaacaggtgttgttgttatggctggtgcacttcttgagcaagc

SEQ ID NO: 149504 - DNA, 449 bp, Arabidopsis thaliana columbia
acgtttcgatttcaatggagtcacgcgtgctgttacgcgccaccgcgaatgtcgttggggttccggaattgagacgaccaatcggagcgatccaccgtcaattcagcactgcatcgtcttcctcgttctcggttaaaccaatcggaggaatcggagagggagcgaatctgatctccggtcgtcagcttcgtccaattcttcttctcgattcgtcggcgatcaacggaggagagaaaagagaaattctcaaaccggttaaagccgccgctgctgaaggtggagataccgctggggatgctaaagttggattcctcgccaagtatccatggctagtcactggattcttcttcttcatgtggtacttcttgaatgtgattttcaacatccttaacaagaagatctataattacttcccttatccctattttgtatcggtgatacacttgttc

SEQ ID NO: 149505 - DNA, 389 bp, Arabidopsis thaliana columbia
catacactatttttctcctctccttattgtctatatatttttcctctttagcttttggatttcgaaatggccaccgttgaggttgaacaagtcactccagtagcagtagagaacgttgaggtaccaacaaagacagtggaggagacagtggtggagacagaggtgacccaacagccggaagaatccgtccccgccgtgacagaacaaaaatccgaagcaccaattgtagaaacaaacgaagaagtggttgtggaagaggcagagaagaaagatgaagaaaccgagaagaaaacagaggagaaagacgagaagacagaagtgatcacggaaactccggtagttgaggaggaggagaagaaagctgaggaagtgacccgaacttcggcggt

SEQ ID NO: 149506 - DNA, 434 bp, Arabidopsis thaliana columbia
  unsure (1)..(434): unsure at all n locations
agttgattgcgaaatttaaaatcgaaaaagctaaaaggggtagtttcgtcataaatttgaattttttctttcactgccagctctgctttagagcttctctacttcttcttcttcttcaagttcgcttaagagatcgatcggagattcggagtagagaaaaatgtcaggattcgtcgggattttggtatcggatccatggttacagaaccaattcacgcaagtggagcttcggagtttgaaatctcacttcacgagcatgaagagagagagcgggaagctaacagtatcagacctcgcgtcaaggatggggaaatcaaaagtagttggagatcagaatctaagcaacgaagaacgagcgactntgatccaaaattttcatccgaatttgaatgatgaagtcgatttcgagttttacttaaggatttatctgaatc

SEQ ID NO: 149507 - DNA, 360 bp, Arabidopsis thaliana columbia
attaactttaagtaccaaaaatggcgggctacaacctcgaagctatcgaagcggcacctttgaaagacgatctggatattgtgatcccaaccatcagaagcctcgactttctagagcaatggagaccatttttgcaccattaccacctgatcattgtccaagatggagacccttccatcaagatccgagttcccgagggttatgactacgagctctacaaccgtaatgatatcaacaggatccttggtccaagagctaattgtatctcctacaaagatggtggttgtcgctgctttggcttcatggtttctaaaaagaagtatatctacaccattgatgatgattgctttgtgcaaagga

SEQ ID NO: 149508 - DNA, 448 bp, Arabidopsis thaliana columbia
atggtttcttcttctttaaccaagcttgtgttctttggttgtctcctcctgctcacattcacggacaacgcttgtggctggaaaatctggcaaagtgaagctcaatctttactacgaatcactttgtcccggttgtcaggaattcatcgtcgatgacctaggtaaaatctttgactacgatctctacacaatcactgatctcaagctgtttccatttggtaatgccgaactctccgataatctgactgtcacttgcccagcatggtgaagaggaatgcaaactaaacgcccttgaagcttgcgcattaagaacttggcccgatcagaaatcacaatactcgttcatacggtgcgtcgaaagcgatacgaaaggctgggaatcatgtgttaaaaactcttgacgtgagaaagcaatcaatgattgttacaatggtgatctttctagaaa

SEQ ID NO: 149509 - DNA, 202 bp, Arabidopsis thaliana columbia
atctaattaactttaagacccaaaatggggggcttccacctttgaagttttcaaaccggaccgttggaaggacaacttggatatggggaccccaaccataaaaagcctggactttttagggcaaggggaaccattttggccccattcccacctgaccatggtccaagatgggaacccttccataaaaacccgggttcccggg

SEQ ID NO: 149510 - DNA, 430 bp, Arabidopsis thaliana columbia
aagacatctatattctccgatttcgttttgtctttctttatcgtctcggtttcgtcgggtgatgtcaacgacggcgatgatctcgtgatccgtcaggtggttggtggagccgagcctcaggttttgacctcagaggatcacttttctctcttcaagcggaagttcgggaaggtctacgcttccaacgaggagcatgactatagattctcggttttcaaagcgaatctcaggcgagcgaggcgtcaccagaagttggatccgtcggcgactcatggtgttacgcagttctcagatctgactcggtctgagttccgtaagaagcacttgggggttagaagtggctttaagcttcctaaagatgccaaacaggctccgattctccctaccgaaaatctccctgaggattttgattggagagatcatggcgccg

SEQ ID NO: 149511 - DNA, 367 bp, Arabidopsis thaliana columbia
ccacacatgcgagatcatcatcaattactagtggctcaaacactggtgagaatcagacaaatatagtccacctgccagctttgaccaggaatatacaccaatatgcttgggatgcttctttcagttctagagccagtaatccttcgggtattgggatgcctgcagagcgattaggaccacagtgggaaacaccgagaagcaaccaagagcagcccttgtttgcacctgcaactgacatgagacagccggtgcatgatctttggaatttcgcacgtggaagccctggttcatctgtagattctctctttgttcctcgagcagggccgagttcagctattcatacgccacagcctaatcccacatggat

SEQ ID NO: 149512 - DNA, 443 bp, Arabidopsis thaliana columbia
caagaagaacaacaacactaagcaaaaaagaaaagctcaagccgagagagacaatggcatcaacattcacgagctcaagcagtgttcttaccccaacaacattccttggccagactaaagcctcaagctttaacccccttcgtgatgttgtctctctcggatctcccaagtacactatgggaaatgatctttggtatggacctgacagagtgaagtacttaggacccttttccgttcaaactccgtcttacctcaccggagaattccctggcgattatggttgggacaccgccggtttatccgcagaccctgaagcctttgccaaaaacagagctcttgaggtgatccatgggagatgggcaatgttgggaggctttggttgcataacccctgaagttcttcaaaagtgggtccgtgtggacttcaaagaaccagtctggttc

SEQ ID NO: 149513 - DNA, 313 bp, Arabidopsis thaliana columbia
caattttctcaaactctaaaatcaatctctcaaatctctcaaccgtgatcaagatgcagatcttggttaagactctcaccggagagactatcaccctcgaggtggaaagctctgacaccatcgacaacgttaaggccaagatccaggataaggaaggtattcctccggatcagcagaggcttatcttcgccggaaagcagttggaggatggccgcacgttggcggattacaatatccagaaggaatccaccctccacttggttctcaggctccgtggtggtatgcagattttcgttaaaacccttaacgggaa

SEQ ID NO: 149514 - DNA, 420 bp, Arabidopsis thaliana columbia
  unsure (1)..(420): unsure at all n locations
attgcttcatcattaccaaatcatcaacttaatcgtttctctcaaatttagggttttctctttggtcgaaagtcttgcgggtgtctgaatcatctctatctggtttgagggtttcgtttgatatctggagaaaggggtttctggaaacaaggagttcataattcgcgatcttgatctatcgatcttcatttatatataaaagcgtgaatgagattatgatggagtcgaaaggtggtaaaaagaagtccagcagtagtagttccttattttacgaagctcccctcggttacagcattgaagacgttcgtccaaacggtggaatcaagaaattcaaatcttctgtctactcaaactgctccaagaggccatcctgagtaccagcgtgcaccgatcttcataatatagntatagctttcttta

SEQ ID NO: 149515 - DNA, 288 bp, Arabidopsis thaliana columbia
gaagtatgtggcagcacaacaggacattcgagagattgatcaagaggaaaagactgatttgcgggtccagagccatgctgccgtagctctccaggaagctgcagaagcatatcttgttggtctctttgaagacactaacctttgtgccattcatgccaagcgtgtgaccataatgcccaaagacattcagctcgctcgtcgtatcagaggtgaacgcgcttaagccaaccaagaatccgagatttggttcaagtagtttttgttttttatgaaagcaagatcttaatt

SEQ ID NO: 149516 - DNA, 371 bp, Arabidopsis thaliana columbia
tccggaatcgccggacgcacccacgcgtccggagatttcatgagagatacagttcgatgagtatcagatcgattacattatccatggtgatgatccttgtgttcttgctgatggtactgatgcttatgcacttgctaagaaggctggtcgttacaagcagattaagcgcactgaaggagtttttagcactgatatcgatgggcgtatgcttctttgtgtaagagaaagatccattagtgacactcatagtcgcttctctctgcaaaggcaatttagtcatgggcatataagcccaaagtttgaggatggagcttcttctgctggtactcgtgtatcgcattttctttctactttccgcaggattgttcaat

SEQ ID NO: 149517 - DNA, 381 bp, Arabidopsis thaliana columbia
aattcttgcagttctggggatattgccgtgtacattattgataccaggtctctttttcatccccgaatcccctcgctggctggcaaaaatgggtatgacagatgaatttgaaacttcattacaagttcttcgaggatttgagactgatattaccgttgaagttaatgaaatcaagagatctgtggcatcatctacaaagcgaaatacagctcggtttgtagatctcaaacgcaggagatactatttcccacttatggttggtatagggttgcttgtacttcaacaacttggtggaattaatggtgtcctattctattccagtacaatatttgaatctgcaggagttacatcgagtaacgcagcaacatttggggtcggggc

SEQ ID NO: 149518 - DNA, 337 bp, Arabidopsis thaliana columbia
  unsure (1)..(337): unsure at all n locations
gggcgacgatatggattccctgttcgaatggatggattctttttacaccgtcntctcagggctccggttacagcagggtggagctcaccacctcaatctgaagaaaccaaggctgcggaggcgacactgatcacggctccttctcaaccagatgtgacggaggcgacactgatcacggctacttctcagccagatattacggaggctttggacgagaatctgttttcagacttaacgattgtgactccggttcaacaccaacctgagccgatggaggcagttatcactactcatcaatctccggcgaagaattatggacgtcaggtgtcactgaaga

SEQ ID NO: 149519 - DNA, 398 bp, Arabidopsis thaliana columbia
gcaaaacaagaagaacaacaacactaagcaaaaaagaaaagctcaagccgagagagacagtggcatcaacattcacgagctcaagcagtgttcttaccccaacaacattccttggccagactaaagcctcaagctttaacccccttcgtgatgttgtctctctcggatctcccaagtacactatgggaaatgatctttggtatggacctgacagagtgaagtacttaggacccttttccgttcaaactccgtcttacctcaccggagaattccctggcgattatggttgggacaccgccggtttatccgcagaccctgaagcctttgccaaaaacagagctctttgggtgatccatgggagatgggcaatgttgggagcttttggttgcataacccct

SEQ ID NO: 149520 - DNA, 380 bp, Arabidopsis thaliana columbia
gtgattttcaagatggaagagttggggttttctatgtttcattcctatgggttaactgaaacttatggaccaggcacaatctgtacatggaagcctgagtgggactctttgcctagagaagaacaggcgaaaatgaaagctcgacaaggcgtgaatcatttagggctcgaggaaatacaagttaaagaccctgtaaccatgagaactttgccagctgatggtgtgactatgggtgaagttgtcttcagaggaaacacggtgatgaatggttacttaaagaaccctgaagcaaccaaggaagcttttaaaggaggttggttttggagtggcgacttaggtgttaaacaccctgacggatacatagagcttgaagacagatc

SEQ ID NO: 149521 - DNA, 266 bp, Arabidopsis thaliana columbia
gttttaacaaaacaagtatcaggccgttccaagcgttcactaacgacacgacgtttgtttatggggcaaaaagacgaattgggtgaaacctcgtcggagaggtttaggcttaaagaaacaaattgttggaatctcaattctcgaatctgacatctcggagaagagatatggcgacagagtcatcggaatcggaagaagaagggaagattagtggaggaaactattagcttatcattgacggcgatctatagagagatgggtgaaaa

SEQ ID NO: 149522 - DNA, 384 bp, Arabidopsis thaliana columbia
ctcatcttcacaggaaacaatggtgtttgtgaagtcctccaaatcgaatgcttacttcaagaggtaccaagtgaagttcaggagaaggagagatgggaagactgattacagggcaaggatccgtcttatcaatcaagacaagaacaagtacaacacccctaagtaccgttttgttgttcgatttaccaacaaagacattgtggcacagattgtatctgcaagcatagctggtgacattgttaaagcttcggcttacgcacatgagctttctcagtatggactcactgttggtcttaccaactatgctgtagcttactgtactggccttcttttggctcgtcgtgttctgaaaatgctggaaatggatgatgagtaccagggaaa

SEQ ID NO: 149523 - DNA, 403 bp, Arabidopsis thaliana columbia
cacccactcatggcgtctcggagagtcttatcatctcttctccgttcatcttccggtagatctgccgccaaattaggcaaccgtaaccccaggcttccttctccttcacccgcgcgtcacgccgctccatgtagctacctcctcggccgcgtcgccgagtacgcgacctcttcacctgcaagctcagctgcgccatcttctgctcctgctaaggatgaggggaagaagacctatgattacggtggcaaaggtgcgatcgggcgtgtttgccaggtcattggtgccattgtcgatgtgagatttgaggatcaggaaggattgccaccaatcatgacatctctcgaggtgcaggatcaccccacaaggctagtgccttgaggggtctcatcacttgggtcagaat

SEQ ID NO: 149524 - DNA, 308 bp, Arabidopsis thaliana columbia
cggtcgacgccacgcgtccgtaaaaatgtcgacggcaaagaggactcccagggttaaccgtaaccctgacctaatcacggcagttgtactagattttaggtgtcagctgcaccacacgataggatcgtggcctatcaagggcaaatactgtggcgatttacctcttgactatgctcaatcaaaggtcgactctgctgttgcgaagcctgtcaagatttatccggcggaagacactaagaaatcgattgttaacagacgcatgcctaagcctaccaagctaaaagccagcattactccatgaactgtga

SEQ ID NO: 149525 - DNA, 466 bp, Arabidopsis thaliana columbia
gcgcgtcgcctctccagcaaatgcagatggacctgtttgcccgccgtcgaacaaactaagccgggcaagtttccgtgaaggttttttatttggcacggctactgcggcataccaggtcgaaggtgcgattaatgaaacttgtcgtggaccagccttatgggacatctactgtagaagatatccagagaggtgcaataacgataacggcgatgtggccgttgatttcttccatcgttataaggaagatatccaactaatgaagaatctaaacacagacgcctttagaatgtctatcgcatggccaagaatatttcctcatgggagaaaggagaaaggagtgagtcaagctggtgtgcaattctaccacgacctcatcgacgagctcataaaaaatggtataactccattcgttactgtttttcactgggacactccacaagatttagaagatgaatatggcggcttt

SEQ ID NO: 149526 - DNA, 394 bp, Arabidopsis thaliana columbia
acagcactttgtcggtttagcaggccttatattattattgatgaaccacatccaatcacgaacgaggaattagtggttgctaaaaccatgacactttttatcaccaattatcggcttattatcactgcgaccccccttcagaataatcttcatgaactgtggactcttctaaattttcttctgcctgagatatttagatcagcacagactattgatgaatggcttcaaatatctggtgagagtgaccagcaagaagttgtgcaacaactgcacaaggttctccgaccatgtctttttcagaagactaaagtcagatgtggaggaaaggtttgccaccgaagactgagaccatacttaaagctggtatgtctcagatgcaaaatgcatactacaa

SEQ ID NO: 149527 - DNA, 406 bp, Arabidopsis thaliana columbia
atcgatttcttccaacttcaataaaggggaaccaacgtaaccctaattttgctttctcctctttgttcagaaaattttccctttactctcaaattccttttcgatttccctctcttaaacctccgaaagctcacatggcgtctcgaaactatcggtgggagctcttcgcagcttcgttaaccctaaccttagctttgattcacctggtcgaagcaaactccgaaggagatgctctctacgctcttcgccggagtttgacagatccagaccatgtcctccagagctgggatccaactcttgttaatccttgtacctggttccatgtcacctgtaaccaagacaaccgcgtcactcgtgtggatttgggaaattcaaacctctctggacatcttgcgcctgagcttgg

SEQ ID NO: 149528 - DNA, 369 bp, Arabidopsis thaliana columbia
cgcctttatctctttctctagatctactcgctatggctactatcaccgttgttaaggctagacagatctgggacagtcgtggtaatcccaccgttgaggttgatatccacacgtcaaatggtattaaggttacagcagctgttccaagtggagcttccactggtatctatgaggctcttgagctgagggatggaggatctgactaccttggaaagggtgtatctaaggctgttggcaatgtgaacaacatcatcgggccagcacttattggaaaggacccaactcagcagactgctattgacaacttcatggtccatgaacttgacggaacccaaaacgagtgggggtggtgcaagcaaaagcttggag

SEQ ID NO: 149529 - DNA, 410 bp, Arabidopsis thaliana columbia
ctttttcactcccacacgttctgctccagcgatactgtgagagaatctctgtgtggttctgaatgtcttaggctggaattggattctgaaatggcggaggagtacaaggaagcgttgttggagaagcagaactatcacgacggatgtcccggctgtaaggtggagcagatgaagcagctccggcgaggatatccttacctcgagctttccttcgtttggattatcgtcctctccacttctctaccaatttcctcactctatcccttcctctactatatgattgaggattttggtgtcgcaaagacggagaaagatattgggttttatgctggttttgttgttgctcttttatgcttggagagcactgacttcttgttctggggaatgtgctgatcgtatggagaaaccca

SEQ ID NO: 149530 - DNA, 399 bp, Arabidopsis thaliana columbia
agcattttggccattctgggcgtataggatgtttgtatctcatattatcttgctcaaagagcagtcgatctgtggaagcaaatagttggggttccaaacatggaggcttttgtgaataaaccagatattctatccttttccattgcgagtaaaattcccgtgtctgagtcaattagacaagagctcttggagctggatggagtctcctatagattgcagcgagaaattgaattgcttgaaagttttgatcgtgttcgatgtatacactgtcagactgtcatagcaagaagaaaagacatgttggttatgtctaatgaaggtcctcttggtgcctacgtaaacccacatggctatgtccacgagataatgaccttttacaaagcaaatgacatagcgctt

SEQ ID NO: 149531 - DNA, 432 bp, Arabidopsis thaliana columbia
cgtgtagctaatgttcctgaggatggaaaggaaggtcctcctgatgtttgtgtcatcgaattaggcggggcgtataggtgatgttgaatctatgccctttattgaggccctaggtcaattctcgtataaagttcgacctggtaattactgcttggttcatgtgagccttgtgcctgttctcagtgatgttagggaacagaagactacatcaacccagcatatcgtgcgaggcctcaagagccttcgtttgacaccaaatatcctatcatgtcgaaggacgaacgcacttgacgaaaatggcaagacaaaactatctaagatctgccatgtgcccaaagtgaatatagtaacgctctatgatagttcaaatatatggcacgtttctctgcttttaaggcagcaaaaagctcatgaagcgatgctaagagagtt

SEQ ID NO: 149532 - DNA, 458 bp, Arabidopsis thaliana columbia
ttctgagccggacgaaggagaggcagccgcctaagaagttgccgtcgtgcgccatggccgtgaaggcttctggattcattgggaaatcagcaatctctgttcatctagatttctcttcgtttcctgtgaaattttcatgcttgaaacagttttctgtatcttcaccaaagccactggtcgttttatccgttgccttatcgtcgccggcaagaacagttgagtctccgcctgttggttaccggaagaatgttgggatttgtctcgttagcccatgtagaaagatttttacggcgtcaaagattcacattccggatacatggcagatgcctcagggtggtgctgatgagggagaagatttgaggaacgctgcctttagagaactgagagaagaaacaggggttacttcggcagaattcattgcggagataccaaactggctgacctatgattttccccga

SEQ ID NO: 149533 - DNA, 458 bp, Arabidopsis thaliana columbia
agggatcgccttttctcactctctgcggattctcaattttgggcaagaaggcaagaacagtttggatcgcgattgagtctggaagaggacaaggatttgatcacattggtgcttctgcctgtttatctgagtttgaggacaagaacttctggggcgtttataatttgccatggctagtaatgagaatctaccacccaatgttatcaagcagcttgccaaggagctgaagagtcttgacgaatcccctccagatggcatcaaggttgtgggaaatgacgaggatttctcacaaatatgtgctgatattgaaggaccagttggtactccttatgagaacggacttttccgtatgaagttgggcttgtcacatgattttccacattcgccttccaaaggcttcttcatgacaaagatttttcatcctaatgttgcttctaatggagagatatgtgttacac

SEQ ID NO: 149534 - DNA, 467 bp, Arabidopsis thaliana columbia
gaagaaaattgagaaaaaaaaaagctttaagatggagaaaaatctacaaaagcaggaatttctagctgagacgtcagagatgaagaacaccaaaaacaacgacgactgttctgtacaacaacaacaacgatttgtgtggccatgggttggtctagtagccaacataccaacggaggtggaaccatcgggtcggagagtaggcaaaagcggttcaacgttacgtgatgagttcactatgaaagggtttaatccaacaagagtccaacccatttgggatttcaagggtcattctggttttgctttggttgaattcgctaaagactttgaaggattcgaaagcgccatgaaatttcgaaaggagttttaatttagaccgtcatgggaagagagattgggaaaaaggtcatcgcttgagagacaataagctctatggatgggttgccagagaggatgattattatcgaagt

SEQ ID NO: 149535 - DNA, 377 bp, Arabidopsis thaliana columbia
gtttgttgcaggacgtgtccgaaacatttacttcccatttgacattgagacggacaccgcattgagcgttgcaacagagatggtagcggaactggatatggacgatcatggagtcacaaaaatagccaacatgattgacggtgagatatcttctcttgtacctagttggagaccgggacctgaattcgaagaatgtcttgcggctgcggcggcggcaaatgctgcgagcatttgcaacaactgcgtatcaaaccgcacctcaatgggctcggtgaatggatttcctgagaaccaatcctggggcaaatgtgatacaatgttgcagaaacgggtgcggtgagactcatggtcggtttgaagagatcacgatccagaga

SEQ ID NO: 149536 - DNA, 427 bp, Arabidopsis thaliana columbia
ctcgcatcttctcgtctttagtgaagatcttttcttcatatatcttttgccacccattatattgaatgcagggtttcaagtgaaaaagaagcagtttttccgcaatttcgtgactattatgctttttggtgctgttgggactattatttcttgcacaatcatatctctaggtgtaacacagttctttaagaagttggacattggaacctttgacttgggtgattatcttgctattggtgccatatttgctgcaacagattcagtatgtacactgcaggttctgaatcaagacgagacacctttgctttacagtcttgtattcggagagggtgttgtgaatgatgcaacgtcagttgtggtcttcaacgcgattcagagctgtgatctcactcacctaaaccacgaagctgctattcatcttcttgga

SEQ ID NO: 149537 - DNA, 347 bp, Arabidopsis thaliana columbia
gacgcctgcctccttgcacctcttttctttctctcgttctcatctttctctctaagagattttgtaggtgacaatcaaaagtttgacaaaatggtgaagtttacagctgatgagcttcgaaggattatggactacaaacacaacatccgtaatatgtctgttattgctcatgtcgaccacgggaaatccactcttactgattctttggttgctgctgctggtatcattgcccaagaggttgctggtgatgttcgtatgactgataccagagctgatgaggctgaacgtggtatcactatcaagtccactggtatttctctctactacgagatgactgatgaatcctt

SEQ ID NO: 149538 - DNA, 414 bp, Arabidopsis thaliana columbia
aagaaattcgtaagtactatcaagaagcagaagatggcccaaaaggtggaagcacaaggagggaaaggagcgcaacctatgggacgatggatcgacacatgacgccgtgaccaagattcagctcgcagcaggcatagacggaattcaatatgttcagtttgattatgtcaagaacggacaacccgaacaagctcctcttcgtggtaccaaaggccgtgttctcccagctgatccgtttgtgattaaccatccagacgaacatctagtttctgtagaaggttggtatagcccttgaaggtatcattcaaggaattaagttcatctccaacaagaagacttctgatgtcattggatccgatgagggtactcaatttactttacaaggtaaaagacaggaagatcattggctttcat

SEQ ID NO: 149539 - DNA, 443 bp, Arabidopsis thaliana columbia
gcctggactcatggcttgtcgtaccgaattcggaccttctcagccattcaaaggcgctagaatgaccggatctcttcacatgaccatccaaaccgccgtactcatcgaaaccctaactgctctcggtgctgaagtcagatggtgttcctgcaacatcttttccactcaagaccacgccgccgcagccatcgctcgtgactccgccgctgttttcgcctggaaaggtgagactcttcaggagtactggtggtgtaccgagcgtgctctagattggggtccaggtggtggtcctgatctgattgttgatgatggtggtgacgctactcttttgattcatgagggtgttaaagctgaggagatctttgagaagactggtcaagttcctgatcctacttctactgataaccctgagtttcagatcgtgttgtctattatcaaggaag

SEQ ID NO: 149540 - DNA, 415 bp, Arabidopsis thaliana columbia
cgcttcttctaagataaatctctccccgattctctctttttctcgctagatactctttttcttgaattagggtttcttctcgcttgccttttaattctctccagctgatctgatctccgttaccgatggagtctactgctaacgcactcgtcgtcaaggtgagctatggaggtgtgcttaggcgtttcagggtgcctgttaaagctaatggacagcttgatcttgaaatggctggtcttaaggaaaagatcgctgctctctttaacctctctgcggatgctgaattgagtctgacttactctgatgaggatggggatgtggttgcccttgttgatgacaacgatctctttgatgttactaatcagcgtcttaagttcttaaagatcaatgtgaacgctggcgtgtccactaactc

SEQ ID NO: 149541 - DNA, 327 bp, Arabidopsis thaliana columbia
  unsure (1)..(327): unsure at all n locations
gtctgttcaagctcccattcttgtggccttcacgcttcaggaacaaagaccagtatctgtctgaaagactacttctgggaaattttcgtctccatggcacccgtgagggggattcttggcttgcaaagggcagtgtccatttggaaggaaagtaacagactgactccagctttgagatcattcagcactcaagctgaatccacttncaccactccacaggcttcttcaccttctgcggcttcggaaaagactcatttcggtggtctcaaggatgaagatcggatttttactaatctctatggtctgcatgacccatttctcaaaggc

SEQ ID NO: 149542 - DNA, 454 bp, Arabidopsis thaliana columbia
agcaaagatataacccccaaaagtatcaattagtttccattttcgccgctaagattctgttttcgaacattgacaccctcaagaatcgccgccatgtgtggaggagctataatatccgatttcattccaccgccgaggtctcgccgtgttactagcgagtttatttggccggatctgaagaagaatttgaaaggatcgaagaaaagctcgaagaatcgttcgaatttcttcgattttgacgctgagttcgaagctgatttccaaggtttcaaagatgattcgtctatcgattgcgatgatgatttcgacgtcggtgatgttttcgccgatgtgaaaccattcgttttcacttcgactccaaaacccgccgtcttcgccgctgcggaaggttcagtttttggtaagaaagttactggcttggatggggacgctgagaaatctgcaaataggaaga

SEQ ID NO: 149543 - DNA, 401 bp, Arabidopsis thaliana columbia
ggattaatcaaagacaaagaaaacgaaaatgttggcaatatttcagaaagcttttgctcacccacgcggaagaactcaacagtgcggcttctcatttctccggcaaaactcctaaacttcccggcgaaactctctccgacttcctctctcatcaccaaaacaatgctttctctatgaacttcggcgactccgccgtcttagcttacgctcgccaagaaacctctcttcgtcaaaggttgttctgtggactagatgggatctactgtatgtttctagggagattgaataatctctgtacattggaatcgacaatacggtttatctgggaagaactcaaacgaggcaatgtttgtgatcgaagcttatcgaacacttcgtgatcgtggccttacccagcagat

SEQ ID NO: 149544 - DNA, 356 bp, Arabidopsis thaliana columbia
gttaaagcctcatgaaagaatcatggcacttgatcttcctcatggtggtcatctttctcatgggtgtcagactgacaccaagaagatatcagctgtgtctatcttctttgaaacaatgccctatagattggacgagagcactggctacatcgactacgatcagatggagaaaagtgctactcttttcaggccaaaattgattgttgctggtgcaagtgcttatgctagattgtatgactatgcccgcatcagaaaggtctgtaacaagcaaaaagctgtaatgctagcagatatggcacacatcagtggtttggttgctgctaatgtaatcccttcaccgttcgactatgctgatg

SEQ ID NO: 149545 - DNA, 408 bp, Arabidopsis thaliana columbia
agggaagcactctagctcttgcatacagtcagtctcaccctgacaaggttactggtttggtcctgggagggatctttgtgtggcgtaaaaaggagattgactggttttacgagggcggtgctgctgctatttaccctgatgcttgggaggagttcagagatcttattccagaaaacgagagaggtagtagccttgtggacgcgtatcacaaaagattgaattctgatgatctggaaattcaatacgcagctgcaagagcttggactaaatgggaaatgatgactgcttatcttcgtccaaatcttgaaaacgttcaaaaggcagaagatgataaattttcattggcgtttgcaaggattgaaaatcactactttgttaacaaaggtttcttcccgtcggactcacact

SEQ ID NO: 149546 - DNA, 400 bp, Arabidopsis thaliana columbia
gttgtggtatgaatatgaagaaacagattatggatgagtctgtaaagtcattgatgctgcctcgtcctccaccgcttgtgggtccatctcagggatatggatcaagaaagatcgatggagacagcataaccaataaacagatcaagaagttctggagacagaagcagatcattgaagaggatcatctctattctgctattaaggctgcagctcgtgtcagagctcgtaatctctctgatgaggactacaaacgctttgaagaaagcttggacatggaggacctggaaaccgaagatcatcagggattgaaagactggtggacaaagagcaaatacgcgtacttgaaccagccggctcttggatctgcagattcacttgagagaaagaggttttcgactta

SEQ ID NO: 149547 - DNA, 378 bp, Arabidopsis thaliana columbia
gtgaaagagagaaaagagaatctctcagaaggtgagcctccaacaaagcgtgaatctctctttcggtctctatctctctatcgcgcgagatcgcatcaccggaaatctccttctacggtggtggtggtgacagttgaccagagatggcggcggagaatgagagaaaatctccttcagcagtctccgatatgggagcttgggcaatgaatgtgataagctccgttggaatcatcatggcgaataaacaacttatgtcctcttctggattcgcatttagtttcgctacaactctcaccggtttccacttcgctttaaccgcattggtcggtatggtatcaaacgctaccggattctctgcttcgaagcatgtacctatgt

SEQ ID NO: 149548 - DNA, 236 bp, Arabidopsis thaliana columbia
  unsure (1)..(236): unsure at all n locations
aaatgatataanaaggataccacaagcggtgaagctagcgagaagagcacgacgcaaanttnttgggaacgtgtgtctatcgagcattgtaaaancaanaatactcncttttgcatttgctggtcatcctttgatttgggctgcggttcttgttgatgtaaggacttgtctgcttgtgattttcaataatatgttgctgcttcgagagaagaaaaagattgggaacaaaaagtgtt

SEQ ID NO: 149549 - DNA, 239 bp, Arabidopsis thaliana columbia
gtcgagaataatggcatcatctttttgtgctttttttgccatcgttgccattttttctcgaagtttcttggggggtaggaaactgaggctgaaaaagaagttgactgttccagctgtgtccaggccagatgcgtcggtgcgcgccgtcgcagctgatccagatagaccaatctggttcccggaagcactcctccagagtggctagacggtagccttccctggggacttcggatttgatc

SEQ ID NO: 149550 - DNA, 443 bp, Arabidopsis thaliana columbia
  unsure (1)..(443): unsure at all n locations
gccgggtcaacaacgtncgagaataatggcatcatctctttgtgcttcttctgccatcgctgccatttcttctccgagtttcttgggtggtgggaaactgangctgaanaagaagttgactgttccagctgtgtccaggccagatgcgtcggtgcgcgccgtcgcagctgatccagatagaccaatctggttcccgggaagcactcctccagagtggctagacggtagcctccctggtgacttcggatttgatcctcttggtctttcatcggacccggacagtctaaaatggaacgtacaagccgagatagtccactgccgatgggctatgctaggagccgccgggatattcatcccagagttcctaacgaagatcggaatcctcaacactccgtcatggtacacggcgggagagcaagagtatttcacggacaaaaccacac

SEQ ID NO: 149551 - DNA, 464 bp, Arabidopsis thaliana columbia
cggacgcatgggccggtcaggctgctggagaagacagtgaagtcattctataccctcaggcaatattcaagggtcccttcaggaaaggcggcaacatcctggtgatgtgtgatgcttacacaccagctggtgatcctattccaaccaacaagaggcacaacgctgctaagatcttcagccaccccgacgttgccaaggaggagccttggtatgggattgagcaagaatacactttgatgcaaaaggatgtgaactggccaattggttggcctgttggtggctaccctggccctcaaggaccttactactgtggtgtgggagctgacaaagccattggtcgtgacattgtggatgctcactacaaggcctgtctttacgccggtattggtatttctggtatcaatggagaagtcatgccaggccagtgggagatccaagtcggtcctgttgaaggtattagttct

SEQ ID NO: 149552 - DNA, 301 bp, Arabidopsis thaliana columbia
gtttcaagggttttcgtttttatcttttcctccgcagaagaagataagaggttcaagaggaaggggatgccaggtccaggtgttgaggaaacaactgacgaggctcttatggatgccattcaagagcagatgaagctacagaaggagaacgatgttgctgctgaggatgtgaaagatggcaacgaagacgatgataatggtgatgacgacaacgaatagattagctgatgcagtctgatggaatgaggcttgcactgaacagttaagcgagctgaaaaggcctaaggtgatgcttaaactc

SEQ ID NO: 149553 - DNA, 334 bp, Arabidopsis thaliana columbia
ctcgcttttttccccatttcaacttttttttttcctctccagtgcactaggaaacaaaaaaaaggcaagatctatgggtggagcggatcgagagaagctcgaaaatggcgctggcgttcgatgagttcgggcgtccgttcattatactgagagagcaagatcaaaagactcgtcttagaggaatcgatgctcagaaagccaatatcgccgctggtaaagccgtggctcggatccttcgatcctctcttggacccaaaggaatggataagatgcttcaaggacctgacggagacatcaccatcacaaacgatggtgctacgatattggagcaaat

SEQ ID NO: 149554 - DNA, 388 bp, Arabidopsis thaliana columbia
  unsure (1)..(388): unsure at all n locations
agacaaatttcactcgctcatctctgtctgaatctcacaagaagaagtgaaagatggtgaagatgtgttgtattggagctggggatgttggtggaccaacaatggcagtgattgcattgaaatgtccagacgttgaagtagcggttgttgatatctctgtaccacgtatcaacgcttggaacagtgacacgcttccgatttacgagcctggtcttgatgatgttgtgaagcaatgccgtggcaagaaccttttctttagtactgatgttgagaaacatgttagggaagctgatattgngtttgtttctggcaacaacaccgactaagactagaggtcttggtgctggtaaagctgcggatcttacgtactgggagagcgctgcgcgta

SEQ ID NO: 149555 - DNA, 281 bp, Arabidopsis thaliana columbia
aacaacgtcgagaataatggcatcatctctttgtgcttcttctgccatcgctgccatttcttctgcaagtttcttgggtggtaagaaactgaggctgaagaagaagttgactgttccagctgtgtccaggccagatgcgtcggtgcgcgccgtcgcagctgatccagatagaccaatctggttcccgggaagcactcctccagagtggctagacggtagcctccctggtgacttcggatttgatcctcttggtctttcatcggacccggacagtctaaaat

SEQ ID NO: 149556 - DNA, 384 bp, Arabidopsis thaliana columbia
  unsure (1)..(384): unsure at all n locations
gtccgcaagagaaggcatcgaagcagtaggaggaccttatattcctttgaagacaggaaggagagatggacttaaaagcaggacggatatgctcgagtcatatcttcccgaccacaacgagagtatctccgtcgttcttgaaaagttcaaatccatcggtatcgacactcccggcctcgtcgccctcctagggtcacacagcgtgggaagaactcactgtgtcaagctggtccatcgtttgtaccctgaggtggacccgtccttaaaccccgaccacgtncctcacatgctacacaagtgtcctgactcgatccctgacccaaaggcggtccaatacgtgcgtaacgaccgtggcacccccatggtgctagacaacaattacta

SEQ ID NO: 149557 - DNA, 140 bp, Arabidopsis thaliana columbia
cggacccgtgggcttctctgctactgctccttcgcgaagaagcatagactaaggtttagggtagaatataatggcgggttggcagaagaatttacagattgttattcgtcaagttggtaaaagagttaaggacagtcaca

SEQ ID NO: 149558 - DNA, 165 bp, Arabidopsis thaliana columbia
ttttcgattttttcaaaaaatcccataactttcccaacgaaaaatgttccgatcaatgattgttcgatctgcttccccagtgaagcagggtcttctccgcagaggattcgcctctgaatctgttcccgatcgcaaagtcgtcatcctcggtgccgccggtgggat

SEQ ID NO: 149559 - DNA, 472 bp, Arabidopsis thaliana columbia
gcggaatcttttctctccaaattctcttctctctgaatcaatccaatcatggttgagccggcgaacaccgttgggattccggtgaaccacatgccattgttgaaggatgagctcgatatcgtgatccccacgatccgtaacctcgatttcctggagatgtggaggccttttcttcagccttaccatctgattatcgtccaagatggagatccatcgaagaccattgctgtccctgaagggttcgattacgaactctacaacaggaacgacatcaaccgtatccttggtcctaaagcttcctgcatttccttcaaggactctgcttgtcgttgcttcggctacatggtctccaagaagaagtacatcttcactattgatgacgattgcttcgttgctaaggatccatctggaaaagctgtgaacgctcttgagcaacacatcaagaaccttctctgcccatcaacttcatttt

SEQ ID NO: 149560 - DNA, 398 bp, Arabidopsis thaliana columbia
cggggcgggccaggcgtacgaaatcttttctctccaaattctcttctctctgaattaatccaatcatgatttatccggggaacagggatttaatgggggtgagaccacataccattgttgaaggatgagctcgatatcgtgatccccacgatccgtaacctcaatttcctggagatgtggaggccttttctttagacttaccatctgattatcgttcaagatggagatccatcgaagaccattgctgtccctgaagggttcgattaccgaactctacaacaggaacgacatcaaccgaatccttggtcctaaagcttactgcatttccttcaaggactctgcttgtccttgcttccgctacattgtctccaaaaagaagttcatcttcactattgatg

SEQ ID NO: 149561 - DNA, 310 bp, Arabidopsis thaliana columbia
aactcagccagagagacttgttggacatcaataccacgagctaagaggtcagtggtgatgagaacacgggaggaaccagacctgaactctctcatgatgatgtccctggtgttctggtccatgtctccgtgagttgcagagactgtgtggtcacggcttctcattttgtctgtgagccaatcaaccttacgcctggtgttcacgaagatgacactctgagtgatggcaagagtctcgtagagatcacagagtgtctcgagcttccactcttctttcttaacgttgacgtagaactgcttgataccttcaa

SEQ ID NO: 149562 - DNA, 390 bp, Arabidopsis thaliana columbia
  unsure (1)..(390): unsure at all n locations
gagaaattaacatggcgtcttttgcaaccatcgccttcgtacaaccttctgccgccgtgaaaggacttggaggtagctctgttgccggagctaanctcttcatcaaaccttctcgccaaagcttcaaaaccaaatccaccagagctggtgctgtggtggctaagtatggagacaaaagtgtatactttgatttagaagatttgggtaacacaacaggacaatgggatgtgtatggatctgatgctccttctccttataacccacttcagagcaagttctttgagacatttgctgctcctttcacaaagagaggtttgcttctcaaatttttgattcttggaggaggctctttgcttacatatgttagtgcgaactctaccggcgatgttc

SEQ ID NO: 149563 - DNA, 289 bp, Arabidopsis thaliana columbia
cattgcttcatcattcccaaatcatcaacttaatcgtttctctcaaatttagggttttctctttgctcgaaagtcttgcggttttctgaatcatctctatctggtttgagggtttcgtttgatatctggagaaaaggggttttctgggaaacaaaggaagttcataaattccgcggatctttgatcttattcgatctttcaatttattatataaaaaagcgtgaaatgaagattattgaatgggagtccgaaagggtgggtaaaaaagaaagtcccacgccagtagtag

SEQ ID NO: 149564 - DNA, 270 bp, Arabidopsis thaliana columbia
ccgatcttaagttcagaagacgatgtcagaggtggaaatagagaacgctgctacgatcgaaggaagacaccgctgcggatgcgccggtgacggatgcggccgttgagaagaagcctgcagcgaaaggacgaaagacgaagaatgttaaggaagtgaaggagaagaagactgttgctgccgctccgaagaagagaactgtttcatctcatcctacttacgaagagatgattaaggatgcgattgttacgttgaaagagagaacttgatcta

SEQ ID NO: 149565 - DNA, 370 bp, Arabidopsis thaliana columbia
cgaaagcctcttttcagaaccgaagctctttactttcgtccaccgggaaatatgccagtcgacgtagcctcaccggccggaaaaaccgtctgcgtcaccggagctggtggatacatcgcttcttggattgttaagatacttctcgagagaggttacacagtcaaaggaaccgtacggaatccagatgatccgaagaacacacatttgagagaactagaaggaggaaaggagagactgattctgtgcaaagcagatcttcaggactacgaggctcttaaggcggcgattgatggttgcgacggcgtctttcacacggcttctcctgtcaccgacgatccggaacaaatggtggagcccgccgtgaatggag

SEQ ID NO: 149566 - DNA, 127 bp, Arabidopsis thaliana columbia
gaaaaagaaatcttcacaatcaatcaaagtgaagtaggagaattggcaggttctaactgtggatgtggctcctgctgcaaatgtggtgattcgagcagtttctggaagaactacaacaaggagtgtg

SEQ ID NO: 149567 - DNA, 287 bp, Arabidopsis thaliana columbia
gggcgaccacgcgtccgagagagcagaatctgatccatcccacctttttcaattctcaggcaaagataagtcaaacttgaaaaaatggaagggactgtgttcacgccttgtttggaaggaatgaagcatgtcaaatctgatcaaggcgagatgcttactaagccatttttagagctttgcaagaccatcttgcctgttatagataaatttggagctgctatgactctcgtgaaatctgacattggtggcaacataacgaggttggagaagaactacttatctgatcc

SEQ ID NO: 149568 - DNA, 451 bp, Arabidopsis thaliana columbia
acaacaatggcgtctcttcaacaaactctattctctcttcaatccaaactcccaccatcctccttgcaaatggccagatctctcccactccgaaaaaccttcccaatccgaatcaacaacggtggaaacgccgccggagcaagaatgtcagccaccgcagcatcaagctacgcgatggcattagcagacgtcgcgaaaagaaacgacacaatggaattaacagtcacagacatcgagaagctcgaacaagtcttctcagatccacaagtactaaacttcttcgcgaatccaacaatcaccgtcgagaagaaacgtcaagtcatcgacgacatagtgaaatcgtcgtctcttcaatctcacacatctaacttcctcaacgtcctcgtcgacgcgaatcggatcaatatcgtgacggagatcgttaagggagttgagttggtttacaataagc

SEQ ID NO: 149569 - DNA, 376 bp, Arabidopsis thaliana columbia
gcgtaaaactctctctctctctctcttggtcttcctcactcttaacgaaaatggactctttaacactgttcttcaggggtgcactcgtcgccgtcggtatctactggttcctctgcgttctcggtccagcagagcgtaaaggcaaacgagccgtagatctctctggtggctcaatctccgccgagaaagtccaagacaactacaaacagtactggtctttcttccgccgtccaaaagaaatcgaaaccgccgagaaagttccagacttcgtcgacacattctacaatctcgtcaccgacatatacgagtggggatggggacaatccttccacttctcaccatcaatcctcggaaaatctcacaaagacgccacgcg

SEQ ID NO: 149570 - DNA, 436 bp, Arabidopsis thaliana columbia
gctggtttcgatgggattgagatccacggggcgcatggttaccttattgatcagtttttgaaagatgggatcaatgaccgtactgaccaatacggaggatccattgcaaaccgttgtagattcttgaaacaagtagtggaaggtgtagtttcagccataggagctagtaaagttggtgtgagggtatctccggctatagatcacttggacgcaactgattctgacccactatcactcgggctagccgtggttggcatgctcaataagttacaaggtgttaatggctcaaagctcgcttaccttcacgttacacaacctcgctaccacgcctacgggcaaacagagtcttgaaagcaagggagtgatgaggaagaagctaagctaatgaagagcttgaggatggcttataatggaacctttatgtttagtggaggat

SEQ ID NO: 149571 - DNA, 399 bp, Arabidopsis thaliana columbia
cgtccaggtgaagttaggaggtgagactttgacgattggtcaagtagccgccgtggctagaggaggaggaggatctacggtggagctggcggaggaggctcgtgccggagtcaaagcgagtagcgaatgggtgatggagagcatgaaccgaggaacggacaggtattggagttaccacagggtttggtgcaacttcccatagaagaaccaaacaaggcggagcacttataaatgagcttattaagttcttgaatgccggaatatttggccccggcgccggggacacgtcacacacgttgccaaagccgacaacaagagcggcaatgctcgttcgtgtcaacactctcctccaaggctactccggtatacgcttcgagattctcgaagtaattacaaagc

SEQ ID NO: 149572 - DNA, 374 bp, Arabidopsis thaliana columbia
gcgacgaagctgatttctccgccgttgtcttgtccgtgggttacttcaagagaggtgataatcagagggcttccacggcggagaagagaatggatggtcacgaagagaaacagagtctctgctgtcacggccatgattgtggagccactttctgttgtttcttcttcagcaattcagattcatcaatggtgggaacaaaaccctaattcggtactgttaatgacggaggctactggtggttattcgttggctagctattatacgtctttgggtttgtttgttatctctgttcctggtctttggtctctaatcaaacgctctgttaaatcaaagatagtgagaaagacgtttgttggtaatgacgtcaagaagga

SEQ ID NO: 149573 - DNA, 257 bp, Arabidopsis thaliana columbia
caaaacactttcacacgatcggataaaatggcggagaagagctttaagtacatcatcctcggcggcggcggcgtctgccggatacgcaggtaaggagtttgccaatcaaggggttcaaccaggagaattggctgttatctcgaaagaggcggtggctccatatgaacgccctgcacttagcaaggggtatttgtttcctgaaggggctgctagacttccaggttttcattgctgtgttggtagtggtggagaaaaac

SEQ ID NO: 149574 - DNA, 158 bp, Arabidopsis thaliana columbia
aagacaaaccaacatcactcttgaagattatctggaagcacaaattatccatcccacaaagagtaagaaacattggttcttgataagaaagaaagaagaggaagaagatagtcatgattcatgaagaatattaaaaagcacgtcatcaacaacacttg

SEQ ID NO: 149575 - DNA, 351 bp, Arabidopsis thaliana columbia
aatcaatccttctttaatttacttattcttagtataacgttcacaccttttcttacacatttacaactatatatggagtcggcacggagcctcgagcacgtgctctccatgcaaggtggcgaggatgacgcgagctacgtcaaaaactgttacggtccagcggcagctttagccttgagcaaaccaatgctgacgacagccatcaactccataaagctcaccgaaggttgctcctctcacctgaaaatagccgatttaggttgcgcaatcggagacaacacgttttccacggtggaaacggtggttgaggtgttagggaagaagctagccgtgattgacggtggaaccgag

SEQ ID NO: 149576 - DNA, 459 bp, Arabidopsis thaliana columbia
gctgcttggtatatctgtggctcttatgctatgtggatctgtgactttcttcatcgggtttctgttgatgccttgggttctggctctgattttggttttctatgtcgctggcatcgtttctgccatttctatggtcgggaggtcgattctctgttacgtcttgacgccaccttctccttccggaaaggagatttctgaatggaagcttctgtgaaatgattaaacaacagaggtgaagaatctatacatcatccggaagcagagcagagcgaagcagaacaaaaaaaagaagaagaaggattgattatataaacacatatatccgatagagtttttctatgttctttatctgtattttggtggggggggtttgggaaaatcatgtggatatcagggagttttatatttctttacatttcgaaaaaagaatttttctatttaactactgttagaaataga

SEQ ID NO: 149577 - DNA, 415 bp, Arabidopsis thaliana columbia
attatatgttaaactctctcccactatatatatgtatcctccttcttctgtatttctcacattggttaccaaaccctgtggggaacacacccacacgtgcgtacacacacaaagacactgcatcctctcaaaatatgcttgttcacgactcttttcgtggcggcggtatcagcggcggctgctgatttcaacactgacgtcaacgtagctgggtgaaatggccgtgggaagatactcagcaacggacaggtccttactattttcttagacaaaatctttggtttcggacttcaattcaatacagagtatttgggttggaaagattgatatgcagattaagctcgttcctgggaactctgtaggaacagtcacaacttattacctaaaatacgaaggatccacttgggatgagaat

SEQ ID NO: 149578 - DNA, 387 bp, Arabidopsis thaliana columbia
  unsure (1)..(387): unsure at all n locations
tcggtcgaccacgcgtccgaaaaattctctgatcagacggtcgattggatcggagatttaaggtaaagaaaaaatggcgcaggaatcgttgatctacagtttcgtagctcgcggcacggtgatcctcgttgagttcactgatttcaaaggtaatttcacctcaatcgctgctcagtgcctccagaagcttccgtcttcgaacaacaagttcacctacaactgcgacggtcataccttcaattaccttgtcgaagatggattcacctattgtgttgttgcggttgattctgctgggaggcaaattcccatgtcctttttggaaagaagtaaagaagattntaacaagcgatatggtggtggaaaggctgcaactgctcaagcaaacag

SEQ ID NO: 149579 - DNA, 428 bp, Arabidopsis thaliana columbia
gagagatcttaacacaaaacaaagcaaacaccaaaaaaaacagagatgggtttggttacagatgaagtgagagctagggcagagaaatacacaggagatgagatatgccgtgagaagacaaaggagtttctcaaggaagtttctatgcctaatggtttattgccattgaaggacattgaagaagttggttacgacagagagacaggtattgtctggctgaagcagaaagaagagcatcacccacaagtttgaagccattggtaaacttgtctcttacgccaccgaggtcattgcacaggtggaggtcggaaagatcaagaagcttaccggtgttaaagccaaggagcttcttatttgggtcactctcaatgagcttgtcttggagcagccgacaggttcaggggagatcaatttcaggacaccaactg

SEQ ID NO: 149580 - DNA, 302 bp, Arabidopsis thaliana columbia
atttgtaagaaaatggcttccaagactttgcttcttttgggtctctttgcatttcttgtcatggtctcagaaatggctgccgcgggcacggtgaagtcagagagtgaggaaactgtgaaacctgaacaacatggtggtggattcggtgacaatggaggaggaagataccaaggaggaggcggccatggtggccacggagggggaggataccaaggaggaggaggacgataccaaggtggcggtgggcgacaaggaggaaggggaagtttctgtcgccactgatgtttgttcaaaggttacca

SEQ ID NO: 149581 - DNA, 434 bp, Arabidopsis thaliana columbia
gccgctttgaatctccggcgacttgacagagaagaacaaggaagaagactaagagagaaagtgggagataatccaggagattcattctccgttttgaatcttcctcaatctcatcttcttccgctctttctttccaagctcataaaaaatggctgaggctgatgatattcaaccaatcgtgtgtgacaatggtaccggtatggtgaaggctggatttgcaggagatgatgctcccagggctgtttttcccagtgttgttggtaggccaagacatcatggtgtcatggttgggatgaaccagaaggatgcatatgttggtgatgaagcacaatccaagagaggtattcttaccttgaagtatcctattgagcatggtgttgttagcaactgggatgatatgggaaagatctggcatcacactttctacaatgagc

SEQ ID NO: 149582 - DNA, 394 bp, Arabidopsis thaliana columbia
acgcaagggaccaactctccttgaggctcttgaccagatcaacgagcccaagaggccgtcagacaggccccttcgtctcccacttcaggatgtctacaagattggtggtattggaacggtgccagtgggacgtgttgagactggtatgatcaagcctggtatggttgtgacctttgctcccacaggattgaccactgaggtcaagtctgttgagatgcaccacgagtctcttcttgaggcacttccaggtgacaacgttgggttcaatgttaagaatgttgctgtcaaggatcttaagagagggtacgtcgcatccaactccaaggatgaccctgccaagggtgctgctaacttcacctcccaggtcatcatcatgaaccaccctggtcagatt

SEQ ID NO: 149583 - DNA, 445 bp, Arabidopsis thaliana columbia
caaaaaaaaaaaaaacagaaagtaacatgagatctctcttattagccgtgtgcctggttcttgctttgcactgcggtgaagcagccgtgtcttgcaacacggtgattgcggatctttacccttgcttatcctacgtgactcagggcggaccggtcccaaccctctgctgcaacggtctcacaacactcaagagtcaggctcaaacttctgtggaccgtcagggggtctgtcgttgcatcaaatctgctattggaggactcactctctctcctagaaccatccaaaatgctttggaattgccttctaaatgtggtgtcgatctcccttacaagttcagcccttccactgactgcgacagtatccagtgagacaagcagaaaatcttaaaggaagctactacatgaactataataacctaattattaataaatgagggcattggttt

SEQ ID NO: 149584 - DNA, 497 bp, Arabidopsis thaliana columbia
  unsure (1)..(497): unsure at all n locations
aaaaaccccaaaaactttacattcttaacaatttcaaccctatgggcttacttgatcatctctgggatgatactgtcgctggtccacggccagagaactgccttggcaagcttcgtaaacaccataccttcagtttccgacctagctccggcaatgatcaatcggaagctggaagtgcgagatcgtacggtgaggattcgctaccggaagaagcagtgaaagttacacgtagtatcatgataattaaaccaccgggttaccaaggcagttcagctccagcttcgcctgccggttcaactccgccgctatcacctttctctccgccgctgtctccgttctctgggggaaaggaaccctttcggtttaggagacggtcgacgtcggatgcgttcgagaaggcagcaggaggatcagagactgtaccaaagagctctcctnctacttacggcatgtgatctctaacacacaacacaagtcttgaaaaagagaagagaaga

SEQ ID NO: 149585 - DNA, 420 bp, Arabidopsis thaliana columbia
ctgcttcatagttcatacgattcttcgattcgtcttcttcaatcagtgaagaagaacggaaaagatggctaaagagagagaccaaaacactaaagacaaaaacctcctcatctgtttcttatggaacttctccgccgagcttaagctagctctaatggcgttactcgttctctgcactttagctactctcctcccttttctaccttcttctttctccatctccgcttccgaactccgtttctgcatctcacgcatcgccgtaaactccacctccgtcaacttcaccaccgtcgtcgaaaagccagtcttagataacgctgtcaagttaactgagaagccggtgttggataacggcgttacgaaacaagccgtaactgaagagaaggtgttaaataacggcgttattaaacggacgtttac

SEQ ID NO: 149586 - DNA, 407 bp, Arabidopsis thaliana columbia
atcaaaatgtcttctcatactgcaactaagtatgatgttttcctaagtttcagagggcgtgacactcgccacaacgtcatcagttttctctacaaagaactggttcgaaggagcattcgaaccttcaaagacgacaaagagctggagaatggccagaggttttcgccggagctcaaaagccccatcgaggtgtcaagattcgccgtcgttgttgtctcagagaactatgctgcgtcttcttggtgtctcgatgagctcgtaacgatcatggatttcgaaaaaaagggttccatcaccgtgatgcccatcttctacggcgtggaaccgaatcatgtgaggtggcagaccggagtactcgctgaacagtttaagaaacatgcgagtagagaagatcctgagaaagttct

SEQ ID NO: 149587 - DNA, 420 bp, Arabidopsis thaliana columbia
  unsure (1)..(420): unsure at all n locations
gaacattcttgtacgagacttagctagtgtgtacaaagtgggattcttgctcttgctctgtaggagagaccaactgaccctgatgtatttcgactgcttggagaagtaaattatgaacttaacaactatgaaggcagtatcgctgcatacaaaatttctgaaaaggtttctaaagggattgatcttgaagttacacgaggcctcatgaatgcgtatttagctgcgaagaaaccagacgaggccgtcaaatttcttctagacactcgtgaacgtctgaatacaaagaaaacaagcacaactgacagtgttacagatgaaacaaatctagacccaattcaggttgagttacttctcggaaaagcgtattcagactggggacatatcagcgacgcgatagctgtttatgaccagntaatcagt

SEQ ID NO: 149588 - DNA, 192 bp, Arabidopsis thaliana columbia
cgttcgcccgttaaaattctcgttcatctgcccgtaaatttatttatgatcatattcatttatatcgtgtcgtgaaagaagctaatgtggagcttccatgtctaatcttgtttaagcttttcttctacttctctctcctgagactcgatcactagttttttttcggggtaaagagatcgaatgtgtcttatg

SEQ ID NO: 149589 - DNA, 451 bp, Arabidopsis thaliana columbia
taaacgttttactttgtgctgcactactcaaccttaatggccgcctcaacaatggctggctgctcccctgccttcgccggtaaggccgtcaagctttcccccgcggcatctgaagtccttggaagcggccgtgtgacaatgaggaagactgttgccaagccaaagggcccatcaggcagcccatggtacggatctgaccgtgtcaagtacttgggtccattctctggcgaatcaccgagctaccttaccggagagttccccggagactacggatgggacaccgccggactttcagctgaccccgagacattcgcaaggaaccgtgaactagaagttatccacagcaggtgggccatgctcggagccctaggctgcgtcttccctgagcttttggctagaaacggagtcaagttcggagaggcgggttggttcaaggcccgttcacagatct

SEQ ID NO: 149590 - DNA, 432 bp, Arabidopsis thaliana columbia
  unsure (1)..(432): unsure at all n locations
aaaaaaaaaaaaacagaaagtaacatgagatctctcttattagccgtgtgcctggttcgtgctttacactgcggtgaagcagccgtgtcttgcaacacggtgattgcggatctttacccttgcttatcctacgtgactcagggcggaccggtcccaaccctctgctgcaacggtctcacaacactcaagagtcaggctcaaacttctgtggaccgtcagggggtctgtcgttgcatcaaatctgctattggaggactcactctctctcctagaaccatccaaaatgctttggaattgccttctaaatgtggtgtcgatctcccttacaagttcagcccttccactgactgcgacagtatccagtgagacaagcagaaaatcttaaaggaagctactacaagaactantataacctaataataataaatgagg

SEQ ID NO: 149591 - DNA, 327 bp, Arabidopsis thaliana columbia
ggggactgtgctgctagaggtgctgatttatttgaaagtatagctgcagaaatcatcagtgcggtgatactaggtggaacaatggctaagaagtgcaaaattgaagatccatcatgctttatcctttttcctctagttgttcattcttttgacttgattatatcctcaattggtattctatcaatcaagggaacacgtgatgctagtgtgaaatctccggtagaggatccaatggctgtacttcaaaaaggatattctctgacaattatattagcttgtataacatttgggcgcgtcgtacttcgctggcttgttttacacttaaac

SEQ ID NO: 149592 - DNA, 471 bp, Arabidopsis thaliana columbia
  unsure (1)..(471): unsure at all n locations
ccctagccgctttactctcttgcgatatctctgagatttgtttgacagtctctaaccatggggaaagagaagtttcacatgaacattgtggtcattggccacgtcgattctggaaagtcgaccaccactggacacttgatctacaagttgggtggtattgacaagcgtgtcattgagaggttcgagaaggaggctgctgagatgaacaagaggtccttcaagtacgcatgggttttggacaaacttaaggctgagcgtgagcgtggtatcaccattgacattgctctctggaagttcgagaccaccaagtactactgcactgtcattgatgctcctggccatcgtgatttcatcaagaacatgatcactggtacctcccaggctgattgtgctgtccttatcattgactccaccactggtggttttgaggctggtatctncaaggatggtcagacccgtgagcacgctcta

SEQ ID NO: 149593 - DNA, 461 bp, Arabidopsis thaliana columbia
cttctggttgcgtttgagtccgtacgaaaacaaaagaaaagagagagatggcggaagagaagaaagcggcaatcagtgtctggactaccgtgaagcccttcgtcaatggcggtgcctctggtatgctcgctacttgcgttatccagccgatcgacatgattaaggtgaggattcaacttggtcagggatctgcagccagtataaccaccaacatgcttaagaatgagggcgttggtgccttctacaagggattatctgctgggttgctgaggcaagcaacttacacgacagcccgtcttggatcattcaagttgctgactgcaaaggcaattgagtctaatgatggaaagcctctaccgctgtatcagaaggcactatgtggtctgacagctggtgctattggtgcttgcgtcggtagtccagccgatctagcacttatcagaatgcaggccgataatact

SEQ ID NO: 149594 - DNA, 458 bp, Arabidopsis thaliana columbia
attttctataaagagataacaaacttcagaaacttctagggccatttttattccggtgcatggtaatcatgatatctgttgtaatgatcactgagttacttttggagtacacgacggctcttgctaaactcaccgccggggttcttccgagacggcaaggcgacagaaatgttatacgtattggcggtttctctctgccttgtcctcctagatcctcacctgttccagatttttcttctcatcttggcgatttctgaactctgcgctacgccttaatctcaattttggtttttcaccggagattatgactgccaagacttttttcccggcgtctgatctctccgtctgtagaataccttttttgtattttcttaaattttttgttttgttcctgaattttgaatggctcagagttgtaaaagatgtatcgaattataatagagactatgatttaactc

SEQ ID NO: 149595 - DNA, 394 bp, Arabidopsis thaliana columbia
gactgagactgtgtttcaacattgagggtgggtgtatgctaagtgtgttgatctttcggggagaaggagcctgatagctggaacgctatcaagtttggaacagttttggaaaatgttgtgtttgatgagcacaccagagaagtggattactctgataaatctgttacagagaacacacgtgctgcctacccaattgagttcattccaaatgcgaaaataccttgtgttggtccacaccccgacaaatgtgatacttctggcttgtgatgcctttggtgttctcccacctgtgagcaagctgaatctggcacaaaccatgtaccacttcatcagtggttacactgctctggttgctggcacagaggatggtatcaaggagccaacagcaacattc

SEQ ID NO: 149596 - DNA, 288 bp, Arabidopsis thaliana columbia
gtcattggttacaagattcagtccgacactataatttgtggagttgactgcggcggcggcgggatccttggcatggggtgggcttttggtggcatgatcttcatccttgtctactgcaccgtcggtatctcaggtggtcacataaaccctgcggtgacgtttggtttgttcttagcccggaaggtatcgctgattatggcggtgctttacatggtggctcagtgtttgggtgctattagtggagttgagcttgataaggtttcttaaagctctcactttgtttattac

SEQ ID NO: 149597 - DNA, 238 bp, Arabidopsis thaliana columbia
ggagggaagaaaaaagttaggttcgaaacgaaagtaaactagttaggtgaaaagcgaaacaacacccacagagcaatggcccctgctctcgccgttacacgagatctcaccgccgtcggatctccggagaatgctcctgcgaaaggacgtgcttcggtttacagtgaagttcaatcaaagccgattaacaacactcttcctttggcttctgttctcaaaggagctttcaaaatcgtcg

SEQ ID NO: 149598 - DNA, 418 bp, Arabidopsis thaliana columbia
ctcaaattcaatcatcaatgttaacggacgagagagaagtagtctgtgtcaccggcgccagtggctgcatcggctcgtggctggtccatcagctcctcctccgcggctactccgtccacgccaccgtgaaaaacctccaggatgagaaagagacgaaacatctagaaggtctcgaaggtgcagccacacgcctccatctattcgagatggatctcctacaatacgacaccgtttccgccgccatcaatggttgctccggcgtattccacctcgcatcaccttgtatcgtcgatgaagtccaagatccccagaagcaactacttgacccggcggttaaaggaaccataaatgttctgacggcggcaaaagaagccaagtgtaaaaagagtgtgtgacgtcttcgatatcggcgattact

SEQ ID NO: 149599 - DNA, 315 bp, Arabidopsis thaliana columbia
tttagggttcctcttctctgatccttttgttaattttcaccgtttttttgacagttccaaagtttcttcaaattctaggggagtgcattttcaaattctggtgaaacattatttgtgtttcaatggtgaagcttagatcttgcgctaacagttaagaaaatctcatctttttcctgtgaaagttttggcctttttagattttaccctttctatattcattaaaccgttcattgatttcttctgagtcattagaggttgatttattgcacgccacttctctttcaattgtacattggctgctacatatcttctcca

SEQ ID NO: 149600 - DNA, 449 bp, Arabidopsis thaliana columbia
aaggaaacgaaaatatgatgatgaagtcgttgatctgtctctctctcatcctcctccgacttgtctccgtcgtggaaggtctcggtggtggtggtggtcttggtagccggaagccgatcaagaatgtatctgatccggatgttgttgcggtcgccaagtatgccatcgaggaacataacaaggagtcgaaggagaagttggttttcgtcaaggttgtggagggaacgacgcaagtggtctccggtacaaagtacgatctgaaaattgcggcgaaggatggtggtggtaagatcaagaactatgaggctgttgttgttgaaaagctttggcttcattctaagagccttgagtctttcaaggcgttatagatctttaattggatttttgtagatcgatctctctctcgggtatatctatctagcttttgatgatttgagactctgacgttt

SEQ ID NO: 149601 - DNA, 442 bp, Arabidopsis thaliana columbia
  unsure (1)..(442): unsure at all n locations
gttcttctctcttttaaataacctcttcacggaacccttctcactcacctatctcacgctagaatctctctctgccaatctcatcttcaacctctctctaactctcgttttcgattctacaatggctgacaagaagattaggatcggaatcaacggattcggaagaattggtcgtttggttgctagagttgttctccagagggacgatgttgagctcgtcgctgtcaacgaccccttcatcactactgagtacatgacctacatgttcaagtacgacagtgttcacggtcaatggaaacacaatgaactcaagatcaaggatgagaagacccttctcttcggtgagaagccagtcactgttttcggcatcaggaaccctgaggatatcccatgggccgaggctggagctgactacgtntgtgagtctactggtgtcttcact

SEQ ID NO: 149602 - DNA, 483 bp, Arabidopsis thaliana columbia
  unsure (1)..(483): unsure at all n locations
gcaaggaggatcatcgggtattggttatggtttgaagtatcaggccagatgtatatcggatggtaaagcagatagagatcacactagcttcctcactggaaccctaagcttgaaagaagaaaatgaggttcatttgcttcgtttgtcttctggtggatctgagctgttatgtgagggattgttctcgcatcctaatgaaatttgggaccttgcttcttccccttttgatcaacgcattntctctactgtcttcttcactggcgactcatatggagcagcaatatggcagattcctgagccatatggtcaatcgaattcttcaacatgggaatgtgttgcttccctagatgcacatgttggtaagattaattgcgttctttggtgtccctctggaaattctgacaagttaatcagcatggatgaacaaaatcttgtcttctggagtttagactcttcaaagaaaagtgcgaggttttatctaag

SEQ ID NO: 149603 - DNA, 452 bp, Arabidopsis thaliana columbia
aacacagacacggaagaagtagcttggttcttctctttgtgaaggtgaatgcgggagatggggactggagattctgcttcgagactgattctctggttctgcttagggtttttgattctaggtgttggatttgtgcaatgtggagttacttatgaccggaaagcacttctcattaatggacagagacgaatcctcttctctggctccatacattaccctcgaagcactcctgatatgtgggaagatttgattcagaaggcgaaagatggaggcattgatgtgattgagacgtatgtgttctggaatcttcatgagccttctcctggaaaatacgattttgaagggagaaatgatttggtgagattcgtgaagacgattcacaaagctggtttatatgctcatcttcggaattggaccttatgtttgcgccgagtggaattttggaggattcc

SEQ ID NO: 149604 - DNA, 418 bp, Arabidopsis thaliana columbia
  unsure (1)..(418): unsure at all n locations
ggagaagcgagaagagattaaaagattagaccttttcgcattcatggattcgaagttgagaagttttgtgatgggtctgttggtgatgactgcnatcttgaataattctggtgttggcgcgtggactggagagattcgtggtagagttgtgtgtgatgtctgtgctgattcttcaattggaccagaagatcatgttcttgaaggagctgaggttgcggttctgtgcataaccaaatctggagaagttgtgaactaccaagctttcacaaactcaaaaggtgtctacacagttgcagagacaatgccagagagcgaacgttgggacgcttgccttgcaagacccatcagcagcttccacacaccttgcaatcgcctacaccaaaccaataccggaatcaaattcacttataaccgccct

SEQ ID NO: 149605 - DNA, 421 bp, Arabidopsis thaliana columbia
cctcacttcactcgtccttgaaacttgagcttcaattacaaagaatggctgcttcaagtgctggcagcgcaaactacgtgcgcaagccacctccattcgcactggatgctttggagccgcatatgagcaaacaaactctggagtttcactggggaaaacatcacagagcttacgtggacaacctcaagaaacaggttcttggaaccgagcttgaaggcaagcccttagagcacattatccacagcacttacaacaatggtgatctcctccctgctttcaacaacgctgctcaggcgtgggaaccacgagttcttctgggagtcaatgaaaccaggtggtggaggaaaaccatcaggagagcttcttgctttgctagaaagagatttcacttcttatgagaagttctatgaagagttcaatg

SEQ ID NO: 149606 - DNA, 478 bp, Arabidopsis thaliana columbia
ttcttatgcggattctgagggagaagagcaacaccatgctgatcaaccgatacagaagcctggggaatcttctaccgttggaaacgaatcagatgggaaaggtaatgcagaagctactggagacttttctggaatggctcaagcctttcacatttcttccacaacagcaagggcaatctctatagtcatcgccttctctgctctcacccttccaatcttcatgaagtccctgggacaaggactggctctcaagaccaagcttctctcttacgcaacactactctttggtttctacatggcctggaacatcggagctaatgatgtcgcaaatgccatggggacttctgttggatctggagccttgacaatccggcaagctgtgatgacagctgcagttctcgaattctcaagtgctcttttgatgggaactcacgtgactagcacgatgcagaaaggaattctcatggctaatgtgttc

SEQ ID NO: 149607 - DNA, 461 bp, Arabidopsis thaliana columbia
cacccatgcgcactttagccactccctctcccccatgtttatcctgcgccatctccctgttacacgccatctccgtttatcccgaaataaccgcgtcgcttccgttgtatccgccgccgccgttcgccaggacgcttccctctggactccagctcctctctctctaatcgaatcagctgcagaatcgcttttccacatctcaatcgacatttcaaacgctccggatctcgtagcttcgtacacgagacccggtcagtatctccagatccgtgttcctgatgttgagaagccttcttttatggcaatcgcttctcctccttccttggcgtcttctcgtggtgctttcgaattcttggtcaagagcatcgctggttctaccgcggagattctctgcgggttgaagaaaggagagaccgttgagcttagctctgtgatgggtaatggtttcaatatcgatctga

SEQ ID NO: 149608 - DNA, 447 bp, Arabidopsis thaliana columbia
aaaccttaagatttcagcaaatgggatcgattttaagcttcgtctgggttaaaagcttggaggctatctgaagacagaacaaaggttcttgcttttgattcattgcccattttgagaagatgttcgaaggtcgtcctcgtgattcttgtctagtttcaacacttttcaccatgccaagccataaagaaacgaaatggagctttttggtttctgggaaacgatcttttctcaacaacgatgagtctgatcttcacttcaagaagatgtacaagcttactactgattcaagtgaaggagaagacaatggatcttcttcagattcaggaacacttatcccagggatgaacagagatgattcgttaagctgtttgattcgttgctctagagctgattactgctccattgcttctgtgaatcgtagcttacgttctttgattcgaagtggag

SEQ ID NO: 149609 - DNA, 438 bp, Arabidopsis thaliana columbia
  unsure (1)..(438): unsure at all n locations
aaaaaaatcgaatctctctctttctctctctaatggcggcgacattaggcagagaccagtatgtgtgcatggcgaagctcgccgagcaggctgagcgttaccaagagatggttcaattcatggaacagctcgttacaggcgctactccagcggaagagctcaccgttgaagagaggaatctcctctctgttgcttacaaaaacgtgatcggatctctacgcgccgcctggaggatcgtgtcttcgattgagcagaaggaagagagtaggaagaacgacgagcacgtgtcgcttgtcaaggattacagatctaaagntgagtctgagctttcttctgtttgctctggaatccttaagctccttgactcgcatctgatcccatctgctggagcgagtgagtctaaggtcttttacttgaagatgaaaggtgattatcatc

SEQ ID NO: 149610 - DNA, 405 bp, Arabidopsis thaliana columbia
gagtatgcaaacgtggagggggctttccatgagaaaggagcatcgtacatcaagtgggcaggtcaaatggcggtcgggctgtaagaccggagtgccatggatcatgtgcaagtcgcccgacgctcctgatcccgtgatcaatacctgcaacgggatgaaatgcggcgagacttttcctggaccaaactcacccaataagccgaaaatgtggactgaggattggacttcattctttcaggtttatggaaaagagccttatattagatctgctgaggatattgctttccatgccgctcttttcgttgcaaaaaatggaagttacatcaactattacatgtaccatggtggaacaaactttggaaggacttcatcttcgtatttcattacaggatactatgatcaagc

SEQ ID NO: 149611 - DNA, 469 bp, Arabidopsis thaliana columbia
gccgtgacgtcctcttcctctcactcctcctcgtcatcgccaccgtctccgctgtcggattggccgacgatgaagcagattgtgtctacacattcttccttagaaccggatcaaccttcaaagccggtacagattcgatcataagcgctagagtctacgacaaatacggagactacatcgggatccgaaacctagaagcatggggtggtttaatgggaccaggttacaactactacgagaggggtaatctcgacattttcagtgggaaagcaccatgtcttccgagcccagtctgttcattaaatctgacctctgacggctccggtgaccaccacggttggtatgttaactacgtggaagtcacgacagccggagttcatgcaaagtgctcgtaccaaagctttgatgttgagcaatggcttgcgttcgatacatcgccgtatgaagctagtgctgttcggaataactg

SEQ ID NO: 149612 - DNA, 452 bp, Arabidopsis thaliana columbia
ctctctcctccttctttttcttccacttctaacagtcacaatcttgtcgggagtcgagcagggctttgcttccgacaaggcactcctcgtgaccggccgcaacatcacggctgacggtggaaggtcgtcactgagagggaagaagcagaggagagcatcaggatgtaacttgttccaaggccgatgggtgttcgatgcttcttaccctttctatgactcgtccaagtgtcctttcatcgacggcgagtttgactgtctcaagttcggccgaccagacaaacagttcctcaagtactcttggcaacctgaatcttgcaccatcccaaggttcgacggtggggcatttctgaggaaatacagaggaaaacgagtcatgttcgtcggagactcactgagtttaaacatgtgggaaatcgtggcctgtatgatccatgcgtcggtaccaaacgcca

SEQ ID NO: 149613 - DNA, 489 bp, Arabidopsis thaliana columbia
ggaacagagaaaatggcagcacaagcacttgtgtcttcttcacttacctcctctgttcagacagctagacagatatttgggtcagaaccagttgcgtctgcctcacagaagaagagttcctttgttgttaaagctgctgcaactccacctgtcaagcaaggagccaacagaccattgtggtttgcttcatcgcagagtctctcttacttggatggcagcttacctggtgactatggattcgaccctcttggtctttcagacccagaaggtactggaggattcattgagccaagatggctagcatacggagagatcatcaacggacggttcgccatgttgggtgcagctggagctattgctcctgagattttaggaaaggctggtctgattccagcagagactgctcttccttggttccaaaccggtgtgattccaccagcagggacatacacttactgggcagacaattacacactctttgttctcgag

SEQ ID NO: 149614 - DNA, 456 bp, Arabidopsis thaliana columbia
  unsure (1)..(456): unsure at all n locations
gagaaacaacaagaagtagtaatggcttcctctatgctctcctccgccgctgtggttacatcggcgggtcaggccaccatggtcgctccattcaccggcttgaagtcatccgctgcattcccggtcacccgcaagaccaacaaggacatcacttccatcgcaagcaacgggggaagagttagctgcatgaaggtgtggccaccaattggaaagaagaagtttgagactctatcttacctccctgaccttagtgacgtcgaattggctaaggaagttgactaccttctccgcaacaagtggattccttgtgttgaattcgagttagagcacggatttgtgtaccgtgagcacggaaacactcccggatactacgatggacggtactggacaatgtggaagcttccattgntcggatgcaccgactccgctcaagtgttgaagggaagtgaagaatgc

SEQ ID NO: 149615 - DNA, 454 bp, Arabidopsis thaliana columbia
cagagatggggcagactttgttcgtggataccctttcagtatgcgcgaaggtgccataaccgcggtctctcatggcctgtggctcaacattcctgactatgatgctcccactcagcttgtgaaacctcttgagaaaaattccaggtatgttgatgcagtcatgaccattcccaaaggaactctttttcctatgtgtggtatgaaccttgcttttgaccgtgagctgattggtccggctatgtactttgggcttatgggtgatggacagccaattggacgctatgacgacatgtgggctggttggtgtgtcaaggtgatatgtgaccacatgggatggggagtgaagacgggtttgccttacatatggcacagcaaagccagcaacccattcgtgaacctgaaaaaggaatacaacggtatattttggcaggaagaggcgattcccgtcttcaat

SEQ ID NO: 149616 - DNA, 286 bp, Arabidopsis thaliana columbia
tgactttaccagagaagatcggtcagattactcaaatcgaacgcagagtcacttcttcctacgcctttacagatttcttcatcggaagtgcactaaacactggaggtagtgtaccgttcgaggacgctaagtcactctattgtgctgatatgattgatgcattacaccgatcagcgcaagcatcagcgtatgggaattccaattatctatagcactgtctctcctcacggcatcaataatgtataccgtgccactgattttcctcacaacatttttctctagccac

SEQ ID NO: 149617 - DNA, 478 bp, Arabidopsis thaliana columbia
caaaatcacaaaagtcatctaaactttgaagaatctttaccaacgagaatctcacaagggtgggaatcgtgcacgcctctggagttatctccggctccgatactccatctggtggattctgtagaagaaaaaatttcaatctttgttggattttctgggaaaaactcagatgggtttgctctgaatcgattggaaaatcaaaccggtgtggactctgcaaagttggttgatatgaacagtcttgtgagaagaaaacaagttgattctgttcatcttatcaaaaacgatggacctcatcagcttgccaagaaactatccgccgttgatcttgttgctattggagttgggacaacaattggagcaggagtgtatattcttgtgggaacggtagctagagagcacacaggacctgctcttgctgtatcattcttcattgctggagtagctgctgctctctctgccttgtgttatgctgagc

SEQ ID NO: 149618 - DNA, 429 bp, Arabidopsis thaliana columbia
gcttcgagtaatccaagtttggattatggattcaaaggagcagagattgctatggctgcttggtgttctgagcttgaatgcttggctaatccagtcacaagccatgttcaatcagctgagcaacataatcaagatgtgaactctcttggtttgatctcgtctcgtaaaacatctgaagctgtggatattcttaagctaatgtcaacaacgttccttgtggggatatgtcaagctgttgatttgagacatttggaggagaatctgagacaaactgtgaagaacacagtttctcaagttgctaagaaaggggtaaccacttgaatcaacggtgagttacatccgtcaaggttttgcgagaaggacttgcttaaggttgttgatcgtgagcaagtgttcacgtatgtggatgatccttgtagcgctacgtac

SEQ ID NO: 149619 - DNA, 408 bp, Arabidopsis thaliana columbia
ctatagtttgtttttgttcttcttataatctttatattttcagcaaacgaaagggaagtgtgtcagaaatctcagagggtgagaatcccaatgaggatcttacccgaacctcgaggttcggttccgtgtcttctccttcttgtgtcggttctcttatcagcgactctctcactcgctcgtgtcgtcgaagttgtcggttacgccgagagcaagatcaaaaccccccatgcattttcaggacttcgagtgacgatcgactgtaaggtgaataaaggccattttgttacaaaaggttcgggaaacattgacgacaaaggaaagtttggtcttaatattcctcatgacattgtcttcgacaacggagcgttaaaggaggagtgttacgctcagcttcacagggcggcggga

SEQ ID NO: 149620 - DNA, 423 bp, Arabidopsis thaliana columbia
agagcaccttatgctgattcctctccttttcttcctcaactcataaacccgatcggccgattgcttgacaattatccttgaaaggttcgattttgattattgggtttctctctgatcatggcggttgttgagactggagcagcagctactgctgctgatgcaggaggagtcgtgatccagccgccgccgtcttcaccaccatcttcaatgactagtcaagattccggcgtttcttccgatgatcagaaccatcactctaggatcgatcaagttctccggcacgatcaaggtctttacagcaagatcgggtcacacgtggcgagatccgacggcgttgacggtggtgagagctttaagcgtgatatgagagagcttcaggagcttttctctaagcttaatcctattggctgagagtttgttcct

SEQ ID NO: 149621 - DNA, 491 bp, Arabidopsis thaliana columbia
ccgacagagaaaaaaaatgtcttcgccaagcaaacgcagagaaatggatatgatgaagctgaggatgagcgattataaagtggaaacgatcaacgatggcatgcaagaattctatgttgaattcaatggtcccaaagacagtctctatcaaggaggtgtgtggaagataagagttgagcttccagatgcttatccttataaatctccatctgttggtttcattactaaaatttatcatcctaatgttgatgaactgtcgggttctgtttgtttagatgtgattaaccaaacttggagtcctatgttcgaccttgtgaatgtgtttgagacatttcttcctcagcttcttctgtatccaaacccatcagatccattgaatggagaagctgctgcgttaatgatgcgtgatcgtcctgcttatgagcaacgagttaatagatactgtgagaagtatgcaaagccaggggaaggttcagaagataagtctagcg

SEQ ID NO: 149622 - DNA, 488 bp, Arabidopsis thaliana columbia
tcttaaacgttttactttgtgctgcactactcaacctcaatggccgcctcaacaatgggtcggtcctcccctgccgggggcggtaaggccgtcaagctttcccccgcggcatctgaagtccttggaagcggccgtgtgacaatgaggaagactgttgccaagccaaagggcccatcaggcagcccatggtacggatctgaccgtgtcaagtacttgggtccattctctggcgaatcaccgagctaccttaccggagagttccccggagactacggatgggacaccgccggactttcagctgaccccgagacattcgcaagggacccgggaactagaagttatccacagcaggtgggccatgctcggagccctaggctgcgtcttccctgagcttttggctagaaacggagtcaagttcggagaggcggtttggttcaaggccggttcacagatctttagcgatggaaggctcgattacttgggaaacc

SEQ ID NO: 149623 - DNA, 492 bp, Arabidopsis thaliana columbia
  unsure (1)..(492): unsure at all n locations
gagaggatcacagcaatacagtgccttgagtgttcctgaactgacccagcagatgtgggatgcaaagaacatgatgtgtggctgctgaccctcgtcatggacgttacttgactgcatccgctgtgttccgtggaaagctgagcaccaaagaggttgacgagcagatgatgaacattcagaacaagaactcatcctactttgtggaatggatcccaaacaacgtcaagtccagtgtctgtgatattgcaccaaagggtttgaaaatggcgtctactttcattggtaactcaacctcaatccaggagatgtttaggcgtgtgagcgaacagttcacagctatgttcaggagaaaggctttccttcattggtacacaggagaaggcatggacgagatggagttcactgaagcagagagtaacatgaatgatcttgtcgcagagtaccagcagtaccaagatgctacagnncgagaggaagagtacgaggaggaag

SEQ ID NO: 149624 - DNA, 470 bp, Arabidopsis thaliana columbia
agaataattacgaagaaatggagaattttggtgaagggagaagaagtggaggcggaatgttgcgcgggctggctctaagcgccggggcggagtactatagactaccgtggaaaccaccggtgacggcgagtctcctggccgcgaacactctcgtttatctcaggccggcgtttatcgatcccgttattcctcacatcagtgaggtctggttcaatcctcacctcatcttcaagcataaggacttgaagcgtttatttctatcagcgttctaccatgttaacgagcctcacttagtctataacatgatgtcacttctctggaaaggtatcaagcttgagacatcaatgggaagcagtgagtttgcttcaatggtctttactcttattggtatgtctcaaggagtcacattgttgttagacaaatcgcttcttctcttgttgactatgacagaagctactacaacgagtatg

SEQ ID NO: 149625 - DNA, 387 bp, Arabidopsis thaliana columbia
aaacaatttctcattagcttacaatggcggatacacaccgtgtcgaccgtactgatagacaggttcagtttcagtcgccgtatgaaggcggccgacgtcaaggtcagtatgaaggtgaccgtggttacggaggtggcgggtacaagagcatgacgcctgaaagcgggccatctagtacccaagtattgtccctgttgattggaagccctgtcggcggatcggtactcgccttggctggattacttctagctggttcggtgatcggcttaatggttgctttaccactatttctcctcttcagcccggttatagtcccagcggctctaactatcgggcttgcaatgacaggctttttagcctcggggatgatcggtctaaccgggctta

SEQ ID NO: 149626 - DNA, 479 bp, Arabidopsis thaliana columbia
  unsure (1)..(479): unsure at all n locations
agaaaatggtcgtcgaggagtcatcatgcgtttacaagaacggagacgcgccagtggaggcgcgtgtgaaggaccttctggctcgcatgactttgccggagaagatcggtcagatgactcaaatcgaacgcagagtcgcttctccctccgcctttacagatttcttcatcggaagtgtactaaacgctggaggtagtgtaccgttcgaggacgctaagtcatcggattgggctgatatgattgatggttttcagcgatcagcgttagcgtcgcgtttgggaattccaattatctatggcactgacgctgtccacggcaacaataatgtctacggcgccactgtcttccctcacaacattggcctcggagccaccagagacgcagatttggtcagaagaattggagcagcaactgcacttgaagtaagagcgagcggtgttcattgggcattttcttcttgcgtggnccgtttgagagat

SEQ ID NO: 149627 - DNA, 449 bp, Arabidopsis thaliana columbia
agaaaacttcgtctctcttctctgcttcgccctctcatttcctgtgagataaaggcggagtggctctgcagttattttggtcatgcatcgattcttagagttcaaaatggttgatcaagttcagcaccccactattgcgcagaaagctgccgggcagttcatgcgttcaagtgtttccaaggacgttcaagtgggttaccagaggccttctatgtatcaaagacatgcaacctacggaaactactccaatgctgcatttcaatttcctccgacatcccggatgttggcaacaactgcttctcccgtgtttgtccaaaccccaagagagaaggggttcactaactttgcccttgactttctgatgggtggtgtttctgctgccgtctccaagactgctgctgctcctattgaacgtgttaagcttttgatccagaaccaggatgagatga

SEQ ID NO: 149628 - DNA, 328 bp, Arabidopsis thaliana columbia
gatttactgagtgaaaaaagcttatcgcggcgattagttcccggcgaagaagaagaagagagataagaaaatggcgactaatggatctgctagctcagcgcagctctctcagaaggaagctgatgtcaggatgatgtgtgccgctgaggttcatcttggaaccaagaattgcaattaccagatggagcgttacgtcttcaagagacgcaacgatggtatttacatcttcaaccttggcaaaacatgggaaaagctccagatggctgctagagttattggtgccattgagaacccacaggacatcatcgtccagtcagctaggccctat

SEQ ID NO: 149629 - DNA, 434 bp, Arabidopsis thaliana columbia
gaagaaacacgagtggaagcttttaaacaaaattaaaaaagagagagagaaatggcgaggtggtgaacatacgtgacgcaggtgccgttaaaaggaacggtggagaaacacttcaagaggtacaggaacgagaactatctcttccctgacactatcggccaccacatccaaagtgttactgttcacgatggcgaatgggacactcaaggaggcatcaagatttggaactacacactcggagatggaaaggaggaggtattcaaggagaggagagagatagacgatgacaataagatagtgaaggttgtaggattggaaggtcacgtgatggagcagttcaaggtgtatgagattgacttccaatttattcccaactctgaagaagattgcgtctgcaaaatcactatgatatgggagaagcgcaacgatgattt

SEQ ID NO: 149630 - DNA, 445 bp, Arabidopsis thaliana columbia
  unsure (1)..(445): unsure at all n locations
cgttttaaagaaaatccgtaggtcctttcaaaaggcaaatgatggcccaaaaggtggaagcccagggggggaaaggagccaacgtaggggacgatggatcgacacatgacgccgtgaccaagattcagctcgcagcaggcatagacggaattcaatatgttcagtttgattatgtcaagaacggacaacccgaacaagctcctcttcgtggtaccaaaggccgtgttctcccagctgatccgtttgtgattaaccatccagacgaacatctagtttctgtagaaggttggtatagccctgaaggtatcattcaaggaattaagttcatctccaacaagaagacttctgatgtcattggatccgatgaggggactcacttcactctacaagttaaagacaagaagatcnatggctttcatgggtctgccggnggcaatcttaattc

SEQ ID NO: 149631 - DNA, 494 bp, Arabidopsis thaliana columbia
  unsure (1)..(494): unsure at all n locations
cattaccaaaccatcatcatcatcatctcttggtgacagaagaaaagagttgaggaacggaggaaatggcagcacaggcgcttgtgtcttcttcacttacctcctctgttcagacagctagacagatatttggctcaaaaccagttgcgtctgcctcacagaagaagagttcctttgttgttaaagctgctgcaactccacctgtcaagcaaggagccaacagaccattgtggtttgcttcatcgcagagtctctcttacttggatggcagcttacctggtgactatggattcgaccctcttggtctttcagacccagaaggtactggaggattcattgagccaagatggctagcatacggagagatcatcaacggacggttcgccatgttgggtgcagctggagctattgctcctgagattntaggaaaggctggtctgattccagcagagactgctcttncttggttccaataccgtgtgacttcaccagca

SEQ ID NO: 149632 - DNA, 436 bp, Arabidopsis thaliana columbia
  unsure (1)..(436): unsure at all n locations
gacaacacaacacacacacacacagagagcaagcaaaagaggcggctagggatcagagagtgggtccttcactgaaagtggcttctttttcattctcttcttctccttcagattccttgcctcttcttcaagattctcctctcttccatgtgcgtttctgtgcttttgaagacgacgatgatgatgatgatgtctttatattgaaaccaaattcgtctccacgattgtttcttctgagttttgatttttcagatctcgcttcttttccgatttgttcaatcatcatggcttacctgatgtagtaattgggatcaaattcattcacaaagctcgagtttttattattagtggctactgttatctgtgtatagaagaagctngtgtgtgtggttctctacgtttcatgatcggtttaggtatctgttatatccggctc

SEQ ID NO: 149633 - DNA, 411 bp, Arabidopsis thaliana columbia
cgaaaatttcaatccgatttgaataatttctgttttcttatcggaacaaaaaaatctgcggggtctggaatctccggtgagtttgtcaatttcgaagaaatttgattgaaatggaggcgagaatcggccgatccatggaacacccatctacacctgcgattaatgctccggcgccggttcctcctccttctacgaggcggccgagagtaagagaagtgagctcgagattcatgtctcccatttcttcttcgtcatcgtcgtcttcctcttcttccgccggagatctccatcaattgacttcaaattctcctagacatcatcaccaacatcagaatcagagatcgacttcggctcagaggatgagacggcaattgaaaatgcaagagggagacgagaatcgtccttccgaga

SEQ ID NO: 149634 - DNA, 73 bp, Arabidopsis thaliana columbia
ggttttgtgacaaaagatattctaactggtttaaagatgcatgcaaggggttggatttgaatgtactgtgttc

SEQ ID NO: 149635 - DNA, 454 bp, Arabidopsis thaliana columbia
aaacaacaaatcatatacaagcaattatggtcacaaaaacaaaaacaatgtctctatcattgggactggtcctcttcatccttgggtctaccgtctccgtgacctcaacactagaaaacctttcaccggcagctgaaaacaaaggatattggtgtgtagcgaataaaaaagcaacagatgagcagctacaagcgaatatagattggtgttgcagctacgaaggaggattccgtgattgtacacagatcaatcccggtggagtttgctatgaaccaaatactctacgagaccacgcgtcgtacgtaatgaacttatattaccagaaccttggtagaaccaaagaccaatgcactttcaacggttctggctctgaagttactaaagacccaagccatgacgcgtgtattttcatatcttatgattaatgtatgtgtgggagatttttagccgaatc

SEQ ID NO: 149636 - DNA, 452 bp, Arabidopsis thaliana columbia
aatgagttctttgctttcgaagttgccgcaacctaaacagaattgaaaacagtacgtagtacgcatgagtcaaacaatggaggaatatcagtctaatgagagtgaagataaaagaagttggatttggagtaaggcggtaagtgttgggaagaaagttctgacagctggtgttgtagtgtcttcagctccacttcttgttccttcactttttgtcgcctcgacacttgccttcctctactcggttccgttttgtctcttcttggctaattatgcttgtacacaaaaggtcatgagtactctgcttcctgatactgaagaaactggtggagttggcaaggaggatgatgacgaatctggatttgatgagtatagcaagattggtcacggtgaaggcgcggctggagttggtgaggctgcacttttcaggggtaaagaagaacccattcccattc

SEQ ID NO: 149637 - DNA, 476 bp, Arabidopsis thaliana columbia
gaaagaggaagtgaaactattaggagtatggtacagtccatacgccataagacctaagatcggtgctgggtctcaaatcagtggatgatgattacgttgaggaaaatctgtttggatccaagagtgagcttcttctcaaatcaaacccggttcacaagaaagtccctgttctcctccacaacaacaaaccgattgtcgagtctctcaacatcgttgaatacattgatgagacgtggaactcatctgcaccgtccattcttccttcacatccttatgatcgtgctcttgctcgcttttggtctgacttcgttgataacaagtggtttccggcgttgagaatggcggcgatcactaaatcggaagacgcaaaagcgaaagccatggaagaaagtggagaagggttggtgcaactcgaggatgcgtttgtttctataagcaagggaaaccctttttcggcggtgagcaatcgggttatg

SEQ ID NO: 149638 - DNA, 439 bp, Arabidopsis thaliana columbia
gtcttataatttattcatttctctcttcttcatcgatcttcggcttttagaaaacctgggcggaaatggcaacggcgtcggttaacatgcagtcagtgttcgctgctccttccggtgtattgactacacgcaacatcagaaacacaaaccaactcttcttcaagaggattgctccggtaggagtcagatgcatggctcagggcgatcctatcaaggaagatccttctgtgccctcgacctcgacttcggccactccaccacaaatgccacagtctcctcctccaccagttagcaagcctaaggtgagtacgaagtttggagatttgctagcgtttagcggtccagcacccgagaggatcaacgggagactagcaatggttggattcgtggcggccatcgccatggagttatcaaagggagaaaaacgtgttgctcagat

SEQ ID NO: 149639 - DNA, 475 bp, Arabidopsis thaliana columbia
gtttgcttccatcgttctctcgattgtttcctctcaagcgaagcttcttcttcttcgagcttcttcctcgtgtgtggaggggtttctgaaataggatcgaagtaatggccagcaaatctggaagcggtggcctaagagaaccgccgaatgagcaagctgttttgaacatgtatgaaggcaagagatcagagctaagccaaatctactccaacataaccgacctcgagatgcaagtgagcgaacattctctggtcattaacgccattcagcctctcgaccaatcgaggaaatgcttccgcatgataggaggcgttcttgtcgaaagaaccatcaaagaggtactaccagctgtccaacgtaacatggacggacttgaagaggttgtgaggaagctatacgagacattggagaaaaaagaagaagatcttacagagtttgaagctaagtataagatcaggataacgaaacaagaaga

SEQ ID NO: 149640 - DNA, 436 bp, Arabidopsis thaliana columbia
ctctctttgctctcaccacactaagaaagaagaagcgagggagaaggagactttttgactcggctgcttcttctcctttctctctgtcacttatttcccctctttgcttccgtcgattcatcccaatctgatcatctctttctccggttaaggtctcaggacttctcagattcgaattataaatgggaaattgttgtgcgagcccgggttcggagactgggagtaagaaggggaaaccaaagatcaaaagtaacccgttttatagtgaagcatacactacgaatggatctggaactgggttcaagctctctgttttgaaagatccaacaggacatgatatatctcttatgtatgatctggggcgtgaggttggtcgcggagagtttggtattacttacttgtgcactgatatcaaaacgggcgagaagtatgcgtg

SEQ ID NO: 149641 - DNA, 472 bp, Arabidopsis thaliana columbia
  unsure (1)..(472): unsure at all n locations
gttagggtgtcactaaaatccggatgtgaaggaattgcagcgatcaatacaatcatgagtggaatgggaattgatatgaagacgttgcgtcctgagccatgcgttgaaggttactccactccagggggatactcttataaggccgttcgcccaattgcactggcaaaagttatgaacattgccaaaatgatgaaatctgagtttagtgaggatcgctcgctttcgggtattggaggagttgaaactggctatgatgccgctgaattcattctccttggatcaaatactgtacaggtatgcaccggtgtgatgatgcacggctatggtcatgtgaaaaccctttgcgctgagctgaaagatttcatgaaacaacacaacttctctacaatagaagagttcagagggcattcgctgcagtactttacaacacacacagantttagttagagacagaaagaacagttgagcagag

SEQ ID NO: 149642 - DNA, 491 bp, Arabidopsis thaliana columbia
accgttaccaaaactcgccggaagagatggcggacgagatggagaccaaaggagagaagaagtacaagtatagcatgatgattcctacctacaacgagcgcctcaacatcgctatcatagtctacctgattttcaagcatctccgggacgttgattttgagataattgttgtggatgatgggagtcctgatggcacacaggaaattgtcaagcaactgcagcaattgtatggtgaagaccgtatccttttaagagctagagccaagaagcttggtttgggaactgcatatattcatggtttgaagcatgctacgggtgatttcgtcgtgatcatggatgctgatctttcacatcatccaaaatacttaccaagtttcatcaagaaacaactagagacaaatgcaagtatagtaactggtacacgatatgtaaaaggtggtggtgtacacgggtggaatcttatgcggaaactcactagtagaggagcaaat

SEQ ID NO: 149643 - DNA, 472 bp, Arabidopsis thaliana columbia
acgcaagtactgcactacttgagatgatgatctttcatttgccatctccccacactgcccagagggaccgtgttgagaatctgtatgaaggtcctcttgatgatcagtatgcaaatgccatcaggaactgtgaccccaatggacctctcatgctctacgtatccaagatgattccagcctctgacaagggtagattctttgccttcggtcgtgtctttgctggtaaggtttctactggtatgaaggtcagaatcatgggtcccaactatatccctggtgagaagaaggatctgtacactaagagtgttcagaggactgtcatttggatgggtaagaggcaagagacagtggaggatgtcccttgtggtaacactgttgctatggttgggctggatcagttcatcaccaagaatgctacattgactaatgagaaagaaagtgatgctcaccccattcgtgctatgaagttttc

SEQ ID NO: 149644 - DNA, 433 bp, Arabidopsis thaliana columbia
attcagactactattcagagcttacctccagctttaaaacactattactgcatctcaaagcgtcaacacaaagtcgacacgttaaggagatgcgttcacgccctcgatgcccaatcggttatagctttcatgaaccactcaaggcagctcaaagatgtggtctacaaactcgaagctcgtggtatgaattcagctgagatgcacggagatctcgggaagctagggagatcaacagttctaaagaagttcaagaacggggaaatcaaggtacttgtgacaaacgagctctctgcccggggtctggatgttgcggaatgtgatctggtggtgaatcttgagcttccaactgatgcggttcactatgctcatcgagctgggagaacagggaggctgggaaggaaagggacggtggtaacagtgtgcgaggaatcac

SEQ ID NO: 149645 - DNA, 441 bp, Arabidopsis thaliana columbia
tttctcttttcactctatccatcttacttttatctttctagtgttacctttcctcttgctagattatttgtttcaagggggatgcctctctgaaaacttcatcgctgccggggatgctttcttttcgacagttccaagttctttgttctggccagtctttctcatttctaatgttgctgctttaattgccagtcgtgcaatgacaacagccacatttacatgcatcaaacagtcaatagcactaggctgtttcccacgtcttaaaatcattctcacctcaaagaaattcattggacagatttatataccggttcttaactggtcccttctggtggagtgtctgatcgttgtctgctcttacctcaaatatcttcccgattggaaacgctaatggcatcccagagctgtgaattttgatgactacaacaattttggtgaccc

SEQ ID NO: 149646 - DNA, 360 bp, Arabidopsis thaliana columbia
gcgatttactaaaactcttccaaaatgtcacattccttcttcaatttattcctaatctctcttttggtctggaacaattgcattgcgcatcactatacattcacggttagggaagttccatatacgaaactgtgtagcacgaaggcgattttaaccgttaatagtcagtttcctggaccgattataaaggttcacaaaggagacactatttatgttaacgttcaaaaccgagctagtgaaaacatcacaatgcattggcatggtgtagagcagccgagaaatccgtggtcagatggtgctgaatacattacacaatggccgattcgacccgggtcagattttttgtacaaagtcatattt

SEQ ID NO: 149647 - DNA, 495 bp, Arabidopsis thaliana columbia
atctctcttgattccaatccattcttcttcaagtgccgggttctcgggtcggatcttctaaggctagctagggataatggctactgtcactactcatgcctcggcctcgattttccgaccttgtacttcaaagccaagattcctcaccggttcttccggtaggttgaaccgcgacttgtcgtttacatcgatcggttcatcggccaaaacgtcgtcgttcaaggttgaagctaagaaaggagaatggttgcccggtttggcatcgcctgattatctcaccggcagtcttgccggtgacaatgggtttgacccgttgggtctagcagaggatccagagaacttgaaatggttcgtccaggcagagctggtcaacggacgatgggctatgctcggtgtcgctgggatgcttttgccggaagttttcaccaagatcggaatcataaatgttcctgagtggtacgatgctgggaaagagcagtattttgcatcgtcgtc

SEQ ID NO: 149648 - DNA, 442 bp, Arabidopsis thaliana columbia
  unsure (1)..(442): unsure at all n locations
agaatagatagaggaggaagaagaataaagagaaaagatgaacaagaaggagatcttcaagcgggcgaagggtttcagaggaagagctaagaattgtataagaattgcgagggaaagagtcgagaaagctctgcagtactcttacagagataggcgcaacaagaaacgtgagatgagaggtctctggatcgagcgcatcaacgccggttctcgtcagcacggtgtgaactacgggaacttcatccatggactgatgaaggagaacatccagctgaaccgcaaagtcctctctgagttatctatgcatgaaccttacagtttcaaagcacttgtggatgtctcccgcaagtcgttccctggaaacaagaacgtggtccaagcatctcggaaagtagacatttcatccatcaatgcctagntaggaccaagttaagttaatctt

SEQ ID NO: 149649 - DNA, 460 bp, Arabidopsis thaliana columbia
gtgaatttgtaggacgagctttggaagaactcagaagttctttgtacaatgagcttaaaacagcagaaggagctaaaaggcaacaacagagattttgtggccctgttgttgcaatgtcctttaatttcgttgttgctgttggaatcatccttgccaataaattagtaatttggtttcttcaatctcaaattcttctttctcttttttttatttaccatgtgaatgtaattgtaaggttgaattgtgcaagtgatgggaagagttggattcaatttcccaatctttctaacattgattcattataccgtggcttggattcttttagctttcttcaagtctctctctttgcttccaatgtctcctccatcaaagacaacacctttctcatctcttttctctcttggagctgtcatggcctttgcttctggactcgctaataccagtctcaaacacaatagcg

SEQ ID NO: 149650 - DNA, 471 bp, Arabidopsis thaliana columbia
cggacgcgtgggcggacgcgtgggtgacgggctgtgtgaattctatttctccgccgcgggtgactttataccggcatcgtgcctctccgtcacggtcgtccttctcattatccggcgatgccttacactctctttaccggcaccgacgtgtatcaagatctccgtcgattatcgctcccaaatttcagattgtggcggctgaaaaatcggagcctctgaaaattatgatatcaggagctcctgcttctggtaaaggtacacaatgcgagctgattactcacaaatatggtttggtgcatatctctgctggagatttgctgagggctgaaatcgcttctggaagtgaaaatggaagacgtgctaaagaacatatggagaaaggacaattggtccctgatgaaataagtgtaatgatggtaaaagatcgtttatcacagacagattcagagcaaaaaggatggcttttggatg

SEQ ID NO: 149651 - DNA, 437 bp, Arabidopsis thaliana columbia
  unsure (1)..(437): unsure at all n locations
cgttcgagccatacctatacagagtcttccatctttttgcatttcccgaaaattccctgccgggggagcagattctaattgcgagtcaagtttgtagaaattcgtaatggaagaaaactttttctttattaatgactattaactattataagatcttcagacataaagaatgatctatctaacaaggggattatgatacatctagttgtaggtgatcttgcaagaagcataagtccatttatttagtttcgctttttttgtacctattattttattctatttctatctctattcggntctattctatatattgctactaaggtcggatattaatattagatatatatttacttaaagatacttagtataattatataatagatataatagaaataataaaaatacangatattctaagatatctttagaattcagaa

SEQ ID NO: 149652 - DNA, 472 bp, Arabidopsis thaliana columbia
aacgtgatcaatatggaagctctaatgcttatcttcacgttctgtttcatagttctgtgtctgatattcctcatcggaagaatcaagcgaaagctcaaccttcctccgagtcctgcatgggcgttaccagtgatcggtcacctccgtcttctcaagccaccactccaccgtgttttcctctccgtctctcaatctttaggcgacgctccgatcatctccctccgtctcggcaaccgactcctattcgttgtctcttcacactcaatcgccgaggaatgcttcacgaagaacgacgtcatactcgcgaaccgacaaaccaccatttctacaaaacacatctcatacggcaactccaccgtggtctctgcttcgtacagcgaacactggagaaatctccgccgcatcggcgccttagagattttctcggctcatagactcaatagcttttcctctattcgccgcgatgagatca

SEQ ID NO: 149653 - DNA, 493 bp, Arabidopsis thaliana columbia
caaaaaaaagaaaacacaaaaacaaagattataatggcttcctcaaccatggctttgtcctccgctgccttcgccggaaaggctgtgaagcctgccgcatcagatgtcctcggaagcggccgtgtgaccatgaggaagactgtcgccaagccaaagggtccatcaggcagcccatggtacggatctgaccgagtcaagtacttgggtccattctccggcgagcccccgagctaccttaccggtgagttccccggtgactacggatgggacaccgctggtctatccgccgacccagagaccttcgccaggaaccgtgagctagaagttatccacagcagatgggccatgctcggagccctaggctgcgttttccctgagctattggctaggaacggagtgaagttcggagaaagcggttgtgtcaaggccggttcacagatcttcagcgacggaggattggactacttgggcaacccgagctggtccacgctca

SEQ ID NO: 149654 - DNA, 477 bp, Arabidopsis thaliana columbia
  unsure (1)..(477): unsure at all n locations
aaaaaacgctcgtcttcttcttcttcttcttcttatattacttcttcctcccacacagacaagttttgtaacgaagacgggatcgcgataagatcacggtgatcgaaaagccctaagaagtattttcaagggaaagggacttaaagatgcatacttttggttacagagcaaatgctctgctcactttcgcagtcacggctcttgctttcatttgcgcaatcgcgtccttctcagacaaattcagcaaccaaaatccttctgctgagatccagatacttaatatcaatcggtttaagaagcaatctcatggtaacgatgaggtcagcttgacactggacatatcagcagacttgcaatcactttntacttggaacaccaaacaggtttttgttttcgtagcagcagagtatgaaaccccaaagaattccctgaatcaggtttctctatgggatgccattattnctgccaaggaacatg

SEQ ID NO: 149655 - DNA, 431 bp, Arabidopsis thaliana columbia
gcgaagaaaaagaaaaccagagatggcgatgacgacagcatcctacggtatttgttctaccggccagggtcgcctcggtcgccggcgctgcgtcgtccaggagctccgtgtctttcttgccgatgagaaacgccggttctaggctcgtagtcagggcagccgaagatcctgctccggcttcctcttcttcaaaagattctccggcagctgccgctgctccggatggagctactgccaccaaacccaagccaccaccgattggtcctaagagagggtctaaggtcaagattctaaggagagaatcctattggttcaaagaaccgtggatcagttgttgccgttgatcaggaccctaagactcgatacccggttgtggtccggttcgcaaaagtcaattacgccaacatatcgaccaacaactatgcattgga

SEQ ID NO: 149656 - DNA, 475 bp, Arabidopsis thaliana columbia
ctgaaattcaacttctagtcttctcctccaactactggcaaattagggtttctgagttcgagagaatgcgtagcagagtgtgaaaatggaaggaagcaaaagcgaggcagtgttcgattccatgaatctaaatcctcagattttcatcaacgaagcaatcaactccgtcgaagattatgtcgaccaagcttttgacttctatgcccgtgatgcatccaaatctctcaaaatcaaaggatctgataaacaaaagtcacaagctttatcaaatggtattgctcgtgttcgtggtttgctactatctgtaatcgacaatcgtttgaaattgtgggaaagctattctcttcgattctgtttcgcagttcctgatggatttgtgttaccaaagagtgaggagtcttcgtctgtgcatcaggatgggttatatgatctagaattagatgcagaattggattctctaagggataagcttaat

SEQ ID NO: 149657 - DNA, 434 bp, Arabidopsis thaliana columbia
gcgtccgaagaatttgctttttgattcacataaaccctaatttttagatttttttcccgatcaacgatagtgggggtctcatagacctgtgcgtttccaagctgagatcaaccagttgctttccctcatcatcaataccttttactccaacaaggagatcttcctccgagaactcatcagtaactcctccgatgctttggacaagattaggttcgagtccttgacggataagagcaagctcgatggtcagcctgagcttttcattcatatcattccggacaagactaacaacaccttgaccattatctatagtggtattgggatgaccaaggctgatttggtgaacaaccttggaacaattgcaaggtctggtaccaaggagttcatggaggcattggctgctggagctgatgttagcatgattggtcaatttg

SEQ ID NO: 149658 - DNA, 196 bp, Arabidopsis thaliana columbia
tgatgaattgtgtaaaacatggcgattcatgaagaaaccgagatgtcaacaacacaaggagcctccttgcacttttaatgatgcctcgccgcctcaagatcatcggttcgagaagcttcgtggggtccgatggggaatcaacctcggaatattaccgcgtttttctttctccaccattgatgagctttgcagagta

SEQ ID NO: 149659 - DNA, 422 bp, Arabidopsis thaliana columbia
cgctctccctctcctctccctttgagaaatccctaactctttgctcttctcttcccggggaggtatctctccgatggggggattgaaatggcaactcctatggttgaagatacgtcaagcttcgaagaggatcagcttgcttccatgtccaccgaagatatcactagagctactcgtcttctcgacaacgagattcgaattctcaaggaagacgcgcaaagaacaaatctagaatgtgattcttacaaggagaagattaaggagaatcaggagaagattaaactcaacaagcagctgccttacttggttggcaacattgtcgagattttggagatgaatccagaagatgatgctgaggaagatggtgcatatattgatcttgactcgcaacggaaaggaaaatgtggtgtgttgaaaacgtc

SEQ ID NO: 149660 - DNA, 233 bp, Arabidopsis thaliana columbia
caggcgcacacgacagacaatcaatcatgaacggttatcctcaaccatggctatgctctgcggtgagagttccagaccggctgcgaccactcacatatcatatgtgccaaggagcggacagatgaccatgacgaatactgtggacctgtcaaacggatcatcatgcagtccatggtacggatctgacctagtgaagtacttgggttcattctccacaaagcgctcgagctacc

SEQ ID NO: 149661 - DNA, 483 bp, Arabidopsis thaliana columbia
  unsure (1)..(483): unsure at all n locations
ctctgagcttataaaaccttcatggcatttgcgcacttctgcagcatccactgtttccttaggatcgggaaacaacaagagcttcttctccttgttattggattgccttttgccagcctttgttttagtcagttttctcctcattaacttctgtcggtacagaatctctctccaggctggtgaactcttgcagctttctcagtgattctgtatcgatttttcccgtgtaaattatggtttcctctcagcgtcctgtccccaacaaaatccagaaacagcaatatctatccatcagcccttcaaattctgtcttgaaagatgatgttgaacttgagttctctgatgtgtttggtccactccccgaagaggccaatgatattgcttacgacgagcctgcttgtgtctacagtcgatccccactcttgntngccccgtgtcgctcgatagtcattcttttgagctgaccaagctcaccttactaga

SEQ ID NO: 149662 - DNA, 436 bp, Arabidopsis thaliana columbia
  unsure (1)..(436): unsure at all n locations
aaaaaaaagaaaacacaaaaacaaagatttgataggctttctcaaccanggctnngncctccggggcctttgccggaaaggctgtgacaccctgccgcatcagatgtcctcggaagcggccgtgtgaccatgaggaagactgtcgccaagccaaagggtccatcaggcagcccatggtacggatctgaccgagtcaagtacttgggtccattctccggcgagcccccgagctaccttaccggtgagttccccggtgactacggatgggacaccgctggtctatccgccgacccagagaccttcgccaggaaccgtgagctagaagttatccacagcagatgggccatgctcggagccctaggctgcgttttccctgagctattggctaggaacggagtgaagttcggagaagcgtgttgggtcaaggccggttcac

SEQ ID NO: 149663 - DNA, 423 bp, Arabidopsis thaliana columbia
  unsure (1)..(423): unsure at all n locations
aacagaaagtatacatgagancncnctttanatagttttcctggnncnngcannacactggggggaatttgccgtgtcttgcaacacgcccattgcggatctttacccttgcttatcctacgtgactcagggcggaccggtcccaaccctctgctgcaacggtctcacaacactcaagagtcaggctcaaacttctgtggaccgtcagggggtctgtcgttgcatcaaatctgctattggaggactcactctctctcctagaaccatccaaaatgctttggaattgccttctaaatgtggtgtcgatctcccttacaagttcagcccttccactgactgcgacagtatccagtgagacaagcagaaaatcttaaaggaagctactacaagaactataataacctaataattaataaatgaggg

SEQ ID NO: 149664 - DNA, 440 bp, Arabidopsis thaliana columbia
  unsure (1)..(440): unsure at all n locations
gctcaaaagagagagaccacggaagcatgaatttagaaacnngaagaagaaccgagacgacgttttttatagagatggcactctactctgnanccccagaacatgggagctcatcacacaagttgcataaacctgcaagaaatctttctagactctatgcacttgctagaaaaaatcagagtgaaaacaagataatctcagtaaccaaaaacattgtgtctggtctgtccttgttgctgaaatcctgtggaagtgatgtatcgaggttaacttactggttgtccaacactgtcatgttgcgagagatcatttcactggattttggtagctcaaagctaaatggattaaattctcttaaagaagattggggtgatgtgagaacccttgaagcggcattaaaaagagttgaatcatgttttttcacccaagcagttgaatct

SEQ ID NO: 149665 - DNA, 375 bp, Arabidopsis thaliana columbia
  unsure (1)..(375): unsure at all n locations
cttttgccgaacaacacaagattgttcttttagcnnnncannccgaccaagcggggatgatttgatacaatctcttctatctcctgagttttttgttttctggtaaacaatttaatctgtggagttttctggagttgctagtggaagaatctgtctcacagctaggcgattatctttcggatgaatttcatgggaacgatgatggtatagggccagactcagcgtatgaggatggaggtcagtttccaattctagttagtaacaggaagaaacgaagaaatgatgatatgggtagtggaacaaaccatctaaagagtaatacttttatcaagagagaggcaaacatgttaggaaaaaatccatggcctgagaaag

SEQ ID NO: 149666 - DNA, 445 bp, Arabidopsis thaliana columbia
  unsure (1)..(445): unsure at all n locations
gaaatacacacatagaagacgaagatttttattagttttatacaganccacaacgccaggggggnaggtttcttagcttctcgaacaattcgaccagcttcacgtcttcttcaatctcaaacctccaatttcttcctccgcacaatcgtctcaaaaccagagctccaatctcctgaatccgctgctgtctctgagcctgagccgccgacacagattctccctcctagaaaccctgtaggtggagcacgcgtccacttctcgaatcctgaagatgcgatcgaggtctttgtcgatggttacgcggtcaaagtccctaaaggattcactgttcttcaggcttgtgaggtcgctggagttgatatcccgaggttttggtatcattctcgnttatctattgctggaaattgcaggatgtgtcttggtgaggttgagaaatctcctaagc

SEQ ID NO: 149667 - DNA, 449 bp, Arabidopsis thaliana columbia
  unsure (1)..(449): unsure at all n locations
gaagtcttttacgttctggannctctttcaatangtttcacaatctatcagcgnctatgcaggcagctttcacaaagacgttaagatacattggggtgatggtcgtggaaagattcacgataatcaagggaaacttctatctctctcgcttgacaaatcctctggttcaggtttccaatctaatcaagagtttctctatggtaaagccgaagttcaaatgaaacttgtccctggtaactctgctggaaccgtcacaacattctatcttaaatctccgggaactacatgggatgagattgatttcgagtttttggggaacataagtggtcatccatatactctccatactaatgtttacacaaaaggctcaggagacaaagaacaacaatttcatctatggtttgacccaaccgctaactttcacacttattgcatcacatggaatccac

SEQ ID NO: 149668 - DNA, 456 bp, Arabidopsis thaliana columbia
  unsure (1)..(456): unsure at all n locations
atcacattttgtaacaataatacaannatatattaatactctccgacgatgcctcangcaccgatgcgcagagttctctagctcggtgaagctcaagtacgtgaaacttggttaccaatatttggttaaccatttcttgagttttcttttgatcccgatcatggctattgtcgccgttgagcttcttcggatgggtcctgaagagatccttaatgtttggaattcactccagtttgacctagttcaggttctatgttcttccttctttgtcatcttcatctccactgtttacttcatgtccaagccacgcaccatctacctcgttgactattcttgttacaagccacctgtcacgtgtcgtgtccccttcgcaactttcatggaacactctcgtttgatcctcaaggacaagcctaagagcgtcgagttccaaatgagaatccttgaacgttctgg

SEQ ID NO: 149669 - DNA, 411 bp, Arabidopsis thaliana columbia
gcggttctgctcttcagatgctaatgtacgtgacttttacaggaatcgatgatgaactaactgaaggccatgagctcggatctggcttactcgggaaagcgcagggatattatgtggcgagtgcaattgacggaactagccagacaatggctttcaccgcgatgtttgaaagcggcggttatgaagatagtataagcttctttggggttctcagaacagcggtatcagaatcgcatataggagtaatgggaggtaccggaaagtatgtgaatgcgaggggattcgcgattctgaagacgtttacaggatctagcgggacgcagcagaatcagccgcatcagttcactgatgggcttgagacttgtgttgagtgtaccgtttatctttcttactagttttatttttcttctt

SEQ ID NO: 149670 - DNA, 448 bp, Arabidopsis thaliana columbia
  unsure (1)..(448): unsure at all n locations
ggctactttctctgtggccaaaccattncataggttttttctgagttctcaggacttcgaagctcctctgctcttccctttgccaagagatcttcttccgatgagtttgtttccttcgtcagtttccaaacttctgcaatgagaagcaatggtggatacaggaaaggggtgaccgaggccaagataaaggtagccatcaatgggttcggtaggattggtaggaacttcttgaggtgttggcatggtcgtaaggactctcctcttgatgtcgttgtcattaacgacactggtggtgttaaacaagcatcacatctcctcaaatacgactcaactcttggaatctttgacgctgatgtcaaaccttcaggagactcagctctctctgttgatggaaagatcatcaagattgtatctgatcgtaacccatcttatctcccctggggggaac

SEQ ID NO: 149671 - DNA, 448 bp, Arabidopsis thaliana columbia
aaacacacatcaaaaacgattttacaagaatataaatttctgaaaaatgtcagagaccaacaagaatgccttccaagccggtcaggccgctggcaaagctgaggagaagagcaatgttctgctggacaaggccaaggatgctgctgctgcagctggagcttccgcgcaacaggcgggaaagagtatatcggatgcggcagtgggaggtgttaacttcgtgaaggacaagaccggcctgaacaagtagcgatccgagtcaactttgggagttataatttcccttttctaattaattgttgggattttcaaataaaatttgggagtcataattgattctcgtactcatcgtacttgttgttgtttttagtgttgtaatgttttaatgtttcttctccctttagatgtactacgtttggaactttaagtttaatcaacaaaatctagttta

SEQ ID NO: 149672 - DNA, 427 bp, Arabidopsis thaliana columbia
tggtgatcgaaggatgagagctcatcagaacaattacttaaccatcatcaatctctcaagtgtcctcgttgtaattctcttaacacaaagttctgttactacaacaattacaatctttctcagcctcgtcacttttgcaagaactgtcgtcgttactggactaaaggtggtgttctccgtaacgttcccgtcggaggtggttgccggaaagctaaacgttcgaaaacaaaacaggttccgtcgtcgtcatcagccgacaaaccaacgacgacgcaagatgatcatcacgtggaggagaaatcgagtacaggatctcactctagcagcgagagctcttctctcaccgcttctaactctaccaccgtcgccgccgtctccgtcaccgcggcggcggaagttgcttcgtcggttattccaggttttgata

SEQ ID NO: 149673 - DNA, 434 bp, Arabidopsis thaliana columbia
  unsure (1)..(434): unsure at all n locations
aataacaactgcaacgccaccgaaagacggatagnntttgttgccgggaactaaatcggagagttcaaaaccaccgcacatagtggtgtttccattcccagcacaaggccacttacttcctctacttgacttaactcaccaactctgcctccgtggattcaacgtctccgtcatcgttactcccggtaaccttacttacctctctcctcttctctccgctcatccctcctccgtcacctccgtcgttttccctttccctcctcatccttcactctctcccggcgtcgaaaacgttaaagacgtcggaaattcaggaaatctcccgatcatggcttctcttcgtcagctacgagaaccaatcatcaactggttccaatctcatccgaatccgcctatcgctctcatctccgatttcttcctcggatggactcacg

SEQ ID NO: 149674 - DNA, 412 bp, Arabidopsis thaliana columbia
  unsure (1)..(412): unsure at all n locations
ctcatccacattagtcaaagatctctatgggtactacaatattggancacaaaancctactagcaggtcccaaatctttatacaccaaatgtatcataaccatcatttacgtcgtatcaatatctcatctaaatgcccatttcataacttcatgcaaacaaaccccataccctagcgtctgcgaccaccacatgtctaattcacctctcaaaactttagacgaccaaacggatgggttcactttccacgaccttgtggtcagctccaccatggaccaggccgtgcaactacaccgccttgtctcttccttgaaacagcatcattctctccacaaacacgcaacatcagctttgtttgactgcttggagctctacgaagacactatagaccaactcaaccactctcggagatc

SEQ ID NO: 149675 - DNA, 449 bp, Arabidopsis thaliana columbia
  unsure (1)..(449): unsure at all n locations
ggaaagcaatcgaacccgaaattcttncattaantattcaaaactatcttctttcactgctgggcaagaagctctgttgtggaacatcggaaatcagaactgaaacagaaacagaaaccatggagaagagagaagacgaacaacaaaagcgcgacgattctagattcaatcaaacactcaagaacgtccaagggtttcttaaaggtagaagtattcctggtaaggtattgttgactaggagatcagatcctcctccatacccaatctctccaacatatcaacggagcttatctgagaatgacgccggaagaaatgagctattcgaaagtcctgttgaggtggaggatcacaattcaagcaagaaacatgataatacatatgctggtaagctacgatcaaactctagtgctgaaaggagtgtgaaagaagttaaaacttgaagataggtg

SEQ ID NO: 149676 - DNA, 458 bp, Arabidopsis thaliana columbia
  unsure (1)..(458): unsure at all n locations
caaaaaaaaaaaaagagaggcaaagatttcgtgagatttcaattnncaatggagaaagtgaatgaaaccttcttcttatctcatggatctccaactttgagcatagatgattccttggaagcgagacaattcttcaaatcatggactcaaaaagttcttcctcaaaaacccaaatcgattttagtcatctctgctcattgggacaccaaattcccatctgtcaacactgttcttcgcaataacacgatccacgatttctctggcttccctgatcctatgtacaagttgaaatatgaagcaccaggagcaattgaattagggaaaagggttaaagagttgttaatgaaagaaggaggaatgaaacgtgttgatgaagatacaaagagaggacttgatcatggagcttgggttcctcttatgttgatgtatccagaagctgatatacccatttgtcaact

SEQ ID NO: 149677 - DNA, 410 bp, Arabidopsis thaliana columbia
  unsure (1)..(410): unsure at all n locations
aagtttttgatagagaagcagagatttactactattgacattctngaggcaagatgtgggaatctgttgtgctcgaaatctgaaaatacaagccctgtttctgggaatgacagtgatttgtcacaattgagcgagaagattagtttactacttttcgagaacgatgaccagttggatcagatgctcatgaatgaaatctcccaagaaaatatgaaaaacaaccttttgcaggaatttctgaaagaaagcttacactcatggcttttacaaaagatagcagaaggtggaaaaggtccaagtgttttggatgaaggtggccaaggtgtattacattttgcagcttctcttggttacaactgggccttagaaccaacaataatcgctggtgtaagcgttgattttcgcgatgt

SEQ ID NO: 149678 - DNA, 418 bp, Arabidopsis thaliana columbia
aacaaaaacaagaatgggtagatccattttgctgtatctgctctctaccgagatcgttaatcgtgggatcgaaccatccggtcctaacgccggctcaccaacgttctcggttagggtcaggagacgtttgcctgattttcttcagtcggtgaacttgaagtacgtgaaacttggttaccactacctcataaaccatgcggtttatttggcgaccataccggttcttgtgctggtttttagtgctgaggttgggagtttaagcagagaagagatttggaagaagctttgggactatgatcttgcaactgttatcggattcttcggtgtctttgttttaaccgcttgtgtctacttcatgtctcgtcctcgctctggttatcttattgatttcgcttgttacaagccctccgatgaacac

SEQ ID NO: 149679 - DNA, 418 bp, Arabidopsis thaliana columbia
  unsure (1)..(418): unsure at all n locations
cgccacgcgtccgatttggcaatgaaatcatacaaactaatatttcttanttactcatctccacgcacacacatgatggactcttcttatcctcttctccattcaatctcttattctcttttccttccttcatataccttaaacagcaacgttctctgttcttcttcttctttttcttcctctggttttctttcacaacttccatgttggactcggacacagacacggactcaggtcctgtggttgcaacaaccaaactcgtcactttcctccagcgtgtgcagcacacggcacttcgatcataccctaaaaaacaaacgcctgatcccaaatcctacattgatctatctctcaaacgtccctacagtctctccaccatcgaatcagccttcgatgatctcacgagcgagtcacatga

SEQ ID NO: 149680 - DNA, 428 bp, Arabidopsis thaliana columbia
  unsure (1)..(428): unsure at all n locations
ctctttaagatttggaaaagaccttngcttcncttcgntcggaaaaccagctcaaagattcaatatgtcaggtgatgaggctgttgctgctcctgtggttcctcctgttgctgaggcagcagtgatcccagaggacatggatgtgagtactgcattggagttgactgtaaggaaatctcgtgcttatggtggtgttgttcgtggtctccatgaaagcgctaagcttattgagaagcgtaatgctcagctctgtgtcctggctgaagattgcaaccaacctgattatgtcaagcttgttaaagctctttgcgctgaccacagcatcaaattgcttactgttccaagtgccaaaacactcggcgaatgggctggtctttgcaagattgattctgagggcaatgcanggaaagtcgttggatgctcatgtc

SEQ ID NO: 149681 - DNA, 426 bp, Arabidopsis thaliana columbia
  unsure (1)..(426): unsure at all n locations
ttctctgagaatctggtgctttagctnnggtaaatangttatatactctagaacggntgctggttgactcattgtgtcattcctcctgtgtttctctgcctttgctgagcgcaatgacgggaccttcagagttggactgaaaaaactcaagttggattcgaaaaatcggcttgcagcacgcgtcgaatccaagcaagaaaagcccctgagagcttacagacttggagattctggagatgctgatgttgttgtgcttaagaattatctagatgctcagtactatggtgagatcgccattggtactccacctcagaagttcactgtggtttttgacactgggagctctaacctctgggtgccatcatcaaaatgctatttctcacttgcatgtcttttgcatcccaaatacaagtcgtctcggtcaag

SEQ ID NO: 149682 - DNA, 453 bp, Arabidopsis thaliana columbia
  unsure (1)..(453): unsure at all n locations
gaaaaggggagaagcaaaaatggnttttcttaagcttcagaagcggctcgccgcatcagtgatgaagtgcgggaagggcaaagtttggctcgatcccaacgaaagctccgacatctccatggccaattcccgccaaaacatcaggaagcttgtgaaggatggtttcatcatcaggaagccaaccaagattcactctcgttccagagctcgcaaaatgaagattgccaagatgaagggtcgtcactctggatacggtaagaggaagggtacccgtgaagctaggttgccaacaaaggtactgtggatgcgtaggatgcgtgttcttaggcgtctgttgaagaaatacagagagacgaagaagattgacaagcacatgtaccatgacatgtacatgcgtgttaagggtaatgtgttcaagaacaagcgtgtcttgatggagagtatccacaagtc

SEQ ID NO: 149683 - DNA, 456 bp, Arabidopsis thaliana columbia
  unsure (1)..(456): unsure at all n locations
caatgtctcctttcaaaatatncttcttcactacncttctcgnggcggcgttttcagtgtcggctgctgatttcaacactgacgtcaacgtagcttggggaaatggccgtgggaagatactcaacaacggccagcttcttactctctccttagacaaatcctctggttccggttttcaatccaaaacagagtatttgtttggaaagattgatatgcagattaagcttgttcctggtaactctgcaggaacagtcacaactttttacctaaaatccgaaggatccacttgggatgagattgattttgagttcttgggtaatatgagtggagatccttatactttacacactaatgtttacactcaaggtaaaggtgacaaagagcaacaattccatctctggttcgacccaaccgccaatttccacacttactcaatcctctggaaccctcaaagaa

SEQ ID NO: 149684 - DNA, 442 bp, Arabidopsis thaliana columbia
aacagatctgaaatcccgcttgataccccatcgactttaaactactggtttttgtttgattgaagtatagtgttaatgactcctctctccaccttcctttgattctacctatcacttcccttgccgttgctccatcttcatcactagtcactatacaccaatcttagatccgggaagctaatttctcttctccgatcggtgaatgcagttacattgacctcggatctaaccaagctcttctggtttccagctctctggaattcaaaaaaatggaggagaaatccaagtcaagaggttggtgcggttggttcatcgccattattgtgctagcttctgttatcctcgccgtcgtttacactgttaaattgagaacgaagaaatccggtgacgatgacggtggcggtcccgttcctggaccctccggcgccattgataagaaata

SEQ ID NO: 149685 - DNA, 444 bp, Arabidopsis thaliana columbia
gaaaaagaaaactacaaaatcaatcaaagagaagtaagataaatggcaggttctaactgtggatgtggctcctcctgcaaatgtggtgattcgtgcaggtaaaccctagattctctcttcattaacttatcatgcatatatatctaatatacatgtggttacatattccttaagataaatttttgaaatcttatacttctgttgtttttttggtatgacaaagttgcgagaagaactacaacaaggagtgtgataactgtagctgtggatcaaactgcagctgcgggtcaagctgtaactgttgaagaaattatcagcatggtctcaaaccaaggaaaatgggaaaaaaatgtgttttatgctaagagatctttgtgtatgttggaataaagacttggcattgtgttgcgtaatgagtaagagtaactattaagcttgcttgac

SEQ ID NO: 149686 - DNA, 441 bp, Arabidopsis thaliana columbia
  unsure (1)..(441): unsure at all n locations
ggaatattttccggtgaatagccgtcccgtgaggctcggacttctgcccggnatcttggaggttttatagtggagatagccggtttacgtctggcaaacccaatttctatgaatggttttggccgggtttttatcttttctcgccgtcgatcggtttataccgattgcttttcacttttatttcaataatttctacagatctgagttaggaattgatttttaggtactagatcctaaaaattaataattctggcttgtgattttggaaacctcgatttgcaggaaatctatcaagcggttatttcttggttgaaagattgaagaatattccgatgcatattaccattcccttatgttgtgttctttaggagttccgttcagtgttattttcggggtaaacaaaaaaatttcgtgcgatgtttcgacgatattttcttcacc

SEQ ID NO: 149687 - DNA, 457 bp, Arabidopsis thaliana columbia
gtaagatttatcaacacaagcaaaaaagattgacttaaagctagaagcaaagggtggtgagatggtatatgtatgggatgatggtgtttacgaaaaagttagaaaggtatatgtagggcaagcacaatacggtatagccttcgtcaagtttgagtatgtcaatggttctcaagtggttgttggagatgaacatggaaagaagacagagctaggagttgaagagtttgagattgatgcggatgactacatcgtatacgtggaaggttaccgtgagaaagttaacgatatgacgtcagaaatgatcacgtttctttctattaagacttttaaaggcaaaacctctcatcctatcgaaaaaagacctggggttaagtttgtgctacatggtggaaaaatcgttgggtttcacggacgttcaacagatgttttacactcccttggggcctatgtttctttg

SEQ ID NO: 149688 - DNA, 450 bp, Arabidopsis thaliana columbia
  unsure (1)..(450): unsure at all n locations
gcggttaagcgtctagtacaatcacatcaagttgnttctcagaaggagattttgaatgtgatggcctcatacaaacattcaaatattgtccgctggtacggggttgaccaggacgaacattttatctatatttcattggaactgtgtgcttgtagcttaaacgatctcatctatgcatcatctgcactacttgagagtccaatggcttcaagtagtatacattcgattcagataaacccaatctttgagaatggcaagggagttgagctatggaaggaaaacggacatccttctcctgttttgttgaagttaatgagggatatagttgctggtctagttcatttgcatgatattggaatcgtacatcgagatctaaagcctcaaaatgtgttgattgttaagaactcatctctatgtgcaaagctatcagatatgggtattagcaagcgc

SEQ ID NO: 149689 - DNA, 392 bp, Arabidopsis thaliana columbia
  unsure (1)..(392): unsure at all n locations
ggttactttctctgtccccaagggtttcacngaatacncatgattgcgaagctcctctgctggtcttcccttcggcaagaaactttcttccgatgagttcgtttccatcgtctccttccagacttctgcaatgggaagcagtggtggatacaggaaaggtgtgactgaggccaagcttaaggtggccattaatggattcggtaggatcgggaggaacttcctgagatgttggcatggtcgcaaggactctcctcttgatatcattgccattaatgacactggtggcgtcaagcaggcttcgcatttacttaaatacgactctactctcggaatctttgatgctgatgtcaaaccttctggagagactgcaatctctgttgatggaaagatca

SEQ ID NO: 149690 - DNA, 449 bp, Arabidopsis thaliana columbia
  unsure (1)..(449): unsure at all n locations
aagaaaaacaaaaatggctgccatagcttctactttcnctctttcttcaaccaaacctcagagactgttcgattcttccttccatggctcagccatctccgcagctcctatctccatcggtctcaaaccacgatctttctccgttcgcgccacaaccgctggttacgacttgaacgctttcacgttcgacccgatcaaggaatcgatcgtgtcacgtgagatgacgagaaggtacatgacggatatgatcacttatgctgagactgatgtcgtcgtcgttggtgctggatctgctggtttatctgctgcttatgagatcagtaagaaccctaatgttcaagttgccattattgagcaatctgttagtcctggtggtggtgcttggctcggtggtcagcttttctccgccatgattgttcgcaaaccagctcacttgttccttgacgaga

SEQ ID NO: 149691 - DNA, 447 bp, Arabidopsis thaliana columbia
ggttttagttgtcgcacgaggaggaaaaatgccatcggttcatggagttcgggcgagaacgagggatctgttcgcgaggccattcaggaagaagggttacattccactctcgacttacctgagaaccttcaaggtcggcgattacgtcgatgtgaaggtgaatggtgcgatccacaagggtatgcctcacaagttctaccacggtcgtactggtcgtatctggaacgtcactaaacgcgccgtcggtgttgaagtcaacaaacagattggcaacaggatcataaggaagaggattcatgtgcgtgtggagcatgtgcagcaatcaagatgtgctgaggagttcaagctgaggaagaagaagaatgatgagctcaaggctgcagccaaagccaatggtgagaccatcagcaccaagagacagcctaaaggacccaaaccaggattcat

SEQ ID NO: 149692 - DNA, 459 bp, Arabidopsis thaliana columbia
ctggagtggctttgctggtgccacagagctagataaatttttgggacccaagggtccagcaaaaaggagtggactgagaggagcggagattcagagtcaaaggcctatggttggtgtgcacgtgcagacgactttgaatctcaaggtccaataggtgagtacctctccaaggagggacagctaagaacagtttcagatatttcgcaaaaaaatgtgcaggatagaaacactgttctggaagaactttcagatatgattgctatgacaaacgaagatctgaacaaggtccaatacagttacaacaggacggcaatgtcactgcaaagggtcctagatgagaaaaaaaacttgcaccaagcttttgctgacgaaacaaagaagatgcagcagatgtcacttcgccatatccagaaaatcctatatgataaagagaagctaagcaatgaactggatcgtaag

SEQ ID NO: 149693 - DNA, 435 bp, Arabidopsis thaliana columbia
  unsure (1)..(435): unsure at all n locations
cttttcatttctctctgatttctcgatcnctccgttcaactatgtctgccttcacaagcaagttcgcctatgagttgatcgccaacgctgcctacatcggcacacctggaaaaggtattttggctgctgatgagtccactggtaccattggaaagcgtcttgcgagcatcaacgtcgagaacgttgagaccaacagacgtaacctccgtgagcttctcttcaccgcccctggtgctcttccatgcctcagtggtgtcatccttttcgaagagactctgtaccaaaagagttccgatggtaagcttttcgttgatatcttgaaggaaggaggagttcttcccggtatcaaggttgacaagggtaccgttgagctagctggaaccgacggtgagaccaccactcaaggtcttgacggtctcggtgacagatgcaaga

SEQ ID NO: 149694 - DNA, 448 bp, Arabidopsis thaliana columbia
  unsure (1)..(448): unsure at all n locations
atcctcatgtctctctccagnngcttgcnttccatttctcaatcagcgacggctccgggttgcttcgtctgctcttgccatctcgccgcctctttttctaattttccggtttcgtcaagagactatagtttctccagaagtggaagccttgttctcaacggaggaggctcgaatctctgccggagattctgtggtttgaaactgtggatacttaagagcttgaatcgtagacaaggcaacaacagaaaacatcagcctgtaaacgagcttacaacacactcaaagcacactttcctcagcgatgatgaacgaggttttgctgaagaaactagagctgaagatttacgaccaggaagagaatattctgggaacggatttgaatgatgggtttcacaatgtgggagacttaccaccctgtgcaaaacaactctcggatgatctttcagat

SEQ ID NO: 149695 - DNA, 397 bp, Arabidopsis thaliana columbia
aaacgagtaagaatacaaacacaaatatgcataaattggcaaacaagctcttcctcgtctgcgcaacttttgccctctgcttcctcctcaccaacgcttccatctaccgcactgttgtcgagttcgacgaagatgacgccagcaaccccatgggcccaagacagaaatgtcagaaggagtttcagcaatcacagcacctaagagcttgccagaaattgatgcgcatgcaaatgaggcaaggccgtggtggtggtccctccctcgacgatgagttcgatttggaagacgacatcgagaacccacaaggcccccagcagggacaccagatcctccagcagtgctgcagcgagcttcgccaggaagagccagtttgtgtttgccccaccttgagacaagc

SEQ ID NO: 149696 - DNA, 444 bp, Arabidopsis thaliana columbia
  unsure (1)..(444): unsure at all n locations
aacaaagaccagtatctctctgaaagactacaactcggatatattttcgnctccatggcacccgtgagggggattcttggcttgcaaagggcagtgtccatttggaaggaaagtaacagactgactccagctttgagatcattcagcactcaagctgcatccacttccaccactccacagcctcctccacctcctccgcctccggaaaagactcatttcggtggtctcaaggatgaagatcggatttttactaatctctatggtctgcatgacccatttctcaaaggcgcgatgaagagaggtgattggcataggaccaaagatttggtgctcaagggtactgattggattgtcaatgaaatgaagaaatctggacttcgtggacgtggtggggctggtttcccttctggtcttaagtggtcctttatgcctaaagnttctgat

SEQ ID NO: 149697 - DNA, 454 bp, Arabidopsis thaliana columbia
  unsure (1)..(454): unsure at all n locations
gctgagagtgtggactcatatagncataaatcngncactgttttgctgaattctgtggaaatgctggttgacctaatgcgatttcctggtcagcttattcctctatcaaccaaagcaatttttatgagtcatatctcagcggcaggggaaagtgattctgcagagaatgactcttgtgattcacctttggagccaaacagtcccatgtttggttatccagagaaatttgaccatgaaaatgcagaaaaagatgaaaacctttcgttgcacaggaaactggatgggtctccaaatacgtctggtccaccatcaaggaatatgctgttacgatctgcctctgcgctagagaggaaattaagtttctcacagagcgagtcaaacatggctaacgagttttggcggcagagccggaggaaggtcattgctgatcagcggactgctagttccagtcccg

SEQ ID NO: 149698 - DNA, 443 bp, Arabidopsis thaliana columbia
  unsure (1)..(443): unsure at all n locations
gtttcttctgtgtgaagatcataatctgattaatacntttgtgtggcgaatnggtttggtaatgagcaggatgacatattaatccggcggtgacttttggtttgttcttggcgaggaagctatctttaaccagagctctgttctacatagtaatgcagtgccttggagctatatgtggtgctggtgtggttaaagggtttcaaccagggctgtaccagacgaatggcggtggagctaatgtggtggctcatggttacacaaagggttcaggtcttggtgcagagattgttggaacttttgttctggtttacactgttttctcagctactgatgctaagagaagtgccagagactctcatgtccctatcttggctccgcttccaattgggtttgctgtcttcttggtgcacttggctaccatcccaattactggaactggcatt

SEQ ID NO: 149699 - DNA, 322 bp, Arabidopsis thaliana columbia
  unsure (1)..(322): unsure at all n locations
tgtagcggcgtgtgatatttttgactatgtttttttgatgacttgtaattattaagtgattagggtgagtcatgagtgttaattatggtttctgatttgaacttagcaagaaatggtctcagcggctgtgattcgagcctctacattgtgtagtaagggacgaagatgctgttttgtgtcattggtgctggaagaaattagacatttgtgatttttttttatattgactgtatacgagtgattaacattaaaatttaacagaaataatatacattttgagtttcgaaanaaaaaaaaaaaataaaaaaaaattaggggcggc

SEQ ID NO: 149700 - DNA, 465 bp, Arabidopsis thaliana columbia
  unsure (1)..(465): unsure at all n locations
gaccacgcgtcgggacgcgtgggcggacgcggggncnncnactaaaccaagctngggnnctttggatggggggggctgctcacattcacggacaaccttgtggctggaaaatctggcaaagtgaagctcaatctttactacgaatcactttgtcccggttgtcaggaattcatcgtcgatgacctaggtaaaatctttgactacgatctctacacaatcactgatctcaagctgtttccatttggtaatgccgaactctccgataatctgactgtcacttgccagcatggtgaagaggaatgcaaactaaacgcccttgaagcttgcgcattaagaacttggcccgatcagaaatcacaatactcgttcatacggtgcgtcgaaagcgatacgaaaggctgggaatcatgtgttaaaaactctggacgtgagaaagcaatcaatgattgttacaatggtgatctt

SEQ ID NO: 149701 - DNA, 407 bp, Arabidopsis thaliana columbia
cttctttccttttttctctctctcaatgactaccttcatgcccggagttgccttctcctgtggtcctgtctccgatctgggaatcttcatctccgaatccaccaccttctcacgctccatctccgcctccctctcatcttcctccagttcaccctcctcctttcgctgttgcaccccattgaacctcaaatcgctgcgttctcatcgccgtcctaagatttctcatatttgttgcgacggaagctctatttccggatctggcctcggcgatcccgatctcgagtttctccaagcctctgtcctcgttgcagagacaagtatgcattacaaaatgcggcgacatggtttccggcaagattcaatgtggcaaacttctaggcctttgcctcccttttctattagagcta

SEQ ID NO: 149702 - DNA, 447 bp, Arabidopsis thaliana columbia
cttgaaggtcaacaacgtcgagaaaagggtacatctctttgtgcttcttctgccatcgctgccatttcttctccaagtttcttgggtggtaagaaactgaggctgaagaagaagttgactgttccagctgtgtccaggccagatgcgtcggtgcgcgccgtcgcagctgatccagatagaccaatctggttcccgggaagcactcctccagagtggctagacggtagcctccctggtgacttcggatttgatcctcttggtctttcatcggacccggacagtctaaaatggaacgtacaagccgagatagtccactgccgatgggctatgctaggagccgccgggatattcatcccagagttcctaacgaagatcggaatcctcaacactccgtcatggtacacggcgggagagcaagagtatttcacggacaaaaccacactcttt

SEQ ID NO: 149703 - DNA, 456 bp, Arabidopsis thaliana columbia
  unsure (1)..(456): unsure at all n locations
ggaagactgttgccaagccaaagggtccaataggctatttccatggnacggatccgaccgagtgaagtacttgggtccattctctggcgagtcaccgagctaccttaccggagagttccccggagactacggatgggacaccgctggactttcagctgatcccgagacattcgcaaggaaccgtgagctagaagttatccacagcaggtgggctatgctcggagccctaggctgcgtcttccctgagcttttggctaggaacggagtcaagttcggagaggcggtttggttcaaggccggttcacagatctttagcgatggaggactcgattacttgggaaaccctagcttggtccacgctcagagcattttggccatttgggccactcaagttatcttgatgggagctgttgaaagctacagagtcgcaggaaatgggccgttgggagaggccga

SEQ ID NO: 149704 - DNA, 456 bp, Arabidopsis thaliana columbia
  unsure (1)..(456): unsure at all n locations
cggacgcgtgggcgtctctctctctcgggtaaaattagggtttcgnttcactatccagagtgtatacaaaggttgttgtggagcttttatcagatcacaggaataagatggaggtatttggaaaatctcccatggttgttacatctgccaatgttatttacttgtctgcaattctgggtcgcgattgcgatggacacaaatgtgattggaaatgtgagaatgaaaatgtttgtgggaatatgtatcgctgcaaactaactggactaactcatgtctgcgacaagaactgtaaccagcggattctctatgataaccatagctctttgtgccgagccagtgggaggattttccctctctcgtccgtcgaggagcaggcggttaaaggtgttcggaggaagcttgacgccgctgagagtcattcttctgagagctgttcgtttaagcgtcgtcgtcgtg

SEQ ID NO: 149705 - DNA, 414 bp, Arabidopsis thaliana columbia
  unsure (1)..(414): unsure at all n locations
ctaaaaccctcgaacacatcgcctttttcnctaactctagatctactcgctatggctactatgaccgttgttaaggctagacagatcttcgacagtcgtggtaatcccaccgttgaggttgatatccacacgtcaaatggtattaaggttacagcagctgttccaagtggagcttccactggtatctatgaggctcttgagctgagggatggaggatctgactaccttggaaagggtgtatctaaggctgttggcaatgtgaacaacatcatcgggccagcacttattggaaaggacccaactcagcagactgctattgacaacttcatggtccatgaacttgacggaacccaaaacgagtgggggtggtgcaagcaaaagcttggagccaatgcgattcttgctgtgtctctt

SEQ ID NO: 149706 - DNA, 340 bp, Arabidopsis thaliana columbia
  unsure (1)..(340): unsure at all n locations
gctgtttcgagctctcctcaaagcccnaattttcttttcttcnncnncanncncncaccatggagctcgtcaggtttttgatgaaattgcacaacgaaacagtttcaatcgagcttaagaacggaaccattgttcatggaaccattactggtgtagatgttagcatgaacactcatttaaaagctgtgaaactcactctgaaagggaagaatccagttacattagaccacttaagtgtcaggggaaacaacattcgctattatattctctcggacagtttgaatctggagactttgctggttgaagacactccaagaatcaaacccaaaaaggccaactg

SEQ ID NO: 149707 - DNA, 453 bp, Arabidopsis thaliana columbia
gtttggcttttcccatgagcttttccagcacatacatctttattgattaaataaaaaacttggttagtctgtgatttaattcttacattcaaatacttatgcgtgaacttgctcttattatatagtctcctactacctattaagtcttttaacggttcataatcctcttagtcgttgagccttgtatgactgcttctgttgtgaccaatgagctcaatccatgttgcttcaatgatccttctcttgtttctcttcttgcatcattctgattctcgtcacctcgacaatgtccacattacagcgtctcggttttcactcgtcaaggttcttgatccacatttcaattcatcaacttttcatttactttcatgttcttcgtatttgcggtatctggttatcaccttctcaaaactaaggcttctttttgtttttctgtggcttaggatcaaaatg

SEQ ID NO: 149708 - DNA, 450 bp, Arabidopsis thaliana columbia
  unsure (1)..(450): unsure at all n locations
cagaacaaagagaaaggcatctctaataagaagatanagcttaacggagaatgaagattgctgagctgtagcaggtttccgctaggcctgatgttgttgaggtctgggacgcgacttcagcagatccaaagctgttagtgtttttgaagtcgtaccggaatacagttcctgttccaagacattggtcgcagaagagaaaatatttgcagggaaagcgtgggatagagaagcagccatttcatcttcctgatttcattgctgcaaccggaattgagaagattagacaggcttacattgagaaagaagatggtaagaaattgaagcaaaagcaacgggagagaatgcaaccaaaaatgggaaagatggacattgactaccaggtacttcatgatgcatttttcaaataccaaacaaagcctaagctgtcagctctaggcgatttgtattttg

SEQ ID NO: 149709 - DNA, 346 bp, Arabidopsis thaliana columbia
  unsure (1)..(346): unsure at all n locations
ggtgaatgatcctaatccgnnnagcnnnaaaaatanaagtttacatannnancaacnngatgaaggggtgcaagnngcagcagatattttcctcggccaagatctagagttttgagaatggcgatggtatcaggaagacgatctactctaaaccccgacgcacctttttttattccggcagctgtacgacaagtggaagatttctcaccggagtggtggcaattggtgacaacttcgacttggtaccctgattactggatcagtcagcatcagcaaggcgcggatggtttctatgacaactgagagtatgagaatggtggatggcatattgatgtagctgatcctt

SEQ ID NO: 149710 - DNA, 353 bp, Arabidopsis thaliana columbia
  unsure (1)..(353): unsure at all n locations
ctccatcaaccaaaaaaaaaaacatttnnggtagnttgtttgcattgaagcttataggcttcgttagtgaaaatggagatcgaatccgtgagatgtgagtgttgtgggttaatggaagattgcacacaagactacattagtgaggtcaaatctaacttcgacaacaagtggctctgtggtctctgctccgaagccgtgagggacgaagtgagtcgccggaagatgaccacagttgatgaagccgtcaaggcccacgtgtcgttttgtggcaagtttaaaaaagataatccggcggttcatgtcgctgatggtatgaggcagatgctacggaggaggtccggtgagttgacgaa

SEQ ID NO: 149711 - DNA, 413 bp, Arabidopsis thaliana columbia
  unsure (1)..(413): unsure at all n locations
ccgccttcggagacttgagtcgccactggatagntcttcttcgatacattccgccgttcgttgcctcttacttggcgtcttgggtgcagtgagaatggggagcaatgatttgaacacctgggtttcggacaagttgatggttctgctaggcttttcacaaactgctgtcgtgcagtatctaattgcaatggctaaacaatcaaaatcaccaggtgaactcgtccgtgaattggtggaatgcgggttttctttgtccggtgatacccgcgcgttcgcagaagaaatttatgctagagctccccggaaaacccctggagtgaatctctaccagcaacaagaagcagaggcagcgatgctgttgaagaagcaaaaaactttttcccttttagaggctgatcatgatgaaaatgaaa

SEQ ID NO: 149712 - DNA, 381 bp, Arabidopsis thaliana columbia
  unsure (1)..(381): unsure at all n locations
attttgaaaccctaatnnctctnctttacccttaattaaaaatgncngaagttgagtaccggtgctttgtctgcggccttgcctgggccaccaatgatgaagatcttcaaaggacgttctcacagttcggcgacgttatcgattctaagatcattaacgaccgcgagagtggaagatcaaggggattcggattcgtcaccttcaaggacgagaaagccatgagggatgcgattgaagagatgaacggtaaagagctcgatggacgtgtcatcaccgtgaacgaggctcagtcgagaggtagcggcggtggcggaggaggccgtggtggaagcggtggtggttaccgcagcggaagcggtggtggatactcaagaggcggtg

SEQ ID NO: 149713 - DNA, 370 bp, Arabidopsis thaliana columbia
  unsure (1)..(370): unsure at all n locations
gtccaagccgttaaaaatgaagcacaacaacgntttccctagctcacactttcgcaagcactggcagaattatgtcaagacttggtttaaccagcctgccaggaagacaaggagacgtgttgctagacagaagaaggctgtgaagatcttccctcgtcccacctctggtcctctccgacctgttgttcatggtcagacacttaagtacaacatgaaagttagagctggaaaaggattcactcttgaagagcttaaggttgctggtatcccaaagaagttggctccaacaatcggaatttctgttgatcaccgacgcaagaaccgttctttggagggtcttcagtccaatgtccaaaggttaaagacttac

SEQ ID NO: 149714 - DNA, 456 bp, Arabidopsis thaliana columbia
  unsure (1)..(456): unsure at all n locations
ctcttttcctctacaacaatngcattgtttcatactatacattcacggntagggaagtgccgtatacgaaactgtgtagcacgaaggcgattttaaccgttaatagtcagtttcctggaccgattataaaggttcacaaaggagacactatttatgttaacgttcaaaaccgagctagtgaaaacatcacaatgcattggcatggtgtagagcagccgagaaatccgtggtcagatggtcctgaatacatcacacaatgcccgattcgacccgggtcagattttttgtacaaagtcatattttccatcgaagacacgactgtttggtggcacgcgcatagctcttggacacgtgcaactgtacacggtcttattttcgtatatcctcgccccccgcaaatcctcccttttccaaaggcagaccatgaagtccccataattttgggtgagtggtgga

SEQ ID NO: 149715 - DNA, 457 bp, Arabidopsis thaliana columbia
taaattgcggccatacaatgctacgttttcattgcttcactccactttgccctttcacggcgaaacaaccttctttccttaggaaacagcaacgtattacctctgatcgcttcacctttcgcggtggtggtggtggcgatgccgccgccgtcgtctcctcctccggcctccgtgatctcgttttcgtcgtaaaccctcaaggtgctaatggtagaacagctaaagaatggaagaagttgcttcctcaccttcgatctcgtcttggtaaagactgtaatgtaagtgaattattaacatcgggtccttctcatgccattgacattacaagagaggctataagggatggtgcagatgctgtcattgcggttggaggtgatggaacacttcatgaggttgttaatggcttcttttgggaggggaaacctgtcggttatctcagtggggaagctagtcgatc

SEQ ID NO: 149716 - DNA, 419 bp, Arabidopsis thaliana columbia
  unsure (1)..(419): unsure at all n locations
ctcgttgggttccctggccgtccttncactggctacctttgtgaatccaaaccactccctccggggcctccttcatctctctgctcctccgccaccaccggctcctgctcctccccttcttgctccgccgctcactcttcccttccctcctccgacctctgcgctatctccaactgtcctcttgatttcatcgaaaccggagattgcaacacttcttcttacccttgtcctcctttctactacgcttacggtgacggctctctcgtcgcaaaactctactccgactcactctctctcccttccgtctccgtctctaacttcaccttcggctgcgctcacaccactctcgctgaacctatcggcgtcgctggattcggcccgggacgtctctttcttcccgctcagctcgcttgtcactc

SEQ ID NO: 149717 - DNA, 393 bp, Arabidopsis thaliana columbia
  unsure (1)..(393): unsure at all n locations
cttgagagtttttgcttcctcgnctncttcgaataatattcagcgggggnnnnnngnttagagttggaagagacgaatcgaattttgacgctttcttttatgtctgacaagatatctccgttttgttgtcaatctggttgcttggaaaacacagtcctacatccagaattaaggactactactagttcctccatcactttagggtctcgcatcttcaaaccggagatccctcctctttctctccacttttttagctaagaagaatggcgctgcagaacattggtgcttccaaccgtaacgatgccttctacaggtacaagatgcctaagatggttaccaaaaccgaaggcaaaggtaatggcattaagaccaacattatcaacaatgttgaga

SEQ ID NO: 149718 - DNA, 464 bp, Arabidopsis thaliana columbia
  unsure (1)..(464): unsure at all n locations
acgcgctatttcaagaccaaaccttttctcncttcttgattgaaactgtggaagcaactctgacagagcagcaatggcggagaagtcgagcttcttcgttcatttcagctgtcttctgcttcttctaactatcataataacatgtggagagggagtgaggaatccggtgaggccaagatcatcggagagaagagcattgatggacggccaagatctctcgaggccattgaagctgacatttggtgggccttctcgtaattggactgacgctattcccatcggtaatggccgtctcggagccacgatctggggcggcgtctcctctgagattctcaacatcaatgaggacacaatttggactggagtaccagcagactacacgaaccagaaggcccctgaagcattagcagaagtgaggaggcttgttgatgaaagaaactatgctgaagctacttcagaagctg

SEQ ID NO: 149719 - DNA, 425 bp, Arabidopsis thaliana columbia
acggggtgcctatatgaacggccgagcaatggagttgattatgcattcttgggcctttcttcgatattagtgcgctgccagataatacactattcaagagtcaacctgatgttgggcagcagtgtttctctgaagcatcggaacgtcgtcccgcagatttattatcatccttctccacgattaaaaatttcatgaacattttgtacagcgggctgcatgatgtattgatgattttacttaaaagtactgatacccgtgagcgtgttctacagtttcttgcagaggtgatcaatgcaaatgcgtctagagcccatatacaggttgatccagtctcttgtgctagctcaggcatgtttgttaaccttagtgcagtaatgctccggctctgtgaaccatttttagacccacatttaacgaaaagggat

SEQ ID NO: 149720 - DNA, 417 bp, Arabidopsis thaliana columbia
  unsure (1)..(417): unsure at all n locations
cttttcgtcatcgtaatcccgcggtgaagaattcgatgattcattgagagngaaaagaaaaacaatgtctcagctgttatcttctcctccaatggcggntttctccaaaaccttcataaaccataagttttcagatgctcgttttctctcttctcactcaattctcacctccggtggattcgccggaaaaattattcctttaaaaccgacggcgaggttgaaattaacggtgaagtctcgacaaagtgattactttgagaaacagaggtttggtgactcgtcttcttcgcaaaacgctgaagtatcttctcctagattttacgtgggtcattcgatttacaaagggaaagctgctcttacgatagaaccacgagcaccagagtttgtggctttggaatctggtgcgttcaagctgac

SEQ ID NO: 149721 - DNA, 365 bp, Arabidopsis thaliana columbia
  unsure (1)..(365): unsure at all n locations
gaagccgtcggcacaagaagaagaagaagaataangtctcacaggaagtttgagcacccgagagatggttctcttggtttccttccaaggaagagagctaaccgtcacagaggaaaggtgaaggcgttccctaaggatgaccaaaccaagccttgcaagttcacagctttcatgggttacaaagctggtatgactcacattgtcagagaagtggagaaacctggatccaagcttcacaagaaggagacatgtgaggctgttaccatcattgagacacctgctatggtggttgttggagttgttgcctatgtgaagactcctagaggtttgaggtctttgaacactgtctgggcacagcattttga

SEQ ID NO: 149722 - DNA, 411 bp, Arabidopsis thaliana columbia
tgagaatcatctgagatcggaaacgacaaatcaaattttcccgaagaatcgagaccattatgtggaggagaatcgtttcatcgcatcttaaatccatctccgccgtcgggtcctgcgcggctccgtcgtgcaggcacgccgtcgtagagtccactcacctttctctctcgactcgtgcatcctccattcccgcatattcctccatattctctcgtttaatcggctccgctgcagcggatactgctgtgaagaagcgtgttgaagatgtgatgcctattgcaaccggtcacgagaaagaggaactacaagccgaattggaggggaggaagctggacgatatagactttcctgaagggccttttggaacaaaggaagctcctgctgtagtcaaatcctactacgacatgagaa

SEQ ID NO: 149723 - DNA, 416 bp, Arabidopsis thaliana columbia
  unsure (1)..(416): unsure at all n locations
aaaacatgactgccgaacagaaaggggagcncgtcgcctaattggaagagcagaagatcgatcttgataaacctgaggttgaagatgatgatgacaatgatgaggatgattccgaggacgatgacgaggcggagggacatgatggggaggccggtggccggtcaaagcaaagcagaagtgagaaaaagagtcgtaaagctatgttgaagcttgggatgaaaccaatcactggtgttagccgtgtcaccgtcaaaaagagcaagaatatcttgtttgtgatatcaaaacctgatgtgttcaagagtccagcttcagatacatatgtgatctttggtgaggccaagatagaggatttgagctcgcagctgcagagtcaagccgcagagcagttcaaggctcccaacctcagcaacgtg

SEQ ID NO: 149724 - DNA, 428 bp, Arabidopsis thaliana columbia
caaaaacaaacgaaaagaagcgacttatgccttatttggtctctccccttctccggagagatctgctctctctatctatctctcaatctgtaagaagaagattcccacttcagtaaaagccctaactttacttgggaaagttcttcatctatcatccttcaatcgtcatcatccatggctgatcaacaaaccctagattcctctactcctcctcctactcaatccgatgatctatctcactcccactctacttcctctactacttcagcttcttcttcctcagatccatcactcttgaggtctctctccttaagtcgactcaacgccggagctcctgagttcgttcctggtcgaactactcctccgctgcctcaacctccgaggatgattatcccgccttctccgccgcacggtatgcttcatatgta

SEQ ID NO: 149725 - DNA, 452 bp, Arabidopsis thaliana columbia
  unsure (1)..(452): unsure at all n locations
cacgcgtccgaacacctcaaagaattatncaaacatgtataatcntatattnnngntngngaaaaaaacccagatcaaaagatctctcatttattcgtttcgtttctgctgttttgagtgtcgggttcgttttagctgtaatctttttttccggcgttcgatttgaaaaaatccggggaacaggtgatcggaatcacggctatacacgggatatcacggggtgttagctcacatgtccatattgtccgacagaagggttgtttaatcgaaactaatcctttgccgcacggaggacgtggagctctgccgtctgaaggcggcagcccttccgatctcctctttctcgccggtggcggttccagctttaacttcttttcctttaggttttaagagttaggggttgttagtggtttttccttcttctttttttggtgctcttgaatcgctttttt

SEQ ID NO: 149726 - DNA, 378 bp, Arabidopsis thaliana columbia
  unsure (1)..(378): unsure at all n locations
gcgtccggcccgccggaggagagagaaaaagagnngggggatagctttttgannncnccnncnccaacgtgcggcctttttagaagctaaaaatggcccaagaagcggatacgaacatcgagatctggaagattaagaaactaatcaagggacttgaatcagctagaggtaatggaacgagtatgatctctcttattatgcctcctcgtgatcaagtatctcgtgtcacaaagatgcttggtgatgaatatggaactgcttcaaacattaagagtcgagtcaatcgtcaatctgttttgtctgccattacttctgctcaacaaaggttgaagctttacaacaaggttcctactaaaggtcttggtctctataccggca

SEQ ID NO: 149727 - DNA, 460 bp, Arabidopsis thaliana columbia
  unsure (1)..(460): unsure at all n locations
ataatgagtttgaaaataaagnnncngcntcttctattcttgtatcatcangnngattctgcctctatcgtcaagtttcttcctgggtttgaaggccctcttcctttcgaacttgaaaccgggtacattggtattggtgaggacgagaatgtgcaatttttctactatttcatcaaatctgaaaacaatccaaaagaagatcctcttcttatatggttaaatggaggacctggatgttcttgtcttggtggtattatttttgagaacggaccggtgggtttgaagtttgaggtgttcaacggaagtgctccttctttgttctctactacatattcatggacaaagatggcaaacattatattcttggatcagccagtaggatctggcttctcctactcaaaaactccaattgataaaactggtgacataagtgaagtaaagaggacccatgagtttcttc

SEQ ID NO: 149728 - DNA, 397 bp, Arabidopsis thaliana columbia
gcccacgcgtcgcaaaagttcgacaatttcgtaggggcaaagaatgacgtttattccaagagatttctagctacgcttcgatcccgatctgaaatgttaatgggctttgaagaaatagatggagatgatgatttccaggaggagtttgcttgcccgttctgtgcagaatcgtatgatatcatcgggttgtgctgtcacatagatgatgaacatactttagagtcgaagaacgcggtatgccctgtttgttctcttaaagtgggagttgatatcgtagcacacataacgcttcaccatgggagtttatttaagttgcagcgaaagagaaagtcacgaaaaagcggtaccaattcgacactttcacttcttcggaaagaactaagagaaggagatctac

SEQ ID NO: 149729 - DNA, 448 bp, Arabidopsis thaliana columbia
  unsure (1)..(448): unsure at all n locations
aaaataccctaatcacatttnngaacaataaataatttttctttaaaactctccgacgatgcgctcaggcaccgatgccagagttctctagctcggtgaagctcaagtacgtgaaacttggttaccaatatttggttaaccatttcttgagttttcttttgatcccgatcatggctattgtcgccgttgagcttcttcggatgggtcctgaagagatccttaatgtttggaattcactccagtttgacctagttcaggttctatgttcttccttctttgtcatcttcatctccactgtttacttcatgtccaagccacgcaccatctacctcgttgactattcttgttacaagccacctgtcacgtgtcgtgtccccttcgcaactttcatggaacactctcgtttgatcctcaaggacaagcctaagagcgtcgagttccaaatgag

SEQ ID NO: 149730 - DNA, 422 bp, Arabidopsis thaliana columbia
  unsure (1)..(422): unsure at all n locations
gcgacccacgcgnccgcggacgcgtgggacaaaatggctcgncgcgatgatcttctccctnncctcctccttctcggcgccgttttcggcgnagcttttgccgaagatgatccagactgtgtatacacattctacctcagaaccggatcgatctggaaagccggaaccgattcgatcatcagcgcaagaatctacgataaggacggtgactacatcggaatcaaaaaccttcaagcttgggctggattaatgggacctgattacaattacttcgagaggggtaatctcgacattttcagtggaagagcaccgtgtttacctagtccgatctgtgccttaaacctaacctccgatggctccggcgatcaccatggttggtacgttaattacgttgagatcacgacggctggtggtcacgcaca

SEQ ID NO: 149731 - DNA, 421 bp, Arabidopsis thaliana columbia
aggaaatatacttcgcataatgacgataatgatcaagtttctcctgttagctctgctcgtgatctctccgatttgcgccgagaaggacctgatgaaagaggaatgccataatgcacaagttccgaccatttgcatgcaatgtcttgaatccgacccaacctccgttcatgcagaccgtgttggcatcgccgagatcatcatacactgtctcgactctcgtctcgatatcatcaccaataacattacaaatatattgtcactgggaggaggaacgaaagaagtgagaaaaatcttggaggattgcagaaatgacacgtcgacggtggcacctaaactactgtcggaagccaaaacaggtctgaaaaccggtgattacgacaaagccgccaaatcgatagagtatgctagcattcctcatagc

SEQ ID NO: 149732 - DNA, 383 bp, Arabidopsis thaliana columbia
ctcgttttgataaaaatctctgaatctctccaagctctcttctcatcaaaccggtggtgcttacaagtatcgtccagctagttcttacaactctcccttcttcaccaccaactctggtgctcctgtatggaacaacaactcctccatgaccgttggacccagaggtcctatccttcttgaggattaccatctcgttgagaagcttgccaatttcgacagggaacggattccagagcgtgtggttcatgccagaggagccagtgctaaaggtttctttgaggtcactcatgatatctttaacctcacttgtgctgactttcttcgagctaccggtgttcagactcctgtcattgtccggttcttcaccgtttatccatgtgcgt

SEQ ID NO: 149733 - DNA, 419 bp, Arabidopsis thaliana columbia
gtaaagcttgaaactttggactaaaagaatggcgtctttgggtgtgtcggaaatgcttggtactccccttaacttcagggcagtttcaagatcgtctgctccgttggcatcaagcccatccacgttcaagactgttgctctcttctctaagaaaaagccagctcctgctaagtccaaggctgtctctgagactagcgatgagctcgccaagtggtatggtcctgacaggagaattttcttgcctgatggtcttttggatagatcagagatcccagagtacttaaacggtgaagttgctggagattatggttatgacccatttggtcttggaaagaagcctgagaactttgctaaataccaagcttttgaattgatccatgcgagatgggctatgttaggagcagcttgtttcatcattc

SEQ ID NO: 149734 - DNA, 437 bp, Arabidopsis thaliana columbia
ttttcttctttactctttttcatcgtcgagaaaaaatggagttggatcttacacctgaggtgcccaagaaggtttacggaggagatggtggatcttactctgcctggtgcccagaggagttgccgatgctcaaacagggtaacattggagccgctaagcttgctcttgagaagaatggcttcgctgtccctcgttactctgattcctctaaggtcgcttatgttcttcaaggatctggaactgctggaattgttctcccagagaaggaggagaaggtgatcgcaatcaagcaaggtgattcgattgctcttccctttggtgtggtcacatggtggttcaacaacgaggatcctgagcttgttatcctcttccttggtgaaacccacaagggtcacaaagcagggcagttcactgagttctatcttactggcacaaac

SEQ ID NO: 149735 - DNA, 445 bp, Arabidopsis thaliana columbia
  unsure (1)..(445): unsure at all n locations
cttcttccaagcttttacctcgtttccctcgctacactttccagaaccgagaagccagaagccagcagttccggggagatcgaaacgagtatcgatacgagactaagttcttctcacagcagctggaccacttcagcttcgccgatcttcccaaattctctcaacgctacctcatcaattccgatcactggcttggtgcttctgcgcttggacctatcttcctttactgcggcaacgaaggtgatattgaatggtttgctacaaactctggattcatttgggatatcgctcccaagttcggtgccttgcttgttttccccgagcataggtattatggagagtctatgccttatggaaagcaggaagaagcttacaagaacgctaccactttatcatatctcactactgagcaagctctngctgattttgctgtntttggcactga

SEQ ID NO: 149736 - DNA, 341 bp, Arabidopsis thaliana columbia
ctccgcttgaaaactgccgtaaacggcagaagcgtgagacagtagtgctctcgacggacggggaaatctagatctggattcgaatgtgaggagtgagaataagaaggctagatcagcggttacgaattcaaattctgttacggaagcagagagtttcttttccgatgtacctaagatcggtacgacgtcggtttgtggtagaagacgagacatggaagacgctgtctcgattcatccttcgtttcttcaacggaactctgagaatcatcatttctacggggtctttgacggccatggctgctctcatgttgcggagaagtgcagagaacggttgcatgata

SEQ ID NO: 149737 - DNA, 71 bp, Arabidopsis thaliana columbia
agccaaggcaaaacaacgaatgtatattttttttacgtcatataaataataaccatgtagaagtttggagt

SEQ ID NO: 149738 - DNA, 420 bp, Arabidopsis thaliana columbia
gcgtcttcttcaacaaaatttaccaccagagatcgcagatatttcttcattcggtcggtctcttttagatccgattcgatgccgtcccgtagacgtaccctcctcaaggtcatcatcctcggtgatagcggggtgggaaaaacctctttgatgaatcagtatgttaataaaaagttcagcaaccagtacaaggcaaccattggagccgacttcttgaccaaggaagtacagtttgaagatcgacttttcactttacagatctgggatacagctggacaggaaaggtttcagagccttggtgtagccttttaccgtggtgctgattgctgtgttcttgtatatgatgtcaattccatgaaatcatttgaaaatctgaacaactggagggaagaatttctgatccaagcgagtccatcagat

SEQ ID NO: 149739 - DNA, 391 bp, Arabidopsis thaliana columbia
caaatctcataaacacattgataattcaaaatcctctcgagagacaagaatgggaagggcactttttcacttgtctctctccctcttctcatgtctcctccttgtcctttcttcaaccttcattgcctccactcccgtctccgaacccgaactcgtagttcaagaagttaacgaaaagattaatgcgtctaggaggaatctaggcgtgctctcatgtgggaccggaaatccaattgacgactgttggagattctacccgaaatgggagaaaaacccacaactggtagccgaatgcgcgatcgggttttgcacacacgcactctgtggtctgtactgtaaaatctacttggtgactgacttttgtgtcaaagacgtggctaaccctaaaccc

SEQ ID NO: 149740 - DNA, 438 bp, Arabidopsis thaliana columbia
cggacgcgtggggaagattttggtttcaagctcttcttctacgattccccgagagctgctggattgagatctctctctcaagcaatggcagctacaagtgagaaacagaacaccacaaagcctcctccttctccttctcctctccgcaattccaagttttgtcagcccaatatgaggatcttgatctctggaggagctggcttcattggttctcacttggttgataagcttatggaaaatgagaagaatgaggtggttgttgctgataactatttcactggctcaaaagaaaacctcaagaagtggatcggtcaccccaggtttgaacttattcgtcacgatgttaccgagcctttgttgatcgaggttgatcggatttaccatcttgcttgtcctgcctctcctatcttctacaaatacaaccctgttaagacaatc

SEQ ID NO: 149741 - DNA, 368 bp, Arabidopsis thaliana columbia
ggccatccatcactatttcagatcacaatggtgttctctttaccacgaaaaagcgtgctcggaccaaggatctctcgcctgaagacttttggttcagtgccccaaagaaaggggttatggtctttgccttacctggagagccaggtctaacagaattggctggggacttcaaaatccaatttcatgaccggcaaggagatttctactgctggttaaacacgacaatgatggaaaatagagtgatcctaaaaaccagtgagcttgatgggtttgacaagaggaagctaccatcgcctggatttatggttgaagatgttctagctgatataaatgcaacaatccttacgaaccctagttctgaaacagca

SEQ ID NO: 149742 - DNA, 425 bp, Arabidopsis thaliana columbia
aaaaggacccctcccaaccagaattagtggagataaacttgacgcgtcccttcttcgtgtctccgtcttcttcacgtcaccggaaaaacgacgaatctcattgcctgagattcttcatcggaattaaacctccggaggaattaatcacgtctcacattttttcaccatgtcgagtttggaggagccgctaagctttgacaagttgccaagtatgagcactatggataggattcagagattttcttccggtgcttgtcgccccagggatgatgtcggtatgggacaccgttggattgaaggaagagattgcactacctctaacagttgcattgatgatgataaaagctttgctaaagagtcattcccgtggagaaggcatactcggaaattatctgaaggagagcatatgtttaggaatatttcgt

SEQ ID NO: 149743 - DNA, 424 bp, Arabidopsis thaliana columbia
cgcagagttcgtagccactctcctcttcttatacatcaccgttttgacagtcatcgggtacaagattcagtccgatactgatgccggtggcgtagattgcggcggagttggaatcctcggtatcgcttgggcctttggtggtatgatcttcatcctcgtctactgcaccgccggtatctctggtggtcacattaacccagcggtgacatttgggctattcttggcacgtaaagtgtcgttacctagggccctattgtacataatcgctcagtgtttgggtgcgatttgtggagttggttttgtcaaagccttccaaagctcttactacacccgttacggaggtggagccaactctctagccgatggctacagcacagggaccggtctagccgcagagatcattggtactttcgtcttgtctaca

SEQ ID NO: 149744 - DNA, 315 bp, Arabidopsis thaliana columbia
acttgctccttctggtactagttctggttttaatgatcgtggaggtggtggatatagccgaggtggaggtgacagtgatcgtgggggtggtcgtggtggtagaaacgattgtggtaggagctatgagagttgttgatatgatggtggaagtttgtgtgtttattattttttgttgtattattaatatattgttttatgtctttattttgtttttatcttttttatatttttattttttatatatatataattttttttatattatatttatataattttatattttatatactttttatttttattatttatata

SEQ ID NO: 149745 - DNA, 343 bp, Arabidopsis thaliana columbia
cccactcaaacgaaattttttcttaatctctctttcgttcttcttcttcttcttcttctttagattgttggaattccaatcggaactctcgattcgctttcttctccgttcttctgtggcggaccggttttgtggttttttatttgaacattcccgatcttgccctgagttccacgatcagtttctttaaaccctaggttttacacaagcattctgtttctccagattatcgcagactctttcgttctattctttgtagttatgtaaaaggtatttcggtagatttagggtttgtctgtgtctagttttcgagatcgagagagatttgtgatgaatactaaca

SEQ ID NO: 149746 - DNA, 294 bp, Arabidopsis thaliana columbia
ggacgagaatgtgcaatttttctactaatacatcaaatctgaaaacaattcaaagtaggatccttttctgatatggttaaatggaggacctgtatgttcttgtcttggtggtattatttttgagaacggaccggtgggtttgaagtttgaggtgttcaactgaagtgctccttctttgttctctactacatattcatggacaaagatggcaaacattttattcttggatcagccagtatgatctggctttttctacttaaaaacttcaattgattaaactgttgtcattagtga

SEQ ID NO: 149747 - DNA, 365 bp, Arabidopsis thaliana columbia
aaaatattttggatactcttaataatcaatcgaatgatgattgctcgttttgtgctcagcattctaatcgtagcggcgatagtttctggtagtgagttttctgatactcgtgatgcaaaagtagaaaaaatcttaaagaaactcaacaaacctgctcttaaatctatcaagagtccagatggagatataatagactgcgttcatatgaataatcatccaatttatgatcatcctttattcaaaaactacacgattcagatgaaaccaagttcttaccctaaaggtaaaaataatgaatcttcagacaaagagaaacaaagtgttgtgactcaactattgacagttaaacggaaatgccccaaaaa

SEQ ID NO: 149748 - DNA, 447 bp, Arabidopsis thaliana columbia
  unsure (1)..(447): unsure at all n locations
tggagggagggtgcatttggcttaaacacttttgtttcaagaatggagccaactaaagccttgattattaganngctgttcccnntgcgccgttttcttcccaagccactcttattggaaccagtnttggtctaacctgannagagcaggctcatagaacaatatgtgtgatgtggatgtttacacnatcgaactttaggccattaaaggctaccctttcaggacttccagaccgagtatttatgaaactcattgtctgtgcaaacaccaataaagttctcggtgttcacatgtgtggagaagattcaccagaaatcatccagggatttggggttgcagttaaagctggtttaactaaggccgactttgatgctacagtgggtgttcaccccacagcagctgaggagtttgtcactatgagggctccaaccaggaaattccgcaaag

SEQ ID NO: 149749 - DNA, 394 bp, Arabidopsis thaliana columbia
gatctattcataaaaaagacaggtaatctcaactccgaggagataactgatatagcagtttgagagaataagaagaagaagaagaagaagaccaagctaaagaatggttgcttttttatcagcttggccttgggaaaactttggcaatctcaagtatcttctctacgctccattagctgcacaagtagtgtactcgtgggtctatgaagaagatatctcaaaggttctttggtgtattcatattcttataatctgcggtctcaaagcacttgttcatgaactatggagcgttttcaacaacatgcttttcgtgactcgtactctaaggattaaccctaaagggatcgactttaaacagattgattacgaatggtactgggacaattacataatt

SEQ ID NO: 149750 - DNA, 359 bp, Arabidopsis thaliana columbia
ctaacatttccggtggccacgttaaccctgccgttaccttcggtgtcttactcgggggtaacatcactctcctccgtggtattctctactggattgctcagcttcttggctccgtcgccgcttgtttcctccttagctttgccaccggtggcgagccaatttcagcgttcggtctctctgccggagtcggatcattaaacgctctcgtcttcgagatcgtgatgaccttcgggctcgtttacaccgtctacgccacagccgttgaccccaagaacggttgtctcggaacaatctcaccattcgccataggtttcatcgttggagctaacattcttgccggtggagcttttatcggggct

SEQ ID NO: 149751 - DNA, 422 bp, Arabidopsis thaliana columbia
caactttctctcatcttcaaattaaaatcaaacagtttcttaataacattttacttcatggctcgtaccaagcagacggctaggaaatcaaccggaggaaaggctccaaggaagcagctggcgacaaaagcggcgaggaaatctgctccggccaccggaggagtgaagaagccacacagattcagacccggaactgttgctttaagagaaatcaggaagtaccagaagagcactgagcttcttatccgtaaactccctttccagaggcttgtcagagagatcgctcaggacttcaaaaccgatcttcgtttccagagcagtgccgtcgccgctcttcaggaagctgctgaagcttacctcgtcggactcttcgaagacaccaatctctgcgccattcacgccaagagggtcacgatcatgcc

SEQ ID NO: 149752 - DNA, 427 bp, Arabidopsis thaliana columbia
  unsure (1)..(427): unsure at all n locations
gaaatacacaggagatgagatatgccgtgagaagacaaaggagtttctcaaggaagggtgtatgcctaatggtttattgccattgaaggacattgaagaagttggttacgacagagagacaggtattgtctggctgaagcagaagaagagcatcacccacaagtttgaagccattggtaaacttgtctcttacgccaccgaggtcattgcacaagtggaggtcggaaagatcaagaagcttaccggtgttaaggccaaggagcttgttatttgggtcactctcaatgagcttgtctaggagcagccgacaagttcagggaagatcaatttcaggacaccaactggtctgtccaggactttcccagtgtctgctttcgtgatcctgaagttgagaagcctgcaacggagnagaacaatggaaccactg

SEQ ID NO: 149753 - DNA, 300 bp, Arabidopsis thaliana columbia
caaagatcgccatctcagaaaaatcttcgctgcaacatcagtgactcgtgctcgagcagatgttgcttattgtattcacgccctttcacggcgtttgcataaaaccaggaattggacggttgctttgaaaacactaattgtgatacatcggcttctaagggaaggagatccaactttcagagaggaactattgaatttttcgcagagagggcggattttgcaactttctaattttaaggatgattcaagtcctattgcttgggattgttcagcttgggtacgtacttatgcattgtttct

SEQ ID NO: 149754 - DNA, 208 bp, Arabidopsis thaliana columbia
cggacgcgtgggctcttctccaatccttattttattttttgaaagtttaaaattttgtgcagcatatcaatttggggtagaaaaattcgaaagaaatgaaagagatgggagtgatagtgcttcttctccttcactcgttcttctacgttgccttttgctgtaatgatggactactaccaaacggtgactttgaactctgttcacgaca

SEQ ID NO: 149755 - DNA, 413 bp, Arabidopsis thaliana columbia
agaagaaaaagaaaacattaatttcaaccaaagcaaaacagagagaaaaaaatagagagagtgaatcaatttcggtggagaaagagaagaatggagcagccgtacgtgtacgcatacccgcaaggtagtggcccctcgggagctccgactccacaagccggaggagtggtagtggatccaaagtactgcgctccttaccctatagatatggcgatcgtacggaagatgatgtcgttaacggacggcaatttcgtgataacggacgtcaacggaaacctgctgttcaaggtgaaggaaccggtgtttggtctccacgacaagagggtcttgctggatggttctggtactccggtcgtcactttgagagaaaagatggtgagcatgcatgacaagtggcaagtgtttagaggagg

SEQ ID NO: 149756 - DNA, 417 bp, Arabidopsis thaliana columbia
gcgaaagcatttcaatcgtagtctaagagaatgtcgacagtgggagagctcgctggcagctacgctgttatgatcctcgaggatgagggtattgctatcacggctgacaaaatcgccactttggtgaaagctgctggtgttaccattgagtcatactggccaatgctattcgccaagatggctgagaaacgtaatgtcactgatctcatcatgaacgttggtgctggtggtggaggtggtgcgcctgttgcagctgctgctcctgctgctggcggtggtgctgccgctgctgctcctgctgccgaggagaagaaagaaggacgaaccagcagaagagagtgatggagatttgggttttgcttgttcgattaaggcattttacttggtttttcttttccgattgggacctattttttt

SEQ ID NO: 149757 - DNA, 271 bp, Arabidopsis thaliana columbia
gtgaagatatctgatttcgggttagcgaaacggaggagtggtgaggtttgtgggtggagtagaggaacaccgtggtatatggcaccggagtctgtgaatcacggcgagtttgaatctccggcggatatttgggctttgggatgctctgttgttgagatgtctagcggttaaacggtatggtgtttggaggatggggctctgaactatttaatgacttttttgttttctattgatgtttgttattttattttttctgtttcttatttttatt

SEQ ID NO: 149758 - DNA, 338 bp, Arabidopsis thaliana columbia
tttttttttttttggggggttggggactttaagatgaaacattcattcatgatttgttttagatcccgacaaagaagaagggggccaacgaattattatacaacatttctttttaaaggggggaaaaacaaaaaggttaaagaatgttccggaagaaaattggtttggtatggaaaggccaaaatctggactgggttgctggttccaattttaaccaccgctttttaaaattcaatccccgtgaagtagaaaaccctacttggatgctaaccgtttttcattgttttgggcagtacttttgccttcattttgaagcgttccaatttgggatgggttca

SEQ ID NO: 149759 - DNA, 277 bp, Arabidopsis thaliana columbia
gttcgttggaatctccgtccctttttgttgatcgacggtggtgaatcttagacgtgggggctgctaagctcggcgctttgttacttcttgccttgcttttcaccaccagcgtcttcgccgatgctgatgagccggaggtttctgaggctgtcggatccgatggctcttccaagatccacctggatcagcttaatgccaagatccgtgccctagaatctcaaatcgatgagaaaacccgggaagttcatggcaattgactatgtagtagcatagaatg

SEQ ID NO: 149760 - DNA, 353 bp, Arabidopsis thaliana columbia
agcgaaccaacaaaaagtcttcatctttaatcattcaatggcttcttcgtctggtatgcagatggttcacacttgccgctccattgcccagattgggttcggtgttaagtcgcaattagtttctgcaaatcgaacaactcaatcagtttgctttggagctcgttcctctggaattgcattatcttcgagattgcactatgcatcacccattaagcaattttctggggtttatgcgaccaccaagcatcagagaaccgcttgtgttaaatccatggctgctgttgaagaagaagtaatcgaacctcaagctaaagtgacaaacaaggtttactttgatgttgaaaattggaggt

SEQ ID NO: 149761 - DNA, 409 bp, Arabidopsis thaliana columbia
gaagtttcttacaatttgtaaagagatctgttttagggttttgccttgttcttgtggggggaataacaaagacatcgccgatatggggaaagacgaagaggaaatgcgaggtgagatcgaggagcgactaatcaatgaagagtacaagatctggaagaagaacactcctttcctctacgatctcgttattactcacgctctcgagtggccttcacttactgttgaatggcttcctgaccgtgaagaaccttccggtaaagactactccgttcagaagatgattctcggtacccatacctccgagagcgagcccaattacttgatgctagcccaagttcagcttcctcttgacgataccgagagtgaagctcgtcagtacgatgatgaccgctctggatttggtggcttt

SEQ ID NO: 149762 - DNA, 357 bp, Arabidopsis thaliana columbia
cggaaacctaggccgagtgttcctctgtaacctccgggactcttccgcaagattcggttgaaaggtcatcgaccgtaactgtctcacgacggagaagaagctctctcaggtcgagacggaggcagagatcctctccttgctggaccacccttttcttcctacgctctatgctcgtatcgacgagtctcactacacgtgtctcctcattgattatgctcccaatggagacttacattccttggtacgcaagcaacctggtaaccgtttaccgattcagccggttagattctttgccgccgaagttctcgttgcattagagtaccttcacgcaatgggaatcgtataccgcgatcttaa

SEQ ID NO: 149763 - DNA, 439 bp, Arabidopsis thaliana columbia
aacaaatacacaacttgtaacttcaaatagattactttcaaagaagagagagagaaagaaagatggagaagaacatgaagtttccagtagtagacttgtccaagctcaatggggaagagagagaccaaaccatggctctaatcaatgaagcttgtgagaattggggcttctttgagatagtgaaccatggattaccacatgacttaatggacaagatcgagaagatgacaaaggaccattacaagacatgccaagaacaaaagttcaatgacatgctcaagtccaaaggtttggataatcttgagacagaagtcgaagatgtcgattgtgaaagcactttctacgttcgtcaccttcctcaatccaatctcaatgacatttcagatgtgtctgatgaatacaggacgggtcatgaaagactttggtaagagactggaga

SEQ ID NO: 149764 - DNA, 404 bp, Arabidopsis thaliana columbia
atttgattgaagtacagatccatcggagaagaagacagagagattgaagatcaatgacttcgagatattgggtggtgtctcttccagtgaaagactctgcttcttcgttatggaatcgattacaagagcagatctctaagcattcctttgatactccagtttatcggtttaacattcctaatcttcgtgttggaaccttagattctctactcgctctcggcgatgatctgcttaagtcgaacagctttgtggaaggagtttcgcaaaagatcaggagacagatcgaagaattggagaggatttctggtgttgagagcaacgcctcttacagttgatggagttcctgttgattcttatctcaccaggtttgtgtgggatgaagctaagtacccaacaatgtcacc

SEQ ID NO: 149765 - DNA, 416 bp, Arabidopsis thaliana columbia
gcttcttgaaacttcttcttcttctttcttctctttaaaggaaaaaaatgtcaggctctaggccgactcagtcctctgagggctcaaggcgatcaaggcacagcgctaggatcattgcgcagaccactgtagatgcgaaactccatgctgattttgaggagtcaggcagctcctttgattactcaacctcagtgcgtgtcactggcccggttgtggagaatcagccaccaaggtctgacaaagttaccacgacttatcttcatcatatacagaagggaaagctgattcagcccttcggttgtttacttgccttggatgagaagaccttcaaagttattgcatacagcgagaatgcatctgagctgttgacaatggccagtcatgcaagttctagtgttggcgaacaccctgttcta

SEQ ID NO: 149766 - DNA, 366 bp, Arabidopsis thaliana columbia
gcttcatcggccgttgcatttcccggcgataagagagagaaagaggagaaagagtgagccagatcttcatcgtcgtggttcttgtttcttcctcgatctctcgatcttctgcttttgcttttccgattaagatcgtagaccatggccgatgctgatgacattcaacctattgtctgtgacaatggtactggaatggttaaggctggattcgctggagatgatgctcccagagcggttttccccagtgttgttggtcgacctagacatcatggtgtcatggttgggatgaatcagaaagatgcgtatgttggtgatgaagcacaatccaaaagaggtattctcacattgaaataccctaatgagcat

SEQ ID NO: 149767 - DNA, 350 bp, Arabidopsis thaliana columbia
gcttcatctaccgtttcatttcccttttttatgagagagaaagagtagaaagattgatccatatcttcatggtcgtggttcttctttcttcctcgatctctcgatcttctgcttttgcttttccgattaagatcgtataccatggccgatgcttattacattcaacctattgtctgtgacaatggtactgtaattgttaaggtcttattctctttatatgattctcccatagcgtttttccccagttttcttcgtcgacctagacatcatgttgtcattgttgggatgtatcataatgattcttattatttttattaacctcaatccaaaatatgtattctttacattta

SEQ ID NO: 149768 - DNA, 361 bp, Arabidopsis thaliana columbia
ttagggttactctttttttcgcttccttttgttcttggttcttaccgagttccacgagcattagcttcagagaccttgaattgaatgccgttggatcaaaaacaagtgggcgaaaaataggattatgattaaaggaggtgtttgggagaacaaccgaaatgagattctaaaaccgccgtgatgaagttggtaagaaccaatgggctcggatctcgtctcttttggtcgaagtctgctaacagtgtaagctcgctgtacagtggtcgatcattataaaaaactgatggacaagagagatagagcttacattgtaacttgctatatgaacatgtcatgggtgccattatgtagagtaagtctg

SEQ ID NO: 149769 - DNA, 414 bp, Arabidopsis thaliana columbia
ctcctctctcaaagtttttatttttaagtgatttagggttttttggtgccctggaggaagaagtttgagtctttgtatctactttgatcaaattgttggtcgcgactggtgcttgaagatatagctttggttctttatgcaaggtttactctcttagaagaatgagagcagataatgatcacgcgcttggtaactcgatagagatttgtaaagatgaatctaagccgcatcaatgtcttgatgagaattgggaagatgcagagctaaaggtcccggaaaatgggaagaacatcaacaatgtgtgtgagttgttctatgatacaagaagtggtgaagaatgggagaatgaggcctgaaagaaagttcgagattctagtcatgattgtgaagcttatgtggattcttctgagaaaa

SEQ ID NO: 149770 - DNA, 410 bp, Arabidopsis thaliana columbia
gagaaaattcagcatttttgatagctcaagcacttgattctttccaaaggggtgtggggagatcacaaaggccaagtaacaatggcgaaaggagttgcagttttgaacagcagtgagggtgttacggggactatctttttcacccaggaaggcgatggtgtgaccactgtgagtggaacagtttctggccttaagcctggtcttcatggtttccatgtccatgctcttggtgacaccactaacggttgcatgtctactggtccacatttcaaccccgatggttaaacacacggtgcccctgaggatgcttattgacatgctggtgatctaggaaacatcacttgtggagatgatggaactgtcacctttacaatcactgattgccagattcctcttactggaccaaactt

SEQ ID NO: 149771 - DNA, 306 bp, Arabidopsis thaliana columbia
ggttctcgggtcggatcttctaagtctagctagggataatggctactgtcactgctgatgcctcggcctcgattttccgaccttgtacttcaaagccaagattcctcaccggttcttccggtaggttgaaccgcgacttgtcgtttacatcgatcggttcatcggccaaaacgtcgtcgttcaaggttgaagctaagaaaggagaatggttgcccggtttggcatcgcctgattatctcaccggcagtcttgccggtgacaatgggtttgacccgctgggtctagcagaggatccagataacttga

SEQ ID NO: 149772 - DNA, 439 bp, Arabidopsis thaliana columbia
cggcgtgcataaagatcttcgaatcaatgtagtttgccccggaagagatgcagctttagggatcgatagtgttggaactgttccagcttctctcataacttttgcttccatccaagcattaaaacctgacatcataatcaatgccggaacctgcggtggcttcaaggtcaaaggagccaacataggcgatgtattccttgtatctgatgttgtgtttcatgatagaagaataccaattcccatgtttgatctgtatggagttggtctccgtcaggcattctcgacacccaattctcctcaaggaactcaatttgaagattggcaggttatctactggtgactcgttggatatgtccacgcaagatgaaacattgatcattgccaatgatgctacgctaaaggacatggagggtgctgccgtggcgtatgtggctgatct

SEQ ID NO: 149773 - DNA, 271 bp, Arabidopsis thaliana columbia
ctacgctctctcaaaagtcgaatatcccaaattcgatccgttttccggcgataatctgcgatctagatccgatggcgaaagaaccagttcgtgtgctcgttactggagctgcaggacaaatcggatatgctcttgtacctatgattgcaaggggtatcatgcttggtgctgaccaacctgttatcctccacatgttggatattcctccagctgctgaagctttgaacggtgttaagatggagttgatcgatgctgctttccctcttcttaa

SEQ ID NO: 149774 - DNA, 448 bp, Arabidopsis thaliana columbia
  unsure (1)..(448): unsure at all n locations
gttttcctctcaaaatcccaacttggcctctgtttttgctttcttttatgttctctgctggtctaaaaaccatctcatacttccaagaatttctctcacaaagaccaagaactcaaaatgtatcaagattctggattaatgctccgttacatgcaaaactgtcccccagatattcaacaattcgaagacctcttcaaatcatacaaactctccgatgaaatgaacaacacttttgttgagtcatcaaacatatctgagtatgatattggagaagaaagtgatctttttagagctcctgatccaattcttgaagaaccaatcttaaccgttgatccactctctgctgctttgactatgatctcttgtggtgaagacacttcacannggtcttgtgagcttcctgatctnggttcattgcagagtggtcaacaacttcttgacaagcttt

SEQ ID NO: 149775 - DNA, 420 bp, Arabidopsis thaliana columbia
aagttgtggtatgaatatgaagaaacagattatggatgagtctgtaaagtcattgatgctgcctcctcctccaccgcttcttcctccatctcagggatatggatcaagaaagatcgatggagacagcataaccaataaacagatcaagaagttctggagacagaagcagatcattgaagaggatcatctctattctgctattaaggctgcagctcgtgtcagagctcgtaatctctctgatgaggactacaaacgctttgaagaaagcttggacatggaggacctggaaaccgaagatcatcagggattgaaagactggtggacaaagagcaaatacgcgtacttgaaccagccggctcttggatctgcagattcactgaagagaaagaggttttcgacttatacaccaaactgtttctc

SEQ ID NO: 149776 - DNA, 437 bp, Arabidopsis thaliana columbia
gggacctgagatatggaaaggcactggtggcaaaatcgatggctttgtttctgggattggtactggtggtaccattacaggtgctgggaagtatcttaaagaacagaacgcaaacgtcaagctgtatggagtggagccagttgaaagtgctattctatccggtgggaagccaggtcctcacaagattcaagggataggagctggttttataccaagtgtattgaatgttgatcttattgacgaagttgttcaggtttcaagtgatgaatccattgacatggcaaggcagcttgctcttaaagaaggtcttcttgtgggaatatcatccggtgcagcagctgctgcagcaattaaacttgcacagaggccagaaaacgctgggaagctaattgtggcgatattcccgagtttcgggagaggtatctatcaacggtact

SEQ ID NO: 149777 - DNA, 426 bp, Arabidopsis thaliana columbia
caaaaataaaaaaaacttaagaacattgtttcgagagatttggtttggagtgaaaatggcactagcaatcaacgtttcttcatcttcttcttctgcgatctcaagctctagcttcccttcttcagatctcaaagtaacaaaaatcggatcattgaggttattgaatcgtaccaatgtctctgcggcttctctgagtttgtccgggaagagatcctccgtgaaagctcttaatgtgcaatcaattacaaaggaatccattgttgcttctgaggttacagagaagctagatgtggtggaagttgaagactttgaggaactagcaaagagattagagaatgcttcttctcttgagatcatggataaagctcttgagaagtttgggaatgacattgctattgcctttagtggagcttgagatgttgctct

SEQ ID NO: 149778 - DNA, 221 bp, Arabidopsis thaliana columbia
tggtggtttcctctcttcatctttgcattcggtatctttctcccggggttaaggcccattgaagctggcacgtgtcattctgatgaccaggggggtcttttagcttttaaaacgggtattaatcaagaacctaccgggattttcaggttttgggagaaagggacctgcctgtgtttaatggaagggggccggtgggttaaccaaccggttaaccggcttaa

SEQ ID NO: 149779 - DNA, 429 bp, Arabidopsis thaliana columbia
gccaaagtcgaaaaacagagttattttgtcggatcaaaagggaagattgagataggaagtgtgggtgactcctttagtgtagcatctcttaaggcttacttgctgaatttatcgcaactctctctttgtgtttgctggcgttggctctgctcttgcttttgccaagctcacatccgatgcagccttggaccccgctggtcttgtcgctgtcgctgtggctcacgcctttgcccttttcgttggtgtttccatagccgccaacatctccggcggacaccttaaccccgccgtgacactcggtctcgccgtcggtggcaacatcacagtaataaccggtttcttttactggattgctcaatgcctcggcttcatcgtcgcgtgtctccttctcgtcttcgttaccaatggcgagagccgtccgactcatgg

SEQ ID NO: 149780 - DNA, 373 bp, Arabidopsis thaliana columbia
ctgagagagagagagtcatggaagctctgaaaaccgcaacttttagccctatgtcggtgttatccgagaaaagatcagaaccacgaaagcctttctcgctccctaacccctttccaccaaaatcacagagaccaatctcccaagaaagcttcttgaagagattcaatggtggattggctcttctaacttctgttctaagcagtgcaacagctcctgctaaatccctgacgtacgaggaagctctgcaacaatctatgaccacttcttcatcttttgattcggatggtctgattgaagggatatccaattttgtcacagacaatcctttggttattgccggtggagttgctgcattggctgttccatttgttct

SEQ ID NO: 149781 - DNA, 418 bp, Arabidopsis thaliana columbia
acgttctgaaacgtgtgttcgtgatcggtttctccatcgttatcttcggaaacaggatatcgacacagacaggtataggaacaggaatagccattgctggagttgcaatgtactctatcattaaggccaagatcgaagaagagaaacggcaaggaaagaaagcatagaaagcagctgaagacggcggtcgacagttgcataaacaagttctccgatggatatatatatatctatataataaataaccaaatgcaatagtatgttgtattgtaccatcaaccattggtttcgagtttttcctttctttgtttttttattgctttctgaaaagttatatataaattttttattctgcttcttctctttttaatggagaacaatttcctgtacaagaagtctaattcatgttagttgaatt

SEQ ID NO: 149782 - DNA, 426 bp, Arabidopsis thaliana columbia
  unsure (1)..(426): unsure at all n locations
cataactataatggcttcatcatcatcaatatcaaatcacaggattccaaacacactaatgtttttggtgatcgtaaactttttgtacctaattcaaactaattcagctgtcagtatcagttccaattccaactcccacttctcaagattctcgagacatcgaagctcaccatcatcaaaaaccaaacaagggtttcttgcaacggtccaagagagtatgaaccatgctctcttggctcgttctcttgctttcaacctcactctttctcatcgaaccgtacaaacccacaacgttcgatcccatccacgactgcctcgagctgctcgacgacacactngacatgttatctcgcatccatgcggataatgatgaagaagatgtccatacatggctaagcgcagcactcacgaaccaagacacttgtg

SEQ ID NO: 149783 - DNA, 428 bp, Arabidopsis thaliana columbia
  unsure (1)..(428): unsure at all n locations
gaaaattttgctctctttatctctcgatttgattcataaaccctagctcttagatttgtgttccgatcaacgagaatggcggacgcagaaacctttgctttccaagctgagatcaaccagttgctctccctcatcatcaataccttttactctaacaaggagatcttccttcgtgaactcatcagtaactcttctgatgctttggacaagattaggtttgagtccttgacagacaagagcaagctcgatggtcagccagagctcttcattcacatcattcccgacaagactaacaacaccttgacgattatcgatagtggtattgggatgaccaaagctgatctggtgaacaaccttggaacaatngcaagatctggaaccaaaaaattcatggaggcgttggcttgctgagctgatgttagcatgaa

SEQ ID NO: 149784 - DNA, 413 bp, Arabidopsis thaliana columbia
aaagagtgtgcaagcaaaataagagaactctaatttatatttgaaacaatgacgatgatgagtgatctttcgcaggatttgttagaggagatattgtctagggttccgagaacttctctaggagcagtacgatccacttgcaaacggtggaacactttattcaaagatcgaattctatgtaaagcagaagaaacaagggatcagtttcggttcataatgaagaagtataagctttgttcaatgaggtttgatctcaacggaaccttaaacgaagatggaggtaccgaattcgtggatccatctataaaggagttaggtcatttttttaatcaagtcaagatatctaaaagttttcaatgcgacgggttattgttgtgcgtgaccaaagaggacaacattaggctcggggtatg

SEQ ID NO: 149785 - DNA, 444 bp, Arabidopsis thaliana columbia
aagcaacaagtgaagaaagaaagaaaaaaatggagaagagtggaggaagaattgtgggggatgagataagaagctttgagaaggcacacttgttcgatcttggtcatcctcttcttaaccgtatcgcagattccttcgttaaagccgccggagtgggagctttacaagccgtgtcaagggaagcttactttaccgtggttgacggggcaggttttgactcgaacaacgtgggtccaccgtcggagattacagggaacaagaaacataggttccctaatctcagaggggaaagcagcaaatctcttgatgcattggtgaagaacacaggaaaagaatctctccaatgggggctagcggcagggttatactcaggtatcacttacggtatgacagaagttcgtggaggagctcatgattggcggaacagcgcggtagctggagcat

SEQ ID NO: 149786 - DNA, 435 bp, Arabidopsis thaliana columbia
caaatcttaaacgttttactttgtgctgcactactcaacctcaatggccgcctgagcgaatggctctctcctcccctgccttcgccggtaaggccgtcaagctttcccccgcggcatctgaagtccttggaagcggccgtgtgacaatgaggaagactgttgccaagccaaagggcccatcaggcagcccatggtacggatctgaccgtgtcaagtacttgggtccattctctggcgaatcaccgagctaccttaccggagagttccccggagactacggatgggacaccgccggactttcagctgaccccgagacattcgcaaggaaccgtgaactagaagttatccacagcaggtgggccatgctcggagccctaggctgcgtcttccctgagcttttggctagaaacggagtcaagttctgagaggcgggtt

SEQ ID NO: 149787 - DNA, 404 bp, Arabidopsis thaliana columbia
gttttagaagaaaaaaaagagagaaaaaaacttgtgaaaaaagtccaaacagggctgggttctccgactcattctctctctctttgccacaacaggcgatggcgatggagatcgattttctccgacgacgattgaggttgagatcagataatttaattggaagattttaagttatggataacagaggtcagaaacgatggaggttgtggaagagttacatgatgataagagagcttgtaactctcaggatttcaggctaaagacttttgattattgagtacttggacgtttgctgagcagtgtttgcaaacacttgagaaaatatcctgacatgagccggtagcctgcttgaatgctggagcaattattgcagggctttcggttattgatttcttctcaacaag

SEQ ID NO: 149788 - DNA, 425 bp, Arabidopsis thaliana columbia
aaccaagctggggttctttggttgcctcctcctgctcacattcacggccaaccttgtggctggaaaatctggcaaagtgaagctcaatctttactacgaatcactttgtcccggttgtcaggaattcatcgtcgatgacctaggtaaaatcttggactacgatctctacacaatcactgatctcaagctgtttccatttggtaatgccgaactcttcgataatctgactgtcacttgccagcatggtgaagaggaatgcaaactaaacgcccttgaagcttgcgcattaagaacttggcccgatcagaaatcacaatactcgttcatacggtgcgtcgaaagcgatacgaaaggcttggaatcatgtgttaaaaactctggacgtgagaaaagcatcaatgattggtacaatggtgatctttcta

SEQ ID NO: 149789 - DNA, 404 bp, Arabidopsis thaliana columbia
atgattatctagccaagcttgagatctttgattgagtgcaactgctaacattcacggtcggggttgacgctgggaaggcgggcacagtgagcctcaatctttactacgaatcactacgcaccggtggtcaggaattcatcggcgatgacctaggtaaaatctttgactacgacccgctacacaaacactgagctcaagctgaatccataaggtaatgccggactgtgcgataatatgactgtcacttgccagtatggggaacaggcatgcacacgaaacgcccttgaagcttgcgcattaagaactgggcccgatcagaaatcacaccactagttcataccgtgcgctcgaagcgaaacgaaaggctgggaatcatgtggttaaaactctggacgtgagaaagc

SEQ ID NO: 149790 - DNA, 414 bp, Arabidopsis thaliana columbia
gtcgaaggcttgagcgttgttccttcttcttcaggtttttgttctattgttaagatgggagacaaaaacgatgacgacaagaacattgagatatggaagattaagaagctgatcaaatcacttgaagctgctaggggtaatggaaccagcatgatctcactcatcatgcctccgcgtgatcaggtctctcgtgttaccaagatgttgggtgatgagtatggaaccgcgtcaaacatcaagagcagagtcaatcgtcaatctgttttgggggccataacttctgctcagcaaaggttgaaactttacaacagggtccctcctaatggtcttgtactctatactggaaccattgttaatgaggatggtaagggagagaaagttactattgactttgagcctttcagacccatcaat

SEQ ID NO: 149791 - DNA, 356 bp, Arabidopsis thaliana columbia
gtggcgtgttcgaatccacggtcgtgcgagagagtgtagttgcgaaggttaaagacgcaatggagaagtttggatttttccaggcgattaaccatggggttccacttgatgtgatggagaagatgataaatggtattcgtcggtttcacgaccaagatccagaagtgaggaaaatgttctatacccgagacaaaaccaaaaagcttaaatatcactctaatgctgatctctatgagtctcctgctgcgagttggagagataccttaagttgtgtcatggctcctgatgttccaaaagcacaggacttacctgaggtttgtggggagatcatgttggagtactcaaaggaagtgatg

SEQ ID NO: 149792 - DNA, 420 bp, Arabidopsis thaliana columbia
atctttttgggcgggaggtaactgaagcagcgaatgaacctttttcttccagtacatatcctcaggatggtcttgattatgctggaactagttcaatcagtaaaagtaaggcattggctttgcttgaaattcttcagtttagatctcctgatgcttcgatgcagcttcctcaaattgtgtcaagcctaaagtatgactcattggtggaggacatacttgggaaccgtgatacctctgttagcggcagtatttactattattctgagcgtggtgatcggctaattgatctatcttccttcagcaacaaactctggcagaaactacattctggatttcccctagtagatagttttccaaatgttgctgagctgagtgaagttagagagacaattcaacagctgttgaaatggggcttgaagt

SEQ ID NO: 149793 - DNA, 420 bp, Arabidopsis thaliana columbia
agaaaaatgggtcgagtctcatctattatctctttctctttgacactcttgatgctgttcaatggctacactgcccaacagtggcccaacgagtgccagctcgatcaactcaatgcgctcgaaccatcccaaatcatcaagagcgagggtggtcgcatcgaggtctcggaccaccatgcaccccagctccagtgctccggctttgcctttgagcgtctcgtcattgagcctcagggtcttttcttgcccactttcttgaacgccggcaaactcacgtttgttgttcacggaaggggcctaatgggaagagttattccgggatgcgccgagacgtccatggcgttaccggtatttggagaaggtcaaggtcagggtcagagtcaagggttccgtgacatgcaccagaaagtcgagcaccta

SEQ ID NO: 149794 - DNA, 431 bp, Arabidopsis thaliana columbia
gtacacagtaacacagacccttttttcctcttactcaaggttcttctttgtcatgtggttgccgaatccacaaagaggagaataaagattcgacctttattagatattaacgactctggatttttgggtttttggagttggatccacatgggttcttatccggatggattccctggatccatggacgagttggatttcaataaggactttgatttgcctccctcctcaaaccaaaccttaggtttagctaatgggttctatttagatgacttagatttctcatccttggatccttcagaggcatattccttccagaacaacaacaacaacaacatcaacaacaaagctgttgcaggagatctgttatcatcttcatctgatgacgctgatttctcttgattcttgtttgaagtatataagccaagttctta

SEQ ID NO: 149795 - DNA, 350 bp, Arabidopsis thaliana columbia
gtttcttcttctttaaccaagcttgtgttctttggttgtctcctcctgctcgcatggacggacaaccttgtggctggaaaatctggcaaagtgaagctcaatctttactacgaatcactttgtcccggttgtcacgaattcatcgtcgatgacctaggttaaatctttgactacgatctctacacaatcactgatctcaagctgtttccatttggtaatgccgaactctccgataatctgactgtcacttgccagcatggtgaagaggaatgcaaactaaacgcccttgaagcttgcgcattaagaacttggcccgatcagaaatcacaatactcgttcatacggtgcgt

SEQ ID NO: 149796 - DNA, 443 bp, Arabidopsis thaliana columbia
gaaattaaaatttcgaaaagtttgttaaaatgaatgcacacatgctcaatctccttggcgtagtcatttttgtagtttctttcgatgtccaagcactcagtcctcactactacgaccatacttgtccacaagccgaccacattgtaaccaatgcagtcaagaaagccatgtcaaacgaccaaactgtccctgctgcgcttttgaggatgcatttccacgactgtttcgtcagaggatgtgatggctcagttctcttagactctaaggggaagaacaaagcagagaaagatggacctcctaacatctcactccatgcattttatgtgattgacaatgcaaagaaggcattagaagaacaatgtcccggtatcgtctcttgcgccgacattctttcacttgcggcaagagatgctgtcgctctcttaggagggcctacatgggca

SEQ ID NO: 149797 - DNA, 179 bp, Arabidopsis thaliana columbia
atcgtctcttctctgctctgctttgctctagatcacaaattaaaagactttattagtcttcctgtcttcaccattaccttctttctttttaacctaacccccaccaggcaaccattggtccggtttccctggattaaaaaggcctccattatttttaccgattggttcttcacacacga

SEQ ID NO: 149798 - DNA, 403 bp, Arabidopsis thaliana columbia
ggcgataatctccgatctagatccgatggcgaaagaaccagttcgtgtgctcgttactggagctgcaggacaaatcggatatgctcttgtacctatgattgcaaggggtatcatgcttggtgctgaccaacctgttatcctccacatgttggatattcctccagctgctgaagctttgaacggtgttaagatggagttgatcgatgctgctttccctcttcttaaaggtgttgttgctacaactgatgccgttgagggatgtactggagtcaatgttgctgttatggttggtggtttcccgaggaaagaaggtatggagaggaaggatgtgatgtccaagaatgtttccatctacaagtctcaggctgctgccttggagaagcatgccgctcctaactgcaag

SEQ ID NO: 149799 - DNA, 444 bp, Arabidopsis thaliana columbia
tgaaaagaaggtaagtttgtctgaagagaagggggcacacaagtaagtgctttgtcagatttcgcgtgcattcatcaaaacaaaaacaaaaaagctcttctttcttcttcttctctctttctttcattcattcagttttcttggctccttcctctcctttcttttctttaattttctcaattttcaaagaagaaaagttgtaccgatttttattaaacgaaaggtcactgtttgattgtgtttaagagaaagaaaaaaaagtagaagaatcttttatcatcaacctgatctggtttgtgcttaactcgaagagaggaaaagacttctgttttgtttttcttggtttgtagcgcattttgcgttcttgaggtttaaagtcgaagaacaacaacagctcatacctttttatattttctggtttctgtggggcttatagagagagag

SEQ ID NO: 149800 - DNA, 434 bp, Arabidopsis thaliana columbia
gccaacgaagcaatagctatgaaaagctaaaccctttccttcttcttcttcttcttcttcttcttcgattgtttagattacttgggtttgacccaagtttgcttctttctatgattcatcaatctagatcttgctatctgggtccagaaacgattcacgcgcttcattcatgatataaagttactaccttttttttattttaccttctgggtcatggttttgtctgcttttcgtcttttgcttttgtctggatgattcataatctctcgagatctattatgttcacaagagttgttcttatgcgtggtgagatgatcttaggagtgtttcactatctttcttcaattcgggtttttagtttctgagatctgtttttgaagaatctgatctgagtttgaggaagtttgactaaatagatcgaagaagatgtttaa

SEQ ID NO: 149801 - DNA, 414 bp, Arabidopsis thaliana columbia
ccttcacctccaaattcgccgatgagctgattgctaacgctgcttacatcggaacacctggaaaaggtatccttgcggcagatgaatcaactggtactattgggaaacgtctcgctagcatcaacgttgagaacgttgaatccaacagacgtgctcttcgtgagcttctcttcactactcctggagctcttccttgcctcagtggtgttatcctctttgaagaaactctttaccagaagagctctgatggtaattgacagtttaacatcgctatatgtctgaatctgtgtatcatcgttgactttgattggggttgattttggttgtgatgcaggtacgccttttgttgatatgttgaagagtgcaggagttttgcctggtattaaggttgataagggtaccgttgagcttgct

SEQ ID NO: 149802 - DNA, 414 bp, Arabidopsis thaliana columbia
cttcttctttaaccaagcttgtgttctttggttgtctcctcctgctcacattcacggacaaccttgtggctggaaaatctggcaaagtgaagctcaatctttactacgaatcactttgtcccggttgtcaggaattcatcgtcgatgacctaggtaaaatctttgactacgatctctacacaatcactgatctcaagctgtttccatttggtaatgccgaactctccgataatctgactgtcacttgccagcatggtgaagaggaatgcaaactaaacgcccttgaagcttgcgcattaagaacttggcccgatcagaaatcacaatactcgttcatacggtgcgtcgaaagcgatacgaaaggctgggaatcatgtgttaaaaactctggacgtgagaaagcaatcaatgatt

SEQ ID NO: 149803 - DNA, 407 bp, Arabidopsis thaliana columbia
ctctgccaatctcatcttcaacctctctctaactctcgttttcgattctacaatggctgacaagaagattaggatcggaatcaacggattcggaagaattggtcgtttggttgctagagttgttctccagagggacgatgttgagctcgtcgctgtcaacgaccccttcatcactactgagtacatgacctacatgttcaagtacgacagtgttcacggtcaatggaaacacaatgaactcaagatcaaggatgagaagacccttctcttcggtgagaagccagtcactgttttcggcatcaggaaccctgaggatatcccatgggccgaggctggagctgactacgttgttgagtctactggtgtcttcactgacaaagacaaggctgcagctcacttgaagggtg

SEQ ID NO: 149804 - DNA, 416 bp, Arabidopsis thaliana columbia
caaaatcatcaaagagggataataatcatgaaattgctagaaaaaatgacatatgtagaatgttttatgataataatggcgacatggttcatgttcataagttacagtcatggagccaatgtagctgcagcacctggaaccaacggacttgatactgcttggtatgatgcgcgagccgcatattatggtgatatccatggtggaggcactgaactagaaggagcttgtggatacggtgatctaaacaaacatggatatggtctagccacagcagcattgagcacggcgctcttcaacagcggggcctcatgtggggcttgttacgagatcatgtgctctcctaatccacaaggatgtttgtccggatctatcaagatcacagcaacagatttatgtccaccaagatccgcttggtg

SEQ ID NO: 149805 - DNA, 422 bp, Arabidopsis thaliana columbia
gggagcagcctgagcaggaggaagaagacgaataagaagaggagcagctactaccatggttctcaagacggagctttgtcgtttcagtggacagaagatttacccaggaagaggaattaggtttatccgatctgattctcaggttttcttgtttcttaactcaaaatgtaagaggtacttccataacaagttgaagccatccaagcttgcatggactgccatgtacagaaagcaacacaaagaaggatgcagcacaagaggctgtgaagagaaggagacgtgccaccaagaagccatactcaaggtccattgttggtgctaccttggaagtaattcagaagaagagagctgagaagcctgaagttcgtgatgcagccagggaagctgctctgcgtgagatcaaggaaagaatcaaaaagacc

SEQ ID NO: 149806 - DNA, 421 bp, Arabidopsis thaliana columbia
ggaggaggatcagccaccccgagaagcttctgagcgcggagccttcgatgagtctaagctggttgacgtcaacattgccttgagctgggaagcctttgaggtgaagcaaggaacagagacagtgcgtgagtattataacgagttccttaagaaggtcaagaacctcggaagagagttggaggaagagcagctggcgtgtctgttccaggaagggctacgcgaggagttgcaggaaggggtatgtgcagcgaactgcggatggatccttaattatgtgtcagatgtagttgatgaagctgagaaggtagaggccaaacttagaagcatcaaggaaaaggtgccgctcgtgtctgaggagtttgcagatgttgactgcggacaaagcaatttgggccgacccgcatccgaagatgaggtggtg

SEQ ID NO: 149807 - DNA, 420 bp, Arabidopsis thaliana columbia
ctctaatcaaaaagcttttaacctcagccgttaaatctttctccgatcatgccgaccagaaacatcgccattggtggagtccaagaagaggtctatcaccccaacgcacttagggcggcgctcgctgagtttatctcgactttgatcttcgtcttcgccggctcaggctccggaattgctttcaacaagatcactgacaatggagcaaccactccttccggcctcgtcgccgctgccttagctcatgctttcggtctctttgtcgctgtctctgttggcgctaacatttccggtggccacgttaaccctgccgttaccttcggtgtcttactcggtggtaacatcactctcctccgtggtattctctactggattgctcagcttcttggctccgtcgccgcttgtttcctccttagcttt

SEQ ID NO: 149808 - DNA, 370 bp, Arabidopsis thaliana columbia
tgtcctcacaacttcagtttaggagttcagcttaagatcttcaagcagagcttaccagaatctatgtggcttaccatcagattgtagagatatgattggaaatgctttgattctcatgggagagattggagctaatgattacaatttcccattcttccaactcagaccattggacgaggtcaaagagcttgttccgttggtgattagtactatttcttctgcgattacggagttgattggtatgggaggaagaacatttctggtgcccggagggttccctctcggatgctcagttgcatttttgacattacaccaaacatcaaacatggaagaatatgatcctttaacaggatgtttgaaatggcttgac

SEQ ID NO: 149809 - DNA, 411 bp, Arabidopsis thaliana columbia
ggagaagctagagagttttctgagatggctcgtactaagcaaacagctcgtaagtctactggaggaaaggctcctaggaagcagcttgctacaaaggctgcacgtaagtctgcaccaaccactggaggagtcaagaagccccatcgttaccgtccaggaactgttgcactacgtgaaattcgtaagtaccagaagagtaccgagttgctgatcaggaagctccctttccagaggctagttcgtgagattgcccaggatttcaagactgacttgcgtttccagagccatgctgtgcttgcactccaggaggctgctgaagcataccttgtgggtctctttgaggacactaacctctgcgccatccatgccaagcgtgtgaccataatgcccaaagacattcagctcgctcgc

SEQ ID NO: 149810 - DNA, 368 bp, Arabidopsis thaliana columbia
gatcaaattatcgaacgatgatggcttctctcgcgacttccataagtggaagcttcagaattctggttaaatcatcttcgacgaggaatgggtttcctgtaatctctgatcaaaacccgagtttcgtcttgtttgcgaataaacgcagacatatctctagaacggcgatttttcaccgatctgcgataagtggttcgagtcaaggagaaaagatatcacctttagcatctggtgtatcttcaggtttatattcagctcagacttttgatttgacgcctcaaaacgttgatttggtgcttgaggatgttagaccgttcttgatctctgatggtggaaacgtctacgttttcttcttttaatgtgtgtgt

SEQ ID NO: 149811 - DNA, 417 bp, Arabidopsis thaliana columbia
caagaaaccaaaagagtaaaacaaacacagagaagcttcttcttaaacgatgccgtactataccagagatgacaacgacgtcgacgatttcgatgagtttgatccaacgccgtacagtggtggttacgacatcacggtgatctacggccgtccgattccaccttccgatgagacttgttatcctctctcatctggtgtcgatgatgatttcgaatacgagagacctgaatttactcagatccatgagccttctgcttacggtgatgaagctcttaacacagagtacagtagctattctcgacccaagccacgacccgcatttcgacccgattcaggtggtggtggtcatgttcaaggtgaaagaccaaatcctggttatggatctgaatccggttatgggaggaaaccggaatctgt

SEQ ID NO: 149812 - DNA, 413 bp, Arabidopsis thaliana columbia
ctcttctctgcttccttcttccatcacattccccaaaaagtctcaacacagagcgagaagaagactcaggttttgcgagaggagagatagagagacttagaaagctcggtaagtccgaactttggtggttcggcggctctacgtcgtctgtaggtcgagtcgtcctggagctcgcccgttgtttctcgacggcggaggtggaagacaacgaccgaccagccatggacattggcggtccaaccaatatccgccacgtggctcacgttaccttcgatcgcttcgatggcttcctcggccttccctctgagttcgagcctgatgtccccagaaaagctcccagtgcaagtgcaacggtgtttggggtatcgacagagtcaatgcagttatcatacgactcgagagggaactgtgtt

SEQ ID NO: 149813 - DNA, 413 bp, Arabidopsis thaliana columbia
aaaaacaaatttttattttatcttccatttttttttttccccgaaattctcgacggggttttccggcgattcattttcgatgcctgaatcgccgattacctgaattcactgaaaccctaaaaccctaaagttactgtagttattaaagctgtgttcttgattccaaatctttgcctaaagattcgtgctttttgtttacttccgatttgatctactcaatctctggaggaagaagaagtttcagagatctatttttgaagctgtgtttgtaattttccccaatttatcaataatgatgatcttttggtgcttgaatatggaatgcttgcgggaacggtgttagtttccttttgtagagctgtcatatattgtgttggtttctttctacatggaagcttacagagaggaagctc

SEQ ID NO: 149814 - DNA, 421 bp, Arabidopsis thaliana columbia
acgaaactcaactaattttgttatcacccaaaaagaagttcaaacacaatggctttcgctttgaggttcttcacatgccttgttttaacggtgtgcatagttgcatcagtcgatgctgcaatctcatgtggcacagtggcaggtagcttggctccatgtgcaacctatctatcaaaaggtgggttggtgccaccttcatgttgtgcaggagtcaaaactttgaacagtatggctaaaaccacaccagaccgccaacaagcttgcagatgcatccagtccactgcgaagagcatttctggtctcaacccaagtctagcctctggccttcctggaaagtgcggtgttagcattccatatccaatctccatgagcactaactgcaacaacatcaagtgaaatggaagcttacgtcgtcgttttg

SEQ ID NO: 149815 - DNA, 379 bp, Arabidopsis thaliana columbia
  unsure (1)..(379): unsure at all n locations
gtcgtcnctttacccgagaagnnggagcgtnncttgannttctgnnaattgannagctggnnttggtgaannntatggtnnctgcgtatacaaaggcgttgaggctcttggagaagtgcatgtatctctctttatgccgtattccgtaattgctgcttagagnnatcttttgactcttgatgaagaagagtccaagaaggatnctttgaaggtgagggctttgcttccgtaggtatgaatccgttacgtgtcttcttgatgagagccagaacaagctcgattacgtcttggctttgactgttgagaactttcttgagcgtcgtcttcagactattgtgttcaagtctggtatggctaagtctatccatcactctcgtgt

SEQ ID NO: 149816 - DNA, 415 bp, Arabidopsis thaliana columbia
aggaaatatacttcgcataatgacgataatgatcaagtttctcctgttagctctgctcgtgatctctccgatttgcgccgagaaggacctgatgaaagaggaatgccataatgcacaagttccgaccatttgcatgcaatgtcttgaatccgacccaacctccgttcatgcagaccgtgttggcatcgccgagatcatcatacactgtctcgactctcgtctcgatatcatcaccaataacattacaaatatattgtcactgggaggaggaacgaaagaagtgagaaaaatcttggaggattgcagaaatgacacgtcgacggtggcacctaaactactgtcggaagccaaaacaggtctgaaaaccggtgattacgacaaagccgccaaatcgatagagtatgctagcattcct

SEQ ID NO: 149817 - DNA, 413 bp, Arabidopsis thaliana columbia
gaaagatagagaaaaaaaatgggaggcaaaggtgtgatgatggtggcgatactttgcctttgggcactctctgcaacatctgaagcagtaacagaggctgagccaggtttgatgatgaacttctacaaggacacgtgtcctcaggccgaagacatcgtccgtgaacaagtcaaactcctctacaaacgccacaagaacaccgctttctcttggctccgtaacatcttccatgactgcgccgttgagtcatgtgatgcgtcgcttttgctggattcgacaagaagagagctaggagagaaagaacacgacaggagcttcggacttagaaactttaggtacatcgaggagatcaaggaagctctcgagagggagtgtcctggtgttgtctcatgttctgacattctcgtcttgtc

SEQ ID NO: 149818 - DNA, 415 bp, Arabidopsis thaliana columbia
ggagaccaagatttgtacagacgccatcgtgtctgaattacagaagaagaaagttcatctcttttactgcttagagtgcgaagaacttgctcgcaacatcgccgctgaatctgatcacatcactctccaatccatcaactggaggagttttgctgatggattcccgaatctatttatcaacaacgcacatgatatccgaggccagcacgttgcgttccttgcttcattcagttcccctgctgtcatctttgagcagatctctgtcatttacttgctccctcgattgtttgttgcgtccttcactttggtgttgcctttcttccccactggctcctttgagagaatggaagaggaaggagatgtagcaactgcttttaccatggcaaggattgtctctaatatccccatttcacgc

SEQ ID NO: 149819 - DNA, 409 bp, Arabidopsis thaliana columbia
tttctccatcaccggcgtttggtcagacatcatcaaatccaacaaaccctttttcgagctcagacatctaccaacccttttgcccctcaaaccccaacaattgctagttcgagttttggaacggctacctcaaattttggttcctcgccctttggtgtaacatcttcttccaatctttttggttcaggttcatcaactaccacatccgtttttggatcatcctccgcttttggaacaacgacaccatcaccgttatttggttcatcaagcactcctggatttggctcttcttcatcaatctttggttcagctcctggtcagggggcaactccagcatttggcaacagtcagccatctactctgttcaattcaaccccttcgaccgggcagactggttcttctttggaca

SEQ ID NO: 149820 - DNA, 414 bp, Arabidopsis thaliana columbia
aagaaaacagagagaatcggtatttttagcctttgctaagatattttgatcaaaaatcccacttttgagcggtcttatctttattctccacctcaaaggaccatttctcatggcttctgttccggtgagacctctacctcttcttcgccggaacatcacctcgacgacggcttcgaaatcatctccaatgctcgccaacgtttcgagccggcattctctcgggatctctacgtatgatgaatttttgaagcaaataaaaactccggcaactgtgaaccaccggcggcgagtaagtacggtggtggcgtcggcgggaaacttgacggcgccgtcgtgggattcgtggaagcctgataagacggcggcggctacggctcttttgctgagtgacgtcatatggcctgctgctggagc

SEQ ID NO: 149821 - DNA, 414 bp, Arabidopsis thaliana columbia
cgcgccgttagtagcgcaacaagaaatctaacggcgccgttagcttctatttcagcagcaagaaatctcttcattggaggaggatgtgacgaaaattatggtgagccaggagtgttttctcattccaatggaataagaaagtacaacaccgttggtaatgctggcgcactaactggtccatttcatcatcttcttggggtcaaccagacaaacaagcccgcctttttaagggtccaatctatgagctatcagtttgtcgctgattctcattcatctcctaaacgtattgtgaagaatgaggatgaggaagatttttctgattcatcaaagaagggaaacgctgaaaaccctaggaaacatcaaattggggagaacatacccaagaaggataaaataaagtttcttgtgaacact

SEQ ID NO: 149822 - DNA, 419 bp, Arabidopsis thaliana columbia
cgaaaaatgaggatgtttggcttgaagcttgtaggttagctaatccagaagatgccaagggggttattgcgaagggagttaagctgatacccaattcagtgaagctatggttggaggctgcaaagctggagcatgatgtggagaacaagagtagggtgttgagaaacggactggaacatattccagactctgtaagactatggaaggctgttgttgagttggctaatgaggaggatgcaaggattttgcttcacagggctgtggagtgctgccctttgcatctggagctatgggtggcacttgcgaggctcgaaacatatgctgaatcaaagaaggtgttgaacaaagcgagagagaagctcccaaaggagcctgcaatttggatcaccgctgctaagttagaagaagctaatgggaag

SEQ ID NO: 149823 - DNA, 416 bp, Arabidopsis thaliana columbia
caaaaatgttcccaagcttgtcccaggctggacaaagcccatctgcattggaaggcatgcttttggtgatcagtaccgtgccactgatgctgtaatcaagggaccaggaaaactgactatgacctttgagggaaaagatgggaaaactgaaaccgaagtctttacatttactggtgaaggtggtgttgctatggcaatgtacaacactgatgagtccatccgtgcttttgctgatgcatcgatgaacactgcttatgagaaaaagtggccactttaccttagcacaaagaataccattcttaagaaatacgatggcagattcaaagacatcttccaagaagtctatgaagccagctggaagtcgaagtatgatgctgctggaatctggtatgaacaccgtctcattgatgatatgg

SEQ ID NO: 149824 - DNA, 412 bp, Arabidopsis thaliana columbia
ggcttcttcactgaagaagcttatctcaagctttctacttgtcttatactccaccaccatcattgttgcttcatcagaatctcgatgtaggcgttttaaatcgatcatcagctttggtgattccatcgcagacaccggaaattatctccatctctctgatgtcaatcaccttcctcaatccgcctttcttccttatggcgaaagcttcttccatcctccctccggtcgtgcctctaatggccgtctcatcatcgacttcattgccgaattcttgggactaccatacgtaccgccttactttggatcccaaaacgttagcttcgaacaagggatcaattttgcggtgtatggagcaaccgcattggaccgagcgtttcttttgggaaaaggaattgaatctgatttcaccaat

SEQ ID NO: 149825 - DNA, 386 bp, Arabidopsis thaliana columbia
acctcctcctccggtgaagtctcctccttctccatattactaccattcaccacctcgtgcggtgaaatccccaccaccaccatattactaccattcaccacctcctccggtgaaatccccaccaccaccatactactaccattcacctcctcctcctgtgaaatctcctcctcctccatattattaccactccccacctcctccggtgaaatccccaccaccaccatacctttacagctctccaccaccaccggtaaaatctcccccacctcctgtctacatctacgcttctcccccacctcccacacattactaggctcatcaaattcaacaaaatttccccattattcaagttttcttttaaaaaatgaaataaaggaagggtc

SEQ ID NO: 149826 - DNA, 349 bp, Arabidopsis thaliana columbia
agcatcttcagattctttcaccgtaaatctaagaaaggttctgtgtttaggggtcggggtctgggaagctcgttctcaccggaaaaccgaagaatatgatcggagtcgggaaaatgaaacagtactccaacgtccttgacaagcctctcagcaaaggcaagcaagaggtgagcttgaccgcatttgctttcttattctcggagctcgttcagtacaatcaaacccaggttgacaatatagctgaacttgaaagaagactagaggatgctgggtatgcagttggatctcgagttctagagcttttctgcatccggtaaaagggaaacattagtgttacacgtttactggt

SEQ ID NO: 149827 - DNA, 399 bp, Arabidopsis thaliana columbia
caattcaccaattcctaagcattcttcagaaatccgagctgctttttgccacatctattcgcttcgaatctcttttcaccagctcaaaaactgtcgctttcaattccgctcgtttcgtcccaccgctccgtgtattgctgaacttcttcatagcaactcaataccatggatgttactgaagttccatggcgtcgtcttcctcaattttccggttcttcacgcgcctcgtggctcgtttcttctgggtttccgctttcttcatatatgttctctcatgttgagcgtggaaagacgtttaggcttaccttgtgctttggggtctctcgtttacgtccaaggtctgctattgtaagtgcacaacaagaacagccacctagtcgtctcaaaggattatgcgag

SEQ ID NO: 149828 - DNA, 411 bp, Arabidopsis thaliana columbia
ggttaacggatcaaattatcgatcgatgatggcttctctcgcgacttccataagtggaagcttcagaattctggttaaatcatcttcgacgaggaatgggtttcctgtaatctctgatcaaaacccgagtttcgtcttgtttgcgaataaacgcagacatatctctagaacggcgatttttcaccgatctgcgataagtggttcgagtcaaggagaaaagatatcacctttagcatctggtgtatcttcaggtttatattcagctcagacttttgatttgacgcctcaaaacgttgatttggtgcttgaggatgttagaccgttcttgatctctgatggtggaaacgtcgacgttgtctccgttgaagatggggtagtctctcttaagctccaaggagcatgtaccagctg

SEQ ID NO: 149829 - DNA, 294 bp, Arabidopsis thaliana columbia
tttttctttctcgtcgtgtcatttttttctcagattcctgaataatcattcggttcgtattccaaaatccccaaacctcatccactcctccatctcccggattcggattcccagaatcatgcccatggagaacgacaatggcccacacgttggcaacgtcgtcgtcaccgctgagcaagcgaccaagattaacgagactgatggacggttgccggagaatcggcagaccggtgttgtctctgacaccggaagtggtagcgagagaggagagcatggggctggagagtctgcagt

SEQ ID NO: 149830 - DNA, 380 bp, Arabidopsis thaliana columbia
aaagataagaactttgacgttttgaagcttaaagcttgaaacttgtttcatccatggcggctcgtagagtgtcttctcttttatctcgatctttttcagcttcctctcccttactgtttcgttctcaagggagaaattgttacaatggagggatcttaaggagatttggaacctcttctgctgctgctgaggaaatcataaacccatctgttcaagtttctcacacacagctcctcatcaatgggaactttgttgactctgcttctggtaagacgtttcctactcttgatccgaggtcaggcgtagtcattgctcatgtagctgaaggcgatgctgaagatatcaatcgagctgtgtaagcttcaaggactgcctttgat

SEQ ID NO: 149831 - DNA, 414 bp, Arabidopsis thaliana columbia
ccgacgataaaccacagccgataaaccctccggtctctttccgaccacataagaaaaagtttctcgaccctagcgatatcaacttctcgtctcttacaatactctcaagactaaactgcgagtaatgaagatcaaatcgtgacggttcagattccggtaaaaatggccggcgagcttctttaacgtactgacgaacggcggcgtcgattaaatcactcacggtggattccggcgagattataatttgtacggctcctaaacttccttgtaccgtcacgttaagtaaaagtttcgtcaaacgtggcggaagtgaaaccgtctccggtacggtgatgctttgaccggtggagaataactccggtaacgttttcggtcttcgaagctcgcctggatttgataacggcgttgttcctc

SEQ ID NO: 149832 - DNA, 416 bp, Arabidopsis thaliana columbia
gccgtcagggagagcaaaacaaagatcggagaagatgaagacgattctttcttccgaaacgatggacatccccgacagtgttaccatcaaggttcacgctaaagtgatcgaagtcgaaggacctcgcgggaagcttgttcgcgatttcaagcatctcaacctcgatttccagctgatcaaggatccagagactggaaagaagaagcttaagatcgattcgtggtttggaacacgcaaaaccagcgcctccatcagaaccgctcttagccacgtcgataacttgatctccggtgttaccagaggtttccgttacaagatgaggttcgtgtacgcccattttcccatcaacgcctccatcggcggtgacggaaagtctatcgagatccgtaacttccttggcgagaagaaggtgagga

SEQ ID NO: 149833 - DNA, 422 bp, Arabidopsis thaliana columbia
caaaaaaaagaaaccacaaaaccaaagtttttattggcttcctcaaccatggctttgtcctcccctgccttcgccggaaaggctgtgaagcctgccgcatcagatgtcctcggaagcggccgtgtgaccatgaggaagactgtcgccaagccaaagggtccatcaggcagcccatggtacggatctgaccgagtcaagtacttgggtccattctccggcgagcccccgagctaccttaccggtgagttccccggtgactacggatgggacaccgctggtctatccgccgacccagagaccttcgccagtaaccgtgagctagaagttatccacagcagatgggccatgctcggagccctaggctgcgttttccctgagctattggctaggaacggagtgaagttcggagaagcggtttggtt

SEQ ID NO: 149834 - DNA, 421 bp, Arabidopsis thaliana columbia
gaaatatacttcgcataatgacgataatgatcaagtttctcctgttagctctgctcgtgatctctccgatttgcgccgagaaggacctgatgaaagaggaatgccataatgcacaagttccgaccatttgcatgcaatgtcttgaatccgacccaacctccgttcatgcagaccgtgttggcatcgccgagatcatcatacactgtctcgactctcgtctcgatatcatcaccaataacattacaaatatattgtcactgggaggaggaacgaaagaagtgagaaaaatcttggaggattgcagaaatgacacgtcgacggtggcacctaaactactgtcggaagccaaaacaggtctgaaaaccggtgattacgacaaagccgccaaatcgatagagtatgctagcattcctcatagctg

SEQ ID NO: 149835 - DNA, 358 bp, Arabidopsis thaliana columbia
atcattaccaaatcatcaactcaatcgtttctctcaaatttagggttttctgtttggtcgaaagtcttgcggttttctgaatcatctctatctggtttgagggtttcgtttgatatctggagaaaggggtttctggaaacaaggagttcataattcgcgatcttgatctatcgatcttcatttatatataaaagcgtgaatgagattatgatggagtcgaaaggtggtcaaaagaagcccagcagtagtagttccttattttacgaagctcccctttgtttccggcattgaagacgttcgtccaaactgtcgcattcaacaatatcaaattcttcttgtctactcaaactgctccaag

SEQ ID NO: 149836 - DNA, 417 bp, Arabidopsis thaliana columbia
attttcacattcactgttacttcttcatttaacttctcactctctctcacacacaagtgtactctctctggagatttgaagaaaaccctaattcccaattttcttttgtcgttttccttctccgacgattgagagttttcctagatctaaagaaaaaagtttcaatcttcactatgcaatactgagaagaaattccacaaggaaaaaaaatgtcaagctccgacccgaaacccggacctaaaccgggtccatggccaccaactccagaatccgtcgcaatgccaccgtcttcctgggctaaaaaaaccggatttcgtcccaaattctccggtgaaactaccgccactgattcttcttccggtcagctctcattaccggttagagctaaacaacaagaaacccaaccggatcttgaag

SEQ ID NO: 149837 - DNA, 416 bp, Arabidopsis thaliana columbia
gctttatcaactgtgtttggaagtggagaagatgcaacagctgcagggaccgaatctgagccaagtcgcgtcctaaagtttagctcttccgctcggtggcaacttcatttcaacgagatcaaagaatcaaacaaactgctggtggttgatttctcggcctcatggtgcggaccatgtaggatgattgagcctgcgattcatgccatggctgataagttcaatgatgttgatttcgtcaaattagatgttgatgaacttcctgatgtggctaaagagtttaatgtgacggcaatgcctacctttgtgctggtgaaaaggggtaaagaaattgaaagaatcattggtgccaaaaaggacgaacttgagaagaaagttagcaaactcagagcataatgagcattgttaacgccttaacc

SEQ ID NO: 149838 - DNA, 414 bp, Arabidopsis thaliana columbia
ggctgaggaaatcaagaatgttcctgaacaggaggtgccaaaggtagcaacagaggaatcatcggcagaggttacagatcgtggattgttcgatttcttgggaaagaagaaagacgaaacaaaaccagaggagactccgatcgcttcagagtttgagcagaaggttcatatttcagagccggagccagaggttaaacacgaaagtcttcttgaaaagcttcaccgaagcgacagttcttctagctcctcaagtgaggaagaaggttcagatggtgagaagaggaagaagaagaaggagaagaagaagccaactactgaagttgaggtaaaggaggaagagaagaaagggtttatggagaagttgaaagagaagcttcctggacacatgaaacctgaagacggttcagccgtcgc

SEQ ID NO: 149839 - DNA, 419 bp, Arabidopsis thaliana columbia
cccaaaaccgatccaaattccgagaaagacaaccaaattttccttttcctctgcaaaaatgtttattgagagcttcaaagttgagagcccgaacgtgaagtacacagagaatgagattcactctgtgtacgattacgagacgacggaggttgttcatgagaagaccgtcaatggcacttaccaatggattgtgaagccaaagactgtcaaatacgatttcaaaaccgatattcgtgtccccaaattaggggttatgcttgtgggtttgggaggaaacaatggatcaactctcaccgctggtgtgattgcgaacaaagaaggaatctcgtgggcaacgaaagacaaagtgcaacaagcgaattacttcgggtcactaactcaagcttcatcgattcgtgtcggatcttttaacggtgaag

SEQ ID NO: 149840 - DNA, 420 bp, Arabidopsis thaliana columbia
attagaaaccctagcgagcggaggaaggtgacaaagaacgagacttttgagagattggagatttcaattttgagatcaaatcttgaaatcaacaaataggagaaagatttagtgatgggtaagaagaagaagagagctacagagaaggtgtggtgttattactgcgatagagagtttgatgatgagaagattcttgtgcagcatcagaaagctaagcactttaagtgtcatgtctgtcataagaagctttctacagctagtggcatggtgattcatgttcttcaggttcataaagagaatgttacaaaagttcctaatgctaaagacggtcgagattcaactgatattgaaatatatggaatgcaaggaattccaccccatgtcttgactgctcattatggagaagaagaggatgagcct

SEQ ID NO: 149841 - DNA, 417 bp, Arabidopsis thaliana columbia
ggcgacccgaagcgagtcgatgcaaaagattttttcttctcaggtctcaatgtgcccgggaacaccaataatcaagttggctctaatgtgaccactgttaatgttgatcagatcccagggctaaacaccatgggaatatcattggtccgcatagactacgcaccgcatggccaaaatccacctcacacgcaccctcgtggctcagagatccttgtccttgtcgaaggaacattatacgtcggttttgtctcttccaatcaagataacaaccggttattcgccaaagtattgcaccccggtgatgttttcgtgttccccataagaatgatccattttcaggttaatgtggggaaaattccagcagttgcttttgcgggattgagtagccagaacgcatgtgttatcacaattgcaaac

SEQ ID NO: 149842 - DNA, 421 bp, Arabidopsis thaliana columbia
attcagtcttcttcttcttcaccaacccaatttcttttcttcaactctctcttctccccaaggccgacttctgatccgcatcgatttccatggcagccaacaccatttctctttccaacgtcgccgcctccaagaatctcaactcctttcaaagccgtgcctttattgctccaccaactatttttttccctgtggcttctgcaaagtctaaacctggggaactttctttatcttccacgactctttccaggtctcgtgtgcgcgccggtgctagccagctcatgaacgaaccgcttaacgatcaacgctccatctcttctcccactgtcgtcgaggttgatcttggtgaccggagttatccgatctatatcggcgccggcttgcttgatcactcagaacttcttcaaaggcatgttcacgg

SEQ ID NO: 149843 - DNA, 419 bp, Arabidopsis thaliana columbia
gttgacagtctctaaccatgggtaaagagaagtttcacatcaacattgtggtcattggccacgtcgattctggaaagtcgaccaccactgggcacttgatctacaagttgggtggtattgacaagcgtgtcattgagaggttcgagaaggaggctgctgagatgaacaagaggtccttcaagtacgcatgggttttggacaaacttaaggctgagcgtgagcgtggtatcaccattgacattgctctctggaagttcgagaccaccaagtactactgcactgtcattgatgcttcctggccatcgtgatttcatcaagaacatgatcactggtacctcccaggctgattgtgctgtccttatcattgactccaccactggtggttttgaggctggtatctccaaggatggtcagacccg

SEQ ID NO: 149844 - DNA, 279 bp, Arabidopsis thaliana columbia
ctttcgcttactctctccccattctctttcttttatagcctcaccttatattttttggcttgtggtttctcggacaaatccgcctttttataaagctaccttagtattttccttcttttaccatctgttttagttttctcctttactctttagatggcagactttcagaatggtaatgcctttgcccctcctagtgtagtgccttcaaatgctatgaatacttattcctttaatgttaaaaactttatctcacgttcaagagcactttattaactcttt

SEQ ID NO: 149845 - DNA, 420 bp, Arabidopsis thaliana columbia
aaaaaaaacagagctttacaatttctctctacagagatcgaagatatggaaggcaaggaagaagacgttagagttggagctaacaagttcccggagagacaaccaatcggaacatcagctcagagtgacaaggactacaaggaaccaccaccagctccgtttttcgaacctggtgagctttcttcatggtctttttggagagctgggatcgctgagttcatcgctacttttctctttctctacatcactgtcttgactgttatgggagtgaaaaggtcaccgaacatgtgtgcttccgtcggaatccaaggaatcgcttgggctttcggtggtatgatatttgccttagtctactgtaccgctggtatctccggtggacacatcaacccagcggttacttttggtctgttcttagcccgg

SEQ ID NO: 149846 - DNA, 422 bp, Arabidopsis thaliana columbia
tttcgttcttgtaaacctatcaggtcggtttgatgcttagaggaatgggcttcaacaaaagtacatatatattccttgccgctggcccgatatatagcgcaaatagaactatggccccactactcgagatgttccctaatctacagacaaaggagatgcttgcttctgaggaagacctggctccttttaagggttctacgattttccactgtttgttcatccaggatgagtcctttctgacttgtaaacttatgtgtctgtgtttagaacttctcctcgagaatggctgcaatagattacacggtgtgtctccacagtgaggtatttgtgacaacacaaggtggaaacttccctcatttcctcatggggcatcggaggtatttgtttggagggacattcaaagaccattcagccagacaagg

SEQ ID NO: 149847 - DNA, 417 bp, Arabidopsis thaliana columbia
aaatataagaaataacaaaatggctcgagtctcttctcttctttctttctgcttaacacttttgatccttttccatggctacgcggctcaacagggtcagcagggtcagcagtttccgaacgagtgccagctcgaccagctcaatgcgctcgagccgtcacacgtactgaagagcgaggctggtcgcatcgaggtgtgggaccaccacgctcctcagctccgttgctcaggtgtctcctttgcacgttacatcatcgagtctaagggtctctacttgccctctttctttaacaccgcgaagctctctttcgtggctaaaggacgaggtcttatgggaaaagtgatccctggatgcgccgaaacattccaagactcatcagagttccaaccacgcttcgaaggtcaaggtcaaagcca

SEQ ID NO: 149848 - DNA, 407 bp, Arabidopsis thaliana columbia
attttaaagattaaggaagcagtgtgtataattttttctttgtaatgacaaactctgctatgggaaggaaatatgtggttttgggtttagcagtgtgtctctttctctcaagcttcaatgaggtttcttgtcaggccgagggaggcatagagtcgagtaatagtgaatttcaaggtagcttcctagaagaaggagaagtagaagttacaaagattgagagtgaaagccagagcagcagctcggagcagaacactaaattgtctatgtcggaggaaaaccaagaagattcttttgatgttgataagtttatcgagtctgaagctgttagtagtcgtgaagaattaggtcaaagttcgagtattgacgaaagtaaccgtgaccctgaagccattctcgatagtctaaat

SEQ ID NO: 149849 - DNA, 419 bp, Arabidopsis thaliana columbia
ctgcttaccattctaacattagcttatgcgaagaagtcaggtgatgtgacagagttgcagattggtgttaagtacaagcctcagaaatgtgatctccaggctcacaaaggggataagatcaaggttcactatcggggaaagttaactgatggaactgtctttgattcaagttttgagagaggtgaccctattgagtttgagcttggaactggtcaagtcatcccaggatgggaccagggtttattgggagcttgtgtaggtgagaagagaaagttgaaaatcccatccaagcttggttatggtgataacggctcaccaccaaaaatcccgggtggggcgacactgatattcgacaccgagcttgttgctgtgaacggagaaccatccagcgaagcgaaatcaaagaatgagctttgatt

SEQ ID NO: 149850 - DNA, 418 bp, Arabidopsis thaliana columbia
gcaaccagagctgcttttatggagattcaagctagcatgattgaactcactgggaagctcaaacaggtgcagaatcagatgcgcaacaaagagggagatagaaagcgagctttcttaaccttggaggagctgaggccattgcctgaagagacaaacacctacaagtcaataggaagaacgtttgttctagagcccaagacagtgctggagggtgaacaagagcaaaaactcaaggacagtgaagctgccgttgcttctctacagacatccaaggaatacttggagaagcaggtagcagaggttgagaacaacttgagggagctgttgcagcaagaaccgggcattgctcaacagattatgtccatgtctatgtaacttttgtattatcccaaacctttgagtttggagagcttttggg

SEQ ID NO: 149851 - DNA, 417 bp, Arabidopsis thaliana columbia
caacttcagcgacaagataacaaaacgctttcacacgatcggataaaatggcggagaagagctttaagtacatcatcctcggcggcggcgtctctgccggatacgcagctaaggagtttgccaatcaaggggttcaaccaggagaattggctgttatctcgaaagaggcggtggctccatatgaacgccctgcacttagcaaggggtatttgtttcctgaaggggctgctagacttccaggtttccattgctgtgttggtagtggtggagaaaaactgcttcctgaatcctacaagcagaaaggaattgagttgatactaagcacagaaatagtgaaagcggatctctctgccaagagtcttgtcagtgcaactggggatgtcttcaagtatcagacgctcataattgcaactggtt

SEQ ID NO: 149852 - DNA, 414 bp, Arabidopsis thaliana columbia
atgatcttttagtttttttttgtttcccccaaatctcactttttctcacttgctctccatctcaaatttcacacaaccgagtaaaccctagaatctccgcttctcattcaattggtttcatcactggtcttaatcattgctagggtttactcggttacctttatcatcatcaattgatccttgttcataattcatcctcttttctttctgtctttggcataaagtttcaatttttcttcttcttctctttctcactcaatcatggcgtatcagcctgttccgggttctgggtttcactacttgaactctcctttcggtgatacaactttcacaaaggtgttcgtcggtggtcttgcttgggaaactcaaagtgaaactcttcgccagcatttcgaacagtacggtgaaatcctt

SEQ ID NO: 149853 - DNA, 420 bp, Arabidopsis thaliana columbia
aaaactccaagttcttacctttttcccatttacaatcggtaaatttctccgatcacgagatacaaatttcactttctgatatcttggatcttccgatcactttgaattttttggtttgttgattttttttttttttttgttccataaagttcgaattttttatagagaagaaaccatgaatgctttagctgcaacaaacagaaacttccgtcatgcatctcgaatcctgggtttggattcgaagatcgagagaagtcttatgatcccatttagagaaatcaagggtgagtgtacgattcctaaagacgatggcactctggtttcataccatcggatttagggttcaacatgacaatgctcgtggacccatgaaaggtggaatcagatatcatcctgaggttgatccagatgaagttaacg

SEQ ID NO: 149854 - DNA, 421 bp, Arabidopsis thaliana columbia
attagcgttgagaaaaaaaaaaagtaagaacgagagagagaaagccatgtctgcgaaaacaatcctatcatcagtagttttggtggttctcgtcgccgcatcagcagcggctaatatcggattcgatgagtcaaacccgatccgaatggtctccgatggtctccgggaggtagaagaatctgtttcccagatcttaggtcaatctcgtcacgttctctctttcgctcgcttcactcaccgatatggtaaaaagtatcagaacgtggaggagatgaagcttcgattctcgattttcaaggagaatcttgatttgatcagatccaccaacaagaaaggcttatcttacaaactcggtgttaatcaatttgctgatttgacatggcaagagtttcaaaggaccaagcttggtgctgctcagaac

SEQ ID NO: 149855 - DNA, 420 bp, Arabidopsis thaliana columbia
gaagaagtgctgttgatatggacgctgttacttgtatagacatgtcttcgttttaccagatgctgatgcactgtcttccttccacaggcgagtcccaaaaagagcaacttgcgctgccgtttcgagctcttccttgggatactgctgaggttcatcttgccttgtttgttcacagagtttcgggtttgcctaagggactgtatctcctagtcagaaacgaggatcatctcagtgatctcaagacagctacgaggcctgaatttgagtggactaaaccagatggatgtccggacaatcttcctctgtacaagctcgccgagggtgattgccagaggctggcaaaagggctatcatgtcatcaggacattgcaggggatggatgcttcagcttaggcatgatagctcggtttgaaccagcac

SEQ ID NO: 149856 - DNA, 418 bp, Arabidopsis thaliana columbia
ggaacgaatcttcgaagtcgaaactgcgtgtctacggattgaatctctgcagcagcttacgaccactgacccttttgcttttgattcaatcgatagacgacggatacaagttctcgctatcgccgagccggagccggagtctgagctgaagccctgtatctgtaactcttccaacagtggacataccttgagagatgaagatcgttcgcagggattttgttcgtaatggacccggaagcgttaagatggtggcagaggactctgatgatctctggtatgcttataacttgattgctgtgggcgatagtgtaatggctgtcactttcagaaaagttcagagagagatacctggtgggggaagagactctgaacgtgttaaactgaagctggaagtacaagttgaggaggtggactatga

SEQ ID NO: 149857 - DNA, 415 bp, Arabidopsis thaliana columbia
aagggacgaggtcttatgggaaaagtgatccctggatgcgccgaaacattccaagactcatcagagttccaaccacgcttcgaaggtcaaggtcaaagccagaggttccgtgacatgcaccagaaagtggagcacattaggagcggtgataccattgccacaacacccggtgtagcacagtggttctacaacgacggacaggaaccacttgtcatcgtcagcgtcttcgatctagccagtcaccagaaccagcttgaccgcaacccaaggccattttacttagccggaaacaacccacatggtcaagtatggctacaaggacgagagcaacagccacagaagaacattttcaatggatttggacccgatgttattgctcaagctttgaagatcgatcttcagacagcacagcaac

SEQ ID NO: 149858 - DNA, 418 bp, Arabidopsis thaliana columbia
ctctccttatcgctctctaaaatccactataagagattcgtaaccgtaagtgatggccctcaaggtggaagctaaaggtggaaaggtagggatccagtgggatgatggatctgactatcatgatgtaacaaagatatatgtacgaggtggtcttgaaggtattcagttcatcaagtttgagtatgtcaaggctgggaaaaaggttattggaccaatccatggtgcttctggtcgtggtttcacagagacgtttgagatcaacaatttggaaaaagaatatttgttatctattgagggttactacaacgcatctaccggtgtgatacaatgtcttcagttcataactaacaagaagacttatgatccaatcggatacaatgagggtgctaggtttacacttagcgctagcaggagcaag

SEQ ID NO: 149859 - DNA, 415 bp, Arabidopsis thaliana columbia
gtgaatgacgctccagcattgaagaaagcggatataggtatcgctgtggcggatgcaactgacgctgcacgaggtgcttctgatattgtcctcaccgagccaggtctcagtgtgatcatcagcgcggttctaaccagtagagccatcttccagagaatgaagaactacacaatatatgcagtctcaattaccattcgtatagtgtttgggtttatgctcattgctctaatatggaagttcgacttttcaccattcatggttttgatcattgctatattaaacgatggaaccatcatgactatctcaaaggacagagtcaagccttctccaacaccagatagctggaaactcaaagaaatcttcgcaaccggcgttgttcttggaggctacatggctataatgactgttgttttct

SEQ ID NO: 149860 - DNA, 359 bp, Arabidopsis thaliana columbia
caacaacaacgatgctgcttcgaatttctggtaacaatctgagacctttgagaccacaatttctcgctcttcgaagctcttggttatcaacttcgccggagcaatctactcaaccacaaatgcctccgagagtaccaaatcttattggaggttcttttgttgagtctcaatcatcttcgtttatcgatgttataaaccctgctacacaagaggttgtatctaaagttccattgactactaatgaagagtttaaagctgcggtatccgcttgcgaagcaagcgtttccgttgtggagaaacacgccgattactacccggcagcgtgttatgctaaagtttcaagagcttatacgcaagaa

SEQ ID NO: 149861 - DNA, 417 bp, Arabidopsis thaliana columbia
ctctcagtacacttcttttcatacctcaagagactaaaactagtttgaggagatttagaggagtgtttggttctttggataacaatatcccaaactgaaaatggctaagtcatatggagctatcttcctcttgaccctcattgtcctcttcatgcttcaaaccatggttatggcctcaagtggatctaatgtgaagtggagccagaaacgttatggaccaggaagcctgaaacgtacccaatgcccatcggaatgtgataggaggtgtaaaaagacacagtaccacaaggcttgcattacgttctgcaacaaatgctgcaggaagtgtctctgtgtgcctccgggttactatgggaacaaacaagtttgctcctgctacaacaactggaaaactcaagagggtggaccaaaatgccc

SEQ ID NO: 149862 - DNA, 414 bp, Arabidopsis thaliana columbia
cacaaccaccgttctccgtcacggtggcgctttattctctcatcggagcgcctcaccggtggcagacggtgtcgttgttcctctcctaaaacctccatcaatcaccatctctttacacagagctctaaccaaaatcttcgagagatggggcagagtatgagctgtggaagtcgaccggagcacggaatattcgcctctgtacagtgcggcgatatcatcactatccgtcgtgtgatggcgacggagcctagtctgttgaatcaaactactccttatgatcgtcactctgttcttcatgtcgctgctgctaatggtcagatcgagattttgtcattgcttttggaacgatttacgaatccagatttgttgaatcgtcacaagcagactccgtttatgttggctgcgatgtatgga

SEQ ID NO: 149863 - DNA, 415 bp, Arabidopsis thaliana columbia
ctttcttctctaatgtagatctgcacttacttcttatcacaacccacttggctcctcattcgcttggttctggggtcaatctcaatcttcaaattcatcttcaccctcctcagatctttctacatctacttgctccgaccatccaaaaacctccgccgatacggttcatgggcaatcatcaccggaccaacatacggaatcggtaaagctttcgcctttcagttagcccataaaggtcttaaccttatactcgttgctcgtaacccagacaagctcaaagatgtctctgattccatcaggatcttaagttagtcaaactcagatcttgtccgttgtgatggatttctctggagatattgatgaatgtgtgaaacggatttaggagagtcttgaaggattagatgttgggattttg

SEQ ID NO: 149864 - DNA, 420 bp, Arabidopsis thaliana columbia
cgcgaaattagttttcaccggcgagattttttatcctctctacgagataacacttagaagaagaggcagttaaaacagagagacgacgtcgtgttatttttccaaattccggtgatctgagaatgacgtcggggactagaacgccgacttggaaagagagagagaacaacaaacggcgagagcggcgaagacgagcgattgcggctaagatcttcgcaggactaaggattcatggaaacttcaagctccctaaacactgcgacaacaatgaagtcctcaaagctttatgcaatgaagctggttggactgtagaagacgacggaactacttaccgcatgggatgcaaaccaatggatcgaatggacctcatgaatggttctacttcagctagtccatgctcatcgtatcaacatagccctc

SEQ ID NO: 149865 - DNA, 372 bp, Arabidopsis thaliana columbia
cgagtggaacgagtactgcggatatcaaaactttgaggtgacttcctttttgaaacaagtgttgtgatcctcttcctcaggtgatgacccagcaatcaatctatatgcatgcaccatcttcttttgtccgggtcgaaacgctcgcccaatagcttggcgggtcacagaagggtttaggggaacatcgagtgctctcatgcatgatgctggaccatgcgagataccttctccacatgctctgatcgatccaaagaatgttacggcgtatggcgaactggcaaacgactacatgcgaccactcacgcaggtccgtactggtattgaccgagagaacaaaagcttgtctgcattgtttacataccttagcttaag

SEQ ID NO: 149866 - DNA, 423 bp, Arabidopsis thaliana columbia
cttctctcttcagtctctctctctctagacgatctctatcttgaataaaataccgataatgacctcaaccaatccggtggtcgccgaagtaataccggcggaaacttctacagatgctacagagacgacgattgcaacgacggaagctggtgaagcaccggagaagaaggtgaggaaagcttacacaatcaccaagtctagagagagttggactgaaggagaacacgacaagtttctggaagctcttcaattgtttgatcgtgactggaaaaagatagaagattttgttggttcaaagacagttattcagatcaggagccatgcccaaaaatactttctaaaggtccaaaaaaatgggactttagcacatgttccaccccctaggcctaagcgcaaagctgctcatccatatcctcaaaaggc

SEQ ID NO: 149867 - DNA, 421 bp, Arabidopsis thaliana columbia
ggtttcttcttctttaaccaagcttgtgttctttggttgtctcctcctgctcacatgcacggacaaccttgtggctggaaaatctggcaaagtgaagctcaatctttactacgaatcactttgtcccggttgtcaggaattcatcgtcgatgacctaggtaaaatctttgactacgatctctacacaatcactgatctcaagctgtttccatttggtaatgccgaactctccgataatctgactgtcacttgccagcatggtgaagaggaatgcaaactaaacgcccttgaagcttgcgcattaagaacttggcccgatcagaaatcacaatactcgttcatacggtgcgtcgaaagcgatacgaaaggctgggaatcatgtgttaaaaactctggacgtgagaaagcaatcaatgattgt

SEQ ID NO: 149868 - DNA, 418 bp, Arabidopsis thaliana columbia
gtcgaagaggcttgatgctagcgactcatgccatgatgggttttggtaaagatcctgactcccaatgaacaaatcagcattttattcactccctaaggtgtttggtgagtcgaaaatagttgaatatcatattcaagaaagtgaaacctcgccggggaagaaagagatactaattgacaacaaacaacactacaagatcatgggaaggaacatagatatgatctctctcattaagctctatgtcgaggacgggaagatcgttcgacatgaagactggtgggacaagaaacctctgaggaacagagacacggttagctttccattagtcggacgggtaatggagatgggtcgaagaggcttgatgctagcgactcatgccatgatgggttttggtaaagatcctgactcccaatgaaca

SEQ ID NO: 149869 - DNA, 418 bp, Arabidopsis thaliana columbia
attttacatttctgcagataagctgctcatactagttatacaacagactccatagaaggtgacatttgtttaagatactcttgttcctggaacacatacgaagatgaagaaagtcttcggacaaactgttagagaccttaagagagaggtcaacaagaaagtgctcaaagttcctggagtagaacagaaggttctagatgctactagtaatgagccatggggtccacatggatcacttcttgctgatcttgcgcaagcttccagaaattatcatgaatatcagctgatcatggtggtcatatggaaacgccttagcgacaccggaaaaaactggcggcatgtctataaggctttgacagttttggagtacatggtaggccatggatcagaacgtgttatagacgagattagagaacgt

SEQ ID NO: 149870 - DNA, 345 bp, Arabidopsis thaliana columbia
gggctggctctcctgagagagactctatacttctcctagtgtttgagctccttttgactcttcttggattccttcttccttgtgtgtttttcttctttctcgaacttttgtttgttgaatttctgctccttttactttcttctccttcttcttccgtcaatttcgtttcttcactctcttgcctaaagctctaaactttttttttgttttctctcaaagtttccatttttgagctctttcttctttgatctgcttcaagttctttcctatttcgttacttctatgggtttttaatgagcttaaaaacaaacctttttcgtctaatttcctataatctactttttt

SEQ ID NO: 149871 - DNA, 350 bp, Arabidopsis thaliana columbia
caattatctacttagagaatttgtgcgcttgggagtccctgattattaaataaaccaaggattttaccatgactgcaattttagagagacgcgaaagcgaaagcctatggggtcgcttctgtaactggataactagcactgaaaaccgcctttacattggatggtttggtgttttgatgatccctaccttattgaccgcaacttctgtttttattatcgcattcattgctgctcctccagtagatattgatgggattcgggaacccgtttctggatctctttctttacggaaacaatattattttcggtgccattatttctacttttgcagctattggattgcattttta

SEQ ID NO: 149872 - DNA, 416 bp, Arabidopsis thaliana columbia
  unsure (1)..(416): unsure at all n locations
caaaccttcttcttctttcttcttcttttacaaaatttcacaaaaccagagggaggggagattcaaacaaacgaatcaacatgtgtgaaattctaaatatatgccagcccaactcgcccagaatctcgatttctccacctttcctcttctattcatcttccaaatcccttaaaaaaagactcaaactttttaattttggtccaaaaaagactcaaactatcttcatcaatggcggagtaaactcacgagagagacgtttttacctaaagctagatgcatcccacaagctctaatcctgggacgatacgaaaagggtaagcttgtcggtcatggtaccttcatttaagtttaccttgcacataacgtttattctttcgtttgcgtancaatcaaagtaatccacatggagaaagttc

SEQ ID NO: 149873 - DNA, 417 bp, Arabidopsis thaliana columbia
cggacgcgtgggaattcgattcattttcaattaggccttgctctagcctccgtaggagttattacttccttggtagctcaacacatgtactctttacctgcttatgcgttcatagcgcaagattttacgactcaagctgcgttatatacccatcaccaatatattgcaggattcatcatgacaggagcttttgctcatggagctatcttttttattagagattacaatccagaacagaatgaggataacgtattagcaagaatgttagaccataaagaagctatcatatcccatttaagttgggccagcctctttctagggttccatactttgggactttatgttcataacgacgtcatgcttgcttttggtactcccgaaaaacaaatcttgatcgaacctatatttgcccaatgg

SEQ ID NO: 149874 - DNA, 416 bp, Arabidopsis thaliana columbia
accagactcaaacagagagtgaaaatgccggcgggacacggagtgagggcgagaacaagagatctgttcgcgagaccattcaggaagaagggttatattccactctccacttacctcagaaccttcaaggtcggcgattacgtcgatgtcaaggttaatggagctatccacaagggtatgcctcataagttctaccatggtcgtactggtcgcatctggaatgtcactaagcgtgccgttggtgttgaagtcaacaaacagattgggaacagaatcataaggaagaggatacatgtgcgtgtggagcatgtgcaacagtcaaggtgtgctgaggagtttaaactcagaaagaagcagaacgatgtgcttaaggctgatgctaaagccagaggagagactatcagcaccaagagaca

SEQ ID NO: 149875 - DNA, 421 bp, Arabidopsis thaliana columbia
cggacgcgtgggttccaaaaacctcaaacgctcctcacacaacgggtttaggagtgatggggtctctcgttcgtgaatgggttgggtttcagcaatttccagcagctacccaggaaaagctgattgaattcttcggaaaattgaagcaaaaggatatgaactcaatgacagttcttgttctgggtaaaggcggtgtcggaaaatcatccactgtcaattctcttatcggcgaacaagtcgtccgtgtcagtcctttccaagctgaaggattgagaccagtgatggtttcaagaacaatgggagggttcactatcaacattattgacacccctggacttgtggaagctggatatgtcaatcaccaagctctcgagttaatcaaagggtttcttgtgaacagaacaatagatgtcttgctcta

SEQ ID NO: 149876 - DNA, 420 bp, Arabidopsis thaliana columbia
cggacgcgtgggttcggttgttcacgaattgtttctgagtttgcccaaacacaaacgaattgaggaaaactgaaagatggcttcttgttcttcttcttctattagtctcctccaacctcttcatagtctctcttcttccactcttttcttttctcagccaagttttcatttttcgtcctctcttaaacctaataagtgcaaaaggcacaatctttcgaaatccttgactctccgatttgctcttaccgaatcagattctacttaacctcttgaaatagaagaaccaagttccaaatcccttcttctacaactctctaagtgttttgatcttccatcagattacttccagcagctaccaaatgatcttcgtctcgatttgaatgatgcggcttttgatctctccaatggacctgtcatcga

SEQ ID NO: 149877 - DNA, 421 bp, Arabidopsis thaliana columbia
agaacaatggcttcctctatgctctcttccgctactatggttgcctctccggctcaggccactatggtcgctcctttcaacggacttaagtcctccgctgccttcccagccacccgcaaggctaacaacgacattacttccatcacaagcaacggcggaagagttaactgcatgcaggtgtggcctccgattggaaagaagaagtttgagactctctcttaccttcctgaccttaccgattccgaattggctaaggaagttgactaccttatccgcaacaagtggattccttgtgttgaattcgagttggagcacggatttgtgtaccgtgagcacggtaactcacccggatactatgatggacggtactggacaatgtggaagcttcccttgttcggttgcaccgactccgctcaagtgt

SEQ ID NO: 149878 - DNA, 437 bp, Arabidopsis thaliana columbia
cgacccacgcgtacgctgaaactaaacctatcttcctcaatcctattgattctctttgcggcggcggcgagtaaagagatcggattcgatgaatctaatccaatcaaaatggtctccgacaatctccatgagcttgaagacaccgtcgtccagatcctaggacagtcccgtcatgttctatccttttctcgcttcactcacaggtatgggaagaagtatcagagtgtggaggagatgaagttaagattctctgtttttaaggagaatcttgatttaatcagatccactaataagaaaggcttatcctataaactctctcttaatcagtttgctgacttgacatggcaagagtttcaaagatacaagcttggagctgctcaaaactgttctgctactttaaagggtagccacaagatcactgaagctacagttccaga

SEQ ID NO: 149879 - DNA, 416 bp, Arabidopsis thaliana columbia
gaaagcacttcggatgatgtattatgcagaccatcacggttttccaatcgtgacatttatcgacactcctggagcctatgcagatcttaaatccgaggaacttggacagggtgaagcgattgccaacaatctgaggacgatgttcggcctgaaagtgccaattctttctattgtcattggggaaggtggttctggtggtgccctagccattggctgtgcgaataaaatgctgatgctcgaaaacgcagttttctatgttgccagtccagaggcatgtgcagcgatcttgtggaagacttctaaggctgctcctgaggctgctgaaaagcttagaattacctccaaggagctggtcaagcttaatgtagctgatggaatcattcctgaaccgcttggaggggcccatgccgatcctt

SEQ ID NO: 149880 - DNA, 377 bp, Arabidopsis thaliana columbia
gaaagaagagcttctagaccttatcatcgacgccatcaagatcggatatcggcatctggactgcgctgctaattataagaacgaagctgaagtcggtgaggctcttacagaagcattcacgacaggccttgtcaagagggaggatctcttcattacgactaagctatggagtgcagaccatggccatgttattgaggcatgcatagacagtctcaagaaactataacttgattacctcgaccttctcctcgttcatatacccatagctacaaaacacaccggaataggaacaaccgactgtgctggtgggatgatgggggattggacatagatacaacactctatgtggcaactacatggtacgacatgtgaaagca

SEQ ID NO: 149881 - DNA, 414 bp, Arabidopsis thaliana columbia
cccacgcgtccgaacagtattgacagtgatgggagtgaagagagcaccaaacatgtgtgcctctgttggaatccaaggcattgcttgggctttcggtggcatgatctttgcccttgtctactgtactgctggaatctctggtgggcacataaacccagcggtgacatttggtctgttcttggctcgtaagctgtcattgacgagagctgtcttttacatcgtgatgcaatgtctcggagccatctgcggcgccggagttgtcaaaggcttccagccaaatccttaccaaactctcggcggaggagccaacacagtcgctcacggctacactaagggctctggtttgggtgctgagataatcggaaccttcgtccttgtctacacggtcttctccgccactgacgccaagagaag

SEQ ID NO: 149882 - DNA, 340 bp, Arabidopsis thaliana columbia
cattgatccaacatggttcggtttctggtacctctgcggttcgattgagcttctcatgctctgtatcaccaccgtcgtcttctcctccactgtcaagggtttctctcaattttcagtcggagaagaagagttgttaccggagaatgatatgcagagctatggttcaagactcggttcaagggattccttcagtttacgccagagaaatggagcgtctctctgctaaggaatcgcttattctcgccttcaatgatgctggaggatttgaggctctagttacagggaagatcactgatatgcaaaagattgatgtcaatgaaaggataacgaatcttgagcg

SEQ ID NO: 149883 - DNA, 408 bp, Arabidopsis thaliana columbia
ctctgtttgtccttgttatgttgttgtaaaacttgaaactttggaagcaaactcatttttataacaaaaggaaatcttattttatacattacattaaagcaacatgaaagacaattcaagctggtcttgttcttgttcttggtcttcgtggaaaatatgtttgttgtctgttctctttctcaccgagacgatcaccgccgtgaagctgccgccaaaattgattattccggctgtaatcgctttcggagactccatcgtcgacacaggaatgaacaacaatgtcaaaaccgtggttaagtgtgattttcttccttatggtatcaatttccaaagcggagttgccacggggagattctgcgatggacgagtccctgccgatttgctagccgaagaactgggaataaaatc

SEQ ID NO: 149884 - DNA, 411 bp, Arabidopsis thaliana columbia
ctcactggcaaaaaagaaagaaaaaaaattcagaagcctttgttttcatcgatgaagaaattaacaaacaaaactaaaaaataggatattcgctggccgaatcgcgtcgatccacatcgcaggtgagggttcctgcaatttatccctcgtggtctctgaatctcagatcgtcgtcaacgaatcctccattttctgaatcaaaattttctggaaacaatggggagcttggggacgatgctgagatatccggatgacatatatccgctcctgaagatgaaacgagcgattgagaaagcggagaagcagatccctcctgagccacactggggtttctgctattcgatgctccacaaggtttctcgaagcttttctctcgttattcagcaactcaacaccgagctccgtaacgcc

SEQ ID NO: 149885 - DNA, 453 bp, Arabidopsis thaliana columbia
ttccggttcggaagggccgacccagagcgctacccgttcgatcaggggtttaggtctttccattactttttaatgttttttctgttactgggtccgcgatctgattttacgacaatagagtttcgggttttgtcccattccagtttgaaaataaagatggctcgtaccaagcaaaccgctcgtaagtccaccggaggtaaagctccaaggaagcaacttgctactaaggctgctcgtaaatctgcaccaactactggtggagtcaagaaaccacatcgttaccgtcctggaactgttgctctccgtgaaatccgtaagtaccagaagagtactgagttgcttatcaggaaactgccatttcagaggctagtccgtgagattgctcaagatttcaagactgatttgcgtttccagagccatgctgtcttagctctccaggaagctgcagaagca

SEQ ID NO: 149886 - DNA, 384 bp, Arabidopsis thaliana columbia
gagaaacaggatcattcattatgcccgccttatctcactacagatcagtatcatctggacggtccgttgaccgatcattccttctcatccaacgactcaagatccacggcagctcttcttccttccctgaatcttctccttctgcgtctattctctccggcgcagatccgttgaagtgtacggtctctggtggatctcttgctaaatggatcaccgggatttcagctggatccgccttagggtttctctattggtcctctggttcttctgattccatctctggtttgtttggtgggagtaatttattgtccttcgctgatagttcaacgccttctgtttgtggtgtaaaagtcggcgatctgaaaccgagatcgtttattccga

SEQ ID NO: 149887 - DNA, 200 bp, Arabidopsis thaliana columbia
atatttacgatccacgatctctcttggtggttctggcttcatcgagacgaaaaagggtgctcggatcgggatcttctccggcttcggagccggattgggatctatttctgcaatttcctcaactcaagatctccagatcggtaatgcccagcgaaggattgattttagcgcacatatcgcgaagggcctcttgaccctca

SEQ ID NO: 149888 - DNA, 413 bp, Arabidopsis thaliana columbia
ctcaaaatatggatagtcacaaatggagtctaggtttcacattactggctttcctcgtaagcacttcctcttccgctgagctcatcattaaacaggtcacacagggcagaggaatagagtacaacaactcttacagtctcacgtcgaatcttggagtgacgacaagagagttgagagacgagcgaccatcaagtaagatagtgacaatcacaagcttctctgtgattaaggacagaggagaaccctatgaatcatctatttttgaggctgccggttacaaatggagattagttttgtacgtgaagggtaatccgaaaggcggtataaataatcatatttcactttacgcgaggatagaagagacagaaactcttccaagagggtgggaagtgaatgttgatctcaaactcttt

SEQ ID NO: 149889 - DNA, 428 bp, Arabidopsis thaliana columbia
  unsure (1)..(428): unsure at all n locations
tcggaattnccggggcggaccacaggcgtccggccgaaattaacaattcctctttcacattctttctttcgattttttagcttaatcgggaggagcgttaacaatggctggtaaaggagaaggtccagcgattggtatcgatctcggtaccacttactcttgcgttggagtttggcaacacgaccgtgttgagatcattgctaatgatcaaggtaacagatccacaccgtcttacgtcgccttcactgatagcgaacggttgattggtgacgccgcaaagaatcaggtcgtcatgaacccgatttacactgttttcgatgcgaagagggtgattggtcctagatttactgatagctctgttcaaagtgacatcaaattgtggcccttgacgctcaaatatggacctgctgtaaataccatgatcgtcg

SEQ ID NO: 149890 - DNA, 411 bp, Arabidopsis thaliana columbia
tagggcattgagatggtgaatggagaatcatcaactagtacgtcttactctgataggaacaatgacacaaatgatcaaggaggagactttgaatgtaacatttgtttcgaactagctcaagatccgattgtcactctctgtggccatctcttttgctggccttgcttataccgttggcttcaccaccattcacattctcaagaatgtccggtttgtaaagccgtggttcaagacgataagcttgttcctctttacggtagaggcaagaaccagactgacccgagatcaaaacgttatccgggtttacggattcctaaccgaccaacaggtcaaagacctgagactgctgctcctcctcctcagcctgaagctgcgagtaattttttcaactacggtattggtttgatgggt

SEQ ID NO: 149891 - DNA, 431 bp, Arabidopsis thaliana columbia
ataaaggggaaccaacgtaaccctaattttgctttctcctctttgttcagaaaattttccctttactgtcaaagtccttttcgatttccctctcttaaacctccgaaagctcacatggcgtctcgaaactatcggtgggagctcttcgcagcttcgttaaccctaaccttagctttgattcacctggtcgaagcaaactccgaaggagatgctctctacgctcttcgccggagtttgacagatccagaccatgtcctccagagctgggatccaactcttgttaatccttgtacctggttccatgtcacctgtaaccaagacaaccgcgtcactcgtgtggatttgggaaattcaaacctctctggacatcttgcgcctgagcttgggaagcttgaacatttacagtatctagagctctacaaaaacaacat

SEQ ID NO: 149892 - DNA, 420 bp, Arabidopsis thaliana columbia
gctggctttggctaagaagctaggtttaacagcaagacaagtggaagtgtggttcgagaacagaagagcaaggacaaagttaaagcagaccgaagtggattgcgagtatttgaaaagatgtgttgagaaattaacggaagagaatcggcggctcgagaaagaggcagcggaactaagagcattaaagctttcaccgcggttgtatggtcagatgagtccaccgaccacacttttgatgtgtccatcgtgtgaacgtgtggccggaccatcctcatctaaccacaaccagcgatctgtctcattgagtccatggctccaaatggcccatgggtcaacctttgatgtgatgcgtcctaggtcttaactttaatgctgcttctatgggttgtgtgtgggtcattgtactttttagattattga

SEQ ID NO: 149893 - DNA, 411 bp, Arabidopsis thaliana columbia
gagattcgctttttctcctgcttacttctttttatcatcttctctttgtcggtttgatttggaaaaactttctgcaaaaaaaagagagattcttaaactttttatctcaagatcctttcaaaaaatctgaaaagagaagatttttaataaaaaagaatggttgaaactggtcaccatcatcaacatccaccggcaccggctgcagccggtcatccgccggttccatccatggcgatggcgcgtaacatgggaaccacttggcctccggcggagcaacttcatcatcttcaatattgcatccactctaacccttcttggcatgagacggttgtactggctttccagcattacatcgttatgctcgggactactgttttgattgccaacacactagtgtcaccaatgggtgga

SEQ ID NO: 149894 - DNA, 407 bp, Arabidopsis thaliana columbia
gatcaataaaaaccagaagaagtcatggctcagaacgatacagtgaagctgatgggggcttggtctagcccttattcccttagggcacgtgtggctctacacttgaaatctgtcaagtacgagtacttagacgaacctgatgttcttaaagaaaagagtgaactccttctcaaatctaaccccatccacaagaaagtccctgtcctcctccatggtgacctctccatctctgagtccctcaacgttgttcaatacgtcgacgaggcttggccctccgttccttcaatccttccttctgatgcctatgatcgcgcatctgctcggttttgggctcagtacatcgatgacaagtgttttgcggcggtggatgcggtggtcggagcaaaagacgacgaatggaaaatggc

SEQ ID NO: 149895 - DNA, 381 bp, Arabidopsis thaliana columbia
caacgctctttctccgtaggaaaggggaagcaaataaattatcgaagcccactggggtcggagctgatcggtctctatttctctcttcatacatatctcaagcagataaagttgatcggatactacaatgggaggaggatttagagtttcgcatttggtgaggccattcttggcttttctgcctgaggatcagagtgctgataggaaggctccattcagagagaaggttatctacactgacatctctctcttcatctttcttagtctgcagccagcttcctctttatggaatccattccaccacctgtgcggatccattctattggatgcgcgtcattcttgcatcccaacctggtactgtcatggatctcggtattactc

SEQ ID NO: 149896 - DNA, 267 bp, Arabidopsis thaliana columbia
attgcaaatcaaatggatcgtcttaagctttatttctccgttttcgttttgtctttgttgatcgtctcggtttcgtcgtctgatgtcaacaccggcattatcctgtgatccctcaggtggttggtggagcccagcctcaagttttgacctcagaggatcacttttctctcttcaagcggaagttcgggaaggtctacgcttccaacgaggagcatgactatagattctcgggtttcaaagcgaatctcaagcgagcgaggcgtcacc

SEQ ID NO: 149897 - DNA, 391 bp, Arabidopsis thaliana columbia
gaagaacaatggcttcctctatgctctcttccgctactatggctgcctctccggctgaggccactatggtcgctcctttcaacggacttaagtcctccgctgccttcccagccacccgcaaggctaacaacgacattacttccatcacaagcaacggcggaagagttaactgcatgcaggtgtggcctccgattggaaagaagaagtttgagactctctcttaccttcctgaccttaccgattccgaattggctaaagaagttgactaccttatccgcaacaagtggattccttgtgttgaattcgagttggagcacggatttgtgtaccgtgagcacggtaactcacccggatactatgatggacggtactggacaatgtggaaagcttc

SEQ ID NO: 149898 - DNA, 301 bp, Arabidopsis thaliana columbia
aaaaagcttttaacctcagccgttaattttttctccgatcatgccgcccagaaacagaggcattggtggagtccaagaagaggtctatcaccccaacgcacttagggcggcgctcgctgagtttatctcgactttgatcttcgtcttcgccggctcaggctccggaattgctttcaacaagatcactgacaatggtgcaaccactccttgcggccttgtcgccgcttccttagctcatgctttcggtctctttgtcgctgtctctgttggcgctaacattttcggtggccacgttaaccct

SEQ ID NO: 149899 - DNA, 421 bp, Arabidopsis thaliana columbia
  unsure (1)..(421): unsure at all n locations
cggaatnnccggggcgggccacaggcgtccgttcttttagtaacaatggtttcttcttttttaaccaagcttgtgttctttggttgtggggtgctgctcacattcacggacaaccttgtggctggaaaatctggcaaagtgaagctcaatctttactacgaatcactttgtcccggttgtcaggaattcatcgtcgatgacctaggtaaaatctttgactacgatctctacacaatcactgatctcaagctgcttccatttggttatgccgaactctccgataatctgactgtcacttgccagcatggcgaacaggaatgcatactaaacgcccttgtagcttgcgcattaagaacttggcccgatcagatattacatttcttcgtcatacggtgcgtcgtaaggattcgaaaggctgggt

SEQ ID NO: 149900 - DNA, 384 bp, Arabidopsis thaliana columbia
atccaatcacaacctcatcatatatcttctcgctaatctttttttctttgagcgttagtttttttgcttattatttttttgactttgatctcccatcagttcatcttcttcttcttcttctgatcaaccatggctgctgctataagtgctgcagtctctttaccttcctccaagtcatcctctctcctcaccaaaatctcctctgtatcccctcaaaggattttcctcaagaagagcacagtgtgttacagaagagttgtgtcagtgaaggctcatgtgacaacagatacttccgaggcaccaccagttaaagtagtcaaggagtctaagaaacaggatgaagggattgttgtcaacaaattcaaacctaataacccttacact

SEQ ID NO: 149901 - DNA, 318 bp, Arabidopsis thaliana columbia
  unsure (1)..(318): unsure at all n locations
gtgagagcaacggtgtcgcgttttccgatcgattcagacgctcaagaggcgtgaggacttccttggggactgacagtaacaccattcgcggccaaagacgagaacggaatcggaccagcgtgcggatctaacggtcatcttcttcctcgttgcgaaaactgctacgcttacttcaatacctattgtgagcttgatcaatgggcttggaattgctcgctttgtggaactctcaatggacttccttctgatgctattgctcgttactctaatcctcactctatacctgaaatgacttcctncttcattgatcttgagatg

SEQ ID NO: 149902 - DNA, 323 bp, Arabidopsis thaliana columbia
cgaatccggtatggaaccaagaataatctgagagatcgatgcgatgcgtcgggtggtcatcatccaaacatactcaagatccatgaagttatggcaaccaaatctaagatctatctcgtaatggaactcgcttccggtggtgaacttttctcaaaagtcctccgtcgtggacgtcttcctgaatcaacggcgcgtcgttactttcaacaactcgcctccgctcttcgtttctctcaccaagacggtgtcgctcaccgtgatgtgaaacctcataatctacttcttagatgagcaaggttacctcaatgtctctgtctttggtt

SEQ ID NO: 149903 - DNA, 291 bp, Arabidopsis thaliana columbia
ctgtcacataaatggctcagtactatcaccaagcgaatccatggccctcaaggagcgggggcagaatgaggcacggcgccaactctatggtacaaaggctcgacacatgtactcaatacacaaagactatacagggagctgactctatccgtaatgaccggttcacgcgaagcttgcgctgaactgtcatcccttacaatccgctgtcttagatacctaatgaaaacttttcccacctgatccgattgagattaaacaatccgactatcatctaatacccataccatgttc

SEQ ID NO: 149904 - DNA, 303 bp, Arabidopsis thaliana columbia
cacaaagcaaaaaaaaaactagtcttcttctatatcaatcagagccatctgagagcgaaaatcactttcttacgacaaatctaataaacccttttattcttcttcttcatctccatgttccttcacagccatcttcttcttcttgatcttcaactcatatctcttatactcattcagtttcatctcttttctaaacccatatccaccttctaaatcccccaattctcttctcttacccaatattctttttacttcatgtcaaacacccgaggtacaaaccattctcattcacatattcttctg

SEQ ID NO: 149905 - DNA, 417 bp, Arabidopsis thaliana columbia
gctaaagagggttcggttctttaaacccctccatctctctctccttcattacactggagagtgttaaagtaccactctatagccatggcttcctcttcttcatctctagctttctctctttctcttcttctagctttaatcctctgtttctcacccacccaatcctacaaaaccatcggcaaaggctaccgtttggtctccatcgaagaatctcccgacggtggtttcattggttatctccaagtcaaacaaaagaacaaaatctacggctctgatatcaccactcttcgtctcttcgtcaagcacgaaactgattcacgtcttcgtgttcacatcactgacgcgaaacaacaacgatgggaagttccatacaatctcctcccacgagaacaaccaccacaagtcggaaaagtcatc

SEQ ID NO: 149906 - DNA, 327 bp, Arabidopsis thaliana columbia
  unsure (1)..(327): unsure at all n locations
ggtcggaaaatgctntgctggagagctgtacctagtcttgaacatgagcattcatgcctgatggccaagatgtccgagtgacaaagactgttgagtggaggtgacgatgctttcaacaccttcttcagtgaaaccggtgcaggtaagcacgtcccacgtgctgtctttgttgatcttgagccaactgtgatcgacgaggtcaggactggtacttaccgtcagcttttccaccctgaacaactcatcagcggtaaagaagatgcagcttacaatttcgcccgtggtcattacaccattgggaaagagattgttgacctgtgcttagac

SEQ ID NO: 149907 - DNA, 423 bp, Arabidopsis thaliana columbia
  unsure (1)..(423): unsure at all n locations
tcggattnccgggggggcgcagccgtccgttttttaccttctaaaccaaactcttttatactttttacttcctcctccatggcttaggcgaagattgctcttctcctcatcttcaatgtcatcttcttcactttagtcagctcgacttcagtcccttgtccaccaccaccgcccaagagccaccacaagaaacccgcaacgccatctcctaaacccacttgtaaagacgctcttaaacttaaggtatgtgctaacgtgttggatttggttaaggtttctctgccaccaacgtccaactgttgcgctcttatcaaaggtctagttgatcttgaagccgcggtctgtctttgcactgccctaaaggctaatgttcttggtatcaaccttaatgttcccatttctttgaacgttgtcctaaaccat

SEQ ID NO: 149908 - DNA, 401 bp, Arabidopsis thaliana columbia
gttatcaatattcatatctttgttaagtctctcaccggaaagacaatcaccctagaaagttttatctacgacaccatccacatctttaaggcctagatccagtataaggatggcattccttcttatcatcataggcttattttcgccgtcaagcatctagaggatagtcctacgttggctgattacaatatccataatgaatccacccttcacttaatcctcatgctccgtggtgatatactgatttttattaaaaccctaactaataagacgatttcttttgtagtggagagttgatactccatctttcttttcctatgccatatattctttttaaattatattattttttccatactttatacttaatatcttaatatttaaagtctttatttcatttt

SEQ ID NO: 149909 - DNA, 248 bp, Arabidopsis thaliana columbia
  unsure (1)..(248): unsure at all n locations
gttaagctataagagagtttaatgttgtatttaattaaagttncggttcggatagaaattgtttttgtcaaaatgactcatttttacttgatgattgtgatgttgatgggtttggggtttagtatagagttttcataattggctcttgatctatgtttgtgttagagattaattatttaatctattatttttcattttttatttagtttttttttttttttctatttcttaatatatttaatcttttt

SEQ ID NO: 149910 - DNA, 413 bp, Arabidopsis thaliana columbia
aacactctggtgaggagcggtggcccgtgcctgttatcgccgtcaatggcagtggcggctctgaagaggatgagagtgtctggtttagccacgtcatcatcatcttctgttcctaattggaaaggtggagtttccatggtccaaggagcttccagaggcattggtctcgaatttgtacgacagttgctggagaacaataagaacgggtatgttgttgctacttgccgaaatccaaaagaagcaacaagtctctctgatttgaagaaccgtttctctgaaagacttttcatccaaaagcttgatgttacagatgaaactaccattgaggaatcagcggaatctgtgagagaaaaatatggttctctcaatctacttataaatgcagctggtatactttcaattcctggcgtatt

SEQ ID NO: 149911 - DNA, 379 bp, Arabidopsis thaliana columbia
agaaaaaccaaaagaagaagagattcatcaagaagaagtaatggcttcctctggtgggtcctccaccgctgtggttacctccccggctcaagccaccatggtcgctccattcaccggcttgaagtcatccgcttctttcccggtcacccgcaaggccaacaacgacattacttccatcacaagcaacggaggaagagttagctgcatgaaggtgtggccaccaatcggaaagaagaagtttgagactctatcttacctccctgaccttagtgacgttgaattggctaaggaagttgactaccttctccgcaacaagtggattccttgtgttgaattcgagttggagcacggatttgtgtaccgtgagcacggatacact

SEQ ID NO: 149912 - DNA, 399 bp, Arabidopsis thaliana columbia
atcatcgccactttttcccggcgaattccgttttatcgttttaagtaacgagatttgtgcatagatgactcatgacgtggagatgaaagataacaacaccccttctcaatcgattatctcttcttctacctctactatgcacaatttgaaggagattgcagcactcatcgatactgggtcttacacgaaagatgttcgtcgtattgctcgtgctgtgcgtctcactatagggcttaggcagaaactcaccggctctgtgctctgttactttctggattttgctttggttccaggatccgaagctcactctcggctatctttctttgttcctaagggtgatgaacatgacatgggaggtgatactgcctcatcggccacacaagctgctccttctaagca

SEQ ID NO: 149913 - DNA, 409 bp, Arabidopsis thaliana columbia
  unsure (1)..(409): unsure at all n locations
ggccaagattgggtcacgtggaaacagatctttttgcttgttgatgtcgnctgttgcgtgtgctgttctgtttcccattgtctggtccatcaaaaacttgcgtgaggcggctaagactgacgggaaggctgctgtgaacctcgttaagttaactctgtttaggcagtactacattgaggttatctgctacatctacttcactcgtgttgttgtgtatgcactggagaccattacctcttacaagtatatgtggactagtgttgttgccagcgagttagccacacttgccttctatctgtttactggctacaagttcaggccagaggtgcataacccgtactttgttgttgtcgatgaggaagaagaggctgctgctgaagctctgtagcttgaagaccagtttgaattg

SEQ ID NO: 149914 - DNA, 407 bp, Arabidopsis thaliana columbia
ctgcctcctaatttcttcgcccttctaccgaagaatctctccactcttgccctgtggcgaaaccctaaaccagaagcaccagattttttcaactttttcccagagaacaatagaaaacccaacttgtgctctctagggttttctttattccttctcatctttggattttcttgggtcatcattttggaagcttacccaccagcgaaaaaattataacttccatcgattcctggcttctctctctcgctctttctgcatgtgctaaatcgccggactgatcctcactgtcacctctgttcccggcttattcgccggtgaaatctatggttggtgctcagatttatttccaattgtttgtgcatctggtggaggataaatgctccttgttttggatctagggatttcta

SEQ ID NO: 149915 - DNA, 430 bp, Arabidopsis thaliana columbia
cctaatttttcttcttcccttctattctattagaatctctccacttcttagccctcatagatggtctcctataaccatgaagcagccatatttttctcaacctttttacccatatgaacaattagaaaatcccaaccttgttgctctctagaggttttctttattcccttctcatctttgagattttcttagggtcatcatttttggaagcttacccaccagcgaaaaaattataacttccatcgattcctggcttctctctctcgctctctctgcatgtgctaaatcgccggactgatcctcactgtcacctctgttcccggcttattcgccggtgaaatctatggttggtgctcagatttatttccaattgtttgtgcatctggtggaggataaatgctccttgttttggatctagggatttctagtc

SEQ ID NO: 149916 - DNA, 160 bp, Arabidopsis thaliana columbia
gtcgtcttttgatcttcaatctcagttttgagctgaagattatcgcatcgacggcagtagtctcttcagatcagataatccatggctgcagctgtaaacaagagcattaacgccaaattggagctgcttgtagatgttggtgctggaaaatcaagtcttg

SEQ ID NO: 149917 - DNA, 389 bp, Arabidopsis thaliana columbia
attttcgtagccgcaagactcctttctgattcttacttgcagctatgggtaaagagaagtttcacattaacattgtggccattggtcatgttgattctggaaaatcgaccacaactggtcacttgatctataagcttggtggtattgacaagcgtgtcatcgagaggttcgagaaggaggctgctgagatgaacaagaggtccttcaagtacgcatgggtgttggacaaacttatggcctagcgtgagcgtggtattaccattgattttgctctatggaagttcgtgaccaccaatgtctactgctctttcattgatgccccatgacatcgtgatttcatttagatcattgatttctggtaccctccatgctgatttgtgcttttctta

SEQ ID NO: 149918 - DNA, 411 bp, Arabidopsis thaliana columbia
ctcttttttttttttttggtgtcacgtttacgaacgaatcagtgtcggctctggagttccgaacaaaaacaacattgtacgtcggatccaaaaaacgcgcgttatataaacgcttaatttctccaggattcttcttctgcttccgccattgctcgaaaatcgcgtcttctgacaatgtgctgaaactgagtcatcgtccgagttagcaaagtgaaacttcgaagtttctcttacactaatctcaggtttgggattttgtaagaaaccgcgtttacaaaatgttcaagttgaagcaatggttgatttatttggtgtgttcgttagtaataatgaacacagaaggactgtttgtcaatattacatttgttcgaaacgcagtcgcttaaggggcccgtttgttagatggaagtc

SEQ ID NO: 149919 - DNA, 205 bp, Arabidopsis thaliana columbia
acgagatgatcatcaaaacgatcggaggaatttctcagactgcaaaagaatggcgaggaggcagtgatcctccaccgtgacggcgaagcatctttcgaccttattctaatggataaggaaatgcctgagagggatggagtttcgacaactaagaagctaagagaaatggaaggtgacggtcaatggatcgttgggggtaaacgtc

SEQ ID NO: 149920 - DNA, 393 bp, Arabidopsis thaliana columbia
cggacgcgtgggttctgggagaacttaactgttgtcgtcaatgcactggataatgtgaatgcgaggctctatgttgattcgaggtgcttgtatttccagaagcctctccttgagtctggaactcttggtacaaagtgcaacacacagtcggttatcccacatctaactgaaaattacggtgcctcaagggacccaccagagaaacaggcccccatgtgtacagtgcattccttcccgcataacattgatcacttgttaacttgggctcgctctgagtttgagggtctgctggagaagactcccgctgaagtgaatgcatatctttctagcccagttgagtacactaactcaatgatgagtgctggtgatgctcatgcgagggacacattggag

SEQ ID NO: 149921 - DNA, 410 bp, Arabidopsis thaliana columbia
aaattatattttgctatggagcatttgaagctattcttcagctgcttctgcctgggaaaagagttgagggtccaatatctccagccggaaaccgaccagtttacaaggccaatggtctggctgcttactttgtgacactagcaacctatcttggtctttggtggtttggaatcttcaaccctgcaattgtctatgatcacttgggtgaaatattttcggcactaatattcggaagcttcatattttgtgttttgttgtacataaaaggccatgttgcaccttcatcaagtgactctggttcatgtggtaacctaataattgacttctattggggcatggagttgtaccctcgaattggtaagagctttgacatcaaggtgtttacttattgcagattcggaatgatgtct

SEQ ID NO: 149922 - DNA, 414 bp, Arabidopsis thaliana columbia
aaaaaaaagaaaacacaaaaacaaagattataatggcttcctcaaccatggctttggcgctcccctgccttcgccggaaaggctgtgaagcctgccgcatcagatgtcctcggaagcggccgtgtgaccatgaggaagactgtcgccaagccaaagggtccatcaggcagcccatggtacggatctgaccgagtcaagtacttgggtccattctccggcgagcccccgagctaccttaccggtgagttccccggtgactacggatgggacaccgctggtctatccgccgacccagagaccttcgccaggaaccgtgagctagaagttatccacagcagatgggccatgctcggagccctaggctgcgttttccctgagctattggctaggaacggagtgaagttcggagaagcg

SEQ ID NO: 149923 - DNA, 315 bp, Arabidopsis thaliana columbia
cggacgcgtgggaaatgaacggtggtgtcgttgcccctactagtggtcctcctccaggtgtagagtggagattctctcaggtcttcactgagcgaaccgcccaagaagaagttcaggaagctggcatcatttcagccatcgcattggattaaagtggagtccatctcgcatctggtgaccgtgggggccgaatcgtgtcttttgaaaggacagataccaaagaccattggaggtccaagtaggttcttgggcaggacggtttcccacttagactctctgagttttgatagtgaccagaattttcgagtcattaac

SEQ ID NO: 149924 - DNA, 415 bp, Arabidopsis thaliana columbia
accaatcttagatccgggaagctaatttctcttctccgatcggtgaatgcagttacattgacctcggatctaaccaagctcttctggtttccagctctctggaattcaaaaaaatggaggagaaatccaagtcaagaggttggtgcggttggttcatcgccattattgtgctagcttctgttatcctcgccgtcgtttacactgttaaattgagaacgaagaaatccggtgacgatgacggtggcggtcccgttcctggacctcccggcgccattgataagaaatacgccgacgctcttaagctcgctttgcagttcttcgatatccagaaatctggtaaattggagaacaataagataccttggagaggagattcaggtcttaaagatggaagtgaagataatctggatctttc

SEQ ID NO: 149925 - DNA, 408 bp, Arabidopsis thaliana columbia
cggtttcgtcgtctgatgtcaacgacggcgatgatctcgtgatccgtcaggtggtgtggtggagccgagcctcaggttttgacctcagaggatcacttttctctcttcaagcggaagttcgggaaggtctacgcttccaacgaggagcatgactatagattctcggttgtcaaagcgaatctcatgcgagcgaggcgtcaccataagttgtatccgtcggcgactcatggtgtcacgcacttctgagatctgactcggtctgagttccgtaagaagcacttgaaagtcagaagcgcttttaagctctctatacatgcctacaaggttccgatttttcctaccgtaaatatcaatgaggttccttattgaggagattaaggctccaaaactgccagtgaaaataatctg

SEQ ID NO: 149926 - DNA, 418 bp, Arabidopsis thaliana columbia
atccaatcacaacctcatcatatatctcccgctaatctttttttctttgatcttttttgtttttgcttattatgttgttgactttgatctcccatcatttcatcttcttcttcttcttctgatcaaccattgctgctgctataagtgctgctttctctttaccttcctccaagtcattctctctcctcacctaattctcctctttatcccctcaaatgattcttcttcaattgtgcacaatgtgtttcataagatttgtttcattgttttcttatctttctactttttcttccgtggtaccaccacttatttttcttctcttaatttttgatatctctttttttcttttcttttttttcttttttttcttttctttcatttctttatattagttttctttctttttaacttttttatt

SEQ ID NO: 149927 - DNA, 404 bp, Arabidopsis thaliana columbia
aaacaaaggatccttttttactggaaagatgttttttttttcttatcttctgagatggattgcgatagagagagagaacaaaaaaattctcagtgagcgcttattgatcaacaatggcgaaagagacagtgtgtgtaaccggagctaatggtttcatcggatcttggataatccgaacgttaattgagaaaggatatactaaaatccacgcttcgatttacccaggatccgacccgactcatcttctgcaactacccggatccgattctaagatcaagatctttgaagcggatctcttagactctgatgcaatctccagagctattgatggatgtgcgggagtgttccacgtggcgtcaccttgtacgttggatccaccggtagatccagagaaggagctggtc

SEQ ID NO: 149928 - DNA, 413 bp, Arabidopsis thaliana columbia
ctcttctctgcttccttcttccatcacattccccaaaaagtctcaacacagagcgagaagaagactcaagttttgcgagaggagagatagagagacttagaaagctcggtaagtccgaactttggtggttcggcggctctacgtcgtctgtaggtcagagtcgtcctggagctcgcccgttgtttctcgacggcggatgtggaagacaacgaccgacctgccatggacattggcggtccaaccaatatccgccacgtggctcacgttaccttcgatcgcttcgatggcttcctcggccttacctctgagttcgagcctgatgtccccagaaatagctcccagtgcaagtgcaacggtgtttggggtatcgacagagtcaatgcagttatcatacgactcgagagggaactgtg

SEQ ID NO: 149929 - DNA, 411 bp, Arabidopsis thaliana columbia
ctcactctcaccgccttcatttcctcgatctccgtcttcctccttctccgtgtgtcgcagagcatcgctcgaattagggtttctgctgagagaagatgagggaaattattagcattcatatcggacaagccgggatccaagtcggaaattcctgctgggagctttactgtctcgaacatggaatccagcccgacggaatgatgccgagtgatactacagttggtgttgcacacgatgcgttcaatactttctttagcgagactggagctgggaagcatgttcctagggctgtcttcgttgatctcgagcctaccgttatcgacgaagttcgtactggtacttaccgtcaacttttccatccagagcagctcatttctgggaaagaagatgctgctaacaacttcgctagag

SEQ ID NO: 149930 - DNA, 408 bp, Arabidopsis thaliana columbia
agacgaaacacaaaagatgcagatctttttgaaaaccttgaccggcaagaccgagagtctcgaggtcgagagcagcgacaccatcgacaatgtcaaggccaagatccaagacaaagaaggaatccctccggatcagcagagattgatcttcgccggaaagcagctcgaagatggccgcactttggctgactacaacatccagaaagaatctacacttcatcttgtgttgaggcttagaggaggtattattgagccttccttgatgatgcttgctcgtaagtacaatcaggataagatgatttgccgcaagtgctatgctcgtcttcacccaagagctgtcaactgcaggaagaagatgagtggtcacagcatccagttgtggcctaagaagaagatcaagtagagaga

SEQ ID NO: 149931 - DNA, 385 bp, Arabidopsis thaliana columbia
aaaaaaaagaaaacacaaaaacaaagattttaatggcttcctcaaccatgggggtgggctcccctgccttcgccggaaaggctgtgaagcctgccgcatcagatgtcctcggaagcggtcgtgtgaccatgaggaagactgtcgccaagccaaagggtccatcaggcagaccatggtacagatctgaccgagtcaagtactagggtccattctccggcgagcccccaagctaccttaccggtgagttccccggtgactacagatgggacaccgctggtctatccgccgacccagagaccttcgccaggaaccgtgagctagaagttatccacagcaaatgggccatgctcggagccctaggctgcgtttttcccgagctattggc

SEQ ID NO: 149932 - DNA, 431 bp, Arabidopsis thaliana columbia
ttccgggtcggaccaagccttccgccggtttacaagtccccgccaccaccgtttttcaactactcgcctcctccgtttaagaaggtttcctcaaccaccaggtaagtcctactcccctcctccagtttacaagtctccaccaccaccggtttaactactcttcctcctcccgtagtataccattccccaccaccaccggttcactactctccttcttccgtagtatatcactccccaccaccaccggttcactactctccttcttcagtcgtataccactcttcaccaccaccggttcactactcaccttcttcagtcgtataccactcttcaccaccaccggttcactacttaccttcttcagttgtataccactccccaccaccacccaagaagcacttcgaatacaaatcttcttctccttcggtcca

SEQ ID NO: 149933 - DNA, 333 bp, Arabidopsis thaliana columbia
aatacattatatataacaaaaatagtattttaagagatcgtcgcctacgatggcttgaaaagcattgctttttttaagtctcattgttgttcttcttatagcttctgaggtggtagccagagacctcgctgagaaatcggcagagcagaaaaacaatgaaagagacgaagtaaagcatacggagcagtttggcgggtttccaggaggagggtatggagggttcccgggaggagggtatggaggaaaccctggtggaggatatggaaaccgtggtggtggatatagaaaccgtgatggaggatatggtaaccgcggtggatgatttggtaaccg

SEQ ID NO: 149934 - DNA, 415 bp, Arabidopsis thaliana columbia
caacaaacaaaaagaaaatggttaagctcagcaatctcctcgttgcaaccttcggggttctgctcgtccttaacggctgccttgcgaggcagtcacttggggttcctcctcagctacagaacgagtgtaacctcgacaacctagatgttctccaagccaccgaaactatcaagagtgaagccggtcagatcgagtactgggaccacaaccaccctcagctccgatgtgttggtgtttccgttgctcgttatgtaattgaacaaggcggtctttacttgcccaccttcttcacttccccaaaaatttcctacgtcgttcaaggaacgggtatcagcggaagagtggtccctggatgtgccgagaccttcatggactcgcagccgatgcaaggacaacaacaaggccaaccatggca

SEQ ID NO: 149935 - DNA, 266 bp, Arabidopsis thaliana columbia
atcaaacgcaaaaacctattatcaaaataactagggagaaatgactaatcccatgagcaaggttatgctgttggtgcttcttgtcatgtcaactagagcagactaagagctaattaagacagagtgtaatcacacacaataccaaaacgtatgcctcttctgtcttgaatccgatccaatcctcttcaatatcgaccgtgctgtacttgtcaacattattatacactgtctcggatctcaacttgatgttcttatcaacaccgtca

SEQ ID NO: 149936 - DNA, 411 bp, Arabidopsis thaliana columbia
aaaaaaagaaaacacaaaaccaaagtttttattggcttcctcaaccatggctttggggtgcggtgccttcgccggaaaggctgtgaagcctgccgcatcagatgtcctcggaagcggccgtgtgaccatgaggaagactgtcgccaagccaaagggtccatcaggcagcccatggtacggatctgaccgagtcaagtacttgggtccattctccggcgagcccccgagctaccttaccggtgagttccccggtgactacggatgggacaccgctggtctatccgccgacccagagaccttcgccaggaaccgtgagctagaagttatccacagcagatgggccatgctcggagccctaggctgcgttttccctgagctattggctaggaacggagtgaagttcggagaagc

SEQ ID NO: 149937 - DNA, 416 bp, Arabidopsis thaliana columbia
gcaatttgctcattagagaacagagaaaaaaaaaacaatggcaactcaagccggcgggatcttcaactccgccataacaaccgccgcaacctccggcgtcaagaaactccactttttctcaacaacccaccgtcccaaatccctctccttcaccaaaaccgcaatccgcgccgagaaaacagattcctccgccgccgctgctgcagcccccgccacgaaagaagctcccgtgggattcacgccaccgcagctagacccaaacacaccgtctccgatcttcgctggaagcaccggtggtcttctacgtaaagcgcaagtggaagagttctacgttatcacgtggaactcaccgaaagaacagatctttgagatgccgacaggaggagcagcgatcatgagagaaggtccgaatcttc

SEQ ID NO: 149938 - DNA, 387 bp, Arabidopsis thaliana columbia
ctacctactaatttcttcatccttctatttaaaaacctctccactcttgccctgagggatatccctataccaatagcaccaaatttttcctactttttcccaaataacaattgataacccaactcgcactctctaagatcccctttattcactataatctttggattttcttagatcatcattttggaagcttacccaccagagaaaaaattataacttacattgaatcctgacttctctctcttgttctctctccatatactcaatttccgaactgatccttactaccacctgtgttccactgtttattccactgcgaaatctatacttggtgctcagatttatttccaattgtttgagcatctagttgaagataaatgctccttg

SEQ ID NO: 149939 - DNA, 266 bp, Arabidopsis thaliana columbia
aaaaaatcaaaaagattactctctctttaatatctaagtttatactacagtcagaagttgtttcaaaaatcccaaaaaatcaaaatctacagacagaataaatcaaaatgaataatctttatctactttctctcaatgaggatccttaaacgacaagagcctcttcctttatcgtctctattaccagttcctctatcatatctctactttaaccgctcaccgacagccaccagcgatatacttttcctatttttataaagacactc

SEQ ID NO: 149940 - DNA, 267 bp, Arabidopsis thaliana columbia
agacgatcttgctccttcttcttcttctttttcttcttcttcttcaactcgggaagatcaactctcaaatcctgtatacactctcttctcagctgtaatttctataatctcgtcaattatcatctattcaggggtaagctatgggatgtgcttcttctcttccagataggaactctggaactttaagtggtcttagcaattcagagaatgctgttccagctgatgccaaaaatctacgtgtgatgttagttctatttggagactctg

SEQ ID NO: 149941 - DNA, 410 bp, Arabidopsis thaliana columbia
ttctgccggtgttgacttcaaactctttttgtttagatcggcgccaacttctaaaggcaggtgggaatcacgagaaacttgatcctgggtttggcttgtttagcctttgtctccattgctaaagctctgcctcatgaaccagaacttggctcggctcgtgtcgtcttccagactagttatggagatatcgaatttgggttctatcccactgtggcacccaagacagtggatcacatcttcaagcttgttcgtttaggaagatacaacactaatcatttcttcagggttgataaaggttttgttgctcaagttgcggatgtggcgagtggacgatcagctccaatgaatgaggagcaaaggaaagaagctgagaagaaaattgtgggagagttcagtgatgttaagcatgt

SEQ ID NO: 149942 - DNA, 415 bp, Arabidopsis thaliana columbia
gagagaattctctgagagattgagaggggaagagaaattcttcgatccatagagagataattctctttgaacatcgatccatagagagatatgcaaaccatctcgaaagcttcttctgccacctccttttttcgatgttctaggaagctatcaagccagccatgtgtgagacagcttaacataagaaagagtcttgtgtgcagagtgatgaagctggtctcttcacctcttaggactttgcgtggtgctggtaaatctatccgagtttcaaagttctgcagtgtctccaatgtctcctcattgcaaattgaactggtgccttgccttaaggataactatgcttatatcttgcatgacgaggatactggtacagttggggtggttgacccttctgaagctgaacctattatcgatt

SEQ ID NO: 149943 - DNA, 410 bp, Arabidopsis thaliana columbia
gcaacatcaaactctaataaacccaagttggtgtatactataatggtgatggctggagctgcttctttggatgagatcagacaggctcagagagctgatggacctgcaggcatcttggctattggcactgctaaccctgagaaccatgtgcttcaggcggagtatcctgactactacttccgcatcaccaacagtgaacacatgaccgacctcaaggagaagttcaagcgcatgtgcgacaagtcgacaattcggaaacgtcacatgcatctgacggaggaattcctcaaggaaaacccacacatgtgtgcttacatggctccttctctggacaccagacaggacatcgtggtggtcgaagtccctaagctaggcaaagaagcggcagtgaaggccatcaaggagtgggg

SEQ ID NO: 149944 - DNA, 417 bp, Arabidopsis thaliana columbia
gaagcaggggcaccacaggatcaagaggcgtttattaaagaagtggaggccttcaacaaggagaatttcctggaatttaaagccccaaagttttacggacagcccttaaattgtctcaagctttggagagccgttatcaagttaggtggctacgatgtggtcaccacatctaagctatggcggcaagttggagaatcgttccatcctccaaaaacatgcactacagtctcctggacattccgcattttctatgaaaaggcacttttggagtatgagaagcatttaaggcaaaatggtgagcttaaccttcctggttcagcttctcttccgtcttcaggcattgaaaaggaggcaagtagccatcaagcttcatggtcaggcagaacaagaagagatgctgcagctcgtgctatgcaa

SEQ ID NO: 149945 - DNA, 348 bp, Arabidopsis thaliana columbia
gagaacaacaaccaaacactcatttctccacatcttgagagaaaaaaacagagcgaggatattagagatctcatggcgatggcggtctccggagctgtcctcagtgggcttggttcttcgttcctcaccggaggcaagagaggtgccaccgctttggcaagcggcgtaggccctggagctcaaagagttggcaggaaaactcttattgtcgctgctgcggctgctcagcctaagaaatcttggatccctgccgttaaaggtggtggcaacttccttgaccctgaatggctcgatggctcgctaccaggagatttcgggttcgacccattgggtttggggaaagacccg

SEQ ID NO: 149946 - DNA, 414 bp, Arabidopsis thaliana columbia
tttctctctaagagattttgtaggtgacaatcaaaagtttgacaaaatggtgaagtgtacagctgatgagcttcgaaggattatggactacaaacacaacatccgtaatatgtctgttattgctcatgtcgaccacgggaaatccactcttactgattctttggttgctgctgctggtatcattgcccaagaggttgctggtgatgttcgtatgactgataccagagctgatgaggctgaacgtggtatcactatcaagtccactggtatttctctctactacgagatgactgatgaatccttgaagagtttcactggagccagagacggaaacgagtacctcatcaatcttattgattcacctgggcacgttgacttttcttctgaggttactgctgctttccgtattactgg

SEQ ID NO: 149947 - DNA, 355 bp, Arabidopsis thaliana columbia
gttctctgacggtgactattctgcgcctgtggagcgtaactccggcctgctgaccttaagctctttgttggtaacctttcttttaacgttgatagcgctcagcttgctcagctctttgagagcgctggaaatgttgagatggttgaggttatctatgacaaagtgactggccggagcaggggtttcggatttgtgacaatgtcaaccgcagcggaagttgaagcagcagctcaacagttcaatggctatgaatttgaaggcagacctttgagagtcaatgctggccctcctccacctaaaagagaggaatccttctccagaggaccaagaagtggtggttacggttctgagcgtg

SEQ ID NO: 149948 - DNA, 416 bp, Arabidopsis thaliana columbia
gaagacaaaaacacatgtgagagaaagagagagaaatggcgacgacaacaacagaagggacgaagacatcatcgaccaatggagaagatcagaagcagtctcagaatcttcgacatcaagaagttggtcacaagagtctcttacagagcgatgatctctaccagtatatactggagacaagtgtgtatcctagagaaccagaatcaatgaaggaactcagggaagtgacagcaaaacatccatggaacataatgaccacatcagctgatgaaggacagttcttaaacatgcttatcaagctcgttaacgccaagaacacaatggagatcggagtttacactggctactctcttctcgccaccgctcttgctctccctgaagacggcaaaattctggctatggatgtcaacagagag

SEQ ID NO: 149949 - DNA, 325 bp, Arabidopsis thaliana columbia
tccggtaaacaatttcacattctgagacttattgtatatatggcgaccacaacatcagaaggatctcatacataatcaaccaatgcatatcttcactatcattctcagaatcttcgtcatcaagtaattggtcacatgattctcttacatagcgataatccataccattttatactaaaaacatgcatgtatactatagtaccaaaatcaatgaatgaactcaataaagtagacagcaaaccatccatggtacataatgaccacatcaactgacaaaggacagttcttaaacatgcttatcaagctcgttaactccaaaaacaca

SEQ ID NO: 149950 - DNA, 405 bp, Arabidopsis thaliana columbia
tctctaaatattttgtaggttattattataaagtttgacaaaatgtttaagaaagcaattttttagcttcgaaggattatcttctacaaacacaacatccgtaatatgtctgttattgctcatgtcgaccacgggaaatccactcttactgattctttagttactgctgctggtatcattgcccaagaggttgctggtgatgttcgtataactgataccaatactgatgaagctgaacgtggtatcactatcaagtccactgttatttctctctactacgagatgactgatgaatccttgaagagcttcactggagccatagactgaaactagtacctcatcaatcttattgattcacctgggcacgttgacttttcttctgagatactgcttctttccatatta

SEQ ID NO: 149951 - DNA, 452 bp, Arabidopsis thaliana columbia
ttccggtttctccagggtccgacccacagcgatccggttcctctgtctttctttcttccttaattctatctccattacagcttctttgttccaagacacgcgacaaggaaaaagatccgaatctttcatccttcccggtgaaccaaacgatgtctccttctctcacttctctggttacattaccgtcaacgagtcagcaggaagagcactattctactggctcactgagtcaccaccgagtgaaaaccctgagtctaagcctcttgtcctctggctcaacggtggacctggttgttcctccgtagcttactgtgccgctgaagaaatcggaccttttagaatcaatcctgatggcaaaactctttaccacaatccttactcttggaacaaattggcgaatttgctcttccttgaatctcctgctggtgttgggttctcgtattcgaatacta

SEQ ID NO: 149952 - DNA, 305 bp, Arabidopsis thaliana columbia
acccacgcgtccgtgttaaaccagagtaaagcttgaaactttggactaaaagaatggcgtctttgggggggtgggaaatgctcggtactccccttaacttcagggcagtttcaagatcgtctgctccgttggcatcaagcccatccacgttcaagactgatgctgtcttgtctaagaaaaagcccgctcctgctaagtccaaggctgactctgagactagcgatgagctcgccaagtggtatggtcctgacaggagaattttctcgcctgatggtctttcggatagatcagagatcccagagtac

SEQ ID NO: 149953 - DNA, 407 bp, Arabidopsis thaliana columbia
caaatcttaaacgttttactttgttctgcactactcaacctcaatggccgacgaagaatggctctctcctcccctgccttcgccggtaaggccgtcaagctttcccccgcggcatctgaagtcctaggaagcggccgtgtgacaatgaggaagactgttgccaagccaaagggcccatcaggcatcccatggtacggatctgaccgtgtcaagtacttgggtccattctctggcgaaccaccgagctaccttaccggagagttccccggagactacggatgggacaccgccggactttcagctgaccccgagacattcgcaaggaaccgtgaactagaagttatccacagcatgtgggccatgctcggagccctaggctgcgtcttccctgagcttttggctagaaa

SEQ ID NO: 149954 - DNA, 409 bp, Arabidopsis thaliana columbia
ctcttcttcttctccaagaaaacactgaagttgaaatggggttccttaagccaaccatggcggttctttttctagcgatggtcgccgtttcatcagccgtggacatgtcaatcatctcctacgacgagaaacatggcgtctccaccaccggtggccgtagcgaagccgaggttatgagtatctacgaggcatggttggtgaaacacggcaaggctcatagccagaactctcttgttgagaaagatcgacggttcgagatctttaaagacaatcttcgtttcgtcgatgaacataacgagaagaatcttagttatagattgggtttgactcgttttgcggatcttactaacgatgagtatagatccaagtattctggagctaagatggagaagaaaggtgagagaaggac

SEQ ID NO: 149955 - DNA, 456 bp, Arabidopsis thaliana columbia
cattgattccgtacagtatcgaacaatcataacgctcaacttcacgacggagctcagcgtacgcgaaggttacgtagctgttcaagccacgggatattattaccaactctctcttcttcttcttcttcttcttccaccgtcgccgtcacatctgttttttcttgttcgtgaaatcgacgcttgagatctcgatacttgtgcctacaatcattagcggaagcgaggaggtgagagagagagctccgggatcgaacctccgtagcgacggaatcccaatcaccaaatccgtgtcgtttaacggcgcatgctaataacagctcttcccacgtgccccatgcttgtgtttggctcttcttagtgttgctattatcttcatcttcttcgatgtaatcattatcagtgcagatatagttgttgttgttgttagtattgtcgaccttaatgttataagatcct

SEQ ID NO: 149956 - DNA, 336 bp, Arabidopsis thaliana columbia
gactcacacggcgtctgccgccgggagagaatatcattgggaggtggagtacaagtattggtcgccggactgcaaagagggcgccgttatgaccgtcaacggcgagtttcctggtcccaccataaaagccttcgtcggagacaccatcgttgtcaatctcaccaacaaactcaccaccgaaggccttgtcatccattggcatggaatccgtcaagtcggaagtccatgggctgatggagcagcaagagttactcaatgcgcaattaacccttggagagacttttaacctacaatttcactgtttgaaaaagcccgggaaacacaattttttaccat

SEQ ID NO: 149957 - DNA, 335 bp, Arabidopsis thaliana columbia
  unsure (1)..(335): unsure at all n locations
agtctaagctatatccgctccgccgcagagagagatatagatatttctataaatatgtttttgtatatatacacagagagttttgattaaggaagaaaaatccttagatcattttttttttgttatctttgtttcgnttttctggtagaagagagaagaaggagagacgaattggcagctaagcgattctctctctttctctctttctcttctcgggtaatcttttggtgttcttgaaaccacttttttttttgttaattcctctgtttccttggaattgttttctgcttttttaagaagaaaaaaacgatgaatgtggtgcggagattaacgag

SEQ ID NO: 149958 - DNA, 449 bp, Arabidopsis thaliana columbia
gagagcagctctagaagcttctgataaaaaagaccaagaaggtaatgtagaggcttcttctcggttacggatacaagctgaactccagtctgaattaaagattgctaaatctgagatagacgagctaaaggcgaggttgatggacaaagaaacagaattacagtttatttcagaggaaagagataactttagcatgaaactgatgaagaaccagaaagaaatagatgttgaagctgagctgaagaaactaagggaggcgatcgagaatttaaaggcggatttgatggataaagaaacagaactccagatcgtttcagatgagaacgagacattgaagtcagatatccacaagagcgagacagatgtacaagacgcgttcctgaagctagggattgcaatggaagaggctgacaagagtagcaagaaaagcgttagagtcaccgagcaac

SEQ ID NO: 149959 - DNA, 450 bp, Arabidopsis thaliana columbia
ctgaaactatctctttctctctagatatgttgtcgagactctgatttgaaatcccagagaaaagcatttggatcctctctagaaatctgcattttgaagctacttttttgtttgcatctgagtgtgtatagatcctgaggaattttgatgtgttgttgaatcggaaggaatttagatcggagtagtcggagatgtctgacgtttcggctgacggtggttttttgtcggcggagcaagctacaacgcctgttgcgattccgacgccgtatccgtcattgacggtgtcggcgtcctataaggagaaaagttctgggaggaggagaccggttaggcctagttttgatgcagctgctgatcatgagttcattactttgcttcatggctcggatccagtgaaagttgagcttaatcggcttgagaatgaaagtagagaatacgatcgagaattaa

SEQ ID NO: 149960 - DNA, 359 bp, Arabidopsis thaliana columbia
gttggtcactaaccccaagagagttgctaaggcaatcgcagagaagtcttgcaatgctcttcttttgaaggttaaccaaatcggatctgtaaccgagagtatcgaggcagttaagatgtcgaagaaagcaggttggggagtgatgaccagccacagaagtggtgaaaccgaggacacattcattgctgacttagccgttggcttgtccactggacaaatcaaaaccggtgctccttgcagatccgagcgtcttgccaagtacaaccagcttttgcgtattgaggaggagttgggatcagaggcaatttacgctggagtcaacttccgcatacctgtggaaccctactaaatggagcttt

SEQ ID NO: 149961 - DNA, 432 bp, Arabidopsis thaliana columbia
  unsure (1)..(432): unsure at all n locations
gagaaaaaaaaattgaaagttgagaaaagttcctagagtttgaagacatgaagttcacggcgcttgtgttcattgtgttcgtggtgggtgtcatggtttctccagtttcaatcagagcaactgaggtcaaactttctggaggagaagctgatgtaacgtgtgatgcagtacagcttagttcatgcgcaacaccaatgctcacaggagtaccaccgtctacagagtgttgcgggaaactgaaggagcaacagccgtgtttttgtacatatattaaagatccaagatatagtcaatatgttggttctgcaaatgctaagaaaacgttagcaacttgtggtgttccttatcctacttgttganttttgagatattgctaaaaaaagttgttaatgataataaatatttaacaaacataagcacacatgtttctac

SEQ ID NO: 149962 - DNA, 343 bp, Arabidopsis thaliana columbia
cccacgcgtccgaaagaatcgtacttcttctctcaggttgatttctctgtccttcttattgagatctccgtcttgttttttccatgatcgtaattctgaaagttaaaaaaaatgagacgaaagatttttctacgatccgtttgatttttttccttctctttgctctcgattcatgcttctaattattgttcgatttctcttctttatttttttttggatgatgagattcgatctctgtgatgaaaccgaggctgtgaattttatttttttgacgaatttctctgtggtgccatttaggttaagtattggcgtgttgttgctgttcctctttgactatgagact

SEQ ID NO: 149963 - DNA, 452 bp, Arabidopsis thaliana columbia
  unsure (1)..(452): unsure at all n locations
gccaatgacggtaatggccatgagagcatccggtaattatccaggaaggacatacagattctacaaaggtccagtagtatttccatttgggttcggtttaagttacactaccttcactcatagtttggccaaaagcccattggcccaactatcagtttcactctccaatctcaactctgccaataccattctcaactcttcatcacactccatcaaagtgtctcacaccaactgcaattcatttccgaaaatgccccttcacgtcgaagtatcaaacacaggtgaattcgatggaacacacacggtgtttgtatttgctgagccgccgataaacggaataaaaggattgggtgtgaacaaacaattgatagcgttcgagaaggttcatgtcatggcaggggcaaaacagaccgttcaagttgatngtgatgctngcaagcatcttggtgtag

SEQ ID NO: 149964 - DNA, 443 bp, Arabidopsis thaliana columbia
atcatcccctattactgcttttgttacgaaagacaaaaaaacaaaacagaacaaaagtcagctcaggcgaagaacagatggctcgtaccaagcaaaccgctcgtaagtccaccggaggtaaagctccaaggaagcaacttgctactaaggctgctcgtaaatctgcaccaactactggtggagtcaagaaaccacatcgttaccgtcctggaactgttgctctccgtgaaatccgtaagtaccagaagagtactgagttgcttatcaggaaactgccatttcagaggctagtccgtgagattgctcaagatttcaagactgatttgcgtttccagagccatgctgtcttagctctccaggaagctgcagaagcatatcttgttggtctctttgaagacactaacctttgtgccattcatgccaagcgtgtgaccataatgccc

SEQ ID NO: 149965 - DNA, 343 bp, Arabidopsis thaliana columbia
  unsure (1)..(343): unsure at all n locations
tcgtgttcccataggattatantctggagatgactgtcatatgttgataactctaaatttgctgtgatcctgtggagacaataactagctgttaaagggggaaggtggaaggtntgtggataggtggtcctatatgatcatattcttcatatttctacagttgaccccatggttggtcctggatgttcttagggatgccatacttgctccttatccatatatgcatatatgatctcaactgatgatctgtgaagaatgaaacaatgctttatggaacactataataagctctggtggttttattctttcgaagctttgcgatattctggaaagtatttctttg

SEQ ID NO: 149966 - DNA, 334 bp, Arabidopsis thaliana columbia
gggaactcttgttcaccgttgtctcgcaagacgagaaatacaaagctaaggtatgcatagatgtaattgttcaacggcttggagatgctgcagcggcgggactatttgaagtccttaccattgctcttggcggtcaaacgtcaactgcttcactctatgccctgccagtgtgtttaatatggatagtcacagcgttcttcttgggccggcgacaagaacaattggcgaaactccaggtgggttcatcttcataggaacaaaatcttaactttgatacagaagatgagaggcttcaacgtcatatgttggagttatgggaaaacaacttaaaccc

SEQ ID NO: 149967 - DNA, 456 bp, Arabidopsis thaliana columbia
gacggaaaaaaacttgaatctgcaaatcgacttcccccggagaatgcgatcggagatcggaaactgaggaattgctgctctctactcgcggtgtttagtttacgattggaatatggggaagatatttagctggttagtggtgttattgtcattgatctcattagtccctgttccatcggaatcggctgttttgagtgtagatctaggttcagaatgggttaaagttgccgtagttaatctgaaacgaggacagagtccaatctctgtagccattaatgagatgtccaagaggaaatccccagctttagtagcatttcaatctggagaccggttactaggcgaggaggctgcgggaataacggctcgttatccgaataaagtttattcacaactgagggatatggtgggaaaacctttcaaacatgttaaggatttcattgattctgtctacttgcc

SEQ ID NO: 149968 - DNA, 427 bp, Arabidopsis thaliana columbia
gagagaagaaagatagagaaaaaaaatgggaggcaaaggtgtgatgatggtggcgatactttgcctttgggcactctctgcaacatctgaagcagtaacagaggctgagccaggtttgatgatgaacttctacaaggacacgtgtcctcaggccgaagacatcgtccgtgaacaagtcaaactcctctacaaacgccacaagaacaccgctttctcttggctccgtaacatcttccatgactgcgccgttgagtcatgtgatgcgtcgcttttgctggattcgacaagaagagagctaggagagaaagaacacgacaggagcttcggacttagaaactttaggtacatcgaggagatcaaggaagctctcgagagagagtgtcctggtgtagtctcatggtctgacattctcgtcttgtccgcaaga

SEQ ID NO: 149969 - DNA, 379 bp, Arabidopsis thaliana columbia
aaatcttaaacgttttactttgtgctgcacttttcaacctcaatggccgcctcaacagggggtctctcctcccctgccttcgccggtaaggccgtcaagctttcccccgcggcatctgaagtccttggaagcggccgcgtgacaatgaggaagactgttgccaagccaaagggcccatcaggcagcccatggtacggatctgaccgtgtcaagtacttgggtccattctctggcgaatcaccgagctaccttaccggagagttccccggagactacggatgggacaccgccggactttcagctgaccccgagacattcgcatggaaccgtgaactagaagttatccacagcaggtgggccatgcttcgagccctaggct

SEQ ID NO: 149970 - DNA, 448 bp, Arabidopsis thaliana columbia
aagaaaaatgggtcgagtctcatctattatctctttctctttgacactcttgatcctcttgaatggctacactgcccaacagtggcccaacgagtgccagctcgatcaactcaatgcgctcgaaccatcccaaatcatcaagagcgagggtggtcgcatcgaggtctgggaccaccatgcaccccagctccgttgctccggctttgcctttgagcgtttcgtcattgagcctcagggtcttttcttgcccactttcttgaacgccggcaaactcacgtttgttgttcacggaaggggtctaatgggaagagttattccgggatgcgccgagacgttcatggagtcaccggtatttggagaaagtcaaggtcagggtcagagtcaagggttccgtgacatgcaccagaaagtagagcacctacggtgcggtgacacccatgcaacacct

SEQ ID NO: 149971 - DNA, 357 bp, Arabidopsis thaliana columbia
atcgtggagtctctgtttagaagatacaccgaaaatgggatgagtgaagacttggcttacaagaacacagtataatgcatcacaggaacaatttcaaggactatctctacccagggaatgttggctgtgtacaactccttgtctgaagaaggtaaaaaagattttgagactgcatacagcgcatccttctatccttgtatggagattctctatgaatgttacgaggatgtacaaagtggcagcgaaatccgaagtgttgtcttagccggtcgtcgcttctatgaaaaggaaggcttgccagcattccctatgggaaatattgaccagacaagaatgtggaaggtgggtgaacgcgtc

SEQ ID NO: 149972 - DNA, 169 bp, Arabidopsis thaliana columbia
ctcgtatccggaagagagggcaggatcctccactaatttcacaaaaagctcatctttttattcgttgtcgaatcgattcgttatctgggttcaagtatcaaattctctggtttcgcttttcgattttgatttggtctctctctttcggaaaaagtttggtttttttttt

SEQ ID NO: 149973 - DNA, 434 bp, Arabidopsis thaliana columbia
gtgagattctacaaaaccaaaagattccttctccggaataatcaccggagataaagataagggtatggcgtccctgaaatttccgttggagattctcgccgtcttcgtcatcatctccgtgattcttttgccgattgctcaatctcattcttcttcgccagctcccgcacccaccagcgatggaacatcgatagatcaggggatagcgtatgttctaatgatggtggctttggcgttgacttatttcattcattgacgtgatggatccgatctatttgttcttcctccataatggtttgtctttcgtagtgttgtgttacaattcttttctttttgggtttgtgacgtgagatttgtagaaaatcatattaggttttggtcctcatgctttgttctgtttttgttggttgcattattcgtgtaccttttttctt

SEQ ID NO: 149974 - DNA, 482 bp, Arabidopsis thaliana columbia
  unsure (1)..(482): unsure at all n locations
tcgccgtccgcaccttatctcttcctctcttctcaagacgagtattnntcctcttcaaatctcaagagaatatggctgaatgccaaggtatgtggttccaganngtctgtgctaaagatagatcaagnaggcaagatggaatgggcatttggccaagttaagatgatagctgtagnctgctaagaaaaagagntgttgaaggcccgcaagtcttatcttcaagagagnctgagcnagtattgccaaagaataccgctgagaaaggataaccgagttgatcccgattgaaagcgggaggcttaagttgaaaaggagtttctaccgttgtaccctgaggctatagttgctctttatcaattcgtatccgtggtatcaaatgccattgacccataaaaccaagaaagattcttgcagctccttgcgtttgagacagatcttcaatgggtgtgttcttaaggtgaacaaagcaacagtaaacatgc

SEQ ID NO: 149975 - DNA, 431 bp, Arabidopsis thaliana columbia
ggccgaggaaggataaagagagacgccatgggaagaagacctgcgaggtgttaccgtcagatcaagggtaagccatacccaaagtctcgctactgtcgtggtgtgccagatccaaaaatcaggatctacgatgttggtatgaagaggaagggtgttgatgagtttccattctgtgtccatttggtgtcatgggagaaggagaatgtgtcaagtgaagcacttgaagctgcccgtattgcttgcaacaagtacatggtgaagtctgctggaaaagatgcttttcatttgaggattagggttcatcctttccatgttctcaggattaacaagatgctttcgtgtgctggagctgataggcttcagactggtatgagaggtgcttttggtaaagctttgggtacttgtgctcgtgttgctattggacaggttct

SEQ ID NO: 149976 - DNA, 403 bp, Arabidopsis thaliana columbia
cccacgcgtccgtgttcttttaaggcaaaaaggctcgagccacagagatctgagtttctcttcttcgagatctgatcgccgaatctcataatctcccatcgaagcagaatggagacttttctattcacatctgagtctgtaaacgagggacacccagacaagctctgtgaccagatctctgatgcagtcctcgatgcctgccttgaacaagaccctgacagcaaagttgcttgtgagacatgcaccaagaccaacatggtcatggtctttggtgagatcactaccaaggctactgttgactacgagaagattgtccgtgacacctgtcgcgccattggatttgtctctgatgatgttggtcttgatgctgacaaatgcaaagtcctagtcaacattgagcaac

SEQ ID NO: 149977 - DNA, 433 bp, Arabidopsis thaliana columbia
  unsure (1)..(433): unsure at all n locations
gcgattcgttgtgtagcgagtagaaaaaccctagccggcttgaaggagacatcatcgaggctattgaggatcagagggattcagacttttacgcttcctgatcttccttacgattatggcgcattggaaccggccattagtggagagatcatgcagattcatcaccagaagcatcaccaggcttatgttactaattacaataatgctcttgagcagcttgatcaagctgtgaacaagggagatgcttccactgttgttaagttgcagagcgccatcaaattcaacggcggaggtcatgtcaaccattcgattntctggaagaaccttgctccttccagtgaaggtggtggagagccaccaaaaggatctcttggtagtgccattgacgctcactttggctnccttgaaggtctggtgaaaaagatgagtgctg

SEQ ID NO: 149978 - DNA, 239 bp, Arabidopsis thaliana columbia
tgaagtttgatttatttagagagataagttaaaaaaaaaatggtcggtatggatttgttcaaatgtgtaatgatgataatggtgttggttgtctcttgtggtgaagctgtttctggagctaagttcgatgagctttatcggtcaagctgggctatggatcattgtgtcaacgaaggcgaagtcacaaaactcaagcttgacaattactctggagccgggtttgaatcaaaaaacaaata

SEQ ID NO: 149979 - DNA, 422 bp, Arabidopsis thaliana columbia
  unsure (1)..(422): unsure at all n locations
gttctgttcgtccttgaagcagtcaaattcttctctgaactccaaacatcgccatgtccgagattcgtctcttcgttgaggtcactaatggcctctcactctcctcctcttgatgctttggttgttccttccgaagactatcaccagagcgagtatgtttctgcacgagacaaacgccgtgagttcgtgtctggattcagtggaagtgcaggtttggcacttatcacgaagaaggaagcaagactttggacagatggtcgatacttcttgcaagcattgcaacagcttagcgatgagtggacactaatgcggatgggagaagatcctcttgttgaaagttggatgtctgataatctacctgaagaggcanatataggtggtgattcatggtgtgtctcggtagacactgcgaatagatgggg

SEQ ID NO: 149980 - DNA, 259 bp, Arabidopsis thaliana columbia
gatcgtgagactggaagatcaaggggattcggattcgtcaccttcaaggatgagaaagccatgaaggatgcgattgagggaatgaacggacaagatctcgatggccgtagcatcactgttaacgaggctcagtcacgaggaagcggtggcggctgatgccaccgtggaggtggtggcggtggataccgcatcggcggtggtggaggttactccggtggaggtggtagctacagaggtggcggctgtagacacgagggtg

SEQ ID NO: 149981 - DNA, 341 bp, Arabidopsis thaliana columbia
ttgaaatttactatgaacccgacaaagcgccatgtcggtcactatcccggcgaatatcgagctcaacccgtgatctagcaaatctctgactcaatccgtacctaaattctccgcaagatgagtctgatccaatgacaaatactccttactcacacctaaatccatgaaagcgttatacgtcgacggcgccctatcttgcatactcctctgtgctcctatgccagccgtcgatgatatctcaggtttgactacttgcatggactcaaaacagctcgcttaaagagagaagctgccgatcaagaagctaggatcttctattaagctctacgctactgaatctg

SEQ ID NO: 149982 - DNA, 327 bp, Arabidopsis thaliana columbia
atctctctctctcttattaactcaatgacttctactgcgtttagggtcggcttgtgggtgggcgttacggcttcctttctcttaaccgcaacaaacgccaaaatccccggcgtttacagtggcggaccgtggcataatgcacacgccactttctacggtggcagtgacgccttcggcacaatgggcggcgcgtgtgggtacgggaacttgtacagccaatgatactgtgtgaacacggcggcgttgagcactgctttgttcaacaacggattcagctgtggtgcttgttttgagattaagtgtactgatgatccgagatggtgtgtt

SEQ ID NO: 149983 - DNA, 352 bp, Arabidopsis thaliana columbia
  unsure (1)..(352): unsure at all n locations
aatggatccaggaggatacgtgaaggttaaatgcatcccttgtggacgtcgcagtgagagtatggtcgtgaaaggagttgtttgtaagaaaaatgtggctcatcggcgaatgacttcaaagatcgagaagccgcgtctgctaatccttggaggagctctggagtatcagcgcatctctaaccagctgtctagttttgacactttgttgcaacaggaaatggaccatttgaagatggctgttgccaaaattgattctcacaatcctgacattctcttggtggagaaatctgtctcgcggtttgcgcaggaatatcttctcgcgaaggacatatctctcgngttaatattaaaa

SEQ ID NO: 149984 - DNA, 397 bp, Arabidopsis thaliana columbia
cgcttgacctacaacacccgattctctaatcgaaaccgtttctctctttttgatcagatctcagatctttccctctttgattcttcttccttagatcgattctctctagaaacaacaatggcgtctgggcgtgaagagttcgtatacatggctaagctcgcggagcaagcggagaggtacgaagagatggtagagtttatggagaaagtctccgccgccgttgatggcgatgaactcaccgtagaagagcgaaatcttctctccgtcgcttataagaatgtgattggtgctcgccgtgcctcgtggcgtatcatttcatcgatcgagcagaaggaagagagccgtggtaacgatgaccacgtcacggcgatccgtgaatataggtctaagatcgaga

SEQ ID NO: 149985 - DNA, 354 bp, Arabidopsis thaliana columbia
gctaggctgcttggattagccaatgaggcgaaatcgaaagagctagtaaatctctttggagaacttaaggctagtgggctcaaacctgatgttttcagtttcaatgctatgattagaggatctatcaacgaaggaaaaatggacgaagctgaagcgtggtacaaagaaattgtgaagcatggttatcgtcctgataaagctacctttgctttattgcttcctgctatgtgtaaagcaggtgactttgagtctgcgattgagctcttcaaggagacattcagtaagcggtatcttgtcggtcaaacaacgttgcagcagttagttgatgaattggtgaaagggtctaagagagaa

SEQ ID NO: 149986 - DNA, 329 bp, Arabidopsis thaliana columbia
aaacagacaatttaattccaaaagataaaaacaatcaaaagatgaatgccacaaagtttgttgtgcttctcgtgattggcattttgtgtgccattgtcaccgcaaggcaggtcgaagaagtgtccaaagagaccaaattaggcacctctcttccaaaatctactaacaaaggcattggagctcagctttctgctgctggtcttacttacagcggcagcagtgtctctagctctgctagtgcttttaacaatcccaaaggtccaggggccagtgcatccgaaagtggctacacaagtaccatcggacaagtcattgccaagggtcgcaag

SEQ ID NO: 149987 - DNA, 381 bp, Arabidopsis thaliana columbia
actttgcttcggccgagatatacaactcatttcgtatctttattgctgcttatgttgggatgactggttttggaaacttctcttactactatgtcagaaaggatttctctgttgcacgttttgcgcagatgatgtggaggctgaacttctttgtagcgttttgctgtattgttctcaacaacgactatatgttatactacatctgcccaatgcacactcttttcaccctaatggtatatggagctctgggtatcttcagcaagtacaaatgtgataggatcggtgatggctctgaagatattttcatgctttctcgttgtcttttttttgtgggaaaattctggagcttttgaatattttgggtccctaacatttttgcta

SEQ ID NO: 149988 - DNA, 402 bp, Arabidopsis thaliana columbia
gcggcgagtatttctcaagaatcggtgtctgtactccggcgaaagagatgtacttggttcgcgacaccggaagcgacgtaaattggatccagtgtgaaccttgcgccgactgttaccaacagtccgacccggtttttaacccgacttcgtcttccacatacaaatctctcacttgctctgctccacagtgctctcttctcgaaacctccgcttgtcggtcaaacaaatgtctctaccaagttagttacggagacggatctttcaccgtcggtgaactcgctaccgatacggtgacgtttggtaactctggtaaaataaacaacgtcgctttgggttgtggtcacgacaacgaaggtctctttaccggagcagccggtttactcggttaggcggtggtgttta

SEQ ID NO: 149989 - DNA, 383 bp, Arabidopsis thaliana columbia
ctctgtccccaagggtttcactgaattctcaggattgcgaagctcctctgcttctcttcccttcggcaagaaactttcttccgatgagttcgtttccatcgtctccttccagacttctgcaatgggaagcagtggtggatacaggaaaggtgtgactgaggccaagcttaaggtggccattaatggattcggtaggatcgggaggaacttcctgagatgttggcatggtcgcaaggactctcctcttgatatcattgccattaatgacactggtggcgtcaagcaggcttcgcatttacttaaatacgactctactctcggaaatcttgatgctgatgtcaaaccttctggagagacttgcatctcttgtgatggaaagatca

SEQ ID NO: 149990 - DNA, 373 bp, Arabidopsis thaliana columbia
gtttagtacacaacagcaacatcaaactctaataaacccaagttggtgtatactataatggtgatggctggtgcttcttctttggatgagatcagacaggctcagagagctgatggacctgcaggcatcttggctattggcactgctaaccctgagaaccatgtgcttcaggcggagtatcctgactactacttccgcatcaccaacagtgaacacatgaccgacctcaaggagaagttcaagcgcatgtgcgacaagtcgacaattcggaaacgtcacatgcatctgacggaggaattcctcaaggaaaacccacacatgtgtgcttacatggctccttctctggacaccagacaggacatcgtggtggtcg

SEQ ID NO: 149991 - DNA, 325 bp, Arabidopsis thaliana columbia
agaggatccgtcggtgtgctagtctcactgacactacatccgatcgtcgccggtgacattttataagtgtggagtttacttcagctttattattcaggaattgatggatcagtacgagaaagttgagaagattggtgaaggaacttacggtgtggtttataaggcacgtgacaaagtgactaatgagacaattgctttgaagaagatcaggctagagcaggaggatgaaagtgttcctagcacagcaatcagagaaatctcccttttgaagaaatgcagcacagcaacattgtcaaattgcaggatgtggtgcacagcgagaaac

SEQ ID NO: 149992 - DNA, 315 bp, Arabidopsis thaliana columbia
attccatatctgtttcaatcagtatttgggtctttttttgtttgagctgtacgagatgaaattctcatatacagttcttggagggggagtaaccttggtttacctatctcaataaagtttatgattggttcgaagaacgtcttgagattcaggcgattgcagatgatataactagtaaatatgttcctccgcatgtcaacatattttattgtctaggcggaattacccttacttgttttttagtacaagtagctacgggatttgctatgactttttattaccgtccaaccgttactgaagcttttgcttctgttc

SEQ ID NO: 149993 - DNA, 318 bp, Arabidopsis thaliana columbia
ctttgcttcaaattcaacccatctctttttcctcccttccctcacaatcaaaatcttaattctcagcttctggttttgtcgaaaatggaaggcggttccgctagtggatcggcttcggctttgtcaaacgatgaaaatctcgtcggttcttgtgaggattcttcttcttctatagggaatgagcttgtgctcgggcttacgttgagccttggtcgcacagggtatcgcgatcgtagggtttacgccgatgagcctccttattctccatcaccttcttctacgagccgagctagcctgattgctgggatcaagaggaca

SEQ ID NO: 149994 - DNA, 420 bp, Arabidopsis thaliana columbia
ctgtatttcaagtttcatgagcgtttgccaccacaacattgtcttttcggggttttagtcatacttaatggcttccaattcggagaaaaatcctcttctttcagatgagaaacccaaatcgacggaggagaataagagttctaagccggaatcagcttctgggagttcaacttcatcagctatgcctggcttgaatttcaatgcttttgatttctctaatatggctagtattctcaacgatcctagcatcagagaaatggctgagcaaatagctaaagatcctgcgtttaaccaattggctgagcagcttcagagatctattcctaacgctggccaggaaggtggtttccctaactttgatcctcaacagtatgtcaatacaatgcaacaggttatgcataaccctgaagttaagacaat

SEQ ID NO: 149995 - DNA, 421 bp, Arabidopsis thaliana columbia
ctgtatttcaagtttcatgagcgtttgccacttcaacattgtcttttcggggttttagtcgggcttaatggcttccaattcggagaaaaatcctcttctttcagatgagaaacccaaatcgacggaggagaataagagttctaagccggaatcagcttctgggagttcaacttcatcagctatgcctggcttgaatttcaatgcttttgatttctctaatatggctagtattctcaacgatcctagcatcagagaaatggctgagcaaatagctaaagatcctgcgtttaaccaattggctgagcagcttcagagatctattcctaacgctggccaggaaggtggattccctaactttgatccttaacagtatgtcaatacaatgcaacaggttatgcataaccctgagtttaagacaatg

SEQ ID NO: 149996 - DNA, 378 bp, Arabidopsis thaliana columbia
tcttctcacaagaatcagattcaagatagaagtttttcaaacaatgtctagtcctcttggtcactttcagattcttgtttttcttcatgctttgcttatcttctcagctgagtcccgcaaaacccaattgctgaacgataatgatgttgaatctagcgacaagagtgcaaaaggcacacgatgggctgttttagttgctggatcaaatgaatattataactacaggcatcaggctgacatatgccacgcgtatcagatactccgaaaaggcggtttaaaagatgaaaacatcattgtgtttatgtatgatgatatcgcgttttcctcggagaatcctaggcctggaagtatcattaataaaccagatggagaagatgt

SEQ ID NO: 149997 - DNA, 328 bp, Arabidopsis thaliana columbia
caagtacttcaaggagaatccagactatgattacccgagttacaactctaagtatgggatatacactgaaggctgtgggctcgacaatgtgttaatgtcttggggacatgatgattacatgtaccttgttgcgaaggagaatcaaactactttaccatcagccggtcttttcatcatcagataccattcgttctacgctcttcacaaatcagaagcatacaagcatttgatgaacaatgaagacagagagaacatgaagtggcttaaagtgttcaacaagtatgatctctacagcaaaagcaaagtccgcgtaaacgttgaggaagtg

SEQ ID NO: 149998 - DNA, 446 bp, Arabidopsis thaliana columbia
gcggaaaccgatgggaaaggagtggatgttatcttggactgcattggggcaccgtatttgcagaaaaatctcgacagcttaaactttgatggaaggttatgtattatcggtttaatgggaggagccaatgcagaaataaaactaagtagtctgcttccaaagcgtctcactgtcttaggagctgcattaagaccaagaagccctgaaaacaaagcagttgttgtaagggaagtcgagaagaatgtctggccagcgatagaagcagggaaggtaaaaccagtgatttacaagtatttaccattgtcacaagcagcagaaggtcatagccttatggagagtagcaaccatattggtaagattctccttgagacttgattctctgcaaagggagaaatgttcagagacaagagtcatggtcaataatcaataaaatctggtcgattctg

SEQ ID NO: 149999 - DNA, 355 bp, Arabidopsis thaliana columbia
cataaactactctttcttccttgtcgtttcaaatggcgcaattgtattcttccgtgaaacccacgccaatgttgaaagatgagctagacattgtgatacctacgattcgaaacctcgacttccttgagatgtggcgacctttctttgagcagtatcatttgatcattgttcaagatggtgatccttcgaaagtgatcaacattccagtagggtttgactacgagctctacaacaggaacgacatcaatcgaatcttgggtcccaaggcctcttgcatttccttcaaggactctgcttgtcggtgcttcgggtacatgggctccaaaaagaagtacatctacaccattgatgatga

SEQ ID NO: 150000 - DNA, 389 bp, Arabidopsis thaliana columbia
cggacgcgtgggttccggtagtcaatggtcctacataaggtcttgcacttatatactgtggccatttcttcacagccattgttggtgcggagtggtgggctcagccgtttgggaagtcgattcctttgtttagttgggttccgtttttgaacgagatgcaaatgtccagaataatactattctccatgattttctttgctgttataccaacccttgcaatcaacacgtctaatgtttacaaagttgtacattcaagaaatggaagcatgcttctagcattagctatgctatatcccttagtcacgttaattgcaagagttctgatttgggattacttgtctccaattgatctcataagaaactaccctcacttagttgtgttgggaact

SEQ ID NO: 150001 - DNA, 423 bp, Arabidopsis thaliana columbia
agattttatggcggtggagctcatgactcggaattacatctccggcgtcggagctgatagcttcgccgttcaagaagcagctgcttcaggactcaaaagtatcgaaaatttcatcggtttaatgtctcgtgatagctttaactctgatcagccatcttcttcttccgcctccgcctccgcctccgccgccgcagatcttgaatcagctcgtaacacaacggcggacgcggctgtttcaaagtttaaaagagtcatatctctcttagatcgaactcgaaccggacacgcccggtttagacgtgctccggttcatgttatttctcccgttcttttacaagaagaaccataaacgacgccgtttcagtctcctcttcctcctccgccgcatatgatccgaaaaggttcgttttcttcatcgatgaa

SEQ ID NO: 150002 - DNA, 447 bp, Arabidopsis thaliana columbia
ggagaagaagcaaactctcaagctccgtcgggaaaaaaaggaaaaccagatcggaaagttcgcgtttttcaaatcttctccggagaaatcagattacttgattcttcaaacaatggatgtgattaagacgcaacagatttcagcaaggacgatcgagaaagtggttgttcatccactagtcttgcttagtatcgtcgaccattacaatcgcgtcgctaaggattcaagcaagcgtgtcgtcggtgttcttctggggagcagctctcgtggtgttgttgatgtcaccaacagctatgcagtgccctttgaggaggatgacaaagacccaagcatctggtttcttgatcacaactaccatgagtcaatgttccacatgttcaagagaattaatgcccaggagcatgttgtatgttggtacagcacatgccctaaacttcgagagaatga

SEQ ID NO: 150003 - DNA, 449 bp, Arabidopsis thaliana columbia
  unsure (1)..(449): unsure at all n locations
gctgtggaacgaatcttcgaagtcgaaactgcgtgtctacggattgaatctctgcagcagcttacgaccactgacccttttgcttttgattcaatcgatagacgacggatacaagttctcgctatcgccgagccggagccggagtctgagctgaagccctgtatctgtaactcttccaacagtggacataccttgagagatgaagatcgttcgcagggattttgttcgtaatggacccggaagcgttaagatggtggcagaggactctgatgatctctggtatgcttataacttgattgctgtgggcgatagtgtaatggctgtcactttcagaaaagttcagagagagatacctggtggnggaagagactctgaacgtgttaaactgaagctggaagtacaagttgaggaggtggactatgacaaagacggatctgttttgcgcatac

SEQ ID NO: 150004 - DNA, 425 bp, Arabidopsis thaliana columbia
  unsure (1)..(425): unsure at all n locations
ggggaaccaacgtaaccctaattttgctttctcctctttgttcagaaaattttccctttactgtcgaattccttttcgatttccctctcttaaacctccgaaagctcacatggcgtctcgaaactatcggtgggagctcttcgcagcttcgttaaccctaaccttagctttgattcacctggtcgaagcaaactccgaaggagatgctctctacgctcttcgccggagtttgacagatccagaccatgtcctccagagctgggatccaactcttgttaatccttgtacctggttccatgtcacctgtaaccaagacaaccgcgtcactcgtgtggatttgggaaattcaaacctctctggacatcttgcgcctgagcttgggaagctngaacatttacagtatctagagctctacaaaaacaaca

SEQ ID NO: 150005 - DNA, 317 bp, Arabidopsis thaliana columbia
ctagtagctccttttttctctatctcgctttctctgtttcaccacagtcatggcgagtcggcgaatcttatcatcgcttctccgttcttcttcgagtagatctacttctaaatcctccttgatcgggagccgaaacccgaggcttttatcccccggtcccgcgcatggagccgctccatgtgggactctccttggccgagtcgccgagtattcgacttcttctccggctaattcggctgcaccatcttctgctcctgctaaagatgagggaaagaagacctatgattacggtggcaaaggcgcgatcgggcgtgtgt

SEQ ID NO: 150006 - DNA, 333 bp, Arabidopsis thaliana columbia
cggcggacaaaattgaaatggagctcagcttgagcacttcctccgcttctcctgcgggtgggaggagacaagcttctcctctgcttcacaagcagcaagagctccgcgtcagctttgcttccgcgctcaaacctggaggaggagctcttcgatttccttcccgccgtccgcttcctcgtcccatcacttgctccgcctctccatcaactgccgaaccagcctccgtagaggtgaagaagaagcagttggataggagggataacgtgaggaatatcgcaatcgttgcacacgttgatcatggcaaaactactctggttgatcctatgcttaggc

SEQ ID NO: 150007 - DNA, 357 bp, Arabidopsis thaliana columbia
ctcggttccctcaccaccaaccgctccgtctcacgccggaacttcgccgtcaaggctcaggctgatgatttaccactggtcggtaataaggcgcctgattttgaagctgaggcagtttttgatcaagagttcataaaggtgaagctctctgagtacattggcaaaaagtatgttattctattcttctaccctttggacttcacttttgtctgccccactgagattactgccttcagtgaccgttatgaagaatttgagaagctaaacaccgaagtattaggggtctctgtcgacagtgtgttctcgcatcttgcgtgggtccaaacagacagaaagtcgggagggctcggtgatctg

SEQ ID NO: 150008 - DNA, 438 bp, Arabidopsis thaliana columbia
ctcacgcacaactctcacatctaaaaatgcaactggtcatgcttcctggtccaccgttcaatgcagcgagttactactacccaaaaggcatttactacgtaatggattacttcaaaaccacttacggtgaccctttaatatatgtcactgagaatggatttagtaccccaggtgatgaggactttgagaaggctactgccgattacaagcggattgattatctctgtagtcatctctgtttcctcagtaaagtcatcaaggagaagaatgtcaacgtgaaaggatattttgcttggtctcttggggataattacgaattctgtaacggatttaccgtcagattcggactaagttacgttgatttcgcaaatatcactggtgatagagacctcaaagcatctggcaaatggttccagatgttcataaacgttaccgacg

SEQ ID NO: 150009 - DNA, 322 bp, Arabidopsis thaliana columbia
gaaagatcgaagaatcgctcttttcaagaagtactttgttgatgagaggaagcaaattgcgagttgtaagcctacaggtagtgaaggattgaaatgtgccattgatcacatccttgaagctgagcagaagggagaaatcaacgaggacaatgttctttacatcgtcgagaacatcaatgtcgccgcgattgagacaacattgtggtctatcgagtggggaattgcagagctagtgaaccatcctgaaatccagagtaagctaaggaacgaactcgacacagttcttggaccgggtgtgcaagtcaccgagcctgatcttcac

SEQ ID NO: 150010 - DNA, 334 bp, Arabidopsis thaliana columbia
cctcaacttcttcttcttctcctctcaagaaacaataactagcaatggcggttaagagatcttcaggggctaacacaaaccggaatggttgaaccaattcctaagagatgcttgagcttggcccagaatcaatgctttgatgaggatggtctgcctgtagacgtaccaaagggtcatttcccggtctatgtaggcgaaaagaggagccggtacatcgtacccatatccttcttgactcatcctaagttcaagagcttgcttcaacaggcagaagaagagttcgggttcaatcatgacatgggactcactattccttgtgaagaagttgttttcc

SEQ ID NO: 150011 - DNA, 338 bp, Arabidopsis thaliana columbia
gagaaagagagaaagagagacagagataatggcgtacagtgcgtgtttcctacaccagagcgcatgggcttcatcagccgcacgatcatcatcttcctcctcatcccagcgtcacgtgtcgctctccaaacctgttcagatcatctgtaaagctcaacagcctcatgaagacgataactccgccgtctcccgccgtcttgctctcactctcctcgtcggcgccgctgctgttggttccaaagtatctcctgctgatgccgcctacggtgaagctgcaaacgtgtttgggaagccaaagacgaacacagacttcttgccatacaatggagatggggtca

SEQ ID NO: 150012 - DNA, 449 bp, Arabidopsis thaliana columbia
caaaagataaacctctctctctctatctatcttatgtcaaaagacagatttattaacaaacgcaaatcataaatctttttcttcttccgagaaagaatgtctaaatcatcgtataatcacatcttcatcttgatcttgtgtttatgtttgagatcatcatcagccttcacgaatctcaacaccttaagctttgaagaatcactttctcctctctttggagatgccaatctcgtccgttcacctgatgatctctccgttcgtcttctcctcgatcgctataccggttctggtttcatatcatcgaatatgtatcaacatggattttacagctccatgattaagcttcccgctgattatactgccggcgtcgtcgtcgccttttatacatcaaacggagacgtgttcgagaaaacacacgacgagttagacatagaagttctaggggacat

SEQ ID NO: 150013 - DNA, 390 bp, Arabidopsis thaliana columbia
aaacccttttagaagactaccgcatctttacttcaaccatatgacgcaacaatataaaggggcaggctttggagaattgagcccccatccgtttgcatttgcagatgcagcttacagacaaatgaaaaatcagggcattagtcaatcaattctggttagtggtgaatgtggagcagggaaaactgagactactaaattgctcatgcaatatctggcagacatgggaggtcgagctgtttctgtaggaaggacagtcgaaaagaaagtcttggagtccaaccctgttctagaagcatttggaaatgctaagactcgacggaacaacaactcaagtcgatttgggaaattcgcggagattcacttcgatcaaagaggtaggattttatgcgc

SEQ ID NO: 150014 - DNA, 384 bp, Arabidopsis thaliana columbia
cgttgtcattcctcttgttgatgtatatgttgcaataataacatcggtcgtgcctattggaactccttttaccgtgacatatacaatttcatgtaatgatcatctcgtcagattataaacgtataatattgccctcacaacagactctaattctaaggattgatgttgcattctctgagataaacgtgctcatagtctacatgctttgaccagaagcctctgtatcttggaatcccaatctctagccatggtttgaggttgccattatagtgtatcacggctgccctctcaatatccctttggttcacactcgggttgtatccaagccctagtatgtgccatttccggtctagcggatatgttcgtcttcaaaatgtgattaga

SEQ ID NO: 150015 - DNA, 403 bp, Arabidopsis thaliana columbia
cctttccaaatcacacccacacgtccgcacacacacaaagacaatgtctcctttcaaaatattcttgttcacgactcttctcgtggcggcgttttcagtgtcggctgctgatttcaacactgacgtcaacgtagcttggggaaatggccgtgggaagatactcaacaacggccagcttcttactctctccttagacaaatcctctggttccggttttcaatccaaaacagagtatttgtttggaaagattgatatgcagattaagcttgttcctggtaactctgcaggaacagtcacaactttttacctaaaatccgaaggatccacttgggatgagattgattttgagttcttgggtaatatgagtggagatccttatactttacacactaatgtttacact

SEQ ID NO: 150016 - DNA, 336 bp, Arabidopsis thaliana columbia
  unsure (1)..(336): unsure at all n locations
acaaaacccgaaactgaaacagagaatccaaaaaaaatgccacaactcgagaacaacgagcgacttctaatcaacgaggaagaagaagaagaaacagcgtacgatgaaacagagaaggtacatatcgtaagaaacgaagaggaggacgatctagaacacggcgtcggatgcggcggcgcaccaccgttctcatggaagaagctatggttattcaccggacctgggtttttaatgagcattgcgtttttagatccagggaatctcgaaggagatcttcaagccggtgcggttgctgggtactctntgttatggcttctcatgtgggcaacagcaatg

SEQ ID NO: 150017 - DNA, 386 bp, Arabidopsis thaliana columbia
cggcgaccgccgattttcccggtaaaaatgaacgacggagatgtatcgaggcagatccagcagatggtgagatttatccgccaagaagcggaagagaaagcaaacgagatctcggtttctgctgaagaagaattcaacattgagaaactccagcttgttgaggcggagaagaagaagatcaggcaagattatgagaagaaggagaagcaagctgatgttcgcaagaagattgattactctatgcagctaaatgcatcaaggatcaaagttcttcaagcgcaagacgatattgtcaatgccatgaaagaccaagcagctaaggatcttctgaacgttagtcgcgatgagtatgcctacaaacagctcctcaaggatctaattgttca

SEQ ID NO: 150018 - DNA, 401 bp, Arabidopsis thaliana columbia
aaagaaatggaattaccactgaacagtggcttcaagatgccgatcgtcggcttaggagtatggagagtggagaaggaagggattcgagaccttatcctcaatgccatcaagatcggctatcgccatctcgactgtgctgctgattataggaatgagaccgaagttggtgatgctcttacagaagcattcaagactggtctggttaagagggaggatctcttcattacaaccaagctatggaattcagaccatggccatgtcattgaggcctgcaaagacagtctcaagaaacttcaacttgattacctcgatctcttactcgttcattttcccgtagcaacgaaacacaccggagtagggacaaccgatagtgctttgggcgatgaccgggttttggacat

SEQ ID NO: 150019 - DNA, 357 bp, Arabidopsis thaliana columbia
ctcctcttcctccacgtccactagaactcgccatgggaaatattggaggagaagcttatggaaacggtccaaacgatctccttaagtccatcactgcaccaacagaatctgacaaacctgtcatcatcgacttatccgtggctgcaatggaagagctcatgaggatggttcaagtagacgagcctctgtggaagagtttggttttagacgaagaagaatatgcaaggacctttcctagagggatcggacctagaccggctggatatagatcagaagcttcgcgagaaagcgcggttgtgatcatgaatcatgttaacatcggtgagattctcatggatgtgaatcaatggtcgacga

SEQ ID NO: 150020 - DNA, 369 bp, Arabidopsis thaliana columbia
cggtattgaagggccggcccacgcgtccgcgatcagatttttttttgctttcaccgttcataacttctcagaaaggaagagcttgtgcgtgtacggttctcttctccgtagattgacttgctctaatgatggaggtcaaattatggaacgacaaacgcgaaagagagatgtatgagaattttgcagagctttttgcaatcatcaaagccacagagaagctagagaaagcttatataaagagacctaatcaatccttcagagtacgaatctgaatgccagaaactcattgtccactttaaaactttatccgctacactcaaagacacggtgccaaacattgaaagatttgcagacacatacaaaatggac

SEQ ID NO: 150021 - DNA, 347 bp, Arabidopsis thaliana columbia
atctgatctatctctctcttccagctgtttcatgatcgatttactcttaacttacagctgagtacagttcactgtaatctctcaagaaccctagattcttttttttccttttcaattgtgatccgtcagcagcaatgcttgatctttaaatttactgatatctgaagatcgaattagggttctgatctacttgatatttatttgtttgggctcttattcagcagctcgatcttgggctgaagctatggctcagagtaattgggaagctgacaagatgcttgatgtttacatatatgattattcggtgaagaagaaacttcatcatactgctaggtcgtttttgactg

SEQ ID NO: 150022 - DNA, 366 bp, Arabidopsis thaliana columbia
agtgattaccgaggggttcctcttcacatggttaaagagctttgttttcatattttggtggggttggattatcttcatcgtgagctttctattattcatactgatttaaagccgggaaatgttctgcttttgtctacgattgatccgtcgagagatgtgaggagatcaggtgttccacttgttctgcctataaccaaggacaagattgtttctgagtctgctgttaaacctgaaactaaaagttatacgtacaatggtgatttgacaaagaatcagaagaagaagattcgtaagaaagcgaagaaggtggtggctcaagattttggtggagaggaagctttggaagaaagtgagagagattctaac

SEQ ID NO: 150023 - DNA, 379 bp, Arabidopsis thaliana columbia
cggcgtgcataaagatcttcgaatcaatgtagtttgtcccggaagagatgcagctttagggatcgatagtgttggaactgttccagcttctctcataacttttgcttccatccaagcattaaaacctgacatcataatcaatgccggaacctgcggtggcttcaaggtcaaaggagccaacataggcgatgtattccttgtatctgatgttgtgtttcatgatagaagaataccaattccgatgtttgatctgtatggagttggtctccgtcaggcattctcgacacccaatctcctcaaggaactcaatttgaagattggcaggttatctactggtgactcggtggatatgtccacgcaagatgaaacaatgatcatt

SEQ ID NO: 150024 - DNA, 449 bp, Arabidopsis thaliana columbia
  unsure (1)..(449): unsure at all n locations
gaagctctttgtctttgtttgggtccttgccaagatccaatttttacgatcaaaatcggcccggtggaattcagacacgggttggagatananatatgtcttgttcatcttcttccggatcagaaggagaagaagagggtttcgatgcttaccgtaaaggtggttatcacgccgtcaggatcggcgatcctttttccggtggtcgttacatcgctcagagaaagcttggttggggtcaattctccaccgtttggcttgcctacgatacgctcacctctacttatgttgctttgaagattcagaagagtgcacaacaatttgctcaagctgcacttcacgaaatcgaatttctttcagctgctgctgatggggatctcgacaagacgaaaatgtgttgtcgtcttattgaccatttcaagcatagtgggccaaatgggcagcatttattc

SEQ ID NO: 150025 - DNA, 518 bp, Arabidopsis thaliana columbia
agacaatttaattccaaaagataaaaacaatcaatttattaatgccacaaagttttttgtgctgcgtcgttatttacatttggtgtgccattttcacctcaagtcatttttaataattttccatattgtcttaattatttctctcacatctaaattgtactaactatttttttttatttttactttttatattttttttttacttttcttttttttcttatacttttattttatttttttttccttaaaactatttcttttttatctatcaatttaatttctatttaatattttaatttactcttttttttatattttttatatatttcaatatctctattatatatcttacattatttttttctatattattttatatattttttttatttttttcttttatattttttatattttattttattttattattaatttatttttattatttttctttttcttatttatataattatcttatttatttatatattttatatttatctatttatcatttt

SEQ ID NO: 150026 - DNA, 284 bp, Arabidopsis thaliana columbia
  unsure (1)..(284): unsure at all n locations
gtggggatagttctctctctattcatttacctttgagatggtaggggattcttgaactcatgattacgtagcttcgctgccgtgaggagagtctaccattntttcaaagactagctattttgaaataaccaattcttcatcaaagctaaaggtggtgggtgatggccttattttttttagtttttgcaccaaagaagagcataaacatctttgcatgactcattacaatatgctctagatgatggattgatatgaatatgcgagaaattaaatcagtatttaac

SEQ ID NO: 150027 - DNA, 334 bp, Arabidopsis thaliana columbia
aaagctaaagattcgccatttttatttctttatggtgggctactctccaagcagggtacgctcaacagacactaataaggataaaaaaacttcgcaacagaatcagatatctaaaaatcccggaaattcactagatttcttctattggtaccgagaggtgtcatcaaatttaacagacttcaagtttattaggccaagcccacgagcttctcactgatctcccacactttacgagccttctcaacgtcacttgcttcttctgataactggttctcaaaaaaagccgaagcattgttccaacttcaataaaccccttatttcgtcaagcttggat

SEQ ID NO: 150028 - DNA, 453 bp, Arabidopsis thaliana columbia
  unsure (1)..(453): unsure at all n locations
agcttagcttcagttatccaccacggaattctccctccggccaaatcggatcgaatctttcttaccatgccggtgttcccgccggatttcagagctcgtggatggactaagtctcctttctctctccttataaatccctctcttgcttcagctgccaatcgtcgtctctctcatcttcctcctatcgcgtgttccagaggtattgatcaggaagatgaagagaaggagagcagagaacttctaccacacaaaaacgatgagaatgcaaccacttcacgctcttcttcatcagtagatagtggaggcctgaaagattatcaacaagaagaaacttacaaaacttccttcaagactgttgccttgtgtgttggcactgcggtggcatttggaattggaataggtttgaaggaaggtgttggcaaggcttcagagtttntcgcaggctacatattg

SEQ ID NO: 150029 - DNA, 450 bp, Arabidopsis thaliana columbia
tgcttctcctgttcattacaaattcaatcccgtcaagactatcaagacgaatgtggttggaacgtggagacatgcttggtttggcggggcgagttggggctagatttcttctgacgagtaccagtgaggtttatggtgatcctctgcagcatcctcaggttgagacttactggggcaacgttaatcccattggtgttcgtagttgctacgatgaaggaaaacgtacggcagagacgttgaccatggactatcaccgaggtgccaatgttgaggtcagaattgctaggatcttcaacacctatggtccaagaatgtgtatagatgatgggcgtgttgttagtaacttcgttgcacaggcactaaggaaagagccattgactgtttacggtgatgggaagcagacaaggagtttccaatttgtttctgatctggttgaaagtttgatgagac

SEQ ID NO: 150030 - DNA, 457 bp, Arabidopsis thaliana columbia
ctcaggagaacagccacttgtcatcatcgctcttctcgacatcgccaactaccaaaaccaactggaccgcaaccctagagtggtgcgatgggccggaaacaaccagcagggaggctttggcggttcacagcaacaacaagaacagaaaaacttgtggagcgggttcgacgcacaggtcatagctcaagcattgaaaattgacgttcagttggctcagcagcttcagaaccaacaagacagcagaggaaacatcgttcgtgttaagggacctttccaggtcgtgaggccacctctaagacagccctacgagagcgaggagtggagacacccacgtagcccacagggcaacggccttgaggagactatctgcagcatgaggtcccacgagaacattgacgaccctgctcgtgctgacgtgtacaagcccagcctaggtcgcgtgaccagcgtcaacagc

SEQ ID NO: 150031 - DNA, 471 bp, Arabidopsis thaliana columbia
cggaaccgccgggccggcccaggcctacgcgtgcggataagggctccctctatccatgaacctggaagttgtatgttcttgttttattatctcgatcatcattcttcatcgctcacaaaatgggctgatgaagagaggtatcaaacatctatgtttcaatggcttcacgggctactcatcacttcatcatcattatcatggatcaagctcaaagaacggcgtaaaaccggagtcaaacatctttgcatgactcattacaatatgctctagatgatggattgatatgaatatgcgagaaataaaatcagtatgaaactaactataaatagtattacatttagagattcaagtatgatatataaaatatgagtcgtcgtgttcatggcttgcagcatgaaaaaaggaagagttcccctttcaaaaacttcaatttcttttgtaaagagaaaaaaaacaaaatttatatgtaat

SEQ ID NO: 150032 - DNA, 384 bp, Arabidopsis thaliana columbia
tccttttgcattgtgtgaaaccttcgagttttctcttcatcttctcaaagtaacaaacgttctgcaaacatattattattggaagcgatctcatcaagaactacgatgaaattcccggctgtaaaagttcttattatctctcttctcatcacatcttctttgttcatactctcaaccgcggattcgtcaccatgcggaggaaaatgcaacgtgagatgttcaaaggcaggaagacaagataggtgtctcaagtattgtaatatatgttgcgagaagtgtaactattgtgttccttcaggcacttatggaaacaaagatgaatgcccttgttaccgcgatatgaagaactccaaaggcacgttcaaatgtccttgatcatgttct

SEQ ID NO: 150033 - DNA, 367 bp, Arabidopsis thaliana columbia
aaagctaaagattcgccatttttatttggggtagggtgggctactcgccaagcaagctacactcaacagacactaataaggataaaaaaacttcgcaacagaatcagatatctaaaaatcccggaaattcactagatttcttcgattggtaccgagaggtgtcatcaaatttaacagacttcaagtttattaggccaagcccacgagcttctcactgatctcccacactttacgagccttctcaacgtcacttgcttcttctgataactggttctcaaaagaagccgaagcattgtttcagctccaataaacccctgatttcgtcaagcttggatcactcaccacctgagcaaggtctttgcctgac

SEQ ID NO: 150034 - DNA, 207 bp, Arabidopsis thaliana columbia
catatttctaacattttcgtagccgcaagactcctttcagattcttacttgcagctatgggtaaagagaagtttcacattaacattgtggtcattggtcatgttgattcttgaaaatcgaccacaactggtcacttgatctataagcttggtggtgttgacaagcgtgttatttagagggtctagaaggaggcttcttagattaaca

SEQ ID NO: 150035 - DNA, 450 bp, Arabidopsis thaliana columbia
cttctactctctgaaacaacttctcaccttctttgctcagattcaaagactccagtcaacaacggcgagacactccagttgtgcgattcctacaaagaaagatcttgctgcaattctaaagatgatcttcaattacagaatcgcttcaactccatgaacatctctgactctaattgttcttctcttctcaaatccattctctgttctaaatgtgatgaattctcaggacaattgtttggtgatgatgatagttctctagttccaattctctgcaactcaacatcacaagacttatgttcaaaactttgggattcatgtcagaacatttccattgtttcttctccttttagtcccactctacttggtggtgctacttcgccttcaacttcatcaaattcatcgacattaaccgatctttggaaatcccaaaccgaattctgtacagccttt

SEQ ID NO: 150036 - DNA, 457 bp, Arabidopsis thaliana columbia
aaaaaaaaaactatgggttacgacaggctcggtccatccggaccatcaaacccgaaccagaaggaccctgccacgtcactgccggaactacagaagaaaactaaaacgaagctgattctcttcactttggccgttttggtagttggagtagtctgcttcggtatctttgccggcatccgagccgtagactcgggtaaaaccgagccgaaactaacccgtaaaccgacccaagcaatctcccgaacctgtagcaaatccttatacccgaacctatgcatcgacacacttcttgactttccgggatctttaaccgccgacgagaacgagctcattcacatatcattcaacgcaacgcttcaaaaattcagcaaagctctttatacttcttcgacgatcacatacactcagatgcccccacgtgtacggtcagcttacgattcttgccttgagttacttg

SEQ ID NO: 150037 - DNA, 454 bp, Arabidopsis thaliana columbia
tggggctttaaattagtagaaatgatcagacagttttccccaagattccgattcagagtatgctcctatccaccgacaaatgtaatgactatcagaaacgaaataatcctttattttttataagtctaccaacttttttctaaaaaagaaagaagaataggaacgaaacaaggctcttttttttttcatatatttcgaaaataaaatcgaatttctgtcatgaataataaaaaaataggatgtctaattatttttcgtaatcgaaaaccacgatgggcttaaatactttttttttttaggagttttttattaaagggttaagttattactcaacaaatagaaattcaaatttgtaaaggggtgagatgaattccgaagcgcgttttttattcttagaatttgagcagacagaattccattggtataattcgggaccccagatatatttaatcca

SEQ ID NO: 150038 - DNA, 464 bp, Arabidopsis thaliana columbia
  unsure (1)..(464): unsure at all n locations
caaatatatattttaaaaaaaaaaaaactgaaacaaaagaagagtcatcagattttgaagacatgaaggtcatgacactaatgggggtcacatttgtgattatcgtcctgtcatctcctattttgatgaaagcagaagagacacagtcatgtgttccgatggagctcatgccatgcttacctgcaatgaccaaaagagaacaaccgactaaagattgttgcgaaaatctgattaagcaaaagacatgtttatgtgattacattaaaaacccattatatagtatgtttactatctctctagtcgctcgcaaagttttagagacttgtaatgttccttatactaagtggtaaagctcaatatattttttaaaataaattttttttttttggtaataatattaataatatttttttttatatatatattggttnttttatttttttatattattttatatatttttt

SEQ ID NO: 150039 - DNA, 452 bp, Arabidopsis thaliana columbia
gagaaatggggagatctatggtgctaatctcggcggttgtactggcttttctagtggcggcgcggatggcagaagtaacagccgggaggatttagtcggcgacaaaaagttctggaaccccaacattaactataccctatgggctcaaggcaaacatttctacgtcggagactggctttattttgtgttctatagagaccaacacaacattcttgaggtaaacaaggctgattatgaaaaatgtatctccaaccgcccaatacgtaattatacacgtggagctgggagagatattgttcctctctatgagactagacgttattatctacttgatggaagaggtggttgcgttcaaggcatgaagctagatgttttagttgagactacttcttcttcttcttcttttacctcttcttctttcagcacaataagaaatcaaatttatgtgtatt

SEQ ID NO: 150040 - DNA, 456 bp, Arabidopsis thaliana columbia
aaaaaaatatgtatagtagagagtccttgtcgagtctccatactttgaacgtagcaaagagggggagggctttgttccctaaacggtgcaggtctcatcaacccgatctccgctggacgtcgaaacaacctgcctcgtccaaacctcagaagacgatgtaaggtcaccgcttcacgggctaatattgaacaagaaggtaacacagtgtaagaacccattcagaatattaaagtaaagggatacataacggcccaagaagagtttctggagggcataacttggtcgagaggtctcgatgacattgctgatatccgcggcagatcattgctcgtcgagcttattagcgccaagactgaccagcggattacggtagaagactacgcacaacgtgtatgggccgaagcccctgatgagaagtacgagtgcgagtttgagatgctctgaagacttttgacc

SEQ ID NO: 150041 - DNA, 457 bp, Arabidopsis thaliana columbia
  unsure (1)..(457): unsure at all n locations
attctttgaaatttgcccagaatcgatgaaacaatcatattcactcgaaatatcgtctctaaaggttggttagtttcctccaggcgttgataggtgatcagagatatgaagaaatcgccgttgccggtgcagaatgtgcagagctccgataagaacgttgccggaaaagaagcattggtgaagcttttgagatggcatttcggtcatgcagatttcagagggaagcaattggaggctattcaagctgttgtatctggaagggattgcttttgcttgatgccaacgggaggaggaaaatcgatttgttatcagatacctgcattagctaaacctggaatcgnccttgttgtgtctcctttgattgctttgatggaaaatcaagtaatggcgctgaaggagaaaggtattgctgctgagtatctctcatctacccaagctacacatgttaagaacaaga

SEQ ID NO: 150042 - DNA, 356 bp, Arabidopsis thaliana columbia
cggacgcgtgggccgacattaaccaatggattactctattcccttaaagaaaaaaacgcgaatggtctattctccactacagatgggcctacatatatatacacacacttgtgcattttcattgatcaactatatccctcttaagatacctagaaagaggagtggatttatctaaagatgcctgattggggacccgtttttgtcgcggtgaccctttttttgttgctgactcccggactgcttattcaagttcctgggagaggtccagtggttgagtttggaacgtttcatacaaagtggctctcggttatttggcatactcttatttactctactcttggttggattctcttgct

SEQ ID NO: 150043 - DNA, 457 bp, Arabidopsis thaliana columbia
caaaagcctatttgggggatcatcaaccttttattatcaccatggatccttacaagtatgggcgttcaagcgcgtacaacggccgattctacaccacaaacggtggtgctccagtctccaacaacatctcttccctcaccatcggagaaagaggtccggttcttcttgaggattatcatttgatcgagaaggttgctaatttcaccagagagaggatccctgagagagtggttcatgctagaggaatcagtgctaagggtttctttgaagtcacccatgacatttcaaacctcacttgtgctgattttctcagagcccctggtgttcaaactccggttattgtccgtttctccaccgttgtccacgaacgtgccagtcctgaaaccatgagggatattcgtgggtttgctgtcaagttttacaccagtaagggaaactttgatcttgttgggaacaa

SEQ ID NO: 150044 - DNA, 451 bp, Arabidopsis thaliana columbia
ctcagcttacgaacaagaaaaaaagaagaatctttagccacctttgagatcaaaagatgaacatcgctcacactatcttcggcgttttcggaaatgcaactgctctgtttcttttcttggctccttcgataacattcaagagaatcatcaagaacaaatccactgaacaattctctggtatcccttatccaatgactctcctcaactgtctcctctctgcttggtatggacttccctttgtgtcaaaagacaacacacttgtgagcacaatcaatggcacaggagcagtgatcgaaacagtctacgtgttaatctttcttttctacgcaccaaagaaggagaaaattaagatctttggtatcttctcttgcgttttggctgtattcgcaacagtagctctcggctctctctttgctcttcaaggaaacggtagaaaactcttttgtggtct

SEQ ID NO: 150045 - DNA, 411 bp, Arabidopsis thaliana columbia
atcttggctgggtttcgtgtgatttcgttttggatatggttgttcggattcttgttaccatggtgcggctatagtgtttgtcggctctgattgtctcaagcatcgttctttactgatttttagatagctctgagatctgtctctgcgattcgtcggatttgaattcgttttttttttggggtagctcttggatttcttcttctagggtttccaagaggatagagaaaatgcgggtgtcctctgagatactccttctttctttggttccggcgttgactttttatcattctggattaagttctaatcgattgaaacctcttcaaaagagtgattggcgtggttatcttagttaaacaacaatttctctgttttgttgtttctccgatcttttcaaatcttttcaattttctc

SEQ ID NO: 150046 - DNA, 425 bp, Arabidopsis thaliana columbia
cattgatatcctctaaattgttccccgtcgtagaaactttaggtaatcgttgccgtcgagctgatatttgtgaaggggaagccgggagattcgataagggattgtaaagttgcacaagtttgcttatccccagaacctgctctgcaacacaacaatggggaaaaaaggagggactttgaagagaagtagcaaaagcacaaaaactcgcaaagatatcgtcgaagaccaatacgacgacgagattgacgcctttcataaacagagggatatagttcccttggatgttaatgatgatactgatgaatcggatgaagatgatgtgcaacctgtatttgatttacagggtgtggatgatgaaagtgaggaggatgaagatacagaagactaaaaggtggtctagaatggacttactttcaaaattatta

SEQ ID NO: 150047 - DNA, 342 bp, Arabidopsis thaliana columbia
gagcaatctatatagattacaatccatactgcttgaagagacggattcacgggtcggatcttgtaagggtagctaggaataaaggctactgtcactactcatgcctcgagcttgatattatgaccttgcacttcaaagccaagaatcctcaccggttcttccagaaggctgaaccgcgactagtagcatacattgatcgggtgatcgggcaagacgtcttcgctcaaggttgaagctaaaaaaggagaatggtcgcccggtttggcagtacctgattatctcaccggcagttttgccagtgacaatgggtttgaccccgtgagcctagcacaggatacaaag

SEQ ID NO: 150048 - DNA, 239 bp, Arabidopsis thaliana columbia
gatttggaagatataattggtggagcaggagaagccattgtagatttgaaacaactcttctcacttgcgtgaaaagtttggttattcagagtggatacagtttgatgcatctgttgtgcgcggtcttgcttattacactggtatcgtcttcgagggatttgatcgaaaagggaagctgcgagctatatgtggtggtgggagatatgataggttactctctacttatggaggtgatgact

SEQ ID NO: 150049 - DNA, 456 bp, Arabidopsis thaliana columbia; identical to SEQ ID NO: 129079

SEQ ID NO: 150050 - DNA, 454 bp, Arabidopsis thaliana columbia
gttttgtcctttttagattttgttttttttttattctttaaaccgttcattgatttcttctgagtcattagaggttgatgtatggcaagcaaaagggttttcaattgtgtgttggttgctgtgatctttgaccagattttatggtggaatttctgaaaaaagtatcaatccggttcttgaaatgatgaagagaccgatcccaagttggccatggtggttattaggaagtagaaaagagaaagaaactgaagctcttaagtttcctacaaagatagctcgagtaaataagaggaaagagcttgaacttgagagctttggttcgtctggctctgaatctgtagatgttgttgctggtgatggacctgaatggtctgttggatggactgagccacatggacctgatttcaaagtgatgattaaggaaatgatggtggcttcttagtgttgggtcctt

SEQ ID NO: 150051 - DNA, 451 bp, Arabidopsis thaliana columbia
  unsure (1)..(451): unsure at all n locations
aaaatccattgacgccctaacaaaagacgccggcttgtgttttcgtcactttctctagtttcctgtaacccaacccactcaaacgaaattttttcttaatctctctttcgttcttcttcttcttcttcttctttagattgttgtaattccaatcggaactctcgattcgctttcttctccgttcttctgtggcggaccggttttgtggttttttatttgaacattcccgatcttgccctgagttccacgatcagtttctttaaaccctaggttttacacaagcattctgtttctccagattatcgcagactctttcgntctattctttgtagttttgtaaaaggtatttcggtagatttagggtttgtctgtgtctagttttcgagatcgagagagatttgtgatgaatactaacagaggaagatatccaccgggtgttggaacgggtcgt

SEQ ID NO: 150052 - DNA, 426 bp, Arabidopsis thaliana columbia
cttagggttaagcaagagagaaactagagatgaggttgataacgcacaacatgctttcctgcagacatcaaaggagtcaccagtggatttcctctacggatcgaagctgggaacgtgattgagaaggaagtcgatttcaatcccgattttatcaggcacatgttcgcgaagattgagtggaaagctctggtggaaggtgcgcgttccatgggatacgctgagttaccggaggaatctccggacgccgcggtgctgaaatcagatgagcccttccttaagaaactccaccacgcgttgctcgagctccaccttgaggaaggcgcgcttgtttgccctgagactggacggaagtttccggttaataaaggaatcccaaatatgcttcttcatgaagacgaggtttaattgattgtgagatttttcctt

SEQ ID NO: 150053 - DNA, 455 bp, Arabidopsis thaliana columbia
ctcacccaagaagacaaaaacacagagagagaaagtagagagaaatggcgacgacaacaacagaagcaacgaagacatcatcgaccaatggagaagatcagaagcagtctcagaatcttcgacatcaagaagttggtcacaagagtctcttacagagcgatgatctctaccagtatatactggagacaagtgtgtatcctagagaaccagaatcaatgaaggaactcagggaagtgacagcaaaacatccatggaacataatgaccacatcagctgatgaaggacagttcttaaacatgcttatcaagctcgttaacgccaagaacacaatggagatcggagtttacactggctactctcttctcgccaccgctcttgctcttcctgaagacggcaaaattctggctatggatgtcaacagagagaattacgaattgggtttaccgatcattgag

SEQ ID NO: 150054 - DNA, 441 bp, Arabidopsis thaliana columbia
gaaaagattgcagtagaagaagaagaactgagaagcggcattgacgaagctgagaaattggttgcaaaggaagatgagataaagatgctgaaagctagactctatgacatggagaaagagcatgaatcactaggcaaagaaaacgagagcttgaagaatcagttgagcgattcagcttcagagatttctaatgtgaaagctaatgaagatgagatggtttcaaaggtgagtaggattggggaagagttagaagaaagcagagcaaagacggctcacctgaaggagaagcttgagtccatggaagaagcaaaagatgctttagaggctgagatgaagaagctcagggttcaaaccgagcagtggaggaaggcaacggatgctgcagcagcagttctttctggagagtttgagatgaatggtcgggatcgatctgggtcaact

SEQ ID NO: 150055 - DNA, 456 bp, Arabidopsis thaliana columbia
gtctctctctctctctctctacacaagaccttgaagaatccgattccataacaatggcgacttcgttagcacgaatctctaaaagaagcataacatcggctgtttcatcgaatctgattcggcgttacttcgccgcggaagcagtagcggtggcgacgacggaaacacctaaaccgaaatcgcaggtgacgccgtcgccggatcgggtaaaatgggactacagaggccagagacagataattcctctgggacagtggctaccgaaggtagctgtagatgcttacgtggcacctaacgttgtgttggctggtcaggtcaccgtctgggacggctcgtctgtatggaacggtgccgttttgagaggagatcttaataagatcaccgttggattcttgctcaaatgtccaggaacggtgtgttgttcatgctgcgtggtcggcgcctacaggattacca

SEQ ID NO: 150056 - DNA, 457 bp, Arabidopsis thaliana columbia
acaacacgaaaacaagatttggagaagggcttgggcatcacgggcaacaaccccaacagcaaccacaggtgaacttacttcacggtgtccccacgggtttacaacagcagcttcctatgggtaatcgaatgagtattcaacaacagattgctgctgttcgagctggaaatagtgttcaaaacaacggaatgctgatgcctctagcgggtcagcagtctttgcctcggggaccaccgcctatgctaacctcttcgcaatcatccatcaggcagccgatgttatcaaaccgcatttccgagagaagtggtttctctggaaggaacaatatccccgagagcagcagagtgttaccgacaagttacactaatctcacaacacaacactcatcaagctcgatgccttataacaacttccaaccagaacttcccgtgaacagtttcccgctggcaagtgcacc

SEQ ID NO: 150057 - DNA, 458 bp, Arabidopsis thaliana columbia
taaacattcacaccatctctttctctaacaatggagatttttcaaaaggccaaagccgttcgtctacggagccatcacgacaagtacctagtcgccgatgaagacgaagaatctgtaactcaagaacgtaacggctcagcaggtgcagccaaatggaccggtgagataatcccaggctcaacaaatctcatccgtctcaaaagcgcttatggcaaatacttaacagcgtctaacaaaccgtttcttcttggagccaccggaaaaaaagttctacagactaaacctagtcgtcttgactcgtctttagcttgggaaccgattagagattctgctttggttaagctcaagactcgttatggtaacttccttcgtggtaacggtggtttacctccctggagaaactctgttactcatgatattcctcatagatcggccactcaagaatgggtactttggca

SEQ ID NO: 150058 - DNA, 388 bp, Arabidopsis thaliana columbia
caaaaaaaaatcaaaaaaaaaaatcaagaacaaatttaaatctcaactctgggaaaacctcggggctggtctttttctggttgtggcattccttcgatttttgcttcaatggatgtttgatttgctctctgactgcgtttggttactatactatggaccctgagagtatcatggctgctgatgggactgattctgctcctgcaaatggtggtttagcaatggaaaatgtatgtgttaaagaaaatggggctgtttctgtcgaaaccgtggacactacttcagaaagtcagaatgagaattcggcaaacagtttcactttggatacaattgaacacgtcaaggaggcagctgtgggcacacacgttgaacatgtagatgatttaaagtg

SEQ ID NO: 150059 - DNA, 388 bp, Arabidopsis thaliana columbia
cggacgcgtgggcagtgattcttaaggaggtaattgtgaaattcccggaggctagaattgggggaggtaaatctaatgttcagagccgtccaaggaagggaagcataactcatgaaaagtttgctataaccctgtctctgcttactatactatggaccctgaaagctttatagatgctgacatgactaattctgctgctgcagataatagtattagcaatggaacaaatatgtgttaacgaaaatgaatctgttcctatcaaaacctccttcactacttcacaaagacacattgcgaattcagaatacagttctcactctcaatacaattgaacacgtcaaggatgcacatttatgccacactagtacgtacatatatcatcatctca

SEQ ID NO: 150060 - DNA, 447 bp, Arabidopsis thaliana columbia
ataacccgttaatctctctctgtccctttcttcttcttttttcaagaacaataaaaaaatggggcaagattctgcaactactactgcgccgccacctttaacctccgacgtttcaatgccttccggtgaagaagatgagccaaagcatgtaacatcggaagaagaggcaccggtgacttcggagacaaatctgaagctacctttgatgccggagctagaggagtcaaatcatacggcggaggttgtttcagagaaggtgacgccggagacgatgactttggagtcagaaggtctcaaccacgcggcggaggattcagagcagacacatgaagtgacgccggagacagagactgcgaagctagaggttctcaaccacacggcggaggattcagagcagacacatgaagtgacgccggtgaaagagactgtgaaatcatagtttttaac

SEQ ID NO: 150061 - DNA, 454 bp, Arabidopsis thaliana columbia
  unsure (1)..(454): unsure at all n locations
aaaagggaatgaggtggttctacacaggagacatatgacgatttcaccctgatggctgcctcgggataatagaccgaaaaaaggagatcgttaaacttcagcatggagaatatgtctccttgggcaaagttgaagctgctctaagtataagtccctatgttgaaaacataatggttcatgctgattcgttctacagttactgtgtggctcttgtggtcgcgtcccaacatacagtngaaggttgggcttcaaagcaaggaatagactttgccaacttcgaagaactgtgcacgaaagagcaagccgtgaaagaagtgtatgcgtcccttgtgaaggcggctaaacaatcacgattggagaagtttgagattaccagcaaagatcaaattattggcatctccatggacgccagagtcaggatagtcacagcagctctaaagctgaaaagagatgt

SEQ ID NO: 150062 - DNA, 453 bp, Arabidopsis thaliana columbia
  unsure (1)..(453): unsure at all n locations
ggataacgcggcaaatgccacggcagcaacaatcgtgaaacctttgggactaggggatcatagttttggggagttaatcataattaacaaccctgtgacactggaccagaactatctctcgaaaccagtggctcgtgcccaaggcttctacttttacaacatgaagacaaattacaacgcttgggtcgcttggacattggtattcaattcgacaaagcacaaagggacatttaccataatggatgcaaatccttttggtttgcagccggccagagatctatcgatcgttggtgggactggtgacttcctcatgactcgtgggatcgctacattcaagaccaaactcactcaaggcagtaagtatttttgtgtggaaatgaatattaaactttatgaatgttactaatatgtgtcttgggattgatcttcgngtgttggcagtttatttgcttt

SEQ ID NO: 150063 - DNA, 446 bp, Arabidopsis thaliana columbia
gtgagatggtaaaaaaaagtcatttaacgtaaaaatgttggccttatatttcattctactcgtctgcgtgcccttaggtgtcatcatgaccgtgacgagtcctcgactagccatcactgtggccgtcactcagccggcggtcttaataatacaaaatcccaataataacctcacatctcctcaagtaattacatctcagccactggatcacgatgagttactccttcgtcaagcttctaaagccaacccaaacccttcacctaaatttcccaaaaaactagctttcatgttcttaacaacgaactctcttccacttgcaccactttgggagctttttttcaaccaaagctctcatcacaagtctctttacaatgtctacgtccatgtagacccgactcaaaaacacaaaccgggttctcacggcacatttcaaaaaccgatcatac

SEQ ID NO: 150064 - DNA, 452 bp, Arabidopsis thaliana columbia
tgatcgttggtggtttagcgaacatctcgaacacttagactagcataaggacatggttcaattgccacgatgagttcttctttctgtttctgctgcctcccatcatattccagtcaggcttcagtttacaacctaaacctttcttctcaaactttggagccattgtcactttttcagtgcttggaacttttgtagcttccatggttactggattgcttgtgtaccttggcggtgtgatgtttctcatgtacagacttccattcgtcgagtgtctcatgtttggctctcttatctcagccactgatcctgtcactgtattgtcgatatttcaagaacttggttcagatgtaaatttgtatgccctggtgtttggagaatcagttttaaatgatgctatggcgatatctctgtacaggacaatgtccctggtgagaagtcattcctctggacag

SEQ ID NO: 150065 - DNA, 442 bp, Arabidopsis thaliana columbia
aaacaaaggatccttttttactggaaagatgttttttttttcttatcttctgagataaattgcgatagagagagagaacaaaaaaattctcagtgagcgcttattgatcaacaatggcgaaagagacagtgtgtgtaaccggagctaatggtttcatcggatcttggataatccgaacgttaattgagaaaggatatactaaaatccacgcttcgatttacccaggatccgacccgactcatcttctgcaactacccggatccgattctaagatcaagatctttgaagcggatctcttagactctgatgcaatctccagagctattgatggatgtgcgggagtgttccacgtggcgtcaccttgtacgttggatccaccggtagatccagagaaggagctggtcgaaccggcggttaaaggaacgatcaatgtgttggaagc

SEQ ID NO: 150066 - DNA, 453 bp, Arabidopsis thaliana columbia
aaacgattgggtcccacactcacctctccgtctcttccacctccatagatagattttttttccttaagcaaaaaagattttatctcactctcaatagtgttagtattgtcacagagaaagcttcagatctagaagaagaagcagacttcataaagagaaacccattttaaaccctagaaatcaagtgtcaatctcggaaaccttctgattccgcaacaatggcagttacagatactgaaagtcctcatcttggggaaattacttgtggtaccttacttgagaagttgcaggaaatctgggatgaagttggtgagagtgatgatgaacgagacaaactgcttcttcagatagagcaagagtgtcttgacgtttacaagagaaaagtcgagcaggctgcgaaatcccgagctgagcttcttcaaaccttgtcagatgctaatgctgaactttcca

SEQ ID NO: 150067 - DNA, 377 bp, Arabidopsis thaliana columbia
cctgactataacgatggttcgtggccttcatgttgttatcgatctgactttaaagagaaggagatttcaacgttgatggatgggcttgagaagtactggcctagtctcagttgtggttctccatcatcatgcaatggtgggaaagggtcattttggggccacgagtgggagaaacatgggacttgttcttctcctgtttttcatgatgagtataattacttccttaccacacttaatctctacttgaagcataatgtcacggatgtcctttatcaagctggctatgttgcttccaacagtgaaaagtatcctctaggaggtatcggaacagccattcagaatgcatttcatattacccctgaagtggtttgcaaaag

SEQ ID NO: 150068 - DNA, 415 bp, Arabidopsis thaliana columbia
gaaacagtggttgcttctttagtttctaatgaattgagattaggaatatgtgagctgatgtgttgctttgctatataggtactctctttaatcccaccatatgaagggaaatctgtgcttgaacttggagctggtattggtcgtttcactggtgaattggctcaaaaggctggtgaagttatcgctcttgacttcatcgaaagcgcgattcagaagaatgaaagtgttaatgggcattacaagaacatcaagtttatgtgtgctgatgtaacatctccagacttgaaaatcaaagatggatctatcgacttgattttcttaaactggttgctcatgtatctctctgataaagaggtggaactaatggcagagagaatgattggatgggtcaagccaggggatacaatttttcttc

SEQ ID NO: 150069 - DNA, 447 bp, Arabidopsis thaliana columbia
ctcgagagctatgctctgtttgatatggatggcaaccaagttcctcaagaattggtaactcagattggcgtaacgtttgagcgtattttggaagagatcaataaagtcagggatgagcaggatgctgacatttcaatttctcaggctttctcaattgtcttttctaggaaacccgagctgaggttagaggggcttgcacacaacgtacttcaatggtatgtatgccgcatggaaggatggtttgccgcagatgctgaaaccatctctgcaaagtgttgggaccaggaggaattgttgcctggtggacacggtcttatggttagagggtatcgtcctgtcatcaatactctggcgaaaggtcttgatatccgagtaggccacagggttactaagattgtcaggcggtacaatggaatgaaagtaacgacagaaaacgggcaaactttt

SEQ ID NO: 150070 - DNA, 435 bp, Arabidopsis thaliana columbia
cttataaaaccccacaccttccttgtttccttctttctacaccgcactctcttcttctggttcgtcttcctctctggtgggggtgtctctttgtatggaaccaccatggataatgtcaaacttgctaagaatggtgttttgagattgccacctggattcagattccattctactgatgaagaacttgtgggtcaataccttaagaggaaagtttgttcttctcctttgccagcttcaatcatccctgagtttgatgtttgcagagctgatccttttgattcacctggcaatttggagaaagagaggtacttctttagcacaagggaagctaaatacccaaatgggaaccggtctaaccgggcaacttggtctggttattggaaagctaccggtatttgttaacgggttgtgacctctaaaggaaaacaaatcgtt

SEQ ID NO: 150071 - DNA, 324 bp, Arabidopsis thaliana columbia
cttcaaaatcgtcagaagaagaagaagaagtcaaatacgataacaatgacgtcatcatcgtacgctccgatttgcgatcgccgtcggagctttcctctcaatcaccaccatcaccaccgcacgttcttgcaaaaccttcctaatctcctcatattccctctcaataaccccagaaaaccctaacctcgaatccgatttcacctccacacgattcgtcaccgttttcacaatccgtcgtctaaatcctcaccacgtggttcctttcttcgcaaacgtcgtcacgagaagccacagatccaatcggatcgttccctccttttgatc

SEQ ID NO: 150072 - DNA, 353 bp, Arabidopsis thaliana columbia
tcttcttcttcttctgttcatcaaagaaaacgaaacccatttctcaaaatccaaaattggcaagagactcaaaactcatcatgggtttcatttcttcttcatcaccagtagaagagtctcattaccatacacacaagatcttccttttctccaactacatccttctcggcgctgcttcaagttgtatcttcctcacactctctctccgtctaatcccttccatctgcggattcctcctcatcctcctccacgccaccacaatcgccgccgcagtctcaggctgcgctgctgcatcttgcggaagaaaccgttggtacgccgctcacatggttgcaactgtgctcactgctata

SEQ ID NO: 150073 - DNA, 454 bp, Arabidopsis thaliana columbia
gaaaagcctttctttcttcttcaccatcctcctctctctctcgaccctcttcaccatctccaacgcacggaagtttaatgtcggaggcagtggcgcgtgggttacaaacccacctgaaaactacgaatcttggtctggcaaaaaccgtttccttgttcacgacactctctattttagctacgctaagggagctgactcggtgctagaggtgaacaaggctgattacgacgcttgtaatacaaagaatccgatcaaaagagtggacgatggagattctgagatctctcttgatcgttatggtccgttttacttcatcagtggcaatgaagataactgtaagaagggtcaaaagcttaatgtcgttgtcatatctgctaggattccatcaacggctcagtcttctcacgccgctgcaccgggaagctctacgccgggatcaatgactccgccggga

SEQ ID NO: 150074 - DNA, 428 bp, Arabidopsis thaliana columbia
cttggaaaccaagaagcatggatcgtgtggtctttttcttcctcatcgcagctacgttactagcaggttctctcggatctaccgtcatgtgcggcgaggttaccgacggtttcgttaacccgatcaggcaagtcgtcccggaggagaacgatgaacaactcctcaacgcagaacatcacttcactctattcaaatccaagtacgagaagacttacgcgactcaggtagagcacgatcatcggttccgtgtcttcaaagctaacctaagacgagctaggcgtaaccagcttctagatccgtctgccgtccacggcgttacgcagttctcagatcttactccgaaagaattccgccgcaagtttttaggactgaaacgccgagggtttcgtctttctactgatacttaaaacggcgcctattctttcgac

SEQ ID NO: 150075 - DNA, 456 bp, Arabidopsis thaliana columbia
  unsure (1)..(456): unsure at all n locations
cgtctctctaatttcctttctctctcaagcttctcagaaagtctgacactttcgagaatctaatctggaaatttcttgtctttttggagaaggaatcgaattatgtacaaggaacgtagtggaggaggtggtggtgggtcatcgagatcagagatcctcggtggagctattgatcggaaacgaatcaacgatgcactcaataagaaactagagaaatcttcaacttccaccaccacatctagggttttctcttctaaagacaaagatcccttttccttcacatctactaaaactcagcttcctgatgtggaatcggaaactgatagtgaagggtctgatgtgagtggatcggagggtgatgatacgtcgtggatcttctggttntgtaatttgagagggaatgatttcttctgtgaaggcgatgaagattatattcaagatgattttaatctttgt

SEQ ID NO: 150076 - DNA, 378 bp, Arabidopsis thaliana columbia
cataaacaaaatatcttcttgctcattattcatcatcaatctactactccgtaaactttgcttcctctgtttgtattagctcagaagagatatgggaagtactccgactgatttacccggtgaggatgtcgccgataacagatccggcgtcggcggtggtatttctgacgtctacggtgaggattccgccaccttggaccagcttgtcaccccttgggttacctctgtcgctagtggctacacattgatgcgtgatccgagatacaacaagggacttgcgtttactgataaagaaagagatgctcattacttaactggtctttttccccctgtgattttgagtcaggatgttcaggagagggaggtgatgcacaatct

SEQ ID NO: 150077 - DNA, 454 bp, Arabidopsis thaliana columbia
tcttactatactatggtgcaggttgtggactttggtgaggtgtgggcctgttcgatgttcacgcgggaggggttacataaatccggtcatgaagttcattgaccaaggaaggaagttcatctgtaatttctgtggtaaatgttactgttttcagttatgcaagctacaaaatctgaagttatagctatgtaactgcaatagtatgtatcaagttatgaaataattgaatattccaagctagaagcgtacactaacatttttgtgcttaaccttcccgtatttaaagatttcttctgtcaatctggatttcacctaattgtggaaggtggtgatatgattttgtttaagagagatgcttatatattgttattgttgtattctcttgggagttcgttgatgtgggaagctttgtgatccatttccttatcaactttcttttgcacaggattcactg

SEQ ID NO: 150078 - DNA, 386 bp, Arabidopsis thaliana columbia
ggaatgtactatgagttcacaacacacaactgggcagttggaaattttggtaacctgcaaacggtgctaccttgcaagagcacgtgcacaaatcaatatcaatcacagacaaccaacaacacccagtgtcctgatcaacggtcaacttcaaaatgcagccacttcaaacacgaagacacagattaagcgtcttaatcaacagttaccatcttccaaaacaggcgacaatgcttcaggagttaaacaaatcactccggatttcaatttggcaccgaaaagtaaacacaagacattgtcttggggagtcatatggaggaaaaagaacttggcagacacaggtgttagtttcagacatgaaaatggtatgttggcttgacgatctgatc

SEQ ID NO: 150079 - DNA, 392 bp, Arabidopsis thaliana columbia
  unsure (1)..(392): unsure at all n locations
cttttaatgctcttatttccctttagcgacaaccgtcccatgatgttcttcagatcattcatggttttcttctttcttatcgtggggcgcatcaaatgtttcttcccgtaaacaaacctacgtgatccacactgtcacaaccagtaccaaacacatcgnaacttcactttttaattcactccaaacagagaatatcaacgacgatgatttttctctcccggagattcactatatttacgagaatgccatgtctggtttctccgcgactctcaccgacgaccagcttgatactgtgaagaacacaaaagggtttatctctgcttatccagacgagctcttatctctacacacgacatattctcacgagtttcttggtctcgaattccgggatc

SEQ ID NO: 150080 - DNA, 411 bp, Arabidopsis thaliana columbia
cggacgcgtgggcgtagccgcaagactcctttcagattcttacttgcagctatgggtaaagagaagtttcacattaacattgtggtcattggtcatgttgattctggaaaatcgaccacaactggtcacttgatctataagcttggtggtattgacaagcgtgtcatcgagaggttcgagaaggaggctgctgagatgaacaagaggtccttcaagtacgcatgggtgttggacaaacttaaggccgagcgtgagcgtggtattaccatcgatattgctctatggaagttcgagaccaccaagtactactgcacagtcattgatgccccaagacatcgtgatttcatcaagaacatgattactggtacctcccaggctgattgtgctgttcttatcattgacttcaccact

SEQ ID NO: 150081 - DNA, 427 bp, Arabidopsis thaliana columbia
ggtatgataaaatctaccgtaaattggcatctcagggtaatgtttcttcaggattggattctgtaaaggatgaaccagagaaactcagggaggaacaaatggagggggatggttttaaggagaagttatcagactctgtgttgatagatgagaagcttgaagagtacagtgattgtgatcgaacagcaaccacttcccgttctcacacagatccagtatcttctcaatctactcaccagaccccggaaagctttaggactccaataacatgtgatgatgatacttttgtatctgtctctgggatttctagggatgtttcaaatctaatcccattcgcgacagagactccagcttcacctgttcaagaaaaaatggcaaacactagatcctttagcaacaactctgtgaaaggtaatcaagatgagtt

SEQ ID NO: 150082 - DNA, 452 bp, Arabidopsis thaliana columbia
catttttggaaacaccatttcatattccttaaacttttccattttagtatcatttcatattcgttgatatggatgtctccaacacgatgctccttgtagctgttgttgcagcttactggctatggttccagcggatctcaaggtggctaaagggtccacgtgtttggccagttttgggcagtcttccgggtctgatcgagcagcgtgaccgtatgcacgactggatcactgagaacctccgtgcgtgtggcggcacttatcagacatgtatctgcgccgtacctttcttggcaaaaaagcaaggtctcgtgaccgtcacgtgcgatcccaagaacatcgaacacatgctcaagaccaggttcgacaactaccctaaaggtcctacgtggcaagccgtgttccatgacttcctcggccaaggtatcttcaactccgacggtgacacttggctc

SEQ ID NO: 150083 - DNA, 456 bp, Arabidopsis thaliana columbia
caaatcacataataattaaagacttcttcttcttcttcttctctacaaattatctcacggtcttcgttttttttgccttcggaacaatggcgacttcttctactttctcgtcactactaccttcaccaccagctcttctttccgaccaccggtctcctccaccatccatcagatactccttttctcccttaactactccaaaatcgtctcgtttgggtttcactgtaccggagaagagaaacctcgctgctaattcgtctctcgttgaagtatccattggcggagaaagtgacccaccaccatcatcatctggatcaggaggagacgacaagcaaattgcattactcaaactcaaattacttagtgtagtttcgggattaaacagaggacttgtggcgagtgttgatgatttagaaagagctgaagtggctgctaaagaacttgaaactgctgggg

SEQ ID NO: 150084 - DNA, 453 bp, Arabidopsis thaliana columbia
cacttgcaaaattcgaatcagatcttctcttcaatcgaaaaaaaagaaaggatttgctgtagattgttgaatcgaagatggcgacaggggaagagaatgtttacatggcgaaattagccgaacaagctgaacgttacgaagaaatggttgaattcatggagaaagttgcgaaaactgttgatgttgaggaactttcagttgaagagaggaatcttctctctgttgcttacaagaacgtgattggagcgagaagagcttcgtggagaatcatttcttcgattgagcagaaagaagagagcaaagggaacgaagatcatgttgctattatcaaggattacagaggaaagattgaatccgagcttagcaaaatctgtgatgggattttgaatgttcttgaagctcatcttattccttctgcttcaccagctgaatctaaagtgttttatcttaaga

SEQ ID NO: 150085 - DNA, 421 bp, Arabidopsis thaliana columbia
caacagttatctgcttctattcttctacgcgtgattcttttaccaacggcagaaatcgatttggctgggatttccccctcctttcgagcgctctgatcgccgcccagaacattcaatttcccgcgagttcaacaaaaaaaaaactctccgtttttattgttccccctttctcaccggtggaagtttccggagatggtgtcacccgaaaacgctaattggattagtgacttgatcgacgctgatcacggaagtttcacaatccaaagtcctggcttctcttggcctgacagcaacctattggtcgctcttctaactccagtgctggagttgatggctcggctggaaactcacaagctagcaaagaacctggatccaaaaagagggggagatttgcatcatcctctgccctagctcgaaagca

SEQ ID NO: 150086 - DNA, 460 bp, Arabidopsis thaliana columbia
gagaaaccttcttcttctttcttcttcttctacaaaatttcacaaaacgagagagaggagagagtcagacaaacgaatcaacaggtgagaaattcgaaatctttgcgagctcgtctcgcccagaatctcgatttctccacctttcctcttcaattcatcttccaaatccctaaaaaaaagactcaaactttttaattttggtccaaaaaagactcaaactttcttcatcaatggcggagaaaatcacgagagagacgtcgttacctaaagagagaagcagcccacaagctctaatcctgggacgatacgaaatgggtaagcttctcggccatggtaccttcgctaaagtttacctcgcacgtaacgtgaaaacaaacgaaagcgtagcaatcaaagtaatcgacaaggagaaagttctcaaaggaggtttaatcgcacacatcaaacgcgagatctcgat

SEQ ID NO: 150087 - DNA, 458 bp, Arabidopsis thaliana columbia
tgaatttacaaaatacgagagagaccttcttgctaatgctaacaactaaattaccaaccccacttcacgcgcctctagcaacctcagaagctccaatcaccgtcttatcctcttgattctccgccggcaaaccaaaattggtcggcgcgtgaggtccaatcagcttaattgaagcgttatcataagctagagcagcttcctcagcagtgttaaaagtacccagccagagacgatcacgtcgtcctttacaagctcctcttccacatctgatctccgccacccacttcccccacggcctctgcctcactccacgatatttcttctccgttttcgccgtcttgagaaattccgccgggatcctgattttgaaccgtgttttgcagacatcgagtttatcggcggaatcggaaggatcgattacgatctctttaacgaggcgtttcccacggcgccgagtc

SEQ ID NO: 150088 - DNA, 451 bp, Arabidopsis thaliana columbia
cagagatccaaaaatgggatctcttccaccgccatcgctagatttctcatcaatcgatgacaggtccctcaaaaatggcggatccggccaccaagagatctctcatgataatctcctcaacctcttcaaatcccagcaagatcttctcaatcacttcttcaaacatctcgatctctctcaaaccctagatttctcacgcattctcctttccaccaccggtaccgttttcttcaccggcgtcggtaaatccgctttcgtagctaacaaggtttcacagacgctcgtttccttaagcttccgttcctctttcctctcccctctcgatgcgcttcatggtgacattggcgctctttcgccacgcgatgttctcgttttcttcagcaaatctggcgccaccgaggagcttctccgtcttgtcccttgcgctagagctaaaggagcctttctggtg

SEQ ID NO: 150089 - DNA, 394 bp, Arabidopsis thaliana columbia
cccacgcgtccgaatctctctctgccaatctcatcttcaacctctctctaactctcgtgttcgagtctacaatggctgacaggaagattaggatcggaatcaacggattcggaagaattggtcgtttggttgctagagttgttctccagagggacgatgttgagctcgtcgctgtcaacgaccccttcatcactactgagtacatgacctacatgttcaagtacgacagtgttcacggtcaatggaaacacaatgaactcaagatcaaggatgagaagacccttctcttcggtgagaagccagtcactgttttcggcatcaggaaccctgaggatatcccatgggccgaggcttgagctgactacgttggtgagtctactggtgtcttcactga

SEQ ID NO: 150090 - DNA, 354 bp, Arabidopsis thaliana columbia
tgcaaagagtaaaatggcgaatcctaaagtcttcttcgacatcttgattggtaagatgaaggcagggcgtgttgtaatggagttatttgcagatgtgactccgagaacagctaataatttccgtgctttgtgcactggggagaatggtattgggaaagcagggaaggctttacactacaaaagctcaacctttcaccgtataatcccaaggttcatgtgtcaaggtggagatttcactcgtgggaatggaactggaggagaatctatttacgggtctaaatttgaagatgagaacttcaagttgaagcacactggtccagggattttgtctatggctaactctggtcccaacac

SEQ ID NO: 150091 - DNA, 467 bp, Arabidopsis thaliana columbia
cggggcggcccacgcgtccggattgttatagcgatggtggctggaagattatcacgtgaagatgctaaagagcatgggtggctggttgatggatttccacggagggttgcccaggcacaaagtctggacaaactgaacgtgaaacctgacatttttatcttactagatgttcctgatgaaattctgatcgatagatgtgttggtcgaaggttggatccagtgactggaaaaatttatcatatcaaaaattaccctcctgaatcagatgaaattaaagcaagactggttacacgcccggatgatacagaggagaaggtaaaagcacggctgcaaatatacaaacaaaattctgaagcgattatttcagcatactcagatgttatggtcaagattgatgcaaacaggccaaaagaagtggttttcgaggagacccagactctactgtctcagatacagttaaagagaat

SEQ ID NO: 150092 - DNA, 414 bp, Arabidopsis thaliana columbia
  unsure (1)..(414): unsure at all n locations
aagaaatggagtcatcacttaaagtcattttcgttttacgagtcacaccatcaaactgcgacgggtccnaatcactcacgcgtgcgactcaccttcttcnacctcctctggtacaaactttacgccgtcgaacgagtcatcttctacaaactcaccgacgcaagtcgttttttctttgactcaatcatcatgccaaaccttaaaacatctctcttctaatccctttcttactacctcccactcgccggaaaacttctgtgggaaccacttgatcccaaacctaaaatcgtctacaccccaaacgaccccttttcattcaccgacccccagtcaaacgccaacttttcaccttttaccggcaaaaaaccgttccccaccaccgagttataccctgtagttcccgagttacatgtc

SEQ ID NO: 150093 - DNA, 438 bp, Arabidopsis thaliana columbia
acgctctcgacataacagcaccagtacactttccaactctttttgtgaaaaaaaaaaggagacatcggggactggtagcttttgatgaagggtgagaaatcatacccctaaatctttaattatccaaggattcagattcaatcgatcaaagcttctcaaattttggcggctgcattttctatttttgcaccggcgttaaacaagcaagtattaaccttaactgacgaagcttcttttacgattcatcatctcttgcaacaacttcaaaaaccctttcttctattaggcgttaaagctcgtgactgcaacaacttgtcgtacactttcaattactcctattagaaacgtaaatttgacgattttctagaaaataaaggtattaggattcttagtgaaccaaaatccttaatgcatgtaattgtaacaaatctttatttt

SEQ ID NO: 150094 - DNA, 409 bp, Arabidopsis thaliana columbia
caccaaaaaaaaaactcaagagagactttgtggccttggcagcctctctccaatccaccgctacattcgtccattcggcgaagatcgccgccgctccttctcgcggaagttctcacctccgatcgactcaagccgtcggcaaatcttttgggctcgaaacttcctcggctcgcctcacttgctccttccagtctgactttaaggacttcaccggtaaatgctccgacgctgtcaaaatcgccggattcgctcttgccacctctgctctcgtcgtctcgggagcaagtgcggagggagctccaaagagattgacctatgatgagattcagagcaagacatacattgaagtgaaaggaactggaacggctaaccagtgccctactattgacgggggctctgagactttctc

SEQ ID NO: 150095 - DNA, 484 bp, Arabidopsis thaliana columbia
cggaaccgcagggccggcccacgcgtccgatttaattccaaaagataaaaacaatcaaaagatgaatgccacaaagtttgttgtgcttctcgtgattggcattttgtgtgccatggtcaccgcaaggcaggtcgaagaagtgtccaaagagaccaaattaggcacctctcttccaaaatctactaacaaaggcattggagctcagctttctgctgctggtcttacttacagcggcagcagtgtctctagctctgctagtgcttttaacaatcccaaaggtccaggggccagtgcatccgaaagtggctacacaagtaccatcggacaagtcattgccaagggtcgcaaggcaagagtttcttctgcaagtgcttctgccgctacaggtgaggctgcagctgcagtgactcgcaaagctgctgctgcacgtgcaaagggtaaggtagcttccgcatcaagggtgaagggttcctctgagaagaag

SEQ ID NO: 150096 - DNA, 463 bp, Arabidopsis thaliana columbia
  unsure (1)..(463): unsure at all n locations
cctacgaaaaaaaattcttcaattcaatatcactaatatgctattctctcttcttcttcttcttcttccgtcttgcgccaaacctcgagtgggcgaatcattcnattctcagattcgcatattttcttcgaattcgctaggctcaaaacgttgtttccgtgtacaagaagcaacctaactatttggggccaggtgaaggaagagctgatttaggttattgagattcgttttcttcaaatggaaaacgaaagggttgagagagaacagagccaatttcaggaagacgagtttatcgattcgagaaaaccaccgccatggaggaaacagatcacggttcgagcgatcgtcgcgagtttattgatagggattgtctacagtgtgatctgtctgaagctgaatctaacgacaggactcgtaccgaatctcaacatctcatcagctcttttggcttttgttttcctca

SEQ ID NO: 150097 - DNA, 463 bp, Arabidopsis thaliana columbia
acgctctggtcattttgcagcagcaacatgctattccagtccgagcttttgctaaggaagctgctggtccagcctttaaaggagatgagatgttgaagggtgtcttttttgatatcaagaacaaattccaggctgctgttgatattctccgtaaggaaaagatcacccttgatccagaggacccagctgccgtaaaacagtatgcaaatgtaatgaagaccatcaggcaaaaggcagacatgttctcagaatctcagcgcattaaacatgacattgatactgagactcaagacattccagatgctcgtgcatacttgttgaagttgcaggaaattcgcaccaggagggggcttactgatgagcttggtgctgaagccatgatgttcgaggctttggagaaagtcgagaaggacataaagaagcctctcctgagaagtgacaagaaaggaatggatcttttggt

SEQ ID NO: 150098 - DNA, 453 bp, Arabidopsis thaliana columbia
atatttttaaaaattactactaatgtctaaccaccagttttttttcttctaatatgcatgaaggtgtgtgtatatactgtgtatgagtatatgtatatgtgcgttgagtataaatacgaagtctcatcttctaagtccaacaccaaaattatttttctctcttttaactacaagtctactacaacttccaataagagagaagagacagagcattaatggagtcaccaagccttccgatgacggccaaagactggaccaccaccagtctccaccgtgtcttcgccatgcaaggcggcgaagatgacctcagctacgtcaacaattccgatagccaagctttggctataaccttaagcaaaccaatccttatctcatctctccaatccatcaaactcttcttcgaccaaactcccatcaaaatcaccgatctcggctgcgccaccggcttcaaca

SEQ ID NO: 150099 - DNA, 452 bp, Arabidopsis thaliana columbia
attttcacattctcttctctctcgatatcatctaaatctctctcgatctcaatttcgcaaaagggctgacaagaagatcagaatgggaatcaacggtttcggaagaatcggtcgtttggttgctagagttgttcttcagagggatgatgttgagctcgtcgctgttaacgatcctttcatcaccaccgagtacatgacatacatgtttaagtatgacagtgttcacggtcagtggaagcaccatgagcttaaggtgaaggatgacaaaactcttctcttcggtgagaagccaggcactgttttcggcatcaggaaccctgaggacatcccatggggtgaggctggagctgactttgttgttgagtctactggtgtcttcactgacaaagacaaggctgctgctcacttgaagggtggtgctaaaaaggttgtcatcttttccccaagcaaag

SEQ ID NO: 150100 - DNA, 407 bp, Arabidopsis thaliana columbia
caaagcgtgagtgagatcgggaatcaaacatcgcctccgtctctcatttcaaacgctatctccatctccttcctccgccgccgccatggaatctccgaagaattctctgatcccgagcttcctctattcatcatcttcatctccgagatctttcctcctcgaccaggtgctcaattccaactccaacgctgcattcgagaaatctccttctccggccccgcgttcctctcctacgtcgatgatttctcggaagaatttccttattgcatctcccaccgagccagggaaggggatcgagatgtattcacctgccttctacgctgcttgtacctttggtggaattctcagctgtggtcttactcacatgaccgtgactcctctcgatctcgtcaagtgcaatatgcaga

SEQ ID NO: 150101 - DNA, 428 bp, Arabidopsis thaliana columbia
gttttgagcatttctcatctctcgaagctcttctttgtgtgtgtggcgatggctgctaattcgataatggcttcctccaaacccctaatctccctgtcatccaaccaacaaccaaaccgagtccaaattcccaaattcgccaaacttccccaaattcccaaatccctcacttcctccaccgatctccgtagcaaagcactatcactctcctccgccaccgccaaatccttagctttaatcgccgctttcgctcctccgtcgatggcggaggcgatggagaaagcacagctcttcgattttcaatctcacgcttccgatcatcgttgttgagtttctcttcttgatgttcgctctcgacaaggtctattactctccgcttggtaacttcatggatcaaagagacgctttcatcaaagagaagctcgcga

SEQ ID NO: 150102 - DNA, 468 bp, Arabidopsis thaliana columbia
caggattcaaagaagctgagcatgaaagcattgttggcagatataaaagagattactgaaaagaagcgagaggatgattcacttcttgcatttgcagccggaaatagactatccatttccccagatttggagtttgattatccggatcatgaccttcatgaagatctttaccagctgatcaaatattcgtgtgcagaaatgtgctctaccgaacagttagataaggtaatgaagatttggacaactttcgtggaacaaatatttggtgttccttctcgccctcaaggtgctgaagaccaagaagacgttgtcaagtccatgaaccagaatgtaaagagcggtagttcaagtgctggcgagagtgaaggaagtcctcacaattacgctagtgttgccgactctagacgctcaaagtcatctcgaaaagctaatgaacatagtcagttggggcaaactagtaattcggag

SEQ ID NO: 150103 - DNA, 435 bp, Arabidopsis thaliana columbia
cttatcactactctaaaagaagcttcatcatggcctcagtaacctcagccaccgttgcaatcccatctgtcaccggccttaaagcctcaaccatcaaatcatccgccaccgtcagaatccaaactgctgctgttgcatcaccgaagcttacagtgaagtcatctctaaagaacttcggagtcgcggccagagcggctgcagcttcaattgctttggccggaaacgccatggcaatagaagttctcttgggaggaggggatgggtcgctagcttttattcccaacgacttctctatagctaaaggagagaagaatgtgttcacgaacaacgctggatacccacacagtgttgtcttcgatgaagacgagatcccaagtggtctcgacctggccaagatctcgatggacgagcaagatctactcaacggtgcgggag

SEQ ID NO: 150104 - DNA, 345 bp, Arabidopsis thaliana columbia
ttatactactctaaaagaatttatcatggcctcagtttcctgagccaccgtgcaatcccatcggtaccggcctaaagcctacccatcaaatcatccgccaccgtcagaatccaaactggtgctgttgcatcaccgaagcttacagtgaagtcatctctaaagaacttcggagtcgcggccagagcggctgcagcttcaatcgctttggccggaaacgccatggcaatagaagcactctcgggaggaggggatgggacggtagctcatattcccaacgacttttctatagctcaaggagagatgattggggtcaagaacaacgctcgatacccacacaatgttgtc

SEQ ID NO: 150105 - DNA, 404 bp, Arabidopsis thaliana columbia
gtcgattcttcgcgagattggtgatgataggcctactgaggatggagatgaagaaggagaagaggacgaggatgaagatgatggaggtgatgaggaagatgaagaaggagaaggagaaggtgggcaagaggaaaggccaaagcttgatgaagggttttatgaaattgaagctattcgtcgtaagagagttcgaaaaggcaaggttcagtatctaattaaatggcgcggatggcctgaaactgccaacacatgggagcctttagagaatctccagtctattgctgatgttatagatgcctttgagggaagtttgaagccaggaaagcctggtaggaaacggaagcgcaaatatgcaggtcctcattctcagatgaagaagaagcaacgtttaacatttacattac

SEQ ID NO: 150106 - DNA, 370 bp, Arabidopsis thaliana columbia
ggaaacctgtaacgtgaaaggagcggcggctatatctaggggaagggcttaagcaggacgatgtgcagcacatccatgaggtgcagcgccagcttcgacagaagactaataacctcaatcgccttgaagctcaaaggaatgaactcaattctcgagtgagaatgctcagagaagagttacagctccttcaagaacctgggtcctatgtgggagaagtggtaaaagttatgggaaagaacaaggtcttggttaaggatcattcagaggggaagtatgttgttgatattgacaaaagtatagacattacgaaaatcactccatcaacgagtgttgctcttcgtaatgatagctatgtttctcacctggttct

SEQ ID NO: 150107 - DNA, 377 bp, Arabidopsis thaliana columbia
atcaggatgcaccttcgtcggcaccgaaattgaagattggtgttgttttgtctggaggtcaggcacctggtgggcacaatgttatttctggactgtttgattacctgcaagagcgtgcgaaaggtagcacattttacgggttcaagggtggtccagctggtatcatgaaatgcaaatatgttgagttgaatgctgaatatattcagccttacagaaaccagggtggttttgacatgatctgcagtggaagagacaagattgaaacacctgaccagtttaaacaagctgaagaaacagcaaagaagcttgatttggatgggttggtggttatcggtggagatgattccaacaccaatgcttgccttcttgctgaaaac

SEQ ID NO: 150108 - DNA, 571 bp, Arabidopsis thaliana columbia
  unsure (1)..(571): unsure at all n locations
ggaannncccgggnncgaccccacgcccgtccgcggtgattatccaatgtacagggtactcaagattncttctgagtgcttattctgaataccggnnaggctatcctcgggttcagcggagactanntctcttctctgcggcggagttacctgttganntagaggcannagctaaagtcnnttgaaactaatnnatgtttactntncttggcttactaaaatcctggtaccccatccccaagatatttctcttgagaaggaaactcattgaagatgcttaagatcaactaggatttacgtggttctatgaccgaatgcaaaccggaggtttatatgtactggctttggaaagaatattcaccgattgggcttctaactgtttgccggtaggctgctctcattgaccgagaagatcctatgtatgcatggtggattgtcaccggaattggaaaacttggggcagattcgggagattcaaaggcctacagagattccagacaatggtcttctttgtgatttactttggtctgatcctgatcagaagaatgaagggtggactgatagcgatcga

SEQ ID NO: 150109 - DNA, 465 bp, Arabidopsis thaliana columbia
ctgttttacgccatacggtaacgagtggaaggcgcttcgtaagtttgccctgcgtgagcttttctgtttgaaaaaggttcagtcctttaggcatatccgagaggaagaatgtaactttctggtcaagcaactgtcggaatccgcggttaatcgctctccggtcgatttgagcaaatcacttttctggctaaccgctagtatctttttcagagttgccttaggacagaattttcatgagagcaattttatcgataaagaaaagatcgaagagctcgtgttcgaagctgagactgccctagcaagtttcacttgttctgatttcttccctgttgccggacttggatggcttgttgattggttttccggacaacacaagagaactcaacgatgttttttacaagctcgatgctcttgttcaacatgtcatagatgatcatttaatccaggaagatcaaaagagcacga

SEQ ID NO: 150110 - DNA, 419 bp, Arabidopsis thaliana columbia
  unsure (1)..(419): unsure at all n locations
ggctttaccttcgtgcttaaagactggagctttaatgtcttcggccactggatttaatttttgcggcagtcttatgaagtcagagggcggcttcnccgttccgacaaagttacagagtactcgaaaaggtgatcgagagagattgagagtccaagctattttcagtttccctcctgcgtttctgacaagaaacggtcgagctgagaaacagaaacagctcaaacaagaacttcttgaagccattgagcctcttgaacgtggtgctacggcctcgcctgatgaccagcttcggattgatcagttagcgcgtaaagtggaagcagttaatcccaccaaggaagccttgaagtctgatttggtcaatggaaaatgggagctcatttatacaacctctgcttcgattttgcaagcaaagaaac

SEQ ID NO: 150111 - DNA, 403 bp, Arabidopsis thaliana columbia
acgcgtttcttcttatagaaatgaattactcttattctttcttttcaacttggacaaccctaatgacattgggttgtcttcagatgcattcatgcatttccagagctcagataaccccaactttctatgacaatacatgtccaagcgactttaccatcgtacgggataccatagtaaacgagctaagatcggatcctagcatcgctgcaagcatcctgcagcttcacttgcactactgaatcgccaatggctgtgatgcatcgatcctgttagacaacacaacatccttttgaacagagaaagatgctgctccaaacgcatacttggatcgaggatttccagtgatcgatagaatgaaagcagcactagagacagcatgtccaaggactgtttcatgcgcaga

SEQ ID NO: 150112 - DNA, 475 bp, Arabidopsis thaliana columbia
cagccgataaatctttctccgatcatgccgaccagtaacatccccattggtggagtcgaagaggaggtctatcaccccagcgcacttatggcggcgctcgctgagtttatctcgactttgatcttcgtcttcgccggctcaggctccggaattgctttcaacaagatcactgacaatggagcaactcactccttccggcctcgtcgccgctgccttagctcatgctttcggtctctttgccgctgtctctgtcggcgctaacatttccggtggccacgttaaccctgccgttaccttcggtgtcttactcggtggtaacatcactctcctccgtggtattctctactggattgctcagcttcttggctccgtcgccgcttgtttcctccttagctttgccaccggtggcgagccaattccagcgttcggtctctctgccggagtcggttcattaaacgctctcgtcttcgagatc

SEQ ID NO: 150113 - DNA, 447 bp, Arabidopsis thaliana columbia
  unsure (1)..(447): unsure at all n locations
gttttctcgaaccttccacgagatatactaagccattgaagaagaagagacctgagacgaacaagaaatccagaaattaccaattgcttttttttgtttaatcgaattcaggaaaagtgaagaaacgaaagagagaagacaaagaagaagaaggtgagatgggagttgattattacaaggttttacaggttgatagaagcgctaacgacgatgaccttaagaaagcttatagaaaactcgctatgaaatggcatcctgataagaaccctaacaacaaaaaagacgctgaggctaagttcaagcagatctctgaggcctacgatgtttttagcgatcctcaaaagagagctgtatatgatcaatacggtgaggaagggttaaaagggaatgtgccacctnccaatgctgctactagtggagcatnctacttctaacaggagatggatc

SEQ ID NO: 150114 - DNA, 422 bp, Arabidopsis thaliana columbia
  unsure (1)..(422): unsure at all n locations
ccgggnccgacgccacgcgtcccgagctatgaatatttcaatgaaaacattactcntttttttttcagaagaatgtctatataggggccaggctaaatcccaacgcgagggagttgagcttcaaacagatggacgagagaaggtattatgaccgtgtccagagcatacgaatcatacccgtcattaatcgcccacttagaatgggatccggaaaccaaaatgagggactcgcttgaagaaaccttatccttccagcacaggtcatacccctgagctctttaggatgcaacatgccaaccagtgcctgccttaactctacaacacccccactaaactcttttaacacgcgtcattttcgcactatactctaatcggttgtatttatatcattccagagaaaacattttttctttttttttttt

SEQ ID NO: 150115 - DNA, 427 bp, Arabidopsis thaliana columbia
gattggtaaagtccagcaagaaaatgagataaaagttaagcctgaaatgacgaaaaaatcaggtgttttgattcttggtgctggacgtgtgtgtcgcccagctgctgatttcctagcttcagttagaaccatttcgtcacagcaatggtacaaaacatatttcggagcagactctgaagagaaaacagatgttcatgtgattgtcgcgtctctgtatcttaaggatgccaaagagacggttgaaggtatttcagatgtagaagcagttcggctagatgtatctgatagtgaaagtctccttaagtatgtttctcaggttgatgttgtcctaagtttattacctgcaagttgtcatgctgttgtagcaaagacatgcattgagctgaagaagcatcttcgcactgctagctatgttgatgatgaaacg

SEQ ID NO: 150116 - DNA, 412 bp, Arabidopsis thaliana columbia
  unsure (1)..(412): unsure at all n locations
cggnccggaancccggggaatatgaccgccgattcaaccgtcgcactcgttcatagcgtcgtttctaacggtgatgtctccaacggaaacacctccgcttcctctaagaaatctcgtgagattgaccgtcgccgccgcagacggaagcagaagaagaacaacaaagcatcccaagccgatgtagatgcatcggacgtttctgctgcttctgaatccaaagagaatacagatccccagccacaggtttgtgagcagattgtgatagagtatgttccagagcaaggctgaatttgaagatgggttttaacgatgagtttaaggaaatcttcgagaagttcaacttccgcgaacctcttgcctcttgagaagacggtacgaaagatgagtctgaggagaaagaagatgtccaaaa

SEQ ID NO: 150117 - DNA, 425 bp, Arabidopsis thaliana columbia
cttgcccttggctctagaaccgaacgtgactctccagatagacttttggagtcacaacattgagtttgaagaggagggaagaagtgagctagggattggttcagagtgaacataaatggctctcaaggcattagactacgatactctgaatgaaaacgtcaagaagtgtcagtatgccgtaagaggtgaactttatctccgagcttctgagctgcagaaagaaggcaaaaagattattttcacaaacgttgggaaccctcatgctttaggacagaagccattgacatttcctcgccaggtggttgcgctttgccaagctccgtttctactagatgacccaaatgttggaatgctatttccagctgatgctattgcaagagctaaacattatctttccttgactttcaggcggttaggtgcttaca

SEQ ID NO: 150118 - DNA, 370 bp, Arabidopsis thaliana columbia
cttatcactactctaaaagaatcttcatcatggccttagtatcctcagccaccgttgcaatgcgatctggcaccgtccttaaaggctgaaccatcaaatcatccgccaccgtcagaatccaaactgctgctgttgcatcaccgaagcttacagtgaagtcatctctaaagaacttcggagtcgcggccgtagcggctgcagcttcaattgctttggccggaaacgccatggcaatagaagttctcttgggaggaggggatgggtcgatagcttttattcccaacgacttctctatagctaaaggagagaagatcgtgttcaagaacaacgctggatacccacacaatgttgtcttcgatgaagactagat

SEQ ID NO: 150119 - DNA, 422 bp, Arabidopsis thaliana columbia
attttcacttgttaaaattttgttactttgctctatctgaatccaaagctgccatctttctccgtttgggttttgattagatctccgatgttgggtttctatatattatgcgagctcacttttgttcgttctgattatctgacaatgatattctccaagcttggttcttccctcgctcgatcctcacgttctaagggatttgtgtacggcggtggtgtgagatcggcggtatttaaccaagggaggttacgagcgccgcagaatctcgaggcggccgtcaatcaagtggatggtggattagggtttttgaggcggcactttgcttctttgctgctcgaagggctagaagccgggattaagccggctttcctaacctagatgcgtggtcttttagtaacccaagaagagatatggactcatca

SEQ ID NO: 150120 - DNA, 476 bp, Arabidopsis thaliana columbia
ctccaatttcgtcgcacacaggaaaacaaaatgcttctcaaagctgcttctactttctctctattgaacattcatggagagaagaaagacatctctcctctcttctcctcctcctcctccatttcgtctccggtttcttctggaaaatccggcaatctctctttccctcttcgtgcttccaagagttcaaccactaccacaagcacgttgagcggcgttgtgttcgagcctttcgaagaggttaagaaagagatggatctagttccatctggtcaacagctttctcttgctcgtcatttgtactcccctgagtgcgaagccgccgtcaatgagcagatcaatgttgagtataacgtgtcgtatgtgtatcacgctttgtatgcatatttcgatcgtgacaacgttgccctcaagggtctcgccaagtttttcaaggaatcgagtgtggaagaacgagagcacgctgagcttgtgat

SEQ ID NO: 150121 - DNA, 427 bp, Arabidopsis thaliana columbia
gcttgacaaggttacatacaacaaatatcatccctacacatcgtggattccaataaccgtctacatctgtctgcgaaattgtacacaacagctgcgtaatttctccatgacactatttgcgtggctcggcaagattactctggaaacctatatttctcagtttcacatctggttaagatcgaatgtgccaaatggacagcctaagtggctattatgcattattccagaatacccaatgctcaacttcatgctcgtcacggccatctatgtcttggtgtcccaccgacttttcgagcttacaaacacgttaaagtctgttttcataccaacaaaagacgacaagaggctgctccacaatgttctcgctggagctgccatctcgctctgtttatatttaacatctctcattcttctgcagatcccacac

SEQ ID NO: 150122 - DNA, 386 bp, Arabidopsis thaliana columbia
cggacgcgtggggaaaaagtctgtttatcatcttcttctttttcaaatcgagatcgaagaagagccaacaaaaaaccaaaaatggagacgaagccaaaccctagacgtccttcaaacacagttctaccatatcaaacaccacgattaagagatcattaccttctgggaaaaaagctaggccaaagccaatttggaacaacctatctctgcacagagaaatcaacctccgctaattacgcctgcaaatcgaacccgaaacgaaaagctcgtgtgtcgcgaggattacgaagatgtattgcgtgagattcagatcatgcatcatctctctgagcatccaaatgttgttaggatcaaagggacttatgaagattcggtgtttggtcata

SEQ ID NO: 150123 - DNA, 387 bp, Arabidopsis thaliana columbia
aaaaagagtcacttccgtgtcacaagaaaccatgaaactttctcttcatcaaccacttctcttcttcttcttagccagcggcctcccattaatcctgaccgtccattctcaatcagacgactcagatttcatccgtactagctgcaacaccacattataccctgacctatgcttctcttctctttcctccttctctagctctgttcacaacgatccagccctcttggctcgagccgccatctccgtcactctcaccaagactctcgacttagcctcatacctcgccaatatcaccactctccagccagagagcaacgaagatggtgctcaccacccaaccgcagccgctgtttttcacgactgcttcgacaatcttaaagacgcggt

SEQ ID NO: 150124 - DNA, 411 bp, Arabidopsis thaliana columbia
  unsure (1)..(411): unsure at all n locations
cagtaagacagctcgctgaaatgatgaccgaggtttacgcaaaagtgagtggagaaggagccattgagagcccaacggttgatgttagctccaaagagttttacggggaaggttatgatgacagtgacaagagaatcccagacatgaccatcattaaccgccaactcggatggaacccgaaaacatcgctatgggacttgctcgagtcgaccttaacctaccagcacaggacatacgctgaagctgtgaagaaggcaacatccaaaccagtggcttcctaaactctccaagaccccaacgaaactcgttaaacacgcgtcattttggcattttactctattcgattctatttttttcatcccagagaaaactatntttcttttttctttttaagaaaacgatataatcacg

SEQ ID NO: 150125 - DNA, 267 bp, Arabidopsis thaliana columbia
attattacttctttaaaagaatcttcatcatgggcttggggtcctcagccaccgttgcaatccgatgtgtcaccggacttaaaggctgaaccatcaaatcatgcgccaccgacaggatccaaactgctgctgttgcatcaccgaagcttacagtgctgtcatgtataaagaacttaggagacgcgggcgtagcgtgtgcacattcaattgctctgcacgggaacgccatggcaatagacgttctttggggaggcggggatgagtcga

SEQ ID NO: 150126 - DNA, 412 bp, Arabidopsis thaliana columbia
attttcacttgttaaaattttgttactttgctctatctgaaaccaaagctgccatctgtctgcgtttgggttatgattagagctgcgattttgggtttctatatattatgcgagctcacttttgttcgttctgattatctgacaatgatattctccaagcttggttcttccctcgctcgatcctcacgttctaagggatatgtgtacggcggtggtgtgagatcggccgtatttaaccaagggaggttacgagcgccgcaaaatctcgaggcggccgtcaatcagggggatggaggattagggttttggaggcgggactttgcttcttttgctgctcgaaggggacttgaacccggtgatttaagtcgtgctttcgctaaccctagatagcgtgagatcttttctagtcaaa

SEQ ID NO: 150127 - DNA, 470 bp, Arabidopsis thaliana columbia
cgcacagtcacgtttctcattacgctgctctctcttccaataagcctcttgaatctgacggcgaagctcgggttcgccggtttttaactcgcggaaaagcgaattccagagctaacgccgtcgatttcgacgacgcgggatccagcgacgaagaaagtagtgacggaggcggtggtggtggtgacgaggaggaggaggaggaatatttcgatgtggagaaggagaggaagaggagagctaaggaatttcatgatacgaaggagcttgagaggaaagcagaggagttacagtataagattgatgaagaaggagacgattcaaaggagaagaagaggatgagagtgaagagagaactccaaaaggtagctcatgagcaagcgtaagaggagaaaaactgcagatatgatgtttgaactaggtcaaaaaggcttatggtaaggaatgtatggacgagcgatagagttttttga

SEQ ID NO: 150128 - DNA, 339 bp, Arabidopsis thaliana columbia
ggcttcctctatgctctcttccgctactatggctgcctctccggctcaggccactatggtcgctcctttcaacggactgaagtcctccgctgcctttccagccacccgcacggctaacaacgacattacttccatcacaagcaacggcggtagagttaactgcatgcaggtgtggccttcgatcggaaagaagaagtttgagactctctcttaccttcctgaccttaccgactccgaattggctgaggaagttgactaccttatccgcaacaagtggattccttgtgctgaattcgagttggagcacggatttgtgtaccgtgagcacggtaactcacc

SEQ ID NO: 150129 - DNA, 367 bp, Arabidopsis thaliana columbia
aaaaagagtcatttccttgacacgatgaaatcatgatactctctgttcatcaaccactgctctgcttcttcttaaccagcggactccagattaatcctgaccagccattctcaatgataccactcacaattacatccgtactagctgcaacaccacgatgataccctgtcctattgttctcttctctcagctagatctgtagctctgctcacaacgatccagcccacttggctagagccgacatgaccgtcactgttaccaagactctggacttagcgctgatacccttgcaatgtcaccactctgcagccagagagcatcgaaaatggggctcaccacccaaccggaggctatgtttgtcacgact

SEQ ID NO: 150130 - DNA, 391 bp, Arabidopsis thaliana columbia
gaaaaattagctgcttttgaatcaaaaagttttgtgctttattgattcaatcatggttgaggatcgtgcggcaccttatactgcctagcaaccttaatctaacatcaaacaactacctacttatgaacagatccgacgacgatttactgaatgcaaaaacttggatttctagagttggttctattagaatttctctagagttgctgacacctatctcggaatactcaccatagccgctgtctacttggtgtacaacaccaccgacactgatagtgtcctttgtttccagcctcagacaactcaatgtcttaaatctttatctcgccctaaaatcaaatggaattcgattcaagcctatcctgatataacgtcaccgtacgctaatttgcag

SEQ ID NO: 150131 - DNA, 421 bp, Arabidopsis thaliana columbia
  unsure (1)..(421): unsure at all n locations
caatccggtaggcgagagagagagattaatcaatcggcgacctttttaattcgctcgtaattcgttttgattttcgtgtttttgcaacgaatttaacaacttctgtgtgtgtgggtgtgagtttcttaagagaagtcagaaacaatgattgggttgtttaaagtaaaggaaaagcaaagagaacaagctcaaaatgctactagaggaggagcttctgttaagaagcaatctgctggcgaacttcgtcttcacaaagatatatcagagttgaaccttcctagctcttgttcaatatcttttccaaatggcaaagatgatttgatgaactntgaagtatccattaaacctgatgatggatattaccacaatggtacgtttgtttttcacaattccaagtctctcctgtgtatccacatgaagc

SEQ ID NO: 150132 - DNA, 451 bp, Arabidopsis thaliana columbia
tctttttcgaattcggagctcaagtttgaaattcgtagaagctagagagttttctgagatggctcgtactaagcaaacagctcgtaagtctactggaggaaaggctcctaggaagcagcttgctacaaaggctgcacgtaagtctgcaccaaccactggaggagtcaagaagccccatcgttaccgtccaggaactgttgcactacgtgaaattcgtaagtaccagaagagtaccgagttgctgatcaggaagctccctttccagaggctagttcgtgagattgcccaggatttcaagactgactttgcgtttccagagccatgctgtgcttgcactccaggaggctgctgaagcataccttgtgggtctctttgaggacactaacctctgcgccatccatgccaagcgtgtgaccataattgcccaaagacattcagctcgctcgcagga

SEQ ID NO: 150133 - DNA, 458 bp, Arabidopsis thaliana columbia
acaatcgtttaatctcacccaagaagacaaaaacacagagagagaaagagagagaaatggcgacgacaacaacagaagcaacgaagacatcatcgaccaatggagaagatcagaagcagtctcagaatcttcgacatcaagaagttggtcacaagagtctcttacagagcgatgatctctaccagtatatactggagacaagtgtgtatcctagagaaccagaatcaatgaaggaactcagggaagtgacagcaaaacatccatggaacataatgaccacatcagctgatgaaggacagttcttaaacatgcttatcaagctcgttaacgccaagaacacaatggagatcggagttacactggctactcttttctcgcaccgctcttgctctccctgagacggcaaaattctggcatggatgaaacagagagattacgaattggtttaccgacattga

SEQ ID NO: 150134 - DNA, 299 bp, Arabidopsis thaliana columbia
atatttgttaaatcgaatccttgaagacaaaaacacatgagagagtacgagagatgacagcctgcgctatctacaaatgcagcgtagacatcagttcccaattgagaagatcagacgcactcttagaaactgcgacatcaatgaagttggtcacaagagtatcatacagagcgatgatctgtaccatcttatactggagacaagcgtgtatgctcgagaaccagaattaaggacagaactcatggaagtgacagcctaacattcatgagacataatgaccacattagcttatgaaagac

SEQ ID NO: 150135 - DNA, 482 bp, Arabidopsis thaliana columbia
gagcgagcaataatgagggtttctcaatctctaattccttttgccataattgctttggtcctttcctttgtcaatgcttatgatccaagtccactccaagacttctgtgttgccattgatgacctaaaaggcgtttttgtgaatggtaggttttgtaaagacccggagcgagtcgatgcaaaagattttttcttctcaggtctcaatgtgcccgggaacaccaataatcaagttggctctaatgtgaccactgttaatgttgatcagatccccgggctaaacaccatgggaatatcattggtccgcatagactacgcaccgcatggccaaaatccacctcacacgcaccctcgtggctcagagatccttgttcttgtcgaaggaaacatatacgtcggttttgtctcttcaatcaagataacaaccggttattcgccaaagtattgcacccccgtgatgtttttgtggttcccataggaatg

SEQ ID NO: 150136 - DNA, 447 bp, Arabidopsis thaliana columbia
ggacggaccttgacctctctgcttcccttcgtgcattttctctctctcactatcctctctctttctagtgtttgggtgagcctctgcgtactctgttcttcttctctcttcagataaaacaagtcctgcatattgaatatctgatgtcttatcgatagctaagtgtggataaggatgaactggttacgtcaccttgattgaaagaacgtaactacttgggtctctctgattgttcctctgttgatagctcaactattcccaatgttgttgggaagagcaatctcaatttcaaagctactgaactgaggctcggtcttcctgagtctcaatctcctgagagagagactgatttcggtttgctgagtccgtgcacaccccaaggagaagcttttctttccgttgctaccctttaaagacaatggatctgctactacagggcataagaat

SEQ ID NO: 150137 - DNA, 446 bp, Arabidopsis thaliana columbia
tgctttgatatgggaatttgacttctcagtcttcatggttctgatcattgccattctgaacggcggtaccatcatgacagtctgagaggacagagttaagccatctcccacacctgatagctggaaacttaaagaaatttttgctactggagtcgttctaggaggctaccaggccatcatgactgttattttcttctgggcggcgcacaagactgactttttctcggacacattcggtgtgaggtccattagggacaataaccacgagctaatgggtgcggtgtacttacaagttagtatcattagtcaagctctgatcttcgtcacaagatcaaggagttggtcttttgttgaacgtcctggagcattgctgatgattgctttcctcattgcacaactgattgctactttgattgcggtttacgccaactgggaatttgcaaaga

SEQ ID NO: 150138 - DNA, 414 bp, Arabidopsis thaliana columbia
gtcgcatcgaggtgtgggaccaccacgctcctcagctccgttgctcaggtgtctcctttgcacgttacatcatcgagtctaagggtctgtacttgccctctttctttaacaccgcgaagctctctttcgtggctaagggacgaggtcttatgggaaaagtgatccctggatgcgctgaaacattccaagactcatcagagttccaaccacgcttcgaaggtcaaggtcaaagccagaggttccgtgacatgcaccagaaagtggagcacattaggagcggtgataccattgccacaacacccggtgtagcacagtggttctacaacgactgacagggaaccacttgtcatcgtcagcgtcttcgatctagccagtcaccagaacccagcttgaccgcaacccaaggccatttta

SEQ ID NO: 150139 - DNA, 345 bp, Arabidopsis thaliana columbia
tgaatcattagttaccacggaatcagcactaacaaccgcggcgtcagctattgcatagagaagtgattcatctatgatgggaggttagcttttatgtttcaggctcttgaattggctcttaagattttgaacgatggcttatcagcggattatataccagatccttctggatatgcgattatacatgatgacaatgatcgtcaatgcaccgacgcatcctgagactactcaataggaagagtaaacagtagctatctaaaatcttcacaccaatatcagagcatgtacacaacgttactctgagaactaggagaggcttcaactagagacatcctgattgcataa

SEQ ID NO: 150140 - DNA, 321 bp, Arabidopsis thaliana columbia
gcgtcaaccgtcgcactccttcatagcgtctattgtaactctgatgtctcaaacgaaaacgcctgcgttttctataagaaatggcgtgagattgaccgtcctcgccgcagacaggggcagcagcagaacaacaaagcatcctaggcccatgtagatacattagacgtttctgctgtttccgaatccaaagagagtacagatccttagccacaggttatgcagcagactgggatagagtctgcttcagagcaagtttaatctgaagtttgttctaacggtgagtcttaggcaatcttaccgatgttcagcctgagagaacct

SEQ ID NO: 150141 - DNA, 430 bp, Arabidopsis thaliana columbia
tattaaccatgaagcttcttgggttcgccttagctattctattagttgtggcgacttgcaaacgtgaagaagagattacttgcggagagaacgttccattcacatgtagccaaacagatcgtttcaacaaacaagatttcgaaagcgacttcatcttcggtgttgcatcttctgcttaccagatcgaaggcggcagaggtcgtggacttaacgtttgggatggcttcactcaccgatacccagagaaaggtggagccgatttgggcaatggagacactacttgtgactcataccggacttggcagaaagatctagacgtgatggaagagcttggagttaaaggctacagattctcctttgcgtggtcaagaatccttccaaaaggaaagaggagtaggggaatcaacgaagatggtattaactactacag

SEQ ID NO: 150142 - DNA, 401 bp, Arabidopsis thaliana columbia
ctctctcttatctcctttcctttcattgtagttaacgaaaagattacgataatggcaacatcagctatccagcaatcctccttcgccggccaaacggctctcaagccctccaacgaactcctccgcaaggttggtgtatccggtggtggccgtgtgaccatgcgtcgtaccgtcaagtctactcctcaaagcatctggtacggaccagaccgtcccaagtacttaggaccattctcggagaatacaccgtcctacctaaccggagaataccccggagactacggctgggacaccgctggactctcggctgacccggagacattcgctaagaaccgtgagcttgaagtaatccacagcagatgggctatgttgggtgctctcggatgcaccatccctgagat

SEQ ID NO: 150143 - DNA, 470 bp, Arabidopsis thaliana columbia
gaaaacgaaaatgttggcaatatttcagaatgcttttgctcacccaccggaagaactcgagcagggcggcttctcattggtgcggcggaactcctaaacttcccggcgaaactctctccgacttcctctctcatcaccaaaacaatgctttctctatgaacttcggcgactccgccgtcttagcttacgctcgccaagaaacctctcttcgtcaaaggttgttctgtggactagatgggatctactgtatgtttctagggagattgaataatctctgtacattgaatcgacaatacggtttatctgggaagaactcaaacgaggcaatgtttgtgatcgaagcttatcgaacacttcgtgatcgtggtccttacccagcagatcaagttcttagaggtcttgagggaagctccccttccgttgtctacgatactcaaaacttctctgttttttcagctctgagatctgtt

SEQ ID NO: 150144 - DNA, 458 bp, Arabidopsis thaliana columbia
acttcagtgtgacccttctgcttataattctctccatggcttccatgttggttggccctgtctgagctttgacattttaggtgagggggggggtttgaaccgaactgagtttcctcacacactttatatggtggctgggactcaggctgagaaagcagctcataactccatagggttatttaaaatcaccaacgtatctggtaagagacgtgatgttgtgcctaagacatttggcaatggtgaggatgaggatgaggatgacgaagatgacagtgacagcgatgatgatgacggagatgaagcttctaaaactccaaatattcaggttcgaagggttgctcaccatggatgtgttaaccgtatacgtgcaatgccacaaaactctcatattttgggtcttttgggcagattctggtcatgtacaggtctgggacatgagctctaattttaatgcttta

SEQ ID NO: 150145 - DNA, 479 bp, Arabidopsis thaliana columbia
cggaaccgtcgatttcatcttcggagacgcaaccgtcatcctccaaaactgtaacatctacgctcgtaagccgatgagcggccagaaaaacacgatcaccgctcaatcacgcaaagaacccgacgagactactggcttcgtcatccagagctcgacggtggctactgcgtcggaaacttatttaggacggccgtggagatcgcattcgaggacggttttcatgaaatgtaatcttggagcgttggtgagtccggcgggatggttgccttggagtggtagttttgctcttagcactctttattacggtgagtatggtaataccggcgccggagcaagtgtctccggtagagttaagtggccaggttatcatgttataaagacggtgacagaggcggtaaaattcacggtggagaatttcttggacggaaactattggattacggctacgggagtaccggtcaacgatggactttgatttt

SEQ ID NO: 150146 - DNA, 476 bp, Arabidopsis thaliana columbia
attcattaatatatttattttgagattttggttgattttttgatatataaatattggacttgccattttctattacaaccatcaaatctcaataaagcaaaacgaacaagaaaatggcgagcacggaagctctcttacccgtcacgtccctacaagatccattatctgagtcaagatccgaccagatcccggagacccgtcggagacgacccatcaaagttcatcttgcagtctattccggtttgctcttgatcgctttgtacgtcactctcatcgtcacacacgacggctccaaggctgaaatagcgacggagtcacgtcctcgtatggccggcgtgtcggagaagagcaacgacggtgtttggatatcatccgatgatgggaaagttgaagcgttcccgtggaacaatactattttgtcggggcaacgcacggcgtttcatttccagcctgagaaaaattggatgaacgatcct

SEQ ID NO: 150147 - DNA, 419 bp, Arabidopsis thaliana columbia
tagttattcagatcgccgaatttgcagtaaggagacgaaaatatggtgcacgtttgctactaccgcaactatggaaagaccttcagagggaccacgtcgtccttacgagaaggagcgtcttgattctgaattgaagctggttggtgagtatggtctgcgtaacaagcgtgagctctggagagtgcagtactctcttagccgtatccgtaatgctgctagagatcttttgactcttgatgagaagagtccaagaaggatctttgaaggtgaggctttgctccgtaggatgaaccgttacgggcttcttgatgagagccagaacaagctcgattacgtcttggctatgactgttgagaactttcttgagcggtcgtcttcagactattgtgttcaagtctggtatggctaagtttatccat

SEQ ID NO: 150148 - DNA, 439 bp, Arabidopsis thaliana columbia
  unsure (1)..(439): unsure at all n locations
cttgagaccataaccctttagcgttttcggctaaagctttctctgactactacaacaatggcgggctgatccctttcccctgctgctcaggttggttctagcagaagtgctttgatggcgatgtcaagtgggttgtttgtgaagccaacgaagatgaatcatcaaatggttagaaaagagaagattggattgagaatttcttgtcaagcgtcgagtattccagcagacagagttccagatatggaaaagaggaagactttgaatcttcttcttcttggggctctttctctacctactggctacatgcttgtcccttacgctaccttnctttgttcctcctggaaccggaggtgggaggtggtggtactccagccaaggatgcccttggaaacgatgtagttgcagcggaatggcttaagactcatggtcccggtgaccg

SEQ ID NO: 150149 - DNA, 284 bp, Arabidopsis thaliana columbia
ccgttaattagggttttcttctctatctcgatttcaataccattgatgatcccctgagctagggttgttcgatcccgatggttgtgtcgcttagctctgatctctgttcatcgaatttggttaatttgttttgattggttaagatacattgcaaagcgatgccaccgaatgttgtgaagaggggaggcgccacgagaagaggtgccaggcttacgagatcggcgctcaaggcgcacaattcttacgcggaatctttccatgacgaatctgtaatatcattgagc

SEQ ID NO: 150150 - DNA, 471 bp, Arabidopsis thaliana columbia
  unsure (1)..(471): unsure at all n locations
ttagtaagacctaactcttaacgaacttttagataaaagcttataactgagagagacatagatcgacaaaagtctctataccttcttgtaacgtggtggttaattaatcatggccgatcaaatctccggcgagaagccggccggagttaatagattcgctcttcaatgtgctatcgtcgcctccatcgtctccatcatctttggttacgatactggtgttatgagtggagcgatggtgtttatagaagaagatttgaagacaaacgacgttcaaatagaagttctcactggaattctcaacctntgtgcccttgtcggatcattgctcgccggaagaacgtcggacataatcggacggcgttacacaatcgtcttggcctcaatactattcatgttaggctcaatattgatgggttggggtccgaattatccggttcttctatccggtagatgcaccgcttgactcggagt

SEQ ID NO: 150151 - DNA, 324 bp, Arabidopsis thaliana columbia
gtccgggattccggcgcccgctgacgcgtgatacaaccgtcgcactcgtactacagagtgttttctaacggtgatgtctccaacggaaacacctgcgctttctataagaaatatcgtgagattgaccgtccccgccgcagacagaagcagaagaagaacaacaaagcatcctaagccgatgtagatgcatcacacgtttctgctgcttctgaatccaaagagaatacagatccccagccacaggttagcgagcagattgtgatagagcctgttccagagcaagcttaatcagaagatggctctaacgatgagtttaaggaaatg

SEQ ID NO: 150152 - DNA, 469 bp, Arabidopsis thaliana columbia
  unsure (1)..(469): unsure at all n locations
gcagacaagcattagcatcatagatacatagagagcttaagcaaaagatctcatactttcaagattgatcgatctctcaagtctcaacaatgtcatcatcatcatcagttcctgcttacttgggagatgaagatctgacacaagaaacaagagctctgatctcttctcttcctaaagagaaaggttggttagtgagtgaaatatatgaattccaaggactttggcacacacaaggctattttacaaggaatcttgatctgccaaaaacgctttgaagctaaagattccgacattatcctcgtcactaatcctaaatcaggtaccacttggttaaaagctcttgtctttgctctccttaaccgacacaagtttccagtttcttcttttggtaaccatcctcttctggtcaccaatccacaccttctngtgcccttcttggaaggagtttactacgagtccccagatttcg

SEQ ID NO: 150153 - DNA, 437 bp, Arabidopsis thaliana columbia
cttctcttctctctatcacactactactactcacatcatttctttctccactagaggctccgggttattcttctacactacacgtggtggttctctccacccaaatccatgcaagagacagttacttttttggaaaattccacagagaatcccccaaagatcaaaaccttaacagtttcatccctttggagactggcgagaaaaccacagtagaagattccgtcctcaacaagaaggagcaagaacaggctccttcctttgtccccgactccgaaaacggttttggcttgtttggtcacgagaccatatacaacaccaccaccgtcaacaaagaggggttcaccaccaccaccaggatcgatgaaaaagtcaacagcatgtttttttccactccaagcctgagcgagaccgaagagtttttcaccacctacgaggaa

SEQ ID NO: 150154 - DNA, 418 bp, Arabidopsis thaliana columbia
  unsure (1)..(418): unsure at all n locations
cagagattgtaaagatggtacttcatgggggagctcaccgtgcgaagcaggtggtgaaagttctgaacagcgacgggaaagtcattgcttatgctaagccgtcttatccatggataaaaggaagtgacacatcaactgcagaatcaggttctgaagctgaagatattgttgtgtctccaaaagcagtaaagagttattcccatctccgcttgacccctgttcgtgaagaggcaaaggttggttctggtgaaacgagttttgccggtagttttgcaggttatgatgagtatgttccaatggttgacaaagctgttgacgccacctggaagttaaacccaccgncatcaaccgggctcctttaaaggagctatatgcctcaatgtccaaggacatgaagctcagtctcggtctagaactt

SEQ ID NO: 150155 - DNA, 309 bp, Arabidopsis thaliana columbia
aaaacatacaaacaacacttgagacgcagattgttcatactaaaaccatacgcgacaccaacccgatcgtgtttaggctgcctatgcaaacccgacctgttcgttaccaaagtcaaatacggtgtggtatatgcccatgaacacatctcccaagatccagagaggtccacgaggtggagcaacgtcaagagcaataaaaccactgatgcactgtgccacaggtccctcaccaactttcagaacatactcttctcgagcaagatcaaatacttttgccttcaatggtaagtgaaacagtgggcattgttg

SEQ ID NO: 150156 - DNA, 404 bp, Arabidopsis thaliana columbia
ctctctatatcaaaatgggtcgccgtagctctatgttttaagatctgcccctcgccctcgggctgctgctgcacgcaggccaggtccttaacctgatcaccatgcacctcctccagctccagctcatgccagcggtggtggtggtagcatgttctcaggcattggttcaaccattgctcagggtatggcttttggtactggaagtgcagttgcacacagggctgttgattctgtgatggttacacgaaccattcagcatgaggctgttgaggctgcttctgcatctgcagcccctgctggaagcgccatgctatctagcacctgcgacattcatgctaaggctttccaaagatgcatctgcagttatggaagcgagattagcaaatgacagttctacatggaca

SEQ ID NO: 150157 - DNA, 460 bp, Arabidopsis thaliana columbia
ctttaagacagctaaaactaaatacaaagaaacagttatgggtttggttacagaggaggtgagagctaaggcagagatgtacaccggagatgagatatgtagagagaagacaaagtgtttcctcaaggaaatatctatgcccaatggtttattaccattgaaggatatagaagaggttgggtatgacagagagtcaggtgttgtatggctgaagcagaagaagagcatcactcacaagttcacagagatagataagcttgtctcctatggaaccgaagtcacagccattgttgagaccgggaaaatcaagaagctcactggagtcaaagccaaggaacttcttatttgggtcactatcaatgagatctataccgaggaaccctctaccaagatcacgttcaagacaccgaccacactgtccaggactttcccgtcacagcttttatagtcccagaagaac

SEQ ID NO: 150158 - DNA, 421 bp, Arabidopsis thaliana columbia
aaaacgcaggaaacttttctgcaaaaaatctcggtttccatattcaaaactttcccacgttaagtctctcttctttgttttgtttcagattcattacttttctccaaaaaactttcttcaagatctgttcttttaaataattatggcggaagaacatcgatgcgagacgcctgaaggtcaccgtctctgcgttaacaactgcggtttcttcggaagctcagcgacaatgaatctatgttcaaactgttacggcgatctctgtctcaaacaacaacaacaagcttccatgaaatcaaccgtcgaatcatctctctctccggtgatcgcacctgttctcgaaaactacgcggcggagttagagatcccgacgacgaagaagacagagggggaaaaaaaccgattcaaattccgacgggagcac

SEQ ID NO: 150159 - DNA, 401 bp, Arabidopsis thaliana columbia
gtgaaatagacatgtctgtgaagatgctgtttatttttacctggacagaaagaccctatgaagcttcactgttccctgggattggctttgggcttttcctgcgcagcttaggtggaaggcgaagaaggcccccttccgggggggcccgagccatcagtgagataccactctggaagagctagaattctaaccttgtgtcaggacctacgggccaagggacagtctcaggtagacagtttctatggggcgtaggcctcccaaaaggtaacggaggcgtgcaaaggtttcctcgggccggacggagattggccctcgagtgcaaaggcagaaaggagcttgactgcaagacccacccgtcgagcagggacgaaagtcggccttagtgatccgaccgtgcccag

SEQ ID NO: 150160 - DNA, 319 bp, Arabidopsis thaliana columbia
aaaaaagcttccaccatttttttttctgtttttttttttttaagctattttcttgatgttttgggtttcactggaagaagaaggataagaaaaaatggcaggtgatggcgtagaaaatgcaaagccaccgcagaaacaggaagatcttcagcctcatccggtgaaggatcaactttacggtatcacttactgcctcacaagtcctcctccttggccggagacaatacttctggggtttcaacactacttagtgatgcttggaacaactgttctcattccaacaatgttagtttcaaagattgatgcaagaaacgaagat

SEQ ID NO: 150161 - DNA, 280 bp, Arabidopsis thaliana columbia
cccggcgacaagggcagagggccgttaaccatggagtcttggaacgcaagctgcgccccaagccttctggccgagggcacgtttgcctgagtgtcatcatcagtgccgttctcactagcagagctatcttccagagaatgaagaactacaccatttattgcagtctcaatcacaatccagattggggttggtttcatgcttattggctttgatatgggaatttgacttctcagcgctcatggttctgaataatgccatccttaatgatgggactatcatg

SEQ ID NO: 150162 - DNA, 427 bp, Arabidopsis thaliana columbia
cgcaagaactcaaacacttcataactaaacatccttttatggtttttcaaaaactcaatcatgtcaagcaactgcggaagctgcgactgtgctgacaagacccagtgcgtaaagaagggaaccagctacaccttcgacatcgtcgagactcaggagagctacaaggaggccatgatcatggacgttggtgccgaggagaacaacgcaaattgcaagtgcaagtgcggctcctcttgcagctgcgtcaactgcacttgctgccccaactaatgaagcttctttaatcaaaatgtaatatgaataaaagttgatgtgggctcatctattgagctcatgtctctcttattactactctctagtatggggtgatgtaatgggttatgacccttctttcccttccctataaaactaaagaaacttggcagat

SEQ ID NO: 150163 - DNA, 403 bp, Arabidopsis thaliana columbia
  unsure (1)..(403): unsure at all n locations
ctgagctngggaaactatatgcagctaatcttctttctcgctgancgcagccaccaccattgcggtctttgctgtgcagtcatgataaggagtcttatggaaaaagattctcacggtctgacatgcggtcttggtgcgctgctgctactactactactactccacttggagcattagagtcttctcagaaaagacttttgatattcgatcagtcaggagaccagactcgtctattacaatgtccatttcctctacggtttccatctcatgcggctgcagaaccagcgaaactctctgagttacaaggtatagagaaagctttcaaagaagatggtgaagagtttcacaagagtgatggaacagagtcagaaatgcatgaagacactgaggagatcaatgcctt

SEQ ID NO: 150164 - DNA, 263 bp, Arabidopsis thaliana columbia
gagatgagggagactattagagagacgagaaggagctgaatcttacctttactgaagacgtcaccaaatacaagagcgccgctgtgatcgtaaacaaggcggtacaagttgctatagatgaatgcaaagccaaagctaaaaaaaggggataactgggagaaaagagactgtcttattaaagagcaaacagcgagcatgaacaagaagtctaagaagaacattgagagaggtggtgccgttcctacatgcatttctgggaacaa

SEQ ID NO: 150165 - DNA, 407 bp, Arabidopsis thaliana columbia
caaaaaagacagtggtaccagctccactcttcaatttctctggatcaaacaaaattggaggagccagcgtcactgtttgaacattttatcatcgtggggcttcatccggaaacgaatttgaggccagtggaagaggctttccgtagaagaaagaaatgggagatggagatgtcaaggtatgaagtggcagattacagaatactccgtcaccgtgggcctcaatttcctatattggagccacagattctttttaaataccctcccggaaagaaggtagcaatgcgtccaaaggatctagcaactttctgctttcctggtggtgtcaaggcacgacttttggagaggaccccatctctcagtgatctaaatgagcttgtgtatggacaggaacatttaggcactgatga

SEQ ID NO: 150166 - DNA, 408 bp, Arabidopsis thaliana columbia
atcagatctagtcaggggtcagatcggatagccgtttttataatggcagcggcgagacgatggcggacgctccaatctgagccggagaacaaggtctgtgtcgattgctcccagaagaatccacaatgggcatcgatttcatatggaatcttcatgtgcttggaatgctccggtaagcaccgtggtttaggtgttcacatctcattcgtcagatccgtcaccatggattcatggtccgagatccagatcaagaaaatggacgctggaggcaacgagcgtctcaacaattttctcgctcagtacgggatctcgaaagagactgatatcatctccaagtacaattccaacgccgcgtctgtgtatcgagatcggatccaagctttagctgagggaagacaatggagagat

SEQ ID NO: 150167 - DNA, 406 bp, Arabidopsis thaliana columbia
cccacgcgccgctcgatcttcttttcttttttttcacctgtttttttgtatttcgagaatactacacttcccactccgcgttatcggatatatgtccttgagtttctccgattgtggtcaatctggaaaattattgagaatctctccctcacttaaccaaaagcgtttttaatcagatagagagagaggaaaaagcatcaaccaaaccatggctgcgagaaatttggagaagatggcttctattgatgctcagctcaggcttcttgctcctggcaaggtttctgaagacgacaagcttatcgagtacgatgctctgttactggatcgatttctcgatattcttcaggatttgcatggcgaggatgtcagagaattcggtcaagaatgctacgaagttgcagctgat

SEQ ID NO: 150168 - DNA, 315 bp, Arabidopsis thaliana columbia
caaaaagtcttcatctttaatcatccaatttctttttcttcttctatgcaaatggtgggagacgtgcccgctccattgccgagattgggttcggtgttaagtctcaattagtttctgcaaatcgaacaactcaatcagtttgctttggagctcgttcctctggaattgcattatcttcgagattgcactatgcatcacccattaagcaattctctggggtttatgcgaccaccaagcatcacagaaccgcttgtgttaaatccatggctgctgaggaagaagaagtcatcgaacctcaagcttaagtgacaaaca

SEQ ID NO: 150169 - DNA, 350 bp, Arabidopsis thaliana columbia
gagcgagcaataatgagggtttctcaatctcttgttccttttgccataattgcttgggtccttgcctttgtcaatgcgtatgatccaagtccactccaagacttctgtgttgccattgatgacctaaaaggcgtgtttgtgaatggtaggttttgtaaagacccgaagcgagtcgatgcaaaagattttttcttctcaggtctcaatatgcccgggaacaccaataatcaagtgggctctaatgtgaccactgttaatgttgatcagatcccagggctaaacaccatgggaatatcattggtcccgatagactacgcaccgcatggccaaaatccacctgacacgcaccc

SEQ ID NO: 150170 - DNA, 348 bp, Arabidopsis thaliana columbia
  unsure (1)..(348): unsure at all n locations
cgtcgctgatcttccctctggaatcaaaatcaatttcttttcttgcaaagacgcanctacaggcacgtcagccgatttcttgtgacaaggattagctaaaccaggtcttaccaacaacacattcggtgccttagtcacaggagctaacgttatgacaatcccaggactcaacacacttggtgtctccctctctcgtatcgactacgcaccaggaggcttaaacccacctcacacccacccacgtgccactgaggtcgtttttcgcctccaaggaacacttgacgttgggtttctcactactgccaataagctaatctctcaatctctcaagaaaggagatgtctttgc

SEQ ID NO: 150171 - DNA, 336 bp, Arabidopsis thaliana columbia
cacgcgccgagttttcctcacttgttctcaataaatctctctctctttcttctctatcgcttgcattgttctcctccagatctcgagtccaatctctctccctctctacttccttcaacagaaatggaaacgttcctatttacctctgaatccgtcaatgaaggacacccagacaagctttgtgaccagatttctgatgcgatccttgatgcttgcttagagcaagatcctgaaagcaaagtggcgtgtgagacatgcaccaagaccaacatggtgatggtgtttggtgagatcactaccgctgcgaaagttgactatgagaagattgttagatcc

SEQ ID NO: 150172 - DNA, 350 bp, Arabidopsis thaliana columbia
gaaaaactcagaagaaaagccaaacagtttaacaatatatggcaacgacaactctctcaatcgcgacaacaatccgtgccgcatggggtcctactctcacttccatcaatcacttcccttcccgaaccaccaccatcgaatacccctctcgcttcggccgtggttcatcatccacattgacccaccgggcaacccatctacgaccaatctccggcgtcgaagctccggagaaaatcgagaagatcggatccgaaatctcatccctaaccctccaagaagctcgaatccacggcgactatctacaagacaaatgcggtgtctccccactctgtcaagcccccgcagcagcg

SEQ ID NO: 150173 - DNA, 426 bp, Arabidopsis thaliana columbia
attgacttcttccatctaaagagtcggatgggaattagtcaacttgagttggaagacgaggtgcaagatgacctaaagcgtgcggctggagaattcaccaaggacgagaacgatgctaacaaacttaaccgcattcttcaactcacaggattcagtgacccagtctatgctgaagcatatgtaacggtacaccattatgatattgctcttgaagttacagtaatcaaccgaaccaaggaaacccttcagaacttgtgcttggagttagcaaccatgggtgatctcaaacttgttgagcgtcctcagaactatagtctggcacctgaaagaagcatgcagattaaagcaaacatcaaggtctcgttcacagagacaggagtcatattcgggaacatcgtctatgagacatcaaatgtaatggagcgc

SEQ ID NO: 150174 - DNA, 383 bp, Arabidopsis thaliana columbia
cttcagtatccattggcggattagccttatagtgttctgatcaaggttttggaggttgcatgtgagtgaggagatgttttcggctcagcataagattcataaggagaagggtgtggaactttctgaattggatgagcaagttgctcaggctttctttgatttggagaacaccaatcaagaattgaaaagtgagctgaaggatttatacgtcaactcggctgttcaagttgatatctctggaggacgcaaggcaattgttgtcaatgttccttacagactgagaaaagcttaccggaaaatccatgttaggcttgttcgcgaacttgagaagaagttcagtggaaaggatgtgatcctcattgctacaaggaggattgtgaggc

SEQ ID NO: 150175 - DNA, 412 bp, Arabidopsis thaliana columbia
aaatgggaagtggaagagatagagacgaccctttattctttatcagcaatccatctaccgcggggtctggagtcactgtatctgactatcgcgacaactttctcggcgaacccacttctcgctccggtagttttcaaagcgagagcttactcggtggaggcggtggagaaagcatcaacgacgctgattttggattcgctcgtcctgatttccgatcggaacaactagctggaaccgtacagatttacgagaggcatgtcttcttgtgctacaaaaagccatctgtttggcccgcaaggatcgaggctgctgagttcgatcgattgcctaggctactctctgctgctgtatcggccagaaagggtagcatgaagaaggagactcgactcacaatatgtgaggggcatgatgg

SEQ ID NO: 150176 - DNA, 449 bp, Arabidopsis thaliana columbia
ctcttttacttccggcgatctctctccgacggcctttggacgccgtcctttactctgttccacgtctccttcactcccctacgcgcatcatcctctccttcctcgccgtatcttcttctgccgaggtttctctccgttcagccatgtcacaaattcaccttctctcgaagcttcccttccaaatcccggattccctcagcttcttccgccgccggttccacgttgatgacgaattcctcttcgccaagaagtggagtgtacactgttggtgagttcatgacaaagaaagaggacttgcacgtggtgaaacctacgactactgtggatgaagctctggaactccttgtggagaatagaatcactggatttcctgtaattgacgaagactggaaattggttgggcttgtttcagattatgacttgttggctttgactccatatctggtagt

SEQ ID NO: 150177 - DNA, 399 bp, Arabidopsis thaliana columbia
  unsure (1)..(399): unsure at all n locations
gaaaaagcaaaagcaaaaatggctcgatctttcgttattgctgtgatctgtatcggcgtcatggccggcgttactggtcaggctgcgacttcaccaccaaccgctacaccagctccaccaactccaacaacttctccaccagcagcaactccttctcctgtctcagcaccaccaccagtcacaacatcttcttcttcagtcaccactgcttctccttcagcaaattcaccaccaccagtctcttctcctcctcctgcttctcctccaccagctactccttctacagtcgcttctccttctcctaccgttgcttctacttcaccagcaactccttctnccgtcgctacttctcccccagctcctctagctttcccttctgctcaagttccagcttcagca

SEQ ID NO: 150178 - DNA, 395 bp, Arabidopsis thaliana columbia
  unsure (1)..(395): unsure at all n locations
gggncgccccacgcgnccggngatgttgatcgaactgnggccgnctttttaattttgtttatgggtcaagtctcacagcttggttcaactgtagtggtgatttgcattgtaagcactttgtccttgtgggccatcatgcccctcctggtcttgttttatggagcttatctttattatcagaacacagcccgtgaggttaagcgtatggattcaatttcaagatcgcctgtttatgcacagtttggagaggcattgaatggcttatcaactatccgtgcttacaaagcatatgatcgtatggctgatatcaacggaagatcaatggataataacatcagattcactcttgtcaacatgggtgccaatcggtggcttggaatccgtttagaaactct

SEQ ID NO: 150179 - DNA, 345 bp, Arabidopsis thaliana columbia
cggcacattaaaagctaattcaacttttctgcaatgtttgatatggagaagaagaagcatttacatgaggttcttgaagatgaccaagagccttttcatcttaaccattacatcggcaaccttcgttctcagatgggttgctccgatatgcgtgtcaagaagcgaaagtccgataacgtcgccacgtttcctcctggtttgttctcctgcgagaactcttgtttcttcgcagctcataaatctcctgacccgagaaagtctccactctttgagctccggtcgccgggaaagaagaagatacgtgacggtcgagttttccttcagataccggcgagaaccgccgca

SEQ ID NO: 150180 - DNA, 453 bp, Arabidopsis thaliana columbia
  unsure (1)..(453): unsure at all n locations
gcgccgaagccagaacaatacaagnncagnnctggttttattttttcagacatcttctcagggctgggagacacttcattaggtgtgtgggaaagctagagtatcaaacttcagattcaggagactacatttttccagtacgaggctccgagagaattgattgttactctgttagatgttaatggaaaccaaatattacagaaaggtgtgttctttttacaactctagagatcaaattagtggttttattagattttctgaatttgagggtttttggaggtagagatagagacaagaatgataatagagagtggtttcttggaagagaaactttcattcaatggctatggaaatgttcaattgaaaatgcagtttgttctcagggaggaagaacgaaatcgcatacgtttcttgagacaatctgcattgcgaaagaagcatgaggagcttgtc

SEQ ID NO: 150181 - DNA, 426 bp, Arabidopsis thaliana columbia
gaaaaaaaaagagagaagaaaaatggtgttgacaatctatgtttctttattcgcttcttcaaagagagctggtgtgacattggtggagaagggagtatcattcgaaactgtcaatgtcgatctcatgaaaggagaacagagacagcctgagtatctcgcgattcagcctttcggtaaaatcccagtcctcgtcgacggagactacaaaatcttcgagtcgcgtgcgatcatgaggtatatagcagagaagtatagatcacaaggacctgatcttttggggaagactattgaagagagaggacaagtagagcaatggttagacgttgaggctacaagttaccatccaccactattggctttaacgctcaacattgtctttgcaccacttatgggttccctgctgatgagaaagtattaaagagagtg

SEQ ID NO: 150182 - DNA, 329 bp, Arabidopsis thaliana columbia
  unsure (1)..(329): unsure at all n locations
cgcggacgcgaggggaagccgctnctnctnctnccttactgtttctcgtcgncgctacaccatcgagaagagccttaaccatggctggcgggaagaacaagaggatttcaaagggtaggaaaggaggaaagaagaaggctgttgatcccttctccaagaaggattggtatgacgtgaaggctcctggttctttcacgaacaggaatgttgggaagactcttgtttccaggactcagggtaccaagattgcctctgagggactgaaacacagggtgtttgaggtttctcttgctgatctacaaaatgatgaggataatgcctacaggaag

SEQ ID NO: 150183 - DNA, 367 bp, Arabidopsis thaliana columbia
gtacttgacgagtttctagttgctgaaaattcaacattttattcagacatcagttctccttggctagcatcagatagaacccagcaaagttctactcccaggttttcttatgccgcacgacctccttcaggctctgaaccaagcttctccatgtctgagggactgagcttggatgaaaattcgttggagaaattgacggaggcttctgcagctgaagcagaggtagctagttctgtttggcgagctgcacaactaggagctggtactctggatgaagaaccctctacctctgatgccagctcgccaattgtagaatctactactgatggtaccgcaaatgaaggagatgtcaggctttatccgagag

SEQ ID NO: 150184 - DNA, 385 bp, Arabidopsis thaliana columbia
cttttggttgcaatttctcgatctcgatttttctttttgaatacaaaacttaatttgtcaagaggccagcatattcgaatttaggggttcttacacccattagatttcgcgtcgatggcgtccaatcgcggtgcgggtggctctctatacggatgagctgatccgtatagatctagagaagggctaagcactagaaatgcttcaggttcagaggaaattcagctgaggattgatcctatgcactctgacctggatgatgagattctacgtctccatggccaagccaggcaattgaaaaatattgctcaagaaattgggtcagaagcaaagtctcagagggacttcttagatgaactgcaaatgacattgatcagagcgcaagcag

SEQ ID NO: 150185 - DNA, 444 bp, Arabidopsis thaliana columbia
  unsure (1)..(444): unsure at all n locations
ccacgcgtccgngaaacccctttttgtccaaggactcatcatcattatcatttgtgattacttcatctttggaatggatattgaaagttgtaatgtctatgatttttgtgacttgggttgtttttcttatgatgatgtaccctgaacaactcggtgatgatttcctcacatttgtctcctccaagactttcctaggcaccacaggaaccatgttcttgattttcagttgtccgattcttgtcatctctgtcttagcttctctctatctcattatctccggggaagacaaggtctttactaagaagaagatatcgaaattcccgaggtttaggctatggacattccctgttcttgtggatggaccaatttgagttgtttctgcagctgagtttcttggaaatatgggcttctctggttttttcctttggnctatctatgcttata

SEQ ID NO: 150186 - DNA, 404 bp, Arabidopsis thaliana columbia
  unsure (1)..(404): unsure at all n locations
ccacgcgnccgaagagaatggggaaagagtgctactacttgtcatgtttactcaagtttcatcttctacttggtgggattcagcttgttgattcaggatctaccatcagatttcttcctggtttccaaggccctcttcctttcgagctcgagaccgggtacattggtgtgggtgaggcagagaaagatcaaatgttctactacttcatcaaatctgagagtaatccagagaaagaccctcttcttctctggttaagtggaggtcctttctgttcttcgntcactgctcttatttatgagaatgggccaattgctttcaaggctgaggaatacaatggaagtatcccctctttggtctctaccacatatgcatggactaaggtggcgagcattctctatttggat

SEQ ID NO: 150187 - DNA, 456 bp, Arabidopsis thaliana columbia
  unsure (1)..(456): unsure at all n locations
ccacgcgnccgntttttcgtctctcaaaccaacgcaaaataacattttttaacgttgtagtaatcgccggtgggctcatcgtagcatcggtaacaggacatgtgtcagcacaaatggatatgtctccgtcgtcaggaccatcgggtgcaccagactgcatggcgaacctaatgaacatgacaggctgtctctcgtacgttacggtcggagaaggtggtggtgcggccaagccggacaagacgtgttgtccggcgctagcggggctagtggagagctcgccgcaatgcttatgttacctcctctccggtgacatggcggcacaacttggaatcaagattgataaggcaaaggctctcaaactttccggagtttgcggcgtgatcactcccgatccttcactttgttctctttttggaattcctgttggagcacctgtagctattggagacgagggag

SEQ ID NO: 150188 - DNA, 444 bp, Arabidopsis thaliana columbia
  unsure (1)..(444): unsure at all n locations
cgcggacgcgtggggttgatcgattggnctcaggacttttttttgaaaccagcattcttaaccgtctctgggcaacttaatggagagaactgatgcaaccgctctctcagatgtatacacatttggtcctacatttcgagctgagaattccaacacgtcaaggcacttagccgaattctggatgattgaaccagaacttgcttttgccgacctggatgatgacatggcctgtgccactgcctacctccagtacgtagtaaagtacgttcttgataattgcaaggaagacatggagtttttcgatacatggattgagaaaggaatcattcgccgcttgagtgacgtagctgagaaagagtttctacagctggggtacacagacgccattgaaattcttctgaaagcaaacaaaaaattcgattttccgtgaagtgggggctggat

SEQ ID NO: 150189 - DNA, 358 bp, Arabidopsis thaliana columbia
  unsure (1)..(358): unsure at all n locations
cgacaaagctaaacgttttactttgngctgcactatttaactttaatggccgcctcaacaatgggtctcgcctcccctgccttcggcggtgaggccgtcaagctttcccccgcggcatctgaagtccttggaagcggccgtgtgacaatgaggaagactgttgccaagccaaagggcccatcaggcagcccatggtacggatctgaccgtgtcaagtacttgggtccattctctggcgaatcaccgagctaccttaccggagagttccccggagactacggatgggacaccgccggactttcagctgaccccgagacattcgcaaggaaccgtgaactagaagttatccacagcaggt

SEQ ID NO: 150190 - DNA, 309 bp, Arabidopsis thaliana columbia
  unsure (1)..(309): unsure at all n locations
ggacaaggaccatcgggaggattgaatctttagttttatcggaaacctgatggtggagataagaaagagaagaagtttgagccggcgncaccaccggctcgtgtagggaggaagcaaaggaagcagaaagggccagaggcggcggcgagacttccgacggtgactccgtctactaagtgtaagctccggttactgaaattggaacggatcaaggattatttgttgatggaggaagagtttgtggcgaatcaagagaggttgaaacctcangaagagaaagctgaggaagatagatctaaaggttgatga

SEQ ID NO: 150191 - DNA, 457 bp, Arabidopsis thaliana columbia
  unsure (1)..(457): unsure at all n locations
ctcactttcacagantgnggcagngcgattatggttatggcagagctctcaaccccgggaacggcgtcatcttttgtcgagtgggggtctcgaattcctctctcttcaaaattgcacctttcaaaccactttcgccatcttcttcttccacctctccacacaacaactcccaactacaaaatctcttgctccgtttctcaaaatagccaagctcctgatgctgcgcaagaaaatggattggtgaagacgaataaagagtgttatggagtgttctgcctcacctatgatcttaaagctgaagaagagacaagatcatggaagaagttaattaatattgcaatttcaagtgctgcaagaatgatttctaaccatcttctcttcagacttgctataggggaagtatttggtccagatcaacccattgcattgaaactgctaggtacagagagatcaattc

SEQ ID NO: 150192 - DNA, 459 bp, Arabidopsis thaliana columbia
aaaataccctaatcacattttgtaacaattatacttttatacattaaaactctccgacgatgcctcaggcaccgatgccagagttctctagctcggtgaagctcaagtacgtgaaacttggttaccaatatttggttaaccatttcttgagttttcttttgatcccgatcatggctattgtcgccgttgagcttcttcggatgggtcctgaagagatccttaatgtttggaattcactccagtttgacctagttcaggttctatgttcttccttctttgtcatcttcatctccactgtttacttcatgtccaagccacgcaccatctacctcgttgactattcttgttacaagccacctgtcacgtgtcgtgtccccttcgcaactttcatggaacactctcgtttgatcctcaaggacaagcctaagagcgtcgagttccaatgagaatccttgacgt

SEQ ID NO: 150193 - DNA, 449 bp, Arabidopsis thaliana columbia
gccgtaacctccgccagtgaaaccctaaactcctctttccgttatttcactgttcatcaatcgctctgcgtcactcttcctagcaagctcctttaattttcctctcaatccaatcgtgattttgcatacccatcaggtttcagaaaaactgaaataatggtgtataagcgcaagtcaatggagaagaaaaaggaaggcatgggttctactattgatcaaaacctgagctttaagaatattatgaaagatgttgcactctttggttcttcgcatatgacatggaaggataagaaagcactggaggataagaaagtgactgcacttggtggaaaggcacaaaagatgcataggctaccgctgagtgtagctcgagtgcagatgaagaaacagaaagatagagaagagaagatgtttgaacagaatgtgattcttggcagatttggtggggg

SEQ ID NO: 150194 - DNA, 413 bp, Arabidopsis thaliana columbia
gaaaatcaaagcagcagttatggccgacgtagcaacaaagcaccccatggaagatgaggtgaagaagacggaggcgtctagtttggtggggaagctagagacagacgtggagatcaaggcttcggctgataagtttcaccacatgttcgctgggaaaccacaccatgtctccaaagcaagtccaggcaacattcagggatgtgatctgcacgaaggcgactggggcacagtcggctctatcgtcttctggaattacgtacatgatggggaggcaaaggtggcgaaggagaggatcgaggcggtggagccagataagaacttgatcacgtttagggttatagaaggtgatctgatgaaagagtacaagagcttcttgctcaccatccaggtgacccctaagcctggaggccctg

SEQ ID NO: 150195 - DNA, 386 bp, Arabidopsis thaliana columbia
atcgaaaagatttttttttttttttaattacaaattaagaaagcaactccacccaaagttaattgcggataactgatatgacacagagagaggctctatgatataagtaagtaacacaagagagaattatcttcttcttccatttttattggaccaaaaagaagatagataacaaaaatagaaaaatctaaggtgtgggaagctctgcagctcatccattcatggcgacgacgatttccactacagctaccggaactatgtgtgcggctccttctgtccctacaatctctcccttactcagaacgactcaccaatgtcaaccatctccttctttatcatccccattttctataaaagctagtacggctctggtttgcggagacact

SEQ ID NO: 150196 - DNA, 465 bp, Arabidopsis thaliana columbia
  unsure (1)..(465): unsure at all n locations
gtgagtctcttctctctctcaaatccactccgtattaagttcataatctatcatccaccatggagaaaacatcaatgttctccattcacgaaggaaagccgattcgatgcaaagcagcagtatctagaaaaccaggagaagcattggtgatagaagagatccatgtggatccacctcaagcttatgaagttaggataaagatcatatgtacatctttatgtcataccgatgtttctttctcgaaaatagacagtggaccgcttgcaaggtttcctaggattctaggacacgaagcagtcggtgtgatcgagagcattggtgaacatgtgaatggatttcaacaaggtgacgtcngtttgccagtgtttcaccctcactgtgaagaatgtagagattgcaaatcctcaaagagcaactggtgcgcaagatttgccgacgatttcctatcaaacacgagacgatatg

SEQ ID NO: 150197 - DNA, 396 bp, Arabidopsis thaliana columbia
gcgtccgcccacgcgtccgaaaaaaaatcggaactttgggatttatggtaagacaccgaagaacacacagccattcgtctttattgaccgctgggcttgtttctctgtcacatacgaatcggggaaatttggatcccgatcgtgatctttagtttggtgaatttgagctggaattggagcttaaaggatcggttttttgactgatctaattgttttgaggatcggtctttcataaagttgttgtctttgaagcttttttgactggtgaggacgaaaaagttgtgattttgggaattagggttgttttgtttcgaattcgccatggatacgagcaggagagctgtggaatcgttttggaggtcgcggatgatagatgcggttacgtctgatgaggac

SEQ ID NO: 150198 - DNA, 226 bp, Arabidopsis thaliana columbia
gcgtccgctcaagctaaacgttctcgtatcatcgaactctcttttagattgaggcacagaggtcctgattggagtggactccattgttatggagattgttatcttgcccatgagcgtttagccatcattgaccctacttcaggagaccaacctctctataacgaagacaagaccgccgctgtcactgtgaatggagagatatacaaccacaagattttgcgtgaaa

SEQ ID NO: 150199 - DNA, 330 bp, Arabidopsis thaliana columbia
  unsure (1)..(330): unsure at all n locations
ggncaacaacgtcgagaataatggcatcatctctttttgctttttctgccatcgctgccattggttctggagagtttcttgggtggtaagagactgaggctgaagaagaagttgactgttccagctgtgtccaggccagatgcgtctgtgcgcgccgtcgcagctgatccagatagaccaatctggttcccgggaagcactcctacagagtggcttgacaggtgccatcctggtgacttccgatctgatcctctcggtctatcattggacccggacagcctaaaacgtaacgtgcaagctctggaagtccactgccgattggctatgctt

SEQ ID NO: 150200 - DNA, 298 bp, Arabidopsis thaliana columbia
acccaccggccgaaacacacatcatacctatatttggcactaataaacatattttatggatatgagaatcaactggaacgggggtagggttctacggaaagggtgcaaccaaaaatgcaccattcgaccattccttcaatggaacaaatacgcagactcttaaaccaatgctacactcttccttgctaagatctaccgtcgagcccgtcttcttaacctcatctaatacggtcctgatcacactttgtccgcaatatttaagtgacatttgtacaaggcttttggtctcatcgtgaac

SEQ ID NO: 150201 - DNA, 410 bp, Arabidopsis thaliana columbia
cgaccacgcgtccggaaacggagaaggagaaagaggcagagatgggagtagagattcaatcgccgcaggaacagagctcttagaccgttgagcagctcgtggcccttaatcctttcaaccctgaaatcctgcctgatctcgaaaactacgttaacgttacatcgcaaacgtatagtctggaagtaaacctatgcttgcttcggctctatcagtttgagcctgagcgcatgaacactcatatcgtggctcgaatcttggtcaaggctcttatggctatgccaactccagacttcagcctttgcctcttcttgattcccgaaagagtgcaaatggaggagcagttcaagtcactaattgttctatcacactaccttgagactgggaggttccaacagttctgggatgaagct

SEQ ID NO: 150202 - DNA, 423 bp, Arabidopsis thaliana columbia
caacaatcagatgtttcgaattcaacaactagcttatgccataagattcatcccggagaaacaggaacgatgacaacacagtaaacatagaagaacagagaaaaatctctgttttaagcaatactacaaatggatcctctgttttatcctcactctctatttttttgcttccttctttgtcgaccatgatcaagatcatagatcttctacttccatatcaaagcatcttcttactaaccataaacctaagcttttcgcttctcgtgccatgtttgaatctaaaatccatgatcacaaacttgggtttacctctcaacaacctaacatcaaaacagacgtattcaacaatttgaaaatctacgtctatgacttaccttcaaagttcaacaaagactggttagccaatgatagatgcaccaacca

SEQ ID NO: 150203 - DNA, 327 bp, Arabidopsis thaliana columbia
gtttttcttcagctgtggatttcttcaattaggtgtatctgttatttggtacacttaccgagggttgcaccccggagaagtggggtacaatgactgctggtcccaagtacagatttctcttcttcattatataagtaattttggtgctcatgattgatatagtaatttgatcactgttttctcttaagatcttgaatacaaaaaactttgaaactgctggagcaatatgggcatttgtaaagtggaaaagagtctttgtttttgagtgacaattatctcgatgatcaactactgactcatatgtaactattccattggtgaaatgcg

SEQ ID NO: 150204 - DNA, 447 bp, Arabidopsis thaliana columbia
cgctcttctaattttgccctcaaaacccttcaattattacgaaaacgccactgctctgtcggcgggactccggtgaggccgtttgggccggaatctgacaagggatatggatgtaggagttactacggcgaagtctatacttgagaagcctctgaagcttctcactgaagaagacatttctcagcttactcgcgaagattgccgcaaattcctcaaagagaaaggaatgcgcaggccttcgtggaataaatctcaggcgatccagcaagttttatctcttaaagctctctatgaacctggagatgattccggcgccggaatcctccgcaagatccttgtttctcagccgccaaatccgcctcgcgttacaacaacgttgattgagccaaggaacgagctcgaagcttgtggaggattcctttacaggaagatgatggtgcgtgccat

SEQ ID NO: 150205 - DNA, 415 bp, Arabidopsis thaliana columbia
aaacgaaacaaaacttttgctgcggcgattatcgttaattcgaaatggacgacggagaaggcatggaaactgcagcggcggagcttgagagactccaaattgaaatcctccacaaaatctccattcttgagagctcttttctcccacagaattcctctgctgctccgtcgccttctctaccggttgatgaaaacgaaactgtgactcgcctctccaccattctccagtccggcggcgttaacgacttctgcttcaagagagttgctaccgattactatgactggcctctcgaatctcgtcgcgacgttctcggcgctttctcagtcgaccatctctgcaagagtattgttctggttaatactcaagctgcatcaaatattttggattgcagtgatccaaacaactcaaaatacta

SEQ ID NO: 150206 - DNA, 382 bp, Arabidopsis thaliana columbia
tcgcgttttagtttacaatcttcatcaccaagaaggtgtggcacatggtcagtttgcattcacaactcaagaagctgggaactacttggcttgtttctggattgattccagtcatcacttagccaatcctataacccttggggttgattggaagatgggtattgcagctaaagactgggactctgttgctaaaaaggaaaagatcgagggtgttgagcttcagttgaggagactagaagggttggggcttgcgattcgtgaggacctaaactatataaaagacagggaagcggtgatgcgagaagtgagtgaaacaaccaactcaagagtggcttggttcagtataatgtcactcggggttagcgttgtggttggggttcac

SEQ ID NO: 150207 - DNA, 396 bp, Arabidopsis thaliana columbia
  unsure (1)..(396): unsure at all n locations
acaagaagacctncctcttttactttttaccgatcaatcacancaacgggcgcggcagcgtcacttctgtgaaacaccttcncttgtcaccgccagtttcctcaacctccctaccacccttaccactgcggattccgatctcgctcctccgcaccgcaacggagacaattccgttgctgatacaaacccacgctggctctcctttcattcggagatgcaaaatactggagaagtacgttctgaagttatcgacggagtcaacgccgatggtgaaacgatactcggcgttgtaggaggtgaagattggcggagtgctagctataaggcggcgattttaagacatccgatgtacgagcagcttcttgcggctcacgtggcttgccttagggttgcgac

SEQ ID NO: 150208 - DNA, 424 bp, Arabidopsis thaliana columbia
  unsure (1)..(424): unsure at all n locations
cccacgcgnccggaaaaaagcttatcgcggcgattagttcccggcgattaagattaagagagataagaaaatggcgactaatggatctgctagctcagcgcaggtctctcagaaggaagctgatgtcaggatgatgtgtgccgctgaggttcatcttggaaccaagaattgcaattaccagatggagcgttacgtcttcaagagacgcaacgatggtatttacatcttcaaccttggcaaaacatgggaaaagctccagatggctgctagagttattgttgccattgagaacccacaggacatcatcgtccagtcagctaggccctatggacagagagctgtgttgaagtttgctcagtacactggagccaatgccattgctggaagacacactcctggtaccttcaccaatcagatgcagaca

SEQ ID NO: 150209 - DNA, 387 bp, Arabidopsis thaliana columbia
cgaaaaaaaattgtttgaagagggtggagactgggatttgaatttaccggctaaaggtctatgaagggttgggctgcatgtccaccagagattgtaagaacgctgccagcttattcctggattctatatcaaccttcacaacatatgaaatttttccatatgagaccttcatattctacaccgtcctgacaagcatcataactttggacagagcttcccttaagcaaaaggtcgttgatgcacctgagatcttaaccgagcttgggaagattccattcctttctgagtttctgaactccttgtatgagtgccagtacaaggcgtttttctcagcatttgctggaatggcggtgcaaataaagtatgaccgttacttgtacccgcatt

SEQ ID NO: 150210 - DNA, 250 bp, Arabidopsis thaliana columbia
  unsure (1)..(250): unsure at all n locations
cgcttccatattgtcacacccatcaataaaattgatgtattctttggctatggntnggagataaagtaaactgactttcaaggttggagactttgagggaccaattgttattttcaaagatgtttcgttccagtaagacaattcttgtttcaacttggtttatatctttcatctaaaacatttccggctgctcttgagtcatggatgttcgaccatgaaaacttgtcagtaaaacaacaaaattgtggtc

SEQ ID NO: 150211 - DNA, 412 bp, Arabidopsis thaliana columbia
ctgagatcagattaatctctctgtgaagttcttgttcgaaaccctagttcccatggatctctgttcacgcttctcatcgagcctgatccttctcttgatctccatctccatagcttcggctgagattcgtaaatcagagatccgatccgatgatcgtccaatcatccctttagacgaattcggtttcactcacagcggtcgtcttgagcttgacgcttccaagatctggctttccaacagcaatcccgatctcgatctctccaaagtgggcttctttctctgcactagagacgcttgggttcatgtgatccaacagcttgaagaagaagagatcacgtgcgctctacaatcagatctcgttaagcatgtgttcaccttcaacaatctcaagggaggagataagagcagattc

SEQ ID NO: 150212 - DNA, 460 bp, Arabidopsis thaliana columbia
  unsure (1)..(460): unsure at all n locations
tatataagaagaaccagncctctgctacgatttttattatcatcatcatcatcatcatggtcaaatcgattcgattctgcgaaaccacttttcaattctcatcggattatttctcttccaatttctacaacgggagctaaactatctagatcggagcattcaatggctgcttcttccgaacccaaatctctttacgatttcaccgtcaaggatgctaagggaaacgatgttgatctaagcatctacaaagggaaggttcttttgattgtgaacgttgcttctcaatgtggcttgactaattcgaattatactgagcttgcgcagctgtatgagaagtacaaaggccatggtttcgagattcttgcgtttccgtgtaaccagtttgggaatcaagagcctggtactaatgaagagattgttcagnttgcttgtactcgtttcaaggctgagtacccgattt

SEQ ID NO: 150213 - DNA, 324 bp, Arabidopsis thaliana columbia
  unsure (1)..(324): unsure at all n locations
cccacgcgnnngnnaaaaaccgcaagaaagcccacaagatttttccttttatggcagatccaagntctgctctcggtcctctttgcgagaagatctgagacaaaaactattttctaagagttgtggatctcacgattctaggctttctcttttctcttctcttgtaccgaatactacttatgaaccaaaacaactccgtttgggttgtggctttcctctgtgaatcctttttcttctctcatatnggcttcttattaccagcataaaagggagtcctgcttcatataaatcatatcctgaaagacttgatgaaagggttcatga

SEQ ID NO: 150214 - DNA, 270 bp, Arabidopsis thaliana columbia
  unsure (1)..(270): unsure at all n locations
ccacgcgnacgataaaggcaaaagcaatagacgctctgttttagctttcttgtccaaaaancgagaagacctatgttgaccaccttctgcgacgccggtgtagcccacgcttgccagcgtcgggatttttccttccctgcttctctctatttcacattgctatctgcttcccctcttgtgcggccgtttcctcaatcatctagtgtaatcaagcgtcttaaagtggagaacggcatttcatcctccatcatactcagatctatcgacgct

SEQ ID NO: 150215 - DNA, 150 bp, Arabidopsis thaliana columbia
  unsure (1)..(150): unsure at all n locations
taaaacacaaccangactgtttctttttcttcatgggctctcaaggctctcttgctaatggtttcttcaacaatggtaatggctattcctccacgcaaggccattgatgtaccatttggtcgtaactaacgtccaacttgggcttttgac

SEQ ID NO: 150216 - DNA, 190 bp, Arabidopsis thaliana columbia
accaaagattcgggtacatgatctgacccgagtcgccgatgatggatctcggatcttgaaaggagttacgatagatataccaaaaggtatgatcgttggtgtgattggacctagtggaagtggaaagtcaacgtttttgagatctctgaatcgtctttgggaaccaccggagtcaactgtgttcttggac

SEQ ID NO: 150217 - DNA, 388 bp, Arabidopsis thaliana columbia
  unsure (1)..(388): unsure at all n locations
cggnagggtcatatggtttaacttgggctttgaaattttcaagtttggttgagaaactcgcgatgcttaatagtccgctgaccgttgcatccgcagttcccggattatttaagcagctgaggattcccctgtttggtgaattcacctgccaaaatgctatcttggccgagcggttcattgaaggaggtagcccctacgtcctgaagaatgagaaagctgatgtgtatcgtctaccatatttgtcaagcggagggcctggctttgccttgctcgagactgcgaagaagatcaactttggagacacattgagtcaaattgcaaatgggttttcatcaggcagctgggataaacctacgcttctggcttggggaatagctgataaatatct

SEQ ID NO: 150218 - DNA, 375 bp, Arabidopsis thaliana columbia
  unsure (1)..(375): unsure at all n locations
ggcgaaacacaaagcaangggctctncnncnccatttttattttttacagagcaccaccatccgctggtggctctgtttatctaggctttggctgtttcttcctctactttttaaatttctcaaacgctcaatcatcgccggttttcgcctgcgacgtagctgcaaacccttctctcgccgcctatggtttctgcaacaccgttttgaagatcgaataccgagtcgctgatctggtcgcgaggctcacgttgcaagaaaagatcgggtttttagtgagtaaagctaacggcgtgactcgtcttgggattccaacgtatgaatggtggtctgaagcacttcacggcgtttcttacatcggacccggcacgcatttt

SEQ ID NO: 150219 - DNA, 313 bp, Arabidopsis thaliana columbia
  unsure (1)..(313): unsure at all n locations
gagaaagaaccagagagagaaaccngagaaattttaatattgctacgaacatngggatgagggattgtgcatatttcgtcgggagatcggagattctggcttggattaactctactctccaactcaatctctccaaagtcgaagaggcttgttcaggcgctgttcattgtcagctgatggattcggtgcatcctgggactgttccgatgcacaaggttaactttgatgcgaagagtgaatatgagatgattcagaactataaggttcttcaggatgtgtttaataaactcaagatcactaagcacatcgaagt

SEQ ID NO: 150220 - DNA, 410 bp, Arabidopsis thaliana columbia
  unsure (1)..(410): unsure at all n locations
ctttaagtaccaaaaatggcgggctacattctcgatgctatcgaagcggcaccttngaaagacgatctgtatattgtgatcccaaccatcagaagcctcgactttctagagcaatggagaccatttttgcaccattaccacctgatcattgtccaagatggagacccttccatcaagatccgagttcccgagggttatgactacgagctctacaaccgtaatgatatcaacaggatccttggtccaagagctaattgtatctcctacaaagatggtggttgtcgctgctttggcttcatggtttctaaaaagaagtatatctacaccattgatgatgattgctttgtggcaaaggatccaagtgggaaagacatcaatgtgatagctcagcacataaagaaccttgaaac

SEQ ID NO: 150221 - DNA, 334 bp, Arabidopsis thaliana columbia
aagaacccaaaggcagagaaaagagatttcacacacaaaaaaaaatggcatcaaccgcactcctcaaggcttctccggtgttggacaaatccgaatgggtcaagggacaaagcgttctcttccgtcagccttcttccgcttctgtcgtcctccgcaaccgtgccaccttcctcaccgtccgtgccgcttcctcctacgccgatgagcttgttaagacagcgaaaactattgcgtctcccggacgtggaatcttggcgatggacgagtcaaacgcgacttgcgggaaacgtttggattcgatagggctagagaacactgaggcaaatcgtcaagc

SEQ ID NO: 150222 - DNA, 475 bp, Arabidopsis thaliana columbia
ctgctgagagcaaactttccctagtggaagtgtgaacccgttcttggtgagaatccagcgaagatgaagcgtttaaaatcaacagtggagaagacaggggaagcggagttatctcttcgggagtccctagaggcaaaagaggctcttcttaacagagctctctctgagaccgaggttttactgctcttgctgttccaaagtttcttaggtgtactgaaggaacggctcccagatccaactaaagtgagatcagtgcaggatctaaaatctataggtgctgaagatgacaagccatctgcgatggacgtggacagcgagaatggaaacccaaagaagagttgcgaagtcggtgagagagaacagtggtgcttatcaacacttggctatctcacggcatttacaaggcaatatgcgagcgagatatggcctcacatggagaagttggagtcaagagtgttctcgggtgaagatgtgc

SEQ ID NO: 150223 - DNA, 611 bp, Arabidopsis thaliana columbia
  unsure (1)..(611): unsure at all n locations
ccggnnnccggaanncccgggtccgaccccacgccgtcncnnggaattccaaacaaagtttnngttgtgcttttctcgtgtattgttcattnnnttgtgnnngccattgnntcaccgcgaggggcgaggtcttgaagaaaagtgtccaagaggagacccanatattaggcaccnnntctcttnnncaaaatctactttaacannaaggcatnntggagcttcnnngctttctgcttgcnntggtcttaccttaccagcggcnnagcagtgtcttctaggcttctgcnttagtgcttttaaccaatccnncaaaggtccaggggccatgtgcattccgaaaggtggctacacaaagtaccaatcgggaccatagtcattgccaagtggtctgcaaggcaaaggagtttcttctgcaagttgccttctgccgctacaaggtgagtgctgcaagctgcaagtgacctcgcaaaagctgcttgcttgcacgtgctaaagggtaagtgtaagcttccgcatcaagtggtgaagtggttccctctgagaaagaagaagaaaggaccacaaaaggaaaaaaggattgagcgtgaggtcatttcatattcttatgcatt

SEQ ID NO: 150224 - DNA, 192 bp, Arabidopsis thaliana columbia
  unsure (1)..(192): unsure at all n locations
cacgcgnacgatggggattgctgatggccantatttctgtttacttttgngaagaaactcccttgcaggtncgcttaaattttaaagctgcttggattgattcaattggcttatcggtggctgctgctgtgctagtgattcttctgactcgatattttactggtcacactaaagacaataatggaggtcctt

SEQ ID NO: 150225 - DNA, 298 bp, Arabidopsis thaliana columbia
gagggccgacccacgacccacgcgtacgtgagaatcataagacgagatcctggtgagtcgtacttcctagttttgcgacgatgaattccggggttcccaagaaactcgtcgttgctccttctcgcacaaatctttcagtgaggagccagagatatataggggctggatctgatgcgagtaagaagagctttggttctggacttagagttcgtccctctcagaaattgattccaaatgctgttgcgacgaaagaggcggatacgtctgcgaccactggacatgaactattgcttttcga

SEQ ID NO: 150226 - DNA, 407 bp, Arabidopsis thaliana columbia
tgacaagtacagaggactatacacaaattctatcctaaatgcaaaagctttctacatgtcatctggttactcggatgagcttctttgggctgcagcttggctacaccgcgccaccggggatcagtattacttgaagtatgctatggacaattccggttacatgggaggaactggctggggggtgaaagagttctcttgggataacaaatacgccggtgttcaaatccttctctccaagatcttgttagaagggaaaggcggtatatatacttcgacattgaagcaatatcaaaccaaagctgactacttcgcttgtgcttgcctcaagaagaatggtggctacaacattcaaacaactcctggtgggttaatgtattggtagagagtggaacaatctgcaatatgca

SEQ ID NO: 150227 - DNA, 480 bp, Arabidopsis thaliana columbia
  unsure (1)..(480): unsure at all n locations
aaaaacccccaaaacctttacattcttaacaattttaaccttatgggcttacttgatcatctgtggggggatactgtcgctggtccacggccagagaacggccttggcaagcttcgtaaacaccataccttcagtttccgacctagctccggcaatgatcaatcggaagctggaagtgcgagatcgtacggtgaggattcgctaccggaagaagcagtgaaagttacacgtagtatcatgataattaaaccaccgggttaccaaggcagttcagcttccagcttcgcctgccggttcaactccgccgctatcacctttctctccgccgctgtctccgntctctgagcaaacgcagggggaaaggaacccccttcgtttaggagacggtcgacgtccgatgcgttcgagaaggcagcaggaggatcagagactgtaccaaggagctctncttctacttacggcatgtgatctcttacacac

SEQ ID NO: 150228 - DNA, 483 bp, Arabidopsis thaliana columbia
aacgtgagaatcagaagaagaaatctcggtgagcataattcctagttttgggatgatgtttccacgactacgattgacgaaggtcttcttctccccgatcatcgccgggaaatggatcgtctttgccgacggtagcagcggcggcggcgttggtagaaatggctactacggtggattgtggtcgtcggccgttattccttccaatgttggtttagctgtcgctgtcaccgtcatggccgtggccgtcgctttcaccgtctactctcgtagaggaagcattggatcaccgtggtcactaaggagaagaaagcgagttcttcaacctaaacaatggaatgcttttttcacagaggaagggcgactcagtgatggaggtgtcaaatttctgaagaaagttcgtagtgggggtgtacatccaagcatcagaccagaaagtttgccgttccttcttggagtgtatgacttaaagagcaacaaagaaga

SEQ ID NO: 150229 - DNA, 465 bp, Arabidopsis thaliana columbia
  unsure (1)..(465): unsure at all n locations
tttctctgtaatttgtcttcgtctctaccttccatctctctcacccactctcctcggaaaccacagcgacggacggacggacggacgataaaacttttgcctctaatttgctcctacaaatctggaatcagccggagcgaatctcgaagcttatgatctcgacttgctgaagaggctgggaatggctggtaaagaggagactgatgtatctgcacaagggtctttaaccagggaggccactgagatatggaggagtgagttggaatctcgccggtttcaggtagatagtttagaagctgaacttgtggatgtcaaggcttaccttgagtttggctcagaagaagatgccagaaaggagttaggagttctttcgggtagggtcagatcgactgcaactatgttgcgttatttgagatcaaaagctagagtcttggccattcctgatgatctagcanatgtgtcatg

SEQ ID NO: 150230 - DNA, 449 bp, Arabidopsis thaliana columbia
caccattgtttttctctgcaaaactaaagatacaaaaaaagaaaaatcggagaaaccaagaaaaaagaaatgggaagtgtagaagcaggagaaaagaaggctttaggatgggctgcaagagatccttctggtgttctctctccttactcctacactttaaggagcacaggagcagatgatgtgtatataaaggttatatgctgtggaatatgccatactgatattcaccaaattaaaaatgatcttggaatgtctaattatcctatggttcctgggcacgaggtagtaggtgaggtgtttgaagtgggatcagatgtgagcaagttcaccgtaggagatgtagtcggagtcggcgtggtcgttggatgctgcggtagctgcaaaccaatgcagctcagaacttgagcagtattgtaacaagagaatctggagttacaacgatgtctaca

SEQ ID NO: 150231 - DNA, 286 bp, Arabidopsis thaliana columbia
atttattttagttttttcgtccaacgtaaacgtatctactctttcgcttcttctttcttctgatcatcctcccgtagctgattcatggagtcaatccactgcaatagtttactaaaccctaatttctccttaaaccagcgtcgtcggaggattaatcacgctgttcttaatcggagagatgctcttttgcgatccctcaacgccgtggagttgcggcggagcacgacgttctcggctgtacggacttctaatttctcagatactgcggcggcgacagatgttggtg

SEQ ID NO: 150232 - DNA, 445 bp, Arabidopsis thaliana columbia
  unsure (1)..(445): unsure at all n locations
ctactctctttaaaagaaatttgtaagtactatcaagaagcagaagatggcccaaaaggtggaagcacaaggagggaaaggagccaacctatgggacgatggatcgacacatgacgccgtgaccaagattcagctcgcagcaggcatagacggaattcaatatgttcagtttgattatgtcaagaacggacaacccgaacaagctcctcttcgtggtaccaaaggccgtgttctcccagctgatccgtttgtgattaaccatccagacgaacatctagtttctgtagaaggttggtatagccctgaaggtatcattcaaggaattaagttcatctccaacaagaagacttctgatgtcattggatccgatgagggtactcacttcactctacaagtaaagacaagaagatcattggctttcatgggtctgncgggggcaatctta

SEQ ID NO: 150233 - DNA, 477 bp, Arabidopsis thaliana columbia
gatcgattagtctcatctgggtttttctccaagttaaattctttgtttctgagatggatcaagcttcgtcttcttcgactatggaggaagacaagaagtcttccactgatcctgtgaatgtcgatgataacgaggagagagaagctatagagattgctctgttccaagtgcctgaatgctatgtttatttgatacctccaaggaaaaccgcagcttcgtacagagcagatgagtgggacgtgaacaaatgggcatgggaaggagctttgaaagtggtgagcaaaggagaagaatgcattataaaactagtagataaaaccacaggggaaccttacccctcaggcatttctaagagagggggaacttcatcctgtagaagcagtaatcgacagtagcagatattttgttctccgtgttgaagaaaagatagatggtcgtgttcgacatgcttttatcggactcggattcccggaaaga

SEQ ID NO: 150234 - DNA, 387 bp, Arabidopsis thaliana columbia
  unsure (1)..(387): unsure at all n locations
gcaagccaaagaacctagactaaaatcaatagacacaagataggaaaatgaagaagcaaaagatgacagcctttgttaaagaactcaacttacggatgaattcgaagaaagaaccgataagtctccgatacattcacatccttggcaccgntgtcttcttctcctctgtctcctctctcgtcatcctccttgctttttaccttaaccaacgcctncaaacatcactcttcctcgtcgaagattatcacactctctcctcaaatcctctcacttctccttccctctctcctnctncttctccttctcctcgcagctctggtagtaatattgcagacgaagagctgatgtggcgagcagcgatggccccacgcagccccatgaagaatg

SEQ ID NO: 150235 - DNA, 296 bp, Arabidopsis thaliana columbia
  unsure (1)..(296): unsure at all n locations
ggacgttctcacagttcggcgacgttatcgattctaagatcattaacgaccgcnagagtggaagatcaaggggattcggattcgtcaccttcaaggacgagaaagccatgagggatgcgattgaagagatgaacggtaaagagctcgatggacgtgtcatcaccgtgaacgaggctcagtcgagaggtagcggcggtggcggaagaggccgtggtggaagcggtggtggttaccgcagcggaagcggtggtggatactcaagaggcggaggcggcggatactcaagaggaggcggt

SEQ ID NO: 150236 - DNA, 433 bp, Arabidopsis thaliana columbia
agaacaacaacaatggaggagatttcggagaagaagaaagttccattgacggagacatactcgagtcaatcctctcctatttaccactcctagacctcgattccgcttgccaagtctccaaatcatggaaccgcgccgtcttttactccctccgccgccttaaaaccatgccgtggttgttcgtctacaaccagagaaattctccgccgtacaccatggcgacgatggcgatggcttatgatcccaagtccgaggcctggatcgagctcaacaccgcatcatctcccgtcgaacacgtctccgttgctcgatcctctcactccacgttgctctacgctttatctccggcgagattctctttctcaaccgacgcgtttcatctgacttggcaacacgtggcaccgccgagagtttggaggatcgatccaatcgt

SEQ ID NO: 150237 - DNA, 471 bp, Arabidopsis thaliana columbia
agagatagagagagaagagaaagatagagagggagatggggtctcatatggtttggttgctatggcttgtatccttcttgtgtgtgttcccagctccatctgagagcatggttcgccactacaagtttaacgttgtaatgaagaacgtgactagattatgctcaagcaagccaaccgtgaccgtcaacggtagatatccaggtcccacaatctacgcacgagaagatgacacgttgctcatcaaagtcgttaatcacgtcaagtacaacgtctccatccactggcacggtgtgagacaagtgagaacgggatgggctgatgggcctgcttacataactcaatgcccgatccagcctggtcaagtctacacatacaactacactttgaccggccaacgcggaacgctctggtggcacgctcatatcctctggctccgagccactgtttacggtgcattggtcatcctttcca

SEQ ID NO: 150238 - DNA, 479 bp, Arabidopsis thaliana columbia
atcactatccgtcgtgtgatggcgacggagcctagtctgttgaatcaaactactccttatgatcgtcactctgttcttcatgtcgctgctgctaatggtcagatcgagattttgtcattgcttttggaacgatttacgaatccagatttgttgaatcgtcacaagcagactccgttaatgttggctgcgatgtatggaagaatctcttgtgtgaagaagctagctgaagttggagctaatattttgatgtttgattctgtgaatcgaagaacatgtttgcattacgctgcttattatggacatgctaattgtgttcaagctattctctctgctgctcaatcaagtcctgttgctgtccattgggggatatgcgagatttgtgaacataagagatgataaaggagcgactccgttgcatttagctgctcgacagagacgacctgaatgtgtgaatgttttgttggatagtggttctcttg

SEQ ID NO: 150239 - DNA, 478 bp, Arabidopsis thaliana columbia
gtagctaccctctctaatctttttttctcattcctgttcttgatagttttctagacagattgcgattaaacaaaaccgcggaacactttgaagaaatctgcgtgatttagagatggcggcttctttatcgagcagacttataaaaggaatcgctaatctgaaagctgttcgttctagcagattgacgtctgcatcagtctaccaaaatgggatgatgagattttcctcaacagtgccaagtgattcagatacacatgatgatttcaagcctacacaaaaagtccctcccgattctacggactcacttaaagatatcgttgagaatgatgtgaaggataatcctgttatgatctacatgaaaggtgtccctgaatctcctcagtgtgggtttagctcactaggccgtcagagttttgcagcaatataatgttcctatcagttctagaaacattctagaagaccaagagttgaaaaacgc

SEQ ID NO: 150240 - DNA, 475 bp, Arabidopsis thaliana columbia
gtcggatttcaaggagtattacgtacatatgcaagcagcaaagagaagccaagcacctgttgcgtcccagatggtggatgaccggataattcttgacaatactgtacttgaacaagtttctctatggaagaaaagcaaaggacttactgataaggctgtcactggccatatttgtttgggaaccaaatgttcataccatcagattgacgacgtgttcatatgcaaagagacgggaaatgttcatgtatgcgatgataactgcaaggaagtaatactgagtccagagggtgacctcatggtgtgtactatctcaggagtttgttctgatactttacttgtacaaactgagccagacgcagatgggtgttatgaggaagaagctgaactagaagctgaagtattcacagataaaagccgattagcccgagcttttgaacttggctacaactgcgatgatgagcaggaactggaacgt

SEQ ID NO: 150241 - DNA, 448 bp, Arabidopsis thaliana columbia
ctcaaagtcaagcaaaaaaaacgaaacaatggatgcgttctcttccttcttcgattctgagaccgggtagcagaagctggagctatgattctcttaaaaacttccgtcagatttctccagccgttcagaatcatcttaaacgggtttatttgaccttatgttgtgctcttgtggcgtctgcctttggagcttacctccatgtgctctggaatatcggcggtattcttacaacgattggatgtattggaactatgatttggctcctttcatgtcctccttatgaacaccaaaaaaggctttctcttctgtttgtgtctgctgttcttgaaggtgcttctgctggccccttgatcaaagtggcaattgatgttgacccaagcatccttatcactgcatttgttggaactgcgatagcgtttgtctgtttctcagcagcagcaattgtagc

SEQ ID NO: 150242 - DNA, 380 bp, Arabidopsis thaliana columbia
gcaaaggattcgtgtcaatgttcttgtgagatcgaactttctctgggttcgtgcagaagctttgcttttttgagtatcgcgtttaaggcacatcgaagaagagagaccctaatttgatattttgagttctatcgatggcttcgctactagctcgcaggtcgttcagtgctctccgagctcgacatctcgctttttcagggcaaggtttacagggatctcatctctgtgggctacagtcccgtgctatatcttatggaagcaacaaagatgatgaagaagctgagcagcttgctaaagagatctccaaggactggagtactgtctttgaacggagcatgaacaccctatttctcactgaaatggtcaggggtttgtaactg

SEQ ID NO: 150243 - DNA, 447 bp, Arabidopsis thaliana columbia
  unsure (1)..(447): unsure at all n locations
atctaccctctctaatctttttttctcattcattttcttgttagncacccagacagatttggattgatcaaaaccgaagaacgagctttgaacaaatcatcgtgaattagagattgcggcttctttatcgagcagacttataaaaggaatcgctaatctcaaagctgttctgtctagcagattgacgtctgcatcagtctaccaaaatgggatgatgagattttcctcaacattgccaagtgattcatatacacattatgatttcaagcctacacaaaaagtccttcctgattctaccgtctcacttaaagatatcgttgagaatgatttgaaagataattccgttatgatctacatgaaaggtgtccttgaatctcctcatagtgggattagcttactagtccttagagtattgcagcaatataattttcctatcagttctataaa

SEQ ID NO: 150244 - DNA, 405 bp, Arabidopsis thaliana columbia
atcttctctacattcgtctttcatcgcagacaacatatcttcaatcttcgtcaattccaaaccaccacaatccttcgcaacccaatctccatcgctccgatccagattccgatggacgccaccgagcagtctctccgtcaatctctttccgagaaatcctcatccgtcgaagctcagggtaacgccgtccgagctctcaaggcttcccgtgcagctaaaccagaaatcgatgctgccattgagcaactcaacaaattgaagctcgagaaatctaccgtcgagaaggagcttcagtctattatcagtagctccggtaatgggttcgcttaaccgtgaggcttttcgaaaagctgttgtcaatactctcgagcggcgtttgttctatatcccttcgtttaagatcta

SEQ ID NO: 150245 - DNA, 464 bp, Arabidopsis thaliana columbia
  unsure (1)..(464): unsure at all n locations
atggtttcttcttctttaaccaagcttgtgttctttggttgtctcctcctgctcacattcacggacagccttgtggctggaaaatctggcaaagtgaagctcaatctttactacgaatcactttgnnccggttgtcaggaattcatcgtcgatgacctaggtaaaatctttgactacgatctctacacaatcactgatctcaagctgtttccatttggtaatgccgaactctccgataatctgactgtcacttgccagcatggtgaagaggaatgcaaactaaacgcccttgaagcttgcgcattaagaacttggcccgatcagaaatcacaatactcgttcatacggtgcgtcaaaagcgatacgaaaggctgggaatcatgtgttaaaaactctggacgtgagaaagcaatcaatgattgttacaatggtgatctttctagaaagctgatacttggtacgca

SEQ ID NO: 150246 - DNA, 483 bp, Arabidopsis thaliana columbia
gaattgtgtaaaaccactccaatggcgattctggacaaattgtttcgagcatctcgagcatggcgcggatcactctctcattctaaatccatggttccttcgcaatcaccacgggcacgagagcttcgtcgctgtttccaccacggaaactttgagcagagtaattcaaaagtaaatcaagtcttgagatcttgcagcaccctaaacgattctccatacttttccatggcacctgcagttttgggtgctctctttagcgttggagtaattggagtagcttatgctgaatctgatgaggctaataatgacaagtcttctgccccaatagatcctaatgacgaaacgtcatctgccccaatagatcctccaccaaactatgtaaacctttgccaagaaagaacgagctcgagttgaagaacttatacaaagtaaaggaactcaatatggttcttacccacggttcaatgttgctgtaagaggtca

SEQ ID NO: 150247 - DNA, 473 bp, Arabidopsis thaliana columbia
gctaaattgagacaagctcaaaatgagtaatctttatagtgaggccgttcgtgaagcgagtcaggactatcacagggaaatccgaggcaaagaaacgtaactttgtcgagactattgagctccagatcggtctgaagaactatgaccctcaaaaggacaagcgtttcagtggatctgtcaagttaccacatatcccccgtcctaaaatgaagatctgcatgctcggagatgcccagcatgttgaagaggctgagaagatggggttggaaaacatggatgttgagtctctaaaaaagcttaacaagaacaagaaactcgtcaagaagcttgcaaagaaataccatgctttcttggcctctgagtctgtcattaagcagattcctcgtcttcttggtcctggtcttaacaaggcaggaaaattcccaactcttgtgagccaccaagaattccttggagtcaaaggtgaatgaaac

SEQ ID NO: 150248 - DNA, 435 bp, Arabidopsis thaliana columbia
cccattttcttctcattttttttttgctcttgactttagaaaccaaaaaaaaaaaaaagggagggagatccttcatatccaaggcggtcaatgtggaaaccagatcggagcaaagttctgggaagtgatctgcgacgaacacggcattgatcacaccggtcaatacgtcggcgattctccgttacagcttgaacgtatcgatgtctatttcaacgaagctagcggtggaaagtacgttcctcgcgctgttcttatggatctggagcctggtaccatggattctctcagatctggtccgttcggtcagattttccggcctgataacttcgtctttggtcaatctggtgccggaataactgggcgaaaggtcattacaccgaaggtgctgagttgattgattctgttctcgatgttgtgaggaaggaagctgataac

SEQ ID NO: 150249 - DNA, 398 bp, Arabidopsis thaliana columbia
tggtaatggagattgtcgctctaagtcactgtggttttttcttcgctatttagaaacgagtgggtcaactgcttcgttatttctaaatctatttgccactacctcttgttgctgcaattgaattggctcaaatcttcttcacttggtcgacagtaaagacgactttgacttggtttttaacttcacttctccgtcgaaaactatcccttctcttccgatcgaatcaatcggctctatctccacacagaccaagccaaatatcttctcctgatactggagacaaacctgcatacatttctgtgatttatgctaagtggcacaagtatttaagaggctccatcttcactgcaccactgagaagtttcgagtggacatgtctaagcttagaattggtttgg

SEQ ID NO: 150250 - DNA, 416 bp, Arabidopsis thaliana columbia
  unsure (1)..(416): unsure at all n locations
ggaggaaggagaaatgataggtttattaactgagagtagcagcagtcatatggcagtcatatgtctccggttaatgcggaggttgaggagatgagatcagagtcgccggtggttaatgataaggcgttagatatttctgatgatgatcatgatgatgagaatgaaccgcttattgtttctggtgaatgtcgtatttgttctgatgagtctcctgttgagaatcttgagagcccttgtgcttgcagtggcagcctaaagtatgctcatagaaaatgtgttcagcgttggtgcaatgaaaagggaaacattatatgcgagatttgtcaccagccttatcaacctggatataccgctccaccacctncacttcagcctgaaaaaacaactattgacattggtggaggatggacaatctc

SEQ ID NO: 150251 - DNA, 482 bp, Arabidopsis thaliana columbia
ccggcttctggaaatttccgtttatccgattcgttctcacgagatgatggctcgttaccacaggagatcgatgatcttgtgcttagttctgctctcattaagcatatcgccgagccaaggcttcctagggacagaggaaaagatcaaatccgctgtcttttactcaccaaaacttgtgatgaatccaggatcagttgcaaatccttacttattcgacatcgatttcccaagaggtcatatcggcctcaaagctttcgatgctgaagtggttgacgaagcgggcaaacccgttcctctacacgagacctatctccaccattggattgtcgagccatactatgtacgtaaaggttccaagcttccacagagagaaatgttcaggaatcatggattttccagggaagatcctgaaagcaatcttgattccaagtcagatattattcttgtgaaaaatggagggttgtgcaggagtttaacactca

SEQ ID NO: 150252 - DNA, 369 bp, Arabidopsis thaliana columbia
  unsure (1)..(369): unsure at all n locations
gcgctctgtgnttcacaccggagatttaagagagattttattatctagaaaaagctataaactttagaattcccaataatggatccgatcgaatctttctagaacaatggcttcgagacctctaacgttaacgtcgaccatttttggaagaaagtcgtgtaccccaaacgtcaccggaagcaaaaacaagcgtatcaagcgactgcatattgtttcaaaactgttgcttcaaatggaaccgtagctaacggcggtgataacgttttacgttcgttgtaagagcaagcttagtattgttctactacagatcttagcggctaatatgactgctattgattcatattattatgtgtgttgttagatttatac

SEQ ID NO: 150253 - DNA, 437 bp, Arabidopsis thaliana columbia
gtaatcaatgagtgtttctcaaaagaaagtgtgaagcagatcatacaagcatttgaagctgaagcaagcaaagacgggaatgaatggataactccagtcatcaaaggtctaaagcgatcgtcacccacagggttgaagatagtactacaatcgatccgtgaaggtagaaaacaaacgctgagtgattgcctgaagaaagagtttcggctcaccttgaatatcttgaggaaaaccatatcccctgatatgtatgagggtataagggctctgaccatagacaaagacaatttttccaaagtggaatccagcgacattagatgaggtggatgatgagaaaaatcaactcggtgtttaagctctttgaggatgatgatattgaactacaaatccctgaaacagaagaaaacaggtggtgaggcaaatacgagacttcaggc

SEQ ID NO: 150254 - DNA, 397 bp, Arabidopsis thaliana columbia
gaacttcaaagaagagaacaacaatggcttttattttatttctggtgatgctctaaaggaccgttacaagtcctttgtcgctgagtacccaatcgtgtccattgaggacccatttgaccaagatgactgggagcactatgctaagatgaccactgagtgtggaaccgaggttcagattgtcggtgatgatttgttggtcactaaccccaagagagttgctaaggcaatcgcagagaagtcttgcaatgctcttcttttgaaggttaaccaaatcggatctgtaaccgagagtatcgaggcagttaagatgtcgaagaaagcatgttgtggagtgatgaccagccacagaagtggtgaaaccgaggacacattcattgctgacttagccgtttgcttg

SEQ ID NO: 150255 - DNA, 454 bp, Arabidopsis thaliana columbia
gttcttcatgaaagcctgagacagaacctttagaagccttctctttgaggtactgtactggcggcgatgcatggattgcagcaccgtacggaagcacatcctcgttgattctatagagtggtgaatgagacgatgcatacccgttggtctcatcttgcattcccagtagagagaaatggcccgggattgtttctgcaaagtatgagaagtcttcggatcccattacaggtgctgcttccacaaaagcttcttgacccaacaaatctctaaccaccttcttgaattgcttgtacaagtccttgttgttcactgttggtggcattggttctctaccgtttggtgttagattaacggacgcattgcatcggtgaacggctgcttgcttggtaatcacctagaatcaaaagttgaaaccggagattggttctatgggtaaagcaacaataccgggaaa

SEQ ID NO: 150256 - DNA, 362 bp, Arabidopsis thaliana columbia
  unsure (1)..(362): unsure at all n locations
ctcatattgcttatattttcctacaacattttcttatcaaaaaacantaaaaaaatggcttggttctttttttgtattgagaagaaaaaccgccaccaattacaaccagaagcttcttcttaattatgttcccgcttacgttatgcttccgttgggagttgtgaatgtggaaaatgtatttgccgacccaaaaacgcttgaaacgcagcttaaacctctcaaagaagaagctggcgctgatggccttattgtcgatgtttggtggggaatcatagaattcaaaggccccaaacaatatgattggacagcctacaaaacgctgttccagctgatcgcacacttggtactcaataaccaagcaa

SEQ ID NO: 150257 - DNA, 393 bp, Arabidopsis thaliana columbia
tgatgcctgagtctgctcttacagcacctaatgtgttgaagcttacaggaagacagcggctggaaagttgtagaggtagaggaacgacagtcattacttatgaggaagatgaggatgaagattagttagacattccttgtaccaacgaatacgatggatatcacaaaaaagatatgctgatgctgaagcctgcaaagggtacaactacacttgcttttatatataaagaaggagttatggtagatgttgattctcgagctagcatgggaggatatatcttgtagtaatttgtgaataatatttttgaagttaatagttatatgctaggtacattgtttggtggtgctgattattgtcaattttttcacataaattttggtattaaattccctt

SEQ ID NO: 150258 - DNA, 450 bp, Arabidopsis thaliana columbia
gtcccattcttttaggttttttgaagatgcaaagatggctagttctgtctcagtgtatgctgaaagatatctttgatctgtcgtggttcctgttacctttctggcggtgtcttatctccctttgttttctttttaaggtttttaatttccctattacctgatgtttttgtcgttttaaatcgtagaggtcaaggcattgttggagggaaggatggtatgagtttaattttgtgtttctggttacttctcatctacacacttttttccccctaattgttttatctaatattggctattatttgtcagtgaggtatgatttgtcctctgtgtcttatgtttcccagaattttcttcaccaatcacttcactacgtttctctgctgtgtacacacttgaaagatgatcatatattccttccaaacgaagtttgtcttataccttgtcctttta

SEQ ID NO: 150259 - DNA, 469 bp, Arabidopsis thaliana columbia
  unsure (1)..(469): unsure at all n locations
ctttcccaatcccaggaaaatcaaacttcgataagatagtttccaccatgatcagcattctcgctcaggaacgtcttcttggttacactcttggtagcgctttgactggattcatcgtttttgagcagagaaaactcatccatgactccgtttccgatcctaaatctcaatccattgatcaagctcaggtgagtgatcgtattttcgggaagaaatatcgtatggaatttgcgtctctgtggaacaaagctgtggatcagacttttgaacctgcgattgagtatcttagttcacgtaaatggtagagatggataagttctttgctgaaatatgtgcctcgtgaattcgattgttgtcgtgttcttgatgaaaaccttatctgaatacagctctgntcttgtttttgctactttcttgaaaaaagaaaatggttgtgttttactggaaatatgaagaaaagcttcttatt

SEQ ID NO: 150260 - DNA, 390 bp, Arabidopsis thaliana columbia
ggcccacgcgcccgtaatctctaactctaagcttgagtaatgaatttacatttcttcggaaacctttgatcaagcatggttctctctcttaaaacttcgaaacaattcctgatttacagactatggaaatggaatcattcatcgacgaccttttgaacttctctgtaccggaagaggaagaagacgacgacgaacatacgcaaccaccgaggaatattactcgccggaaaactggattacggccaacagactccttcggtctctttaataccgacgaccttggagtggttgaagaagaggatttggaatggatttcaaacaaaaatgcttttccggtgattgaaacattcgtcggtgtattaccgtcggagcattttcctaatacgtctc

SEQ ID NO: 150261 - DNA, 348 bp, Arabidopsis thaliana columbia
gttaatcgtaactcacagtgactcgttcgagtcattgtctctgtctttagctcaaaccatggcgagtaacaaccctcacgacaacctttctgaccaaactgcttctgatgatttcttcgagcaaatactcgggcttcctaacttgtcagcctcttctgccgccggtttatctggagttgacggaggatcaggtggtggagcaccgactatgatgctgcagacgggttcccgagcagaaggctgtcacatgggtggcttacgaggaagtggaccaactggttttgacaatcagatgttatctttggggttcagtcttgatcaagggaaaggacctgcgtttcttagacc

SEQ ID NO: 150262 - DNA, 357 bp, Arabidopsis thaliana columbia
cgttcgaagaccatttcttgttctttggacgaccatcggcgacagtgttaagtctagagtctgcttggtcttcggcgtagttttttccccggcttgaaaaatgggtctatccttcggaaagttgttcagcaagctctttgcaaagaaagagatgcgtatcctcatggtgggtctcgatgcagctggtaagactacgatcttgtacaagctcaagcttggagagatcgtgactacgattccaaccattggtttcaatgtggagactgtggaatacaagaacattagctttaccgtgtgggatgtcgggggtcaagacaagattcgtccattgtggaggcactactttcagaacactca

SEQ ID NO: 150263 - DNA, 451 bp, Arabidopsis thaliana columbia
cggacgcgtgcgttacaacaacaaatcttaaacgttttactttgggctgcactactcaacctcaatggccgcctcaacaatggctctctcctcccctgccttcgccggtaaggccgtcaagctttcccccgcggcatctgaagtccttggaagcggccgtgtgacaatgaggaagactgctgccaagccaaagggcccatcaggcagcccatggtacggatctgaccgtgtcaagtacttgggtccattctctggcgaatcaccgagctaccttaccggagagttccccggagactacggatgggacaccgcccgacctttcagctgaccccgagacattcgcatggaaccgtgaactagaagttattcacagcaggtgggccatgctcggagccctaggctgcgtcttccctgagcttttggctagaaacggagtcaagttcggagaggc

SEQ ID NO: 150264 - DNA, 400 bp, Arabidopsis thaliana columbia
cgccgttgtctgatattgagagagagagagagatttaaaacttcttctggttccttttatcaagattttttctctctcttaaaacttcgaagcgatttttgatttacagactatggaaatggaatcattcatggacgaccttttgaacttctctgtaccggaagaggaagaagacgacgacgaacatacgcaaccaccgaggaatattactcgccggaaaactggattacggccaacagactacttcggtctctttaataccgacgaccttggagtggttgaagaagaggatttggaatggatttcaaacaaaaatgcttttccggtgattgaaacattcgtcggtgtattaccgtcggagcattgttctataacgtctcttctgaaagaagagcgactg

SEQ ID NO: 150265 - DNA, 473 bp, Arabidopsis thaliana columbia
caatctctaactctaagcttggtaataaattcacatatgtctgaaaatttttgtatggacatgaccaaaagaacgtgtaaaattggacagtgcctccatttctgaggtatgggaagtactgtggactactttacagtggatgtcctggtgagagaccttgtgatggtcttgattcttgttgcatgaaacatgatgcttgtgtccaatccaagaatagtaattattcacatacactctatatctagtcccacttttaccttatatttcatataaaagtgttacaattttgattaatttttgtttttatgcgtagatgattatctaagccaagagtgtagtcagaagttcattaactgcatgaacaatttcagccagaagaagcaaccgacgttcaaaggtaacaaatgcgacgctgatgaagtgattgatgtcatctccattgtcatggaagctgctcttatcgccggcaaagt

SEQ ID NO: 150266 - DNA, 468 bp, Arabidopsis thaliana columbia
ctcgatttcgctcttcagaaatttgacaatgaagcttgacactagtggattggagacaactatgcctgtgattggctttggatcaaacagtgagatgcttgatgggttttcgtctgcaccttcgtttgatcttcctcgtaccactgattttgatgggtttcagaaaaaagctgtggagatggtgaagcctgcaaagggtacaactacacttgcgtttatctttaaggaaggtgttatggtagctgctgattctcgagctagcatgggaggatatatctcgtcgcaatctgtgaagaagattattgaaattaatccttatatgcttggtacaatggctggtggtgctgctgattgtcaattctggcacagaaatctgggaattaagtgccgtctacatgagctggcaaacaaaaggagaatctcttgttcaggagcttcaaagcttcttgctaacatgctctattcata

SEQ ID NO: 150267 - DNA, 481 bp, Arabidopsis thaliana columbia
  unsure (1)..(481): unsure at all n locations
caaatcttaaacgttttactttgtgctgcattacttaacctcaatggccgcctcaacggtntgtctctcctcccctgccttcgcgggtaaggccaccaagctttcccccgcggcatctgaagtccttggaagcggccgtgtgacaatgagtaagactgttgccaagccaaaaggcccatcatgcagcccatggtaccgatctgaccgtgtcaagtacttgggtccattctctggcgaaccaccgagctaccttaccggagagcttcccggagactacttatgggacaccttcgttactttatctgaccgctagtcattcccaaggtacctataactataatttattcacatcaatttgggccaagcttggtaacacttgttttgatctttttcttaacttattgtttttaatccgttttcttttcctttatagacttttttatctttttatttttttatactattattcttttattttttt

SEQ ID NO: 150268 - DNA, 338 bp, Arabidopsis thaliana columbia
agataagatttttacagattctgcctcgatcaacagactctaatcagcagcaaatgtggagcgtcaccggagcattgactgtggcggtgccgcctaccgccgccgcttgccgtacgaaaccctttctcatctcctcttcctttcccaagcagacaaagaaactccatctctcttcgccttctctgtctctaccatcatcacatttctcctcctctttcaaaaccgcagctacctccatcgagcaacagtcttctgttaacaagggagagagcaccaagtaccatttcctggtagcaaacgctaaattcatgcttgacgaagaggagcacttccaggag

SEQ ID NO: 150269 - DNA, 422 bp, Arabidopsis thaliana columbia
attgcatctcaaaaaatctcagctatggctaccttctccgtttggaagctcgatgaccacccggagctgcccaagggtaagaccatcgccgtaatcgtcttagatggttggggtgaatctgcccctgatcagtacaactgtatccacaacgctccaactccagccatggattctcttaaacatggagcttctgatacttggactttgatcaaagctcacggtactgctgtaggacttcctagtgaagatgatatgggaaacagtgagggtggtcataatgctcttggtgctggtcgtatctttgctcaaggtgctaagctttgtgaccaagctcttgcttctggcaaaatctttgaaggtgaaggttttaaataccttttttgaatctttcgagacgaatactttgcatcttgttggacttc

SEQ ID NO: 150270 - DNA, 388 bp, Arabidopsis thaliana columbia
gctctctcgaagttccgtgcgactctctgctcgagtaagatctcctaccgatacaatgattaggtgagaggctaaccgcaaagaaatctgcaagtacctcttcaaagaaggagtttgctttgcgaagaaggatttcaatcttgctaagcatccgttgatcgatgtccccaacctacaagtgattaagcttatgcagagtttcaaatccaaggagtatgttagggagacatttgcctggatgcattactattggtttttgaccaatgaagggatcgagttcttgagaacttatcttaatcttccatctgatgttgttcctgctactttgaagaagtcagctaagcctggtggtcgtccatttggtggcccacctggtgatcgctcaaga

SEQ ID NO: 150271 - DNA, 436 bp, Arabidopsis thaliana columbia
aaagacttctgttttgtttttcttggtttgtagcttattttgcgttcttgaggtttaaagtcgaagagagcaacaacagctcatacttttttatattttctggtttctgtggggctcatagagagagagaaagaagagagattttatacgattatatagctattagatttttgtggtagtggtgttgtctcatgattaagagaagctttaaagaaaactcaagtttgcttctgaggaagacaattaagaaaaaggtttactattaaacgacaacgctgttgcaatcgccaccacaaaaagattcaagctatggattcgtcttacttgtggacgacttaacaaattacagatttaaaaaaaaaaggtttcacatggttctgtctttgaaaatgtgcttagcacttagatacaaagtaaaaaaaatttgttattttaa

SEQ ID NO: 150272 - DNA, 476 bp, Arabidopsis thaliana columbia
catgctcctaacaaccagaatgggagtgcttccactggttcctcagcagctcaaaagcatctgcagaaccaacagttgaggccaccgattaatcatgggaactctcaaggatttccaactcataaagtgcaatcgcagcctttgaattttcagcagaggcagcaacccagagaaaatgctactcaacatagtgagactgtaggggaagatagcccatcaactgctgatagccggggttctcgttccaatgttgcctatggccagaactatggtatgcaaatgcaacccaactaacttgggtttgatgagttcccctgcccctggtgggtgggtggttggatcttcgagcagtcatggtgaaaagaaatcacagcagcaggtttcaaaggctggtgtagaattccttcagtcaccgggttatgctatgacctttgcgacgttcaatggggcttacactgctcctaccctaaacatgt

SEQ ID NO: 150273 - DNA, 462 bp, Arabidopsis thaliana columbia
cccgaagagacttacatgccttcgtctgtgccatgtttctttaaaaacggagctttggggcaggggtttgggaaatctcaaggcgaaccgattaactcagctggctcgaacttgcctgcgggtggagaaaacgatgggagcttctggattgatctccctgaagatgaagaagttagaagtaatctaaagaagggaaatatagaaagctcagagctttacgtccacgtgaaacccgcgcttggcgggattttcacggacgttgtaatgtggatattctgtccatttaatggtccagccactctcaaaatcgggcttctcacggtaccaatgaaccgccttggagagcatgttggtgattgggaacatttcacattcccgattagccaccttcaacggcgatcttacacagatgttcttctcacagcatagtggtggaggaatgggtgatgtatccgatcttga

SEQ ID NO: 150274 - DNA, 473 bp, Arabidopsis thaliana columbia; identical to SEQ ID NO: 125857
  unsure (1)..(473): unsure at all n locations

SEQ ID NO: 150275 - DNA, 460 bp, Arabidopsis thaliana columbia
gccactataaaaagcaggcgcgtcctcgaagaagaagaagaagaagtaacaaattggtggaaatcagaagttgaatcggagaataacaacgatgacgacgaacaagcaggtcatattcaaagaccacgtgagtggtttccctaaggaatccgatttcaatttcaccaccaccaccgtcgaacttagggttccggaaggttctaaatcggttcttgtgaagaatctctacctgtcatgcgatccttatatgcggtctcgcatggggaaacctgatccctcctctgctcttgctcaagcttacgctcccggcaagccaatctatgggtatggagtgtctagagtgatagaatctgggcatccagattacaagaaaggtgatttactctggggaatagttggatgggaggagtatagtgttattacaccaatggctcacatgcatttcaagatccaacataca

SEQ ID NO: 150276 - DNA, 287 bp, Arabidopsis thaliana columbia
ctgatcatggcttcttgaaacttcttcttcttctttcttttctttaaaggaaaaaaatgtcaggcgtggaggccgactcagtcctgtgagggctcaaggcgatcaatgcacagcgctaggatcattgcgcagaccactctagatccgaaactccatgctgattttgaggagtcaggcagctactttgattactcaacctcagagcgtgtcccttgccctgttgtggagaatcagccaccaaggtctgacaaagttaccacgacttatctttatcatatacagaaggg

SEQ ID NO: 150277 - DNA, 420 bp, Arabidopsis thaliana columbia
ctcaaattttgaaactaatcatctctctccttttttcaaacatacacagagaatggtggattcgaaaaggcctgcgaaaaccaaattgttagattcgtcttcgatttctaatgtcagagtcgtccttagggttcgtccttttcttccccgggagatttcggacgagagttgtgacgggagatcgtgcgtttccgtaatcggcggcgatggaggagataccagcgaagtggcggtttacctcaaagatccagatagctgtcgtaacgaaagctatcagctggatgcgttttacgggagagaggatgataatgtgaagcatatattcgatagagaagtaagccctttgattcctgggatctttcatggtttcaatgctactgtgcttgcttatggagccaccggaagcggtaagacttttac

SEQ ID NO: 150278 - DNA, 433 bp, Arabidopsis thaliana columbia
  unsure (1)..(433): unsure at all n locations
ctttttcaaacgaagaagaagaagacgaaacgctaccatcatctacacacacacacccaactacttttgtccatcgccggcctgtacaaatgtcgactacccgtaggatccgcggcgagaatcggttttataacccacctccgatgagaaaacttcaacaagagcgtgagaagaagagacttgaagcggaggagatagagaaagagaagaagaaggcaaaggagattctcgatcgaaagattaaagtcgaggagaaggagattaagcaacctgaggagtgctcgacctccgattgctctgtgccgagtcgggtcttctncaccaccaccaccaccggaactacttcttccaatttgggccggtttctggattgcaccactccaattgtttctacgcagcacttgcctttgacaagtagtaaggggtggagaac

SEQ ID NO: 150279 - DNA, 428 bp, Arabidopsis thaliana columbia
acaaatcttaaacgttttactttgtgctgcactactcaacctcaatggccgcctcaacaatggctctctcctcccctgccttcgccggtaaggccgtcaagctttcccccgcggcatctgaagtccttggaagcggccgtgtgacaatgaggaagactgttgccaagccaaagggcccatcaggcagcccatggtacggatctgaccgtgtcaagtacttgggtccattctctggcgaatcaccgagctaccttaccggagagttccccggagactacggatgggacaccgccggactttcagctgaccccgagacattcgcaaggaaccgggaactagaagttatccacagcaggtgggccatgctcggagccctaggctgcgtcttccctgagcttttggctagaaacggagtcaagttcggagag

SEQ ID NO: 150280 - DNA, 423 bp, Arabidopsis thaliana columbia
cagaaacaaaccaatattcaggtgaattactggatcttgcagatgcatacaatatcgttgtaggaaacgaaggtcactatgatagtaatggaagacaacaaatagagaattggatgaagaaagatacgtctagagttagcgaagaccttaaagcacttcttactcaaatatcagcttctcgtgggatagagtttttgtcacctagagatgtaagccccaagatttctgttaacagtagcgatcaagagacaaagaacctagatcatgatatgcagctgctacttcaaaagagaatgcttgaaaggaacgagagtaacttatcgttggaaggagtttctgtgactgaaatcgagggtgaaagtgagggtgatcggttgaaaagacaggttgattatgataggaaactgctgactggtttatata

SEQ ID NO: 150281 - DNA, 413 bp, Arabidopsis thaliana columbia
aatttaattccaaaagataaaaacaatcaatagatgtatgccacaaagtttgttgtgcttctcgtgattggcattttgtgtgccattgtcaccgcaaggcaggtcgaagaagtgtccaaagagaccaaattaggcacctctcttccaaaatctactaacaaaggcattggagctcagctttctgctgctggtcttacttacagcggcagcagtgtctctagctctgctagtgcttttaacaatcccaaaggtccaggggccagtgcattctaaagtggctacacaagtaccatctgacaagtcattgccaagggtccccaggcaagagtttcttctgcaagtgcttctgccgctacaggtgaggctgcagctgcagtgactcgcaaagctgctgctgcacgtgcaaagggtaa

SEQ ID NO: 150282 - DNA, 356 bp, Arabidopsis thaliana columbia
aaaaaattatattcaagagaaaaaggaaaaaatgaatttcatctccgatcaggtaaagaaactctcaagctcaacaccagaggagccagaccacaacaagccagtcgaaggaaccgaaacagctacaagaccagctaccaacgccgagctcatggcaagtgccaaggttgtagctgaagctgctcaagccgcagctcgtaacgaatcagacaaactcgacaagggtaaagtcgccggagcctctgctgatatcttagacgctgccgagaaatacggtaagttcgatgaaaagagtagcactggtcagtacctcgacaagggttgagaagtatctcaacgactacgagtcgtcacac

SEQ ID NO: 150283 - DNA, 419 bp, Arabidopsis thaliana columbia
  unsure (1)..(419): unsure at all n locations
caacaacaaatcttaaacgttttactttgtgctgcactactcaacctcaatggccgcctcaacaatggctctctcctcccctgccttcgccggtaaggccgtcaagctttcccccgcggcatctgaagtccttggaagcggccgtgtgacaatgaggaagactgttgccaagccaaagggcccatcaggcagcccatggtacggatctgaccgtgtcaagtacttgggtccattctctggcgaatcaccgagctaccttaccggagagttccccggagactacggatgggacaccgtcggactttcagctgaccccgagacattcgcanggaaccgtgaactagaagttatccacagcaggtgggccatgctcggagccctaggctgcgtctttcctgagcttttggctagaaacggag

SEQ ID NO: 150284 - DNA, 415 bp, Arabidopsis thaliana columbia
  unsure (1)..(415): unsure at all n locations
ccgggnccgacccacgccgtccgctgaagcagacattangcgttgagagaaaaaaaaaatgttagatcgagagagagaaagccatgtctgcgaaaacaatcctatcatcagtagttttggtggttctcgtcgccgcatcagcagcggctaatatcggattcgatgagtcaaacccgatccgaatggtctccgatggtctccgggaggtagaagaatctgtttcccagatcttaggtcaatctcgtcacgttctctctttcgctcgcttcactcaccgatatggcaaaaagtatcagaacgtggaggagatgaagcttcgattctcgatttcaaggagaatcttgatttgatcagatccacccaccagaaaggcttatcttacaaactcggtggtaatcaacttgctgatttgaca

SEQ ID NO: 150285 - DNA, 398 bp, Arabidopsis thaliana columbia
  unsure (1)..(398): unsure at all n locations
aaacaacaagaagtagtaatggcttcctctatgctctccttcgccgctgnggttacatccccggctcaggccaccatggtcgctccattcaccggcttgaagtcatccgctgcattcccggtcacccgcaagaccaacaaggacatcacttccatcgcaagcaacgggggaagagttagctgcatgaaggtgtggccaccaattggaaagaagaagtttgagactctatcttacctccctgaccttagtgacgtctaattggctaaggaagttgactaccttctccgcaacaagtggattccttgtggtggaattcgagttagagcacggatttgtgtaccgtgagcacggaaacactcccggatactacgatggacggtactggacaatgtggaagc

SEQ ID NO: 150286 - DNA, 428 bp, Arabidopsis thaliana columbia
tgagactccccgtcaccgtcaaagccactaagccgtcgtttctcgtcatttggatccgatactcctccgccgcgtcgtcgccgacagtctccttgaatccaagtggacgattacagcaaactctcgcaggatctgtggaagtgaaaggaaaatctctgcactccggtaagttctcgacggtgaagctaaatccggagatcgccggagctggtaggttcttcgagtttcgatccagattcatccctgcgtcgattgaatttgctcaggaatcgcctctttgcacgacgctgttgaaagatgagctcaaaatccgaaccgttgagcatttgttatcagctcttgaggcgaagggagttgataattgcaggattcaaatcgagagcgaaagttccgatgatcgagaagtcgagctaaagaatgggtcgatg

SEQ ID NO: 150287 - DNA, 347 bp, Arabidopsis thaliana columbia
  unsure (1)..(347): unsure at all n locations
caacaacaaatcttaaacgttttactttgtgctgctttacnggnncngnnngngncgggcatggcgggtcttcagagatccaccatctctttccgacgacagggctcttcgggtatagtctgggacgatcgtctcatcgccgagctaagccaacaagcggccaacgaccggaaaggcgagactctacaacaggacgaacaggccaagctgattacgtcggaagtacaggatcagacaaccaaacctatcgccggagaaggactcaaacctatcagaactgacggaggtatggagaggagtcgatccaacggaggaggagccatccgccaccatccaaacacaaggag

SEQ ID NO: 150288 - DNA, 441 bp, Arabidopsis thaliana columbia
  unsure (1)..(441): unsure at all n locations
nnccgtctagattcagntttttttcattcaaaaaagagtcgtcttcataaacgcccnttcgtcttcttccctggaaatctagtttctttcttccacgaaaatgagagagtgcatttcgatccacattggtcaggctggtatccaggtcggaaatgcttgctgggagctgtactgtcttgaacatggcattcagcctgatggccagatgccgagtgacaagactgttggtggaggtgacgatgctttcaacacctttcttcagtgaaaccggtgcaggtaagcacgtcccacgtgctgtctttgttgatcttgagccaactgtgatcgacgaggtcaggactggtacttaccgtcagcttttccaccctgaacaactcatcagcggtaaagaagatgcagctaacaatttcgcccgtggtcattacaccattgggaaagaga

SEQ ID NO: 150289 - DNA, 279 bp, Arabidopsis thaliana columbia
gaaggacagagatggttactggaagtggcttgttgttaacttgcgatctggaggagcagctggggcactcttcccttctgtgcgcgaacacactagactatgcccgtacccgtgatagctaatgatgccaaggctgcaaagaaaggaagtggcggaagacagtctgatggtcttgttgatgtttacagagagacacttaagactaatggtattgctgatctggtccgtgaattcaacatctaaggtgttgatataaatgactaccgtggtatgaacttt

SEQ ID NO: 150290 - DNA, 431 bp, Arabidopsis thaliana columbia
  unsure (1)..(431): unsure at all n locations
gcttcctcaatctaaggatttccatgaacaaggaactaaaatgagatctcttctctttgtactatcactcatttgcttttgctctcaaacagcactttcatggaagaaggaagagtttcgcagctgtgaccaaactccattttgtaaacgcgctcgatctcgtactcccggcgcgtgttctctaattgtcggcgatgtttccatcactgatggagatctcgtagcgaagcttctaccgaaagcgcctaatcaaggcgatggggatcagatcaagccgntgattctttctctctcagtttacaaggatgggatcgtgcggcttaaaatcgatgaggaccattcgttgaacccgccgaagaagaggttccaagttcctgatgtggtagtgtctgagtttgaggagaagaagatctggctgcaaaaagtagcga

SEQ ID NO: 150291 - DNA, 431 bp, Arabidopsis thaliana columbia
cggacgcgtgggttacaaagcaaaatgactagtaaggtcgtcttccttcttctcctgtctgtggtcgtcgtcctcctccctctctacgcctctgcggctgcccgcgtcggtggttggagtcccatcagcaacgttacggaccctcaagtcgtagagatcggtgaattcgcggtctccgagtacaacaaacggagcgaatcgcgactcacgttcgagacggttgttagcggcgagactcaagtcgtatctggtacaaattaccgtcttaaggtggcggctaatgacggcgacggagtgagcaagaactacttggcaatcgtatgggacaagccgtggatgaaattcagaaatctcacttccttcgagcctgccaataatgggcgcttcctttaagcttttaacatgtaaccgctctttattaatattgcaga

SEQ ID NO: 150292 - DNA, 450 bp, Arabidopsis thaliana columbia
attggattaatcaaagacaaagaaaacgaaaatgttggcaatatttcagaaagcttgtgctgacccaccggaagaactcaacagtccggcttctcatttctccggcaaaactcctaaacttcccggcgaaactctctccgacttcctctctcatcaccaaaacaatgctttctctatgaacttcggcgactccgccgtcttagcttacgctcgccaagaaacctctcttcgtcaaaggttgttctgtggactagatgggatctactgtatgtttctagggagattgaataatctctgtacattgaatcgacaatacggtttatctgggaagaactcaaacgaggcaatgtttgtgatcgaagcttatcgaacacttcgtgatcgtggtccttacccagcagatcaagttcttagaggtcttgagggaagcttcgctttcgtgtctacgat

SEQ ID NO: 150293 - DNA, 416 bp, Arabidopsis thaliana columbia
  unsure (1)..(416): unsure at all n locations
acggagattgtttggtatcctgacgcanataagatggtcaggaatgaatacaatcccctcacaggtgacgcatttgataaagtttttggaccacagtcaacaactccagaagtatatgacgtagctgctaaacctgtagtcaaggctgctatggaaggtgttaacggaaccgtttttgcttatggtgttacaagcagtggaaagacacatacaatgcatggtgatcaagattttcctggaatcataccattagcaataaaagacgtgttcagtatcattcaggaaaccaccggaagagagtttctgctccgtgtttcatatcttgaaatatacaatgaggtgataaatgacttactggatccaacagggcaaaanttacgtattagagaggattcccagggcacttacgttgaggg

SEQ ID NO: 150294 - DNA, 448 bp, Arabidopsis thaliana columbia
  unsure (1)..(448): unsure at all n locations
ngtgatttgcttttgaatttcaaaccttcacataaataaaatactttcgaatccgtgtttgagtcagcgaatctttttccgataactatggctgaggaaatcaagaatgttcctgaacaggaggtgccaaaggtagcaacagaggaatcatcggcagaggttacagatcgtggattgttcgatttcttgggaaagaagaaagacgaaacaaaaccagaggagactccgatcgcttcagagtttgagcagaaggttcatatttcagagccggagccagaggttaaacacgaaagtcttcttgaaaagcttcaccgaagcgacagttcttctagctcctcaagtgaggaagaaggttcagatggtgagaagaggaagaagaagaaggagaagaagaagccaactactgaagttgaggtaaaggaggaagagaagaatgggtttatggaga

SEQ ID NO: 150295 - DNA, 416 bp, Arabidopsis thaliana columbia
ttttctgactcttcaatctctcccaaagcctaaagcgatctctgcaaatctctcgcgactcgctctttcaagatgcaaatcttcgtgaaaacactcactggcaagactatcactctcgaggttgagagctctgacaccatcgacaatgttaaggcaaagattcaggacaaggaaggcattcctccggatcagcaaagattaatattcgccggtaaacagctagaagatggccgtaccttggccgattacaacattcagaaagaatcaacccttcatttggttctccgtttaagaggtggtatgcaaatctttgtcaagactctgactggcaagaccattactttggaggttgagagctctgacactattgacaacgtcaaagcaaagatccaggacaagggaggaatccctccgga

SEQ ID NO: 150296 - DNA, 392 bp, Arabidopsis thaliana columbia
gtttcttagggtttttgatctctgcaatggcgaatctaattcctagattcctcaggaacaaggcttgcttcaattcaatccaaaggcttactactactccttctctcttcacttaccagaagccctacttcaacaacaacaacaacatcgactctgttattgagaaacccgatccagtttcttttactaatcctttgattacactctccgggaatgaatccaatcaacctatgcgggtttaccctagtttctccatggggttatgcttgaatcccaaaatgattcaaggtctggatctagctgaaacaccgtcgttggaggaggagggagaggatactcaggagattgtgatttacgctgatagtgtgaagaagaagagggagaagaagatg

SEQ ID NO: 150297 - DNA, 374 bp, Arabidopsis thaliana columbia
  unsure (1)..(374): unsure at all n locations
agcgtggccagttcgtgcgcctgttcatccaggcattgtccctagctggtctcaacttcttggcgacgtcactgttccttgcattgatgatagagttgcaacagcgtggttgaacgatccagagattaggaaagctattcatactaaagaggagagcgagattggaaggtgggaactttgcagtgggaaactctcattctatcacgacgcaggaagcatgatcgatttccatagaaaccttacactaagtggatatagagctctcatttacagcggngatcacgatatgtgtgttcccgttactggctcggaagcttggacaaaatctcttggatacaaagttattgatgaatggagggcatggatatcaaatg

SEQ ID NO: 150298 - DNA, 414 bp, Arabidopsis thaliana columbia
ctgataacggccttttgcctctgcataagcttgttaaggcttggagatacgatctttcgaacttccagcctgagatttctgttcttacgaaggataatatatggattaagcttgaggaaccgaggaaaagctatggggaattgattagaactgttttggtcacgttgcattccattcagtttcttaggaggaatccccaagcgtccgagaaagctctctgggagaaattaactagaagtttgaggtcatatgatgtgaagccatcgcagaatgatttggtggatcatattggtttaatcgctgaagctgcgaaaagagatagaaatttggcgaattcgaagtttatacttgcatttctcacaaaaaagcctaccaaaaggagattacctgacgaggacaatgcaaaagatgatt

SEQ ID NO: 150299 - DNA, 462 bp, Arabidopsis thaliana columbia
caaaagcctatttgggggatcatcaaccttctatcatcaccatggatccttacaagtgtcgtccttcaagcgcgtacaacgccccattctacaccacaaacggtggtgctccagtctccaacaacatctcttccctcaccatcggagaaagaggtccggttcttcttgaggattatcatttgatcgagaaggttgctaatttcaccagagagaggatccctgagagagtggttcatgctagaggaatcagtgctaagggtttctttgaagtcacccatgacatttcaaacctcacttgtgctgattttctcagagcccctggtgttcaaactccggttattgtccgtttctccaccgttgtccacgaacgtgccagtcctgaaaccatgagggatattcgtggttttgctgtcaagttttacaccagagagggaaactttgatcttgttgggaacaacactc

SEQ ID NO: 150300 - DNA, 471 bp, Arabidopsis thaliana columbia
gagaaatcaaatcactcacactccaaaaaaaaaatctaaactttctcagagtttaatgaagaggcgcttaaccacttccacttgttcttcttctccatcttcctctgtttcttcttctactactacttcctctcctattcagtcggaggctccaaggcctaaacgagccaaaagggctaagaaatcttctccttctggtgataaatctcataacccgacaagccctgcttctacccgacgcagctctatctacagaggagtcactagacatagatggactgggagattcgaggctcatctttgggacaaaagctcttggaattcgattcagaacaagaaaggcaaacaagtttatctgggagcatatgacagtgaagaagcagcagcacatacgtacgatctggctgctctcaagtactggggacccgacaccatcttgaatttccggcagagattacacaaaggaattgg

SEQ ID NO: 150301 - DNA, 156 bp, Arabidopsis thaliana columbia
ctcgctgctcgagttatattcgagaggtttccttcaacattggcgaatttatcaagaatggggatactgatcaaggatgctaacgcaaaggcgactgcaaatatcaaacttttgaactcgatagaaagcaaaatcattctgtcatcaaaattgact

SEQ ID NO: 150302 - DNA, 368 bp, Arabidopsis thaliana columbia
ccgtccgaatcgctctacttctctctctctctctagattcgaaaaaatggcgaaactggtgatgttgttgggtctgtgtatcttaccggcgatagccatggcggcaaggaggggaaatattggaaagaatacaatggtggttcaaggtagcacctactgtgacatttgcaaattcggcttcgagactcctgaatcctcctacttcatccccggtgcaacggtgaagctatcatgcaaagacaggaagacaatggaagaggtttacacagacaaagctgtatcagacaaagaaggaaagtataagttcattgtccacgacgatcacagagaccagatgtgcgatgttttgcttgtgaaaagctcggata

SEQ ID NO: 150303 - DNA, 350 bp, Arabidopsis thaliana columbia
  unsure (1)..(350): unsure at all n locations
caagaatcagattcaagatagaagtttttcaaacaatgtctagtcctcttggtcactgtcagattcttgtttttcttcatgctttgcttatcttctcagctgagtcccgcaaaacccaattgctgaacgataatgatgttgaatctagcgacaagagtgcaaaaggcacacgatgggctgttttagttgctggatcaaatgaatattataactacaggcatcaagctgacatatgccacgcgtatcagatactccgaaaaggcggtttaaaagatgaaaacatcattgtgtttatgtatgatgatatcgcgttttcctcggagaatcctangcctggagttatcattaat

SEQ ID NO: 150304 - DNA, 470 bp, Arabidopsis thaliana columbia
ggtttgtatagcacggatttgtgtaccgtgagcacggtaactcacccggatactatgatggacggtactggacaatgtggaagcttcccttgttcggttgcaccgactccgctcaagtgttgaaggaagtggaagagtgcaagaaggagtaccccaatgccttcattaggatcatcggattcgacaacacccgtcaagtccagtgcatcagtttcattgcctacaagccaccaagcttcaccggttaatttccctttgcttttgtgtaaacctcaaaactttatcccccatctttgattttatcccttgtttttctgcttttttcttctttcttgggttttaatttccggacttaacgtttgttttccggtttgcgagacatattctatcggattctcaactgtctgatgaaataaatatgtaatgttctataagtctttcaatttgatatgcatatcaacaaaaagaaa

SEQ ID NO: 150305 - DNA, 442 bp, Arabidopsis thaliana columbia
aagaatttgaagataatcattaaatatatattttacctaaattaactcacacgacataccgtgtttagtgcggctaaaacagtgttaagatccggtgaagatgctaatacgcgattcaaagagcgcgtgaccacaaacccaagatcgaacggctcagatctcgcgggaatcatctgaagcgtgtactccacgcccatgaagaacagaagtccggcagcgaacatgcacggtatccaatggtatctcaccacgtagacgatatcacgcgccgtccacgtcgtgaacgacgctttgcttcttcatcctcctcctccgacaccattggcgtagccgttgtcagttttcttagcagatatatccatgtgagtgtttgtatctccgacgcgacggttgttggtgtctagggttccgtcaatggcgacgccgttagtgtggtttccgt

SEQ ID NO: 150306 - DNA, 445 bp, Arabidopsis thaliana columbia
ggcttaacgaaatcaaattcgcaagtggtgtcctggacgagcttctttatctgggtgtaccgtctgaacgcagatatggatctggaattatggtgttagagtatggaaaagcagttcaggagagtgtgtacgaacatatccgtgttgttcgcgaaggccatcttcggattatattctcccaagagctgaagattctctcatgggagttctgtactcgtcgacatgaagaactacttcctcgtcgcctagtagctccacaggtgaaccaattgcttcaggttgcagagaaatgtcagagcacaattgatcaaagtggatcagatgggattcatcaacaagatttgcaagctaatagcaacatggtcatggctgctggacgtcaactagcaaaaagcttggagtcacattcactcaatgactgaagcttctcaaaacgatatgttcg

SEQ ID NO: 150307 - DNA, 410 bp, Arabidopsis thaliana columbia
ggtcaacaacgtcgagaataatggcatcatctctttgtgcttcttctgccatcgctgcgatgtcttctccaagtttcttgggtggtaagaaactgaggctgaagaagaagttgactgttccagctgtgtccaggccagatgcgtcggtgcgcgccgtcgcagctgatccagatagaccaatctggttcccgggaagcactcctccagagtggctagacggtagcctccctggtgacttcggatttgatcctcttggtctttcatcggacccggacagtctaaaatggaacgtacaagccgagatagtccactgccgatgggctatgctaggagccgccgggatattcatcccagagttcctaacgaagatcggaatcctcaacactccgtcatggtacacggcgggagag

SEQ ID NO: 150308 - DNA, 419 bp, Arabidopsis thaliana columbia
  unsure (1)..(419): unsure at all n locations
aaagaaaggaacctcgaactcagagaaattgagagaagagagaagaatcatgggacaaggacgcatcgggaggattgaatcggcaaggagatcggaaacctgatggtggagataagaaagagaagaagtttgagccggcggcaccaccggctcgtgtagggaggaagcaaaggaagcagaaagggccagaggcggcggcgagacttccgacggtgactccgtctactaagtgtaagctccggttactgaaattggaacggatcaaggattatttgttgatggaggaagagtttgtggcgaatcaagagaggttgaaacctcangaagagaaagctgaggaagatagatctaaggttgatgatcttcgtggtacacctatgagtgttgggaatttggaagagttgattgatgagaatcac

SEQ ID NO: 150309 - DNA, 272 bp, Arabidopsis thaliana columbia
aatggtgtcattcaaggtctctctcgtctctacttcgcctattgatggacagaaacctgcggcttgtggactccgtaagaaggtgaaagtttttaagcaaccaaattaccttgaaaattttgtccaggcaacgttcaatgctcttactacagatgaagttaaaggtgcgacacttgtggtttctggtgatggtcgttattattcagagcaagctattcagattatagtaaagatggcagcagcttatggtgttagacgtgtgtgggttggtc

SEQ ID NO: 150310 - DNA, 269 bp, Arabidopsis thaliana columbia
gccgcgctttgtagcaatgtcaatgtggtaccctctaccttcttcttcttgctccactcactagcgaaatgcagaatcaacaataatagaaaaagccctaactttctccgtcgatggctttcttcttctactttttcttactcttgactctttcttctccttcttcttctgcttcctcttcaaactccttgacttacatcgtgcacgtggaccacgaagcttaaccctcaatctttcccactcatttttactgggacactttctctctt

SEQ ID NO: 150311 - DNA, 364 bp, Arabidopsis thaliana columbia
gagcagaatctaaaaacacttatcgtttcgtctcttctctgatccattgttgaagatgtcgaagagaaaaactaaggagccaaaggttgagactgtgactcttggaccttctgttcgtgaaggagagcaagtttttggtgttgttcacatctttgcatctttcaatgacactttcattcatgtgactgatctctccggtagagaaactctcgtccgcatcaccggtggcatgaaggtgaaggctgaccgtgatgagtcctctccttatgctgctatgcttgcagctcaagatgttgctcaaagatgcaaggagcttggcatcactgccatgcacgtgaagctccgtgctactggaggaaacaaa

SEQ ID NO: 150312 - DNA, 441 bp, Arabidopsis thaliana columbia; identical to SEQ ID NO: 127262
  unsure (1)..(441): unsure at all n locations

SEQ ID NO: 150313 - DNA, 451 bp, Arabidopsis thaliana columbia
cttgaaaaaaaaacatcttaattagaaaacaaaaaggagagacataaagatgaatgcgattgagtttgttgtacttctcttgattggagttgtatgtgtcaatgttggtgcaattaggcaactcgagaaaagatccaaagagaccgaattaagcgtctctcttcccaaagctaccaaaggcgttggagctgaatttacagttactgtttatactcagtctataggtgatggcaatggctttggtgatgctaaaataaagggtcgcaaaggttccagcagcaatgcaattggaagcggctccggaattactagtggatatgtcattgcaaagggtcccaacgcaacagctttttctaggagtattgctttcggtctaggccaaactaatgcttgagcgggtcgcaaaggtgcaaccgccaaaggaaatggttttggacgtggcattactact

SEQ ID NO: 150314 - DNA, 452 bp, Arabidopsis thaliana columbia
cccacgcgtccgacagagctttcaaatatatccctctcctgcgagagcagagaaatggagagagactagtgagtgagagagtccatcgctttctttctttctctctctcgctctctcttcatctccaacagagacttctttctagagaaagagatcttcacaaatatgactgtgatgaatcaccgacacaagcaatgtcattttctcctcctccttctgatcactgtcttctctgccgcgttggatggtgtttcttccgagacagacgtcggagggtttgactacggtgaagcattgtctaaaagcttactctactttgaagctcagagatcaagaagacttccgtacaaccagcgcgtgacttggcgtgatcactctggtctcaccgatggtcttgaacaaggggttgatttagtgggaggatatcacgacgcccgagacccatgtaaatt

SEQ ID NO: 150315 - DNA, 421 bp, Arabidopsis thaliana columbia
gttcgtatcagactgtggaactgattgagaccttcatgaattaccaggagaatatcaagaggtgtgtgtgcatcatatatgatccctctaaagctgatctaggcgtcttagctttgaaggctttgaagctttcagattcctttatggagttgtaccgaggtggaaactttactggcgagaagttgagagagaaaaatttctcctggatggatatttttgaggaaatacctatcaaggtttcaaattctgcccttgtcagtgcctttatgaccgaactggagactgatacacctgtctcacagggcgattatgatcgtctacactcatcaaccactcctttgcttgagaacaatatggagtttttgattaaatgcatggatgatttatctatggaacagcaaaagttccagtattactaccg

SEQ ID NO: 150316 - DNA, 393 bp, Arabidopsis thaliana columbia
  unsure (1)..(393): unsure at all n locations
cgccgacacttcaagaaaaattaaagaaaagaaagtaaactctttcaccaaaaaaaataaaggaaatttattgttccatctttctgataatcggatcttacagagagagagctccatggatcgccgcatctatggtggctccgccgtcattcatctctttctcttcttctccgtcctaatcttctccgccgcatctgcattatccaagaaccagtctccttcttccgggtcgggtcagatcaactccaactctgtcctcgtagctcttcttgactctcgttacactgagctagctgagctcgtcgagaaagctcttctccttcagacactngaagacgctgntggtcgtcacaatattaccatttttgctcctcgcaatgaagctcttgagcg

SEQ ID NO: 150317 - DNA, 378 bp, Arabidopsis thaliana columbia
gaaaccttctccttcttctgcttcttttatcatcggagaattcgaatcttcttttccgctgggtgagattctctaattatccttttggaagagtttcgtgtgagagagaagcgtaatgggctgctttggttgttgtggtggtggtgaggatttccgtagagtttctgaaactggaccaaagccagtgcataacactggaggttacaatggaggtcaccatcaaagggcagatccacccaaaaaccttccagtcattcagatgcagcctatctctgttgcggccattccagctgatgaattgagggatataacggataactatggttcaaagtccttgattggtgagggttcatatggaagagtctttatggtattctt

SEQ ID NO: 150318 - DNA, 305 bp, Arabidopsis thaliana columbia
  unsure (1)..(305): unsure at all n locations
gggatttttgttccgatctccttctccggcttatcaccgatttagatctaagcctgagggtgtcgtttgcattttagagattccgagaatgagacaacggcaactattttccgtgtttttgcttctcttagctttcgattcgttccagaagctntgctactgtgacgatcaaacggttctgtatgaatcgttcgatgagccttttgatggccgctggatcgtttcgaagaatagtgattacgaaggtgtatggaagcatgcaaagagtgaaggacatgaggattatggacttctcgtgagtgaga

SEQ ID NO: 150319 - DNA, 420 bp, Arabidopsis thaliana columbia
  unsure (1)..(420): unsure at all n locations
atcatcaccatgtcctcccataccaatctcccttttcccaaaccagttcctaaaccagatcagcgggtctccggtacatcccaaaccaagaaaccaccgtcttcctccgtagctcaagaccaacaaaacctaaaatgccctcgttgcaactctccaaacacaaagttctgttactacaacaactacagtctctctcaacctcgtcacttctgcaaatcttgtcgccgttactggacacgtggcggtgctctaagaaacgtccncatcggtggtggttggccgaaaaccaaaaaatctatcaaacctattcctcatgacacacttcttcgcttcttcttcagagtctctatcatatgagatcatcaatcttctctcgcacatgatttagtgccgatatttacaatgacactcacttgatac

SEQ ID NO: 150320 - DNA, 335 bp, Arabidopsis thaliana columbia
  unsure (1)..(335): unsure at all n locations
ccaccaatccccattttttcccttttacaattcttaagctagttttatactttggttggtcctttcatttgggttaagagaagccatggataccgagtttctccgaaccctagatcgtcagattcttttgggtgtcttcgttgctttcgtcgccgttggtgctggtgctgcttattttcttacatcctccaagaaacgcagagtgtgtttggatccagagaatttcaaggagttcaagcttgttaagagacatcagcttagtcacaatgtggccaagttcgtttttgaactcccaacttctacttctgtgttgggtcttnccattggacaacaca

SEQ ID NO: 150321 - DNA, 429 bp, Arabidopsis thaliana columbia
gtcaccaattgattcaatatcccaagaggaataagaagaagcaagagaagaagaagagagaagcgatttttataaaaatggcggcggatgctctgagaatctcgagttctagttctggttcgttggtttgtaatcttaatggttcacaaagacgacctgttcttcttcctctgtctcatcgtgctacctttctgggtcttcctcctcgtgcttcatcttcttcgatttcttcttcaattcctcagtttctgggtacttctcgtattgggctaggttcttccaagctctcacaaaagaagaaacaattctcagtcttcgctgcagctgaagccgaggcgaagcgggctgtaccgcttaaagattaccgaaacatcggtattatggctcacatagacgcgggaaagacgacaacaaccgagaggattcttt

SEQ ID NO: 150322 - DNA, 466 bp, Arabidopsis thaliana columbia
gaacaagacggttgttcctggatgttccacacgcctctctctgcgccagcctagaacgatgggtactcctcctgcttccttgagagtcttttcctctctcggatctaaccaggatcccaccggcagcgttttgattgagaccactgccacttcatcctcctctctcgagacctccgccgccgacattgttcccaaatccaccgtatctggtggagttcaggatgtctacggcgaggatgccgccaccgaggacatgcctatcactccttggtctctctctgtcgccagtgggtatacgttgttgcgtgatccacatcacaacaaaggccttgcctttagccacagagagcgtgacgctcactatctacgcggcctcctcccccccactgttatctcacaagatcttcaggttaaaaaaattatgcacactcttcgtcagtatcaagttcccttgcagaagtatatg

SEQ ID NO: 150323 - DNA, 447 bp, Arabidopsis thaliana columbia
  unsure (1)..(447): unsure at all n locations
ggaatgcttggcacatacttgaatatcttggctctatggatgctgttccttctatgggccagttggattgcttttgttatgtttgaggacacgcagcagggcctcacggtcttcacttcatatggtgcaactctttaccagatgtttattttgttcacaacatccaacaatcctgatgtctggattcctgcatacaagtcttctcgctggtcttcggtgttcttcgtgctctacgtgctaattggcgtctactttgtcacaaacttgattcttgccgttgtttatgacagtttcaaagaacagctcgcaaagcaagtatctggaatggatcaaatgaagagaagaatgttggagaaagcctttggtcttatagactcagacaaaaacggtgagattgataagaaccaatgcattaagctctttgaacagntgactaattacaggacg

SEQ ID NO: 150324 - DNA, 383 bp, Arabidopsis thaliana columbia
ctttctctctctctttttctccgcggaaggaatctcttcttctggttgcgtttgagtgcgtgcgaaaacaaaagaaaagagagagatggcggaagagaagaaagctccaatcagtgtctggactaccgtgaagcccttcgtcaatggcggtgcctctggtatgctcgctacttgcgttatccagccgatcgacatgattaaggtgaggattcaacttggtcagggatctgcagccagtataaccaccaacatgcttaagaatgatggcgttggtgccttctacaagggattatctgctgggttgctgaagcaagcaacttacacgacaacccgtcttggatcattcaagttgctgactgcaaaggcaattgagtctaatgatg

SEQ ID NO: 150325 - DNA, 439 bp, Arabidopsis thaliana columbia
cagagagaaacaaaaaaagaagaagaagaagttgaagaagaagaagccatgaatgcttgagcggcaacaaacagaaacttcaagttagctgctaggcttcttggtctggattctaagctcgagaaaagtcttctcatccccttccgagaaatcaaggtggaatgtaccataccgaaagacgatggtacactagcatcattcgttgggttcagagttcaacacgacaatgcaagaggtcccatgaaaggtggaatcagatatcatcctgaggttgatccggatgaagtgaacgcattggctcagctcatgacatggaaaacagcagtggctaagattccttacggaggagctaaaggagggattggttgtgatcctagcaggctcagtatcttcgagctcgagcggttgactcgagttttcactcaaaagattcatgatc

SEQ ID NO: 150326 - DNA, 353 bp, Arabidopsis thaliana columbia
atcaagaaagaacacttttgtgaacttcttcttccccacatctcctaaaagcttcacgacacggcaaaccaagcgtttcttttcttatctactcgattatcaacacatcttttcctgaaactccttccacatctttgtctgatcatggtgaaggaaacagtgtattatgatgttcttggtgtcactccctctgcttctgaggaagagattcgcaaggcttattacatcaaggcaagacaagttcatgctgacaagaatcaaggtgatcctctagctgctgaaaagtttcaggttcttggtgaagcttaccaggttctaagtgatcctgttcatcgtgaagcgtatgatcggac

SEQ ID NO: 150327 - DNA, 340 bp, Arabidopsis thaliana columbia
  unsure (1)..(340): unsure at all n locations
gtctggaatcaattacttcctaaaggttgccatttgttaacttactctgttagtctactacggaccaataactatgtttttcgatggataccattatcatggaacaacctttgagcagagttaccggtgttatccggcatcttttatcgacaagccacaacttgaaagtggtgacaagattataatgccaccatcagcccttgatcgtctagcctctttgcatattgactatccgatgctgtttgagcttcgtaatgctggaattgaacgtgttacacacttgggagtccttgagttcattgcagaaagaagcatgatttacatgccatatnggatgatg

SEQ ID NO: 150328 - DNA, 383 bp, Arabidopsis thaliana columbia
  unsure (1)..(383): unsure at all n locations
cgcctttccacaagcaatcatggtgctccaaaacgacatcgatctccttcatccgccacctgggctggagaagagaaagcataagctcaagcgtctcgtgcaatctcccaactccttcttcatggatgttaagtgtcagggatgcttcaacataaccactgtgttcagccattctcaaactgttgtggtatgtggaaactgtcagacagttctgtgccagcccaccggtggtaaagcgaggctacaagagggatgctctttcaggaagaagtgagattgagatctcacgaatcattcatccgntcgcagatgtnttgctttaagagttttgatatctatgacgtttttctgcttatgagaagattttgaatgcatgataaaac

SEQ ID NO: 150329 - DNA, 412 bp, Arabidopsis thaliana columbia
cctccctctacatgatggatacattctcttgtaattcttatgaacaaaaccacccccatgatgatgatattgatattgatgctcatgatcatgattctcatggtggtgatcatcaagaggagagtggatggacaacttatcttgatgatttctcaaatcaatatagaactactcatcatgaagaaaatgatcatcaagacaagagttcttattcacttcttgccacctctacttctctggtctctgacgccgccacccatgccttttccggcaagagttttcccgttaattttccggcgaaactgaagtttgggaggggaagaaccaaaaagatttgtgaggatgattctttggaggacacggctagctctccggtcaacagccctaaagtcagtcactttgaacatattca

SEQ ID NO: 150330 - DNA, 414 bp, Arabidopsis thaliana columbia
gtcgtctcttgttccttccgctgccaacaaaatggagctgtcgtctgcgtccgccggattgggccactcctcctccgccgctcagcttctcagacctaagctcgggtttattgatttgcttcctcgtcgagcgatgatcgtttcttctccttcttcttcgcttcctcgatttttgcggatggaatctcaatctcagcttcgccaatctatctcttgctctgcttcttcttcttcttctatggcattaggtagaattggagaagtaaagagagtgacaaaggaaacgaatgtttcagtgaagattaatttggatggtactggagttgcagatagttctagtggaattcctttccttgaccatatgttagatcaacttgcttcgcatggcttgtttgatgtgcacgttagagctac

SEQ ID NO: 150331 - DNA, 425 bp, Arabidopsis thaliana columbia
aaagccgagaaagctccggcggagaagaaaccaaaggccggaaagaagctcccgaaggaagctggtgccggaggcgacaagaagaaaaagatgaagaagaagagtgtcgagacttacaagatctacatcttcaaggtgcttaagcaagttcatcccgatatcggaatctgcagcaaagcgatggggatcatgaacagtttcattaacgatatcttcgagaagcttgctcaagaggcgtcgaagcttgcgaggtacaataagaaacctacgatcacttctcgggagattcaaactgctgtgagattggtgcttcctggagagttggcgaagcatgccgtttctgaggggactaaagccggcacgaaattcaccagctcttgaataattgagttagggttcttatcatatggatgttgctctgcttt

SEQ ID NO: 150332 - DNA, 354 bp, Arabidopsis thaliana columbia
  unsure (1)..(354): unsure at all n locations
gcggagggatgtacctctgcttaagacttgcatctgaaagttggacccgctattaaagagacctctagcgagacgatgnaagaaaagggttggagccttgacattgttatagaaagcatntgagcgtacccactgtaagttaatcgccaagnaacgcgtggtgtcaattggcaagcgttgtcaagtgagaaggttctttctagtgacacaccctaaacaatggttacaattgcttgcaactggcgaaatacgaaagatctcatggcttgcagggaatcattgatccaaccaaagttgtgagatgttgcctagagcatgcttcatctgtggcaaagacattcttgatgtctgatt

SEQ ID NO: 150333 - DNA, 305 bp, Arabidopsis thaliana columbia
cttttagtaacaatggtttcttcttctttaaccaagcttgtgttctttggttgtctggtggtgctcacattcacggacaaccttgtggctggaaaatctggcaaagtgaagctcaatctttactacgaatcactttgtcccggttgtcaggaattcatcgacgatgacctaggtcaaatctttgactacgatctctacacaatcactgatctcaagctgtttccatttggtaatgccgaactctacgataatctgactgtcacttgccagcatggtgaagaggaatgcatactaaacgcccttga

SEQ ID NO: 150334 - DNA, 427 bp, Arabidopsis thaliana columbia
cggacgcgtgggcaaatacacattttaagaaagaaaaaaaaaaattgaaagttgagaaaaggtcctagagtttgaagacatgaagttcacggcgcttgtgttcattgtgttcgtggtgggtgtcatggtttctccagtttcaatcagagcaactgaggtcaaactttctggaggagaagctgatgtaacgtgtgatgcagtacagcttagttcatgcgcaacaccaatgctcacaggagtaccaccgtctacagagtgttgcgggaaactgaaggagcaacagccgtgtttttgtacatatattaaagatccaagatatagtcaatatgttggttctgcaaatgctaaaaaaacgttagcaacttgtggtgttccttatcctacgttgtgattttgagatattgctaaaaaacagtgtaatgataat

SEQ ID NO: 150335 - DNA, 364 bp, Arabidopsis thaliana columbia
gccagattctcagtgatttggatatttcgaaatgcgcaatctcagattcagggattcaagcattggcctcctctgataagctcaaactgcagatcctattatttgcaggttgctctatggttacagacaagagcttgccagccatcgtcgggttgggttccactctattgggattaaacctccaacagtgtcgatccatttccaattccactgtcgacttcttagtcgagcgtctttacaaatgtgacatcctctcctgatcaacaattccactgtcgacctctccacttataatgtaaggtattttagtcccgccaagttcgtttatcaagtctcaactctttttcaggctctgtgatctacg

SEQ ID NO: 150336 - DNA, 169 bp, Arabidopsis thaliana columbia
ctcttttacagcttttcacaaacaaatcccaaatctgattctttcagctaaaattcttccatgggtcgatcgaattgtcaaaaaaaagatatcacaacccttcgtgtgttctcatttcttaatcttatacacttgaaatctccaaaaaggggaaaaagaaaatgagttg

SEQ ID NO: 150337 - DNA, 429 bp, Arabidopsis thaliana columbia
ggaaaacaaaggatcttccatgggcgatcgctgagaagatccgcaagaacaaaaacatcaaattccttgaaatcaggaatcttattcgatagtctatttgagcccttgatctggttttttatttggtgaaagttttgaaatggtgctggtattggcattgggggatctccatgtaccccatagagcggctgatctacctcctaagttcaaatcaatgcttgttcctgggaagattcaacacatcatctgcactggaaatctctgcatcaaagaaatccatgactacttgaagactatctgccctgatttgcatatagttcgaggggagtttgacgaagatgcgcgataccctgagaataaaaccttgactattgggcaattcaagctgggattgtgtcatggccaccaggtgatcccatggggtgatct

SEQ ID NO: 150338 - DNA, 387 bp, Arabidopsis thaliana columbia
agaacaatgagctaaatgctgtttcagcttttagtgagattgttcctgatactgtcggtttcgatgactttgagaggtttccgccgactgcagctactgttagctctgctcttcttctgggtatctgtggtctacctgataccattttccgcaatgctgtggacatggctttggcggattcttcttgtgcagggcttgaaaccacagaatctcgactctcttgctttttcaataaggctattgtcaacgtaagtggcgatcttgtcaaactcgttccaggtcgagtttctactgaagtggatgcacgtcttgcttatgacacaaatggcattatccgcaaggttcatgatctgctgagactatacaatgaaatcgatgtaccacacg

SEQ ID NO: 150339 - DNA, 341 bp, Arabidopsis thaliana columbia
  unsure (1)..(341): unsure at all n locations
agaacagaggagctctgtcttgtttcctcttatttacgtactaccaatcctcatacacacacgtgtgtctttggtttcatctccgaaaagtgataatctngtttttttgatttgacttttgagagaacagagcatatataaagaaacagagcagctctgttttttttttttgtgttgcagtttgtagaatcatggagaggtacgaaatagtgaaggatattgggtctggtaacttcggagtagcaaagcttgttcgtgacaaattttccaaaaagcttttcgctgttaagttcatcgagcgaggccaaaagattgatgaacatgtacaaagagaaatcatg

SEQ ID NO: 150340 - DNA, 337 bp, Arabidopsis thaliana columbia
gtcttaagctttatttctccgttttcgttttgtctttctttatcgtctcggtttcgtggtgtgatgtcaacgacggcgatgatctcgtgatccgtcaggttgttggtggagccgagcctcaagttttgacctcagaggatcacttttctctcttcaagcggaagttcgggaaggtctacgcttccaacgaggagcatgactatagattctcggttttcaaagcgaatctcatgcgagcgaggcgtcaccagaagttggatccgtcggcgactcatggtgttacgcagttctcagatctgactcgggctgagttccgtaagaagcacttgggggttag

SEQ ID NO: 150341 - DNA, 353 bp, Arabidopsis thaliana columbia
aaaaaatataaaataaaaaacactatggcggaaaactacgaccgtgccagtgagttgggaggagtcgacgagatgaagattggcgtgaaaggactcgtcgacgccggagtcacaaaagtcccgcgcattttccataacccgcatgttaacgtagcaaaccctaagcctacatcgacggtggtgatgattccaacaatcgatctatgtggcgtgttcgaatccacggtcgtgcgagagagtgtagttgcgaaagttaaagacgcaatggagaagtttggatttttccaggcgattaaccatggggttccacttgatgtgatggagacgatgataaatggtattcgtcggtttca

SEQ ID NO: 150342 - DNA, 401 bp, Arabidopsis thaliana columbia
  unsure (1)..(401): unsure at all n locations
aaaaaaacagagctttacaatttctctctacagagatcgaagatatggaaggcaaggaagaggacgttagagttggagctaacaagttcccggagagacaaccaatcggaacatcagctcagagtgacaaggactacaaggaaccaccaccagctccgtttttcgaacctggtgagctttcttcatggtctttttggagagctgggatcgcttagttcatcgctacttttctctttctctacatcactgtcttgactgttatgggagtgaaaaggtcaccgaacatgtgtgcttacgtcggaatccaaggaatcgcttgggctttcggtggtatgatatttgccttagtctactgtaccgctggtatctncggtggacacatcaacccagcggttactttt

SEQ ID NO: 150343 - DNA, 183 bp, Arabidopsis thaliana columbia
gttggagttgcacaacaacacaaacatttaccgaaaaccaaccccatcatgactcatcttttgttgtgtcttcacaaatctctctttaaaagtcattacagtagatggtagagaactcttgtgtattgccataactcttccaaaactcttttttctttttgttattgttagtcattgttctta

SEQ ID NO: 150344 - DNA, 362 bp, Arabidopsis thaliana columbia
ctttgtactctctcctcaaattagcttttgttggtgggattttttgaggatggtgattgcgtgcgaggtgtcatcgtgcctttgggccttctcttcttcatatctggtctcgctgacaatctctttcaggcagtttgctatgtactcattcgaccactgtctaagaacacatacagaaaaattaaccgggtggttgcagaaaccttgtggttggagcttgtatggatagttgactggtgggctggagttaagatccaagtgtttgctgataatgagaccttcaatcgaatgggcaaagcacatgctcttgtcgtttggaatcaccgaagtgatattgattggctcgtgggatgggatctggc

SEQ ID NO: 150345 - DNA, 388 bp, Arabidopsis thaliana columbia
  unsure (1)..(388): unsure at all n locations
caacttacaaagcctacaaagggtatactattgtttggaccgcctggtacggggaagacagggctggcaaaagctgtagcaaccgaagctggaacaaacnttantaatatttcaatgtccagcattacttcaaagtggtttggtgagggagagaagtacgttaaagctgttttctctttagcaagtaagatagctccaagcgtcatttttgttgatgaggttgatagcatgctgggaagacgtgagaatccaggagaacatgaagctatgcgtaagatgaagaacgaattcatgataaactgggacggcttacgcacaaaggataaagaaagggttttagtattggctgctaccaacagaccatttgaccttgacgaagcagtaatta

SEQ ID NO: 150346 - DNA, 373 bp, Arabidopsis thaliana columbia
aagagaaacaacaagaagtagtaatggcttcctctatgctctcctccgccgctgtggggacggccccggctcaggccaccatggtcgctccattcaccggtttgtagtcatccgctgcattcccggtcacccgcaagaccaacaaggacatcacttccatcgcaagcaacgggggaagagttagctgcatgaaggtgtggccaccaattggaaagaagaagtttgagactctatcttacctccctgaccttagtgacgtcgaattggctaaggaagttgactaccttctccgcaacaagtggattccttgtgttgaattcgagttagagcacggatttgtgtaccgtgagcacggaaacactcccggatacta

SEQ ID NO: 150347 - DNA, 331 bp, Arabidopsis thaliana columbia
cgcggatgcggaagatggcggagaagacgaagaagctgagaggaggattcatcgtcagcgcgaacgtggtggagaatcgcctcgggaacggagaagacgttctccgagtagagagagggatgattcgaagagtaatcgatcgggaagtagagagagaggaagtaggggtaacggtggtggaagtcgacgagtgagtagatctccgggaagaagatcggaggataaccctaattccagtggcaattctgtgaattcgagtaacaacaatagaccgtggaaatttgtatctgttcctgcaacaagataagctttaagcaacaacaatggagat

SEQ ID NO: 150348 - DNA, 416 bp, Arabidopsis thaliana columbia
gtgagagaagaaagatagagaaaaaaaatgggaggcaaaggtgtgatgatggtggcgatactgtgcggtgttgggcactctctgcaacatctgaagcagtaacagaggctgagccaggtttgatgatgaacttctacaaggacacgtgtcctcaggccgaagacatcgtccgtgaacaagtcaaactcctctacaaacgccacaagaacaccgctttctcttggctccgtaacatcttccatgactgcgccgttgagtcatgtgatgcgtcgcttttgctggattcgacaagaagagagctaggagagaaagaacacgacaggagcttcggacttagaaactttaggtacatcgaggagatcaaggaagctctcgagagggagtgtcctggtgttgtctcatgttctgacattctc

SEQ ID NO: 150349 - DNA, 323 bp, Arabidopsis thaliana columbia
gcgtccgaacaaatctgatcttggtggatggacacggattgttgtggagaagccatttggcagggaccgtgaatctgcagagcaactgagttctcagattggagagttatttgatgaatcacagatctatcgtatagaccattatcttgggaaggaattagttcaaaacatgttggtcctccggtttgcaaatcgctttttcttgccactttggaaccgtgacaatatcgagaacgtgcagattgttttcagggaagattttggaactgaagggcgtggcggatattttgacgaatatggaataatgcgtgatattattcaaa

SEQ ID NO: 150350 - DNA, 236 bp, Arabidopsis thaliana columbia
  unsure (1)..(236): unsure at all n locations
caatatttgccaagacccaaccattttanggaggggcgacaaacgagggggcgtgcttgtgctttaccgagtttcacaacctcggcttctctgaccttatagtatatgttgcgccactctggattgctgtggctgccggagttttggatggatgggtttggaggcccaagtggacttatctcgattctaaactcttgtacaatgcaactaaattcctcaatcttaaggcttccact

SEQ ID NO: 150351 - DNA, 251 bp, Arabidopsis thaliana columbia
gtggggtcctgattgcaccgcaaagtttctacaagacaataatttaaagtggatcatcagagggaagggagcccctgacgaaagggcaaaacgagatgaccttgcaccaatgaatggaggatatgcagaagaccatgaaaggcttataactttgttcagtgctcctgatcattctcagtttcaggatacacgggagagacacaacaacaaagcagcctacataatattacaaatccctgaatgtgaggagc

SEQ ID NO: 150352 - DNA, 420 bp, Arabidopsis thaliana columbia
cgagacagtacccaagaggcccatccgaaggccaggcagatggtgaaggcagcaaccgctgtcacagccggtggatccctacttgtcctctccggcttaacactcgctggaacagtcatcgcactcacggtggctactcctctcctcgtcatcttcagccccgtcttggttccagcagtggtaaccgttgctctcatcattaccggattccttgcatccggtggctttggaatagccgccattaccgccttctcttggctctacaggcacatgacgggatctggatcggataagatagagaatgctcggatgaaggttggaagcagagtgcaagatactaagtatgggcagcacaacattggagtccaacaccaacaagtttcttaaaattcaaaggctaaaaacgatttccacattaaa

SEQ ID NO: 150353 - DNA, 446 bp, Arabidopsis thaliana columbia
gatctccccctcctcctcctgctaagaaaaacgcttctaaaaattcaacttctgcacgtggggcacctgcgaaaaaaaaagaggatcatgagaaaacaatcatcattgctgttgttgtgactgcagtttctacgtttttgttggctgcattattcttcttatgctgctccagggtttgtggaaatggttcaggaggcaggaaaaacgatgaaaggcctcttctcagtttaagcagtagtgattactctgttggttcctccatcaactatggtggttcggtcaaaggagataagcagggtcatcaatcttttaatatttactcaaaccaaggaaaaatgtcatctttcgatggaagtaactctgacacttcagattcgttagaagaacggctatcacacgaaggcctgagaaataatagtattaccaatcacgggcttgcacctttg

SEQ ID NO: 150354 - DNA, 443 bp, Arabidopsis thaliana columbia
gcgagacgaagaagcaaagatgttcagaaaccaatacgacacagatgttacgacatggagtggaacaggtcgtttattccaagtggaatacgccatggaagcagtgaagcaaggatctgcagcaattggactcagatctcgttctcatgtcgttctcgcttgtgttaacaaagctcaatcggagctttcttcgcatcagaggaagatctttaaagtcgatgaccatatcggtgttgcaatcgctggtctcacagccgacggtcgtgtattgtctcggtatatgagatcggaatcgattaatcactcttttacttatgagtctcctcttactgttggtcgtctcgttggtcatcttgctgataaagctcacgtctgtacccaacgatcatggaaacgaccctatggtgttggtttgctggtaggtggattggatgagtctggag

SEQ ID NO: 150355 - DNA, 464 bp, Arabidopsis thaliana columbia
gtacggaatcggagttccgggccacgacccacgcgtgcggacagcgaaagcagggcaccctgagtgggacttgccagaggacgccggagaatacaatgacaagccggaggagactggatttttcaagaaggatgggacttatgtctcggagaaggggaagtttttcatgacatggtactcgaacaaactaatttttcatggagatcagatcttaggagaagccaacaagatctttgctggacttaaagttaacttggctgccaaggtttctgggattcactggttgtacaaccaccacagccacgctgcggagttgactgctggatattacaaccttttcaagagagatggttaccgtccgatcgcccggatgctctcaaaacactacggcattctcaacttcacttgccttgagatgaaagataccgacaatacagctgaagccctaagtgctccttaagaac

SEQ ID NO: 150356 - DNA, 399 bp, Arabidopsis thaliana columbia
aataaaaccaaaaaaaaaaaaatttaattttatcagatgaaacctgagaagctgacaggaaacacatcttcaaccacaggttcatacttactgaaaaaaacagaggaaaaaaaggagctcccttttctatctctaagggaaaatgggtagcaagatgttgtttagtttgacaagtcctcgacttttctccgccgtttctcgcaaaccttcctcttctttctctccttctcctccgtcgccgtcttcgaggactcaatggactcagctcagccctggaaaatcgatttctttgagaagaagagtcttcttgttgcctgctaaagccacaacagagcattcaggtccagttggaggagacaactttaatagcattgttttgtcctattgtagcatcaacaa

SEQ ID NO: 150357 - DNA, 438 bp, Arabidopsis thaliana columbia
gtaccgattcgggattcgcgcaacgcctcacgctttcgctcgttacagtgacagtgccggtaggagacaccaatgacgggtctgcagtggtggtgggccgagcatcattcaagatcttcttcatcttcaacgcactcgcgttgtttacgtctctggcggttgtggttgtccagatcacattggtgagaggagagacaaaagctgagaagagggtagtggaagtgatcaacaaactcatgtggttggcatcgatgtgtacatctgtggcatttttggcatcttcatacatagtggttgggcgtaagaacgagtgggcggctgagctggtgaccgtggttgggggtgtgataatggctggtgttcttggaaccatgacttaatacgtggtaaaaatcgaagaggacaaggtcgatgaggaaagaagtgaagagtgctcgc

SEQ ID NO: 150358 - DNA, 427 bp, Arabidopsis thaliana columbia
gccacgcgtccgcatagagcaccaaacatgtgtgcctctgttggaatccaaggcattgcttgggctttcggtgggagtgatctttgcccttgtctactgtactgctggaatctctggtgggcacataaacccagcggtgacatttggtctgttcttggctcgtaagctgtcattgacgagagctgtcttttacatcgtgatgcaatgtctctgagccatctgcggcgccggagttgtcaaaggcttccagccaaatccttaccaaactctcggcggaggagccaacacagtcgctcacggctacactaagggctctggtttgggtgctgagataatcggaaccttcgtccttgtctacacggtctttttcgtcactgacgccaagagaagcgctcgtgactcccacgttccgattttggcaccactc

SEQ ID NO: 150359 - DNA, 438 bp, Arabidopsis thaliana columbia
gtggctctctaatggcggcggttattggaaacgtggcgttgttacttgacgttaactctcaccgtacggtggtaactgatcggagaattcgtttaacggtggtcgacgtcgttttgaatttacaaaagagagattcgcacagtcacgtttctcattacgctgctctctcttccaataagcctcttgaatctgacggcgaagctcgggttcgccggtttttaactcgcggaaaagcgaattccagagctaacgccgtcgatttcgacgacgcgggatccagcgacgaagaaagtagtgacggaggcggtggtggtggtgacgaggaggaggaggaggaatatttcgatgtggagaaggagaggaagaggagagctaaggaatttcatgatacgaaggagcttgagaggaaagcagaggagttacagtataagattgatg

SEQ ID NO: 150360 - DNA, 430 bp, Arabidopsis thaliana columbia
gggaccgcttaaaccgattcctttggcggagaaatgcaattgattcgtggcagtccagggttgcttcagaggcatcgtttctccatctccaacactcttcctttcacttcttcttcttgtggaagctggtctgctaatgaatcgaggaagctaggctttgattctttccctagtactagagctgcgacatatctcattagctcgttgaaaaatgccggcttttcctctttggcagtagtacctaaacaaaacttttcgtcgaggtgtttttccaccactggagattctgttcaaggatcccctgagtcagattgtgttgtgcctcagagaatcaagtttaagcggcttgataaaaccgctaagcatattatgcagattgtagacaaggaagcagttgaggaagtgagaactcttagagagattccagaga

SEQ ID NO: 150361 - DNA, 437 bp, Arabidopsis thaliana columbia
gaacacttgaaaagacaagattcgcgagttcttcgttctgccttttttttttttgtgtgttcgagagatgtctgcctttgaagacgattccttcgtcatactcaacgatgatgcgtctgagtctgttccagtctcaggctcttttgacgccactgattctttctcagctttcgacggctcactccaagtcgaggactccgtcgacgatgtttttgcagcgccgtcttctgactacggtgcttactccaacggtgacggcatcttcggatccaacggggatcacgacggtcctatcttgccaccaccgtcggagatggaatcagatgagggatttgctcttagagaatggagaagacaaaatgcaattcaacttgaggagaaggagaagagagaaaaggaattgttgaagcaaattattgaggaagctgatcaataca

SEQ ID NO: 150362 - DNA, 436 bp, Arabidopsis thaliana columbia
gaaaaaatggcaataaccaacaaattaatcataacacttcttctccttatctccatagctgtcgtccactgcttatccttccgtgtggagatcgacgagttcgagccaccacagcaaggagaacaagaaggtccccgtcgccgtcctggtggtggctctggcgagggatgggaggaagagtcgacgaatcatccataccacttcaggaagcggagtttcagtgattggttccagtcaaaggaaggttttgtgagagtgctgcctaagttcacaaaacatgcaccggctctcttccgaggaatcgagaactacagattctcgttggtggagatggagccaacaactttctttgtgcctcaccatttggatgccgatgctgtttttatagtcctacaaggtaaaggagtgatcgagtttgtgacggataaaacaaaag

SEQ ID NO: 150363 - DNA, 422 bp, Arabidopsis thaliana columbia
  unsure (1)..(422): unsure at all n locations
actaacagagagaaaaagcaaaagcaaaaatggctcgatctttcgctattgctgtgatctgtatcgtcctcatcgccggcgttactggtcaagctccgacttcaccaccaaccgctacaccagctccaccaactccaacaactcctccaccagcagcaactcctcctcctgtctcagcaccaccaccagtcacaacatctcctcctccagtcaccactgctcctcctccagcaaatccaccaccaccagtctcttctcctcctcctgcttctcctccaccagctactcctcctccagtcgcttctcctcctcctcccgttgcttctcctccaccagcaactcctcctnccgtcgctactcctcccccagctcctctagcttcccctcctgctcaagttccagctccagcaccgaccacgaag

SEQ ID NO: 150364 - DNA, 426 bp, Arabidopsis thaliana columbia
tattttcaaagctcttaacccaaaaaccctaagtcttttttttcttcaaattattgggtatattaatgttttaagctatgatggatatgactcctacaataacaacaacaacaacaccaactcctaaatcacccgaacccgaatccgaaactccgacccggatccaaccggcgaaacccatttcctttagcaacggcatcatcaaacgccaccaccaccaccaccatcctctcctctttacttacaaagaatgtctcaaaaaccacgcggcggctttaggtggtcacgctctcgacggttgcggcgaattcatgccgtcttcgtcgtcaatctcctccgatccaacttctctcaaatgtgctgcttgtggctgccaccgtaatttccaccgccgtgatccagataacaacaacgactcttcccaaa

SEQ ID NO: 150365 - DNA, 129 bp, Arabidopsis thaliana columbia
cgtacgcgtgggaattcgatttattttctattaggccttgctctagcctgcggaggagttattacttccttggtagctcaacacatatactttttaccttcttatcctcttcatagtctcaatgatttt

SEQ ID NO: 150366 - DNA, 411 bp, Arabidopsis thaliana columbia
  unsure (1)..(411): unsure at all n locations
ttgggcaatggagttttaagccatggattttgttgggaccaaaaaaattttgaaaaaggcccttaaaagaaaaaatacccgggaggcgcatttgacccttttggatactcgaaggaccccaagaagctcgaggaattgaaagttaaagagatcaagaacgggcggcttgcgctgttggcgtttgtaggattctgtgtgcaacagtcggcttacccggngacaggaccattggagaacttggcaactcacttggcggatccatggcacaacaacattggcgatattgttatccctttcaactaatgaatgtaaaaatagaaatatgtgtaccttatgagctttatgtgtatcaaaaacactgtgtaatgaaagacagatttgtgaaaaaaataaaaattattttatattaaa

SEQ ID NO: 150367 - DNA, 432 bp, Arabidopsis thaliana columbia
gcccttcttttaccagatcagacgtaaatttcaactcttcagtgaagagatttctttgaccgaattttctactccgatcgatcaattgaagattgaaatggaagctaattcaggcggaggaggaggagctgaaggcggaagagcggtaaccggaggaggaggaggaggaggagggagcgatgtggaattggtgagcaagacgttgcacgtggagcataagctattctattttgatcttaacgagagatgctcgggaaggtatctaaagatattggagaagacgtcggctacgaggtcaaccatcattggtcctttctgcggcatctcttggatccttgatctcttcaactactatgtcaattctgaggaacacgagctttttagcaaagaattgcagcttgattccaaggtggtttacttcgatatcggtga

SEQ ID NO: 150368 - DNA, 414 bp, Arabidopsis thaliana columbia
aaaccactaatttttccacattttgggagaaaaaaacagagcaggtttattagagatctcatggcgatggcggtctccggagctgtcctcagtgggcttggttcttcgttcctcaccggaggcaagagaggtgccaccgcattggcaagcggcgtaggcactggagctcagagagttggcaggaaaactcttattgtcgctgctgcggctgctcagcctaagaaatcttggatccctgccgttaaaggtggtggcaacttccttgaccctgaatggctcgatggctcgctaccaggagatttcgggttcgacccattgggtttggggaaagacccggcttttctgaaatggtacagagaggctgagctgatccatggccgatgggcgatggcagcggttcttgggatcttcgtc

SEQ ID NO: 150369 - DNA, 437 bp, Arabidopsis thaliana columbia
agaaaaaggggtcgggcctaatctataatctctttctcttggacactcttgatccttttaaatggctacactgcccaacagtggcccaacgagtgccagctcgatcaactcaatgcgctcgaaccatcccaaatcatcaagagcgagggtggtcgcatcgaggtctgggaccaccatgcaccccagctccgttgctccggctttgcctttgagcgtttcgtcattgagcctcagggtcttttcttgcccactttcttgaacgccggcaaactcacgtttgttgttcacggaaggggtctaatgggaagagttattccgggatgcgccgagacgttcatggagtcaccggtatttggagaaggtcaaggtcagggtcagagtcaagggttccgtgacatgcaccagaaagtagagcacctacggtgcggtgacaccat

SEQ ID NO: 150370 - DNA, 437 bp, Arabidopsis thaliana columbia
tagggttttagtcatacttaatggcttccaattcggagaaaaatcctcttctgtcagatgagaaacccaaatcgacggaggagaataagagttctaagccggaatcagcttctgggagttcaacttcatcagctatgcctggcttgaatttcaatgcttttgatttctctaatatggctagtattctcaacgatcctagcatcagagaaatggctgagcaaatagctaaagatcctgcgtttaaccaattggctgagcagcttcagagatctattcctaacgctggccaggaaggtggtttccctaactttgatcctcaacagtatgtcaatacaatgcaacaggttatgcataaccctgagtttaagacaatggccgagaaacttggtaccgccttagttcaggatccacaaatgtctccttttttggatgctttc

SEQ ID NO: 150371 - DNA, 434 bp, Arabidopsis thaliana columbia
atggagatgatgatttccaggaggagtttgcttgcccgttctgtgcagaatcgtatgatatcatcgggttgtgctgtcacatagatgatgaacatactttagagtcgaagaacgcggtatgccctgtttgttctcttaaagtgggagttgatatcgtagcacacataacgcttcaccatgggagtttatttaagttgcagcgaaagagaaagtcacgaaaaagcggtaccaattcgacactttcacttcttcggaaagaactaagagaaggagatctacaaaggttgttaggatttacttctcgtaatggttctgttgcgtcaagtgtaactcctgatcctctcctgtcgtcatttatctcacctacacgatcacagagttctcctgcgccacgccaaaccaaaaacgtatccgaggataaacagatagagcgc

SEQ ID NO: 150372 - DNA, 430 bp, Arabidopsis thaliana columbia
tcattttctatcaacaaaaaaaaagacatcttcttcttcttctttttttctaccaatgtcaattttcacatccccatttcctagtcctaaaaaaaacctcgaataatgttgatgcctcccaccatgtcttgtttgattcccaaaatagttttcatatcccttatcacttgttttgtgtgtcgtggaccttatgcccatgcaagaagtttgaatccaccagtcatgggagaaactaacccgctcataaaaacgatgaaggttcctgtgaatataatctacggaagttataaaagtggacctgatgattcaggtaaaggtcacgatgcacctttaccaccaaagataccgatgaatataaattacggaggttataaaagtggacctgatgattcaggtaaaggtcacgatacacctttaccaccaaagatac

SEQ ID NO: 150373 - DNA, 435 bp, Arabidopsis thaliana columbia
aaagaacaaaaatgggtctggtaacaaatgctctcaaatatctcttactcctgtctagttccttgactttcatctacaccaatgcagtttcatccgcttctccaatgactccaccgtcatcgccggctaagatgagcaggagacttgtggcagttgaaggcatggtttattgcaagtcatgcaagtattccggcgtcgatactctcttggaagcatctcctcttcaaggagcgaccgtaaagcttgcatgcaacaacacaaagagaggtgtgacaatggagacaaaaacagacaaaaacggatacttcttcatgctagccccaaaaaaactcaccacctacgctttccacacgtgccgggcttggcctacgaatcctggacccacgactgcaacgatgacatgcaccgtgccgtcaaagctcaacaatggaataa

SEQ ID NO: 150374 - DNA, 386 bp, Arabidopsis thaliana columbia
ctctgtttgtggtaagttggatttcaattatgcagactttgacatctctacgtgcgagtcccacacaatgttctaaaggctcggagcatacctcgtttactggctctgaagattctcaggagtctgatggagatgaaactggttatatagacccaactgtgaatgatgaaaccgctgttcaggatttcggcaaatctgtttttaagtcctaactcttctgatgatgaagacaaggatgagaaccttatgactcagacaccaattgttcttatcccagccataaaaggcagtcgagagaagtttggcttgtcactgaggaagtcgagtgtttcatggggggctgatgtgtatgaatcttctttcttgatagctctcccacacattct

SEQ ID NO: 150375 - DNA, 113 bp, Arabidopsis thaliana columbia
gccaagccttccgttgttttggcaggagggtttcctttaagtttatgggaaggggtccaaaccgccatatttaagggcctttggctcaacatccctgcctttgatgccccaac

SEQ ID NO: 150376 - DNA, 431 bp, Arabidopsis thaliana columbia
acttttgaaggtctgtctgttttcctgatctgaggtccttctagggatttttttttatggcggtgaagcagcagaagctttagctagacttgtcggaagattgtgacacttattgaatctcagattagggtctacttatattaccattgagtggaatatttgaaagactgttcttccgaaggtgaaattcatggctgataagtacatcgtcgaggaagcagaggctttggccaagagagctttgcattcaccaattgcacaggcgacgccgatctacgagcagcttttgtcactttatcccacttctgcgagattttggaagcaatatgtggaggcacagatggctgtaaacaatgatgatgcttccaaacagatatttagtcgttgtttgttgacctgccttcaagttcctctttggcaatgttacattc

SEQ ID NO: 150377 - DNA, 443 bp, Arabidopsis thaliana columbia
  unsure (1)..(443): unsure at all n locations
cttccatcctttcccaattcatcaccttaatcgtttctttcaaattaagggttttctcttttctcgaaggtcttgcggttttctgaatcatctctatctggtttgagggtttcgtttgatatctggagaaaggggtttctggaaacaaggagttcataattcgcgatcttgatctatcgatcttcatttatatataaaagcgtgaatgagattatgatggagtcgaaaggtggtaaaaagaagtccagcagtagtagttccttattttacgaagctcccctcggttacagcattgaagacgttcgtccaaacggtggaatcaagaaattcaaatcttctgtctactcaaactgctccaagaggccatcctgagtaccagcgtgcaccgatcttcataatatagttatagctttctttactttccagtttataattntcttctt

SEQ ID NO: 150378 - DNA, 413 bp, Arabidopsis thaliana columbia
  unsure (1)..(413): unsure at all n locations
cttcggattttcattagttgggttaaccaaagtttaatccacagagatttaaagccctttaacatccttttaggagatgacatgagagccaaggttgctgattttggattggtcaagaacgcacctgatggtaaatactctgttgaaacaagattagcaggcacattcggttatctagcaccagaatacgccgctactggaagagtaacgacgaaagtggatgtgtatgcatttggtgtggttctcatggaaatactaactggaagaaaagctntagatgattcattaccagacgagagatctcatctagtcacatggttcagaagaatcctaatcaacaaagaaaacattctaaaggcactcgaccaaaccttagaagcagacgaggaaacaattgagagcatttacagagt

SEQ ID NO: 150379 - DNA, 419 bp, Arabidopsis thaliana columbia
ggaggaggtgatcttctcttctcagatcatcttctactcttgagtatacccggcctttgaagataattcctagtttgggacttatccttacttctccgggatttcactttaatccaccgaagagttttgacatctgaattgtattgttttgggtgtgatcccgatagaattcgagggtaggaatcggaaagtagggtgatttggtttagaagaagaaagaaatggagggttttgtcgatcactacattgttctaggtttagcttctggagaggaagctctgaagcttaccgagaaggagattgcaaaagcatacaagttgaaagctttggacttgcatcctgataaaccccctgatgatcctgatgcccatgagaaatttcagaggcttaagacattttacgaggttttttaaagacga

SEQ ID NO: 150380 - DNA, 380 bp, Arabidopsis thaliana columbia
gagttttctcaggtttctatctctctctttaaacacaacgaaagacattgaagctgagagaaatggctcttaagacattgcaagctctgatctttcttggtctatttgccgcctcatgtctagctcaagctccggctccggcacctatcacgtttcttcctccggtagagtctccttctccagttggtacaccaactgcagaaccaccggctcccgttgcttcaccccctattccagccaacgaacccactccggttccaacaacttcaccaaccgtctcacccccgaccacgttgcccacaactttccctgtcgcttcttctcctaaaccatatgctttggcttcaggcccatcaggtccaacaccagcttcgggcccc

SEQ ID NO: 150381 - DNA, 434 bp, Arabidopsis thaliana columbia
aagaagagcaagcagcggcgcataagttgaacacaagtgaagctcacaatggcgaggattaaggttcacgaattgagggagaagtcgaagagcgatcttcaaaaccagctgaaggaactcaaagctgagctcgctctcctccgtgtcgctaaagtcaccggaggtgctccaaacaagctctctaaaatcaaggtcgtgcgtaaatccatagctcaggttttgacagtgtcttctcagaagcagaagtctgctctaagagaagcatacaagaacaagaagttgcttcctcttgatctccgtcccaagaagacccgtgctattcgtagacgcctcaccaaacaccaggcctcgttgaagacagagcgtgagaagaagaaggagatgtatttcccaataaggaagtacgctatcaaagtttaagttttagctgctag

SEQ ID NO: 150382 - DNA, 435 bp, Arabidopsis thaliana columbia
ggaggccacgaaggtttcagcatccatctcctctcctccgccacatggttctctcaggtgccgtgcttcagctctccgatctaaatcactgccccctccgtcctcgcagactgccgttcgctccacctctggcgactctctggttcgtcgcctcggccttttcgacctcatactgttgggcgtcggcgcttccatcggcgccggtgtcttcgtcgacaccggaaccgtcgctcgcgatgctggacctttagtcacaatcagcttcttgctagcttgtgctatttgtgtgttgaacgctctttgttttgctaatctttcattttcgttaccctgctgcttgttgttggatctaacatgtactttattctcagctttctattgttaatcctatttttttttagtttatatttcatctcttggcttttgcttttttta

SEQ ID NO: 150383 - DNA, 141 bp, Arabidopsis thaliana columbia
cgtccggcgggaggtttccagcggggagggcgagtttttaagaaacatggccactaggagacactgttgctgggaagaagtcaatgagtcaaaagacagagcctgattctatggaacaaactgtgaatgtgatgcaccatg

SEQ ID NO: 150384 - DNA, 434 bp, Arabidopsis thaliana columbia
tttcatctctcaggtaaaaaaactgagtcgagatttggtgacgtgatgaatcatttggtgataatctctgtgttcttgagctcagtattgttgttatatagaggagaatctggaatcacaagtagttttattcgatctgaatggcctgcggttgatataccacttgatcatcatgttttcaaagtcccaaaaggatataatgcaccacaacaagtacacataactcaaggtgattatgatggtaaagctgttatcatctcttgggttacacctgatgaacctggttctagccaagtacattacggtgcggttcaggggaaatatgagtttgttgctcaagggacttaccataactacacgttttacaagtataagtctggctttattcatcactgccttgtctctgaccttgagcatgatacaaaatactatta

SEQ ID NO: 150385 - DNA, 417 bp, Arabidopsis thaliana columbia
  unsure (1)..(417): unsure at all n locations
cttccggaattggaaaaaggcccccaacctttttttttccttaatctttctctcctcccatcataatcaccatgtcctcccataccaatctcccctctcccaaaccagttcctaaaccagatcaccgtatctccggtacatcccaaaccaagaaaccaccgtcttcctccgtagctcaagaccaacaaaacctaaaatgccctcgttgcaactctccaaacacaaagttctgttactacaacaactacagtctctctcaacctcgtcacttctgcaaatcttgtcgccgntactggacacgtggcggtgctctaagaaacgtccccatcggtggtggttgccggaaaaccaaaaaatctatcaaacctaattcctccatgaacacactttcttcgtcttctttctcttagaggttct

SEQ ID NO: 150386 - DNA, 428 bp, Arabidopsis thaliana columbia
ctctctctgcctcctttcggattcaaatctcagatctagctcaaccatggcgttgctcgtcgagaagacctcaagtggccgtgaatacaaggtcaaagacatgtctcaagccgatttcggtcgtctcgaactcgagctcgccgaagttgagatgcctggactcatggcttgtcgtaccgaattcggaccttctcagccattcaaaggcgctagaatcaccggatctcttcacatgaccatccaaaccgccgtactcatcgaaaccctaactgctctcggtgctgaagtcagatggtgttcctgcaacatcttttccactcaagaccacgccgccgcagccatcgctcgtgactccgccgctgttttcgtctggaaaggttgagactctttaagagtactggtggtgtaccgagcgtgctctagattgg

SEQ ID NO: 150387 - DNA, 362 bp, Arabidopsis thaliana columbia
ggagctcaaggatctgcagaaggatccttcttcaaactgcagcgctggtccggtggctgaggacatgttccattggcaagccactatcatgggacctcctgaaagtccgtatgccggaggagtgtttttggtttctattcatttccctccggattatcctttcaagccaccaaaggtgtcttttaagactaaggtgtaccatccaaacatcaatagcaatggaagtatttgccttgatattttgaaagagcaatggagccctgctcttactatctctaaggttctgttgtcgatttgctcgctgttgactgacccaaacccagttgatcctcttgtgctcgagatagtctacatgttcaaga

SEQ ID NO: 150388 - DNA, 417 bp, Arabidopsis thaliana columbia
aatttcttcacaaattcagcggcgatgaagttcaatccgcgtgtgagctcttctcgccggaagaacaggaaggctcacttcacagctccttcaagcgtgaggcgcgttctcatgagctcgccgttatccaaggatctccgtaacaaacacaacgtcagatccatgccgattcgtaaagacgacgaagtgcaagttgttcgtgggacgttcaagggaagagaagggaaggtgatgcaggtgtatcgccgcaagtgggtgattcacatcgagagaatcacaagggagaaagtcaacggatccacggtcaacgtcggagtcaatgcttcgaatgtgatgatcactaagctccgtctcgataaggataggaagttcgctttggagcgttaggctaatggacgcgccgccgtcgataaggag

SEQ ID NO: 150389 - DNA, 358 bp, Arabidopsis thaliana columbia
caaaaacttgtgaccaaggaatgcaacttctctttagatgagtattttgatgtatcgaggatccttgacatgtacagtctgacgctccaaagtgtgtccccacctccacgaactcctctacttctcattcagtcgccggaaaccgccccctacccgcattccgaagcattctacgaccccgtctcatctctcacaatgaaggatggaggaggatggccgccgggtacgatccatgtgcatcagagtatacagaaaaatatatgaacagaaaagatgttcaggaggcactttacgctaatgtcaccaacatctcttaccctaggactcattgcagtgacactgtcttatttttgtctga

SEQ ID NO: 150390 - DNA, 425 bp, Arabidopsis thaliana columbia
ttaaataattaacagttttcttggagaaaagattcaagtccaagtccaagcagagaaagtgagagagagagaaatgatgggtagcttgaaaataatatctccaccacctccggcgacaagattccggcaacgagtaacggcgaacggagatgggtttccgacatttcttccgaaggagatacaaaacataaaagatccattcgcaagagctttagctcaaaagattgtacgaattcctgttcctcttcagatgggaaactttagaggcagtgtaatgagtagctgtatcaaaccacttgttcaattacacgacaaaagtcccgttggtcttcttcattggttcgacagttcttgtcttgaatggagacgtacttattctctgcttggacaagccttgcttgagacttgggctattgatgttcttg

SEQ ID NO: 150391 - DNA, 428 bp, Arabidopsis thaliana columbia
ctacacacttttctgcgatatctctgagtatttgttgacagtctctaaccatgggtaaagagaagtttcacatcaacattgtggtcattggccacgtcgattctggaaagtcgaccaccactgggcacttgatctacaagttgggtggtattgacaagcgtgtcattgagaggttcgagaaggaggctgctgagatgaacaagaggtccttcaagtacgcatgggttttggacatacttaatgctgagcgtgagcgtggtatcaccattgacattgctttctggaagtttgagaccaccaagttctactgtactgccattgatgctcctggccattgtgattttatcaagaatctgttcactggtacctttctagctgtttgtctggccttattattgactttactctcttttggttttgtgtctttt

SEQ ID NO: 150392 - DNA, 353 bp, Arabidopsis thaliana columbia
ctcaagttaaaacagaaaaaatgtcaactttagaaaacactccgtttaatggcgttgcctcatccaccattgttcgagctaccattgtccaagcctccaccgtctacaacgatactcccgccactctagaaaaggcgaacaagtttattgtggaggctgcaagcaagggatcggagctggttgtgttcccggaggcgtttatcggtggttatcctcgaggttttaggtttggtttaggggtgggagtttatatcttataatgtctgtatgatttttcttatgttccattgctttcttatattatatgtttctgtttccttgtatttgtatatttttttttgttaattcttttt

SEQ ID NO: 150393 - DNA, 418 bp, Arabidopsis thaliana columbia
ctcactgtaatcccttagatcttcttttcaaatttcaatggcgtccggtgatgttgagtatcggtgcttcgttggaggtctagcatgggccactgatgacagagctcttgagactgccttcgctcaatacggcgacgttattgattccaagatcattaacgatcgtgagactggaagatcaaggggattcggattcgtcaccttcaaggatgagaaagccatgaaggatgctattgagggaatgaacggacaagatctcgatggccgtatcatcactgttaacgtggctcattcacgaggtagctgtttcttgtttgagccattcgttttgtttattattattttttttctctttatttttttctatatatcttttcttcttttttttttattagttacttttaattttaaactcata

SEQ ID NO: 150394 - DNA, 220 bp, Arabidopsis thaliana columbia
agaaaattcagcatttttgatagctcaagcacttgattctttccaaaggggtttcctgagatcacaaaggccaagtaacaatggcgaaaggagttgcagttttgaacagcagtgagggtgttacggggactatctttttcacccatgaaggcgattgtgtgactactttgagtggatcagttttttttttttattctgttttttttggttttcatgttta

SEQ ID NO: 150395 - DNA, 201 bp, Arabidopsis thaliana columbia
acccttccgtttgaatttttcaggaccaaaagaaaaatacatttttaatggcggccatgaactcgggggttctcacttgcagctacgcaattgctggctctggctcggtagagcttaaccagaaagttggtttggtgaattcatcagttgggtttggtcagaagaaacagatgattatgcctgtgatcaaagctcaacgcg

SEQ ID NO: 150396 - DNA, 436 bp, Arabidopsis thaliana columbia
gaaataacaaaatggctcgagtctcttctcttctttctttctgcttaacacttttgatccttttccatggctacgcggctcaacagggtcagcagggtcagcagtttccgaacgagtgccagctcgaccagctcaatgcgctcgagccgtcacacgtactgaagagcgaggctggtcgcatcgaggtgtgggaccaccacgctcctcagctccgttgctcaggtgtctcctttgcacgttacatcatcgagtctaagggtctctacttgccctctttctttaacaccgcgaagctctctttcgtggctaagggacgaggtcttatgggaaaagtgatccctggatgcgccgaaacattccaagactcatcagagttccaaccacgcttcgaaggtcaaggtcaaagccagaggttccgtgacatgcaccagaaagt

SEQ ID NO: 150397 - DNA, 392 bp, Arabidopsis thaliana columbia
ctcactctcttctcttctcctactctcttctctcttcgttttctacatcttcaagggtgttttcaaaagaagaaaccagagaaactgctacatgcttcactacgagtgctacaagggcatggaagagagaaaactcgacaccgagacttgtgctaaggtcgttcaacgaaacaagaacttgggtcttgaagagtacaggtttctccttcgtactatggctagttccgggataggagaggaaacgtacggtccaagaaatgtgcttgaaggtagagaagactctcctactctccttgacgctcactccgaaatggacgagatcatgttcgacactcttgacaatgctttttacaagacaaaaggctcaatctcttcttcagacattgatattc

SEQ ID NO: 150398 - DNA, 427 bp, Arabidopsis thaliana columbia
gacaccttctctaaactcaaattgatgatcatggtgttgatggagtcgcttcgtctgtacggacccgtgattaaaatttcccgagaggcaacacaagatatgaaggtaggacacttggagatcccaaagggcacaagcattatcataccgttactgaagatgcacagagacaaggccatatggggcgaagacgccgaacaattcaatcccttgagattcgaaaacggcatttctcaagccaccattcacccaaacgctctcctcccgttctcaatcggaccaagagcttgcattgccaaaaactttgccatggtcgaagccaagaccgttctcactatgatccttcaacagttccagcttagcctttcccccgagtataagcacacgccagttgatcacttcgatctctttccgcaatacggcctac

SEQ ID NO: 150399 - DNA, 339 bp, Arabidopsis thaliana columbia
ggaagcacatgctcgcatagaagatctctagagcgagaagcgatctcataaaaagaagctcgagcagttcttgaggaaagttagcgaggagagggctgcttggcggagcagggagcatgagaaggtccgagcaattattgacgatatgaaaactgatatgaacagggagaagaaaacccgtcagagattagaaatcgtaaatcataaactagtcaacgagcttgcagattcaaagttagccgtgaagcgttacatgcaggactacgaaaaggaaaggaaagcaagagaattgattgaggaagtttgcgacgaactttgcaaaggaaataggagaagtta

SEQ ID NO: 150400 - DNA, 446 bp, Arabidopsis thaliana columbia
tccgccggtttacaaggtccccgccaccaccggttaagttcttctcgcctcctccggtttacgggtgtcctccaccaccagttaagtactactcccctcctccagtttacaagtctccaccaccaccggttcactactctcctccttccgtagtataccattccccaccaccaccggttcactactctccttctcccgtagtatatcactccccaccaccaccggttcactacttttcttcttcagtcgtataccactcttcaccaccaccgggtcactactcaccttctccagtcgtataccactctccaccaccaccggtttacttcttaccttcttcagttgtataccactctccaccaccactcaagaagcactacgaatacaaattttcttcttcttcggtccattacttttcccctacggtataccattcttcttcttct

SEQ ID NO: 150401 - DNA, 411 bp, Arabidopsis thaliana columbia
aaaaaagaaaaaaaaaagtccttaattctttatctgaataatgagtcatccgacaattcatgatttagattcaactacttatacttattaataaactaatagcaaggaagaaacaaattgagttgatccgtttacctaagtaaggaccaataaaatcaaaaattttgatcttcgaaaccaattaaatgaaattctaagggttccattttatggggcagtgcgcgagaaattaaatcataaacaaatgatagaatttgagcgccctgaaaatgccataatatataacattaaaatctataacattaaggtgttcggaaatggttgaagtagatgaataggaggatcgctatgactatagcccttggtaaatttaccaaagacgaaaaagatttatttggtattatggatgac

SEQ ID NO: 150402 - DNA, 427 bp, Arabidopsis thaliana columbia
gactattatctcgtgaaacaaagatcacttcgggattcaaacctgctccggcgagcgtgccactttgttcggggtagacatcgattccaaccctcagcaccgcgctctcttgagctcggcatgaacaagacggagcttgcctcatgatgactaaatcaaactcagattccgactacttggatggctactatcgtcgcaagcaacctcagacctccaccatctcttggttgctacccgttctggggaaacaagagactactcttcgtattgatccatgctgaatgaccgtgacacatcacatcatgacagacatgtataccatcgattgactccggctgcgtttaactccgccgaatcggaccaccaccatcaccgcttaactcatgtctacattggtgagcttcaccctgtcttcgatgaggctgtt

SEQ ID NO: 150403 - DNA, 425 bp, Arabidopsis thaliana columbia
gagattgcgccggagtcaaggagagggagagagcgatccaacggttgagatgtttctacgggcaatcggacggccattattggctaaagtgaagcagacgacggggatcgtcgggcttgacgttgttcccaacgcgagagcggtgctgatcgatctctacagcaaaaccctaaaggagatccaagctgtgccggaggatgaagggtaccgtaaagcggtggaatcattcacgcgccaacgtctcaatgtgtgcaaggaagaagaagattgggagatgattgagaagcggcttggttgtggtcaagtcgaagagcttatcgaagaggctcgcgatgagctcacactcattgggaaaatgattgagtgggatccttggggtgtaccagatgattacgagtgtgaagtgattgagaatgatgcgccga

SEQ ID NO: 150404 - DNA, 443 bp, Arabidopsis thaliana columbia
ggttgccgcgcaccgcacccacgcgtccgcggacgcgtgggtttagaggtctacaactaaaagcctttgtgtgtgccagagtagctccctactaatccgccgccgcacctcctcgatctccgcccagctcccttcttttctatctatctattcagttgtttctccggtaacaaccagctgaggaagaagaagaagtagtagccgtgatgatgatgatgacgtcacttggtggtggtgctggaggcggcggaggaggtggtggtagtggtggtgggagatttgtgacgtattcgtcgtctttatctgtgcctccgtcggctcctcagtcacctaacttctctggtggtctccgatcacagccttctttttcttgttgaggcaagagatgtatcgtttctgagttacttgcagagcgtcacaggcttactccattttttgcctgt

SEQ ID NO: 150405 - DNA, 412 bp, Arabidopsis thaliana columbia
ttcgaaagatgctttatgctttgatgaaaagcagatgtaaaaatgatatactcaaattcaggaagcaaacgagagaagtaacaagttattgaaggggaagtacaaagtgtaaaatgatctgcgtttgagataagtgacgaagaagaatataataataaatcttttagtactagagaaacagacctctgtctttgatttgtaaaccaaacaagcagaagaggaatctggctaacattccatctatgccttgcttgcgatgttgttggagagccagtcaagtcccttatagagtccttctccagaggtggcacatgtgctctgaatgtaccagtgtcgttgacgaagagaatgaagcccaagcttgtcagttatctcagcagcgttcatcgcgttgggaagatcttgcttgtag

SEQ ID NO: 150406 - DNA, 392 bp, Arabidopsis thaliana columbia
aattcgggattccaccccacgccccacgccagctcgatagccgaacctgccgaaactatatctacatgggaaccaagttcaattcccgtaaggaagacgtcattggcgagacgtatctcgggattcaaatatttagattctacttcaagtgcaccaagtgctctgcagagctgactatgaagacggatccacaaaattctgattacattgtcgaatctggggcatctcgaaattatgaaccctggcgtgcagaagatgaggaggttgataaggataaacagaaaagagatgctgaggagatgggggacgcgatgaagtccttggagaacagaactttggatttctaaaagagaaatggtccatatagctgcactttgattgtaatgaaattc

SEQ ID NO: 150407 - DNA, 398 bp, Arabidopsis thaliana columbia
  unsure (1)..(398): unsure at all n locations
tttctagtggaagtgtcatggagttcagcaaatttggtagcgatttgggtataaactggtaaaagttgcttctctcgggttttaatctgtttctggagaagctcgatgtttgcatatgccttgtttcgcttggcatcttggatatttgctttcagattgattagcgtctggtccaaccttcccatgcactctaacagctctttccttctaaattttatctctatcatcccttcaggctcaagcacattttcacgagcggtttcatcagcgtacatttcaatataatccgaatttatctggctatcaacaaccacccatgcttcacctngcagttctcccatcattgggatgtacacaaacactggctgccgatatgttctcagattttctactatagc

SEQ ID NO: 150408 - DNA, 457 bp, Arabidopsis thaliana columbia
ggaattcggattcccgcacgccccacgccagctcgaagccgaacattcccagcctcttgagtcttacttccagtcaatccctgggatcgagatggtggcttgctcaacaccttacaacgctaaaggattgatgaaagcggcgataagaagtgagaatcctgtgattctgtttgaacacgttctgctctataacctcaaggagagtattccggatgaagaatacatatgtaatctggaagaagcagaaatggtcagacccggtgaacacatcacgatactgacgtattcaaggatgaggtaccatgtaatgcaggctgcaaagacgctggtgaacaaagggtatgatccagaggttatcgacataaggtccgtgaagcccgttgatctctacacaattggaaactcggtgaagaagacacaccgggttttgattgtggaggaatgtatgagaacggga

SEQ ID NO: 150409 - DNA, 374 bp, Arabidopsis thaliana columbia
  unsure (1)..(374): unsure at all n locations
caaatggatcgtcttaagctttatttctccgttttcgttttgtctttctttatcgtgtcggtttcgtcgtctgatgtcaacgacggcgatgatctcgtgatccgtcaggtggttggtggagccgagcctcaggttttgacctcagaggatcacttttctctcttcaagcggaagttcgggaaggtctacgcttccaacgaggagcatgactatagattctcggttttcaaagcgaatctcaggcgagcgaggcgtcaccagaagttggatccgtcggcgactcatggtgttacgcagttctcagatctgactcggtctgagttccgtaagaagcacttgggggttagaagtggctttaagcttnctaaagatgc

SEQ ID NO: 150410 - DNA, 394 bp, Arabidopsis thaliana columbia
cgaagaacaaagtttgaaccttttcttcatccatctctctccgtcgcttcttcctagcgatggcttcactcgaatcaggtttgtgaaggttttttctagggtttcgaaaagatgccggcgacagcaggaagagtgcgtatgcccgcaaacaatcgggtgcatagtagtgcagcgcttcagactcatggaatatggcagagtgcgattggttatgatccttatgcaccaactagtaaagaagagcctaagacgacacaacagaaaaccgaagatcccgagaactcgtacgcgagttttcagggacttttggctcttgctaggattacgggttcgaataacgatgaggctcgtggttcttgtaagaagtgtggccgtgttgggcatttgacgtttc

SEQ ID NO: 150411 - DNA, 434 bp, Arabidopsis thaliana columbia
gatggctagagtttgtgtaatgatgatggctatggctatagctatggctatgaacggagctatgggtgatccaatagcaccatgttacttcatattcggtgactctttggttgatagtggaaacaacaatcggcttacctctctagcaagagctaattacttcccttacggtatcgacttccagtacggtccaaccggtcgcttctccaacggaaaaaccaccgtcgatgtcatcactgagcttcttggtttcgatgactacattacaccgtattccgaagcaaggggagaagatatcctaagaggagtaaactacgcttctgcagctgccggaatccgagaagaaactggtcgacaattgggagctagaataacatttgcagggcaagtagctaatcatgtaaacactgtgtcacaagttgtgaacatactcg

SEQ ID NO: 150412 - DNA, 442 bp, Arabidopsis thaliana columbia
ggggccacgcgtccggatggctagagtttgtgtaatgattatttctatggctatagctattgctatcaacatggctattggtgatccagtaccaccattttacttcatattcgttgactctttggttgatagtggaaacaacaattggcttacctttctagcaagagctaattactttctttacggtatcgactttcagtacggtccaaccggtcgcttctccaacggaaaaaccaccgtctatgtcatcactgagcttcttgttttcgatgactacattacaccgtattccgaaacatggtgagaagatatcctaagatgagtaaactacgcttttgcatctttcgttattctagtagaaactgttcgttaatttgtagattgaataacattttcatgtctagatagctattatgtaaacactgtatacatgtctttatca

SEQ ID NO: 150413 - DNA, 435 bp, Arabidopsis thaliana columbia
  unsure (1)..(435): unsure at all n locations
aacaaatccttctctgagaaaaaacaacagatccgaattttatctttaatcaggcggaaaaaatggagaaagcgatcgagagacaacgcgttcttcttgagcatctccgaccttcttcttcttcttcgcacaattacgaggcttctctatctgcttctgcttgcttggctggggacagngctgcatatcagaggacctctctctatggagatgatgttgtcattgtcgcggcacataggactccactatgcaagtccaaacgtggcaatttcaaggatacatatcccgatgatttgctcgcacctgttttgagggcattgatagagaagacgaatctaaacccaagtgaagtaggtgacattgttgtgggtactgttttggcacctggatctcagagagccagtgaatgcaggatggctgcgttctatgctggtt

SEQ ID NO: 150414 - DNA, 292 bp, Arabidopsis thaliana columbia
cgtgcgtgcagataacaactttgatcaagatgacctcttgacggaggaaatgcatttactagaagtcatgctgaagtttttgtctgggttggtcaatgtgtggaccctaaggaaaaacaaactgtctttgagattggccaaagatacataaatctggctggttcgctggaaggcttggctccaaacgtttcattttacaaaatcactgagggaaatgaaccgtgcttcttcaccacttatttttcatgggatgatactaaagctacagtgcaagggtatttcctaccacaaa

SEQ ID NO: 150415 - DNA, 434 bp, Arabidopsis thaliana columbia
ttaaaaccctcgaacacatcgcctttatctctttctctagatctactcgctatggcgactatcaccgttgttaaggctagacagatcttcgacagtcgtggtaatcccaccgttgaggttgatatccacacgtcaaatggtattaaggttacagcagctgttccaagtggagcttccactggtatctatgaggctcttgagctgagggatggaggatctgactaccttggaaagggtgtatctaaggctgttggcaatgtgaacaacatcatcgggccagcacttattggaaaggacccaactcagcagactgctattgacaacttcatggtccatgaacttgacggaacccaaaacgagtgggggtggtgcaagcaaaagcttggagccaatgcgattcttgctgtgtctcttgctgtctgcaaagctggggc

SEQ ID NO: 150416 - DNA, 415 bp, Arabidopsis thaliana columbia
aaaagatgctcttgcttaaacaccaacataaacaagaagagcagcagcaattgttacgacagcaacagcagctgtattctcaggtttttgctgatcaacagcgttctcagcaacggtttggagacccatcttatggtcagttgcaggcgtctcttgatgcgcttaggctgcaaccatcaaaagatatgtcacaagtcaatcagcaggtgcaggttcctgtttcccatgaggagcgaggcatcaacttagctgatttgctcccagtaacccatgccactaatcagactgttgcttctttcgaaaccccctctctgcacctgcaaaaccagctatttggtaatgttgaccctaggatggttctgcctgatcaaattgatgatacccataaaaaagagtcgaaatcagaatatgaaag

SEQ ID NO: 150417 - DNA, 362 bp, Arabidopsis thaliana columbia
atctgcctttactctcttcatctttaccttcgacatcttcctccaatgtctaaatcgcggcggagctgccacgtgtcatcctgatgatgaagcgggtcttctagctttcaaagcgggtataacccgagatccttcgggtattctcaggtcttggaagaaaggtaccgcttgttgttcttggaacggtgtcacttggctcaccactgaccgtgtctctgcactctctgtcgctggacaagccgatgttgctggaagctttctctccggcactctctcgccgtcgttggctaaactcaagcaccttgatgggatttacttcaccgatctgaagaacatcactggttcttttcctcaattccttt

SEQ ID NO: 150418 - DNA, 143 bp, Arabidopsis thaliana columbia
tcgctcaactttgcagaattttcctctaaaggttcagactttggggtaaaggtgtgaacgttggctatgggtcttgacggaaacaattgtggaggggtttgtttaaacttttgttgtgtttttattcttatatattttttata

SEQ ID NO: 150419 - DNA, 444 bp, Arabidopsis thaliana columbia
ggggggggccacgcgtccgaatgcctaataactaacgatcaacttctcttattttctttatattagtcatcggatgcaatcactacatggcttttggctttcctctcttcctccttcctgaacttgatcccacaagcattgcataaactctgaaacacatttaccaatttaaaaattaataataattattaagcagcataattaatatttaaacatgatttattagttgaaaattcggagactaattaccttaggaccaagaggacctcttcgccacataggagtgttaagtgcgttacaattcatgttcgtacacttcttcatcccttcaatcctccccccgcagaatccaccacaaccgcgaatccgcttcggggttgcgttttccttccaagagtttgtcatcaccgtagagttgttacgacgagctctcctagcaggaac

SEQ ID NO: 150420 - DNA, 436 bp, Arabidopsis thaliana columbia
gcagagaccaaagaagagacaactaccttcaccttagatgatgaagaagctgggttggaaggcgaaaaggaagcggaaaagatgattgtagaagcatactctgctctactactcgcctttctttcaactgaaagtagaagtatacgcaactccatcaaggactatctcccgaaacgcaatctggcaattcttgtaccggttttggaaagatttgtggcatttcacatgactctgaacatgatccctccggagacacataaagcagtgatgggagtgattgaatcctgcaaatcaccgtagaaagggatcaaaaagggcaattaattcttcattctccaatttctctgtacagcttctgcaatagaaaagaaaaaagaacttggaatgctttggggtgatcactaactctggtgatcgcattgatgtatgatataag

SEQ ID NO: 150421 - DNA, 437 bp, Arabidopsis thaliana columbia
cggacgcgtgggaaagaacccgacaaagcgccatgtcgctcactatcccggcgaatgtggggctcaacccgagatctaacaaatctctcactcaatccgtacctaaatcctccgcaagattcgtctgctccgatgacaaatcctcctcctccacacctcaatccatgaaagctttctccgccgccgtcgccctctcttccatcctcctctctgctcctatgccagctgtcgctgatatctcaggtttgactccttgcaaggactcaaaacagttcgctaaaagagagaagcaacagatcaagaagcttgaatcttctcttaagctctacgctcctgaatctgcccctgctcttgctctcaatgctcagatcgagaaaaccaaacgcaggttcgacaactacgggaagtacggattgttatgcgggtcagacggttta

SEQ ID NO: 150422 - DNA, 436 bp, Arabidopsis thaliana columbia
accaaaaccatcagatcttaagaagaagaacctaaagctcactacgatattgggcgagaatatgacgactttttctgttccgattgataacggagattctatgaagatcgcagaagaagaatcacaaagaacactgtacccatatgttactggaacttcaattgttgcaatcaagtacaaagatggggttttgatggcttctgatatgggaggttcatatggatcaaccttaagatacaagaacatcgagagagtgaaggctattggtaagcattctcttcttggtgccagcggagaaatcagcgactttcaggagattctccgttatcttgatgagctcaccctgaatgataacatgtgggatgatggtaactctttgggaccaaaagagattcacaactatctgacccgtgtgatgtacaaccgtcgcaacaag

SEQ ID NO: 150423 - DNA, 429 bp, Arabidopsis thaliana columbia
aaaaaagcaaatatttattcgtaaatataacttcagaaccctttcaacaaaacgtgtggctgttctttctccgtggagaagttaaagatgacgatgtcggagaactcaagaaacttggaagctggtttgctactgaggaagaaccaaaacgacatcaacgaatgtcgtatcactgctgttgtacttttcagtactttcgtttctgtttgtggctctttctgcttcggttgtgcggcaggttattcatcagttgctcaaacagggatcataaatgatttaggtctctctgttgcacaatactccatgtttggttcaatcatgacttttggaggaatgattggtgccatcttcagcgggaaagttgcagatctcatgggtcgaaaagggactatgtggtttgctcaaattttctgcatcttcggttgggtt

SEQ ID NO: 150424 - DNA, 436 bp, Arabidopsis thaliana columbia
cgtccgaaaagggtttatcatccttgaaaaggagacaaatattgcttcaaagctaaaatcaaacgggcttcgtgtttacgttgaaagatttagcaacgagtgtgtaactcatgcatttgacttttacgatgatccaacgttagagatagactcttttgtccgcgatgtccaaattgatggcatcatcactgacttcccagcaaccactgcaagatacagaaagaacaagtgttacggcgaatttggtctgactacaaccggtgagctcataactttcgcgaatccaatgcttcttccaccagctgaagctccatatccagcactacttgactcagatgtgacggaaccaccattgcctgaagcaagaagtcagcctcctgcttcttctccatcaaaggcagaggaaaaagcaatagaagttccctttgcatttata

SEQ ID NO: 150425 - DNA, 438 bp, Arabidopsis thaliana columbia
ggttaccaaagtgttacatttccgtattaccgatcgtccgattccgcctgaaaaccggagatctgcaacaaaatataatctccagaccatgatgaatctagaagatgaagaaacacacatcttcgttatgaaccgtttcgaatcttcccttattttttcaaggggcaagatcgaaatatcttcttaacaggtcttagtttctcttcttagggtttagtggttgtgtaggagtatttgtgtatagactttttactagttgtcgtatctttctctgtatcttcgggtttttaatttctgcttaatcgtcaggttctctgggtaaatcataggttggcttttgtcatttcgtctgtgtcttaagtggattagttggtcgtaagacaagttatagagatgtgtttacgggtaaagatgaagcttaagttttgatgtaatctt

SEQ ID NO: 150426 - DNA, 409 bp, Arabidopsis thaliana columbia
aagaaagagaaaaaaagctttcgtagtgtctattgaaaccagagaaaagccaaaggggatgcaaccaacatccgtcggtagtagcggcggtggtgacgacagaggaggcagaggaggaggaggagggctaagtagaagtggactatctcggatccgttcagctccagcgacttggcttgaagctttacttgaggaagatgaagaagagtctttgaaacctaatcttggtctcaccgatttgcttaccggcagctaacaccgatatctatgtggagatcgatagattacccaaggaaggggaaacgatttaggccaagacagggcaaacgctcgtcggaggaaaaggcgcgaatcatgcggtgtgtgtagcgaatctaatttatccgacttacttcgttggtcgtttggg

SEQ ID NO: 150427 - DNA, 433 bp, Arabidopsis thaliana columbia
gaaaatggaagagagaaaagtgaagagaattatcatgttccctctaccgtttacagggcacttcaaccctatgatcgagcttgctggaatattccacaaccgtggcttctccgtcacgatactccacacttctttcaacttcccggatccttctcgccatccacagtttacttttcgaactatcactcacaaaaacgaaggagaagaagaccctctctctcaatcagaaacttcttcgggtaaggacctcgtcgtccttattagtctgctgaaacaatactacaccgagccgtctcttgcagaggaagtaggcgaaggagggacggtgtgttgtttggtctccgacgctctatgggggaggaacacggagattgtagcgaaagagattggagtgtgtacaatggtgatgaggactagtggtgcggcaacgttt

SEQ ID NO: 150428 - DNA, 433 bp, Arabidopsis thaliana columbia
aacgtcttaaaacatgggaagtatcgtggagccatgggcagcaatcgccgagagcggaaacgcaaacgtgaccgcgaaaggctcgagcagggagctgcgacatgggagaacagcacacaacatgtcttcatcgtcgctaaggaagaaatcagacctgagattggttcagaaagttccatgcaaaactctcaagaacattctctctaatcttcaagaagtcattcttggtactaagcttactctcttatttctcgccatccctctcgccattcttgccaattcttacaactacggtcgtccgttgatatttggactgagcttgatagggctgacacctctagctgagcgagttagctttttgacagagcaactagctttctacactggtccaacagtgggcggtttgttgaacgcgacttgtggaaacgcgaca

SEQ ID NO: 150429 - DNA, 443 bp, Arabidopsis thaliana columbia
caaatggcgaacaagctcttcctcgtctgcgcagctctcgccctgtgtttcatcctgaccgacgcttccgtctatcgcaccgttgtcgagttcgacgaagatgacgccagtaaccccataggcccaatacagaaatgtcagaaggagtttcagcaagaccagcacctaagagcttgccagagatggatgcgcaagcaaatgtggcaaggacgtggtggtggtccttccctcgacgatgagttcgatatggaagacgacatcgagaacccgcagagacgacagctactccagaagtgctgcagcgagcttcgccaagaagagccagtttgcgtttgccccaccttgagacaagctgccaaggccgttagattccagggacagcaacaccaaccagagcaagtcaggaaaatttaccaggcagctaagtacttgcctaacatttg

SEQ ID NO: 150430 - DNA, 337 bp, Arabidopsis thaliana columbia
  unsure (1)..(337): unsure at all n locations
gcgtccgactctcactctcagtctcactcacatttttaccattctccttctcgttttcatctgcntttttcaaatcacgcgcctctcctccacgtagcaccgtctcgttgagttcttccaggagacgacaagatcgccggcgatcaattgaggctatgtctcatgtgatggaattggaagatgaattctatttctagaagcttctctcatcggataatctgatctcgttcactggattcggttcttttctttccgagtgaagcgcgaggagtacattcctagatttggagaatttgagaatggtgatattgcaaggatttatattagttttgcttat

SEQ ID NO: 150431 - DNA, 367 bp, Arabidopsis thaliana columbia
gaaaaggcgctcttaatgtcgcaaatgatcctggagaagcgatttggacagtggggggtttttgttgcttctaccctaatggaaaatggtggtgttcctccttcagcaactccagaaaaccttctcaaagaggctatccatgtcattagttgtggttatgaggataagtcagattggggaatggagattggatggatctatggttctgtgacagaagatattctgactgggttcaaaatgcatgcccgtggatggcgatccatttactgcatgcctaagcttccagctatcaagggttctgctcctatcaatctttcaaatcgccttaaccaaaggctgaggtgggctttagcgtcagttgagattc

SEQ ID NO: 150432 - DNA, 454 bp, Arabidopsis thaliana columbia
aaatcccgggggggacccacgcgtccggggaaatacagtgaggtttttgaggggattaacatgaataacaatgagaagtgtatgaggaagattctcaagcctgttaagaagaagaagattagaagggagattaaaatacttcagaatctttgtggagggccaaatattgtaaagctgcttgatgttgtcagagatcaacactcaaaaacgccaagcttgatatttgagtatgtaaacagcacagactttaaggttctgtatccaacattgactgattatgacattcgctactacatctatgagctgttgaaggctttggacttctgccactcacaaggaataatgcacagagatgtcaagccacacaatgtcatgatcgaccatgagctgcgcaaacttcgcctaatagattggggtctcgctgagttttatcatcctggaaaagagtacaacg

SEQ ID NO: 150433 - DNA, 419 bp, Arabidopsis thaliana columbia
aacctccaggatgagaaagagacgaaacatctagaaggtctcgaaggtgcagccacgcgcgtgcatctattcgagatggatctcctacaatacgacaccgtttccgccgccatcaatggttgctccggcgtattccacctcgcatcaccttgtatcgtcgatgaagtccaagatccccagaagcaactacttgacccggcggttaaaggaaccataaatgttctgacggcggcaaaagaagccagtgttaagagagttgttgtgacgtcttcgatatcggcgattactccaagtcccaactggcctgctgataagatcaagaatgaggaatgttgggctgctgaagactactgcacgcaaaatggattgcggtatccactgtcgaagacgcttgctgagaaggcagcttgggaatttgc

SEQ ID NO: 150434 - DNA, 354 bp, Arabidopsis thaliana columbia
gtgagtttagaccgtccaaaattgttttttattggaatccataggatttcaacgtagactggcttccattgacaatgaggtttttcagattcgccggtccattcgagacgctatatttgtgcagttagagaagcgaaacccacttaccgatgatgatgcattaaaagcgaagcctttagaagctgctaaacgcttctagggaggactttttaaaatggctatgacaaaggaggaatacttgcacccgtcaactcttgaatctcgcttgacaagcttaataaaaggcttgcaattgcataaggtccaagcccaacatgctgaatgttctacgcttggaacaaccataacacctac

SEQ ID NO: 150435 - DNA, 373 bp, Arabidopsis thaliana columbia
acgcgtccgctcataattctccatctctttcctttctcatctctcgattcctttctttctttccaggggcattgatttctctctgcttataaaaatacacattctctcttcttagaaccatcaccgattcgaacagatctaataaatcgtttttttcaccagatttttttcgccggagtttgttttgatccattctgctatggcgggagaacacagacttcaagaaccacgattatgtgctaacaattgtggcttcttcggaagcacagctacacaaaatctctgttccaaatgttttcgagatcttcaacatcaagaacaatactgcttcaccgacaaacatgctcttacccaatccttagccgccgttggc

SEQ ID NO: 150436 - DNA, 435 bp, Arabidopsis thaliana columbia
aaaaaaacaaacaagaatacaaaaatggctgaacaacaagatcatcacaaagagcttgaggttttaccttctccaccgtctaccgaatctccggtaaggaaacaccgaccaacagttataacaaccgaccatcacaacaatcaccaccgttcctcctccatgatccaccacgatcttgacctcaaactctccatcagcctcagctcgatctcaacagcggaggagcttccaaacggtggtgtggaggcgttgaagtggcaagccgcggagcagataaggcttgcggctatagagaaggcttacgccgagagggttagagagttgactcgccgtgagatggagatggctcagtctgagtttgctcgtgcaagggtgatgtggcagaaggcaagggaagaagtggagagagctgagagattgaaggagagatcaatg

SEQ ID NO: 150437 - DNA, 435 bp, Arabidopsis thaliana columbia
attatatcaaaattatagaacaataaggaattttaacttatcatggggaaaggcgcattgctgatataataacctctatacgaaatgctgacatgaatagaaaaggaacggttcggataggatcgactaacatcacggaaagtattgttaaaatccttttacgagagggttttatcgaaaacgtaaggaaacatcgcgaaaacaaccaatattttttgattttaaccctaagacatagacgaaataagaaagaatcctacaaaacgattttaaatttaaagagaataagtcgaccgggtctacgaatctattctaactctcaacgaattccacgaattttaggcggaatatgaattgtaatcctttcgacttctcaaggtataatgacagaccgagaagctcgacttataagaatcggctgagaaattatgtgtt

SEQ ID NO: 150438 - DNA, 365 bp, Arabidopsis thaliana columbia
  unsure (1)..(365): unsure at all n locations
attatatcaaaattatanaacaataattttattttaacttatcatggggaaatacgccattgtttatataataacctctataccaaatgctgacatgaatagaaaaggaacggttcgaataggatcgactaacatcacggaaagtattgttaaaatccttttacgagagggttttatcgaaaacgtaatgaaacatctctaaaacaaccaatattttttgattttaaccctaatacatagactaaataagaaagaatcctacaaaacgattttaaatttaaagagaatatgtcgaccgggtctactaatctattctaactcttaacgaattccacgaattttatgcttaataggtaatttaatcc

SEQ ID NO: 150439 - DNA, 344 bp, Arabidopsis thaliana columbia
ggggggccacgcgtccggacttgtctctgctttgattgaatattacgcttgatcgaaaattcccttagattgcttgaatatggttttacagaaggtcagattacacagagatcggatttgcgaaaaaaaaaaatgggaagtccaaagaagaacgagaacaaaggcttcttcgccgccatgacttctggcttctccatgttcggtaccgtcgtgtcgagatccgttaacggcgtgcaaggtaatgaaggagttgaggtcataaattcagaatgtggcaagtaagattctgaagaggaagctcagaaaggaaggtggaaggactaggaacgagattagttacttga

SEQ ID NO: 150440 - DNA, 325 bp, Arabidopsis thaliana columbia
ggggggcccacgcgtacaaaaccctatccgccttattcatctacttctttctctagttatttcctcaacctctgttgttagattcctagcggggaccaacatttccgatcaaaatctcgactaaaggagaatgaccagctatcggtatcgatcttggtaccacttactcttgcgtcggagtatggcaacactaccgttttgagatcattgctaatgttcaaggtaacataaccataccttcttactttgcttttaccgactcctataggattatctgttactcatctaataatcatgtcttcatgaaccctgttaacaccttttt

SEQ ID NO: 150441 - DNA, 432 bp, Arabidopsis thaliana columbia
gttaggtgcaatgtattcgtttcctcaaatacggttaccaacgggagctctccaagctggaaaacaagctggaaaagtgccagacgttttctactgtctcaagctcttagaagccacaggaatctccacagtacctggctctggatttggacagaaagaaggtgtgttccatctgaggacaacaatcctgccagcagaagatgagatgccggagatcatggatagcttcaagaagttcaacgacgagttcatgactcagtatgataataactttggttattcgaaaatgtgattacttcttcttctgaacgactattgtgttctgctacactctttaaagctaaatctctgtagtacactctttctctttgccctattctataaaccatatctctctctttgggtctctttttttttgggtgtaaactctct

SEQ ID NO: 150442 - DNA, 398 bp, Arabidopsis thaliana columbia
cgctctcctctagctcgcgattgcgaaaacatggctctacctaaccagcaaaccggggggtatcccagcttcaagcttgtcattgttggtgatggaggcacagggaagactacttttgttaagagacatcttactggggagtttgagaagaagtatgaacctactattggtgtggaggttcatccattagatttgttcacaaactgtggcaagatccgcttttactgctgggacactgctggacatgagaaatttggtggccttagggatggatactacatccatggtcaatgtgctataataatgtttgacgtcacatcacggttcacatacaagaatgttccgacatggcaccgagatctctgcagggtgtgtgaaaacatcccgattgttttgtg

SEQ ID NO: 150443 - DNA, 448 bp, Arabidopsis thaliana columbia
cacgcgtccggtctctgcaaacaaaggaagaagaatcaagatggctctggaaatctgtgtgaaagcggcggttggtgctcctgatcatctcggcgactgtccgttcagccaacgggctcttctcacactcgaggagaagagtcttacctacaaaatccatctgattaacctctctgacaaaccccagtggttcttggacattagtcctcaagggaaagtaccagtgcttaagatcgacgacaagtgggtgactgattccgacgtcatcgttggtatactcgaggagaagtatcctgatccaccactcaagactcctgctgaatttgcctctgttggatccaacatttttggtacttttgggacattcttgaagagcaaagactccaatgacggatctgaacatgccttgcttgttgagctagaaactttggaaaaccatcttaagagt

SEQ ID NO: 150444 - DNA, 391 bp, Arabidopsis thaliana columbia
caaaaacaaagattataatggcttccttaaccatggctttgtcctcccctgggttcgccggaatggctgtgaagcctgcctcatcagatgtcctcggaagcggccgtgtgaccatgaggaagactgtcgccaagccaaagggtccatcatgcagcccatggtacggatctgaccgagtcaagtacttgggtccattcttcggctagcccccgagctaccttaccggtgagttccccggtgactacggatggtacaccgctggtctatccgccgacccatataccttttccaggaaccgtgagctataagttatccacagcatatgggccatgctcggagccctaggctgcgtttttcctgagttattggctatgaacggagtgaagttctt

SEQ ID NO: 150445 - DNA, 435 bp, Arabidopsis thaliana columbia
gtcgaatggctcaccggtgttacttggcaagacgccggcaaggtagagctagtggggggatcatcttacttaggacagccattgccgttctctatctcgacattgatatggatcgaagtgttagtgatcggctacattgagttccaacgaaacgctgaactggactcggagaagcgtttgtatccaggaggcaagttctttgacccgttaggactagcgtctgacccggtgaagaaggctcagcttcagctagctgagatcaaacatgctcgtttagccatggttggattcttgggttttgcggttcaggcggctgcaaccggtaaaggaccgctcaacaactgggcgactcaccttagtgacccacttcacaccaccattatcgataccttctcttcctcctgatgtggtggcttttagcttctactggtgtca

SEQ ID NO: 150446 - DNA, 420 bp, Arabidopsis thaliana columbia
tcttcttgctccttaccaaagaggatttatagattggtctctttggcggtgcgtgtgtgggtataactgtgcttattatccaccttatcaacaatgttgccaaagctcatggtggtttctctgtgtttgctggtgtggtagaacgaacccgttaaggcaatgacttgtacatataaatgattgagagtgttgtcatcaatctatgctaatagcattctgagagcaagtgtgctctagttttcggtcaaatttatgagccccctgttgcccgtgcccttttatgactgactggtttgacttttacccaatatttccttgttgctgtaggccaattactttttctttttattgactaccattattcattttacttatgtcctactttatatgtctgcttttctccttttttttaccttcttt

SEQ ID NO: 150447 - DNA, 429 bp, Arabidopsis thaliana columbia
atcaatataatctagaaaaaaaaaaagaagagagaagagagaaatgtcgagagctttgtcagtcgtttgtgtcttgctcgccatatccttcgtctgtgcacgtgctcgtcaggtgccgggagagtctgatgagggaaagacgacgggacatgacgatacaacaacaatgcccatgcatgcaaaagcagctgatcagttaccaccaaagagcgtcggcgacaaaaaatgcatcggaggagttgctggagtcggtggattcgccggagttggtggtgttgccggcgtgggaggtctagggatgccactcatcggtggtcttggcgggatcggtaagtatggtggcataggcggtgcagctggaatcggtggatttcatagtataggcggtgttggcggtctaggcggtgtcggaggaggtgttggcggtct

SEQ ID NO: 150448 - DNA, 434 bp, Arabidopsis thaliana columbia
gcaaaagtgtgcacgaagaacaaagcgacgcatccgattttatttgtttgataggggcgtgtcgtcttcgtctctctaacccaattctgtggtgtctgaagaaagcagaatcaaatccatgtctttcagaggacttagcaggccaaatgcaatatctggaatgggtgttgcagatgagagcaaaaccacatttctagagcttcaaaggaaaaaaactcatcgctatgtggtcttcaagattgatgaatccaaaaaagaagttgttgttgagaaaactggaaatcctacagagagctacgatgatttcttagcttcacttcctgataatgactgcagatacgctgtttatgactttgatttcgttacttctgagaattgtcaaaagagcaaaatcttcttctttgcttggtctccttcgaactctggaattcgag

SEQ ID NO: 150449 - DNA, 365 bp, Arabidopsis thaliana columbia
gtaaaagcgttcactaacaacaaagcttcgcatccaaatttatttgtttgatgggggggtatcttcttggactctctaacccaattctgtgttgacagaagaaagcataatcaaatccatgtctttcacaggacttagcaggccaaaagcaatatctggaacgactgttgcagatgagagcaaaaccacatacttagagtctcaaaggaaaaaaacttatacgttatcgcactttaaaaatgaacaaatccaaaaagcagtagttgttgtgaaaactggaaattctacagagagctacctaaatattcttagcctcactttctgataatgactgctgataccctgcttatgacattgatttcgtt

SEQ ID NO: 150450 - DNA, 437 bp, Arabidopsis thaliana columbia
cgagttaccaacaaaaaaaaaactctcctttatttcagtcttcttttacaaatcatggtctgctctttgattccatcttgtgaaccaccggcataagaaaatatgacaattgctttaacgatcggaggaaacgggttttcgggtctaccaggatcgtcgttttcttcatcatcttcgtcgtttcgattaaaaaacagcagaagaaagaacacgaagatgctcaacagatcaaaagtcgtttgttcttcttcatcttctgtaatggatccgtataagactcttaagatccgacccgattcatctgaatacgaggtcaagaaagctttcagacaactcgctaaaaagtatcatcctgatgtttgtagaggaagcaattgtggggtacagtttcagacaattaacgaagcttacgatattgtgttgaagcaaattaaaaa

SEQ ID NO: 150451 - DNA, 435 bp, Arabidopsis thaliana columbia
gaacgtggtttgtttggaatctatcatgattggtgtgaatcattcagcacttaccggggggcttactacctccttcacgctgatcatcttttctcttcactgaaaaagaggtgcaacttggtgggcgtgatggctgaagtagaccggattcttagaccacaaggaactttcatagtaagagatgacatggaaacgataggagaaattgcgaagatggtgaaatcgatgaaatggaatgtaagaatgacacattccaaagatggagaacgattgctctctgttcagaagtcatggtggcgtcctacagaggccgagaccattcagtcggcacatagcttgagatcaaggtaacgcagaagagtgtgggttaatatagtcgacagtcgttccttttacgatccaagtgatttgttcttacatgtattagccgaatat

SEQ ID NO: 150452 - DNA, 437 bp, Arabidopsis thaliana columbia
gaagccgcaaaccattttttgtcaatctagggttcttcttcgtacttgcagatttcgggtgcgttttcactacgatctgcgaagatgttctccgctcagaacaagatcaagaaggacaagaatgctgagccaacagaatgcgaggagcaagttgctcaggctttgtttgatttggagaacactaaccaggagttgaaaagcgagttgaaagatctctacatcaaccaagctgttcacatggatatctctggaaaccgcaaagctgttgtgatttacgttccattcagattgaggaaagctttccgcaagattcatccccgtctcgtcagagagcttgagaagaagttcagtcgaaaggatgttatctttgttaccacaagaaggatcatgcgttcccccaagaagggtgctgctgttcagaggccacgtaacaaaac

SEQ ID NO: 150453 - DNA, 448 bp, Arabidopsis thaliana columbia
cgtccggaagccgcaaaccattttttgtcaatctagggttcttcttcgtacttgcagatttgggcgccgttttcactacgatctgtgaagatgttctccgctcagaacaagatcaagaaggacaagaatgctgagccaacagaatgcgaggagcaagttgctcaggctttgtttgatttggagaacactaaccaggagttgaaaagcgagttgaaagatctctacatcaaccaagctgttcacatggatatctctggaaaccgcaaagctgttgtgatttacgttccattcagattgaggaaagctttccgcaagattcatccccgtctcgtcagagagcttgagaagaagttcagtggaaaggatgttatctttgttaccacaagaaggatcatgcgtccccccaagaagggtgctgctgttcagaggccacgtaacagaactctta

SEQ ID NO: 150454 - DNA, 429 bp, Arabidopsis thaliana columbia
cgtccggaagccgcaaaccattctttgtcaatctagggttcttcttcgaacttgcagattgggggtgcgttttcactacgagcggtgaacatattctccgctcagaacatgatcaagacggacacgaatgctgagccaacagaatgcgaggagcaagttgctcacgctttgtttgatttggagaacactaaccaggagtagaaaagcgagttgaaagatctctacatcaaccaagctgttcacatggatatgtctggaaaccagaaagctgttgtgatttacgttccattcagattgaggaaagctttccgcaagattcatccccgtctcgtcagagagcttgagaagaagctcagtggaaaggatgttatctttgttaccacaagaaggatcatgcctgccgccaagaagggagctgctgttcagagg

SEQ ID NO: 150455 - DNA, 434 bp, Arabidopsis thaliana columbia
aaacactaaagatgagaacacttgaagcttttgctctgtccctgtttcttgtcttcgtagtaaaatgggtcaattctgactctagttcttctcctagtaaagatcaatttctgagttgcatgtcgacacattctgattccagcttcataaaccctaaaagcttcatccacaaaccagattcaagagtctacaccgatttctcgcagtctttaatatcacaaaactacagatttctgaccttgaatttcacaagccagaagccgattctgatcgttacaccaagaactgatactgaaatccagagatcattactctgtagcaggaaacttggggtgaaagtaagaaccaaaagcggtggtcatgactatgaaggcctttcttatctctcattacactcgcctttcatcatactcgatctcgttaatgttcgatcg

SEQ ID NO: 150456 - DNA, 412 bp, Arabidopsis thaliana columbia
cttcttctttaaccaagcttgtgttctttggttgtctcctcctgctcacattgacggacaaccttgtggctggaaaatctggcaaagtgaagctcaatctttactacgaatcactttgtcccggttgtcaggaattcatcgtcgatgacctaggtaaaatctttgactacgatctctacacaatcactgatctcaagctgtttccatttggtaatgccgaactctccgataatctgactgtcacttgccagcatggtgaagaggaatgcaaactaaacgcccttgaagcttgcgcattaagaacttggcccgatcagaaatcacaatactcgttcatacggtgcgtcgaaagcgatacgaaaggctgggaatcatgtgttaaaaactctggacgtgagaaagcaatcaatga

SEQ ID NO: 150457 - DNA, 427 bp, Arabidopsis thaliana columbia
ctgtagaacacaaacagaacaaacaaaatatcaattgaagagtctctcagtcgctagggggagcaaatagagaaaatggctacctttactgcctccgcttcccccgtctccgccgttcgtccggctctccttctcaagcctaccgtagccatttttgttcctgtccttggttggcctccaaggggtaaaaagaagggaggagggggatgttcaatggggccaaagcagggaacacgttcagtcatgcgggctggagtttcagttgcagcaacagctgctttgacggcggtgatgagcaaccccgcgatggctttggttgatgagaggatgtcaacagaaggaacaggattaccctttggtctaagcaacaacctcttgggttggattctgtttggagtctttggtttgatctggactttcttcttcg

SEQ ID NO: 150458 - DNA, 359 bp, Arabidopsis thaliana columbia
cacttttctgcgatatctctgagatttgttgacagtctctaaccatgggtaaagaggggtttcacatcaacattgtggtcattggccacgtcgattctggaaagtcgaccaccactgggcacttgatctacaagttgggtggtattgacaagcgtgtcattgagaggttcgagaaggaggctgctgagatgaacaagaggtccttcaagtacgcatgggttttggacaaacttaaggctgagcgtgagcgtggtatcaccattgacattgctctctggaagttcgagaccaccaagtactactgcactgtcattgatgctcctggccatcgtgatttcatcaagaacatgatcactggt

SEQ ID NO: 150459 - DNA, 431 bp, Arabidopsis thaliana columbia
aaaaaaagctattgtttgaaagaagaagaagttaactatggcaaaggatgtggaagccgttcccggagaaggatttcagacaagagactatcaagatccgccaccagctccgtttattgatggagcggagctaaagaagtggtctttctacagagcagttatcgcagagttcgtagccactctcctcttcttatacatcaccgttttgacagtcatcggttacaagattcagtccgatactgatgccggtggcgtagattgcggcggagttggaatcctcggtatcgcttgggcctttggtggtatgatcttcatcctcgtctactgcaccgccggtatctctggtggtcacattaacccagcggtgacatttgggctattcttggcacgtaaagtgtcgttacctagggccctattgtacataatcgctc

SEQ ID NO: 150460 - DNA, 439 bp, Arabidopsis thaliana columbia
atcagatctagattcagtttttttcatcaaaaaagagcgtcttcataaacgcccttcgtcttcttccctggaaatctagtttctttcttccacgaaaatgagagagtgcatttcgatccacattggtcaggctggtatccaggtcggaaatgcttgctgggagctgtactgtcttgaacatggcattcagcctgatggccagatgccgagtgacaagactgttggtggaggtgacgatgctttcaacaccttcttcagtgaaaccggtgcaggtaagcacgtcccacgtgctgtctttgttgatcttgagccaactgtgatcgacgaggtcaggactggtacttaccgtcagcttttccaccctgaacaactcatcagcggtaaagaagatgcagctaacaatttcgcccgtggtcattacaccattgggaaagagatt

SEQ ID NO: 150461 - DNA, 448 bp, Arabidopsis thaliana columbia
ggtcgcgcacgctccgctgttaacacaaacagaacaaacaaaaatctattgagagtctctcacacctagggtggtcaaatatagaaatggctagctttactgcctccgctttcaccgtctccgccgctcgtccggctctccttctcaagcctaccgtcgccatctctgctcctgttcttggtttgcctccaatgtgtaagaagaatggaggagtgagatgttcaatggagacaaagcaaggaaaccgctcagacatgggggctggagtttcagctgcagcaacagctgcttttactgccgtgatgagcaatcccgcgatggcttttactgatgagaggatgtcaacataaggaacaggattaccctttggtctaagcaacaacctcttgggttggattctagttggagtctttggtttgaactgcactttcttcttcgtctacacttc

SEQ ID NO: 150462 - DNA, 440 bp, Arabidopsis thaliana columbia
ctcttccaagcttagagactcttagagcgagaaaatgatggcttctcttaaagctgaggaaacgagccagatgcagctcgttgagcgtgaagaaaatgatgaagacgaagatctatttgagatgattgacaaattgatcgcacaaggtataaacgcaggagatgtgaaaaagctacaagaagctgggatccatacctgcaatggtctcatgatgcataccaagaagaaccttactggaatcaaaggtttatctgaggccaaagttgacaaaatctgtgaagctgctgagaaaattgtgaactttggatatatgactggaagtgatgctcttataaagaggaaatcagttgtaaaaatcactacagggtgtcaagctctcgatgatctcttaggaggtggaattgaaacctcagccatcacagaggcttttggggaattta

SEQ ID NO: 150463 - DNA, 380 bp, Arabidopsis thaliana columbia
gttctaatcgcgttgtattctttctccaaggaagatggctctaaaggaacagctagaggagagtcaacaaacagcaagtgaaatgccaatctactctttcgagcattgcttcttccagagaaagaacgagttcttcgaggcagaatgtgcctttgcctgcggcaatcacgcagaagaagcctgatgcagctcctgtcaagttttcaagcgataccgagcgacttcagaacattaacaacattagaaaagctcctgttggagctcaaatcaagcgtgtcattgatcttctctatgagagaaggctagccttgacgccagagcaaataaatgaatggtgtcatgtagatatgcatgctaataaggctgtttttgatagttta

SEQ ID NO: 150464 - DNA, 371 bp, Arabidopsis thaliana columbia
gatttatcaacacaagcaaaaaagatggcccaaaagctagaagcaaagggtggtgagatgggagatgtatgggatgatggtgtttaccaaaatgttagaaaggtatatgtagggcaagcacaatacggtatagccttcgtcaagtttgagtatgtcaatggttctcaagtggttgttggagatgaacattgaatgaagacagagctaggagttgaagagtttgagattcattcccatgactacatcatatacgttggaggataccgtgagaaaattaactattttactttagaaaagatcacttttctttttattaagacttttaaaggcataacctctcattctatttcaaaaagacctggggttaagtt

SEQ ID NO: 150465 - DNA, 412 bp, Arabidopsis thaliana columbia
atccctttgaaacaagatcatatcttaactttgtataaaaacaggacaaaaaaacagaggatcatggttatgtatgaagaggattttgtgttgaactcacgaggcatgaagttgttcacttgtgtatggaaaccagtgaagcaagaaccaaaggcattgctcttcctctgccatggctacgctatggagtccagcatcaccatgaacagcgcagccacgaggttagccaatgccggttttgccgtatatggaatggactatgaaggacatggaaaatctgagggtctaaatggttacatcagtaactttgatgatctcgttgatgatgtctctaatcattattctacaatttgtgagagggaagagaacaaggggaagatgaggttcctacttggagaatccatgggaggag

SEQ ID NO: 150466 - DNA, 431 bp, Arabidopsis thaliana columbia
caaacagagagcgagtcacgcgccgagttttcctcacttgttctcaataaatctctgtctctttcttctctatcgctttcatttttctcctccagatctcgattccaatctctctccctctctacttccttcaacagaaatggaaacgttcctatttacctctgaatccgtcaatgaaggacacccagacaagctttgtgaccagatttctgatgcgatccttgatgcttgcttagagcaagatcctgaaagcaaagtggcgtgtgagacatgcaccaagaccaacatggtgatggtgtttggtgagatcactaccgctgcgaaagttgactatgagaagattgttagatccacttgcagggagattggttttatctctgctgatgttggtcttgacgctgacaaatgcaatgttttggttaacattgagc

SEQ ID NO: 150467 - DNA, 433 bp, Arabidopsis thaliana columbia
gttgaatttcaaaactgtttcatcttcatgctcttatgtctcttctcactccggtggtactctctgctcttcaggaaaccaagctcaagacaaaactcctatgactgtgatctgcctccaagccctccttctatgccaatcatcggccatcttcaccttatcctctcttctcttgtccacaagtcttttcaaaaaatctcctccaagtacggacctctcctccatctccgcatcttcaacgtccccatagtcctcgtctcctctgcgtcagtggcctacgatatcttcagggtgcacgatgtaaacgtctcttctcgcggtccccctccattcgaggagtcactcttgttcggatcttccagcttcatcagcgctcccctccctatggagattactggaagttcatgaagaagctaatggtcacaaagctgct

SEQ ID NO: 150468 - DNA, 440 bp, Arabidopsis thaliana columbia
cgttgaggaacattgaaaacgctcttccgatctcacaggaacgacctaagaagctgggcaggctctcaaagcaaccggagattggtctaaatgacgaaaacaaccctgtcgctgtggctgaatcgaccgtcgaatacgttgcttctgagaatctcaaaccattttcagatcctgaatcttctgtccagagattacttgaagaattagcatcaaaggattggattaaagtatgtgactcattgaacaacacaaggagatttgcaattcatcactcttctctgttgctaccaattctagaaaagcttatagttgtgatggtgaaggcgatgaagaatcctagaagtgcattgtgcaagacttcgattatgacttgttctgatatcttcactgcttatggagaaaagttgctggaaggacctcatttgaaatctatggacgat

SEQ ID NO: 150469 - DNA, 440 bp, Arabidopsis thaliana columbia
  unsure (1)..(440): unsure at all n locations
cggacgcgtggggggatcgccttttctcactctctgcggattctcaattttgggcgggaaggcaagaacagtttttatcgcaattgagtcttgaagaccacaaggatttgatcacattggtgcttctgcctgtttatctgagtttgaggacaagaacttctggggcgtttataatttgccatggctagtaatgagaatctaccacccaatgttatcaagcagcttgccaaggagctgaagagtcttgacgaatcccctccagatggcatcaaggttgtggtaaatgacgaggatttctcacaaatatgtgctgatattgaaggaccagttggtactccttatgagaacggacttttccgtatgaagttggccttgtcacatgatntttcacattcgcctcccaaaggctacttcatgacaaagaatttccattctaatgt

SEQ ID NO: 150470 - DNA, 432 bp, Arabidopsis thaliana columbia
ctctcatctccactcttctcattccgtaagtaaaaaaacaaaaaacaaacaaaaatggcttcccacattgttggatatccacgtatgggacctaagagagagctcaagtttgcattggagtctttctgggatggcaagagcagtgccgatgatttgcagaaggtgtctgctgatctcaggtctgatatctggaaacagatgtctgctgctgggattaagtatatcccaagcaacaccttttctcattatgaccaggtgcttgacaccaccgccatgcttggtgctgttccatctagatatggatttaccagtggtgagatcggtctcgatgtttacttctccatggctagaggaaatgcctctgttccagctatggagatgaccaagtggtttgacaccaactaccattacatcgtcccagagttgggccct

SEQ ID NO: 150471 - DNA, 437 bp, Arabidopsis thaliana columbia
  unsure (1)..(437): unsure at all n locations
ggcatcatctctttgtgcttcttctgccatcgctgccatttcttctccaagtttcgtgggtggtaagaaactgaggctgaagaagaagttgactgttccagctgtgtccaggccagatgcgtcggtgcgcgccgtcgcagctgatccagatagaccaatctggttcccgggaagcactcctccagagtggctagacggtagcctccctggtgacttcggatttgatcctcttggtctttcatcggacccggacagtctaaaatggaacgtacaagccgagatagtccactgccgatgggctatgctaggagccgccgggatattcatcccagagttcctaacgaagatcggaatcctcaacactccgtcatggtacacggcgggagagcaagagtatttcacggacaaaaccacactctntgtcgttgagctcattt

SEQ ID NO: 150472 - DNA, 307 bp, Arabidopsis thaliana columbia
aaaatatcatatctaaagaagagcgtcttcataaacgcccttcgtcttcttccctgcgagctattttctagatctttctttcttccgcgaaacgacaatgagagagtgcatttcgatccacattggtcaggctggtattcaagtcggaaatgcttgctgggagctttactgtcttgaacatggcattcagcctgatggccagatgcctggtgacaagactgttggtggaggtgatgatgctttcaacaccttctttagtgaaaccgttgctggtaagcacattccacgtgctggttgtgtttgattt

SEQ ID NO: 150473 - DNA, 432 bp, Arabidopsis thaliana columbia
tccaattttaactgaatttgagataattttggtttagtgatggcgattaggttgaatcatagtgtaattccagtgagcgtgaagcttggagctccgacgagagtatcggctcggagctcgttaccgttcagcgttggagattggcgtggtgtttctacattttccggtgctaggcctttggttctcgcgaaggtgaaactgagagcagagagtactgaggaagatcgagttccaattgatgacgacgacgattctactgatcagctcgttgatgaagaaattgtgcatttcgaagagcgtgattttgctggcacagcgtgtgttcctgtatatgttatgctaccactgggagtgattgatatgaactcggaagtggtggaaccggaggagcttttggatcagttaagaactttaaagtcggttaatgttgat

SEQ ID NO: 150474 - DNA, 435 bp, Arabidopsis thaliana columbia
catgaatcagattcaagatagaagtctttcaaacaatgtctagctctcttggccagggcagattcttggttttgttcatgcttcccttatattctcaactgactaccgcacaacccaatatgctgaacgataatgatgatgaatgtagcgacacgagtgcaaacggcacacgatgggctgttttagtatgctgcttcaaatgaatactataactacaggcataaggctgccatatgccacgcgtatcagatacttcaaaaaggcggtttcaaagatgaaaacatcatcgtgtttatgtctgatgatatcgcgtttttctaggagaatccaaggcctggagttatcattaattaaccggatggacgagatgtatataaaggagttcctaaggactacacttaagaagactttcatggtcaaaactactacaatgtg

SEQ ID NO: 150475 - DNA, 388 bp, Arabidopsis thaliana columbia
cgggaaaacacaaaaagacgaaaatgaccctattcaagaggccatgtctttacgtcagggatggacaaggaagatccagaagaggtacttagccgacgagccaagttcttgatttacaaaacacttcaagaagccgacttgatttctcggcgtgatcctcattcgtcgtttatacggctgaagctttatctgttgaaggtcaagatcggaaagaggttggctaagctacgccggagtgtagtatccgccgttagatttggcggaattcgaaagcattctcataatggcgtgagagcgttgaaaaagatgttccaaggtggtgcaacaactggactacctaagcctattttctcccttgaagtttgaaatttcatttatttatatttct

SEQ ID NO: 150476 - DNA, 354 bp, Arabidopsis thaliana columbia
  unsure (1)..(354): unsure at all n locations
gcgtgcggggccacactctctaatttaaaaaagagagagagagagagagacacacagagagagagaggggtttctgagaacctttttttttcacgggggttacatcgtattaaacgtaatggcccctcacgaagttccatttcaaaaaaaatggttccagggggaaaaaagccggttcctactttttccaagaaatcggaaaccgccaccccaaagcgggtgccgggcgagaaaccccctttttcggggggggatctgaaaaaagcaatcccgccgaattgtttaaaacgctcaatccctcgttttttttcctaccttatcagngacatcattatagcctcatgcttctactac

SEQ ID NO: 150477 - DNA, 348 bp, Arabidopsis thaliana columbia
cgccttgaatcgcttctctggactctcctctaaaaccaccttatcagctgacttcgagccgggctctcgccggagttttctaccgccgactagagttggacttaagatctcttccgccgccgaatcggagcctgatctcagtgtcactgtaaatggcctgaaaatgcccaatcctttcgtgatcgggtcgggtccaccgggtaccaactacaccgtcatgaagagagcctttgatgaaggttggggggccgtcatcgccaaaaccgtatctttagatgcatccaaagttatcaacgtgacacctagatatgctcggctacgaaccggatccaatggctcagccaaaac

SEQ ID NO: 150478 - DNA, 338 bp, Arabidopsis thaliana columbia
gagccatttataaacaacactcgagaaaacgcttgagaagacgtattcaacgttggggggggtccatggatcctcccacccaaagccataactcggtccgtactgttccaggctcgaatcatagccacaccgatttgattatctcatcgttcctttcgtttccagattcctctccgatctccattagcaattccttcgatcgagtccttgatagagctctcgcctccgcttccgctgatgaatccgttcaggatcgtctcgtcgatcgtactctcgaactcgcgtcgcttcttctcgattccactaggcgttgcttccgtaagcgagcttctgttcac

SEQ ID NO: 150479 - DNA, 434 bp, Arabidopsis thaliana columbia
gcgccatgtcgctcactatcccggcgaatctcgttctcaacccgagatctaacagagctctcactcaatccgtacctaaatcctccgcaagattcgtctgctccgatgacaaatcctcctcctccacacctcaatccatgaaagctttctccgccgccgtcgccctctcttccatcctcctctctgctcctatgccagctgtcgctgatatctcaggtttgactccttgcaaggactcaaaacagttcgctaaaagagagaagcaacagatcaagaagcttgaatcttctcttaagctctacgctcctgaatctgcccctgctcttgctctcaatgctcaaatcgagaaaaccaaacgcaggttcgacaactacgggaagtacggattgttatgcgggtcagacggtttaccgcacttgatagtgaacggagac

SEQ ID NO: 150480 - DNA, 424 bp, Arabidopsis thaliana columbia
cctctctctcatttctcggagatattcaccagagcaataaccatggacgctaaagaggcctctgccaccgatttgaaaagaccgagagaagaggatgataacggcggcgccgctaccatggagacggagaacggagatcagaaaaaggaacctgcttgtttctccactgttattcctgggtggttctctgaaatgagtcctatgtggccaggagaggcacactcattgaaggttgagaaagttttgtttcaagggaaatcagattatcaggatgttattgttttccagtctgcaacatatggaaaagttttggttttggatggagtaatccaacttacggagagagatgaatgtgcttatcaggaaatgatcactcatcttcctttgtgttctatccctaaccctaagaaagatatggtcattg

SEQ ID NO: 150481 - DNA, 425 bp, Arabidopsis thaliana columbia
gatattttagctgtatggttttggttccgatcacaaagagcatcgaatcgagctaggtcctccgccggctttgctgtgtgtgtgatcgttcgtttactaaatctgaaacaagtatctaacgccttgccggagatgtcgagctcaggccaaactcagttccgttatacacagacgccgtctaaggtggttcatctgcggaatcttccatgggaatgcgtcgaagaggagctcatcgacctttgcaaacgattcggcaagatcgttaataccaagagcaatgtctgcgccaatcgcaatcaagctttcttcgaatttgctgacttgaatcaagctttatcaatggtgtcgtattatgcttcatcttcagagcccgcacagattcgttggaaaactgtctatattcagtactctaatcgccattgaga

SEQ ID NO: 150482 - DNA, 408 bp, Arabidopsis thaliana columbia
gtccggtttaagtgacgggatgttaccaaacggtgactttgaactaggaccaaaaccatcggacatgaaaggaacgcaagtaataaacaagaaggcgattcctagctgggagctttcaggcttcgtcgaatacataaagtccggtcaaaaacaaggagacatgcttctcgtagtcccggccggaaagttcgcaatccggctaggcaacgaggcatcgatcaaacaaagacttaacgttacaaaaggaatgtattactcactgacgttcagtgccgcaaggacatgtgcccaagacgaacggctcaacatatcggtggcacctgactcaggcgttattcctatacagacggtgtacagtagcagtggatgggacctttacgcatgggcgttccaagccgagagtaacgt

SEQ ID NO: 150483 - DNA, 400 bp, Arabidopsis thaliana columbia
caactgtccaaaacgcaacttcttttaacggcgttgccccatccaccaccgtgcgagggacaatcgtccaatcctccaccgtctataacgatactcctgccactatagacaaagcggagaagtatattgtggaggcggcaagcaagggagcagagctagtgttgttcccggaggggtttatcggtggctatcctcgaggttttaggttcggtttagcggttggcgttcataacgaagaagggcgtgatgagtttcggaagtaccatgcttctgctattcatgttcctggccctgaagtagcaagattggctgacgtggctaggaaaaaccatgtgtacttggtaatgggagccatagagaatgaagggtataccctctattgcacagttcttttctttag

SEQ ID NO: 150484 - DNA, 402 bp, Arabidopsis thaliana columbia
ataatttctctctcgcagacgcacagatctctcttcgaatctgctagatctgttccttttctgacatctgtattgcgaaacctctgatcggaaggtttcgtttacagatctaccgatacgagtttcgcagtatttccgagttccgacgtatgctttgttttcagatctgggtttgttgtatatctagaaatggcggagactttgaaagaagattcgattatgattcgagaggtttgggattacaatttggttgaagaattcgcgttgatccgtgagattgttgacaaattcagctatatcgctatggatactgagtttccaggtgtggttttgaagcctgttgctactttcaagtacaataacgatcttaactacaggactctcaaggaaaatgtcgatttg

SEQ ID NO: 150485 - DNA, 405 bp, Arabidopsis thaliana columbia
agttttacagagtgttccctaacggaggagctgcgataatgagagaaggaccgaatgtattgaaactggcgaggaaagaacagtgtttggctttaggtacgaggttgaggtcaaagtacaagatcacttaccagttttacagagtgttccctaacggagaggttcaatatcttcacccgaaagatggagtttatccagagaaagcgaatccaggaagagaaggtgttggactaaacatgagatccatcggtaaaaatgttagtcccattgaggttaaattcactgggaaacaatcttatgatttgtaagattttaattcgtattttatataataatgctagacaaacaaaacaaatttaaaaagggatcacactacatgtaaaatcttgcggatgttataacaac

SEQ ID NO: 150486 - DNA, 192 bp, Arabidopsis thaliana columbia
atgaatgtcttgtcaacaattggaccgttggccttggtagagcccggcttgagggttccaaacaggattgcattgtgcttcccctggccaatattggtcaaggattggaagacctggttgaatcttgaggtgggtgggaccttacttttccaggcgggggtggaaccttccaaagcttccaactggattttg

SEQ ID NO: 150487 - DNA, 392 bp, Arabidopsis thaliana columbia
  unsure (1)..(392): unsure at all n locations
cttatcatgaatccactggtttctgctgcttcggttattgctggtgggttgggtggtgggcttgcttctattggacctggagtcggtcaaggtacagctgcgggtcaagctgtcgaaggtatcgcgagacaacctgaggcagaaggaaaaatacgaggtactttattgcttagtttggcttttatggaagctttaacaatttatggcctggttgtagcattagcgcttttatttgcgaatccttttgtttaagcccagaaatcacaaaattctggattttttttgtagtttttttaattctatcaagatttaactcctacaattattcattgagacaacaatccttgggaaggactaatttgaggatggngaattagcacatcgattcgctt

SEQ ID NO: 150488 - DNA, 429 bp, Arabidopsis thaliana columbia
  unsure (1)..(429): unsure at all n locations
ccacgcgtnccgaccgattttgcagcatgtcagtcttcaacgatatcgctcgccggcttaaaagatataaacacgcgggcgcctggtgaaaatccatcatnctggtaaacaaacccattgaggtactgtaacctccacgttccgatctcaagcanaaaattcaaatncccgctcttcagaaatcattatccagcaaagagaatccgaatccgaagcttagtcaccgctcatttggatcgactcagaagccagtgctccggcctgtaccgcgcattgataagtccgccgtgagtggcgagggtcgggttacgcgatccacgtcatctggtttgcgaggtaggagttctagtccatctgatttgattagggttttctcggatttgagaaagagaaatgaatctagggttattggggaaaagggtgaatcgg

SEQ ID NO: 150489 - DNA, 388 bp, Arabidopsis thaliana columbia
  unsure (1)..(388): unsure at all n locations
gggaggncactttcctcttctctctctctctctctctgcctgacctcgggttctctcgatcgctcttcaccatggatctacgatcatgtggtccttcttgaagttttttgatctcttcttcttacgggtttttacttcgtttgattttcctgttgtttgttgttcaaggatcgagatttcgtggagctctctattcgcagcttggagattggacttgtttgaattggctcttttgtgatggaggatactcggtcagttgcttcactcatggactctacatcatccaagattcagcagcttcagaaggcgtttgctgaacttgaaagtcagcgtgctgtaacacttaatctgaagtggaaggaacttgaggagcattttcatgggcttg

SEQ ID NO: 150490 - DNA, 435 bp, Arabidopsis thaliana columbia
ttacaattccggaatcgccccacccgtccaaacgtgcaaaccttgaacgggctattaaattagcttaggaagaaatgttgaggacaaagctcgaagcaaccacaaaggcgaaggaactgctagaggctcatggttcgtggcttcccccttggcttgctgttcactggtttaaatttcagacttataccgagacacattgggaggcccatgggaaacctgctgtggagacagtaattctaaaggtgacggaagcaaaagctcaagctgaaaagtgggctgaaccacatgtcgaaaacgttaaaactaaatatattccagccatcaaggaaaccgttactatacatgttgagccacacttccgaacactatccatcaaagctaaagaggcttaccattcatcaaagagtgctgtttcccctcacattgtcacggttc

SEQ ID NO: 150491 - DNA, 336 bp, Arabidopsis thaliana columbia
ctgagactgactgagaaagcacctaactgcgagacctgagaaaatttaaggtggctcggaacattgcgatgatggattgctcatatcctgtcacagagatcacaaatactggctagaattgactcctccatacaactgaatatttttaactacgaataggcttgtacaggcgctcataattgcaagctgatggaactagtgaatgcttgtactgttccgatgcacacaggttaactttgatgcgcatgggtgaatatgagacgattcagaactataaggtacttcacgaagtggctaatatactcaagatcactgaccacatcacagtgtgcaaac

SEQ ID NO: 150492 - DNA, 401 bp, Arabidopsis thaliana columbia
gagaaacaacaagaagtagtaatggcttcctctatgctctcctccgccgctgtgggggcatccccggctcaggccaccatggtcgctccattcaccggcttgaagtcatccgctgcattcccggtcacccgcaagaccaacaaggacatcacttccatcgcaagcaacgggggaagagttagctgcatgaaggtgtggccaccaattggaaagaagaagtttgagactctatcttacctccctgaccttagtgacgtcgaattggctaaggaagttgactaccttctccgcaacaagtggattccttgtgttgaattcgagttagagcacggatttgtgtaccgtgagcacggaaacactcccggatactacgatggacggtactggacaatgtggaagct

SEQ ID NO: 150493 - DNA, 392 bp, Arabidopsis thaliana columbia
ccactttcctttcgtttgcaaaaacccatcccatcaaaaataaacaagagggcctaaagaagaatcctaaagactttacgggtcttgtttaggataaaagaaatgcctgccggtggattcgtcgtcggggatggccaaaaggcttatcccggcaaactcactccctttgttctcttcacttgcgttgttgctgccatgggcggtctcatcttcggatacgatatcggaatctccggtggtgtgacgtctatgccgtctttcctcaagcgattcttcccgtcggtgtatcggaaacaacaagaggacgcgtcaacgaaccagtactgtcagtacgatagcccgacgctaacgatgttcacatcgtctctatatctagcggcgctaatttcgtc

SEQ ID NO: 150494 - DNA, 403 bp, Arabidopsis thaliana columbia
caaggttggaagctgaagcaggataagaatatgatacatatgactggtaaataccatgaaggaaagggaggagaatttgaagggacagggtcaaatggtgacgaactccaaatggttgatgatgctcggcttcctatgagccgtgtggtacatttcccatccgctcgcatgacaccttatcgtatagtgatagttctccggctcatcattttgggagtcttcttgcattatcgtacaactcatcccgtgaaagatgcatatgccctgtggttgacctcagttatttgtgagatctggtttgccttttcttggcttcttgatcagttcccaaaatggtatcccattaacagggagacttttcttgacaggcttgctttaagatacgatcgagatggtgaaccat

SEQ ID NO: 150495 - DNA, 405 bp, Arabidopsis thaliana columbia
cattcatccatcttttaatcattactcgagattctgtttccatggccatatcctcagatcttgtcctttgtctctctcttttcattttcatcatcaccaaatccgccttggctcagaaatgttccaactacaaattctccaccaaccgtctctttgagtcttgcaacgacctacctgttcttgattccttcctccactacacttacgattcttcttcaggcaatctccaaatcgcgtatcgccacacaaagctcacccccgggaaatgggtggcatgggccgtgaatcccacatctactggcatggtcggagctcaagccattgtggcttatccataatcagacggcaccgttagggcttatacgtcacccatcagtagctaccaaacgagtctcctagaagctg

SEQ ID NO: 150496 - DNA, 190 bp, Arabidopsis thaliana columbia
cttactcttacttttaaaccatgaagcttctggggttggccttagatattttataaggtggggcgacttgcatgcttgaagaagagattacttgcgaagagaacgtgtcgtgaacatggaaccaaacagagcgtttcaacaaactagatttcgaatgcgtctgcatcggtcgtgatagatcatctgctta

SEQ ID NO: 150497 - DNA, 349 bp, Arabidopsis thaliana columbia
ctaactcttactctaagtacatatatcttcaagaatggatgctacctcttttccaagcgagcgggtcttctatgcttgctttgatctccccacatattcacacaaactcgtgacaggagaatccaacagagcttgtcttaatctttactacaaatcactttgaacgggacgtcagagtttcatcgttgttgaactatgaatagactttgactccgagctccatacaatcaccgattacaagctcgctacattctcggtacgccaaaatctacaatcgtatcaccgtcattagccagtatggtgaagaagaatgcgaacttaacgctctcgaagcttgcataattaacac

SEQ ID NO: 150498 - DNA, 367 bp, Arabidopsis thaliana columbia
ctaactccaactctaaatacatatatttttaagaatcactgccaaacgcggggcaggggagcctgatcacaatgcttgctcactgcatgccagattagccaccaaccgcttaacttgacaatcctgcacatggtgacttaatgtttaatccaattgaacttggacaagttttaacaaacctatcgagattcaactagtcatagcttatgcattccagatcgattctgctacctgttcctagcattttgcatccagaagcattaagatatgcaaacttatttccggcatatgaatggatggtgctaacaaatgcacactccactcacttgagaaacgcataactgacacgtactctgaccacaaattt

SEQ ID NO: 150499 - DNA, 351 bp, Arabidopsis thaliana columbia
ctaactctaactctaagaacatataacttcaagaatcgatgatatttctgggtcaggcgaccttgtctattatgcttgctttaccctccacagattctcacacaaactcgtgacagaagaatcctacaaaggcggtcttaatctttactacaaatgactttgaacgtggatgtcatagtttcatcgtctatgaactagacaaatgactttgactccaagctccatacaatgaccgatgataagctcgctacattcgggtacgccaaagtcttcaataatacttccggcatttgccagtatgttcaagacgaatgcaaactctacgctctggaagctagcagtagtaacact

SEQ ID NO: 150500 - DNA, 404 bp, Arabidopsis thaliana columbia
gcgattctcactaaaaccctcgaacacatcgcctttatctctttctctagatctacgcgctatggctactatcaccgttgttaaggctagacagatcttcgacagtcgtggtaatcccaccgttgaggttgatatccacacgtcaaatggtattaaggttacagcagctgttccaagtggagcttccactggtatctatgaggctcttgagctgagggatggaggatctgactaccttggaaagggtgtatctaaggctgttggcaatgtgaacaacatcatcgggccagcacttattggaaaggacccaactcagcagactgctattgacaacttcatggtccatgaacttgacggaacccaaaacgagtgggggtggtgcaagcaaaagcttggagccaatg

SEQ ID NO: 150501 - DNA, 397 bp, Arabidopsis thaliana columbia
cttatagatctgtagtttttttccgcgaccgcccaaaaaattctctgatgagacgggcgattggatcggagatttaaggtaaagaaaaaatggcgcaacaatcgttgatctacagtttcgtagctcgcggcacggtgatcctcgttgagttcactgatttcaaaggtaatttcacctcaatcgctgctcagtgcctccagaagcttccgtcttcgaacaacaagttcacctacaactgcgacggtcataccttcaattaccttgtcgaagatggattcacctattgtgttgttgcggatgattctgctgggaggcaaattcccatgtcctttttggaaagagtaaaagaagattctaacaagcgatatggtggtggaaaggctgcaactgctcaagc

SEQ ID NO: 150502 - DNA, 402 bp, Arabidopsis thaliana columbia
ctaactctcactcttagtacaaatattttcaagaatggtttctccttcttggtcaagcaagcttgtcttctttgcttgctttgttctgttcacattctcacacaaactcgtgacaggagaatccgacaaagttgagctcaatctttactacgaatcactttgtcccggttgtcagagtttcatcgtcgatgaactagtcaaagtctttgactccgatctcgatacaatcaccgatgtcaagctcgttccattcggttacgccaaagtctccaataatctgaccgtcatttgccagcatggtgaagaggaatgcaaactcaacgctcttgaagcttgcgtcattaacactttgcctaacccgaaatcgcagtacaagttcatacgatgcgttgaaaacaatac

SEQ ID NO: 150503 - DNA, 401 bp, Arabidopsis thaliana columbia
caaaaatggtggtgaaaaactcgatcaaattcaactctcagagtgagcgcgggtctggggaagagaccaaggttcctcctatctttggccttcctccagatgccttagacgacaagaaacctacctcggattttgcagtacctatcatcgactttgcaggcgtccacaagtcgcgtgaagccgttgtggagaagatcaaagccgctgcagagaattggggaattttccaggtgatcaaccatggtgttcctttaagtgttcttgaagagattcaaaatggagttgttaggtttcatgaggaagatccggaggttaagaaatcttacttctcgcttgacctcaccaaaacatttatctaccacaataatttcgaactttacagttcgtctgctggtaactgg

SEQ ID NO: 150504 - DNA, 405 bp, Arabidopsis thaliana columbia
cccttttctctctctctcgaagatatcgcctttaattccttcttcttcttctgattgcttcagagattcatttcttagagatctcagcttctgtaagagtaggctagctaccaaaaaaaaagaaatagaaaaaaacattgatgcttaatcagcagttcttggtgtttgagacacatgtctccaataatactcagtgagatctttctctctgggtttatgttaaattccacaatcaggcgcaggacccatcttgttcaatctttctctggtgtcttcctttactggctttactatgtctcatgatctctgaacttatctccagttttatatctatacgcataattacaacaaaaccctagtttcttttcaaatttctcttcttcgtttttcgtcatctgggtcctg

SEQ ID NO: 150505 - DNA, 340 bp, Arabidopsis thaliana columbia
  unsure (1)..(340): unsure at all n locations
gtccgaaaaacataagctaagaaaacgaaactcaactaattttgttatcacccaaaaagaaggtcaaacacaatggctttcgctttgaggttcttcacatgccttgttttaacggtgtgcatagttgcatcagtcgatgctgcaatctcatgtggcacagtggcaggtagcttggctccatgtgcaacctatctatcaaaaggtgggttggtgccaccttcatgttgtgcaggagtcaaaactttgaacagtatggctaaaaccacaccagaccgncaacaagcttgcagatgcatccagtccactgcgaagagcatttctggtctcaacccaagtctag

SEQ ID NO: 150506 - DNA, 402 bp, Arabidopsis thaliana columbia
ttcgccgggattctcctttgcaccataaaatagaagatgagagaaatccttcacatgcaaggtggtcaatgtgggaaccagattggttccaagttctgggaagttgtatgtgatgagcatggtattgatcccactggtcgttacgttggaaactctgatctgcagttggagcgtgtcaatgtttactataacgaggcatcctgcggaagatatgttccccgtgcaattctcatggatcttgagcctggtactatggacagtgtcagaactggaccttatggtcaaatcttcaggcctgacaactttgttttcgggcaatctggtgctggaaacaactgggctaaagggcattacactgaaggagctgagcttattgatgctgtactcgatgttgtacgcaaa

SEQ ID NO: 150507 - DNA, 407 bp, Arabidopsis thaliana columbia
gaagttttcaacagattcgccggagaatcttcgaatcaacggcggagaaaaggctgggtgacggctgtcatcacgagccaacatcatcactcgtcccttctccggcggcttgaggcgattaatctcaacggacacaactccgatcacaatcgagacttcgcttcctttcacagctcacttatgtgatccaccgtcacgctccgtcgaatcatcgagtcaagagcttctcgatttcttcagaaccatggcgttgatgcgacgtatggaaatcgcagccgattcgctgtacaaagcgaagctaatccgagggttttgtcatctctacgacggccaagaagctgtagctataggcatggaagctgcgattacaaagaaagacgcgattattactgcttatcgtgatcact

SEQ ID NO: 150508 - DNA, 382 bp, Arabidopsis thaliana columbia
ctaactcttactctaagtacatatatctttaagaattaatgatatatctttttcagcgcagctttttttctatgcttgctctacactctccacatactcacacaaactcgtgacaggagaatccaacagagcttatctcaatctttactacaaatcactttgaaccggatgtcacagtttcatcatcgatgaactagtcaaagactttgactccgacctcaatacaatcaccgattctaagctcgttacattctgttacgccaaagtctccaataatatcaccatcattagccagcatgttcaagaggaatacaaactcaacgctcttgaagcttgcgtcattcacactctgtctaacccgaaattgcagcacaagttcata

SEQ ID NO: 150509 - DNA, 392 bp, Arabidopsis thaliana columbia
gcgagcaataccgagggtttttcaatctctaatccctaaggccataattgctttgggactgtactttgtcaatgctaatgaaccaagtacactccaagacttctgtgtagccattgatgacctaaaaggcggacttgcaaaaggtacgttactgtaagaccacaaggcgagttccaagcaaaagattatttcttctcaggtctcaatgtgcctaggaacaccaattactacagtggctcataaggagaccacctgttatgtcgatcagattcctgctgtcaacaccaataaaatatacttggttccgatagactacgcacggtacggacaaaatgcatctaagactcaccctcatggctcacacatccttgagcttgtctaaggaacattat

SEQ ID NO: 150510 - DNA, 357 bp, Arabidopsis thaliana columbia
ctcactcttactaaaaaaactcgtaacttcgagaaataaggaaagacaccgaacagcgcacaaccattccttttgattgacctcttccttctatatctgtaacataccaatcgacgaaagaaggatcccgatcgtgatctatagtttgctgcatatgagctggaatcggagcttaaaggatcgtttttttgaccgatctaattgttttgaggatcggtcttttataaagacgctgtctttgctgctttcatgactggacaggacaaaatacaagtgattttccgaattaggccagcatgggaagaggaatgccaactctacgctctggaaagttgcgtaattaacacttaggctaac

SEQ ID NO: 150511 - DNA, 395 bp, Arabidopsis thaliana columbia
cccacgcgtccgaaaaaaaatcggaactttgggaaataaggaaagacaccgaagaacacacaaccattcctctttattgaccgcttccttctttctctgtcacatacgaatcggggaaatttggatcccgatcgtgatctttagtttggtgaatttgagctggaattggagcttaaaggatcggttttttgactgatctaattgttttgaggatcggtctttcataaagttgttgtctttgaagcttttttgactggtgaggacgaaaaagttgtgattttgggaattagggttgttttgtttcgaattcgccatggatacgagcaggagagctgtggaatcgtattggaggtcgcggatgatagatgcggttacgtctgatgaggacaaagttg

SEQ ID NO: 150512 - DNA, 426 bp, Arabidopsis thaliana columbia
  unsure (1)..(426): unsure at all n locations
ttcaagtaattctccttcgtggtcctgaatctgtgccaccaaaggttatcggaaaatgtcaggtgcgaggttctgaatcactacatgccgaggttctcaaccaaatctgctggcgcttcatatganccatctaacgccgccaaagggtttgcaaggatgtactcaaagtcgaatcttcggtcctaaaaggaaccaatcaaaatgcttgttggtggttctggnggatattaaagcttaccaaaagatgggaacacgctattgaaggaaatgcaaattcagaatccaacagccattatgattgcgaggacagctgttgcacaggatgatataagtggtgatggtactacttccactgttatcttcattggtgagcttatgaaacagtctgaacgctgcatctatgaaggtatgcatccacgagtccta

SEQ ID NO: 150513 - DNA, 405 bp, Arabidopsis thaliana columbia
  unsure (1)..(405): unsure at all n locations
gaagaaactacaatagttaatcaatcaaagagaagtaagagaaatggcagattctaggtgtgggtgtggctcctcctgcaaatgtggtgactcttgcagttgcgagaagaactacaacaaggagtgcgacaactgtagctgtggatcaaactgcagctgtgggtcaaactgtaactgttgatgaaattattatggtctaaaatcatatatatggcagaaaaattggggaaaatatgtgttttatgctaagagatgtgtgtgtgttgttggaataaagacgtgaccgttgtgttgcgtatcaactctnttaagctttgacttttcccagctttgtattttcctatgtatggtaatggtgtgattgtgtaatgttttcatatgtaacgtaaaaaaaatatttatgtg

SEQ ID NO: 150514 - DNA, 292 bp, Arabidopsis thaliana columbia
ccctattcctttgatctacttaatagccctgagactctctttctgtactctaatcatttatcgagctctctcattctcttattctggatcagccaagtttctccatttctcaatcaagaaaatcttgaaatactcaaatcttttcaagattcactttcaaagatatcttgataatagcctcaaactctggtttcaaagatgggaaacgacgagaccgtacgattcttgattcactttttcaaatggagaaggttcatggtgttttgcttcgtttctcatcatggctttgcgc

SEQ ID NO: 150515 - DNA, 289 bp, Arabidopsis thaliana columbia
gacaaattctgattgcgtttgatagcattagattctgatcgaatttgcaagacctgggagactggggattctttatgctcggttattttaattccataggagcgctccggatcaattgaaactacctcggttaaagcagtcacttaactttggatcgatgagggttttctcattggagtttgaacgcattagttctctagcttgcacatacttaatcttcatgtcttatgagacaagtcttactgctgttatcatgccattctagaacgtctctatggcattaccaggc

SEQ ID NO: 150516 - DNA, 401 bp, Arabidopsis thaliana columbia
gaaaaaaataatcagaagagaaagatccatggctgataattgtatcagacttcttcgctcagcctctgttttcttctgtttagggcttctaatttcatccttcaacttgttgcagggtattgcagctgaaaatctttccaagcagaaactgacctcatggattcttcagaatgagattgtaaaggaagtcaatgagaatccaaacgctggatggaaagcttctttcaatgatcggtttgcaaacgccactgttgcagagtttaagcgccttcttggtgttaaaccaacaccaaagacggaatttttgggtgtgcctattgtaagccatgatatatctttgaagcttccaaaagaatttgatgctagaaccgcttggtcacagtgcaccagtattggaagga

SEQ ID NO: 150517 - DNA, 368 bp, Arabidopsis thaliana columbia
gacaaagtctgtttgcgtttgatagcattagagtctgatcgaatttggaagacctgtgagattagggtttctttttgtttgtttttttttattccgaaggagagctgcggagcaattggaattacctcggttaaagcaatcacgtagctttggatcgtttagggttttctcattgggtttgggggatttgtattcgagcttcctcaaactcaatctgatggtgatgtgagacaaggcttaatcctgttaattggcgattctagggtttttcaatggcgagcacaggcgagcctgaccgtaaaaggcgtcactttagctccatatcaccttctgaagctgcagccgccgtaaagaaacagcctttcttt

SEQ ID NO: 150518 - DNA, 397 bp, Arabidopsis thaliana columbia
ataacaccgatccatctctttctttctctctccgtcgactctcgttcttagagatggagagctttctacgtattcgttgttgctcttcttctcaccttgaattataggggagaagcaagtggttctgttttcttcattgatggatccaacaatcaatatcttcgtccacgatcatccagtgaggcacttcccatgtcgcctgttgaaatatctgcagcagtgtctgccttgttgggttttgcaccttcagcaactttgacagctgatggctcatccaagttgaacaagattctaaaacctaatccatttgagaggcctcgcgctgcttttgtgctagaaatcgctggagctgatgatatgcttttggaaacctcccctagtcattctttcttgggca

SEQ ID NO: 150519 - DNA, 377 bp, Arabidopsis thaliana columbia
  unsure (1)..(377): unsure at all n locations
ttccgggtggtggtcacacatccaaggtttacgccatccgtcagagtatcgcgaaggctctggttgggtactaccagaagtatgtggatgagcactcaaagaaggagattaaggatatcttggtgaggtatgataggactctgcttgtggcggatccgaggaggtgtgagccgaagaagtttggtggtcgtggtgctcgttctcgttaccagaagagttaccgttaaacaaagctggtttgtgttttgtttttcaatttggaatcatcgtaaggtttttttgggagtatggacttgtgagactctntagattttataatttctgctttattatgcttgttggattatggtgattctccaagaaacttatgttttgtt

SEQ ID NO: 150520 - DNA, 401 bp, Arabidopsis thaliana columbia
ctcacacttacggtaaaaacacggaattttacgagctaaagaacgactcgggctagcgacacaaccatttctctctattgactccattccttctttatatgtaaactacgaatcggtgatatacggatcccaaacgtgatctttagtttggtgaatttgacgctggaatcggagctaagaggatctggtgactgactgagctaatagctttgaggatcatccttttataaagtcgatgttttcggtgcttagattactggcggggacgaaactatggtgattccgcgaataagcgaagttcagacaaacaaccgcctactgtacgggcatgatagttgcgcaataacctcgtaggctatccgggaatgacagctcgtacctttagctacggactagatact

SEQ ID NO: 150521 - DNA, 403 bp, Arabidopsis thaliana columbia
cggacgcgtgggagacgatgacaataagatagtgaaggttgtaggattggaaggtcgcgtgatggagcagttcaaggtgtatgagattgacttccaatttattcccaactctgaagaagattgcgtctgcaaaatcactatgatatgggagaagcgcaacgatgatttccccgaaccaagcagctacatgcaactcctcaagagtatggttattgatatggaggaccacgtccttaaagcttaatcaatatcacaaccaccaccatcatcacaaccaccatcaccatcatcctatatatttattaaattgttttcatttatatataatagactagataagaacctgtataatgtgcgggataaaatgattgaaataaattattatgtataaaattattatatg

SEQ ID NO: 150522 - DNA, 396 bp, Arabidopsis thaliana columbia
ctcactcttactataaaaactcatatcttcgagaattgaggatagacacggtataacgcacactcgttcctcttgattgaccggttccttctatatctgtaacatacctatcgacaagagaaggatccagagcgtgacctatagtttgctgcatatgagttggaattggatgttaaaggatcatttttttgactgatctaattgttttgaggatcgatctttaacaatgacggaggctaagctggtttcatgactgtacaggacagaatacaatagattgaccgacatttggcagatgtggaagaggaatgcaaactcaacgctcttgaaagttgcgtcattaacactgtggctaacccggaatcgcagcacatgctcatactatgcgctgaaaac

SEQ ID NO: 150523 - DNA, 402 bp, Arabidopsis thaliana columbia
atttttcattcccttgttccggcgataacagtctcagtggcgacaaaccctattgccgagccggctcgcattttcctctagctatcgcaacgcctctcgctctctctccccaccggtttacataaagatggaaagtagcttgtatgatgagtttggtaactatgttggacctgagattgagtctgacagagatagtgatgatgaagtagaagatgaagatctccaagataagcatcttgaagaaaatggttccgatggcgaacaagggcctgggggttctaatggctggattaccactatcaatgatgttgagatggagaaccaaattgctcttcctgaggataagaagtactaccctactgctgaggaggtttatggtgaggatgttgagaccttggttat

SEQ ID NO: 150524 - DNA, 397 bp, Arabidopsis thaliana columbia
gttggttgatacagcttgagggaggaggatggtgcaataatgtaacaaatggcgtgagtcggatgcatactcgattaggttcatcgaagaaaatggtggagaaccttgctttctcagctattcttagcaataagaaacaatataatcctgatttttacaattggaatagagtgaaagttagatactgtgacggggcatcattcacaggagatgtagaagcagtgaaccctgctactaatcttcacttcagaggtgctcgagtttggttagccgttatgcaagagctgctagctaaaggcatgataaacgccgagaatgctgttttgtctggctgttctgctggcgggttagcttcgctgatgcattgtgatagtttccgtgctctattaccgatggg

SEQ ID NO: 150525 - DNA, 400 bp, Arabidopsis thaliana columbia
gcattttccataacccgcatgttaacgtagcaaaccctaagcctacatcgacggtggtgatgattccaacaatcgatctaggtggcgtgttcgaatccacggtcgtgcgagagagtgtagttgcgaaggttaaagacgcaatggagaagtttggatttttccaggcgattaaccatggggttccacttgatgtgatggagaagatgataaatggtattcgtcggtttcacgaccaagatccagaagtgaggaaaatgttctatacccgagacaaaaccaaaaagcttaaatatcactctaatgctgatctctatgagtctcctgctgcgagttggagagataccttaagttgtgtcatggctcctgatgttccaaaagcacaggacttacctgaggtttg

SEQ ID NO: 150526 - DNA, 313 bp, Arabidopsis thaliana columbia
aaaaaaaaaaaaaaaaaataaaaaaaaaaataacacaaacagtatcaaacacaaaatcaggggaagaattttctcaggcgttcgttctagcaaatacagaattgcttacgctttactgcctccgcttccaccgtctacgccgttcctccaactctccttatgaagcctaccttaaccatctctgatcctgtactacctttgcctccaatgactaagaagaatggaggagcaagatgttcaatgcagacaaagtaaggacacttatgacccattgggtctggattttcagctgcagcatcagctgatttgacag

SEQ ID NO: 150527 - DNA, 399 bp, Arabidopsis thaliana columbia
cccgagagagtgagcgttacaaaaataaccataacgtttcttgagagagacagatagaggtcagggggctctgataaaatccagcaatggcttcaaagcttgtagtgataattgtgtttatcctcaaactcatcgccgttgggttagccattgccgccgagcacagaagaagtgtcggcatggttgaaccagactgagacacgcaatatgattactgtgtgtatggtattgacattgctacaagttatggagctggtgcattggtactcctctttgtaagccaagtccctcattatggctgctagtcgttgcttctgttgtggaaagtctcttaaccctggcggatcaagagcttgtgccattattctcttcctcatgtgctgggagtttttcttgatc

SEQ ID NO: 150528 - DNA, 406 bp, Arabidopsis thaliana columbia
gtcagagtcaagggttccgtgacatgcaccagaaagtagagcacctacggtgcggtgacaccattgcaacaccatctggtgtagctcaatggttctacaacaatggaaatgagcctctcattcttgttgcagccgcggatctcgccagcaaccagaaccagcttgaccgcaaccttagaccatttttgatagccggaaacaacccacaagggcaggaatggctacaaggccgaaagcaacagaagcaaaacaacatcttcaatggcttcgcacctgagatcttggctcaagccttcaagatcaatgtcgagacggctcagcagctccagaaccagcaagataaccgtggcaacatcgtcaaggtcaacggacctttcggcgtcattaggccacccttgagacgcgg

SEQ ID NO: 150529 - DNA, 263 bp, Arabidopsis thaliana columbia
ctcactcttactaaaaaaactcctaacttcgggaattaaggaaagtcacgggcgaacacacaaccattcctttttattgacctcttccttctttctttgtaacataccaatcgacaaaatttggatcccgatcgtgatctttagtttgctacatatgacctggtatcggatctcataggatcatttttttgactgatctaattgttttgaggatcgagcttttataaacacggagtctaagaagctttcatgactgttcacta

SEQ ID NO: 150530 - DNA, 339 bp, Arabidopsis thaliana columbia
acccttccggaaaccggcggaattgccaggttccaaattggaagatgcctccgattccctcttcaaggttgttcttataggcgattctggagttggcaaatccaatctcctttccagattcactaaaaacgagttcaatctagagtctaaatccaccattggcgtcgaattcgccactcgtaccttaaaagtcgatggcaaagtcgttaaagctcagatttgtgacactgctggtcaggagaggtaccgtgccatcactagtgcatattaccgtggagccgtgggtgcactcctagtatatgatgtaactcgccgtgcaacatttgagaacgtagatcg

SEQ ID NO: 150531 - DNA, 407 bp, Arabidopsis thaliana columbia
cggacgcgtgggcagggtatacgttttcagttgctgcatgcgccaccctttgtcatgaattatgctggtgacttaaaatacgtggtaaacaagttccatgtatctagtggaacatctgaaagtataagagatctaaaagtagaactcgcagaaatgaaagtctggattgcatcttcattacatagaggcgaagaagaagtcattttaggagttcacaacatgcttctcgaatcacatccggactctgttgtcataattgtgcctcgacatccacatcatggccaacagattgctcatctttttttgtagaaactgcggaaagatggccaaagtgttgctctaaggtctcaaaacgaaaagcttacaccaaggaagacgaatatatatgtggtggatacactaggtga

SEQ ID NO: 150532 - DNA, 112 bp, Arabidopsis thaliana columbia
  unsure (1)..(112): unsure at all n locations
gtcaatatgttggttctgcaaatgctaaaaaaacgttagcaacttgtggtgttcctgatcctagttgttgatttttgagatattgctaaaaaaagttgttaatgataatnnt

SEQ ID NO: 150533 - DNA, 410 bp, Arabidopsis thaliana columbia
aatttactaaaactcttccaaaatgtcacattccttcttcaatttattcctaatctgtcttttgctctacaacaattgcattgcgcatcactatacattcacggttagggaagttccatatacgaaactgtgtagcacgaaggcgattttaaccgttaatagtcagtttcctggaccgattataaaggttcacaaaggagacactatttatgttaacgttcaaaaccgagctagtgaaaacatcacaatgcattggtagtctaaagaccatttgtattataccacttacaagcatataataaattaagacgatgatgattgaataagtgtatatgtatatttaaacacacaggcatggtgtagagcagccgagaaatccgtggtcagatggtcctgaatacatcacacaa

SEQ ID NO: 150534 - DNA, 395 bp, Arabidopsis thaliana columbia
acaaaactcaactaattgtgttatcacccaaaagagaagagcaaacacaatggcctgcgctttgaggttcttcacatgctttgttttgacagtgttcatcgttgcatcagtggatgcagcaataacatgtggcacagtggcaagtagcttgagtccatgtctaggctacctatcaaagggtggggtggtgccacctccgtgctgtgcaggagtcaaaaagttgaacggtatggctcaaaccacacccgaccgtcaacaagcatgcagatgcttacagtccgctgcaaaaggggttaatccaagtctagcctctggccttcctggaaagtgcggtgttagcatcccctatcccatcttcacgagcaccaactgcgccaccatcaagtgaagtgggg

SEQ ID NO: 150535 - DNA, 401 bp, Arabidopsis thaliana columbia
caaatcttaaacgttttactttgtgctgcactactcaacctcaatggccgcgtcagcgatggctctctcctcccctgccttcgccggtaaggccgtcaagctttcccccgcggcatctgaagtccttggaagcggccgtgtgacaatgaggaagactgttgccaagccaaagggcccatcaggcagcccatggtacggatctgaccgtgtcaagtacttgggtccattctctggcgaatcaccgagctaccttaccggagagttccccggagactacggatgggacaccgccggactttcagctgaccccgagacattcgcaaggaaccgtgaactagaagttatccacagcaggtgggccatgctcggagccctaggctgcgtcttccctgagcttttgg

SEQ ID NO: 150536 - DNA, 398 bp, Arabidopsis thaliana columbia
cttggttatggtggggattgggcagttcggattgatgtaaaaaataaaggggtgagggatgatgtgaagagaagtgcacatctcttcttttatttagctgatgaaggtggcaatgttttaaatttaggccaagatggtttagatttccaagggagctctctcctggtttcggggtcacgtgaagatgtaggagactggcagatacacttaaaatcacagaatcagctcgagacacattattccggtttcaagacgcctcacatatataatttgtctgatctagttcagcaaaatcttgctctgcaggcaaggaagtttggacgacttcagctctctgacacatcagaggattcttctaacatttacatctttcagatttctgggaggctaccatttac

SEQ ID NO: 150537 - DNA, 403 bp, Arabidopsis thaliana columbia
atcaaagctgccactaaaaactttgatgagtcccgggtgcttggtgttggtggtttgggcaaggtttacagaggagagattgatggcggaactacaaaggtagccatcaagagaggcaacccaatgtccgagcaaggtgtacatgagttccagactgagattgaaatgctttcaaagcttagacatcgtcatcttgtgtccttgattggatactgtgaagagaactgcgaaatgatcttagtctatgattacatggctcatggtacaatgagggagcatctctacaaaacccagaatccttctcttccatggaagcaacgtcttgagatatgcattggagcagcccgaggtttacactatctacacactggtgcaaaacacacaatcatccatagagatgtga

SEQ ID NO: 150538 - DNA, 379 bp, Arabidopsis thaliana columbia
  unsure (1)..(379): unsure at all n locations
aaaggctcgagccacagagatctgagtttctcttcttcgagatctgatcgccgaaggtcataatctcccatcgaagcagaatggagacttttctattcacatctgagtctgtaaacgagggacacccagacaagctctgtgaccagatctctgatgcagtcctcgatgcctgccttgaacaagaccctgacagcaaagttgcttgtgagacatgcaccaagaccaacatggtcatggtctttggtgagatcactaccaaggctactgttgactacgagaagattgtccgtgacacctgtcgcgccattggatttgtctctgatgatgttggtcttgatgctgacanatgcnaagttctagtcaacattgagcaacagag

SEQ ID NO: 150539 - DNA, 404 bp, Arabidopsis thaliana columbia
attcatgcgagttcatggggcgcggctctggtgagaatctccccgtacacgtttctccgccatcggaatcgccatctccatcggcgtctctgttcttggtgctgcctggggaatttacattaccggaagtagtttgatcggtgccgccattgaagctcctcgaatcacttccaagaatctcatcagtgtaatcttctgtgaagccgtggctatatacggtgttattgtggcaatcatattacaaacgaagttggagagtgtaccatcatcaaagatgtatgatgctgagtctctaagagctggatatgcaatctttgcttctggaatcattgttggattcgcaaaccttgtatgcgggttatgtgtaggaatcattggaagcagttgcgcattgtctgatgctc

SEQ ID NO: 150540 - DNA, 367 bp, Arabidopsis thaliana columbia
aaaaaaaagaaaacgccgaaccatagattttaatggtcttcctcaaccatggctttgagctcccgtgccttaaccggaaaggctgtgaaccctgccgcatcagatgtccttgaaagccgtcgtgtgaccatcacgaagactgtcgccaagccaaaggttccatcaggcagtccatgtgacggatctgaccgagtcatgtacttgggtccattctccggcgagccctcgagctaccttaccgatgagttcccaggttactactgatgggacaccgttggtatatcctgcgacccagagacctatcgcaggaaccgcgagctagaagttatccacagcagatgcgccatgctcggagccctaagctgcg

SEQ ID NO: 150541 - DNA, 423 bp, Arabidopsis thaliana columbia
  unsure (1)..(423): unsure at all n locations
cgggggggcccagggcgcccgaaaaaaacagggtttctctgatattttgttttgggaggctgcaactggcaaaaacagggaagagcttttcgcagctaatgtttttatgctcaagggcaatgttgtatcgacaccaacaattgcaggaactattttgcccggagtcactcgaaactgcgtaatggaattgtgtcgtgatttcggctaccaggtcgaggaacgtacgattcctctagtggactttctcgatgcggacgaagctttctgtcctggcactgcttccattgtgactagtattgcatccgtaacctttaaagacanaaagaccggattcaaaacaggggaagaaacattggctgcgaagctatacgagacgttaagtgatatccagacgggtcgggtcgaggataccaagggatggac

SEQ ID NO: 150542 - DNA, 309 bp, Arabidopsis thaliana columbia
agagatttagatattgtagagtgagattctaaagagagagagagagagagatatggctagtgggatcgctcgtggtcgtttagctgaagagaggaaatcgtggaggaagaatcatcctcatggttttgtggcaaagccggagacggggcaggatggaactgtgaatctaatggtgtggcattgcactatacctggtaaagctgggactgattgggaaggtggattctttccattaacgatgcacttcagtgaggattatccgagcaaaccttcgaaatgtaaatttccacaaggggttttccaccctaa

SEQ ID NO: 150543 - DNA, 206 bp, Arabidopsis thaliana columbia
tagaaacactcaaaacttcaaaccaaaaaaaataaatgggagaggaagagaagaaacgagaagcggcagaggaaaagaaaatggaagagaagaaaccagaagagaaaaaagaaggagaagacaagaaagtggatgctgagaaaaaaggagaagattctgacaagaagcctcaagaaggagaatctaacaaagattccaaagaagat

SEQ ID NO: 150544 - DNA, 397 bp, Arabidopsis thaliana columbia
ttttattatctctctctttctgcgtgttccaatttcttccacaaaaccctaggtttgtgttaaaccctgaaattcgtgtaacctttcaacaatctcttcaattttgttttcgattctgaatccattgtttacgaatctctcatctaaagctacattcttcgttaaatcgtttttaatcgactcgctcactcgtgagttgactcgtcagctgtttccataattgcttattgaatttttatacgatgatgtttcaatatggaagaaactagaggaatttctgatccagagaatgggagttcgagttacggcggtaaaccgccgaatccactctccttctcttcttccttcgccgctgctgccgtttacaggcaaaccttctacggcgagcgatcgttgg

SEQ ID NO: 150545 - DNA, 400 bp, Arabidopsis thaliana columbia
accgtgagtagccacaacatcactcaaatcctcgctgattctccagattactcttcgttcaacagctacctttctcagacgaagctcgccgacgagatcaacagccgcacgacgattacagttctcgtccttaacaatggcgcaatgtctgctctcgccggaaaacatccactctccgttattaaaagcgctttaagcctcctcgtcctcctcgattactacgatccacaaaaactccacaagatctccaaaggcacaactctctccaccacactttaccaaaccaccggaaacgctcccggaaacctaggattcgtcaacatcaccgatcttaaaggaggcaaagtcggatttggctccgccgcttcaggttccaaactcgattcatcttacaccaaat

SEQ ID NO: 150546 - DNA, 381 bp, Arabidopsis thaliana columbia
taaattgaagaatttttttatcacaaattctcagatttcttgacttagattccgcgaatcaaggctctcatcgcatggaagattcaggaaaaaaatcagagtttctcttctttggaaaggaaacaaatactctgtgagatcgattctggagcttcttgaagatttaggttacgaattgagaaagttaaccggcgttacatcggagacgcttcgttgatcgtccaggttgatgaaaaaggatcagcttgatgtacccttttctgagaacactcgagcttgagttgcaggaatcaaacataattgaggataaaactatcagaatgatgggagtgtctgaagaagaggtcgaaggtgttctaaaagagcagtgtctgacatgag

SEQ ID NO: 150547 - DNA, 368 bp, Arabidopsis thaliana columbia
ccagccgtccgaaaaaatggcaatccttcttcctctgatctgccttctgggttcattcatggtagtggggatggcggctgatttaacaccggaccgttattggagcactgctttaccaaacactcccattcccaactctctccataatcttttgactttcgattttaccgacgagaaaagtaccaacgtccaagtaggtaaaggcggagtaaacgttaacacccataaaggtaaaaccggtagcggaaccgccgtgaacgttggaaagggaggtgtacgcgtggacacaggcaagggcaagccccgaggagggacacacgtgagcgtttgcagcggaaaaggtcacggaggtggcgtcgcagtccaca

SEQ ID NO: 150548 - DNA, 370 bp, Arabidopsis thaliana columbia
tttgactccactttccaaaaaaaacaaaaaaaaataaatactaatataagaaattctgaaatctaaaatttcagatttcagaaatcgccatggcttcagtgactctaggttcatggattgttgttcaccaccacaatcatcatcatccatcttcaatccttaccaaatccagatccagatcttgtcctataactcttactaaacccatctcctttcgatcaaaacgcaccgtttcatcatcttcttcaatcgtttcttcttcccgtgttacaaaagaagacaatctacgccaatctgaaccatcctctttcgatttcatgtcgtacattatcaccaaagccggattagtcaacaaagctttagattcagc

SEQ ID NO: 150549 - DNA, 240 bp, Arabidopsis thaliana columbia
  unsure (1)..(240): unsure at all n locations
nnngnnncnnnnnnggnnnttttgtcccatcagccttttgtggtattcttggttttcgaccatctcaggggactgtttcttcagttggagttttgcccaattctcagagcctagagactgttggatggtttgcctctgatccatccgttttgtgtcaagttggacatgccttactaaatctgagtgcagtaacacatagaaggcaaagatctttaatctttgctgatgatttattcgagc

SEQ ID NO: 150550 - DNA, 163 bp, Arabidopsis thaliana columbia
ccggcgatgcacttacatctctctttaccggcaccgacgtgtatcaagatctccgtcgattatcgctcccaaatttcagattgtggcggctgaaaaatcggagcctctgaaaattatgatatcaggagctcctgcttctggtaaaggtacacaatgcgagctg

SEQ ID NO: 150551 - DNA, 454 bp, Arabidopsis thaliana columbia
  unsure (1)..(454): unsure at all n locations
gccgagtatttcaattatcatncancagaaactcttctctctttccttccggatcacccaccccatgtgtaccgggtagagagaagcgcggctgatactctttcctccctaacccctannaccggagacggcagaacaccagannttccactcccgacaccaannttgcacaccattctcgtcctcttcgtcgaacacagcgcaaagtctcagtccccacccgtggatccatcgctcatcacgcaccgccaagcggcaaattcttctccaacggattcgatcttgcatgggctcaaaccgccggatccaaaaccggagccgcaaaccggcttcaccaaatggttgaatcattcaaaccggtggtagcagcgcttctcgatctccctatgccgacgatcgccgccttgaacggccacgccgccgccgcgggattgattttggctttgagccatga

SEQ ID NO: 150552 - DNA, 405 bp, Arabidopsis thaliana columbia
gacaaaagataagagagaatagagagagagagagcaatggccaatgcgaagcccttgggtctggtcggcttcttttgtctgttattacagttattctccatcttccatatcggaaatggggaattggagatgaactattacaaagagagttgtccaaaagcggaagagataataagacaacaagtggagacgctttactacaaacacggtaacacagccgtatcttggctccgtaatctcttccatgactgtgtcgtcaagtcgtgtgatgcgtcgctgctgctagagacagcgagaggtgtggaatctgagcagaaatcgaagaggagtttcggtatgagaaactttaagtacgttaagattatcaaagacgcactcgagaaagagtgtccttccacagtctct

SEQ ID NO: 150553 - DNA, 381 bp, Arabidopsis thaliana columbia
acggacgcgtgggcttcagcttcgaccattttcgtcttcttcattcagtgttgagtccgcgtttacctgtgagctcgaagaaagtgacgatcaatgggaaccctaggcagagcattttactcggtcggtttttggatccgtgagactggtcaagctcttgatcgcctcggttgtcgccttcaaggcaaaaattacttccgagaacaactgtcaaggcatcggacactgatgaatgtatttgataaggctccgattgtggacaaggaagcttttgtggcaccaagcgcctcagttattggggacgttcacattggaagaggatcgtccatttggtatggatgcgtattacgaggcgatgtgaacaccgtaagtgttgggtca

SEQ ID NO: 150554 - DNA, 376 bp, Arabidopsis thaliana columbia
agatcccagaaacaactgttgtaatggcttcctcaaccatggctttgtcctcccctgccttcggcggaaaggctgtgaagcctgccgcatcagatgtcctcggaagcggccgtgtgaccatgaggaagactgtcgccaagccaaagggtccatcaggcagcccatggtacggatctgaccgagtcaagtacttgggtccattctccggcgagcccccgagctaccttaccggtgagttccccggtgactacggatgggacaccgctggtctatccgccgacccagagaccttcgccaggaaccgtgagctagaagttatccacagcagatgggccatgctcggagccctaggctgcgttttccctgagctattggc

SEQ ID NO: 150555 - DNA, 265 bp, Arabidopsis thaliana columbia
gtccggaatggccggagcgacccacgaatctgcggacacttgaaagtacccttttcacactctttctttcgattttttagggtaatcgtgagtagcgttaacaatggctggtaaaggagaaggtccagcgattggtatcgatctcggtaccacttactcttgcgttggagtttggcaacacgaccgtgttgagatcattgctaatgatcaaggtaacagaaccacaccgtcttacgtcgccttcactgatagcgaacggttgatt

SEQ ID NO: 150556 - DNA, 397 bp, Arabidopsis thaliana columbia
atagaatcaagcgatgatgaatcttagggttttgttcctcgctctccttctccttggatctcctctgcttcaagttgctagatgtcaatcggatgccgaggatcattcaagtcttgttgacgatgttgtgggagaaaacactgatgatgcggttgaggaagatgaccatgatttggatatgaacttgtcctcatttccaggagttgagactgtttgtgttttccccaaaaacagtgccaaattggttccagctggagaagagactgagctccttgttggtcttaaaaatgaagggaaaactagagtaggtgtgatgggaattagggccagcgttcatcttccttatgatcataagttgttggttcagaatctaaccatgttgagacttaacaatgca

SEQ ID NO: 150557 - DNA, 396 bp, Arabidopsis thaliana columbia
aaaaaagatattctttatcccaatttccctaaatcataaagaaacttacgggtcggggtgaacgccatctggagtctactaaatcataagcgatgatatcttcgattgagaatgagagatccgaaattccttcccctgagaagctgaagttagtggaggagccatccgacgatgaatctaagttctataattatgattcggactattgggaaactttggcagatgatcttctactgttatatgaagagtggggcaagagcgggggtattgatgtggacttctcgaaagtgcgtaacagatttggtcacggagctgttcatctcgacgactacaatatggatagcgagcctcatgagaccaacagagatctgctcaacatgatgtccaacatggcta

SEQ ID NO: 150558 - DNA, 398 bp, Arabidopsis thaliana columbia
acgagcttctcgcatgaagcaatgcttgaagggatagtgccagtgagagtgtttgatgagagatcgagattagagagtgaaggacaatcctggaattggtctggaacttcgccggagataaagttatcggcgactaaaaacgcctgtaggttgtgaattgagaggattgtggaagggagagatgatcggatctggtttcttgagaaatcaatgaaagaaagtgaaactgaatcggagatgtctccagggatccctccgctgagacgatttccggctagttcgagtctctgtagcttctcaagcttgccaaagccgataggaattgatccgtttagtagattgttctgcattctaacacgaactagtgattggcaagtggaaagagtcgctggaatctg

SEQ ID NO: 150559 - DNA, 410 bp, Arabidopsis thaliana columbia
  unsure (1)..(410): unsure at all n locations
gtttcttctcccttcctacatcctctctcttctctttctctacactttcatctaatggccggcctgagatggagagagtggtggaacacgatggccttccccacccggcgtatctggaatcgtttcaccgttcgcgtcgggtttcgacacagcggacttttgaggttagaacatgacgtgagttcttgcgagtatgaagacatacacataatgnggaatttgttacacaagaatgaagatcttacacgcgtaccaatccaacaacaacaacaacagaggatgaaaccttgttggaatcttcttggttcgtatctttgccaaagattctganccgttttatgatataaaccaaaccattgttgtatttgagagagccttgacgggtcccttgcagtgtggtgtggtttatt

SEQ ID NO: 150560 - DNA, 472 bp, Arabidopsis thaliana columbia
  unsure (1)..(472): unsure at all n locations
aaagagtaaagggacgctagagagagctcgaagacgcaatggcgagaatcaaggttcatgagctgagggagaaatcaaaagctgatctttcgggtcagttgaaggaatttaaggcagagcttgctctccttcgtgtcgctaaggtcactggaggtgctcctaataagctctctaagatcaaggtggtgaggaagtcgattgctcaggtgttgacagngatctcacagaaacaaaagtctgctttgagagaggcatacaagaacaagaagcttttgcctcttgatcttcgtcccaagaagactagagccatcaggaggagactcactaagcatcangcatcgttgaagacagagagggagaagaagaaagaaatgtactttccaataaggaagtatgcttttaaggtgtaagcttttatcttgatcacatcaatttttgtgtttgaatttgagctcgtgtgggtttttgcttt

SEQ ID NO: 150561 - DNA, 438 bp, Arabidopsis thaliana columbia
gtttgcttctagggtctttcttttctttgtttgtatatgtgacctgtttgaatcttaatttggctgttaaaagggttattgagatgcagcaaaagttgtagactgagatggacaaattatctgagacctggaattaaacgtggaaactttactcctcatgaagaaggaatgatcattcacttgcaagccttattgggtaacaagtaatctcagacaaaaggatctacatgtgtatatacttgaatgttttgtgtatatattttgatgatgtgaaccctaaactggcttatttgtttacatatggatgtggtaagatgggcgtccatagctttatacccaccacaaagaacggacactgatatcaagaactactggaacacacatttagagaagaagctcacaagtctgacagtgatgagaggagcagatcagagaaca

SEQ ID NO: 150562 - DNA, 331 bp, Arabidopsis thaliana columbia
atttgatagaatcaagcgatgatgaatcttagggttttgttcctcgctctccttctccttgcatgcgcctctgcttcaagttgctagatgtcaatcggatgccgaggatcattcaagtcttgttgacgatgttgtgggagaaaacactgatgatgcggttgaggaagatgaccatgattcggatatgaacttgtcctcatttccaggagttgagactgtttgtgttttccccaaaaacagtgccaaattggttccagctggagaagagactgagctccttgttggtcttaacaatgaattggaaactagagtaggtgtgatgggaaatagg

SEQ ID NO: 150563 - DNA, 314 bp, Arabidopsis thaliana columbia
tctgaacccatctgttcttgataagattgagctaagaccgacttcaatcgaaaaagagactggcggtaagattgcaacagcgcaagggctctatgctatggcgctaccagggttttggatggacattgggcaaccccgtgactacataacgggtttgagactctacttagactcccttaggaagaaatcttctgccaaattaaccagtgggccacacataggtgggaattgttttgttgacgaaaccgctacaattggtgaaggatgattgattgtaccagactttgtcattggtccaggctgctttgttgagt

SEQ ID NO: 150564 - DNA, 351 bp, Arabidopsis thaliana columbia
cactctttggtgtctcaataacactaagaaagtaagtaaatgaaaaccagagatggcgaggacggacagcatgtacggtatttgttttaccggccaaagtcacctcgggtgccggcgcttggttgatcagtagctccgagtattaattgccgatgagaaacgccggttctaggctcgtagggagggcagacaaagatccttgtgctgtttgctcttcttgaaaagattctccggcagctgccgttgctccggatggagctactgtcatcaaacccaagccaccactgattgggcctaagagagggtctaaggacaagattctaaggcgagaattctattggttcaagaacg

SEQ ID NO: 150565 - DNA, 405 bp, Arabidopsis thaliana columbia
catttccaaattatttctaagctaagaaaatctttaaaaataacaaagcttctaaaataataatccgacctaccggattcaaaccattgatctgaagatcatctataaaccagtccttgatctataaactaaaataagggaagaaaaaaacaagagagagaaatagagaatgaagtcttttgcggctaaggtagaagagggagttaaaggaatagacggaaagccgtcggtaggtccggtgtaccggaatcttctgtcggaaaaaggttttcctccgattgattctgagatcaccactgcttgggacattttcagtaaatcagtggagaaattccctgacaataatatgcttggatggcgtcgaattgttgatgagaaggttggaccatatatgtggaaaacgta

SEQ ID NO: 150566 - DNA, 251 bp, Arabidopsis thaliana columbia
  unsure (1)..(251): unsure at all n locations
gagagttaagctataagagagtagaaagttggtgttaattaaagttttggttcggatattgatggtttttgtcaaaatgactgatgtttacttgatgattgtgatgttgatgggtttggggtttagtatagagttatcaaangggcacaagttctatgttggagggagagatgtgtgggtccttatctttattgaggtttttttttattttncacaccnatatcttttttaatgtatcgacacttatatat

SEQ ID NO: 150567 - DNA, 141 bp, Arabidopsis thaliana columbia
  unsure (1)..(141): unsure at all n locations
cgtacaagcaagaagagagagcgaaaatggagctctgtgttatcagcacgactacgactgttggggggagtaatccgtttcttccgtcaattacacgccgtgttagnnnccgattttttcaattcagacactgtgctacag

SEQ ID NO: 150568 - DNA, 427 bp, Arabidopsis thaliana columbia
  unsure (1)..(427): unsure at all n locations
gaccaattggtcattgaagaaggctaaagtcttcactcactatggcttcatccctctggtcatgttcgtcggcatgaactccgatcccaaacctcatctcttccagctccttagccctgtctgatccatccaattttatcatcaacctaaatcaatcgaatcggtcttcctctggttcggcttcttcatatctttacgcgtgttcttagattcgccgaatcntcttgtatgctttttcattagctagtctttgaatactttctctatggtactgtattgtataactttagcttatgatttaatgtgaaatcgaattttatngtttgttantnntttattttaacaaatttttttacttttgttattaaagttttttattctactctatcaaatttttttttttatgtataatgggctgttctttttt

SEQ ID NO: 150569 - DNA, 331 bp, Arabidopsis thaliana columbia
cgcatcagatgtcctcggaagcggccgtgtgaccatgaggaagactgtcgccaagccaaagggtccatcaggcagcccatggtacggatctgaccgagtcaagtacttgggtccattcttcggcgagcccccgagctaccttaccggtgagttccccggtgactacggatgggacaccgctggtctatccgtcgacccagagaccttcgttaggaaccgtgagctagaagttatccacagcagatgggccatgctcggagccctaggctgcgttttccctgagctattggctaggaacggagtgtagttcggagaagcggtttggttcaag

SEQ ID NO: 150570 - DNA, 486 bp, Arabidopsis thaliana columbia
  unsure (1)..(486): unsure at all n locations
gttgaagtgtaatcagccccagagaatttcaagttgcttgcgaaatgcagaagtgaagtgtgtaaggagcttggaataccggaggagcaatgtgagctatctatggggatgtctggtgactttgaactagcaattgaactgggaagcacaaatgtgagaataggatctactattttcggggcgagagagtatcctaagaagtaatgatgtaaactactgagtgatgagattgattctaagtttgaacatcaaaaccagtttcagggaagaataagagcttaggttttaatgttgaaatcatgtagatcttctctcttcttttggtttgcattgcatttggtgatgttgcttgtaagttgtaaccaaggtacattatnactatttttctaatttcatggatataaacacatgaaagatgtattttttcactattatattattcttttatttaaacacaaatctatatttttttttactaattttatt

SEQ ID NO: 150571 - DNA, 449 bp, Arabidopsis thaliana columbia
gatgtcgtcagaggtcaagtggctctcatcaccggtggtggatccggtatcggttttgagatctcttctcagtttggcaaacatggagcttctatcgctatcatgggacgacgaaaacaagtcctcgatgacgccgtctctgctcttcgatctcttggaatccaggctattggattggaaggtgatgttcgtaagcaagaagatgcgagaagagttgtggaagcaacttttcagcattttggtaaacttgatattcttgttaacgccgctgctggcaattttctggctgctgctgaggatttgtctcctaatggcttcagaacagtcttagacattgatgcggtaggaacattcaacatgtgtcacgccgctctcaagtatcttaagaaaggagcgcctggaagagacttcataagcggtggaggtttcgttttttacaatagcgcgac

SEQ ID NO: 150572 - DNA, 323 bp, Arabidopsis thaliana columbia
aaatccccactttcacaacaaaaaaactcttttctttttgtctgctcgtttttcttttcaaaatgggagccttggaagcagaaagagccgccaacaatgctacggcgttagagacacagtcgtcaccggaagatctcggtcaaccatctcctctgcgtaagatcatctccgtcgcttcaatcgccgccggtgtacagttcgggtgggccttacagctttctcttctgactccttacatacaactcctcgggatccctcacaaatggtcgtcttacatgtggctttgtggtcctatctccggcatgattgttcaaccgatcgtc

SEQ ID NO: 150573 - DNA, 397 bp, Arabidopsis thaliana columbia
  unsure (1)..(397): unsure at all n locations
atttttataagatatcttcacatacacaaaaacatttattgtacagtgcacaagtgatcgaatatgtgattctttttcataatcagagatctgatctaaatggagtatgaccgtacgttgaacttgattccatacggactacaaggagtaagagaggaggaagaaatcgaagaagacgatgaagagagcatgacgttgtcgtcagtaccagaaaacgaaacgtnngagtgttcttcgtcttcggcgacgtatnctccaataccttctgggcctaaaacaccgagagagccgatggagtttttatgcagatcatggagtccttctacttttgagaactctttagctttatcattttagaaatctgataaacaactcaacaaaaaccctaattattttt

SEQ ID NO: 150574 - DNA, 480 bp, Arabidopsis thaliana columbia
  unsure (1)..(480): unsure at all n locations
aaataaaacacacaatttcaagattttctactttttattacaaagattcaatcttcttgtttcttgttgcaaccatgagtcttcttgcagatcttgttaaccttgacatctcagacaacagtgaaaagatcatcgctgaatacatatgggttggtggttctggtatggacatgagaagcaaagccaggactctccctggacctgtgaccgatccatcaaaacttncaaagtggaacctatgatggttcatgcactggtcaagctcctggtcaagacagtgaagtgatcttataccctcaagcaattttcaaagatccattccgtagaggcaacaacanccttgctatgtgtgatgcttacacttcaacgggagagccattccctactaacaagcgacaagctgcggttgagatctttgctaaccccggtgttattgctgaagtgccattgtatgggaatcgaacaagaatacaatttgtt

SEQ ID NO: 150575 - DNA, 362 bp, Arabidopsis thaliana columbia
  unsure (1)..(362): unsure at all n locations
agaacaatgaaaaatttaaccagtttcgtaattgttatcttactacaaagcttattgtttcatgtatatggtcgtcatcaaagttcttcgaagaacattttagtagattcatctccatttccttctgatttcctctttggtacagcttcttccgcttaccagtatgaaggtgcgttcttgactgatggaaaaagttcgaacaattgggatgtctttacgcataaaaatcctgggaaaatacttgacaagaacaatgcagatagagctgtggaccaatataatcgatttttggaggacatccaattaatgtcttttcttggagggaacagntattggttttcaatttcttggtgtagtatctt

SEQ ID NO: 150576 - DNA, 332 bp, Arabidopsis thaliana columbia
  unsure (1)..(332): unsure at all n locations
cgacgaagacaggcctagattttttttccaatctcgtccttcttcttctcacacggcggtggaagaagaagaagctcgaatccctaacaagcttttcatttcaatctccgtctcaatctccctcatcatattatctctctccttcttctacttcgaatctgaacctgccaaatcgctactattatggctttccctctctttcctcgncggncctttctctcctagctcgctcaccggaggtaagattcgcgtcggttatggtcagatcttgcagccagaacagattcacgatgagtcatccacggataacgaacgtgaatccaggacgaaat

SEQ ID NO: 150577 - DNA, 463 bp, Arabidopsis thaliana columbia
  unsure (1)..(463): unsure at all n locations
gtacactcgcggctccttcctctgccccggaggccaggcttttcctaaccgcagcttctctgaagaagtctctgttcttgatgggcactttactcagctgggcttgaacagcgtagcctacttgatgggcaatgatgatgagactaagaaatggcatgtctatgctgcctctgcccaggactccagcaactgcaacaacaatgtctacactctcgagatgtgcatgactggtctggacagagagaaagctgctgtcttctacaaggatgaagctgacaagactgggtcaatgactgataactctggaatcagaaagatccttcccaagtctgagatctgcgactttgaattcgagccctgcggctactctatgaactcaattganggggatgcaatctncacgatccatgtgaccnctgaagatgggtttagctacgctagcttcgaagctgtgggttacgac

SEQ ID NO: 150578 - DNA, 404 bp, Arabidopsis thaliana columbia
gacccaatgacaataagaagacgaatggcgtcttcgtcgctctgagtcacatcttcaggtggtgctgctcccgactatgcagccactcaaacctcatcgcacttaccaatccaaaaccgctctcgcagagcatctttacgactatctgataagaccaagcttcggtttctctccaagcctagtcgcagaagctaccctgcggtgaaagcacaatctaacaaggttagttctgctgcatcatcaaatgcggtcaaggatgctgggcctttatcagctgaaggaatggcgaaagactcattgatggagccgaatgcttcttcttctgaatgagctacagaagagtctatttctgagttccttacccaagtaacaactcttgtcaagcttgtggattcaagagacat

SEQ ID NO: 150579 - DNA, 414 bp, Arabidopsis thaliana columbia
  unsure (1)..(414): unsure at all n locations
gttcggcgtttgtatcaccagagacgcgacgcgataatgcttcggaagtcggttctcgagctgtcttctcgtttgtcaataaagagattcccgaggaatttgggagctcagaggtttcatttgagctcttcgagaaatgcatctacatctggtaaaaatggtctccctggagctaaacccgttgggaaaccagatgcctcaaaagttgatcctncaaaagtgactccttctcctcctactaaaggaaattcttcaaaagtggttataggaggtgttgcaatcgctggggcttttctggaagcgtttcagactggctatttggatcatatatttgtgaaagaacattagtaattaagtgagcgaattctttctgaatctcttactttaaagctggaggaggcttttcattttgaa

SEQ ID NO: 150580 - DNA, 447 bp, Arabidopsis thaliana columbia
aaaaaaaagaaaacacaaaaacaaagattataatggcttcctcaaccatggctttgtcctgcgctgccttcgccggaaaggctgtgaagcctgccgcatcagatgtcctcggaagcggccgtgtgaccatgaggaagactgtcgccaagccaaagggtccatcaggcagcccatggtacggatctgaccgagtcaagtacttgggtccattctccggcgagcccccgagctaccttaccggtgagttccccggtgactacggatgggacaccgctggtctatccgccgacccagagaccttcgccaggaaccgtgagctagaagttatccacagcagatgggccatgctcggagccctaggctgcgttttccctgagctattggctaggaacggagtgaagttcggagaagcggtttggttcaaggccggttcacagatcttcagcg

SEQ ID NO: 150581 - DNA, 399 bp, Arabidopsis thaliana columbia
  unsure (1)..(399): unsure at all n locations
gaaattctccgtcttcttcattcgtttttgactcttctctatacttgtcgtctcctatcatcgcaattcatcttcccccgtttggtgtgttaaaccggagaaatttggagtttcgccggaatcttcctctgtctattgtataatttcctctgtctttgatcaaaagttgatcgtacttggattcccgatctcttccttctagattaggtcctggaatcgncttcttaggtgctcctcgctttcactgcccccgatctcttccttctcaattaggtcaagaaagagaggacgtgagagaatcaattacgattctgagatgatgaactcgaggattacatggatcatcatcaagcgaacaggtatgaaaagatgggaacgatgaatgattttggtttctcg

SEQ ID NO: 150582 - DNA, 374 bp, Arabidopsis thaliana columbia
  unsure (1)..(374): unsure at all n locations
gaaaaaaaagctattgtttgaaagaagaagaagttaactatggcaaaggatgtggaagccggtcccggagaaggatttcagacaagagactatcaagatccgccaccagctccgtttattgatggagcggagctaaagaagtggtctttctacagagcagatatcgcagagttcgtagccactctcctcttcttatacatcaccgttttgacagtcatcggttacaagattcagtccgatactgatgccggtggcgtagattgcggcggagttggaatccttggtatcgcttgggcctttggtggtatgatctttattctcgtctactgcaccgnctggatctgtggtggtcacattaacccaacggtgacatt

SEQ ID NO: 150583 - DNA, 357 bp, Arabidopsis thaliana columbia
  unsure (1)..(357): unsure at all n locations
tgcaaatggtattactactgtctcagcgaaagacaaagcaacaggtaaagagcagaatatcacaatcagatcttcaggtggtctctcagacgatgagattaacagaatggtgaaagaagctgagcttaacgcacagaaggatcaagagaagaagcaacttatcgaccttaggaacagtgctgatacaacaatttacagngtagagaagagcttgagtgaatacagagagaagattccagctgagattgcctctgagatcgaaactgcagtgtctgatctcaggactgctatggctggtgaggatgncgaggacatcaaggctaaggactgagctgnaaacatggcagtgtcgaagat

SEQ ID NO: 150584 - DNA, 325 bp, Arabidopsis thaliana columbia
gaccaattggtcattgaagaaggctaaagtcgtcactcactatggcttcatccctctggtcatcttcgtcggcatgaactccgatcccaaacctcatctcttccagctccttagccctgtctgatccatccaatttcatcatcaacctaaatcaatcgaatcggtcttcctctggtttggcttcttcatatctttacgcgtgttcttagattcgccgaatcttcttttatgcttttttcattagctagtttttgaatactttctctatggtactgtattgaataactttagcttatgatataatgtgaaatcgaattttatgttt

SEQ ID NO: 150585 - DNA, 497 bp, Arabidopsis thaliana columbia
agcttatgcaggaatcggctgttttgtcagatttttttacccaggttttatccaaaccagagtataaaactgtgagagctcaactcgaaagtaaaagaaactttaaaaatgtaaacttgaatactaagaccgatactagacccgacccggaaacccaaacccgatgcaattctgtcaatctctcttcttactaccgactcttctccgtacgatctccgccatcagatcctctaatttccgacgccggctcaatcctaacacaccaccgttccaaattccgttggttcactctacgatcacttcagcctgtaggcttcacaccttctcaatgctccgaaatcactctctgcctccgcaacaatcctcacctctctctccgtttcttcctcttcactcgccgttactctctctgctctcacgacacacactcctgctcaactctcatccacatcctttctcgatctcgtctcaaaagccacgctagtgaaatcatacgt

SEQ ID NO: 150586 - DNA, 461 bp, Arabidopsis thaliana columbia
  unsure (1)..(461): unsure at all n locations
gatgaagctgattggttttacacgccaatttatcctacttgcgacctcactcctaccggcttgccattaccgcttaaatcgccgcgtatgatgagaagttcgatacaactaatctcatcaaattggccttattggaatcggactgaaggagctgatcacttctttgttgcgccccatgactttggagcttgcttccattatcaggaggaaaaagccattgaaagagggatacttccactactccagcgtgccactttggttcagacatttggccaaaggaaccatgtctgtttggacgaaggctcgatcactattcctccttttgcacctncacagaagatgcaggcccattttattccttcagatattccacgctctatctttgtctacttccgcgtgttattttatgatgttaacaacgaccccgaaggtggatattatgcatgaggtgcaagagcagc

SEQ ID NO: 150587 - DNA, 309 bp, Arabidopsis thaliana columbia
  unsure (1)..(309): unsure at all n locations
gggcgaccacgcgtcgagaaatggaggtgatcggatttacgcgcgaattttaggggaaatcgaagaaaaagggaagccggggacgatcaagagtttcgtagtctccacgaccttttaccagtcgtacgtactcgtgaccaccgtgctgaattagatgctnnaaagcaatcaacgtcacattcagctgtggatcgagaggttagtgaatggtcacatgcaccgactgtttctgancctaaagacttgctatatctgtagactgaccaagacaaatttttgtgaaaatctgaaagcggctgttgagaagaa

SEQ ID NO: 150588 - DNA, 384 bp, Arabidopsis thaliana columbia
  unsure (1)..(384): unsure at all n locations
gaacaaacaaaaaatgaagagaagtgactttgagactcaatgggaagcaaatagtgaaatggctagctttactgtctacgcttgcaccgaaatccgacgttcgtccggttctaattctcaagcctaccgatccacatctatgatccagctataggaatgccttcaatgggtaagaagaacggaggagtgagatgatcactggagacatatcgaggaaacgaatcatccatgggggctggagatcagctacagcaacagctgcttcgacatgggactggagcgaatccctgatggctatgatagatgagaggatgcgaacagtatgttcnggaacaccctttggtctaagcaacaaccatctagggttggattctgtaaggagtc

SEQ ID NO: 150589 - DNA, 476 bp, Arabidopsis thaliana columbia
  unsure (1)..(476): unsure at all n locations
cgctttgttgcagaggatcacaatctaatggcgattccaatgtccatggcaatggcgactcctacagattccgtgagcagagtctggagtatgtcttctctcaaatcagctcttccctccaccgcatcactccgattaccttcctcgtcttctcgccgtccggttactcttcgtctcccaatctcttctccttcactcccatctttctccggtctctctccggtcaatcctctcctctcaatcggacttccagattggcaaagctttgagaatggattcaaaattgttgacggtggtggtcgtatctacgcgatgagacacggacgacgtgttccgaagctgaacagaccaccggaccagcgcaaagctcttctgcgaggactcacgactcagcttcttaagcatgggagaatcaagacgactcgagctagagctagtgcgatgaggaagttcngtgacaagatgattacattggc

SEQ ID NO: 150590 - DNA, 352 bp, Arabidopsis thaliana columbia
ccggccggaatcccgggcgaccacgcgtccgaacaccaaatcttaaacgtttaactttgtgctgaactactcaacctcaatggccgcctaaacaatggctctttcctcccctgccttcgccggtaaggccgtcaagctttcccccgcggcatctgaagtccttggaaccggccgtgtgacaatgaggaagactgttgccaagcccaaagggcccatcaggcagcccatggtacggatctgaccgtgtcaagtccttgggtccattctctggcgaataccgagctaccttaccggagagttccccggagactacggatgggacaccgccggactttcagctgaccccgagaca

SEQ ID NO: 150591 - DNA, 81 bp, Arabidopsis thaliana columbia
aacaaaacgaatctcttattgcttcttctctctctatgtctcaccctcgaccaaagatgttgggacctttgttcaaaccca

SEQ ID NO: 150592 - DNA, 485 bp, Arabidopsis thaliana columbia
ccgaaatggaagatccaataggccgtgtattaaagaaaactcaggttgcagatgatcttattttagagaagacctcatcaccaataggtgttcttctgattgtttttgaatcccggcctgatgcacttgttcagatagcttcgcttgcaatccggagtggaaatggtcttctgctgaagggtggaaaggaggctcgtcgatcaaatgctatcttacacaaggtgatcactgatgcaattccggagactgttggaggtaaactcataggacttgtgacctcaagagaggagattcctgatttgctcaagcttgatgacgttattgatcttgtgatcccaagaggcagcaacaagcttgtttctcaaataaaaaactcgacgaaaatcccagtgctaggccatgctgatggaatctgtcatgtatatgttgataagtctggtaaactggacatggcaaagcgcattgtttccgatgcaaagttggac

SEQ ID NO: 150593 - DNA, 340 bp, Arabidopsis thaliana columbia
gtagactttgtaacaatggaaagttcagaccctgatccatccactggcagcagaatcgtttcgagacatcgttctcctgttataccagagtattttcggtgtccgatatcacttgaactgatgaaggatcctgttatcgtctccactggacagacatatgaaagatcatcaattcagaagtggcttgatgctggtcataaaacatgtccgaaatctcaggagacacttttacatgctggattaacccctaattatgtgttaaagagtctcattgctttgtggtgtgaaagcaacggcattgagctaccgcaaaatcaagggagctgtagaaccacaaaaa

SEQ ID NO: 150594 - DNA, 478 bp, Arabidopsis thaliana columbia
aacaaaacgaatctcttattgcttcttctctctctatgtctcaccctcgacctctcctccgcacaactccgccgtaacttctacgccggaagttgtcctaacgtcgaacaaatcgttagaaacgccgtacagaaaaaagtccaacaaactttcaccaccattcccgccactctacgcctctatttccatgattgtttcgtcaatgggtgtgatgcatcagtgatgatagcgtcaacaaataataataaggcggagaaggatcatgaggaaaatttatcgttggccggagatggattcgacaccgtcattaaagctaaagaagctctcgatgccgtcccaaattgtcgtaacaaagtttcatgcgctgatattctcacgatggccactcgtgacgtcgttaatcttgcgggtggaccacaatacgacgtggaattgggaaggctagatggactatcatcaacagcggctagcgtcggag

SEQ ID NO: 150595 - DNA, 441 bp, Arabidopsis thaliana columbia
gaataatccactcgaatcttaaaacgacgtcggtttaaccaaatgcgagtcaacggatgctgctgcaatgcgtcgtgttgtgttcgtcactcgccgtcgtcgtcatctccgtcgcttcgacctctcccctcgttggtgttcaccctttagatgaaaagtatttcgactcagatgttatcaaatgcaaagatggctccaaatctttcacatgagatcgtctcaacgacaacttctgcgattgtctcgacggcaccgatgagcctggaacttcggcatgtccaaatggcaaattttactgtaggaacattggaagttctccaaagttcgtttactcttctcgtgtgaatgatcgaatctgtgattgctgcgatggaagcgactagtacgaaagtagcattcattgttccaacacttgtataatgggtggtaacgttaactaca

SEQ ID NO: 150596 - DNA, 463 bp, Arabidopsis thaliana columbia
cggacgcgtgggcagctctattctctacctcatttctcatcataacaaagagagagaaaaaaactatggaattgacactgaattcctcgagttctcttatcaaacgtaaagatgccaagagttctagaaaccaagaaagttcctccaacaacatgacctttgcgaagatgaagccgccaacatatcaattccaagcaaagaactcggttaaggaaatgaagttcactcacgagaagaccttcacgccagaaggtgaaacccttgagaaatgggagaagctccacgttctctcatacccacactccaagaacgacgctagcgttccggtgttcgtcatgttaccgctcgacacagtaacaatgtcagggcatttgaacaaaccacgagccatgaacgctagtttgatggccctgaaaggagctggtgtggaaggtgtgatggtggatgcttggtggggattggt

SEQ ID NO: 150597 - DNA, 490 bp, Arabidopsis thaliana columbia
  unsure (1)..(490): unsure at all n locations
tttacatattcgtacgctacaaactttcgccaagtacaacgcacaagctgcatcggctttgcgagaagagcgtaagaaacctctttatcaaaatggagatgatgtatatgcggatttggattgggataatctcgggtttggnctaaatccagctgattacatgtatgtcatgaaatgctcaaaagacggcgaattcactcaaggagaacttagtccctatgggaatattcagctaagtccttctgctggagtcttaaactatggacaggcgatatacgaaggtacaaaagcatacaggaaagaaaatgggaagcttcttttgtttcgtccggatcacaacgctatccggatgaagcttggcgctgaacggatgctcatgccttctccttcggttgatcagtttgttaatgcagttaaacaaaccgctcttgcaaacaaacgttgggttcctcctgcagggaaagggactttgacattaggcctttgttga

SEQ ID NO: 150598 - DNA, 328 bp, Arabidopsis thaliana columbia
  unsure (1)..(328): unsure at all n locations
cggacgcgtggggttttgaagctctctctttcaaattctgttcgtctctcgcgatctgtgtgtctctctcagatagctccgaaactttcacgcagagttaagtgaagcaggatgggattgtcattcgccaagctttttagcaggctctttgccaagaaggagatgagaatcctgatggttggtcttgatgctgctggaaagaccaccattntgaacaagctcaagctcggagagattgtaaccaccattcccactattgggttcaatgtggagactgtgttgtacaagaacattagcttcacagagggggatgtcagctggtcaggat

SEQ ID NO: 150599 - DNA, 315 bp, Arabidopsis thaliana columbia
ggagtggtttatgtggctgagcctcttgacgcttgtcaaaatcttatgaataaaccagaacagagctccaatgaaacttctccttttgtgttgattgttagaggaggctgtagttttgaagagaaagttagaaaagctcagagagctggtttcaaagctgctattatctatgacaatgaagaccgtggaacattgatagcaatgtctggtaactctggaggtatatggattcatgcggtctttgctacgaaagaaacgggtgaagttttaaaggagtattcgggttacccctttactaaagtttggttgattcct

SEQ ID NO: 150600 - DNA, 106 bp, Arabidopsis thaliana columbia
  unsure (1)..(106): unsure at all n locations
gttttgatggataaggaaaggacaaaggcttttactgatgctccgaggactactcctgaagggatctccaatgatacttgtcctttcgtgttgattgttanaggat

SEQ ID NO: 150601 - DNA, 455 bp, Arabidopsis thaliana columbia
  unsure (1)..(455): unsure at all n locations
gaatatacttcctgacctcattcgtcattgttcttatcaaaaagcatcggtccgagatggataccttacgcttttcaagttcttgccaagatccttgggtgctcagttccagaagtacttgcagcttgttttaccggccattctggatggtcttgccgatgagaatgaatctgttcgtgatgcagccctgggggctggccatgtactggtggagcaccatgcaacaacgtctctgcctcttcttcttccagctgtggaggatggtattttcaatgataattggcgtatccgtcaaagttctgttgaactgcttggggatctattgntcaagggtgctggtacatcgggcaaagctctactggagggtggaagtgatgatgaaggtgcaagtactgaagcgctaggtctggccattattgattttttaggaatggacaagtgcaattgaatttttg

SEQ ID NO: 150602 - DNA, 441 bp, Arabidopsis thaliana columbia
atcgaagtcggacttggcccggccggtgaactacgttatccttcttacccccaaagccaaggttgggtgtttcccggcatcggagaattccagtgttatgacaagtacttgaagaaagatttcaaggaagcggcggcgaaagcagggcaccctgagtgggacttgccagaggacgccggagaatacaatgacaagccggaggagactggatttttcaagaaggatgggacttatgtctcggagaaggggaagtttttcatgacatggtactcgaacaaactaatttttcatggagatcagatcttaggagaagccaacaagatctttgctggacttaaagttaacttggctgccaaggtttctgggattcactggttgtacaaccaccacagtcacgcttcggagttgactgctgtatattacaaccttttcaagagagat

SEQ ID NO: 150603 - DNA, 428 bp, Arabidopsis thaliana columbia
  unsure (1)..(428): unsure at all n locations
cagaattgtgcgatttacgaaaatctctgaaacctccgatcgttaacggcgaccgccgattttcccggtaaaaatgaacgacggagatgtatcgaggcagatccagcagatggtgagatttatccgccaagaagcggaagagaaagcaaacgagatctcggtttctgctgaagaagaattcaacattgagaaactccagcttgttgaggcggagaagaagaagatcaggcaagattatgagaagaaggagaagcaagctgatgttcgcaagaagattgattactctatgcagctaaatgcatcaaggatcaaagttcttcaagcgcaagacgatattgncaatgccatgaaagaccaagcagctaaggatcttttgaacgttagtcgcgatgagtatgcctacaaacagcttctcaaggatctaattg

SEQ ID NO: 150604 - DNA, 368 bp, Arabidopsis thaliana columbia
ctaactccagagagcgaagaacacaatcccagagtagcagaatctgatccatcccacctttttcaattctcaggcaaagataagtcaaacttgaaaaaatggaagggactgtgttcacgccttgtttggaaggaatgaagcatgtcaaatctgatcaaggcgagatgcttactaagccatttttagagctttgcaagaccatcttgcctgttatagataaatttggagctgctatgactctcgtgaaatctgacattggtggcaacataacgaggttggagaagaactacttatctgatcccgacaaggtcaagtacttgtacacctttggtcaaggcgaaattgagtctaagatagcaaaaggatcg

SEQ ID NO: 150605 - DNA, 188 bp, Arabidopsis thaliana columbia
  unsure (1)..(188): unsure at all n locations
cgtgatcatcgcctgaaaaaaatttgagataatggccagaaagttcttcgtcggaggcaactggaaatgtaacggaactgctgaggaggtgaagaagattgtgaacactcttaatgaagctcaggttccttcacaggatgttgnagaggntgtggttagccctccatatgtttatcttcctctggtta

SEQ ID NO: 150606 - DNA, 332 bp, Arabidopsis thaliana columbia
cttttcctctccttactctccatcaatggcttctcttatctctttttctttgctcccaaaaccaaaagccgtaagaagttcaatttcagctcctcagacacagacaataaatactgaaaagcttgaagataaattcggacgaaaaggcataaaattctcggaatcaaacaacattcctatggtagagcttaaggtcagaaatggaagttcattaaaactgagtctatcagatgctcatgtactttcatataagccaaaggtatactggaaagacgagggattcgaggaagtcctttacacagttgatggtgatgagagcagaggtggggttg

SEQ ID NO: 150607 - DNA, 392 bp, Arabidopsis thaliana columbia
ttggttaataatttctttttccgtcctaaccaccattggcgccaccagaagcttcctaagcaggggatgaattcgattccatggcgaacctcgccgaccaggcagagcgttacgaaaaaatggttgaattcatggagaaagccgcgaaggctgttgccaaagacgaactaaccgtcgaagaacgtaatctcctttccgcggtttacaaaaacgtcatcggagctcgtcggccttcggggagaataatttaatcgatcgaacaaaaggaggagtctcggggtaacgatgcccacgtttcgttgatccgtgactacagaagcaaaatcgaaacggaactttctgttatctgtgacggaatccttaagcttctcgatacgattctcgttcccgct

SEQ ID NO: 150608 - DNA, 109 bp, Arabidopsis thaliana columbia
gaccacgcgacgctctccttttccaagaaatcatctttttttttttcatctattcaggatcgatccggggggagatttattacatattcgccctttcatttgctccaaa

SEQ ID NO: 150609 - DNA, 283 bp, Arabidopsis thaliana columbia
  unsure (1)..(283): unsure at all n locations
ctttatcttccaaaacacaaaacaaaatattttttcttccactgctctctcaagcgccatcggcggaacttcattcatccgtcgttccccagctccaattattntncgttctcttccattagccaacacacatttcctcttnggnntnaaattaggcaccgctcttngttttcgttttacagccatgctttcattcaaggtctaattttatctctccagaaggngagcttccggctgagtgtgactactacgtttacgtttttgttgctgctgaggaagctgt

SEQ ID NO: 150610 - DNA, 493 bp, Arabidopsis thaliana columbia
gacgcattacattttcttccgatcaatacagagagatcagtttctgagagagaagaagatgtctatagaggaagaaaacgttccaacgactgttgactcaggagctgccgatacaacggtgaaatctccggagaagaaaccggcggcgaaaggtggtaaatctaagaagacgacgacggctaaagcaacgaagaagcctgtgaaagctgctgctccaacgaagaagaaaacaacttcctttcaccctacctatgaagagatgattaaagatgcgattgtaacgttgaaggagagaactggatctagtcaatacgcgattcagaaattcatagaggagaaacataaatcactgcctcctacttttaggaagcttttgcttgtgaatctcaagagacttgttgcttctgagaaattggttaaagtcaaagcttcttttaagattccttctgctagatccgcagcaacacctaaaccggctgcttcgggtaagaag

SEQ ID NO: 150611 - DNA, 497 bp, Arabidopsis thaliana columbia
  unsure (1)..(497): unsure at all n locations
aaatactctccggagttaactacgcttccgcagctgctggaatccgagaagaaaccggtcgacaattgggacaaaggataagctttagtggacaagttaggaactaccagaccacagtatcgcaagttgtgcagcttctaggagacgagactcgtgcagctgattacctcaagagatgtatttactctgttggtttaggaagcaacgactatctcaacaactacttcatgcctacgttttactcttctagcagacaattcacacccgaacaatacgctaacgatctcatcagtcgctacagcacccagctcaatgcattatacaactatggggctcgaaagtttgcattgagtggaattggagcagttggttgtagtcctaacgcgctcgcaggcagtcccgacggtaggacttgcgtagaccgcatcaactcagcaaaccagatcttaacaacaagctaagatcntcttgtgatcagctcaacaacaatcaccctg

SEQ ID NO: 150612 - DNA, 320 bp, Arabidopsis thaliana columbia
  unsure (1)..(320): unsure at all n locations
gaatccgagaagaaaccggtcggggggtgtgacaaaggataagctttagtggacaagaaaggaactaccagaccacagaatcgtatgttgtgcagtttataggngactagactggagcagcttgattgcctaaagagatgtatttactctgttggtttaggaagcaacgactactatcaacagcgacnntatgccgttcgtttactcatctagcagacaattcacacccgaacaatactctaacgatctctattgccgttacagcacccagatcaatgcattatacanctatatancccnaaagtttgtattgagtggaa

SEQ ID NO: 150613 - DNA, 393 bp, Arabidopsis thaliana columbia
ggcgaccacgcgtccgcttgaagattcgaatcgagaagtccgtggaagaggaagaagaagaagatgtctgtgcaagaggatttagacaagcatatgctttctcggaaaatcgaagacgccgtttatgccgccgtaagggctaaaacctcagatcccgtgctcttcatcggtaatcatctgaagaaagctgtatcatttgttataacgaaggtttaagctcgtcatatctttgacagcagaggcatttcaacagttgaagttgatctgctctcttacaaaggccgttttcgtgcttaagatttagtggtttttctttcggaacattttattccatcatattacttttttgtttcataattatttttttttgatactttttatatttttttcttt

SEQ ID NO: 150614 - DNA, 406 bp, Arabidopsis thaliana columbia
gaggaatataactttttttttctttttcctttttgcttttttacaaccaaaaaaataaagcaagccgtagagagcaagagacggtgtaaagatgcactacacacgcatctcgccggctttagtaccatctctatcaccaaccgccgcggctgaatctagcggtggtgggacgatgatagctactgttttcatggcccttctcctcccctgcgtcggcatgtgcatcgtcttcctaatctatctattcctcttgtggtgctccacacggcgtcgtatcgaacgccttcgatttgctgaaccggttaaaccggtcacaggtaaaggcctttcggtgttggagctcgagaaatccctaaactcacctgaagagagctagccgtaatagcttgatcaacggaatgtgctg

SEQ ID NO: 150615 - DNA, 461 bp, Arabidopsis thaliana columbia
attttcttccgatcaatacagagagatcagtttctgagagagaagaagatgtctatagaggaagaaaacgttccaacgactgttgactcaggagctgccgatacaacggtgaaatctccgtagaagaaaccggcggcgaaaggtggtaaatctaagaagacgacgacggctaaagcaacgaagaagcctgtgaaagctgctgctccaacgaagaagaaaacaacttcctctcaccctacctatgaagagatgattaaagatgcgattgtaacgttgaaggagagaactggatctagtcaatacgcgattcagaaattcatagaggagaaacataaatcactgccttctacttttaggaagcttttgcttgtgaatctcaagagacttggtgcttctgagaaaatggtaaagtcaaagctttctttagattccttctgctagatccgcaggaacacctaaac

SEQ ID NO: 150616 - DNA, 452 bp, Arabidopsis thaliana columbia
gaaaaaaaaaaggagacgtcgtcgtcttctagcttctgattaagtctgataaattatgcccctaaatctgtaattctccaaggattcggattcgatcgatgaaagcttctcaaattttggcggctgcagcggcgagggttggaccggcgttaaggaagcaagtattaaccttaacggacgaagctgcttctagggttcatcatctcttgcaacagcgtcaaaaaccttttctccgattaggcgttaaggctcgtggctgcaacggcttgtcgtacactctcaattacgccgatgagaaaggtaaatttgacgagttggtagaagagaaaggtgtgaggatccttgttgaaccaaaggccttaatgcatgtgattggaacaaagatggattttgtagatgataaactcagatcagagtttgtgtttatcaatcctaactcacaaggacaatgc

SEQ ID NO: 150617 - DNA, 374 bp, Arabidopsis thaliana columbia
caagaatcagattcaagatagaagtttttcaatcaatgtctagtcctcttggtcacttgcagattcttgtttttcttcatgctttgcttatcttctcagctgagtcccgcaaaacccaattgctgaacgataatgatgttgaatctagcgacaagagtgcaaaaggcacacgatgggctgttttagttgctggatcaaatgaatattataactacaggcatcatgctgtcatatgccacgcgtatcagatactccgaaaaggcggtttaaaagatgaaaacatcattgtgtttatgtatgatgatatcgcgttttccttggagaaacctaggccttgagttatcattaataaaccagttttagtagatgtttat

SEQ ID NO: 150618 - DNA, 481 bp, Arabidopsis thaliana columbia
tagatgtgatttcactctcgctaggtggatcatcacgcccgttttacgtggatcctatcgcgatagccgggttcggagcgatgcagaagaacattttcgtgtcttgctctgcgggtaattcaggaccaactgcatccacagtgagtaatggagctccgtggttgatgactgtcgctgccagttatacggataggacgtttccggcgattgtccggatcgggaaccgtaaaagcttggtcggatcatccttgtataaaggaaaaagcttaaagaatctgcctttggcgtttaacagaacagctggagaagaaagcggagccgtgttctgtatccgggactcgctcaagagagaactcgtcgagggtaaaatcgtcatttgcttaagaggagccagcggcagaacggccaaaggagaagaggtgaaacggagcggaggagcagcgatgcttcttgtgagcacagaggcggaaggagaggagct

SEQ ID NO: 150619 - DNA, 366 bp, Arabidopsis thaliana columbia
atcagtcttctcttttcacggctacaaggctaattgagagtgtcccttgcgttagagtttgttactagcttttttcgtctgaaacatggcgaattttgccaaaccagagaacgcgttgaagcgtgctgatgaattgatcaatgttggacagaaacaagatgctcttcaggcgcttcatgatctcattacttccaagagatacagagcttggcagaaaccgcttgagaagatcatgtttaagtatcttgatctttgtgttgacttgaagaggggtcgattcgctaaggatggattgattcagtatcgtattgtttgccagcaagtgaatgtcagttccttggaggaaggtatcaagcactttctaca

SEQ ID NO: 150620 - DNA, 464 bp, Arabidopsis thaliana columbia
ccgggcgacccacgcgtcgtaagctgtccttttgatgatctacaatcttatagagccaatgggcatatcttcagtgtgggcaacccaaacaatgaagtgaccgtgagacaacttgctgaaatgatgactgaggtctacgccaaagggagtggagagacaggtatcgagaagtcaacgatcgacgtgagctccaaagagttttatggataacgttatgatcacagcgacaagagaatcccagacatgaccattatcaacacgtaacttggatggaacccgaagacgtcgctgtgggacttgcttgaatcgaccttaacataccagcacacgacttatgcgggagccattaagaagggcactttaaaaccagtcgcatcttagaggtcgtgtttctttacaaacacctcaaatcatggtggtggcttcgattccattctttctttttaaaaaaaaaattttcccaa

SEQ ID NO: 150621 - DNA, 392 bp, Arabidopsis thaliana columbia
ctttatctcccaaaacacaaaacaaaaaaaaatggcttccactgctctctcaagcgccatcggcggaacttcattcatccgtcgttccccagctccaatcagtctccgttcccttccatcagccaacacacaatccctcttcggtctcaaatcaggcaccgctcgtggtggacgtgtcacagccatggctacatacaaggtcaagttcatcacaccagaaggtgagctagaggttgagtgtgacgacgacgtctacgttcttgatgctgctgaggaagctggaatcgatttgccttactcttgccgtgctggttcttgttcgagctgtgctggtaaagttgtgtctggatctgttgatcagtctgaccagaagttcctggatgatgaacaga

SEQ ID NO: 150622 - DNA, 385 bp, Arabidopsis thaliana columbia
ggttattggtccaaaaaggtaaaccgattggggaccaatggtggaggtcaaatccaccgtttaaaccgcctgaaacgccattagattctatggagtttttgtcacgtacttggagggcttccgctactgaagtttcaagagctgtcgtcgcgtttccaccgacttttcaaccgccgcaaatgcgtttttcggagatccaaaacgggtcttctgacgtcactttggtgccggaagatgaagaaaacgcattcgtcttggaaatcttttcttttgcttttagaaactcttaatggcatggacgatatggtcatcaccgggattatcgccgacatcagggacttctatgctatcacgcagcctcgatcttctcgcatcgcacttagca

SEQ ID NO: 150623 - DNA, 411 bp, Arabidopsis thaliana columbia
  unsure (1)..(411): unsure at all n locations
cattttctgtcctaactctccatcactggcttatcttatctattgtcctttgctcccaaaaccaggagccgtaagaagttcaatttcagctcctcagacacagacaataaagactgaaaagcttgaagataaattcggacgaaaaggcataaaatactcggaatcaaacaacattcctatggtagagcttaaggtcagaaatggaagttcattaaaactgagtctatcagatgctcatgtactttcatataagccaaaggtatactggaaagacgagggattcgaggaagtcctttacacagttgatggtgatgagagcagaggtggggttggtgtngnaatcgaaaacggggaagaacctaaaggtgggtcttcagtaatttcacgatgttattggagtgtcaaggatac

SEQ ID NO: 150624 - DNA, 377 bp, Arabidopsis thaliana columbia
tgaagttaataacaatgaagatattctctgttctgttactactatgtttcttcgttacttgttctgtctcttctgaacccagaaaccctgaagtggaggcgttgataaacataaagaacgagttacatgatccacatggtgttttcaaaaactgggatgagttttctggtgatccttgtagctggactatgatctcttgttcttcagacaacctcgtaattggcttaggagctccaagtcagtctctttcaggaactttatctgggtctattggaaatctcactaatcttcgacaggtgtcattacagaacaataacatctccggtaaaatcccaccggaggattgttctttttccaaattacagactctggattta

SEQ ID NO: 150625 - DNA, 419 bp, Arabidopsis thaliana columbia
cgcgatgtacgtaccttgcttcccctgacactgaagcagttgagcagcgcatcaaccactggcgaatcaaatttctctattgatggcgttgatattaaaactgttgtaatcgttggacggatttctagaatggagaacagaatcactcaggtcgattttgttgttgatgacggtacaggctgggttgattgtgtcagatggtgtcacgctcggcaagaaactgaagaaatggaagcagtcaagctgggaatgtatgttcgcttacatggacacctgaaaatttttcaagggaaacgatctgtgaatgttttttcagtcaggcctgtcactgacttcaatgagattgtacaccactttaccgagtgtatgtatgtccacatgtacaacaccaagttacggggtggttctattactcaaga

SEQ ID NO: 150626 - DNA, 481 bp, Arabidopsis thaliana columbia
  unsure (1)..(481): unsure at all n locations
atttttataagatatcttcacatacacaaaaacatttattgtacagtgcacaagtgatcgaagatttgattctttttcataatcagagatctgatctaaatggagtatgaccgtacgttgaacttgattccatacggactacaaggagtaagagaggaggaagaaatcgaagaagacgatgaagagagcatgacgttgtcgtcagtaccagaaaacgaaacgtcggagtgttcttcgcctccggcgacgtatcctccaatccctcctcggcctaaaacaccgagagagccgatggagtttctatgcagatcatggagtccttctacttctgagatctctttagctttatcatctcagaaatctgataaacaactcaacaaaaaccctaatanttttcagttggccgatgtcacttttctggctccggtagcaccaccaccgncgctacaaacgggaaagctagcgagtgcggttcacgcgc

SEQ ID NO: 150627 - DNA, 420 bp, Arabidopsis thaliana columbia
gtcaaaattgagacttctctctgtagagtaaagtagtgaggaacatagaatgatcgccgacgacgatgagaagtggcttgccgccgcaatcgccgccgttaagcaaaatgctttctatatgcagcgcgctatcgactccaacaatctcaaagacgctctaaagttttctgctcaaatgctcagcgagcttcgtacttccaagctttctcctcataaatactatgaactctatatgcgagtttttaatgaattggggactttggagatattcttcaaggaagagacgggacgtggttgctccatcgcagagctctacgagttagttcagcatgccggtaacattttgccaagattgtatcttttatgtaccataggatctgtatatatcaaatccaaggatgttactgctacggatatact

SEQ ID NO: 150628 - DNA, 310 bp, Arabidopsis thaliana columbia
cacatagtcacataccaaagcaaaaccatggttcgttgcacgtcgtcgtttttgcttctaacatgggtctttaccttgtccattctccaaatctcctttgctcaacttgttccagcaatcatgacattcggtgactctgtagttgatgtcggcaacaacaactatcttccgacccttttcagagctgattatcctccttatggccgtgatttcgctaaccacaaagccaccggtcgtttctgcaacggcaaattagccacttgatataacttgctgagactttaggcttcactaagtacccaccagctta

SEQ ID NO: 150629 - DNA, 258 bp, Arabidopsis thaliana columbia
acacgattggataaactttaaatcctaacagcagatcacgtgctaataacatggttccggggcttactcaaaccgttgatgctatgtccaccgggacgataacaaaaccgtcactgccatcagtccaagacagcgatcgagcttacgtgacgtttcttgctggaaacggtgattacgtgaaaggagtcgttggtttagccaaagggttaaggaaagtcaaatcggcttatccactcgtagtagcgatgttacccgacg

SEQ ID NO: 150630 - DNA, 332 bp, Arabidopsis thaliana columbia
  unsure (1)..(332): unsure at all n locations
tctttctctatcactcgctctgtttctctgctttacggataattcctttttggctatttatttatgcatgagaagttccatcgagggagttctgaggatgcagctgaagctctcaagaagcttgaaacatccataaatggtgcgaggataagcttcgacacgacatggacacgagaatttaggagcttatttataggtcccttattcaagtgtttggnggctttatgtttgataatctccctcttagttttcatagagggtatatacatgaaccttggagtactctacgtcaaggtgtttgagccgaaaccccgaaaagtttatagattgga

SEQ ID NO: 150631 - DNA, 340 bp, Arabidopsis thaliana columbia
cgcacgcgtacgatctgaaggcaagcctgttgctgcctgtctgatatacaagtgtctgatacactggagatcttttgaagtagaaagaaccagtatatttaatcggataatcgagacaatagcatctgccattgagatgcaggaaaacagcgatgtactatgctattggttatccaattccgccacattattaatgtttcttcaacgcactctgaaagccggtgctacaggaagcataactactcccagacgtcggggaatgccttcatctttgtttggacgggtatctcagagtttacgaggttctccacacagtgctggattcccatttatgactgga

SEQ ID NO: 150632 - DNA, 415 bp, Arabidopsis thaliana columbia
  unsure (1)..(415): unsure at all n locations
gaacaatggcttcctctatgctctcttccgctactatggttgcctctccggctcaggccacgtatggtcgctcctttcaacggacttaagtcctccgctgccttcccagccacccgcaaggctaacaacgacattacttncatcacaagcaacggcggaagagttaactgcatgcaggtgtggcctccgattggaaagaagaagtttgagactctctcttaccttcctgaccttaccgattccgaattggctaaggaagttgactaccttatccgcaacaagtggattccttgtgttgaattcgagttggagcacggatttgtgtaccgtgagcacggtaactcacccggatactatgatggacggtactggacaatgtgggagccttccttggtcggttgcaccgactccgctc

SEQ ID NO: 150633 - DNA, 311 bp, Arabidopsis thaliana columbia
  unsure (1)..(311): unsure at all n locations
agatttcgtgtgtgaagaatcatttcaagccatgtctccggctaaagttgatactaccaagaaggctgatcctaaggccaaggccttgaaggcggcaaaggctgtgaagtnnnagcaagccttcaagaagaaggacaatatgattaggtccaatgttacctttcacaaggcaaaaacttttaccaagccttgaactggtaagtacccaaaaatnagggnttcttcntggttcaaggtggatcactaccaaattcttaagtacccactcacctctgnntntgcnannaaaaaaattgaagacaacaacactt

SEQ ID NO: 150634 - DNA, 489 bp, Arabidopsis thaliana columbia
aacctcgtttactctctacgccaatttcagcgcttagacatccctttttgcaatcatggctgatgaaatcaatgagataagggaagagcaagaacagctcgcaccctttgatccttccaagaagaaaaagaagaagaaggttgtgattcaggaacctgtcgaggacttagcagagtcttcacagactgagaaatctgattcattgcctgttaatgatggtcttgagagttcatttactggaatgaagaaaaagaagaagaagccaactgaatcaagcttattgaacaacgaaagtgttgatgctggggaagatttggatgagattgctaatgacgagcaagagggggaagaaggaatagttctacagcaacgttacccctgggagggaagtgagagggattacatatatgacgagcttcttggtagagtctttaacattctccgtgaaaataatccggagcttgctggagataggcgtcgtacagttat

SEQ ID NO: 150635 - DNA, 443 bp, Arabidopsis thaliana columbia
aatcccaggccttgatattgttgttgacccgtgtgctgctgtgctagtgttcattgtaacaggactttgttgccttggagtaaaggagagcacatttgctcagggaattgtaacaacagcaaatgtctttgtcatgatatttgtcatagtagctggaagctatttgtgtttcaagacaggttgggttggttatgaacttccaacggggtattttccttacggggttgatggaatgcttactggatctgctactgtcttctttgcctacatcgggtttgatacagttgcaagtatggcagaggaggtgaaaaatccccggcgggatttaccgctcggtattgggatttcgctcctgctttgttgtttgctgtacatgatggcgtctgttgttattgttggttcagagccgtattttgctttggaccctgacactccaatatcat

SEQ ID NO: 150636 - DNA, 380 bp, Arabidopsis thaliana columbia
tgtttggtttaatccacagtttatttacattatgtattaattaagggttttcaaaatttgaaatattgaaattcaggtacggaattgaacaagagtataccttgttgcaaaaggatattaagtggccggtaggttggccggtcggcggtttcccaggtcctcagggaccgtactactgtggagttggagcagacaaagcctttggaagagacatcgttgattctcattacaaagcttgtctttacgccggaatcaatgtcagtgggactaacggcgaagttatgcctggccagtgtgagttccaagtcggtcccaccgttggaatcgctgccgtctatcaggtttggattgctcgtttcattcttgagaggatcacaaaa

SEQ ID NO: 150637 - DNA, 426 bp, Arabidopsis thaliana columbia
cccttcttgcaaaggctgttgctggggaagctgaagtccccttcataagttgctctgcaagtgagtttgtagagctgtatgtcggtatgggtgcctcacgtgtaagggatctttttgcacgggccaagaaggaagctccatcgattatatttattgatgagatagatgctgtggcaaaaagccgtgatggtaaattccgaatggggagcaacgatgaaagggagcaaactttaaatcagttgctcactgagatggatggttttgacagcaattctgcggttatcgttcttggagctacaaatcgtgccgatgtcttagatccggccctgcgtcgtcctgggagaatttgatcgtgttgttacggtggaaacgccagacaaaattgaagaagaaccattttgagagtacatgtgtaaaaaaagagct

SEQ ID NO: 150638 - DNA, 467 bp, Arabidopsis thaliana columbia
gagagcgaaggagatgcgagcgaaggatatgtgagcgaaggagatgagagcgaaggagaggggagcgaaggagctgtgagcgaaagagctgagttcccggagccatcggaagaagccaagcttttcgtcggaaatttggcttatgatgttaatagccaagctttggctatgctctttgagcaagccggtactgttgaaatcgccgaggttatatacaatagggaaactgaccagagtcgtgggtttggatttgtgacaatgagttctgtggacgaagctgatacagctgtggagtagttcaaccgttatgatcttaacggacgtctactaactgttaacaaggcagcttcaagaggatcacgttcagaacgtgcgcctcggttatatgaacctgcatccagagtttatgtagggaatttaccatgggatgtgtgacaatggccgtctagaacagctttcagtgtgca

SEQ ID NO: 150639 - DNA, 482 bp, Arabidopsis thaliana columbia
aaaatctaaaaactttctctcaattctctctaccgtgatcaagatgcagatctttgttaagactctcaccggaaagacaatcaccctcgaggtggaaagctccgacaccatcgacaacgttaaggccaagatccaggataaggagggcattcctccggatcagcagaggcttattttcgccggcaagcagctagaggatggccgtacgttggctgattacaatatccagaaggaatccaccctccacttggtcctcaggctccgtggtggtatgcagattttcgttaaaaccctaacgggaaagacgattactcttgaggtggagagttctgacaccatcgacaacgtcaaggccaagatccaagacaaagagggtattcctccggaccagcagaggctgatcttcgccggaaagcagttggaggatggcagaactcttgctgactacaatatccagaaggagtccacccttcatcttgttc

SEQ ID NO: 150640 - DNA, 508 bp, Arabidopsis thaliana columbia
atcgctcgctgctcttcctcccacagatcgaaaaccatgaatcctgagtacgactatcttttcaagctcctgcttatcggggattctggcgtaggcaagtcttgtcttcttttgagattctctgatgattcttatgtagaaagttacattagcactattggagtcgattttaaaattaggactgtggaacaagatggcaaaacaattaagctccaaatttgggacactgctggtcaagaacggttcaggactattactagcagttactaccgtggggcacatggaattattattgtctacgatgtcacagatgaagaaagcttcaataatgtcaagcaatggttgagtgaaattgatcgttatgctagtgacaatgtcaacaaactccttgttggaaacaagtctgatcttactgaaaacagagccattccttatgaaactgccaaggcttttgccgatgaaatcgggattccttttatggagactagtgcaaaagatgcttcaaacg

SEQ ID NO: 150641 - DNA, 300 bp, Arabidopsis thaliana columbia
cgcggatctctcccatctaaaaataacccgacccatttacgcgacccaaaccggatcaacccgcagtggataagccaagcttcgtaatccaatccaaagaagcagaatccgccgcgaaacaactcggcgtttccgtcattcagctcctcccgtcgctagtcaaaccagcacaatcctacgctcgaactccgatttcgaaattcaacgtcgcagtcgtcggactcggatcatcaggtcggttctttctaggcgtcaatgtcgaattcccaaatcttcctttccaccactaaatccacgccg

SEQ ID NO: 150642 - DNA, 498 bp, Arabidopsis thaliana columbia
ccgcctaaaccttctgccgtcaaaccacctaaaccaccggcagttaaaccacctactgcggatcctcccaccgtgaaaccccatcctaaaccaccaaccgtcaaaccccatcctaaaccaccaaccggcaaaccccaccctaagccacccaccgtcaaaccaccccaccctaaaccacccaccaaaccttacccccacccaaaacctcccatcgtaaagccaccaaccaagcctcctccgttcacccctaaacctcccaccaaaccttccccgtccacacctaaacctcccacgaccaagccttctccgtctactccgaaaccaccccaccacaagccttcgtctacaccatgcccaccaccaacaccaacgccgactccaccagttgtaacaccgccaacaccaaccccacccgtcataacttcaccaacaccaaccccatcccgtcgtaacaccgtcaacgccaactgcacccgtcatttcaccaccaacaccaac

SEQ ID NO: 150643 - DNA, 438 bp, Arabidopsis thaliana columbia
gtaaccctttagcgttttcggcttaagctttcgcttactacacaacaatggcgtcctcatccctttcccctgctactcagcttggttctagcagaagtgctttgatggcgatgtcaagtgggttgtttgtgaagccaacgaagatgaatcatcaaatggttagaaaagagaagattggattgagaatttcttgtcaagcgtcgagtattccagcagacagagttccagatatggaaaagaggaagactttgaatcttcttcttcttggggctctttctctacctactggctacatgcttgtcccttacgctaccttctttgttcctcctggaaccggaggtggaggtggtggtactccagccaaggatgcccttggaaacgatgtagttgcagcggtatggcttaagactcatggacccgttgacccgtccttttccc

SEQ ID NO: 150644 - DNA, 458 bp, Arabidopsis thaliana columbia
  unsure (1)..(458): unsure at all n locations
agtgagagtaataccttctcaagccataccctaatactgtatagtgagcctattatggcaaaccacctaacaatctatcaacaggtctaaaaaacgacataactgaaccaatctcactttggaaaagacatgaacaaaacccgacttcgtgctgtgtacccaccttccggtatgcaacaccgtaagagatgtcgattgagaggtcgaaactacgtccggcctgaaggtaaacaacgcagcttctcaaaagatgaagacgatctcatgctcaagcttcatgcacttcttggcaatagatggtcattgtttgcgggaagattgccaggacgaaccgacaacgaaatttggatccattgggaaacgtacctaaaaaggaagctctgtaaaatgggaatcgacccaaccaatcattgttttcaccattacaccaactacatttntagacggtaccttcattc

SEQ ID NO: 150645 - DNA, 553 bp, Arabidopsis thaliana columbia
tttcgtagccgcaagactcctttcagattcttacttgcagctatgggtaaagagaagtttgacattaacattgtggtcattggtcatgttgattctggaaaatcgaccacaactggtcacttgatctataagcttggtggtattgacaagcgtgtcatcgagaggttcgagaaggaggctgctgagatgaacaagaggtccttcaagtacgcatgggtgttggacaaacttaaggccgagcgtgagcgtggtattaccatcgatattgctctatggaagttcgagaccaccaagtactactgcacagtcattgatgccccaggacatcgtgatttcatcaagaacatgattactggtacctcccaggctgattgtgctgttcttatcattgactccaccactggaggttttgaggctggtatctctaaggatggtcagacccgtgagcacgctcttcttgctttcacccttggtgtcaagcagatgatttgcttgttgtacaagatggatgccaccacccccaaatactccaaggctaggtacgatgaaatca

SEQ ID NO: 150646 - DNA, 477 bp, Arabidopsis thaliana columbia
aaaggtttggttttttgaagacagagaggagatttgagattttgggtttcaatggcggtttcaagtgctttcgttggttgtccaaagcttgagactttattgaatcaccataatctatctccttcttcttcttcttcgtcctctgtttcacagacaccattgggtcttaatggggttcgtgttcttccgaagaacaatagaaccagacgaggtttgatccaaaaagctcgttgtgagctctctgcttcttctgattctgcgtctaatgcagctagcatctctgctcttgaacaactcaagaactctgcagctgatcgatatacaaaggaaagaagcagtattgttgtgattggacttagtattcacacagctcctgttgagatgcgtgagaagcttgctatacctgaagctgaatggccaagagctattgctgaatttggtggtttgaatcatattgaagaagctggtgtgcttagt

SEQ ID NO: 150647 - DNA, 446 bp, Arabidopsis thaliana columbia
actggatgcttgctttattctgtggattttctatcattggcaagaacacttgagaaacttcagattaagagaaacatggccaagcttgagctttataggaacttcaccaatgcactcgctatctctgttctgctctctatcgcttggattggttttgagctatacttcaacggaactgaccctctaatcgaactctggcgaatggcgtggatcattccagctttttggaatttactctcttatggtctgttagcagtcatatgcatcctttgggctccatcaaataatcctacaaggtactcatacttagcggaaacaggggatgagtttgaagaggaaggtatctcattgacaggtagtggaaataagagtacagaagatgttgaaaggaatgaacttctatttgggcttccagacgacgttgaagagggcaaacgtgagtaagc

SEQ ID NO: 150648 - DNA, 512 bp, Arabidopsis thaliana columbia
ttcaactgtgaatttcaccgacgaaacaaaaaattgagagagagagagagaaacgatgagttctcagatttcggagattgaacaagagcagctgatcgagaagcttgagatcttcaagatccatggcagagacaaacgtggccgtaagatccttcgtattatcggaaaattcttcccagctcgatttctgtcactggatgtgttgaagaagtatctagaggagaagatatttcctcgattaggtagaaaaccattcgccgtactctacgtccacaccggcgtacagagaagcgagaacttcccaggtatctcagctctacgagcgatctacgacgcaattgcggtaaacgtcagagacaatcttcaggaggtttactccctccatccaggtcttcaatcacgtcttttcctcgccacctgcggccgatttctattttccggcgggttgtacgggaagctgaggttcataagcagagttggtctatctgtgggaacatgtgaggaggaatgag

SEQ ID NO: 150649 - DNA, 497 bp, Arabidopsis thaliana columbia
cggtttgggagagagaagagaagaagaagacaccctttaagcaaaacagaggattttcattctctggtctgtttgaattattactaatctatcatcttgttgttctcttcgtcgacaatgtcgggaaacaaagaagaagaggatcctcgtatccatggaatcaaaactaagatccgtgtcgttccagattttcccaagaaaggaataatgtttcaagacataacaacagtgttgttggatccgaaagccttcaaagacacaattgatctgtttgtggagaggtacagagacaagaacatctcagtggttgcaggtaaatattatctctcattgcaattcataatgttaattaattttctatacatagtgttatttcgatgggattactattcaaaagattcgacttatttcaaggaactcgattttttaattggtttgatgattttccggggaaataagggggtaggtcatgtttttagtgacgtttagtttttttt

SEQ ID NO: 150650 - DNA, 411 bp, Arabidopsis thaliana columbia
ccggagaaacttccgaccaacgtgtcggagctgattagaaatagtgtcatgtcacacatgcagggaatcttctcgatcgaagggccttcactggttcctctgcaactatcatctcgtatgtaagtcgctccactgttatcacatgttgcagagttgcggaaatgaattgtgttgttatccatttcatgtagggagactcatctattgtatgttgttccagatgaagtgataagtatatctcttttaaaacactactctcaaattctgtcaccatctgagaatgataaagttctttagattctagacatacattgtggtcggatcctagtaccttgatcattaagatgaacatgtttgggtagcctgaggtatgattgtctcgatatctattatcttcgattgcctcacctt

SEQ ID NO: 150651 - DNA, 459 bp, Arabidopsis thaliana columbia
gtgatgatgttgcaacagcatcagccttctttctctctccttacttcttctctgtctgacttcaatggcgctaagctccatttacaagtccagtacaagaggaaggttcatcagccaaaaggagcactctatgtttcagcgtcgagcgaaaagaagattctgataatgggtggtactcgattcattggtctgttcttgtccaggatccttgtcaaagagggacatcaggttacattgttcacaaggggtaaatctcctattgccaaacaattgcccggtgaatctgaccaagactttgctgatttctcttctaagattcttcacttgaaaggagacagaaaggactatgactttgtgaaggcaagtctttcagcagaaggcttcgatgttgtttatgatatcaacgggagggagggcctagaagttgagcccatactagaagcactacccaaactagag

SEQ ID NO: 150652 - DNA, 448 bp, Arabidopsis thaliana columbia
atcattaccaacaaaaaatggcggctttatcatcctcctctctgtttttctcttccaagacaacttctccgatcagcaatctcctgatcccgccatctctccaccgcttctctctaccctcttcatcttcctccttttcctctctctcttcttcttcttcttcttcttcttctctcttgacattctctctgaggacttctcgaaggttatctcctcaaaaatttaccgttaaggccagctccgtcggtgagaagaagaatgtacttatagtcaacaccaacagtggcggtcacgccgtgatcgggttttacttcgccaaagagcttctctccgccggccacgccgtcaccatcttgaccgtcggcgatgaatcttccgaaaagatgaagaaacctcctttcaaccgattctccgaaattgttagcggcggaggaaagacggtgtgggg

SEQ ID NO: 150653 - DNA, 478 bp, Arabidopsis thaliana columbia
gaacaaccaaacactcatttctccacatcttgagagaaaaaaacagagcaagtatattagagatctcatggcgatggcggtctccggagctgtcctcagtgggcttggttcttcgttcctcaccggaggcaagagaggtgccaccgcattggcaagcggcgtaggcactggagctcagagagttggcaggaaaactcttattgtcgctgctgcggctgctcagcctaagaaatcttggatccctgccgttaaaggtggtggcaacttccttgaccctgaatggctcgatggctcgctaccaggagatttcgggttcgacccattgggtttggggaaagacccggcttttctgaaatggtacagagaggctgagctgatccatggccgatgggcgatggcagcggttcttgggatcttcgtcggccaggcctggaacggtgtggcatggtttgaagctggagcccagccagacgcgatc

SEQ ID NO: 150654 - DNA, 564 bp, Arabidopsis thaliana columbia
ttaccatcatcttcatcatcatcatcatcatcatcctttctttatccaactttcttcaccaaatcgattcttcttcaaccatgtcttccttcacctccaaattcgccgatgagctgattgctaacgctgcttacatcggaacacctggaaaaggtatccttgcggcagatgaatcaactggtactattgggaaacgtctcgctagcatcaacgttgagaacgttgaatccaacagacgtgctcttcgtgagcttctcttcactactcctggagctcttccttgcctcagtggtgttatcctctttgaagaaactctttaccagaagagctctgatggtacgccttttgttgatatgttgaagagtgcaggagttttgcctggtattaaggttgataagggtaccgttgagcttgctggaaccaatggtgagactactactcaaggtcttgatggtcttggtgaccgttgcaagaaatactacgaggctggtgctcgttttgccaagtggggtgcggttcttaagattggtgtttatgagccatctcagttagctatcatgagaa

SEQ ID NO: 150655 - DNA, 340 bp, Arabidopsis thaliana columbia
caatcatcaggaataaagggtttgattacttctattggaagaaaaaaatctttggaaaatggatcaaacagaggaaccaccactcaacacacaccagcagcacccagaagaagttgaacatcatgagaatggtgcgactaagatgtttaggaaagtaaaggctagagctaagaagttcaagaacagtctcactaaacatggacaaagcaatgagcatgagcaagatcatgatttggttgaagaagatgatgatgatgaccagcttgaacctgaagtgatcgatgcaccaagcgttacaggttaacctagagaaacttatgtttcaacattggggggaaat

SEQ ID NO: 150656 - DNA, 513 bp, Arabidopsis thaliana columbia
ggagtcagatacagttccctagatcgagaatctccaggcgctttgtaatacctgtttagtatatgtttgtcaagttctctgtcagagatttaccgggaatcgatcagaagatatgaactgggttcaacgcaaaatctacctttataatgtcacattcgggctctacatgcttgattggtgggaacgatacctcttcaattctttggtggttgttttgatgtggttcgttttatacaacgggactcgctacttttcggagctttttcagaggcatttgacatgaaaacatgtgttgttcctcgcacagtagagcacgaaaagcctagatcatccaaaggcatgttcgtttggttccaatttctgagacgtataccatcataaatccctctttcggcgtcacctttgtttttgtcaattttcctccaacggctctaggacagcgcctatgtctctatagtatttgttcccatgtgtttgcgattaacagaaaatgttttggagactcgtaagatc

SEQ ID NO: 150657 - DNA, 130 bp, Arabidopsis thaliana columbia
aaggaaaacatgattgggagggatcgtacgatggtgggcgtcgatttatacgagtgtcgcacctgttggttctctgaagggaacacagacgatcgtcgaataatgcaccgataaaaattatcaagctccg

SEQ ID NO: 150658 - DNA, 335 bp, Arabidopsis thaliana columbia
ggcagacaagcattagcatcatagatacatagagagcttaagcaaaagatctcatactttcaagattgatcgatctctcaagtctcaacaatgtcatcatcatcatcagttcctgcttacttgggagatgaagatctgacacaagaaacaagagctctgatctcttctcttcctaaagagaaaggttggttagtgagtgaaatatatgaattccaaggactttggcacacacaagctattttacaaggaatcttgatctgccaaaaacgctttgaagctaaagattccgacattatccttgtcactaatcctaaatcaggtaccacttggttaaa

SEQ ID NO: 150659 - DNA, 305 bp, Arabidopsis thaliana columbia
gtctcctccatgtttaccacttacaccagacgcataaccttcctttattcgcgcggatggggggcaacaaatgttcagaagcggcaacgtcaccgttcgggtcttcgaacgttaaattcggactccttctcccggcgcatgcgacaggagctaaaattctttctctgtctcaatctatcagtcgcaatgtgtgtgtagcttatctctttaccggcaatgataggtcaatcgcgctagacactggtactaaaacctagtcccaagcctcacactctacgatgtccgatctaccgatcactgttatc

SEQ ID NO: 150660 - DNA, 441 bp, Arabidopsis thaliana columbia
ccgtcttcgtcgcctaaagtctcggtgggcctgtactacgagtctctctgtccctactgctcttgcttcattgttaaccacctcgcgaagctcttcgaagacgatctcatatcaatcgtcgatctccatctctctccgtggggcaataccaagctccgttccgataacgtcactgccgtttgccagcatggggcatttgaatgcttcttggataccgtagaagcttgtgcaattgatgcttggcctaaagtaagcgatcatttcccgttcatatactgtgtcgagaagttggtgactgaacataagtatgacaagtgggagacgtgttatgagaagctcaatctcaactcgaaacctgttgcagattgtctcagcagtggacatgggaatgagcttgctttgcactatgctgcagaaacgaatgcgcttcagccttctcac

SEQ ID NO: 150661 - DNA, 545 bp, Arabidopsis thaliana columbia
aaggaataatggagtttggattagccacttcgagttttctgggtactcaactaatcccggccactctgtttagcaaacgagctcgagctttgtctctcaccgtcacagcgaccggtggcagcagaaacaataaggtttacacgaggcttgattcttgtctagtgattcctcctcctcctaaattcaagaaaccgcgtgctattgttaaattcttgggaggtgccttcgtcggagctgttcctgaactcacttacagttaccttaaggagctactggcaaaggaagggtatttgatagtatctgtgccgtacaatgttacatttgatcatgaacaagctgctaagcaagtttatgagaggtttaattcatgcttggacacgattgtctcatctggaattccaaattcaaacttgaagcctggagatttagctgaccttcctcttttctcagttggtcacagtaatggtgcactgcttcaagttttgaccggaagttattttgctgagaagataccaaaggttaatgccattatttcattcaataac

SEQ ID NO: 150662 - DNA, 213 bp, Arabidopsis thaliana columbia
aattattctcagatggagaaacccatctccatcacgacggggaagtttcggaccaacaacagcaacaatcataacaatgtctggttcgttgttccactcttctttatcctctgtttcgttctcctctgttttgactactctggtttcttaccgacccaaaccaaaccgtttctaattccgacgttcccaaaataacatcttggattacaaaga

SEQ ID NO: 150663 - DNA, 409 bp, Arabidopsis thaliana columbia
ccgtaacctccgccagtgaaaccctaaactcctctttccgatatttcactgttcatcaatcgctctgcgtcactcttcctagcaagctcctttaattttcctctcaatccaatcgtgattttgcatacccatcaggtttcagaaaaactgaaataatggtgtataagcgcaagtcaatggagaagaaaaaggaaggcatgggttctactattgatcaaaacctgagctttaagaatattatgaaagatgttgcactctttggttcttcgcatatgacatggaaggataagaaagcactggaggattagaaaggtgactgcacttggtggaaaggcacaaaagatgcataggcttccggttagtgtagctcgagtgccgatgaagaaaccgaaagattgagaagagaaga

SEQ ID NO: 150664 - DNA, 482 bp, Arabidopsis thaliana columbia
ctctgatcatttcgatttttttccggtgaaaagggaggagaaacatggttgtacgtatcagactgtcgagatttggatgcaaaaatcggccattttttagggttatggctgctgatagcagatctccaagagacgggaagcatcttgaggtcttaggttacttcaatcctttgccaggccaggacggtggtaagaggatgggtctcaagttcgatcgaattaagtactggttatctgttggtgctcagccatcagacccggttcaacgtctcctattcagatccggtttacttcctcctcctccaatggtggctatgggacgtaaaggtggagcacgagacacacgcccagttgatccgatgactggtcgctatgtggatgcagagaataaaacagttaatgccaatgataaccagcctaaggaagaggatacagaagccaagagtgcatgattcattagccttctgtcatcgtagcttttc

SEQ ID NO: 150665 - DNA, 332 bp, Arabidopsis thaliana columbia
cccttcactgcgccagtgttgtgcggctctgcgaatcttcgaaaatgggtgcgtacaagtatgtatctgagctatggaggaagaaacagtccgatgtgatgagattcctccagagggttaggtgctgggagtacagacagcaaccttcgattgttcgtctcgtcaggcctactcgtcctgataaggctcgtcgtttgggttacaaggccaagcagggctttgttgtgtaccgtgtacgtgtgagacgtggtggacgcaagaggccagtgcctaagggtattgtgtatggtaagccaacaaaccagggagtgacacaactcaagttccagcgt

SEQ ID NO: 150666 - DNA, 444 bp, Arabidopsis thaliana columbia
gaggttgaaccattagtaagaaatcataagccatcttcgccaactccaaatgagtgctccaaactctccaactgtcaatttacgatcacatccttcctccagtttacacagtagcctttctcttctacaccaaaaatgatttgatctctcaagaacacacttcccacaaactcaagacttctctgtctgaaaccctgaccaagttctaccctcttgccggaagaatcaccggagtaaccgtcgattgtaccgatgaaggagctatctttgtcgatgctcgtgtcaataactgtcctctcactgaatttctcaagtgccctgatttcgacgccctgcaacagttgcttcctctagatgtttgagacaacccatacgtggctgctgccacgtggcctttgctgctcgtgaaggcaacttacttcggatgcggatgcatggccatag

SEQ ID NO: 150667 - DNA, 431 bp, Arabidopsis thaliana columbia
caaaggcgtctgcttttacgttttctacttcacagcatatggcggattgggctccagttgtgcggggagttgtattaggcggtatcctttctccgggacttcttttctcgttgcccggacatcaccatactctccaattcggcggcatgaaaaccaacggcaaagccatcgccgttcacacactcatcttcttcgctgcttacaccatcttgatcctcgctgtcaatctccacatcactaccggctaatttatgggccgaaataaaggtaacccttttgctgtatctgagctctctccctctcaggaatcttctgagatctggaactctgtttttagggatttgtatactatactctgttctctagtttgtgttgtgcattgagctaatactgtaaaatgttataatcattttagcttgttttgatgtcat

SEQ ID NO: 150668 - DNA, 497 bp, Arabidopsis thaliana columbia
gaaaactcattaattcattcgtcggattcgaagaagaaatcacttcccagaaactggcttcgtatcgaagtattgcttgtgttcttcggagaaacgagatcgggatccgaatacgagtacaatggaggtttcgcaagatggatcggaaagagataaaactcctcctccttcctcttcttcttcttcttcctctcccattcctgtcgtcaccaatttctggaaagaatttgatttggagaaggagaaaagcctgcttgacgagcaagggcttagaatagctgaaaatcaagaaaacagccaaaagaatcgccgaaagcttgcagagagcacacgagacttcaagaaagcttcgcctgagaacaaacttagtatgtttaattccctcctcaagggatatcaagaagaagtagataatattaccaagagggccaagtttggggagaatgctttcctaaatatctatcagaaactctatgaagcacctgatcccgtttcct

SEQ ID NO: 150669 - DNA, 343 bp, Arabidopsis thaliana columbia
attagattgaaccctaaaaactctattattggattggatcatcatcgttaaagctccacgccttgtcccaatttcctctttggttctttccttctgggcttgttattgttgtttctcgaaaaagaagaagaagcgatggtattgggattttagggattattgcggtttgttgtatatatatatatagaagctgagggattttgtgttgtgaagaacatcgaatcctgttttttttcgaagaaagttcttagaattcttcaagtggaagaagatgtcatcagctggtgttgcgttaagtccggttcgtagcgagccattgatttttcctttggttcgggccaat

SEQ ID NO: 150670 - DNA, 404 bp, Arabidopsis thaliana columbia
tctgactctctatctgaaatctcaaaacggagaacgcgagggaacaagagattaaagcatagtgagaccctaagagagagagctttaggtctagaggggatcttcacaattcacacaacaactacgagataggatcgtgcgcgtcaaaagaagctggtactgctgattccagccgaagattagtctccgcttctggttgttccggtggagactcgtcggaaatgagaggtcttttcaaatccaaaccgcggactcccgctgatattgttcgtcagactcgcgatctcctcctctacgccgatcgatccaacttcttccctgacctttgagagtccaaacgcgaggaaaagatggtggaactaagtaagagcatacgaggattgaaggtgattctatatggaaac

SEQ ID NO: 150671 - DNA, 504 bp, Arabidopsis thaliana columbia
gttttagtattatccatcttgccgaggacggtctagccagagagaacttatagcttgaagacggtggaagtactccgcaacggctagaagacaccgtgcttcttgacgggtcgtcaacaattggttcagcctatggatcgtttggtgcctcaaattatccgcctgtaagtttctaatgtattagctagttcaaaactaaataagagttatagggaaaatggagaaatagtaaaagcaaaacaaaagatggacaaagtagtgcacatgttattgactaagaccaattaaggacaaataatcgaattggaccatcattaatctcataaatataagtattaaagactaactagagaggaaaaaaacagataaaggactaattaagcattataatgattgtgcatgacccgaaattatgtggttgattgacgactaatgccgattattcaacattgtgatcgatcaaaaaatcaaagcttgtagtaattcactaaatagaacacgaca

SEQ ID NO: 150672 - DNA, 224 bp, Arabidopsis thaliana columbia
taaattacatcgggatggagaattcttgatattgacaatggtaataatacctgatactccaaatagatcgggacaccataaagaggttaagagaaggccacattcttcaagagcaccatttagatatcaaagagaggaataccgttatcattatcttcacggaagagccagaccagtccctgaaattggggacaaccgggaaagttctgattcacgaactgaga

SEQ ID NO: 150673 - DNA, 330 bp, Arabidopsis thaliana columbia
ccgaacgtgactctccagatagacttttggagtcacaacattgagtttgaagaggagggaagaagtgagctagggattggttcagagtgaacataaatggctctcaaggcattagactacgatactctgaatgaaaacgtcaagaagtgtcagtatgccgtaagaggtgaactttatctccgagcttctgagctgcagaaagaaggcaaaaagattattttcacaaacgttgggaaccctcatgctttaggacagaagccattgacatttcctcgccaggtggttgcgcctttgccaagctccgtttctactagatgacccaaatgttgg

SEQ ID NO: 150674 - DNA, 439 bp, Arabidopsis thaliana columbia
atctctctgcaccacagaattgtgcgatttacgataaatctctgaaacctccgatcgttaacggcgaccgccgattttcccggtaaaaatgaacgacggagatgtatcgaggcagatccagcagatggtgagatttatccgccaagaagcggaagagaaagcaaacgagatctcggtttctgctgaagaagaattcaacattgagaaactccagcttgttgaggcggagaagaagaagatcaggcacgattatgagaagaaggtgaagcatgctgatgttcgcaagaagattgattactctatgcagctaaatgcatcaaggatcaaagttcttcaagcgcaagacgatattgtcaatgccatgatagaccaagcagctaatgatcttctgaacgttagtcgcgatgagtgtgcctacagacagctcctcaaggatcta

SEQ ID NO: 150675 - DNA, 497 bp, Arabidopsis thaliana columbia
  unsure (1)..(497): unsure at all n locations
agaactcttgctgactacaatatccagaaggagtccacccttcatcttgttctcaggctccgtggtggtatgcagattttcgttaagacgttgactgggaaaactatcactttggaggtggagagttctgacaccattgataacgtgaaagccaagatccaagacaaagagggtattcctccggaccagcagagattgatcttcgccggaaaacaacttgaagatggcagaactttggccgactacaacattcagaaggagtccacactccacttggtcttgcgtctgcgtggaggtatgcagatcttcgtgaagactctcaccggaaagaccatcactttggaggtggagagttctgacaccattgataacgtgaaagccaagatccaggacaaagagggtatcccaccggaccagcagagattgatcttcgncggaaagcaacttgaagatggaagaactttggctgactacaacattcaagaggagtccacact

SEQ ID NO: 150676 - DNA, 421 bp, Arabidopsis thaliana columbia
gaatctctctctctctctcttcttataagaaaagagctaaaaagcttcccttcgttttactatatccatgattctgaattccacacacactgagagagatagagggacacattaaaagctaattcaacttttctgcaatggctgagaaggagaagaagaagcatttacatgagtttcttgaagatgaccaagagccttttcatcttaaccattacatcggcaaccttcgttctcagatgggttgctccgatatgcgtgtcaagaagcgaaagtccgataacgtcgccacgtttcctcctggtttgttctcctgcgagaactcttgtttcttcgcagctcataaatctcctgacccgagaaagtctccactctttgagctccggtcgccgggaaagaaagaagatacgtgacggtcgagttt

SEQ ID NO: 150677 - DNA, 131 bp, Arabidopsis thaliana columbia
cgcgtgggcgaggttttcacttacgcgaaaaagatcgctgcgccgtatgatttggttgtgcagagtaaggagctagggaggttaccgttctgctcaattcgctgctggaggagtggagacgacggcagatg

SEQ ID NO: 150678 - DNA, 454 bp, Arabidopsis thaliana columbia
tcttcatggcgctcttctcgtcgattgcaataacgggtattctcgagatgcaatggggcaaagttgggatcgatgattggtggagaaacgaacagttttgggtcattggaggtgtttctgcgcatctgtttgctctcttccaaggtctcctcaaggttcttgctggtgtcgacactaacttcacagtcacatcaaaagcagctgatgatggagagttctctgacctttacctcttcaaatggacttcacttctcatccctccaatgactctactcatcataaacgtcattggagtcatagtcggagtctctgatgccatcagcaatggatacgactcgtggggaccgcttttcggaagactgttctttgcactttgggtcatcattcatctttacccgttccttaaaggtttgcttgggaaacaagatagaatgccaaccattattgtcgtctg

SEQ ID NO: 150679 - DNA, 505 bp, Arabidopsis thaliana columbia
atttcgttgaagctcagatccttgaagcaattggaatcgattacatcgatgagagcgaggttttgactcttgctgatgaagatcatcacatcaacaagcataatttccggatcccgttcgtttgcggttgccggaatctcggcgaggctctgaggaggatccgtgaaggtgcggcgatgattaggaccaaaggtgaagctggaaccggtaacattattgaagctgtgaggcatgtgaggtctgttaatggtgacattagggttttgcgaaacatggatgatgatgaggttttcactttcgctaagaaattagccgctccgtacgatctcgtgatgcagactaagcagcttggtcgtcttcctgtagtccaattcgccgccggtggagtggctactccggctgatgcagctctcatgatgcagcttggatgtgatggtgtctttgttggttctggtatcttcaagagcggtgacccagctcgtcgtgcacgtgccaattgttaagc

SEQ ID NO: 150680 - DNA, 390 bp, Arabidopsis thaliana columbia
acattgcacatttttccctttacttttctttagctcatttcaagaagatggttttatctaagacagcttccaaatccgatgattcaatccattcaacttttgcttcccgttatgtccgcaactctatctcacgattcgaaatacctaagaactcgatccctaaggaagcagcataccaaatcatcaacgacgagctcaagtttgacggtaacccgaggctaaacctggcctcctttgtgaccacttggatggagccagaatgtgacaagctcatgatggaatccatcaacaagaacaacgttgagatggaccaataccctgttaccaccgaccttcagaatcgatgcgttaacatgattgcgcgtctcttcaacgcgcctttaggtgacg

SEQ ID NO: 150681 - DNA, 433 bp, Arabidopsis thaliana columbia
ttcttctcgacttggatctttaaagcttcttcgatttttccagaggcaatcatggttaaaggtccaggactctacactgaaatcggcaaaaaggccagagatcttctgtacagggattaccaaggagaccagaaattcagtgtcaccacttactcttcaactggtgttgcgatcactacaacgggaacaaacaaaggaagcttgtttttgggtgatgttgctacccaagtgaagaacaacaacttcactgctgatgtcaaagtttccactgattcttctcttttgaccactcttacctttgatgagcctgcccctggactgaaagttattgttcaggctaagttgcccgatcacaaatctggaaaggctgaggttcagtatttccatgactatgctggtatctctaccagcgttggattcacagctaccccga

SEQ ID NO: 150682 - DNA, 268 bp, Arabidopsis thaliana columbia
tctgatcctcgtgaagctgaaaatattgttgagagagtcactccaaggttgcaacatgccaactgtgctgttgtgctttcagctgttaagatgatccttcagcagatggagcttattactagcacagatgtgattcgaaatctttgcaagaagatggctccttccctagttacattgctttctgcagaacctgagatacagtatgttgcacttcgtaacattaaccttattgtccaaaagagacccactattcttgcccatgaaatca

SEQ ID NO: 150683 - DNA, 486 bp, Arabidopsis thaliana columbia
  unsure (1)..(486): unsure at all n locations
cgttgcagaaactaagaagagatgggtcttctctccaacagaatcatagatcgagtgtgaaacctggagatcatatctactcctggaggactgcttacatctatgcccatcacggcatctatgttggagatgatagagtcatccatttcactagacgaggccaagaagttggaaccgggactgttctagatctcatactagtcagctcaggtccatcccgaaaccacacccactgtccaacctgtgttccacctaacgaaggtcacggtgttgtttcctcatgccttaactgtttcctagccggtggtgtcttgtaccggtttgagtactcagtcaacgctgctcacttcctcgtcaaagccagaggaggaacttgcacactcgctgtcgctgaccctaatgaggatgttgttcaccgggccaaacacctncttcaaaacggatttggatgttatgacggtttcaagaacaactgtgaggatttcg

SEQ ID NO: 150684 - DNA, 419 bp, Arabidopsis thaliana columbia
caaccaagacaaaaagaacaatggcagcgagtgcatctccaatggcgagccagctgaggggcagcttctcctgcgcttctctttctcagcgtctcgccgtcccgaagggcatctccggtgctcctttcggtgtttctccgaccaaaagagtctcttccttcactgtccgagctgttaaatccgacaagacaacattccaagtagttcaaccaatcaacggtgatccattcattggaagtttggaaactccggtgacatcaagcccattgatcgcgtggttcctttccaacctccctggataccgtaccgccgtcaaccctttccttcgtggtgtggaagtgggcctggcccatggtttcttcttagtgggcccattcgtcaaagctggcccatttaggaacactgctttcgccgggtca

SEQ ID NO: 150685 - DNA, 489 bp, Arabidopsis thaliana columbia
cggagaaagatgcagagggagctgaagagtactatggaagagcaatactggagaatccaggagatggagaagctttatccatgtatggaagattgatatgggaaacgaagagagatgagaagagagctcaaggttactttgatcaagctgttaatgcttctcctaatgattgtatggttttgggatcatatgcacgtttcatgtgggaggcagaggatgatgatgatgatgatgaagaagaagaagaagaagaatggatggctgcatcaccactcatggtttctgcagtttagagactaacacgacgaagatgaagaagaagtaatggagactaagattatgtatcaagtatcaaccttttttttttgtctattttactgtctatttactaacttttgttgttataacctgaagtgttttgaatacatgtttgttgaaagtaaacttatgttacctttttataagagaattatagtgcttctgtttttt

SEQ ID NO: 150686 - DNA, 505 bp, Arabidopsis thaliana columbia
ctacttcttcttcttcctctgtggccactctacactgtccacacctacttcaagacacctttctcatccttgagatcggcgtcagatcctccgccgcttctcctcttcactatctccgtgttaaagatgatggaatctggcgctggtttcgtggccatggaagagaggatctctcctggaagtttcttccagtatcctctttctggattccgtgcttctcctaatcgatccccttgtcctccctctgatcgtgaaaggtacttgactgaattattgcaagagagacaaaagttgggtccctttttgcaagttatgccaaattgctgcagactgcttaatcatgaaatcaggagggtctctagttttcctgatcttgatagatatgagcatggcagtccatttagatcgcttggtcagccgacaaatggaaagcttgatttagagggatggtcgatgatgcaagccgaggaaaactgtcaccttcagagagcttcttcattttcgc

SEQ ID NO: 150687 - DNA, 513 bp, Arabidopsis thaliana columbia
caaatagaaaacatggctaacatgctcttcctcgtgtgcgcaactctcgggctggggcttcctcctcaccaacgcttccatctaccgcaccgaagccgaattctatgaagacgacgccagccaccgcttaaggacatgtacattgatgccataaagagcttcatgcatttacatcacctatagagcttgccagagatggatgagcaagcaaacgaggcaaggacgtggtggtggtccttccctcgacgatgagttcgatttcgagggcccccagcagggataccagctactccagcagtgctgcaacgagcttcgccaggaagagccagtttgcgtttgccccaccttgaaacaagctgccagggcagttagcctccagggacagcacggaccattccaatccaggaaaatttaccagtcagctaaatacttgcctaacaattgcaagatccagcaagttggtgaatgtccctttcagaccaccatccctttctttccttcttactacttgag

SEQ ID NO: 150688 - DNA, 395 bp, Arabidopsis thaliana columbia
atcgatcctctcctcttcttttctctgaggctcgttggaaaggtgggggcttctatcgaatcgaaccaacctcagaggctaagaagaggacctttgagagaatctccgcgtcaggatcagaaaaaacggtgatacggaagctagttctagggctaatgggcgccgcgggctccaaactcgagaaagctctaggcgaccagttccccgaaggtgaacgctactttggatttgagaatttcggcaacacttgctactgtaacagctgtatgcaggctccttatttttgtggtcctttccgagaacaactgcttgaatactataccagtaattaaagcgtggtcgatgcttcagagaattttaagacctggctggcatactcggtttcgaagttaagt

SEQ ID NO: 150689 - DNA, 235 bp, Arabidopsis thaliana columbia
tttggtcttcttgggctctattttaataaaggaggttggtccacatcaaaaaaaaaaacgacattgcaagggacaacgcggtaaacacttatcaaagatcaccattcaccaaaggcatggagaggccctatatgggaaatttaaaagatagaattggttacctatttaatggcttggatcaaaggttaaggggctcatcattaggtgggttaagggccaacattggcttccattt

SEQ ID NO: 150690 - DNA, 497 bp, Arabidopsis thaliana columbia
aaaacaaaagcaatccaatcccaaacccatttgctcttaagattcttcacatagagaaggcacaggttccttcttcttcttgcttcatcatccccaaacacacacaaactaaaaaaaaggcaaaaccctagatccaagatcagacctaatctaatcgaaactcatagctgaaaaatgaagagagatcatcaccaattccaaggtcgattgtccaaccacgggacttcttcttcatcatcatcaatctctaaagataagatgatgatggtgaaaaaagaagaagacggtggaggtaacatggacgacgagcttctcgctgttttaggttacaaagttaggtcatcggagatggcggaggttgctttgaaactcgaacaattagagacgatgatgagtaatgttcaagaagatggtttatctcatctcgcgacggatactgttcattataatccgtcggagctttattcttggcttgataatatgctctttgagcttaa

SEQ ID NO: 150691 - DNA, 464 bp, Arabidopsis thaliana columbia
ccctccgtcgccagcatttattcttctcacttttcttcaccggagaatcacgacaacatcaaattctccggcgacatctcagtggcagtgcatctgtaaaatgcttcaaggactgttgttcgctactcttgcttaattattactatagctggtgaaaatgggaggttgctgtagttcttcgaggaagtcacatcttgttggaacacctgtttactattattgtccagaatcttttgaagagcttgtcccttcaggaacccgtgctggtgtgggatcagcattcaccacaggcctcttggttgatataggtttggagacatctatacctgacaccttttgtgctcctgctcctcttccatatgatttgcttttggtgcgaccacaatgcacagattctgagtccattaaaggaaggatgtgtgggagcagttttgaaacgctagcgacgtgtgaagatcttgggg

SEQ ID NO: 150692 - DNA, 481 bp, Arabidopsis thaliana columbia
  unsure (1)..(481): unsure at all n locations
atggcttcatcatcatcaatatcaaatcacaagattccaaacacactaatgtttttggtgatcgtaaactttttgtacctaattcaaactaattcagctgtcagtatcagttccaattccaactcccacttctcaagattctcgagacatcgaagctcaccatcatcaaaaaccaaacaagggtttcttgcaacggtccaagagagtatgaaccatgctctcttggctcgttctcttgctttcaacctcactctttctcatcgaaccgtacaaacccacacgttcgatcccatccacgactgcctcgagctgctcgacgacacacttgacatgttatctcgcatccatgcggataatgatgaagaagatgtccatacatggctaagcgcagcactcacgaaccaagacacttgtgagcagagccttcaagaaaaatccgagtcatacaaacacggactngcgatggatttcgtcgcaagaa

SEQ ID NO: 150693 - DNA, 484 bp, Arabidopsis thaliana columbia
cttcttaccaaagatcatagatacaaaaatgcagggagctctgtttatcaaaccaacgattcttcttcctcttgcttcttcagtttcttctccaaaactcacttttcttcttcctcacgcaaccaaagcttcaagactctcatctctcagatcaaacaactcatcatcatcatcatccttaacgtctgaccctaacaccgtcgactataactcctccatcctttctgtttttccagctgaagcatgcgaagtaatcagtggatacgcttgttctgctgatatttaccctgaagtcaagctcgatacaaagcccgtctcacgtcccgtggcttcagagcccgttgacagagaatacgaagagtataacagccccaaaacggttttccgtgaagaggcctgcgatgatcttggaggagaattctgtgaacctgactttcaaaaagatgccaactagaagaaacaagattttatgtcatgtgaatat

SEQ ID NO: 150694 - DNA, 479 bp, Arabidopsis thaliana columbia
acgcgtgggcaacaatggctacttcaagaacattcattggctgtaatctctctatcgtacgtgctcgatatagccactacttatggtcaggctccagcttcaggcccttcaggcacaacgaacatatccgcattcctagacaaggctggacaggccacattgtgcataagacttcttaaaagcgctcaagcctgagaccaaatcaacactcagctcaattctttctggagtaatggcttaaccgtgttcgtccctactgatctcgcccacaacagcctcaaatccgggaccctaaactcatgggctgaccaacaataaggtgagctaggtcaggttcatgtcttacctacactcatgaccatgcctgagctgcaaacctgcagtaacgcctgacgcacgcatgctggagatggccacaacggtagatgccctgttaacatcactagctccggtaaccaagttaacatcagcactggagt

SEQ ID NO: 150695 - DNA, 450 bp, Arabidopsis thaliana columbia
gctaagaaaacgaaactcaactaattttgttatcacccaaaaagaagttcaaacacaatggctttcgctttgaggttcttcacatgccttgttttaacggtgtgcatagttgcatcagtcgatgctgcaatctcatgtggcacagtggcaggtagcttggctccatgtgcaacctatctatcaaaaggtgggttggtgccaccttcatgttgtgcaggagtcaaaactttgaacagtatggctaaaaccacaccagaccgccaacaagcttgcagatgcatccagtccactgcgaagagcatttctggtctcaacccaagtctagcctctggccttcctggaaagtgcggtgttagcattccatatccaatctccatgagcactaactgcaacaacatcaagtgaaatggaagcttacgtcgtcgttttggcggttaagagtatgggtta

SEQ ID NO: 150696 - DNA, 397 bp, Arabidopsis thaliana columbia
ttcaatcactcaccggagaagaagaagaagctatgccggtggtaaagctcctctgggggctactctgggaaattcagaccattctacgagtcacgcctcgccgtcgctacagctcagaacttcggaattctcggaaacggccgaatccatgtcctcgagctcgctcctggagctccaggcgtaactgaatccggctcgtacgatacagccgacgctgtatacgacgtatgttggtcagaatctcatgactctgtgctcatcgccgcaattggtgacggctcagtgaagatttacgacacagctgtttctcctacttctaatccgattagatcattccaagagcacgcgcgtgaggttcaatctgtggattacaatcccacgcggcgcgattcgtttc

SEQ ID NO: 150697 - DNA, 386 bp, Arabidopsis thaliana columbia
ttcttcttaacaaatcgagtcctttttctgataactcatttcgatttcagaaactcgccaagaactggatactctggcggaatcagagattaagaaccgagacgtggttctgaaactgtatgaagccctgagatctcgcgacgtcaaatctgtgcaccagatcttaaccccagatctggagtattggttccacggtcctccgccgcaccagtttttgatgcgcgtactcaccggaggtgtctctccgtcttcttcctccttcgaattcgtacctctctccgtcgtttccttcggatctaccgtaatcgcggaaggctgcgacgccgcgacatcgatttcttggatccacgctgggactgtagcgaatgggataatcacacaggtga

SEQ ID NO: 150698 - DNA, 520 bp, Arabidopsis thaliana columbia
aagaacaaatctcccaaatctaaaatctttctcttctctcttcgtttccataaccatgtctgcgaagaagattgtgttgaagagttccgatggtgaatctttcgaggttgaggaggcggtggctctcgagtcacaaaccatagcgcatatggttgaagacgactgcgtcgacaacggagtccctcttcctaacgtcacgagcaagatcctcgccaaggtgatcgagtattgcaagaggcacgtcgaggctgctgcctctaaggccgaggccgtcgagggtgctgctacctccgatgacgatcttaaggcctgggacgctgattttatgaagatcgatcaagctactctctttgaactcattctggctgctaattacctgaatatcaagaacttgcttgatctaacatgtcagacaagtgcggatatgatcaaaggaaagactccagaagagatccgcacaacgttcaacatttagaacgacttcacaccagatgaagaggaagaggttcgcagagagaac

SEQ ID NO: 150699 - DNA, 463 bp, Arabidopsis thaliana columbia
cattctcgtttgtgtttttgattggcggagaattggtgatagataagcttcttcttgcctcttctcaacttggtggatctgtcatcgatggcctctttgatgctcaacggggccattaccttccccaaaggtttaggttcccctggttccaatttgcatgccagatcgattcctcggccgaccttactctcagttacccgaacctccacacctagactctcggtggctactagatgcagcagcagcagcgtgtcgtcttcccggccatcggcgcaacctaggttcattcagcacaagaaggaggcttactggttctacaggttcttatccatcgtatacgaccatgtcatcaatcctgggcattggaccgaggatatgagagacgacgctcttgagccagcggatctcagccatccggacatgcgagtggtcgatgtcggcggcggaactggtttcactactc

SEQ ID NO: 150700 - DNA, 400 bp, Arabidopsis thaliana columbia
ccacaatgtatcttttggaccgcctattgtatttgttgggatatcttgcaagtcaggggcgggttttcttggtagacaaagaattcaatgttatagggtacaccttgttgctaagcctgattgagtacaagactcttgtgatgcggggtgatttagacaaagccagtgaaatcttacctacaattcctaaagatcagcataacagtgttgctcatttcttggagtcacggggaatgattgaagatgctctggaaattgcaacagatcctgactacagatttgagttggccatacaactgggtagacttgaaattgcacaggaaatcgctgtggaagtacagagcgaatctaagtggaaacaattaggagagttagctatgttctccggaaagctgcaaat

SEQ ID NO: 150701 - DNA, 486 bp, Arabidopsis thaliana columbia
  unsure (1)..(486): unsure at all n locations
gatatttaggtcctgtcgtactcgcacaacatctcctatccataaatccgcgcctgctttgatagaattagatacaaaattatcgatttttgaaacaggaattaaagtagtagatcttttggccccttatcgtcgtgggggaaaaattggactattcggtggggctggcgtgggtaaaacagtactaattatggaattgatcaacaacattgctaaagctcatggtggtgtatccgtatttggtggagtaggcgaacggactcgtgaaggaaatgatctttacatggaaatgaaagaatctggagtcattaatgaacaaaatcttgcggaatccaaagtggccctagtttatggtcagatgaatgaaccgccaggagctcgtatgagagttggtctgactgccttaactatggcagaatatttccgagatgttaatgagcaagacgtacttctatttatcgacaatatcttncgtttcgtacaagc

SEQ ID NO: 150702 - DNA, 454 bp, Arabidopsis thaliana columbia
ctgaaattgagaagaaaagtatcaaagacaaacttccacagcttgagcaagaggagcggaatagcattgaagaaattgatcgcataaaacctgaactctctaaggcaagaactgaggtcgataagagaaagacagaaatgaataagttggagaaaagaatgaatgagatcgtggaccgtatctataaggattttagccagtctgttggggttccaaacatacgtgtatatgaagaaactcagctcaagactgctgaaaaggaggctgaagaaaggctggaactgagtaaccagcttgctaagttaaaataccagctggaatatgagcaaaaccgtgatgtggggtcacggattcgaaagatagagtcttctatcagttctctggaaactgatttggaaggtatacagaaagacaatgtctgaacgttaggagacagcggttaaaataactaatg

SEQ ID NO: 150703 - DNA, 526 bp, Arabidopsis thaliana columbia
  unsure (1)..(526): unsure at all n locations
tttgattcaatcactcaccggagaagaagaagaagctatgccggtgttcaaagctccgttcagtggctactctgtgaaattcagtccattctacgagtcacgcctcgccgtcgctacagctcagaacttcggaattctcggaaacggccgaatccatgtcctcgagctcgctcctggagctccaggcgtaactgaatccgtctcgtacgatacagccgacgctgtatacgacgtatgttggtcagaatctcatgactctgtgctcatcgccgcaattggtgacggctcagtgaagatttacgacacagctcttcctcctccttctaatccgattagatcattccaagagcacgcgcgtgaggttcaatctgtggattacaatcccacgcggcgcgattcgtttcttacttcttcgtgggatgatacggttaagctttgggctatggatcgtccggcgagtgtaaggacttttaaggaacatgcntattgccgttatcaagcagtctggaatcctaaacatggtgat

SEQ ID NO: 150704 - DNA, 420 bp, Arabidopsis thaliana columbia
cttcttcttcaaacaaaaaatgggttttttaaagttatctccaatgatccttctggtagcaatgatcggcgtttcatatgccatggacatgtcaatcatctcctacgacgaaaaccaccacatcaccaccgagaccagccgtagcgactcggaggttgagagaatctacgaagcgtggatggtggaacacgggaagaagaagatgaatcaaaacggtcttggtgcagagaaagatcaaagattcgagatctttaaagataatcttcgtttcatcgatgaacataacaccaaaaacctcagttataaacttggtttaacccggtttgctgatttaaccaatgaggagtaccgatctatgtaccttggtgctaaaccgaccaagagggttttgaaaaccagtgatcggtatcaggcgcgtgt

SEQ ID NO: 150705 - DNA, 429 bp, Arabidopsis thaliana columbia
gcggtttttattaaaacaaaaaatgggttttttaaagttatctacaatgatccttctgctagcaatgatcggcgtttcatatgccatggacatgtcaatcatctcctacgacgaaaaccaccacatcaccaccgagaccagccgtggcgactcggaggttgagagaatctacgaagcgtggatggtggaacacgggaagaagaagatgaatcaaaacggtcttggtgcagagaaagatcaaagattcgagatctttaaagataatcttcgtttcatcgatgaacataacaccaaaaacctcagttataaacttggtttaacccggtttgctgatttaaccaatgaggagtaccgatctatgtaccttggtgctaaaccgaccaagagggttttgaaaaccagtgatcggtatcaggcgcgtgttggtga

SEQ ID NO: 150706 - DNA, 256 bp, Arabidopsis thaliana columbia
attcaaaatctcattctttctagtaaacaagaacaaaaaaatggcggatacagttgggggaacccataacgatatcatcggcagagaccagtacccgatgatgggccgagaccgagaccagtaccagatgtccggacgaggatctgactactccaagtctaggcagattgctaaagctgcaactgctgtcacagctggtggttccctccttgttctctccagccttacccttgttggaactgtcatagctttgact

SEQ ID NO: 150707 - DNA, 424 bp, Arabidopsis thaliana columbia
caacgatctttatctacaaacattcataaactcttactctctccaaaaatgaagctctgtctgcgttttctctcagtccttctcctgatcgctttcatggttcttgctaccactgcagaggtgagtccgttggataataaaatatgcaagacaaggagtgatcgtttctcaggagtgtgcataagcacaaacaattgtgccatcatctgccaacaattcgagcactttgatggcggtcactgcgaattcgatggagccttccgtcgttgtatgtgcaccaaacaatgttgattcaatactctctatttgatcattggttctatataataataagggacacactttgttaatttgtgtcctctctccatatatactatatactatctcattatttaagaaatttaatggatttttaataataatt

SEQ ID NO: 150708 - DNA, 426 bp, Arabidopsis thaliana columbia
aaaaaaatcaaaaagattactctctctttaatatctgggtttatactacagtccttctttggtgcaaagatcccaaaaaatcaaaatcgaaagagagaataaatcaaaaggaagaatctttatctgctttctctcgatgaggatccggaaacgacaagtgcctcttcctttatcgtctctattaccagttcctctatcagatctctactttaaccgctcaccgacggccaccgcgagatactttcgcggtggttataaagacggcggtgatgattttggttctcttcagctttcgcttccgccgccgtcgcagatttctgatcggcttattcaaagagatttgataaagaagaaggaggaggtcaaggctttggatgatgataatggtgatgtagacgtcaagagtcgtactgatgcatcgggcag

SEQ ID NO: 150709 - DNA, 427 bp, Arabidopsis thaliana columbia
ggagacactacttgtgactcatatactctttggcagaaagatatagacgtgatggacgagctcaactctactggctacagattctccattgcgtggtcaagactccttccaaaaggaaagaggagcaggggagtgaacccaggagctattaagtactacaacggtctcatagatggcctcgtcgcaaagaatatgacgccctttgttaccctctttcattgggaccttgctcaaacactacaagatgaatataacggtttcttgaacaaaacgatcgtagacgatttcaaggattacgcggatctatgtttcgagttatttggtgatagggtaaagaactggatcaccatcaaccagctatacacagtgcctactagaggatatgcattgggaacagatgcacccggtcgatgttctcctaagattg

SEQ ID NO: 150710 - DNA, 287 bp, Arabidopsis thaliana columbia
attcttcttcaaacaaaaaatgggttttttaaagttatctccaatgatccttctgctagcaatgatcggcgtttcatatgccatggacatgtcaatcatctcctacgacgaaaaccaccacatcaccaccgcgaccagccgtagcgactcggaggttgagagaatctacgaagcgtggatggtggaacacgggaagaagaagatgaatcaaaacggtcttggtgcagagaaagatcaaagattcgagatctttaaagataatctgcgtttcatcgatgaacataaca

SEQ ID NO: 150711 - DNA, 344 bp, Arabidopsis thaliana columbia
atgaatcttaaaacaaaaaatggatttcttaaagctatatacaatgatccgtttgctcgcaatgaacgatgctgcatatgacatggacatgtcaatcatatcctacaacgaaaacaaccacatcactaccaggacctgtcgtgactacttggatgttgagagattctacgaagcgtgtatggaggaacacatgcagaagtagatgaatcaacacagtcttggtgcacagaaagatcaaagagttgcgagctttaacgataatgttggatctatcgatgaacataacaccaaagaccgtgcttatgaactagctttaaccgggttggctgaattaaccaatgagg

SEQ ID NO: 150712 - DNA, 264 bp, Arabidopsis thaliana columbia
atgcatcttaaaacaaaaaacgggttttttaaagttatatacaatgatccttctggtagcaatgatcggtgtttcatatgccatggacatgtcaatcatatcctacaacgaaaaccaccacatgaccaccgggaccagccgtggcgacttggaagttgagagaatctacgaagcgtggatggtggaacacgggaagaagaagatgtatcaaaacggtcttggtgcagagaaagatcaaagattcgcgatctttaaagataatct

SEQ ID NO: 150713 - DNA, 418 bp, Arabidopsis thaliana columbia
cttcttgttaaaacaaaaaatgggtttcttaaagttatctccaatgatccttctcctagcaatgatcggcgtttcatatgccatggacatgtcaatcatctgctacgacgaaaaccaccacatgaccaccgagaccagccgtagcgactcggaggttgagagaatctacgaagcgtggatggtggaacacgggaagaagaagatgaatcaaaacggtcttggtgcagagaaagatcaaagattcgagatctgtaaagataatcttcgtttcatcgatgaacataacaccaaaaacctcagttataaacttggtttaacccggtttgctgatttaaccaatgaggagtaccgatctatgtaccttggtgctaaaccgaccaagagggttttgaaaaccagtgatcggtatcaggcgcgt

SEQ ID NO: 150714 - DNA, 318 bp, Arabidopsis thaliana columbia
atacatgttgatacaaaaaatggtttttttaaagccatatacaatgatcctcatggtagcaatgatcggcgacacatatgccatggacaggtcaattatactgtacgtcaaacgccagcacgttaacaccgagaccaggcgtcgcgactcagaggctgcgagaatgtaggaagcgtggatggtggaacacgggaggaagaagatgaatgaaaacgtgcttggcgcatggaaagatcaaggattcatgctgttctatgatcatgttgaggatatcgaggaacataacagcaataacctcatgttaaacttggttaaccc

SEQ ID NO: 150715 - DNA, 399 bp, Arabidopsis thaliana columbia
gacttgatgcaaagggcaatcagcttcctcgttcggtatatgttactagcgaaaagagaccctgattccagcaccacagaaagattaatgctatgaatgcactggagagagtttcagcaatttttaccaacggacctttcatcttgaatcacgattgtgaccattacataaataacaacaaatccttaagagaagcaatgtgctacactgatggaccgaaacctcgtgaagcaagttggatatgatcagttcccacaaagatttgatggtatcgataagaactatagatatgctaatcgttataccgagttctttgatattaacttgagaggtttagatgggattcaaggacctgtatatgtcggcactggatgtgttttcaacagaacagcattatac

SEQ ID NO: 150716 - DNA, 225 bp, Arabidopsis thaliana columbia
agcgatttcacctccattttcttcgatttttctagaaccagagcctacctagctggcgccttaaggaggtgattcagtttacaagcaaaatggtgaagatttgctgcattggagctggatatgttggtggtccaaccatggctgtcattgctctaaagtgtccatcttttgaagtagctgttgatgatatctttgtgccaaggatcaatgccttggacagtgatt

SEQ ID NO: 150717 - DNA, 463 bp, Arabidopsis thaliana columbia
ccgggcaggaattggccggagcgacacgcgtccgtttttttttaaaacaaaaaaggggttttttaaagtaatctccaatgatccttctcctggcaatgatcggggtttcatatgccatggacatgtcaatcatctcctacgacgaaaaccagcacattaccaccgagaccagccgtagcgactcggaggttgagagaatctacgaagcgtggatggtggaacacggggaggaagaagatgaatcaaaaccggtcttggtgcagagaaagatcaaagattcgagatctttaaagataatcttcgtttcatcgatgaacataacaccaaaaacctcagttataaacttggtttaacccggtttgctgatttaaccaatgaggagtaccgatctatgtaccttggtgctaaaccgaccaagagggttttgaaaaccagtgatcggtatcaggcgcgtgttggtgac

SEQ ID NO: 150718 - DNA, 420 bp, Arabidopsis thaliana columbia
attaaaacaaaaaatgggttttttaaagttatctccaatgatccttctgctagcaatgatcggagtttcatatgccatggacatgtcaatcatcttctacgacgaaaaccaccacatcaccaccgagaccagccgtagcgactcggaggttgagagaatctacgaagcgtggatggtggaacacgggaagaagaagatgaatcaaaacggtcttggtgcagagaaagatcaaagattcgtgatctttaaagataatcttcgtttcatcgatgaacataacaccaaaaacctcagttataaacttggcttaacccggtttgctgatttaaccaatgaggagtaccgatctatgtaccttggtgctaaaccgaccaagagggttttgaaaaccagtgatcggtatcaggcgcgtgttggtga

SEQ ID NO: 150719 - DNA, 426 bp, Arabidopsis thaliana columbia
cttcttcttcaaacaaaaaatgggtttcttaaagttatctccaatgatccttctgctagcaatgatcggcgtttcatatgccatggacatgtcaatcatctcctacgacgaaaaccaccacatcaccaccgagaccagccgtagcgactcggaggttgagagaatctacgaagcgtggatggtggaacacgggaagaagaagatgaatcaaaacggtcttggtgcagagaaagatcaaagattcgagatctttaaagataatcttcgtttcatcgatgaacataacaccaaaaacctcaggtataaacttggtttaacccggtttgctgatttaaccaatgaggagtaccgatctatgtaccttggtgctaaaccgaccaagagggttttgaaaaccagtgatcggtatcaggcgcgtgttggtga

SEQ ID NO: 150720 - DNA, 365 bp, Arabidopsis thaliana columbia
cttcttcttaaaacaaaaaatgggtttcttaaagttatctccaatgatccttctgctagcaatgatcggcgtttcatatgccatggacatgtcaatcatctcctacgacgaaaaccaccacatcaccaccgagaccagccgtggcgactcggaggttgagagaatctacgaagcgtggatggtggaacacgggaagaagaagatgaatcaaaacggtcttggtgcagagaaagatcaaagattcgggatctttaaagataatcttcgtttcatcgatgaacataacaccaaaaacctcaggtataaacttggtttaacccggtttgctgatttaaccaatgaggagtaccgatctatgtaccttg

SEQ ID NO: 150721 - DNA, 374 bp, Arabidopsis thaliana columbia
gttaatcttaaaacaaaaagtgggtttcttaaagtcatctccaatgatccttctgctagcaatgatcggcgttgcatatgccatggacatgtaaatcatattctacgacgaaaaccaccacatcaccaccgagaccagccgtggcgactcggaggttgagagaatatacgaagcgtggatggtggaacacgcgaagaagaagatgaatcaaaactgggttggtgcagagaaagatcaaagattcgagatctgtaaagataatgttcggttcatcgatgaacataacaccaaagacctgacgtgtaaactgtggttaacctgatgtgctgatttaaccaatgaggagtaccgaactatgtaccttggtgctaaac

SEQ ID NO: 150722 - DNA, 230 bp, Arabidopsis thaliana columbia
ctccgtcactatcttcgactcgggtctttttcctggtggacgcatgtctcaaagaagggagattggagaagatgggaaggagttgatgttctaccatggagcttcatttttctgcgtgagcaactcttatgccatggctcttgttcatgagtgggaatccagaggttttgtttctgaatggaaacacgtttttgggagttttgattgctcctccaacatgtttcttggca

SEQ ID NO: 150723 - DNA, 421 bp, Arabidopsis thaliana columbia
  unsure (1)..(421): unsure at all n locations
tggatgttgtaaagcttgtaaagttatgtgtagtggcaacgatggaccttgcttgtgcgattcatgggtgttttgtgggaacaaagaggattgtggctcgaagtttggagagtgttggttgaagaagcaaaaagatgtcttggtgcctgatcgacaaggaggtggcgagaaagtaatgtggacatctggacttatcttcggacaaggccagggcattgttggttttgagacggaacacggcgtaattcatgtcaaacttcaacctggatgcgctcctcactcagtatactacattctgagtttgttaactctacgccattgtgcaggctgccagtttcatcgagcagagaaccggtgatcatattgngactcagaaggcaatcatgtaaagaatgctccctttggtccaccatacgctatg

SEQ ID NO: 150724 - DNA, 421 bp, Arabidopsis thaliana columbia
cacaatacaaaacacaactttcatatataacaaaaaaagttatagaaatggccaaagacgtggaaggacctgagggatttcagacaagagactacgaagatccgccaccaactccgtttttcgatgcggacgagcttaccaagtggtctttatacagagccgtcattgccgagttcgtagccactctcctcttcttgtacatcaccgttttaactgtcatcggttacaagattcagtccgacacaaaagccggtggagttgactgcggcggcgtcggaatccttggcatcgcgtgggcttttggtggcatgatcttcatacttgtctactgcaccgccggtatctcaagtggtcacataaaccctgcggtgacgtttggtttgttcttagcccggaaggtatcgctgattagggcggtgct

SEQ ID NO: 150725 - DNA, 363 bp, Arabidopsis thaliana columbia
gaccgatcggcgatcagtagacttaaccaaactcgcggtgaaacagtcggaatccaccgctataaggaacgatgatgatctcccaattcttcgtcttatctcagcgaggagataacatcgtcttccgtgactaccgggctgaggtacccaaaggaagtacagagacattcttccgtaaagtcaagttctggaaggaggatggcaatgcagaggcgccacctatctttaatgtcgatggcgtgaactacttccatgtcaaggttgttggtctatattttgttgcgacaacgagagttaacgtgtcaccctttcttgttttggagcttctacaaaagattgctcgtgttattaaagattatcttg

SEQ ID NO: 150726 - DNA, 391 bp, Arabidopsis thaliana columbia
attgtggttaaaacaaaaaggggggaaattaccgttatgtataatgactcttttggtgggaaagagcggaactcaatatgcacatggacatgtgaatgatattctactacgaaaaccaccacatgactaccgcgaccagacgtagcgactcggaagttgagagaatctactcatgttggatgagggaacacgctaagaagaagatgaatgaaaacggtcttggtgcagagaaagatcaaagattcgtgatctttaaagataatctttgtttcatcgttgaacataacaccaaaaacctcaggtataaacttgaattaacccgatttgctgctttaaccaatgaggaggaccggtctatggaccttggtgctaaaccgatcaaagggttttg

SEQ ID NO: 150727 - DNA, 425 bp, Arabidopsis thaliana columbia
  unsure (1)..(425): unsure at all n locations
gtaaggctcactttgttttagctttctcctctacttcgataatgccgtttgctccttccttgttgtcatcgtcttcctcagtctctcaatttcttcccagattccccaacgcgactagattcaatgtaactccacggagcagagccgccaccgtcgtcgcggcatccgtcaccgacctagccggggtcgacagtacaacaatcgccgtactcggtggaggatccgtagcagcactcgcggcgatggtttccttaacggatccggagaggaggcggaaattgcaggcggaggaagttggcggaggcgataaggaggttgtgagggagtatttcaatagcacggngttcgagaggtggaggaagatctacggtgagactgatgagtgaatcgagtacaagaggatattcgactcggtcatgctaaga

SEQ ID NO: 150728 - DNA, 327 bp, Arabidopsis thaliana columbia
cccccacatttctatatctctctctcgcgctgcttcgagaatcttgtgtaacatcctctttttttacaagagaaaaatggcctgtggagaggatatacacacacttgtgtgacacaatggcactggaatggaaaacgctggtttctctggagaatacgccccgagcgcagtgttcccaaatagtggtgggcgctctacgcacactggtgacatgggtggtatggcacaaagagactcacacggtggatatgaatctcaccacaagagaggtattctctctgtaaagtatacaatcgcacatcgtattgagagacactggtatcacat

SEQ ID NO: 150729 - DNA, 426 bp, Arabidopsis thaliana columbia
tttgactccactttccaaaaaaaacaaaaaaaaataaatactaatataaaaaattctcaaatctaaaatttcagatttcagaaatcgccatggcttcagtgactctaggttcatggattgttgttcaccaccacaatcatcatcatccatcttcaatccttaccaaatccagatccagatcttgtcctataactcttactaaacccatctcctttcgatcaaaacgcaccgtttcatcatcttcttcaatcgtttcttcttccgttgttacaaaagaagacaatctacgccaatctgaaccatcctctttcgatttcatgtcgtacatcatcaccaaagccgaattagtcaacaaagctttagattcagctgttcctctccgtgagccactcaagatccacgaagcgatgcgttactctcttctcg

SEQ ID NO: 150730 - DNA, 406 bp, Arabidopsis thaliana columbia
gatttatgtttggtctttttttatcgtttcggtttcggcgtttgatgtcaacgacggcgttgatctacctatcggataggtggttggtggagccgagcctcaggttttgacctcagaggatcacttttctctcttcaagcggaagttcgttacggtctacgctttcaacgaggagcatgactatagattctcggttttcaaagcgaatctaatgcgagcgaggcgtcaccagaagttggatccgtcggcgactcatggtgttacgcagttctcagatctgactcggtctgagttccgcaagaagcacttgggtgttagaagtggctttaagcttcctaaagatgccaacaaggctccgattcttcctaccgaaaatgtccttgaggattttgattggagagatcat

SEQ ID NO: 150731 - DNA, 349 bp, Arabidopsis thaliana columbia
  unsure (1)..(349): unsure at all n locations
gagaagcgtttataccccggaggcaagttctttgacccgctaggtttagcggctgacccggagaagactgctcaacttcagttagctgagatcaagcatgcacgtcttgcgatggtcgccttcttgggattcgcggttcaagcggctgcaacaggtaaagggccactcaacaattgggctactcacctcagtgatccactccacaccaccatcatcgataccttctcctcatcttaaaatcattatcatgtgagattctatttgtaacttatgtaaaaacagagctatgatgatactgaatcgactttgggcttttgcttaanagctaatttaaccaatgaggagtacc

SEQ ID NO: 150732 - DNA, 412 bp, Arabidopsis thaliana columbia
atcaaagaaagaagatggaatctgaatgactcgaatcacatcttctgaataagcacgaagaagaagcttcttccttcacttctggtcttcttctcagcacatccgtcgttgtcgctggatccttctgttatggctgcgccatgtcatattcgtcgcctgctcagtccaaaatcatggaagaactgggactttccgttgcagattattcgtttttcacttcggtaatgacattaggaggaatgattaccgccgtgttcagcggtaaaatctctgctctcgttggtcgtcgacagacaatgtggatctcagatgtttgctgtatttttggttggctcgctgtagccgttgcacatgatattataatgcttaatactggacgactctttcttggtgttggggttggtctaattag

SEQ ID NO: 150733 - DNA, 327 bp, Arabidopsis thaliana columbia
atcttggttgaaagatagagacgaaattggaagcgtcgatgaacaaccacgagggagactgatgaacgagcgggccgatttatgcgacacctctactagcgatgactggtgcacgagaaaaactaatatatggtgctgccatatacactggaaccgggcaagcgaagacagattacttagctactgacgatgtgggaccgagttcattcacatactcgagtgttatgcacagattaccaatgccttaccttgaagatgaacttcatcactcatgctggaactcatgtagctctcgctatggtgattcttcttgcgagagacgttatc

SEQ ID NO: 150734 - DNA, 392 bp, Arabidopsis thaliana columbia
ccgtccgacatagtcctttttttttataaaggttttttcacaaccaaatttccattataaatcaaaaaataaaaacttaattagtttttacagaagaaaagaaaacaatgagaggtaaatttctaagtttactgttgctcattactttggcctgcattggagtttccgccaagaagcattccacaaggcctagattaagaagaaatgatttcccacaagatttcgtttttggatctgctacttctgcttatcagtgtgaaggagctgcacatgaagatggtagaggtccaagtatctgggactccttctctgaaaaattcccagaaaagataatggatggtagtaatgggtccattgcagatgattcttacaatctttacaaggaagatgtg

SEQ ID NO: 150735 - DNA, 392 bp, Arabidopsis thaliana columbia
ccccattaaacaaaaaaaaatcaaatctctctctttctctctctaatggcggcgacattaggcagagaccagtatgtgtacatggcgaagctcgccgagcaggcggagcgttacgaagagatggttcaattcatggaacagctcgttacaggcgctactccagcggaagagctcaccgttgaagagaggaatctcctctctgttgcttacaaaaacgtgatcggatctctacgcgccgcctggaggatcgtgtcttcgattgagcagaaagaagagagtaggaagaacgacgagcacgtgtcgcttgtcaaggattacagatctaaagttgagtctgagctttcttcttgttgctctggaatccttaagtccttgactcgcatctgatccca

SEQ ID NO: 150736 - DNA, 183 bp, Arabidopsis thaliana columbia
  unsure (1)..(183): unsure at all n locations
cgggaagnaacgggggggcccacgccgtccgaaaaacataagctaagaaaacgaaactcatctaattttgttatcacccaaaaagaaggggaaacacaatggctttcgctttgagggtcttcacatgccttggtttaacggggtgcataggtgcatcaagcgatgctggaattttatgtggga

SEQ ID NO: 150737 - DNA, 420 bp, Arabidopsis thaliana columbia
gtgctgccaccgacaccagctccagcaccagccccggaaaatgtgaatctcaccgagcttttaagtgtagctggtccgttccacacattcctcgactaccttctctcgactggagtcattgagactttccaaaaccaagctaacaacactgaggaaggcatcacaatctttgtccctaaagatgatgctttcaaagctcagaagaatcctcctttgtcaaatctcacaaaggatcagcttaagcagcttgttctcttccatgctctgcctcattactattcgctttcggaattcaagaacttgagccaatctggtccagtgagcacctttgctggtggtcaatactccttgaaattcactgatgtttctggcacggttaggattgattctttatggaccaggactaaagtcagcagcagt

SEQ ID NO: 150738 - DNA, 357 bp, Arabidopsis thaliana columbia
gaagaagaagaatggagttattcaataatggaacggccgttagattacggagctgtcacgatacatacatctacgccgtcgaggatgaaaaaaccgtccgtcaaagctctgacggaacctcacggcaatcgctatggacggtggagatggttccacgtaaaccaaaattcatacgtctcaagagctgctacggcaagtatttaacggcgagcgagtcgtcgtttcttctgggaatgaccggcgcgaaagtcatccaaacgccgccgtttcgtcaagcggagcatgaaagcgactgggaaccaatcaaagaagagtcaacggttaaactcatgtcgtggaacgaggaatatttacgtg

SEQ ID NO: 150739 - DNA, 426 bp, Arabidopsis thaliana columbia
  unsure (1)..(426): unsure at all n locations
actgacacaaaagggaatgcgcttcatgcgggtcatcctcttaatctcaaactctctaggactacactaaatctaactttttgcagagagcaaaagattcaataattgagattgatctcaaaaccaaagctctcgtgctcttgtcgttgatgttggttgtgtagactttgtatacaatgatgaaaagtttggcgaatgctgttggagcgaagacggcgagggcttgcgacagctgcgtgaagagacgtgcacggtggtactgcgcggccgacgatgcttttctttgccagtcttgcgacagtttggtccattcagcaaaccctcttgctcgccgccacgagagagtccgtttgaagacggctagcccggcggtcgtaaagcatagcaaccactcatcagcttctnctccacatgaggtcgccacgt

SEQ ID NO: 150740 - DNA, 416 bp, Arabidopsis thaliana columbia
gaaaacttcgtctctcttctctgcttcgccctctcatttcctgtgagataaaggcggagtctctctccagttattttgctcatccatcgattcttagagttcaaaatggttgatcaagttcagcaccccactattgcgcagaaagctgccgggcagttcatgcgttcaagtgtttccaaggacgttcaagtgggttaccagaggccttctatgtatcaaagacatgcaacctacggaaactactccaatgctgcatttcaatttcctccgacatcccggatgttggcaacaactgcttctcccgtgtttgtccaaaccccaggagagaaggggttcactaactttgcccttgactttctgatgggtggtgtttctgctgccgtctccaagactgctgctgctcctattgaacgtgt

SEQ ID NO: 150741 - DNA, 423 bp, Arabidopsis thaliana columbia
agagcacaaccaccgtgaatcatccgtcggagaaggtgggagttcatcaatgacgacggtgattaaagaagaagctgccggagttgacgagcttttggttgttttaggttacaaagttcgatcatccgacatggctgacgtggcacacaagcttgaacagttagagatggttcttggtgatggaatctcgaatctttctgatgaaactgttcattacaatccttctgatctctctggttgggtcgaaagcatgctctcggatcttgacccgacccggattcaagaaaagcctgactcagagtacgatcttagagctattcctggctctgcagtgtatccacgtgacgagcacgtgactcgtcggagcaagaagacgagaattgaatcggagttatcctctacgcgctctgtggtgttttggat

SEQ ID NO: 150742 - DNA, 364 bp, Arabidopsis thaliana columbia
ccgcaatggagaagcagagaaccgtagactcggttttcgcagcagcaaagaccactgctcaaagaggagacgcgttgcacatcagaatcgtagcgatcaagaaactgttggcaaagctagaagcagagaaagtggacgttgattcaaagttcacctctttaacgacgagtctgtcagagcttctcaaggaggcgtcacaggcttacgaagagtatcacgaggcggtgcataaggcaaaggacgagcaagcggctgaggaatttgcggtggagacgacaaagagagcagaacatatttgggttgagtttcttagttcacttaattgaactaatgagattcttgattgtggttaaagcacatgttc

SEQ ID NO: 150743 - DNA, 370 bp, Arabidopsis thaliana columbia
gaagaagaagaatggagttattcaataatggaacggccgttagattacggagctgtcacgatacatacatctacgccgtcgaggatgaaaaaaccgtccgtcaaagctctgacggaacctcacggcaatcgctatggacggtggagatggttccacgtaaaccaaaattcatacgtctcaagagctgctacggcaagtatttaacggcgagcgagtcgtcgtttcttctgggaatgaccggcgcgaaagtcatccaaacgccgccgtttcgtcaagcggagcatgaaagcgactgggaaccaatcaaagaagagtcaacggttaaactcatgtcgtggaacgagaaatatttacgtgggaacggaggagc

SEQ ID NO: 150744 - DNA, 427 bp, Arabidopsis thaliana columbia
aaaaaaaaacacaaaaaagtttcaatggccttctcaacaatggctctctcctcccctgctttcgccggaaaggctgtgaacctttcccctgcggcatcagaagtccttggaagcggccgtgtgacaatgaggaagactgttgccaagccaaagggtccatcaggcagcccatggtacggatccgaccgagtcaagtacttgggtccattctctggcgagtcacccagctaccttaccggagagtactctggagactactgatgggacacagctggactatccgctgaccccgagacattcgcaaggaaccgtgagctagaagttatccacagcaggtgggccatgctcggagccctaggctgcgtcttccctgagcttttggccaggaacggagtcaagtttggagaggcagtttggttcaaggctg

SEQ ID NO: 150745 - DNA, 377 bp, Arabidopsis thaliana columbia
ggtgggtaaaaaagagaagaaagaaaaatggtgctaaaggtgtacggacctcactttgcttcaccaaagagagctttggtcacactgatcgagaagggcgttgccttcgagaccattcccgtcgatctcatgaaaggagaacacaagcagcctgcttattttgctctacagccttttgggactggtactgctgttgttgacggggactacaaaatcttcgagtcccgtgcggtgatgaggtacgtagctgggaaggacaagtcacaaggacctgatcttttggggaaaaccgttgaagacagaagtcaaggtgaacaatggcttgatgtggaagcgaccacttaccacccaccgctattgaacttaacgcttcacat

SEQ ID NO: 150746 - DNA, 420 bp, Arabidopsis thaliana columbia
  unsure (1)..(420): unsure at all n locations
atcataagcccacccacttcgattaccaactccgaccgccagagacagcgagtttcagatcaaagatgtcggcgacgcttacaggatcgggaactgctttggggttttcgtgttcctcgaagatctcgaaaagagtttcttcttcaccagcttctaaccgatgctgcatcaagatgtctgtttccgtcgacgagaagaagaaaagtttcagtcttcagaaatctgaggaagctttcaatgctgctaagaatctaatgcctggaggtgtgaattcccctgttcgagcattcaaatccgttggtggacaacctgttttgattgattctgttaaaggctcaaaaatgtgggacattgatggaaatgagtatattgactacgttggctcttggngacctgctattattggccatgctgatgacg

SEQ ID NO: 150747 - DNA, 413 bp, Arabidopsis thaliana columbia
gattaatcatccccatttggatctgtttgaaactcttagggaagaacatggcaggagctgcctccgcgctgtttctgcttgatatcaagggacgcgttctcgtctggcgtgattatcgtggcgatgtctccgctgctcaagccgagcgattcttcactaagctcatcgagaaagagggtgattcacagtcaaatgatccagttgcttacgataatggggtgacttatatgtttgtacaacatagtaatgtatacttgatgatagcatccaggcagaattgtaatgctgccagtcttctcttctttcttcaccgcgttgtcgatgttttcaagcattacttcgaggagttagaagaggaatcattgaaggataactttgtggtagtgtatgagctacttgacgagatgatggac

SEQ ID NO: 150748 - DNA, 337 bp, Arabidopsis thaliana columbia
cgtccgcccacgcgtccggcttatttgggggatcttcaaccttttatcataaccatggatcctgacaagtatcgtccttcaagcgcgtacaacgccccattctacaccacaaacggtggtgctccagtctccaacaacatctcttccctcaccatcggagaaagaggtccggttcttcttgaggattatcatttgatcgagaaggttgctaatttcaccagagagaggatccctgggagagtggttcatgctagaggaatcagtgctaagggtttctttgaagtcacccatgacatttcaaacctcacttgtgctgattttctcagagcccctggtg

SEQ ID NO: 150749 - DNA, 362 bp, Arabidopsis thaliana columbia
gagagagagagcaatggccaatgcgaagcccttttgtctcctcggcttcttttgtctgttattacagttattctccatcttccatatcggaaatggggaattggagatgaactattacaaagagagttgtccaaaagcggaagagataataagacaacaagtggagacgctttactacaaacacggtaacacagccgtatcttggctccgtaatctcttccatgactgtgtcgtcaagtcgtgtgatgcgtcgctgctgctagagacagcgagaggtgtggaatctgagcagaaatcgaagaggagtttcggtatgagaaactttaagtacgttaagattatcaaagacgcactcgagaaag

SEQ ID NO: 150750 - DNA, 278 bp, Arabidopsis thaliana columbia
gttgaagctttcgtgtaatgtgactgattctaagttacagagaagcttactcttggtctcccattcatatcgatctgatccggtgaatttcatccgtcggagaattgtctcttgttctcagacgaagaagacaggtttggttcctttgcgtgctgttgtatctgctgatcaaggaagtgtggttcaaggtttggctactctcgcggatcagctccgattaggtagtttgactgaagatggtttatcttataaagagaagtttgttgttagatcttacg

SEQ ID NO: 150751 - DNA, 230 bp, Arabidopsis thaliana columbia
cttaaccctcaatcaaaccaaccaaccaaaaaaccatgatgcagcgggttttcaccttgggaaaaggaagaagcgaaggcaacacgggcatgaagtccttgttgggagggaaaggagccaacctggcggagatggctagcataggcttgtcggtgccgccggggctaaccatatcgaccgaggcttgtcagcagtatcagatcgccggcaaaaagctttcacaaaggtta

SEQ ID NO: 150752 - DNA, 433 bp, Arabidopsis thaliana columbia
caaacaagaactcaaacacttcataactaaacatcctttaaagccttttcaaaaactgaatcatgtcaagcaactgcggaagctgcgactgtgctgacaagacccagtgcgtaaagaagggaaccagctacaccttcgacatcgtcgagactcaggagagctacaaggaggccatgatcatggacgttggtgccgaggagaacaacgcaaattgcaagtgcaagtgcggctcctcttgcagctgcgtcaactgcacttgctgccccaactaatgaagcttctttaatcaaaatgtaatatgaataaaagttgatgtgggctcatctattgagctcatgtctctcttattactactctctagtatggtgtgatgtaatgggttatgacccttctttcccttccctataaaactaaagaaacttgcaagataaat

SEQ ID NO: 150753 - DNA, 400 bp, Arabidopsis thaliana columbia
tccgaaaagaaaaaaaggctttttaactgaaattgaaacacaagatgggatgctcttcatacgctggcagatctatcgctggtgatgcctggaactggcactggtactgggtcattaagtcaaggctgggggaaaaaaagctggggaagcttatgtttcagattttaaagggactgatccggcattcatgtctaaaagtagttctcttagaaacttcaaacagagaagatacggcagcaatgacctttgtaaccctgaactcgagagaaaaagtccaagtagttctttaatccaaaagagacggcagaaagcattaccagctaaagttcttaaagatgagcttgctgcaagctcacaagtcatagagccttgtaatagcaagggaataggtgaggaatat

SEQ ID NO: 150754 - DNA, 427 bp, Arabidopsis thaliana columbia
atcggatcacaagccaaagttccagtcgacgaccaattccgagtggtcaacgaaggtggctcaccgattacagtcccatcgaatacaaccccgacgtacgtggcttcgtacccttcagtgacaacttccgtctctgtttctacaacacaaccccaaacgcatacactctcgctctcagaatcggaaacagagtccaagaatccactctcagatgggtctgggaagcaaacagaggctcaccggtcaaagaaaacgcgacgttgacttttggcgaagacggaaacctcgtactcgctgaagccgatggacgcttggtatggcaaacgaacacagctaacaaaggcgccgtggggatcaaaatcttggagaatggcaatatggtaatatacgattccagtggaaaatttgtatggcagagctttgattt

SEQ ID NO: 150755 - DNA, 415 bp, Arabidopsis thaliana columbia
aagagataaatggagtttgtgtctcgtaacttatcctgtgagcgaaaatggtgagggcaactaaggcagagaagaagatcgcctacgataccaagctatgtcagcttatcgatgagtacacccagatcttggtcgttgcggccgataacgtcggatcaactcagcttcagaacatcagaaagggtcttcgtggagactccgtcgtgcttatggggaagaacactatgatgaagcgttccgttaggattcactctgagaacaccggaaacactgcaatcctgaatctgcttcctctccttcagggaaacgttggtttgatctttaccaaaggtgacctcaaggaagtgagcgaggaggttgctaagtacaaggttggtgcccctgctcgtgtgggtttggtggctccaattgatgt

SEQ ID NO: 150756 - DNA, 410 bp, Arabidopsis thaliana columbia
gatctttgtgataacaatcttccaccatgggaacaaagtttttagctctgggtgggtctctgtgtcttgttctctcaagcttctatcaagtttcttgccaggatgaaggaactggaagtttgagtactttagatctaattgagcatgaatatcaaactagtgtcaattctcttcaaggcaatgaagcagtagatcaaactgagaccagtggtcagaaaaacagtacagtgtctgataacaacactatttctttgtctctatctgaagaacctgcattggaaactcttaaagaatctgttgatacatcagctgagttaggagctgttactgatgaagtcgataaaccttcaagtatgttggaccatattgaacttgagttcgaagcacatatcaatgaacttaaagaagct

SEQ ID NO: 150757 - DNA, 399 bp, Arabidopsis thaliana columbia
  unsure (1)..(399): unsure at all n locations
cttcaccaaatcgattcttcttcaaccatgtcttccttcacctccaaattcgccgatgagctgattgctaacgctgcttacatcggaacacctggaaaaggtatccttgcggcagatgaatcaactggtactattgggaaacgtctcgctagcatcaacgttgagaacgttgaatccaacagacgtgctcttcgtgagcttctcttcactactcctggagctcttccttgcctcagtggtgttatcctctttgaagaaactctttaccagaagagctctgatggtacgccttttgttgatatgtcgaagagtgcaggagttttgcctggtattaaggttgataagggtaccgntgagcttgctggaaccaatggtgagactactactcaaggtcttgat

SEQ ID NO: 150758 - DNA, 444 bp, Arabidopsis thaliana columbia
  unsure (1)..(444): unsure at all n locations
ccgtccggccggtcccgatatgtgaggttcgttaccgcctggcgaaaattttcatcgggaaacttatctggatcgtttaccgccggcgaaaatttccatacggaaaccttaatctgatcggaaggaagaaggctcgatgaagagcagattgaagagctacaggaggaagaagctagggttagccacagatatcgncttctggtctctctgtttcctcttcggtttctatggcttcactctactttctcagaatgtgcctcgtgttaaacccaagttgagaatgttggatatggttgagaatggggaagaagaagctagctcgatgcctcatggtgttactggagaagaatctattggatcgattccttttcaggtacttagttggagacctagggctatatattttccgaattttgcaactgcagaacaatgccaagctattat

SEQ ID NO: 150759 - DNA, 327 bp, Arabidopsis thaliana columbia
gagaacttgagaaaggcctcttcagcaacaaacattgttgatgatctcagttgcgaatatttggagcttcccaatctggtgggtttcaagatgttgatggagaaactgaagagagacgacgtgccaggctggaacgtcaccagaggacacaggagcgggctgcaaaagcacttgctgagaaaaatgaacgtgatcttcaagtacaaagagaacaagctgagaaagataggattgggtgggaccctggatgatgagatacgaaggtatattgcagggaaggagggaaacttgtgtgcttttgctttaacattacaatttgttttttgg

SEQ ID NO: 150760 - DNA, 420 bp, Arabidopsis thaliana columbia
ctcatattgcttatattttcctacaacactctctcaacaaaaaaacaaaaaaaaaggacgttctttctttgtttgtatttagaagaaaaatggctaccaattacaacgagaagcttcttcttaattatgttcccgtttacgttatgcttccgttgggagttgtgaatgtggaaaatgtatttgcggacccagaaacgcttgaaacgcagcttaaacgtctcaaagaagaagctggcgttgatggcgttatggtcgatgtttggtggggaatcatagaatccaaaggtcccaaacaatatgattggacggcctacaaaacgctgttccagctgatcgcacggttgggactcaaaatccaagcaatcatgtcttttcaccaatgtgggggaaacgttggcgacatcgttactattccgatcc

SEQ ID NO: 150761 - DNA, 411 bp, Arabidopsis thaliana columbia
ataatatattgcttcctatagtgtctttatccctctcaaattttcttttctctctgcctctcccacaatcacaagataggaaaattgatccacaaagaatcgtctgaatgaagacaacagttgtttatctggtgattctatgtctcattgtttcatgtaccaatggagaaaccaaacatgtaagaaaaattaactccgatggatccgaagcttggggatacgtcgaagttagaccaaaagcacacatgttttggtggcattataaaagtccatatagagttgaaaatccttccaagccatggcctatcatcctctggctccaaggtggacctggagcttcaggggttggtatagggaattttcaggaggttggaccattagacacatttctcaagcccagaaactcaactt

SEQ ID NO: 150762 - DNA, 386 bp, Arabidopsis thaliana columbia
gattcagactctgaacgattactgcaaaccattgcttgagtttctgagctcgcttggctcagatgacggtaaggtgattgttgttgctcatagcatgggaggaatatccgctgcacttgctgctgacagcttcgcttgtaagattgccgctattgtctttttgacagctttcatgcccgacacaataaacccacctgcttatgtttacgaaaagctgctcagaagcattccacaagaggaatggttggacaccacgtgtgtgaactacgggaaacctgattttcctctacagtatactcttttgggaccaaagtttatggccaagaaaatgtatcaaaactcttcagttcaagatcttgaagtggtgaagacattagtgagggaaa

SEQ ID NO: 150763 - DNA, 393 bp, Arabidopsis thaliana columbia
cgaagatattatttttcatggattgagcaaagaagaggacgataatttcgaaaagatcgcgatacaatggacaagttctcgtacaattcgtatccagattcagctgaatcgtcgccaagatctcgcgatgtcgaatttgaaaatccgtcgccatgggaggaccagcagcagcagaactacaaggtgaagctcatgtgcagctatggcggcaagatccagcctcgtccacacgataaccagcttacttatgtaaacggcgataccaaaatcatgtcggtcgatcgtggtatcagatttccggctttagtatcgaagctctccgccgtctgcagcggtggtggtgatggaggagaaatctcgttcaagtatcagctttcatgtgaagaactagat

SEQ ID NO: 150764 - DNA, 424 bp, Arabidopsis thaliana columbia
tgaacaaggtggccataatgtacctgtggccgctggtgcaggtgacaccaacatgtgcggaggcattgtgcagatgttttgggataaaatattaggtagatgcttggactttgatgatcaaattcgccagacctctctcaagatagtggaagttgtactacgtcaaggcctagtgcatcctattacgtgtgttccttatttgattgccctcgagacagatcctcaagaggccaaccaaaagctggcccatcatttactaatgaatatgcatgagaagtattcggctttttttgagagccgtcttggtgacggacttcaaatgtcgtttatcttcatgcaatccatcagccaggtcactttagaaccaaatcaaagtctttagcaaaagggtttaacaaacatgtttgggcaaaatgatcatgct

SEQ ID NO: 150765 - DNA, 409 bp, Arabidopsis thaliana columbia
gttactgtgtcactgtcccttcttgggttgaccttcccaagtcaagcgtttcagatcctgccgtgttttatagagtgcaagtagcgatacaatctcctgagggaatcacttctgctaggctggtacttaggaggttcaatgatttcttggagttatattcgtctattaaaaaggagtttgtgaagaaaagcttaccccaggcaccaccaaagaagattctgaggatgagaaaccagacacttttggaagagaggaggtgctctctggaagattggatgaatagacttttgtcagatattgatatatccagaagcgctcttatagctacatttcttgagcttgaagctgctgtcaggtcttattttaatgatgaatatcaagaaactgaagatacctctggggacattcc

SEQ ID NO: 150766 - DNA, 416 bp, Arabidopsis thaliana columbia
caaagaaaaagtctgtttatcatcttcttcttcttcaaatcgagatcgaagaagggccaacaaaaaaccaaaaatggagacgaagccaaaccctagacgtccttcaaacacagttctaccatatcaaacaccacgattaagagatcattaccttctgggaaaaaagctaggccaaggccaatttggaacaacctatctctgcacagagaaatcaacctccgctaattacgcctgcaaatcgatcccgaagcgaaagctcgtgtgtcgcgaggattacgaagatgtatggcgtgagattcagatcatgcatcatctctctgagcatccaaatgttgttaggatcaaagggacttatgaagattcggtgtttgttcatattgttatggagggttgggaaggtggtgagctttttgatc

SEQ ID NO: 150767 - DNA, 283 bp, Arabidopsis thaliana columbia
acaagctcgaagagaagaaggaaagcaaaattctgaagtttctggggttcatgtggaatccgctttcatgggttatggaagctgcagctctcatggccattgctttggctaatggtgataatcgacctccggattggcaagattttgtgggtattatctgtctgcttgttatcaactccacaatcagtttcattgaagaaaacaacgccggaaatgctgcaactgctctcaatggctggtcttgcttcttaaaaccaaggttcttagggatgggaaatggagt

SEQ ID NO: 150768 - DNA, 409 bp, Arabidopsis thaliana columbia
aaaaaaggaaaccccaaaaccaaggtttttattggcttcctaaaccatggctttgtcctcccctgccttcgccggaaaggctgtgaagcctgccgcatcagatgtcctcggaagcggccgtgtgaccatgaggaagactgtcgccaagccaaagggtccatcaggcagcccatggtacggatctgaccgagtcaagtacttgggtccattctccggcgagcccccgagctaccttaccggtgagtttccccggtgactacggatgggacaccgctggtctatccgccgacccagagaccttcgccaggaaccgtgagctagaagttatccacagcagatgggccatgctcggagccctaggctgcgttttccctgagctattggctaggaacggagtgaaagtcggaga

SEQ ID NO: 150769 - DNA, 422 bp, Arabidopsis thaliana columbia
ggagagaagagagaaagagagaaagagagacagagataatggcgtacagtgcgtgtttcctacaccagagcgcattggcttcatcagccgcacgatcatcatcttcctcctcatcccagcgtcacgtgtcgctctccaaacctgttcagatcatctgtaaagctcaacagtctcatgaagacgataacttcggccgtctcccgccgtcttgctctcactcttctcgtcggcgccgctgctgttggttccaaagtatctcctgctgatgccgcctacggtgaagctgcaaacgtgtttgggaagccaaagacgaacacagacttcttgccatacaatggagatgcgttcaaagtgcacgttccagcaaaatggaacccaagcaaagagattgagtatccaggacaagtgcttaggttcgaaga

SEQ ID NO: 150770 - DNA, 425 bp, Arabidopsis thaliana columbia
  unsure (1)..(425): unsure at all n locations
tcaaaaccaaaatcactaaagaggagaagattgctaaagtttgataaaacattccaaaatcaatggctgataggatcaaaggtccatggagtcctgaagaagacgagcagcttcgtaggcttgttgttaaatacggtccaagaaactggacagtgattagcaaatctattcccggtagatcggggaaatcgtgtcgtttacggtggtgcaaccagctttcgccgcaagttgagcatcggccgttttcggctgaggaagacgagacgatcgcacgtgctcacgctcagttcggtaataaatgggcgacgattgctcgtcttctcaacggtcgtacggacaacgccgtgaagaatcactggaactcgacgctcaagaggaaatgcggcggttacgaccatcggngttacgatggttcggaggatcat

SEQ ID NO: 150771 - DNA, 426 bp, Arabidopsis thaliana columbia
gaagaagaggacgacgaagaagatgcagtgacaacatgaagaagaagaaacagtctcatctcgccggagaagaagaaagatgtcggggcaatcatacgtcgatgaccatctcatgtgcgaggtcgaaggcaaccacctcacacacgccggcatcttcggccaagacggcagtgtctgggctcagagctcagctttccctcagttgaagcctgcagagatagcaggaatcaacaaagactttgaagaagccggacatcttgccccaaccgggctattccttggcggtgagaagtacatggttgtccaaggtgaggctggagccgtcatccgagggaaaaagggacctggtggagtcactatcaagaagactactcaagctctagtctttggatctatgatgaaccgatgaccggagggcaatgcaac

SEQ ID NO: 150772 - DNA, 416 bp, Arabidopsis thaliana columbia
gagagattcaaaaatccgattccagatccattcctgggcaaacaaaggttggtgtttcgctaatctcaaagcttttttcaaattcggaaaaagcaaatcgtgggaagagattcatcttctctctgtgcgttcatcggatctcggagcttttggttcgtcgtcaatggcggaagagacggagaaaaagtacattacgaacgaagatcttaaaaaacacaacaaatctggagatctatggatcgcgattcaaggcagggtctacaacgtctccgattggattaaaactcatcccggaggcgacacggtgattctcaatctcgttggtcaagacgtcaccgatgctttcatcgcatttcatcccggaaccgcttggcaccatctcgaccatctcttcaccggttaccacatcagagatt

SEQ ID NO: 150773 - DNA, 415 bp, Arabidopsis thaliana columbia
ctcattatcgatacagacccaggaattgatgatagcatggcgatattgatggcgtttgaaacaccggagctggagatattaggattaactactgtgtttggtaatgtttctacacaagatgctactcgcaacgctttactcttgtgtgagattgctggctccctgatgttcccgttgcagaaggaagttccgaacctttaaagggtggaattccgcgtgttgctgattttgtgcatggtaaaaacggactaggagatgtctttttttctcctccgagtagaaagaaatctgagaaaagtgcagctgagtttctagatgagaaggtcgaagaatatccgggtgaagtcaccattctcgccctcggacctctaaccaacctggcattagccatcaaacgcgatagttcatttgcgag

SEQ ID NO: 150774 - DNA, 288 bp, Arabidopsis thaliana columbia
agggttttgagcaaaaaggagtgatgagagctaagtggaagaagaagcgtatgaggagattgaagaggaagagacgaaagatgagacagcgatctaagtagaccaaatctactccacaagtctttcgcttttcccctctgcattttgtgtttcatttgcttcagtttgttcccagaatttgtcttagtttccagatattgctgttgttggattaatggattttcagtttgatcttcctttgtctattaatttacgatttaatatttgtctctaagcttatattatctc

SEQ ID NO: 150775 - DNA, 383 bp, Arabidopsis thaliana columbia
tcaaaaccaaaatgactatggacgaaacatccgccgctgctgcagctgcttcttccatcatgggtactcgggtggctcccggtatccatcccggttcaggtcggttcacagccgtgttcggtttcggaaagaagaaggcagcttccaaaaagagtgccaaaaagacggtgactacggaccgggctatttgggacccaggcgccatttctactgactggcttgatgggtccttggttggagattacggttttgatcccttcggtttaggcaaaccggccgagtatcttcaattcgatatcgattcactagaccagaatctggctaagaacttggccggagacgtgatcgggacccgtacggaagctgtcgacgccaaatcgacg

SEQ ID NO: 150776 - DNA, 370 bp, Arabidopsis thaliana columbia
  unsure (1)..(370): unsure at all n locations
gaagaagaggaagaagaagatagatgcttttgacaacatgaagaagatttaacagtttcatctcggctggattgattatatgctactgagaatctttaatttctgcaacttttgtatctcttgctgatcaccaaataagaaaactctcgtggatctattgaattgggtttccactatctttattggagagatggagtcttcaagtccccaccattagtcacattgttgaggataatgttggaaaatatgatgaagagagaataattgtggcgatgtaagtctgtggagaagcaccatgtgggttttcagattctaaagatgcttccggngatgctcacgaacgctctgcttctatgcggaagctttgtat

SEQ ID NO: 150777 - DNA, 430 bp, Arabidopsis thaliana columbia
  unsure (1)..(430): unsure at all n locations
attgaaatggagctcagcttgagcacttcctccgcttctcctgcggttttgaggagacaagcttctcctctgcttcacaagcagcaagtgctcggcgtcagctttgcttccgcgctcaaacctggaggaggagctcttcgatttccttccctccgtccgcttcctcgtcccatcacttgctccgcctctccatcaactgccgaaccagcctccgaggtgaagaagaagcagttggataggagggataacgtgaggaatatcgcaatcgttgcacatgttgatcatggcaaaactactttggttgattctatgcttaggcaagctaaggttttccgagataaccaagtcatgcaagagaggatcatggactcaaatgaccttgagcgtgaaagaggaatcactattcttagcaaaaatacctncatcactt

SEQ ID NO: 150778 - DNA, 415 bp, Arabidopsis thaliana columbia
gccctccattttcctcgatcaaatcaattgcagagctataagaggaatgcaaaatgggtctctccaatagcagctgttgtacctaacttccatcttcctatgcgcagtctcgaggataaaaacaggacaaacacagacgacataaggtcccttagagtgatcacagccattaagacaccgtatttacctgatggaagattcgacctccaagcatacgatgacttagtcaacacgcagatagaaaacggtgctgaaggtgtgattgttggtggtacaactggtgaaggccaattgatgagctgggatgagcacataatgcttatcggccatactgtaaattggtttgggggaaggatcaaagtcattggaaacactggaagtaactcgactagggaagctattcatgccactgagc

SEQ ID NO: 150779 - DNA, 268 bp, Arabidopsis thaliana columbia
gtcgtcttcagcttcatcggccgttgcatttcccggcgataagagagagaaagatgagaaagagtgagccagatcttcatcgtcgtggttcttgtttcttcctcgatctctcgatcttctgcttttgcttttccgattaagatcgtagaccatggccgttgctgatgacattcaacctattgtctgagacaatggtacttgaatggtttacgctgtattcgctggatatgatgctcccactgcgtttttttctttttatttgttttct

SEQ ID NO: 150780 - DNA, 428 bp, Arabidopsis thaliana columbia
atgagatggcaggcaagaccaagactcatatagtaaaaatgttttgacaatcaaaggccaaataagcaaagagatctctgactctctatctgaaatctcaaaacggagaacgcgagggaacaagagattaaagcatagtgagaccctaagagagagagctttaggtctagaggggatcttcacaattcacacaacaactacgagataggatcgtgcgcgtcaaaagaagctggtactgctgattccagccgaagattagtctccgcttctggttgttccggtggagactcgtcggaaatgagaggtcttttcaaatccaaaccgcggactcccgctgatattgttcgtcagactcgcgatctccttctctacgccgatcgatccaactccttccctgaccttcgagagtccaaacgcgaggaaaagat

SEQ ID NO: 150781 - DNA, 395 bp, Arabidopsis thaliana columbia
ggaccggaacggaagggccgacccacccgacccgactggctgtaccgcggaggcagcttctacccattgggtttggctaccgacccagaggcattcgctgagttgaaggtgaaggagctcaagaacggaagattggctatgttctctatgtttggattcttcgttcaagccatcgtcactggtaagggaccgatagagaaccttgctgaccatttggccgatccagttaacaacaacgcatgggccttcgccaccaactttgttcccggaaagtgagccaagttttatctgtattttgcttcagtctttgcttcgtgagtgtgagaggagaaagagagcttgtttagatgtaaaatttgcaagactttgtattttttttattaatcaaataactc

SEQ ID NO: 150782 - DNA, 433 bp, Arabidopsis thaliana columbia
agaaaaaaaaaaagaagagagaagagagaaatgtcgagagctttgtcagtcgtttgtgtcttgctcgccatatccttcgtctgtgcacgtgctcgtcaggtgccgggagagtctgatgagggaaagacgacgggacatgacgatacaacaacaatgcccatgcatgcaaaagcagctgatcagttaccaccaaagagcgtcggcgacaaaaaatgcatcggaggagttgctggagtcggtggattcgccggagttggtggtgttgccggcgtgggaggtctagggatgccactcatcggtggtcttggcgggatcggtaagtatggtggcataagcggtgcagctggaatcggtggatttcatagtataggcggtgttggcggtctaagcggtgtcggaggaggtgttggcggtctaagcggtgttggagggg

SEQ ID NO: 150783 - DNA, 429 bp, Arabidopsis thaliana columbia
  unsure (1)..(429): unsure at all n locations
ctttctgcacagatctttccatcgtaacaactacttcttcacacattaccactctgtccaccactcatctcctgttccacatcccatgactgctggaaacgcaacgttattggaaaacattatcctctgtgtcgtagctggtgttccattgattggatgttgcttgtttggtgttggatcattaagtgcgatctacggttacgctgttatgtttgatttcatgaggtgtttaggacattgtaacgttgagatattctttcacaagctgttcgagattcttccagtcttacgatatctcatctatactccaacgtaccatagtctgcatcatcaagaaatggggaccaacttttgtctatttatgcctctctttgatgttttgggcgatacacaaaacccaaactcatgggaactncaaaagaagattcg

SEQ ID NO: 150784 - DNA, 418 bp, Arabidopsis thaliana columbia
gccggcttcagggtatggtgatagcttttgcattcgtgaagccaaaacagaaccttttgctgtcaaagatcatagaggagaactatacaagaaacattatccaccggctgtacacgatgaagtctggagactggatcgaatagcgaaagacggagtgctacacaagaagctattgaaagctaatattgtgacagtcgaagacttccttcgactccttgttaaggatccacagaagctgagaaatttgcttgggagtggaatgtcgaatagaatgtgggagaacacggtggagcacgcaaagacgtgcgtgttgggtgggaagctttatgtgttttacacagaccaaactcacgctacaggcgttgtgttgaatgatatatatgaattgcgaggcctaattacaaacggacagttccta

SEQ ID NO: 150785 - DNA, 288 bp, Arabidopsis thaliana columbia
gatgaattgtgtcaaacttgttgatctgaatctcgctaagaacttcttgaccggaggaatccctaacagtttatctcagattgcttctttaaactcgttggatttctcagggaataggctaacaggtgaaatcccggcgagtcttgtgaagttgaagctgagtttcattgacttgtctggaaatcaactttcaggaagaataccaccggatcttttagcggtgggaggatccaccgcgttcttacgtaacgagatgctctgtgttgataaagagaacgctgaaacaaa

SEQ ID NO: 150786 - DNA, 416 bp, Arabidopsis thaliana columbia
cgttcttagcaatggcgaaactaaaccctaaattcatctctttgattcttttcgctctcgtggtgatcgtctctgctgaagttatcttcgaggagaaattcgaagatggatgggagaagagatgggtaaaatctgactggaagaaagatgataatactgctggggaatggaaacacacagctggaaattggtctggtgatgctaacgataaaggtatccaaactagcgaggactacagattctacgctatatcagctgaattccctgagtttagcaacaaggataagaccttagtcttccaattctctgtcaagcatgagcagaagcttgactgtggtggtggctacatgaagttgctaagtgatgatgttgaccagacgaaattcggaggagacactccttacagcattatgttt

SEQ ID NO: 150787 - DNA, 352 bp, Arabidopsis thaliana columbia
  unsure (1)..(352): unsure at all n locations
gaaaaaaggcggggacgccacgcgnccgctcaaaaccaaaatcactaaagattagttgattgctaaagcttgataaaacaggccgttggtaatggctgataggatcaaaggcccatggagtcctgaagaagacgagcagcttcgtaggcttgtggctaaatacggtccaagaaactggacagtgattagcaaatctattcccggtagatcggggaaatcgtgtcgtttacggtggtgcaacctgctttctccgcatgctgagcatttaccagtttcatcttgtgaacacttgactattatatattcctcacgctctggttgggtgggtggtgattattcttgtttttttttt

SEQ ID NO: 150788 - DNA, 388 bp, Arabidopsis thaliana columbia
cccacgcgtccgcccacgcgtccgatcatatgtcaaatggacagcaaaattggctggggagcttgacacaggagtgccatgggttatgtgcaagcaagatgatgcccctgatcctttggttaatgcttgcaatgggaggcaatgtggagaaacattcaaaggacccaattcacccaacaaacctgcaatatggactgagaactggacgagtttttatcaaacatatggtgaggaaccattgataaggtcagctgaggatatagcgtttcatgttgctcttttcatcgctaagaatggaagctttgtaaactactacatgtatcatggaggaaccaacttcgtgagaaatgcttcacagttcgtattcactagttattatgatcaggct

SEQ ID NO: 150789 - DNA, 433 bp, Arabidopsis thaliana columbia
ggagttttggtaacggatccgggttagcgggtaaggcgtttgctagctataacccggttttggttaccggttcggatctgatttacgggtcgggttgtgatcgggctaaacaaggaggggatgtagggttacagaccatcttgtgtattccttcacataacggagtgttggagcttgcattcacggaggagatccgaccaaattcggatctttttaataggatcctgtttctttttggaggatccaaatatttttctggagccccgaattcgaactcggagcttttcccatttcagttagagagcagttgttcaagtactgtaaccggtaacccgaatcctagtccggtttatctacagaaccggtataaattgaacttctcgacgtcatctttcacattggcgagagctccatgcggcgatgtactgagttt

SEQ ID NO: 150790 - DNA, 428 bp, Arabidopsis thaliana columbia
ctcttttagtaacaatggtttcttcttctttaaccaagcttgtgttctttggttgggtcgtgctgctcacattcacggacaaccttgtggctggaaaatctggcaaagtgaagctcaatctttactacgaatcactttgtcccggttgtcaggaattcatcgtcgatgacctaggtaaaatctttgactacgatctctacacaatcactgatctcaagctgtttccatttggtaatgccgaactctccgataatctgactgtcacttgccagcatggtgaagaggaatgcaaactaaacgcccttgaagcttgcgcattaagaacttggcccgatcagaaatcacaatacttgttcatacggtgcgtcgaaagcgatacgaaaggctgggaatcatgtgttaaaaactctggacgtgagaaagcaatc

SEQ ID NO: 150791 - DNA, 420 bp, Arabidopsis thaliana columbia
  unsure (1)..(420): unsure at all n locations
aaaagaagagcgtcttcataaacgcccttcttcttcttcgtcttcttccctgcaaatctaggttctagatcttttctttcttccgcgaaacgaaaatgagagagtgcatttcgatccacattggtcaggccggtatccaggtcggaaatgcttgctgggagctttactgtcttgaacatggcattcagcctgatggccagatgccgagtgacaagactgttggcggaggtgacgatgctttcaacaccttcttcagtgagaccggtgcagggaagcacgtcccacgtgctgtctttgttgatcttgagccaactgtgatcgatgaggtcaggactggtacttaccgtcagcttttccaccctgagcaactcatcagcggtaaagaagacgcagcntaacaattcgcccgtgggcattaca

SEQ ID NO: 150792 - DNA, 436 bp, Arabidopsis thaliana columbia
caatttcgaaaaatgcagctttagcaataagataattcataggagttttgaggctagatttgttctttcaatctgaagtttctttctttttgtttgtctgaaatgagcagtgacagctttggttgctgtgaagaatgaattgaatgatccgtacaaagttcttgagaattgggatgtgaattcagttgatccttgtagctggagaatggtttcttgcactgatggctatgtctcttcactggatcttcctagccaaagcttgtctggtacattgtctcctagaatcggaaacctcacctatttacaatcagtggtgttgcaaaacaatgcaatcactggtccaattccggaaacgattgggaggttggagaagcttcaatcacttgatctttcgaacaattcattcaccggggagataccgggctcacttggagaa

SEQ ID NO: 150793 - DNA, 434 bp, Arabidopsis thaliana columbia
ctcttccttgcgttctctctttctctctctcgccgacgacgaaaacatgggtgccggggcgaagaaagctttgaagaagaacatgaagaaggttgctgcttcggcttcttcttctcagctacctcttccccagaacccgaaaccttcagctgattttttgccactagaaggaggtccagctcgaaaagctccagttaccaccccacctcttcagaataaagctactgtgctatacatcggtagaatccctcatggcttctatgagactgagattgaagctttcttctcgcagtttggaacagttaagagagttagagtcgccagaaacaaaaagactgggaaatcaaagcattttgggttcatacagtttgaggaccctgaggtggcggaaattgcagcgggtgcaatgaatgattatttgttgatggagcaca

SEQ ID NO: 150794 - DNA, 435 bp, Arabidopsis thaliana columbia
ctttctctgggttcgtgcagaagctttgcttttttgagtatcgcgtttaaggcacatcgaagaagagagaccctaatttgatattttgagttctatcgatggcttcgctactagctcgcaggtcgttcagtgctctccgagctcgacatctcgctttttcagggcaaggtttacagggatctcatctctgtgggctacagtcccgtgctatatcttatggaagcaacaaagatgatgaagaagctgagcagcttgctaaagagatctccaaggactggagtactgtctttgaacggagcatgaacaccctatttctcactgaaatggtcaggggtttgtcactgaccctcaagtacttctttgatccaaaagttacaatcaattatccttttgagaagggtccattgagccctcgtttccgtggtgaacacgctc

SEQ ID NO: 150795 - DNA, 402 bp, Arabidopsis thaliana columbia
gagatggggcagactttgttcgtggataccttttcagtatgcgcgaaggtgccataacgcggggtctctcatggcctctggctcaacattcctgactatgatgctcccactcagcttgtgaaacctcttgagaaaaattccaggtatgttgatgcagtcatgaccattcccaaaggaactctttttcctatgtgtggtatgaaccttgcttttgaccgagagctgattggtccggctatgtactttgggcttatgggtgatggacagccaattggacgctatgacgacatgtgggctggttggtgtgtcaaggtgatatgtgaccacatgggatggggagtgaagacgggtttgcctttcatatggcacaacaaagccagcaacccattcgtgaacctgtaa

SEQ ID NO: 150796 - DNA, 366 bp, Arabidopsis thaliana columbia
gagaagaagaagcaaagatataacccccaaatgtatcaattagtttccattttcgccgctgagattctgttttcgaacatttacaccctcaagaatcgccgccatgtgtggaggagctataatatccgatttcattccaccgccgaggtctcgccgtgttactagcgagtttatttggccggatctgaagaagaatttgaaaggatcgaagaaaagctcgaagaatcgttcgaatttcttcgattttgacgctgagttcgaagctgatttccaaggtttcaaagatgattcgtctatcgattgcgatgatgatttcgacgtcggtgatgttttcgccgatgtgaaaccattcgttttcacttcgac

SEQ ID NO: 150797 - DNA, 427 bp, Arabidopsis thaliana columbia
cacatttcttttccttattttaatcaaaacatttgtttgcatcattcacaggcaaataaaaattctccctttttcttagattgctactacttataaagtagagagtgcagatagatgtaattatcaaacgaggaagcatcattatcattatcattatcatcattactgcttcatagattcatattattggttatctaaaagtttgcttttgtagtagttggtggttaagtaggatttgatttgatcttctagaattacagatcgagaaacagcaaatctgaggttttagaaaatgggatcttcttctgggcaaagtggatacgatctgtcttttaagatcttgttgattggtgattctggtgttgggaaaagcagattgcttgtcagcttcatttttagctccgttgaagatcttgctcctactatt

SEQ ID NO: 150798 - DNA, 275 bp, Arabidopsis thaliana columbia
catctctcgagccggagccgcgttgcgaaagcatttcaatcgtagtctaagagaatgtcgacagtgggagagctcgcttgcagctacgctgttatgatcctcgaggatgagggtattgctatcacggctgacaaaatcgccactttggtgaaagctgctggtgttaccattgagtcatactggccaatgctattcgccaagatggctgagaaacgtaatgtcactgatctcatcatgaacgttggtgctggtggtggaggtggtgcgcctgttgc

SEQ ID NO: 150799 - DNA, 436 bp, Arabidopsis thaliana columbia
aaaatttgagataatggccagaaagttcttcgtcggaggcaactggaaatgtaacggaacgtgctgaggaggtgaagaagattgtgaacactcttaatgaagctcaggttccttcacaggatgttgtagaggttgtggttagccctccatatgtttttcttcccctggttaagagcacattgaggtctgacttttttgttgcggcacaaaactgttgggttaagaaaggaggtgctttcactggtgaagtgagtgcggagatgcttgtgaacttggatattccatgggttatccttggtcactctgaaaggagggcaatccttaatgaatcaagcgagttcgtcggagacaaggttgcctatgcacttgctcaaggtttgaaagtgattgcttgtgttggtgagactcttgaggagcgtgaagcttgatcgaccat

SEQ ID NO: 150800 - DNA, 426 bp, Arabidopsis thaliana columbia
atctagagagctagagaaatattcagtggtcggagaatggcgtctctcaaaattccagcaaatattcctcttcccgaagaagactccgagcagctccacaaggcattcaaaggatggggaactaatgaagggatgatcatatcaattttggctcatagaaacgcaacgcaacgcagtttcattcgtgccgtttatgctgctaactacaataaggatcttctcaaggaattagacggagagctttctggtgactttgagagagttgtgatgttgtggactcttgatccaacggagagagatgcgtatttggccaatgaatctaccaaattgttcaccaaaaacatttgggtcctagttgaaatcgcttgtactagaccttctcttgagtttttcaagaccaagcaagcataccatgttcgctacaag

SEQ ID NO: 150801 - DNA, 411 bp, Arabidopsis thaliana columbia
ctcagatctcttccaattttctagaaaaaacatgtcttgctgtggtggaagctgtggttgtggatctgcctgcaagtgcggcaatggttgcggaggttgcaaaaggtaccctgacttggagaacaccgccaccgagactcttgtcctcggtgttgctccggcgatgaactctcagtacgaggcttccggcgagactttcgttgccgagaatgatgcttgcaaatgcggatctgactgcaagtgcaacccttgtacctgcaaatgaagaacttcataaaccctaagtctgtaataaccctaatgttatgttaggtttgcttatatgtaataattggctgatttttccggtagttttgccggcgacgatggtctttcctctcttctgtgtgtgtttttaatggttggtcatta

SEQ ID NO: 150802 - DNA, 435 bp, Arabidopsis thaliana columbia
cttttgcttttctaatctctcaatggctaccttaaaacacaaacctgtaaatttggtattttacgtttataatttgattattatattctcctcccatagttccacggcggagctccgcaggctactgcagccatcaaaaaccgatggtacagtgagctttctcgttatcggagactggggaagaagaggctcctataatcagtcccaagtagctcttcagatgggagaaatcggagagaaattagatatcgattttgtgatttctactggagataatttttacgacaatggtttaaccagcttgcacgatcctctatttcaagattcttttaccaacatttataccgctccgagcttgcagaaaccttgttttaggaaatcatgattatagaggtgacgtcagggcacaacttagccctatgctcagagctctgg

SEQ ID NO: 150803 - DNA, 435 bp, Arabidopsis thaliana columbia
  unsure (1)..(435): unsure at all n locations
cgtatctgtgactctcgtgatcatcgcctgaaaaaaatttgagataatggccagaaagttcttcgtcggaggcaactggaaatgtaacggaactgctgaggaggtgaagaagattgtgaacactcttaatgaagctcangttccttcacaggatgttgtagaggttgtggttagccctccatatgtttttcttcccctggttaagagcacattgaggtctgacttttttgttgcggcacaaaactgttgggttaagaaaggaggtgctttcactggtgaagtgagtgcggagatgcttgtgaacttggatattccatgggttatccttggtcactctgaaaggagggcaatccttaatgaatcaagcgagttcgtcggagacaaggttgcctatgcacttgctcaaggtttgaaagtgattgcttgtgttggtga

SEQ ID NO: 150804 - DNA, 437 bp, Arabidopsis thaliana columbia
  unsure (1)..(437): unsure at all n locations
aacaaattaatcataacacttcttctccttatctccatagctgtcgtccactgcttatccttccgtgtggagatcgacgagttcgagccaccacagcaaggagaacaagaaggtccccgtcgccgtcctggtggtggctctggcgagggatgggaggaagagtcgacgaatcatccataccacttcaggaagcggagtttcagtgattggttccagtcaaaggaaggttttgtgagagtgctgcctaagttcacaaaacatgcaccggctctcttccgaggaatcgagaactacagattctcgttggtggagatggagccaacaactttctttgtgcctcaccatttggatgccgatgctgtttttatagtcctacaaggtaaaggagtgatcgagtttgtgacggataaaacaaaagaatcgntccacataactaa

SEQ ID NO: 150805 - DNA, 400 bp, Arabidopsis thaliana columbia
gtcgttatcaaccctcatcatctttttttccaacgtaaccaccgacgccagcgtcgtcgccattaacaactggatctgtctccgtttccatcaaatctctttctctctctgcagatcaattgattttttacaacgtgattgaagcggggctagctccggtgacgatagttgattggttttgtcccttaagatgagctccttcaatggtaacgaacggcgtcggctgccgtgaatcatgagagagatggctcagtttctttttcttttctctgatcttcctctttatcatcagattctatctcagaaacttatcaatgtgcgtttgattttttttgcttgggttccctttacaataatcattagggtatagtttttgaatggaattctcttccaataaaca

SEQ ID NO: 150806 - DNA, 163 bp, Arabidopsis thaliana columbia
  unsure (1)..(163): unsure at all n locations
atagaaaacaacattttgtatgagcctaatttatcttaagctttgtaggcttcattttttcttgcaacactattaactcgttggggttttcggtgatgatatatatgaagttgatgnaaaaaaaaatataataaaattataaaaaaaagggcgggcgttttaa

SEQ ID NO: 150807 - DNA, 389 bp, Arabidopsis thaliana columbia
ctctctctcgctctctatctctcacgctctcacaggagaagaaaaaattagaaagggtgtgagaatggcggctacagcagcttcaagcttacaaattgctacacgaaggccgagcatgtcttcgcctagcaaaattcttaaagcaggaacctacattgttggtgccaatcctgggaacgcttcatgggataaactttcatgcactcgccaattatcaaaccttggatgtttgagaaaccacagtgctgttccaacttgtaagagacccttttctttttccacaagggcaatgtctgaatccagtgaaaacaaggctccttcagggcttccaattgatttgagagggaaaagagctttcattgctggtatagctgatgataatggctatg

SEQ ID NO: 150808 - DNA, 469 bp, Arabidopsis thaliana columbia
  unsure (1)..(469): unsure at all n locations
tccggctttcgtaccatttttcgcctagctttttcttctgttctagggngtttcgggatacttaaacttaattgacccgagaaacccgttggaatcccattacgtcttgtgtgagggcttaaatactcttaaccttttaatcacatttcaaatacgattggggtattaaagttgtaaaaggaaagggaacttggaatcatgaaagcttgggcttttcactcttctcgtttcttctgatcttgaatctagcaatgggtagattcgttgttgagaagaacaatctcaaagttacatcacctgattcgatcaaaggtatttacgaatgtgccattggtaatttcggagttcctcaatacggtggtactttagtcggcaccgtcgtctatcctaaatccaatcagaaagcttgtaaaagctactccgatttcgatatctccttcaaatccaaacctggacgattaccaacttt

SEQ ID NO: 150809 - DNA, 431 bp, Arabidopsis thaliana columbia
gcttcctcttcctctgagaaatcaaatcactcacactccaaaaaaaaaatctaaactttctcagagtttaatgaagaagcgcttaaccacttccacttgttcttcttctccatcttcctctgtttcttcttctactactacttcctctcctattcagtcggaggctccaaggcctaaacgagccaaaagggctaagaaatcttctccttctggtgataaatctcataacccgacaagccctgcttctacccgacgcagctctatctacagaggagtcactagacatagatggactgggagattcgaggctcatctttgggacaaaagctcttggaattcgattcagaacaagaaaggcaaacaagtttatctgggagcatatgacagtgaagaagcagcagcacatacgtacgatctggctgctctcaagt

SEQ ID NO: 150810 - DNA, 441 bp, Arabidopsis thaliana columbia
tcttatcaatggcttcctcactcgtctcatcttttcaacccaggtcagcatttttgggagatagaaatgtgttcaaggtctcaagcacaccttttgctcaagtgggttactccagtaagaccattgagtgcaaagaatcaaggataggaaagcaaccgatcgctgtaccttccaatgtaaccattgcattggaaggtcaagacttgaaagtgaagggtccattaggagagctggctttaacttacccacgcgaagttgagcttacaaaggaagaatccggtttcttaagggtcaaaaaaaccgtcgaaactagaagagccaaccaaatgcacggccttttcaggacgcttaccgataacatggttgtgggagtatcaaagggatttgagaaaaagcttatacttgtgggtgttggttatcgtgcaacagtagacggaaagg

SEQ ID NO: 150811 - DNA, 435 bp, Arabidopsis thaliana columbia
ggaaacccaagcataacggcgaaaggatcgagcagagaactaagacttggaagaaccgctcacaacatgtcttcttcttctttgaggaaaaaatcagacctccgagtgattcagaaggttccatacaaaggtcttaaagattttctctctaatctccaagaagtcattctcggaacaaagcttgccattctttttccggccattcctgccgccattatttgcacctattgtggcgtcagtcagccttggatatttggacttagcttgctaggactgacacctttggctgagcgagtcagctttttgacagagcaactagctttctacaccggtcctacattgggtggtctattgaacgcaacgtgtggaaacgcgactgaattgataatcgcgattcttgctttgaccaataacaaagtcgcagtggtgaaatat

SEQ ID NO: 150812 - DNA, 383 bp, Arabidopsis thaliana columbia
gagacaaactctgagagacaaaacaagagaaaatcgctcgtcgtcggtattcaagcgtctgtgactccgataaagcctagactagcgaggacggcgagagagagagagagagagctttggagttgtcgtatctctaaatcggaggcaatttgagtgagataaagacaaaggaaggaatcaagtggactaccgaagcgagttttgagctttttcagagacggatttggagatttcttgttgatatcgtctgcttagaggcttatttggtaccagatgaaacagatctgagcttcggaaggtatggcgagttcggaggtttcaatgaaaggtaatcgtggaggagataacttctccttctctggttttagggaccctaaggagac

SEQ ID NO: 150813 - DNA, 349 bp, Arabidopsis thaliana columbia
gccgtagggagagcaaaacaaatattttagaagatgaagacgattctttctgggcgagcgatggacatccccgacagtgttaccatcaaggttcacgctaaagtgatcgaagtcgaaggacctcgcgggaagcttgttcgcgatttcaagcatctcaacctcgatttccagctgatcaaggatccagagactggaaagaagaagcttaagatcgattcgtggtttggaacacgcaaaaccagcgccttcatcagaaccgctcttagtcacgtagataacttgatctccggtgttaccagaggttttcgttacaagatgaggtttgttgtcacccatttttccattaact

SEQ ID NO: 150814 - DNA, 426 bp, Arabidopsis thaliana columbia
  unsure (1)..(426): unsure at all n locations
gataagaagaagactggaattttttggaggaggactctgctccatcgccgnccggcctgtaacccaccggactcagtaaactagtctgtaacacaatatcttctatttcagataagatttagcttggagaagagcaagttccgaaaatggaggggcgtcgtgtatagatccaccacccacagccctgatggaagcagacaacggaggccccaattctagtcatgcattcaaacaacgtctgcgttggacgcatgagctacatgaacgcttcgttgatgccgttgctcaacttggtggccctgatagagctacacccaaaggcgttcttagagtgatgggtgtacaaggcttaactatatatcatgtcaagagtcacttacaggaatatcgacttgcaaagtatcttccagattcgtcttctgaggg

SEQ ID NO: 150815 - DNA, 428 bp, Arabidopsis thaliana columbia
ggaagaagaaactctacaagtcttcttcttctctcatcctctcttctccattttcagaactctctacagtctaatcctcatctatttccccaatgatttgcttcgaatctttctctcccctgttcttctcatctccggagctctccttctctctcttctccgtctcggatcgacccgagaacctaacacccaacccgataaaagctacgaggagtctgaagaacctaaggtttttctggttcgtgaatccgatttgatgggtggttttgtggaatggaacttgagagcaccattggaagtgattcacgaagcttacgaagatgaagaagaggaagaagaagaagaagatccgacccggtttagaaaaatggagagattcccatcgttgtcactctgttacccagaatcagattcggaatcggattctg

SEQ ID NO: 150816 - DNA, 244 bp, Arabidopsis thaliana columbia
ctcaagaaaatcaaagcagcatgtttgtccgacgtagcaacaaagcaccccatggagtatgaggtgaagaagacggaggcgtctagtttggtggggaagctagagacagacgtggagatcaaggcttcggctgataagtttcaccacatgttctctgggaaaccacaccatgtcttcaaagcaagtccaggcaacattcatggatgtgatctgcacgaaggcttctgggtcacaattcgcttta

SEQ ID NO: 150817 - DNA, 410 bp, Arabidopsis thaliana columbia
aaatgggccatttagtaaccgtgtatgagcgctcggacagaattggtgggctgatgatgtatggagtaccaaacatgaagactgacaaaattgacgtcgttcaacggcgggttgatcttatgaccaaagaaggtatcaactttgtggtcaatgccaatattggaaaggacccatcttactcccttgatggacttaaggaagagaatgatgcaatcgttcttgctgttggttccacaaaaccaagagatcttccagtgcctggtcgtgatctatctggtgttcactttgccatggagtttcttcatgcaaacaccaaaagtttacttgacagcaatcatgaggatggcaattacatttctgcaaaagggaaaaaggttgttgttattggtggaggtgataccggcacagat

SEQ ID NO: 150818 - DNA, 263 bp, Arabidopsis thaliana columbia
gaaaggaagggccgacccacgcgtgcggatttttgttacgatctacttatacagcttattacctatacagaacaaagcctgaggggggcttttgcattttagagattccaagaatgatacaacacaacctattttccgtgtgtttgctgttcttagctcgcgtttcgttccacaagcttcgctactgagacaactaaacaacaatgtatgaatcgatctatgagtctagcgatggccgtaaaaacaccttgaagaatagtgat

SEQ ID NO: 150819 - DNA, 393 bp, Arabidopsis thaliana columbia
aacgaattcgagacctagaaattcatcgaaccgtctcgtttctgtattcggacgcaagtcttcttctccttcatttgttactctcagagttgtttcatcgatggcttacgagaaagagcttgatgctgctaagaaagctgcttcactcgctgctcgtctctgtcagaaagttcaaaaggctttgttgcaatcagatgtgcaatcaaaatctgataaaagtccagtgaccgttgctgattatggttcacaagcagttgttagtttagtcttagaaaaagagctcagttctgaacccttttcattggtggctgaagaggactcaagcgatctacgcaaggatggttcttaggatactctggagcgcatcacaaaactcgtgaacgacactttggc

SEQ ID NO: 150820 - DNA, 346 bp, Arabidopsis thaliana columbia
cacgaacctagccactacactatcatcgaattaccggaatgtttctcgccgtagaactatgtccacctctgtgaattgttcggtggagattacggaggctgatcggtcggtgaaactgaagaacgggaacgattcactggagatatgcagagttctcaacgggatgtggcaaacgagcggaggatgggggaagattgatcgaaacgacgccgttgattcaatgcttcgttacgccgatgctggtctctctactttcgatatggctgatcactatggtcctgctgaagatctttacggtatttttatcaatagagttcgttgagagcgttcaccggagtacttggag

SEQ ID NO: 150821 - DNA, 434 bp, Arabidopsis thaliana columbia
cacagcatgaaaggaaacctttaaggtctttgtctccatggatcagtgatatactacttgctgctcctcttggtataagaagtgactatttccgatggtgtagtggtgtaatgggtaaatatgctgctggagagctcaagccgccaaccattgcttctcgaggatctggtaaacatcctcaactgatgccttcaaccccaagatgggctgttgctaatggagctggtgtcatactgagtgtttgtgatgatgaagttgctcgatatgagactgctacgctgacagcggtcgctgtccctgcacttcttcttcctccgccaacgacatccttagatgagcatctagttgctggccttccagcttttgaaccatatgcacgtttgtttcatagatactatgccattgcaactccaatgctacgcagagactttttt

SEQ ID NO: 150822 - DNA, 441 bp, Arabidopsis thaliana columbia
  unsure (1)..(441): unsure at all n locations
gcgaaacagtgagagagacagagagaagatatagagatgggtgtggagaagcaagtcatcagacccggcaacggtcccaaacccgctccgggccaaaccgtcaccgtccattgcaccggattcgggaaagatggtgatctatcccagaagttctggagtacaaaggacgagggacaaaaacctttctcgttccaaatcggtaaaggtgctgtgatcaaaggatgggatgaaggcgttatcggaatgcaaattggagaggttgctcgcttgcggtgctcatcggattacgcatatggcgctggtggatttccggcatgggggatccagccaaactctgttctcgactttgaaatcgaagtactgagcgtgcagtaatgatctccccagctcctaaactgtgggtagattattaaacaaccctntatgtttattgcttctggg

SEQ ID NO: 150823 - DNA, 266 bp, Arabidopsis thaliana columbia
gctttctgcaaatttctccgatcgtgttcaattccgtcgagagctcaagctctgtggctcgtagtaaaaaaatggccgcggtcgcggcaccaatggcttcgaagactggaggatataaagctgaaatggtggtctacaacaagcggtgtgaagatctacggaccgggaacataaactttgctcgagcaaaatctgtcaacgtgctgacatcaaaggggtcggatgagaggtggactcgttattgtaaacggagaggttgcttgctt

SEQ ID NO: 150824 - DNA, 381 bp, Arabidopsis thaliana columbia
caacctagctagctagtaaacagtattttctatataccaaaaatggcttcaagttccatagctcttttcttggctctcaatcttctctttttcacaacaatctccgcctgtggtagctgtactccgtgcggcggaggttgcccctctcccaagccaaagccaactcctaaaccaaccccaagccctagctctggctcgagcaagtgccctaaagacaccctcaagctcggtgtctgcgctaatgtgctcaacggcctcctggacttgacccttggcaagccaccggtcgagccatgctgcagcctcatccaaggactcgctgatgttgaggcagccgtttgtctctgcaccgctcttaaggctaacattcttggaatcaac

SEQ ID NO: 150825 - DNA, 423 bp, Arabidopsis thaliana columbia
ccggcttttctgaaatggtacagagagtctgagctgatccatggccgatgggcgatggcagcggttcttgggatcttcgtcggccaggcctggagcggtgtggcatggtttgaagctggagcccagccagacgcgatcgctcccttctcgttcgggtcgcttcttggaacccaattgcttctcatgggttgggtggagagcaaacgatgggtcgatttcttcaacccggattctcaatcggttgagtgggcaacgccatggtcgaagaccgccgagaatttcgcgaactataccggcgatcagggataccccggtgggagattcttcgatccgttgggtctcgccgggaaaaaccgcgacggtgtttatgagccggactttgagaagcttgagaggctgaaattggcagaaattaaacactcg

SEQ ID NO: 150826 - DNA, 406 bp, Arabidopsis thaliana columbia
caagaatcagattcaagatagaagtttttcattcaatgtctagtcctcttggtcactttcagattcttgtttttcttcatgctttgcttatcttctcagctgagtcccgcaaaacccaattgctgaacgataatgatgttgaatctagcgacaagagtgcaaaaggcacacgatgggctgttttagttgctggatcaaatgaatattataactacaggcatcaggctgacatatgccacgcgtatcagatactccgaaaaggcggtttaaaagatgaaaacatcattgtgtttatgtatgatgatatcgcgttttcctcggagaatcctaggcctggagttatcattaataaaccagatggagaagatgtttataaaggagttcctaaggactacactaaagaagc

SEQ ID NO: 150827 - DNA, 428 bp, Arabidopsis thaliana columbia
  unsure (1)..(428): unsure at all n locations
gttttgctcttctctgtatcgtcttcttcacagactgggcttgattttgagttcttgtagttttcggattcttagcaatctaggtttttttttttttttacttttcgaaaagccgatccagatttttgataattttgaagaagaagatgcaacaaaatcaagtgaagaagggcacgaaagagatggagtttttcacagagtatggtgatgcaaacagatataggattctggaagttattggtaaaggaagctatggagttgtgtgtgcagctattgatacacatactggagagaaagttgctattaagaagattaatgatgtctntgaacatatttctgatgcgcttcgtattctccgggaagtgaaacttcttcggttttacggcatcctgatattgtggagatcaaaagcattatgctgccttctt

SEQ ID NO: 150828 - DNA, 222 bp, Arabidopsis thaliana columbia
ctttttccttcctcctctccgattttttctccgtcagtaaaagaaaatcaaagtcggttgacacattgttggtaaagacaagcttgtggtctcaacctcctgctctcttctccacaccgctgctgatcttatcaatgagactaagcttgatgatgaaatcaagtcatggttggcgtttgctgcccagaaggtcgatgaagcgaacgcttaggtcaaggcttt

SEQ ID NO: 150829 - DNA, 430 bp, Arabidopsis thaliana columbia
gaactttgtcggagagagaagattgagaaagttcctaactttagcttttataagagcatggagaaaatacacgaggaagaaggtattgaaccggaccagttaatgggagacgttctatactacggagacaaccactctgcggtggtgcagctgcacggccgacctgacgtggaaaagctgatcgacgagaatcgcactggaggcaagctgatcgtgcttgacgttggtctaaaacattgtggtccttgcgttaaagtgtatccgaccgtgctgaaactgtcccggtcaatgtccgagacagtcgtattcgctagaatgaacggtgacgagaacgatagttgtatggagtttctcaaggacatgaatgttatcgaagttccaactttcttgttcattagagacggcgagattcgtggccggtatgttggtt

SEQ ID NO: 150830 - DNA, 170 bp, Arabidopsis thaliana columbia
ggaactcacacctcatcgaccgccgctggatccgtcgttgaaggagctagcttattaggcgacgcttcaagaacagctcggggtatggctccacgcgctcgtgtcgctgtttacaaagtctgttggcttggggggtggttcaactcaaatattttagctgcaatcgataa

SEQ ID NO: 150831 - DNA, 434 bp, Arabidopsis thaliana columbia
  unsure (1)..(434): unsure at all n locations
ctcaaagtcaactccggatctcaagtgaaagactcatcccgaattgcacctgatgctactccctcatccccatcgtcgtctctgtctttattcaaaggagtgttaccgaggtatttcagctcggagtggtcggtggctcagttcaggttggttgaaggaactcagtacatagccgcctttggccatcaaaagaacaccgttgttattcttggcatggatgggagcttctacagatgccagtttgatccggtgaacggcggtgaaatgtctcagcttgagtaccacaactgtctgaaaccgccttcagttttctaaaagctttactacttatactcttttggtccttctctctctntatatctctctgcaacttaagcggtgagatatggtgtatagttttgtgtatataataatgatgggtcgtcctataattt

SEQ ID NO: 150832 - DNA, 433 bp, Arabidopsis thaliana columbia
ctctattctctacctcatttctcatcataacaaagagagagaaaaaaactatggaattgacactgaattcctcgagttctcttatcaaacgtaaagatgccaagagttctagaaaccaagaaagttcctccaacaacatgacctttgcgaagatgaagccgccaacatatcaattccaagcaaagaactcggttaaggaaatgaagttcactcacgagaagaccttcacgccagaaggtgaaacccttgagaaatgggagaagctccacgttctctcatacccacactccaagaacgacgctagcgttccggtgttcgtcatgttaccgctcgacacagtaacaatgtcagggcatttgaacaaaccacgagccatgaacgctagtttgatggccctgaaaggagctggtgtggaaggtgtgatggtggatgc

SEQ ID NO: 150833 - DNA, 325 bp, Arabidopsis thaliana columbia
ctttataaaagcttatcgctaatttgacagaacactagaacagttctctctttttgtcgacagtcttcttcttcttcttcttcttcgattggatctggaactgaactcaaattgggaagaattttgacatggaggaggaccggtgttcgatcaaggatgatgcaactcaattgataggtaacaccccaatggtatatctgaacaacattgtggatggttgtgtagctcgtattgcagctaagcttgaaatgatggagccttgctctagtgtcaaggagcgaattgcttatggtatgattaaagatgcacaaaacaagggattgat

SEQ ID NO: 150834 - DNA, 432 bp, Arabidopsis thaliana columbia
aaaaaaaacaagttttcttctttttacactcaagaatataaattccctgttctccagatcttttctcaagaaaatttaaagctttaacttaagaaagcttgaacctttctcttccaaccacatcttccttctttttatcctctagctcaacttagaaagaatagaataaagtggcaaaaccgaaagtgaaccaacttgtagtaaattaatagttatgggttcgaaacctaatgccatgaagaatgtggtggctatggcggcagtttctgctctgttccttctagggtttcttgtttgctctgtttctggttctgtctcttacgatagcagagccattaccatcaatggcaaaagaagaatccttatctctggatctattcactaccccagaagtactcctgagatgtggccagatctaattcggaaagcaaa

SEQ ID NO: 150835 - DNA, 301 bp, Arabidopsis thaliana columbia
acagttcatattagtcatcttcttcttcctctgtctgaattcttcctcctctcggatccatttttagaggagtctagtttcttacttgaacatagacatggaatcaactaataactgacaaccaagaggctgttcttttcaaatgattggtagtagttatattatgcttggacagtgccatgatgggcatctgtgagatgaaaagctgctgctcatggcttcttttgatctcgctgctttgctcactatctaatgaaagttaagcgattagtgcttgacgcaattctctttttaactttaa

SEQ ID NO: 150836 - DNA, 433 bp, Arabidopsis thaliana columbia
aatccaaaaccactcatttttctattactgaaatttttcttagagaagaagaagaggaagcaaaatggccacaagcgcatcagctttgctctcaccaaccacattctccactgcaatctcccacaaaaaccctaactccatctcattccatggccttcgtcccctccgtctaggtggctcctcctccgccctacccaaactatcaaccaccgggagaaaatcctcctccgctgtcgtgagagctgagctaagcccttccatcgtcataagtctcagcacaggtctctccctcttcctcggccgtttcgtcttcttcaacttccagagagagaacgtagcaaaacagggcttaccggagcagaacggaaaaacccatttcgaagctggagatgatcgtgctaaggagtacgtcagtctcttgaaatcgaacgat

SEQ ID NO: 150837 - DNA, 135 bp, Arabidopsis thaliana columbia
tttttaaactcaacaccaaataaatttgttggtttaaagattattaaatttcccggggaaatttcaaccaaagtattgggaataaccggaggtttaacgccggaccagttcgattttttcaactttcaagggatt

SEQ ID NO: 150838 - DNA, 429 bp, Arabidopsis thaliana columbia
ccagagtaaagcttgaaactttggactaaaagaatggcgtctttgggtgtgtcggaaatgcttggtactccccttaacttcagggcagtttcaagatcgtctgctccgttggcatcaagcccatccacgttcaagactgttgctctcttctctaagaaaaagccagctcctgctaagtccaaggctgtctctgagactagcgatgagctcgccaagtggtatggtcctgacaggagaattttcttgcctgatggtcttttggatagatcagagatcccagagtacttaaacggtgaagttgctggagattatggttatgacccatttggtcttggaaagaagcctgagaactttgctaaataccaagcttttgaattgatccatgcgagatgggctatgttaggagcagctgggttcatcattccctga

SEQ ID NO: 150839 - DNA, 437 bp, Arabidopsis thaliana columbia
cgataaaccaccacatccttccctgaaaccctaaccacaacaatcgccgccgtctctagaaatatccatccacctacttcggctttgtttatcagattttgatgaaaccagatcgggtcttcctctagatccgttctaggttttctatttccaccgtcttatcattatcatcatcatcaattcatcatcatcatcaataatccagatgctcaccaaattcgtcattcatagacatgtctctgtttctgaaagacgattcgattcaaattcgcgaagtctggaacgataaccttcaagaagaaatggatctgatccgagatgtcgtcgacgacttcccttacgtcgccatggacactgagttccccggcatcgtcgtccgacctgtcggaactttcaaatccaacgctgattaccactacgaaaccttgaagacgaac

SEQ ID NO: 150840 - DNA, 437 bp, Arabidopsis thaliana columbia
  unsure (1)..(437): unsure at all n locations
cttggtatccacctcttgaaaagactctctcttgtctatctaaattatatcgttgcttggagcaggccgtcttcactggattagcacaggaagctgtagaagtttgctcactgtcaattcaaaaagccagcaagcttatcattaagcgatcaactacaatggatggccagcttttccttatcaagcatctccttatcttgagagaacagattgccccttttgacatagaattttcagtaacccataaggagcttgatttctctcatttactggaacacttgaggaggatacttagaggtcaagcgtcactttttgactggtctaggtcaacctctctagcaaggaccctgtcaccttgagttttggagagtcaaatagatgccaaaaaggaactggaaaaatgtcttaagacaactngtgaggagttcatcatgtca

SEQ ID NO: 150841 - DNA, 427 bp, Arabidopsis thaliana columbia
cgatgatattttgcaacactctttactcttcttcttctccatcatatctctcgggggtaacttcaaaaccgtcgcgattctcaaagaatctcagacctcgagctcaattccagtccatggaagaccacgacgatcaccttcgccgaaaatttatggagttcccgtatgtgtcacccacgcggaagcagctcatggttgatctcatgtcgacggtggagaatcgccttcaatcacaactccttccctgtaacctccctccagatgtacgaaacttcaataaccctaacggttccgccgaagcatctcttcatatcagatccggcgacaaatcttctccgattgattttgttataggaagttggatacattgcaagatcccaacaggagtatctttgaatataacaagcatctctggattcttaaactc

SEQ ID NO: 150842 - DNA, 420 bp, Arabidopsis thaliana columbia
cagtctctcactttctctcttctctctctctctttcttttttgagtccgagaagtgtaagtctgaaagaatgacgaaggatgagttgacggaggaagagtcgctctccggcaaggactacttagacccaccgcctgtgaagacgttcgaggtgagagagctcaagaagtggtccttctacagagctgtcatcgctgagttcatagctactttgctctttctatacgtgactgatttgacagtcatcggctttaagagccagactgatatcaacgcctgcggcggagcttgtgccagtgtcggcctcctaggcatatattgggcctttggtggcatgatattcatcctcgactactgcactgcctgcatatatggtctttatctctctctttctctctctctctctctctctctctttcct

SEQ ID NO: 150843 - DNA, 324 bp, Arabidopsis thaliana columbia
tctagatatcggaactacagggctcgtcggataagtcctcgtagcggaaagcgccaagtctggccacgccactttcgctctggttagagaagcctctctctccgatcccgttaaggcccaactcgttgagagattcaaagatctcggcgttaccatactctacggaagtttaagtgataaagagagcttagtgaaggcgattaaacaagtcgatgtcgtgatatcagctgttgttcggtttcaaactgaaattcttaatcaaaccaatatcatcgatgccatcaaagaatctggaaatgttaagagattcttaccgtcggaatt

SEQ ID NO: 150844 - DNA, 410 bp, Arabidopsis thaliana columbia
  unsure (1)..(410): unsure at all n locations
attgatcgaaaaaggggggaataacattccggaaaccccattttttcttgattcacggtggaagtgtattctgagtctgtttctgtattctttctagattcaaagcaaagactcagtattgaatcaacagcaaaagataaaatggattcataggctcactatattctattcgaattagaatagaaacacatgctcgatagaaatattagatctaatagaatcaacaaatgaggtaggttcattaacaactcacagattcaaaatggcaaaaaaagaaagcattcattccttttttttattttctatctatagtctttttgccctggntgatctctctctgctgtaataaaagtttgaaaacttggattactaattggtggaatactagacaatgcgaaacttttttgaat

SEQ ID NO: 150845 - DNA, 247 bp, Arabidopsis thaliana columbia
cgaagatatttaaatataaccaaaacaatgttgctttattactttgccccttatcaacggtaggtgataaatacacaagtgtttgacagaacaacgcagtcattgaattacgtgttattaaatgccgtcgaaaacactgattctattcctatcaaacccacttacccattcccttttatatgcacaaattctcataaagagaggaagtagcaatgattttttttcggaagccatggaagctgctaat

SEQ ID NO: 150846 - DNA, 299 bp, Arabidopsis thaliana columbia
gaaatggcaaagttgtgaaaagtggtcctaatgataatatcttcatctataatgctggcgatggagctcctggcttaatagcgatgcccactggtgatgaagttatggcaaaagatttcaatgaagtcttggagaagatgcataagaggaaaaaaatacaacaagatggtgatctatgttgaagcatgtgaatcaggaagtatgtttgaagggattttaaagaaaaatcttaacatatacgcagtgactgctgctaattctaaagagagcagctggggagtttactgtcctgagtcata

SEQ ID NO: 150847 - DNA, 432 bp, Arabidopsis thaliana columbia
ggaaaaaaaggggcgacgccaccgtccgtttggagcctccacagatgacctagagcgctgtttactcaatgggatggtagattgtggtggtcggcataatcacatttacaaaagagctatgcttctagtcgagcaagttaaagttagtactagaagtcctctagtcacttgccttctggaggggcccagtggaagtgggaaaactgctttagcagcaacaattggtatcgatagtgacttcccatatgttaagatagtttctgcggaaactatgattggtctttctgagagcacaaaatgtgctcacattgtcaaggtctttgaggatgcatataaatctccaatgagcatcattatccttgacgatattgaaagattgttggaattcatagcaatcggtcctcgcttttcaaacataatttcacagacgct

SEQ ID NO: 150848 - DNA, 444 bp, Arabidopsis thaliana columbia
  unsure (1)..(444): unsure at all n locations
aaaaanggggggggggaggggggggagggaanaaaaatcctttctaaatttattttttaaggttgactcgtctgcggggctgttgtcgtatccgatctcccaccatcttccccaaagggctcacctgatcgccatgacccttccactatttcttcgagccccagtcgtggtggtgacaatcagtctgaagtcatattcaagagtgaagagtatcggcaattgtttcggctttcagctgacgaaatccttgttcaagattttaactgtgcttgtcaggagagtattcttatgcagggtcatatgtacctcttgatgcattatatctgcttttactccaacatctgtggttatgagaccaaaaaaattatcccatttgctgaaatattttgtgttaaacgagccaagactgctggtatttttcctaatgccattgagattttaagt

SEQ ID NO: 150849 - DNA, 388 bp, Arabidopsis thaliana columbia
cacaaacacaatctaatccaaaaaatcataagatgaatgccacaaagtttcttgtgcttctcgtgattggcgttttgtgtgccattgtcaccgcaaggcaggtcaaagatttgtccacagagaccaaattaggggcctctcttccaaaaacgactaccaaaggcattggagctcagctttctgcaactggctcaactttcagcagcagcagtgtcgttagctatgctaatggttttaacaatcccaaaggcccaggggccaatgcattcgaaagtggctccacatttaccagcggacaagtcactgccaagggtcgcaaggcaagagtttcttctgcaagtgcttctaccgctacaggtgaggctgcagctgcagtgtctctcaaagc

SEQ ID NO: 150850 - DNA, 129 bp, Arabidopsis thaliana columbia
  unsure (1)..(129): unsure at all n locations
cgaggcagggacccgcccccccaccncagcgacagaacgagggnaaccncgacaaccnagangnncnccaagccaccgaaacnancaagagggaagccgcgcagaacgagnacngggaccacaaccacc

SEQ ID NO: 150851 - DNA, 188 bp, Arabidopsis thaliana columbia
  unsure (1)..(188): unsure at all n locations
cggaaggccgnaaagcnnncccccgcggcaacggaagnccnnggaagcggccgcgngacaangaggaagacngnngccaagccaaagggcccaacaggcagaccaagagacggaacngaccgnggcaagnacnnngggccaaacncnggcgaancaccgagcnaccnaaccggagagnnccccggaga

SEQ ID NO: 150852 - DNA, 300 bp, Arabidopsis thaliana columbia
  unsure (1)..(300): unsure at all n locations
acgacccacgcgnccggcaaagagagaaanggcnagcnnnacngccatagaaataaccgtctccgccgcncgaccggggcgcgttctcaagccaaccgtcgccacctccgcccctgnnctnggtttgcctccaaaggggaagaagaagggaggagcgagatgttcaatggagacaaagcaaggaaacgtctcagtcatgggggctggagtttcagctgcagcaacagctgctttgacggcggtgatgagcaatcccgcgatggctttggttgatgagaggatgtcaacagaaggaacagg

SEQ ID NO: 150853 - DNA, 269 bp, Arabidopsis thaliana columbia
  unsure (1)..(269): unsure at all n locations
gcagcaacaagtgaattattttttagaaggnngaaacangggaaggatcagattcaaagatgaactctcccacacactagaaacgcttaataagtccagaaacaaactttgaaagagattcttctcaagaaccaatccgccatttacttacaaaactgtggtctcaatggaaacgctactgaccctgaagaagctttcaaatctatgngtcctttagtcactgatgtngaaatagagccttacatcaaaagaatgggtgatggtgacac

SEQ ID NO: 150854 - DNA, 190 bp, Arabidopsis thaliana columbia
  unsure (1)..(190): unsure at all n locations
gaagcggagnggccggccacacagcaccnaaaccgcaanncacgggggcgccgncgacggancgngngaaangggacnacagaggccaacgacagancannccnnngggacagnggcnnccgaagggagccgnngangcnnacgnggcacccaacgnngngcnggcnnggcaggncacagncngggacgg

SEQ ID NO: 150855 - DNA, 189 bp, Arabidopsis thaliana columbia
  unsure (1)..(189): unsure at all n locations
agaagagcgccaacgacgaacgacnngangacgaaancgnnnangagnnacgnngacnngaaaaaagcagcgangaaggaaanggaagcaggaccggacnnngancnggagaaggcnncnacgaaagcagacaaganggangagaancggncancnnncnaagaagaagcagagaaggggaaagcagag

SEQ ID NO: 150856 - DNA, 154 bp, Arabidopsis thaliana columbia
  unsure (1)..(154): unsure at all n locations
acacaagccacccacacaaccacggaagccannagcannagcncaacacncaagaancnccgangnanncgcgggggananccaaccagcagcgaagaacggaaaaggganaccccnagaccacgcaaccggagnngnagncggagaaacagcg

SEQ ID NO: 150857 - DNA, 331 bp, Arabidopsis thaliana columbia
  unsure (1)..(331): unsure at all n locations
ctgctgggannagcacaccaggaatgtgcgcaagtttagcgtatttcgacacttacaggcgtgcttagatacctgcgaatctggtcaggcgcagagagatctctttggagctcatacatatgagagaaccgatcgtcctggtgcataccacactgaatggactaagcttgcaaggaagagtcagtaaagcatggacacagncccttgatttgagggtattctctctctttctctctcacactctggttttgtgcttaatctgaattcaatggttccatgttgttgggagggctttattcatcatagaacacgaaaacaaattgtttcagtt

SEQ ID NO: 150858 - DNA, 265 bp, Arabidopsis thaliana columbia
  unsure (1)..(265): unsure at all n locations
ccaacaagattttgnngacgagttccgatggcgagtctttcgagatcgacgaagcggtggcgcgtaagtttctgatcatagtgcacatgatggaggataactgcgccggtgaagcaattccgcttgaaaatgtcaccggggatatcctctccaagataatcgagtacgcgaagatgcacgtcaatgaacctagtgaagaagacgaagacgaggaggcgaagaaaaatctagactcgtggggacgctagttcattgaaaagctaga

SEQ ID NO: 150859 - DNA, 242 bp, Arabidopsis thaliana columbia
  unsure (1)..(242): unsure at all n locations
gacccacgcgnncggccggagagcaggccagacaaanacgaggcttaaattgaagaagaaccagnancngaacagagcggangaacgacaacatnccacaccccaagcannatgngngacagagacaaagaacttacaacatcccacagaagctgaaaacgaagaagaagaagaagaagaaagagtaaaggaagtcagtggtgcttctcctgaaccaaaacaagaaagcaacctcacaaaaa

SEQ ID NO: 150860 - DNA, 298 bp, Arabidopsis thaliana columbia
  unsure (1)..(298): unsure at all n locations
aaacccggcccgacccacgcgnccggangagagcaaagggcaagngnnngattaaactagaacaagngangacacnggaaggggacagangacaccagaacacgagcacgcccccancacagncggagnaangaaccaaaacnacnccaaaaacgggncnnnncgggcaaacgaagcnaaaangcagcnngaaaacncaaaaggaagagagaggggngcncaangcacaagagaancnganccaaaggacnacagagaagnaaagaagcaacnnggncaaaccaaaagngnaagaaaa

SEQ ID NO: 150861 - DNA, 238 bp, Arabidopsis thaliana columbia
  unsure (1)..(238): unsure at all n locations
aaagggaaccttgattttgtttttttggaggcancnnaacgggaaggctgcgtttcggatctttgcattccattagancagtcganagaggcagagacacgagatcgaaccgggcttctcttaccgggttatcaacaagacctagtgacccgtgtagctcaagcttctagaggtccagtcattttggtccttatgagtggtggaccaatcgatgtaaccttcgctaagaatgatcctc

SEQ ID NO: 150862 - DNA, 269 bp, Arabidopsis thaliana columbia
atgtaaaattaacttacgagattacgacatatatacaaaatatattttcaacaatgtttggtttctaaatatttttgtggatttcttttttttttattaattattagccctaagcgtttgggtattcggatcggatatttcgggttcggttttttggttttagaagtttaggacccgctgaggtaattatgattttaggtcggttacggttcgagttatttatatattgaatataaattggtggcaattataaatacttgaaattaaaa

SEQ ID NO: 150863 - DNA, 357 bp, Arabidopsis thaliana columbia
  unsure (1)..(357): unsure at all n locations
aggatcggcgtttcttcctaatcagacgatnnacattaacaatctcaacgaaaaagtgaagcttgatgagctgaagaaatcgctgaatgcagtgttctctcagttcgggaagatactggagatattggcgtttaagacctttaagcacaaaggacaagcttgggtagtcttcgacaacaccgagtctgcttccactgctattgctaaaatgaattaattttctttctacgacaaggagatgagaatacaatatgccaaaacaaaatcagatgttgttgtcaaggccgatggtacatttgttcctcgcgagaagagaaagagacatgaggagaaaggaggcgggaagaaaaagaaaga

SEQ ID NO: 150864 - DNA, 311 bp, Arabidopsis thaliana columbia
  unsure (1)..(311): unsure at all n locations
aganaacnaaacagaacagagcaatttctatacagncataaccattcctgncacaaaacttattctctttgcttctgcattacttctaacagctctatatatcggcgttaatgcatccaggtccaatgaaacatggcatgaacatgcagttgagaacccacatgaagtcgctgccatggtggacatgagcattcgaaacagcacagagcggngaagattaggttactttttctgcgccaccggcaacccaatcgacgattgctggcgttgcgaccgcaaatggcagcttcgtcgcaaacgtttagccgatt

SEQ ID NO: 150865 - DNA, 351 bp, Arabidopsis thaliana columbia
  unsure (1)..(351): unsure at all n locations
gagagggacatngggtctttaccaagccggccgttgacggactaacgaacgaccaattcttcttcctctttcatcttttctcttccttctgctttttcttctaatttcctaatnctcttccaaaattcaccattttcctttccaccacttcagagatcttccctttcttattagctatgtcttcttctaacacgccatcttctagcgccgccgctgncggatcgatagattctttcgccgcccggagaaattccaagagacccaagtattcgaaatttactcagcaggagcttcctgcttgcaaaccaattcttacgcctggttgggtgaattcaacagttttgatcatta

SEQ ID NO: 150866 - DNA, 344 bp, Arabidopsis thaliana columbia
  unsure (1)..(344): unsure at all n locations
accacaacccgntacgaacccgggtaataaccgccggttactccaagacagaccaatcggaagcggaggaggaactttaaatctgaacaaaatcaattacaacggaacgatttcgtatctaagactcggatctgacgggagtctcaaagattactcgtattttccagcaactacgtatctcaaaagggaagagagatgctcattcttatccacttactttctncggcaaagaaagttgaccgcgcttagcggcgaatacagatactgccatcgtgggatgtgcaacgcatgtcctacaccaaaaggaataactcacatgagtgataaatgcgcaccacctaaaa

SEQ ID NO: 150867 - DNA, 126 bp, Arabidopsis thaliana columbia
  unsure (1)..(126): unsure at all n locations
aaaggaancagccncaaacacnnggcaanggaacaacancncacacagcaacccgagaagagaggncgagnngcacccgaccagaaagcaaacccngcaagaggncgngggaaagacgnncaggag

SEQ ID NO: 150868 - DNA, 238 bp, Arabidopsis thaliana columbia
  unsure (1)..(238): unsure at all n locations
tcgagcgaatggtgcaacgncggcggatacgaagggtagcaccgcttgggatctttgaagggaacactgacgaacgncgacgaacgcaccggaaaaaattataaagttccggntttagatgatggtaccgttaaagccggtgatttcaaaaagatagagacggngaaggaagaaaaggggcttaagttatacgatccaagttacttgaacacggcttctgttagaatttcgatttttt

SEQ ID NO: 150869 - DNA, 238 bp, Arabidopsis thaliana columbia
  unsure (1)..(238): unsure at all n locations
cggcngagcgggggagaccaaggcacccagagaataggatgggcgtagnaagcgacgaaaagcggcgggggggngaaaanaagcggacacccccacacncccganaaggnnaaccnnnngaacggcngcngaanccaagggcaggcaagagacaaccnggcgaacggaaacaacnnagnagccagaggaaaagaaagcaaaagcganncccggagnagcggcgagcgaaaggggagca

SEQ ID NO: 150870 - DNA, 319 bp, Arabidopsis thaliana columbia
tccgaaattttccggttaacgcagttaaggggaaaattaggctatggcgatgttaggtgcacagcaagttccagcagcagcttgtactccagatatgggtgggaatgcttttgtgccccagaattatcacatattgcatcaatcaccagagcatgttcacagactttaccaagagattagcaagttaggtcgtcctgaagaagaaaggttaatgagcaacaattctacctcgcaagctattgacaagaagataatggcgcttggataccggggaatcagggcaaagatagctactggggacacacaagaatatattgga

SEQ ID NO: 150871 - DNA, 199 bp, Arabidopsis thaliana columbia
  unsure (1)..(199): unsure at all n locations
cgcgnccgaaacaacagagccgaannnnancnnnaancatatcttaaaaaatggagaaagcgancgagagacagacgcgntncacnngagcagcgccgaccctcttcttcttcttcgcacaattacgaggcttctctatctgcttctgcttgcttggctggggacagtgctgcatatcagaggacctctctctatggag

SEQ ID NO: 150872 - DNA, 127 bp, Arabidopsis thaliana columbia
  unsure (1)..(127): unsure at all n locations
aaaggaggaaaaaaaggacgangggnatggaccagggagacacccccccccagcaccaggaccagngaacaaaccggaaccgggaanccgggcgaagaaccggaacaacgaggannnaccggcacca

SEQ ID NO: 150873 - DNA, 342 bp, Arabidopsis thaliana columbia
  unsure (1)..(342): unsure at all n locations
attcttcgnagtgaagcaaaatggggttgagtttcgccaagctgtttagcaggctttttgccaagaaggagatgcgaattctgatggttggtcttgatgctgctggtaagaccacaatcttgtacaagctcaagctcggagagattgtcaccaccatccctactattgggttcaatgtggaaactgtggaatacaagaacattagtttcaccgtgtgggatgtncggggtcaggacanggatccgcctttgtgagacactacttcagacactcaagtctaactttgttgtgtagcaagacagaacagagttgtgaggctcggatgacttcacagatgctgat

SEQ ID NO: 150874 - DNA, 295 bp, Arabidopsis thaliana columbia
  unsure (1)..(295): unsure at all n locations
accacacccacgctcctngnnatacctntccctccccgtctccggtccatcaggagttgtcttcgccggggccttctccaggagtggaaccatcatctgattcaaactctcgtgttccagctccaggaccggctacagctcccaattcggccggnttggttggtccggggatggtggttcttgtgattatgataagttctctgctttgaggggtttatatattgtcgctagtcattaaatttgtgaggggattaattactctaccattgagattcatatttatgtgcctttttat

SEQ ID NO: 150875 - DNA, 181 bp, Arabidopsis thaliana columbia
cacctccgcttcctctaagaaatctcgtgagattgaccgtcgccgccgcagacggaagcagaagaagaacaacaaagcatcccaagccgatgtagatgcatcggacgtttctgctgcttctgaatccaaagagaatacagatccccagccacaggtttgtgagcagattgtgatagagtat

SEQ ID NO: 150876 - DNA, 312 bp, Arabidopsis thaliana columbia
  unsure (1)..(312): unsure at all n locations
tcacaaaccggctcttntaaattccaccaaaccctcagattctcaatctccgatcgtcggaaattctcagcgatggccggagctggcgtcgatgatttcgttaaaggaaatgtttttccgaatggtgtcgctctcatcactctcgatcgaaccaaagctctcaacgccatgaatttagatatggatataaagtataaaagctttcttgatgaatgggaatctgatccgagagtgaaatgtgttatcgttgaaggaagcacatctagggccttttgtgcagggatggatattaaaggagttgctgcagaaatc

SEQ ID NO: 150877 - DNA, 115 bp, Arabidopsis thaliana columbia
tatcagtcaacaggtcacaaacggcagaggaatagagtacaacagttcttacagtcttgaggagaatcttggagtgacaagagagttgagagaagagcgaccatcgagtaagata

SEQ ID NO: 150878 - DNA, 202 bp, Arabidopsis thaliana columbia
  unsure (1)..(202): unsure at all n locations
aaaacaaaaaaaaaagacaggcgttttttggaggnanggagaggcaaaaatgactaccaattacaacgagaagcttcttcttaattatgttcccgnttacgttatgcttccgttgggagttgtgaatgtggaaaatgtatttgcggacccagaaacgcttagaacgcaacttaaacgtctcaaagaagaaactggcgttgat

SEQ ID NO: 150879 - DNA, 327 bp, Arabidopsis thaliana columbia
  unsure (1)..(327): unsure at all n locations
cacgggagttttgttcaggcgccgcaancattcagttattgtcngagnncggacagggatggaatttttgtcatttcgaggattctgtctttcggatgtgatgaagaaagggggagacttattgggatggctttagtttaatagggttttactcattttatgtgaatagggaaagaaataggattgggtattttcttatacagatgatgatgatgatgatcaaagaataaaaataatgtatagggaagctttttgtaaacacaaatatgtttggtaaccattttggtatttgaatcaatgcatatggtttgttttctcgattaaaaa

SEQ ID NO: 150880 - DNA, 295 bp, Arabidopsis thaliana columbia
  unsure (1)..(295): unsure at all n locations
gatcagaatcgcccccaacgccnccggaagaatcggtcgtttggttgctagagttgttcttcagagggatgatgttgagctcgtcgctgttaacgatcctttcatcaccaccgagtacatgacatacatgtttaagtatgacagtgttcacggtcagtggaagcaccatgagctttaggttgaaggatgacaaaactcttctctttggtgagaagccagtcactgttttcggcatcaggaaccctgaggacatcccatggngtgaggctggagctgacttttgtgttgagtctac

SEQ ID NO: 150881 - DNA, 178 bp, Arabidopsis thaliana columbia
  unsure (1)..(178): unsure at all n locations
caaaannncaaaaagggcgaggagtacaggcgcaggaagcggcacaaccaaagggggcagaggaaagccaaaggccaccaaatccgtctctcgatcatctaaagccggtcttcaattccccgtcggaagaatcgctagattcctcaaatccggtaaatacgccgagcgtgtcggtgcc

SEQ ID NO: 150882 - DNA, 189 bp, Arabidopsis thaliana columbia
aagactgattacagggcaaggatccgtcttatcaatcaagacaagaacaagtacaacacccctaagtaccgttgtggtggtcgatttaccaacaaagacattgtggcacagattgtatctgcaagcatagctggtgacatagttaaagcttcggcttacgcacatgaagctcctcagtatggactcact

SEQ ID NO: 150883 - DNA, 306 bp, Arabidopsis thaliana columbia
  unsure (1)..(306): unsure at all n locations
ggccgacccacgcgttcgggaacaacagatgaagaaccagncagaacaaaattgccatttcgagacncgnccaaacaagcaagcggtatcttacaatggaagagagcccacgaaaggagaggatggttacaattggagaaagtacggacaaaaacaggtgaaaggaagtgagaatcctcggagttactataagtgtactttccctaattggccaacgaagaagaaagtggagagatctttggaaggtcagatcacaagagatgtgtataaaggaagccacaaccatcctaaacctcagtctactag

SEQ ID NO: 150884 - DNA, 352 bp, Arabidopsis thaliana columbia
  unsure (1)..(352): unsure at all n locations
gcacnccccaaagcccgtagctttttaacctncggtgaccgcccctaagctaccagttcctncggggaccgtccctaagctaccagtccctccggtgaccgtccctaagctacccgttcctcctgtgaccatccctaagctacccgttccaccagtgactgtacctaagctacccgttcctcctgtganccgccccaagctacccgttcctccagtgaccgtccccaagctacccgttcctccagtgacaggccctaagctacccgttcccccggtaactgtacctaagctacccgttccttcagtgacccgtcctaagctacccctttctccgatttcagggctacccata

SEQ ID NO: 150885 - DNA, 471 bp, Arabidopsis thaliana columbia
  unsure (1)..(471): unsure at all n locations
ccggctggaaaaccgggccgccacgcgtcgagggtcgtttcacgcaaaggccangttaatttagngaaangcngnacaaagaagatgttgggacaggaagccttcttgcctctcttgcagaagctgcgtttctcattggtcttgaaaagaatagtgacattgttgaaatggcaagttatgctccactctttgtgaacacaaatgatagacggtggaaccctgatgcaatagtcttcaactcctctcatctatatggaacacctagctattgggttcaacggttttttgcagagtcaagcggagcaactcttctcacttcaacactcaagggaaactctacttctcttggtgcatctgctatctcttggaaaaacaatggcaaagattacatacgcataaaggctgtaaacttcggagctaactcagaaaatatgcaagtgttggtacttgattggacccgaacgtgatgag

SEQ ID NO: 150886 - DNA, 185 bp, Arabidopsis thaliana columbia
  unsure (1)..(185): unsure at all n locations
ggaaaccacaaaaccaaagannancccggattcctcaaccanggcnnngaacaggcgggggcgncgacggaaaggcggcgaccccccccgcancagangnccncggaagcggccgngngaccaagaggaagacngnncgccaagccaaagggccaacaggcagcccacnggacggancngaccga

SEQ ID NO: 150887 - DNA, 211 bp, Arabidopsis thaliana columbia
  unsure (1)..(211): unsure at all n locations
tcttaacgctccctctatanacaaacagaagcgtttgatactgtaaaaaagatttagaaatggagactctgagtcgnttattggtttcatgtctctgtttccggtttagttctgatttgtctgaaaatcttcaatcacattttgagaagtacactaactttgtgcagactattgtataagaggaattgtcgtacgtcggaaacagtcgttg

SEQ ID NO: 150888 - DNA, 315 bp, Arabidopsis thaliana columbia
  unsure (1)..(315): unsure at all n locations
ggaaactactccaccccttcatcncaatttcctccgacatcccggatgttggcaacaactgcttctcccgtgtttgtccaaaccccaggagagaaggggttcactaactttgcccttgactttctgatgggtggtgtttctgctgccgtctccaagactgctgctgcttctatggaacgtgttaagcttttgatccagaaccaggatgagatgattaaagctggcaggctttctgaaccctacaagggtattggtgacttgtttcgcaggacgattaaggatgaaggttttggttctctatggagaggaaacact

SEQ ID NO: 150889 - DNA, 288 bp, Arabidopsis thaliana columbia
  unsure (1)..(288): unsure at all n locations
cgcaagggaggcagaaaaaaaaaaaaaacacaaaaataaatcaatggccgccncaacaaagacgggcggctccccagcaaacgccggaaaggcccccaaccttgcccctgcggcatcagaagtccctggaagcggccgtgtgacaatgaggaagactggtgccaagccaaaggggccatcaggcagcccatggtacggaaccgaccgaggcaaggacctggggccaatctctggcgaggcacccagccacaccaccggagaaggccccggagaccaccgaagggacac

SEQ ID NO: 150890 - DNA, 294 bp, Arabidopsis thaliana columbia
  unsure (1)..(294): unsure at all n locations
agcctggaactgggaagacattgcttgctaaggcggttgcgaattcaacatcagctactttcttgagagttgttggtagtgagctgattcagaagtatttgggagatggtcctaagcttgtgagagaacttttcagagttgctgatgaccttncaccatcaatcgtcttcatagatgagattgatgctgttggtaccaagcggtatgacgctcacttaggaggtgaacgtgagatccaaagaactatgttggaacttcttgaccagcttgatggatttgattcaagaggagatg

SEQ ID NO: 150891 - DNA, 226 bp, Arabidopsis thaliana columbia
  unsure (1)..(226): unsure at all n locations
gcagagaccatttggagnggagcnnacttgncgttttggccccgaaaaaggagggggggggctgcgaagaagaagaccgcccacaaaggggcaaacccncnanncgagaggaggccnaagcaanncggnangggnggagcnnnaccnccnaagaaggancncncncgcnacancaaanggcccaaanccaaccgncnncaaaggcaaaagaggancccgaagcaga

SEQ ID NO: 150892 - DNA, 382 bp, Arabidopsis thaliana columbia
  unsure (1)..(382): unsure at all n locations
gcaaccgngacaaaaaattgatttttttggcnancacaggaactangganaggaatgctctncangctctcacccccactgattggcaccttgaagcagcgtttgatgtgttttacagccagcctcaaccaagaagcaatgctgctgaagtaagacgcttggaggagctctacaatagatataaagacccgtattctgatatgattcttgcggagggtatctcggttctgtgtaatgatcttgaggtggaaccgcaagacatagtcacgttgggtctttcgtggcatatgaatgctgcaacagcgtgtgagttttccaggcaagaatttatcagtggaatacaggcattaggtgtagaatcaatcggggaagttgcaggaaa

SEQ ID NO: 150893 - DNA, 315 bp, Arabidopsis thaliana columbia
  unsure (1)..(315): unsure at all n locations
tctcacatcctcaaacnctgcggcttttcccgctacaagttgtgccattgctcctgaaaggatcaggtttactaagggtgctttttactacaaaagcaacaatgtagtgacaggtaaaagagtgttttccataaaagcacaaatcacaacagaaacagatactcctactcctgcaaagaaagtagagaaagtgtcaaagaagaacgaggaaggtgtgattgttaacaggtacagaccaaaagagccttacactggaaaatgccttcttaacaccaaaatcacagctgatgatgctcctggagagacctggcacat

SEQ ID NO: 150894 - DNA, 314 bp, Arabidopsis thaliana columbia
gatgatacctctcaacacaccggcaagagttgtgtggttgatgggaatgtggcgagtgttatgtgttcttacaatcaagttaacggcaaaccgacatgcgctgatccagatctgctctttggtgttatccgcggtgaatggaaattaaatgggtacattgtttcagattgtgattcagtagatgtcttgtataagaaccaacactatacaaagacttcagctgaagctgcagccatatctatattggcaggtttggatttaaactggggttcattcttgggtcaacatacagaggaagcagttaagtcgggttt

SEQ ID NO: 150895 - DNA, 304 bp, Arabidopsis thaliana columbia
  unsure (1)..(304): unsure at all n locations
gatgtggagacacaccgccactnnggacagtcgttagcaactgaagtccgagcttcttctttcaccgacatagaagatctcttggcgttcgttagctggctagatgaagagctctccttcttggttgatgaaagggcagttcttaaacactttgactggccagaaggtaaagctgatgcgctacgagaagcagcttttgaatatcaagatcttatgaaactggagaagcaagttacgtcctttgttgatgatcctaatctctcttgtgaacctgctttgaagaagatgtacaagttgctagaga

SEQ ID NO: 150896 - DNA, 119 bp, Arabidopsis thaliana columbia
  unsure (1)..(119): unsure at all n locations
aacaaggcaattgtggatcggggaagaagcagattgcttatctaatctttcgaggcagctcgtggatcatgtaaatgtgaccgatccgncaacccgaaggttgtgccagtcaaacatgc

SEQ ID NO: 150897 - DNA, 132 bp, Arabidopsis thaliana columbia
acgggggcgcccccccccacaaagatgagcttctctctaagatggagtgtgatggagaaaaggtggtgaaggatcatttatgggccaggaaagaaagaaaaaaggttttggaagcatatatcgaaacagcga

SEQ ID NO: 150898 - DNA, 362 bp, Arabidopsis thaliana columbia
  unsure (1)..(362): unsure at all n locations
gaacggcggttganctgagncanaangcngttgatttttcangaaaancaanannnnagcggcggaataaggagannagggggactcgcttcacctggcaaccctttcttaattctattcaagagaaacataaagtcggngaccttgtatgcattagtgggaaggtaaagtcattgcgtgcagaagatcattttgaaatgagggaatacaatatagatgtactcaaagatgaagaagaatcatctcatcgagcccaggggagaccatatcctatatatccttcaaaaggagggttgaacccaaagttccttagcgatgtcatcttcagggctcttgcgggttctccccgccaatatggatcc

SEQ ID NO: 150899 - DNA, 405 bp, Arabidopsis thaliana columbia
  unsure (1)..(405): unsure at all n locations
ttttagaaanacaaaaaaaaaggcggagctttttcgagaaatttgttgcttacccttccctgtgatattccttgggatctgctttacagttttatacatacacatttgattggaccattggttcggtattcttaaacgaccggagatttatccacacaacgtcttctcgcagccaaacacatcaaactacaacatgttcttcttgtgtagaaaactctcactttcacgattccgacaccattntcctttcagactccgtcgttttcttggggaaaacccaaatccaactacccatttctttacattacccgacaatcaaacaaaacgaccagagaagtcgagactcgacggcgtagaacacaaaaccctaaaggtaaatggcataaacatgcacgtggcggagaa

SEQ ID NO: 150900 - DNA, 257 bp, Arabidopsis thaliana columbia
  unsure (1)..(257): unsure at all n locations
ccgggccgacccacgcgnccggagagctctcactataaaacagagcacaagtcaatttttctaaccacnccaacagagaggcgaaagaaaaaaaaagcnanggccncccagaagaagaagnnaaccanggcaaaggangnggaagccgnncccggagaaggannncagacaagagacnancaaganccgccaccagcnccgnnnannganggagcggagcnaaagaagnggncnnncaacagagcagnnancgcaga

SEQ ID NO: 150901 - DNA, 391 bp, Arabidopsis thaliana columbia
  unsure (1)..(391): unsure at all n locations
gaaaaatngncaagggggggtttgtaaacatagnagcctatgctgaaggacatactgtgaagttagcagacaagcttttgttgaaggatgtgatttctgatcttcctgcagttgccaacagtgaaaaaagagacgagattacatatgacaaagatcccacaacgccatttcaaaagttcatcagattgagaaaggatgaagcgtcaggttcacaatcaaagtccaagtccaaaaagcatgtcttatatgatcatcaccctcttaatcttaatataaatgactatgaacgggtttgtcaggtccccaagagaaagggaggcgatttagggacttttctgtgtattgttgacctggaatgagtcaaagtgaagagggaaggaagggcaaactt

SEQ ID NO: 150902 - DNA, 175 bp, Arabidopsis thaliana columbia
  unsure (1)..(175): unsure at all n locations
aggcagcccaaggggcggggctgaccgagacaagaaccccgcccccacccaccggcgagcccccgagcaaccnaaccggngaggnccccggngaccacggangggacaccgcnggncnanccgccgacccagagaccnncgccaggaaccgngagcnagaagnnanccacagcag

SEQ ID NO: 150903 - DNA, 402 bp, Arabidopsis thaliana columbia
  unsure (1)..(402): unsure at all n locations
accaccaccaccaaccggagaagcttttatctttaccggtcatgccccgcggntcaggtcaaccggcggctgatacagagatgacagaagctcctggaggttttcccgcggcggctccatcgcctcagatgcctgggattgagaatattccggcgactcttagccatggtggtaggtttattcagtataacatatttggaaacatcttcgaggtcaccgctaagtataagcctccgatcatgcctattggcaagggtgcttatggcatcgtttgttcggctatgaattctgaaactaacgagagcgttgcgattaagaaaattgctaacgcttttgacaataagattgatgctaagaggactctccgtgagatcaagctgcttcgtcacatggatcatgaaa

SEQ ID NO: 150904 - DNA, 342 bp, Arabidopsis thaliana columbia
  unsure (1)..(342): unsure at all n locations
ctcaacacttcacactgnnnncaaaacagtttcatattctcagcncagccgccaccgccagcggccgtttgtgctcgctccggcgaccttctctgcggcttgtttcgcaaaaaatccgtcgcgccttttcgttttactcagcctgtctatcgtacgtcgctgtgtccaagtttcgttgctgttcgagccatggcagagtctcagactgctcagaggaatcagccgcaatcctcaggctcctctggggagaagcaagctttgatatctctatctgacaagagggacttggctttttttggcaacggtctgcaagaattgggatacactattgtttctactgga

SEQ ID NO: 150905 - DNA, 149 bp, Arabidopsis thaliana columbia
  unsure (1)..(149): unsure at all n locations
caggcgcnacnccagcggaagagcncaccgnngaagagaggaancnccncncgggggcnaacaaaaacgngancggancncnacgcgccgccgggaggancgngncnncganggagcagaaggaagagaggaggaagaacgacgagcac

SEQ ID NO: 150906 - DNA, 196 bp, Arabidopsis thaliana columbia
agcactgcatcgtcttcctcggtctcggttaaaccaatcggaggaatcggagagggagcgaatctgatctccggtcgtcagcttcgtccaattcttcttctcgattcgccggcgatcaacggaggagagaaaagagaaattctcaaaccggttaaagccgccgctgctgaaggtggagataccgctggggatgcta

SEQ ID NO: 150907 - DNA, 266 bp, Arabidopsis thaliana columbia
  unsure (1)..(266): unsure at all n locations
ggaaagaaaccacngagaagacaactacaagaagaagaaagccccgccaccncaagaacccaacnncnccaagnagnancaanagngacgncacnncaacgncancaacancaacnncacccacancaacggccacgccancnccggnnncagcagagaggggangnngnacnccggagaagncacgaanaccggagangcngacgnngccaccggcaccgaagaagcaaaagggggcgcaaaacngcgcnnnaaggaggagacaa

SEQ ID NO: 150908 - DNA, 299 bp, Arabidopsis thaliana columbia
cccatcagatggcctcggaagcggccgtgtgaccatgaggaagactgtcgccaagccaaagggtccatcaggcagcccatggtacggatctgaccgagtcaagtacttgggtccattctccggcgagcccccgagctaccttaccggtgagttccccggtgactacggatgggacaccgctggtctatccgccgacccagagaccttcgccaggaaccgtgagctagaagttatccacagcagatgggccatgctcggagccctaggctgcgttttccctgagctattggctaggaacg

SEQ ID NO: 150909 - DNA, 242 bp, Arabidopsis thaliana columbia
  unsure (1)..(242): unsure at all n locations
gggagagagcgaaccataggatgagatgnnncnaccgncaaacgggcgggcattnagggcgaaagggaagcccaccaccgggancgncgggcnggacgnngnncccaacgcgagagcggngcngancgancncnacagcaaaacccnaaaggaganccaagcngngccggaggangaagggnaccgnaaagcnggggaancaaacacgcgccaacgncncaangngngcaaggaagaagaag

SEQ ID NO: 150910 - DNA, 374 bp, Arabidopsis thaliana columbia
  unsure (1)..(374): unsure at all n locations
gncgggnggctacgancgncaccattanctaagtttggcngngaaaaccganagcgcggggacgatctctatataggcaagagcgacaagatgcgtaggtggttgtgctgtgcttgccacgttgaagaaccttaccattcttctgaaaatgaacacctcagaagccctaagcaccacaatgattttgggcatcacactagaaaaccacaggcggctgtgaagcctgatgctttgaaggagcctccatctattgatgtgcctgcattgtcattggatgagttgaaagaaaagaccgataactttggatcaaagtcattgattggtgaaggatcttacggcagagcctattatgcaaccttggaagatggaaaggc

SEQ ID NO: 150911 - DNA, 247 bp, Arabidopsis thaliana columbia
  unsure (1)..(247): unsure at all n locations
acaaaggggacgnnnnngnncncgttatatttaattttccagaaaaaancncaaggcgcgaggggggaagaaacagannccgcgccccccgccccggnganacaaacccnaaccgagccggcgacggagaaagcgcaaacccnagaaccnaaccnagccncaancgaagccaccgncgaancggnggggcagggaggcaccgaancgacnnngaacaacgacgcnaanaacaacaacgccgcngaca

SEQ ID NO: 150912 - DNA, 133 bp, Arabidopsis thaliana columbia
  unsure (1)..(133): unsure at all n locations
agcaaaagcaggnncncaagcccnncccngcccgcgaccgngancncngccgcnnccacgccgacgacnangncncnnnncnccgcagcannaccccngaaacccagcaagancaganncgccaacnnaagcg

SEQ ID NO: 150913 - DNA, 359 bp, Arabidopsis thaliana columbia
  unsure (1)..(359): unsure at all n locations
gaaaacannanacngggacagggcgggcccggggctaacgccacccagccccaaagcgaaatctgcgccacttgagggaaatgatggttcatttgaggagtttttagatccagactttggtggatcagccattggacgtgttagccctgttgactctggtttgtggtggatcatattgctgagagcttatggaaagctcacgggtgactacacgttgcaagagagaattgatgttcaaacagggatcaagatgatactcaagctttgtctagccgacggttttgacatgttcccgactctacttgtcactgacggatcatgtatggttgatcgaagaatggggattcatgggcattcac

SEQ ID NO: 150914 - DNA, 335 bp, Arabidopsis thaliana columbia
  unsure (1)..(335): unsure at all n locations
actcgcatctcatcccatctgccggagcgagggagtctaaggtcttttacttgaagatgaaaggtgattatcatcggtacatggctgagtttaagtctggtgatgagaggaaaactgctgctgaagataccatgctcgcttacaaagcagctcaggatatcgcagctgcggatatggcacctacttatccgataaggcttggtcttgccctgaatttctcagagttctactatgagatacttaattcttcagacaaagcttgtaacatggccanacaggctttttgaggaggccatagcttgacttgacactctgggagaggaattctacaaaga

SEQ ID NO: 150915 - DNA, 347 bp, Arabidopsis thaliana columbia
ccaagaaggcggaggaaggggtcgaaagccctcctgtttccagtgaagaagaagaatctggctcatctggagaagaatctgaatcttctgctgaagttccgaagaaagtcgagtcttcgcaaaagcctgaatctgactctgaaggcgaatctgaatcggagtccagttctgggcccgagcccgagtccgagcctgctaagacgatcaagctgaagcctgttgggacttaaaccaatccagagacgtctggatctgccgcgactgtacctgagagttcaacggctaagcgtcctttgaaggaagctgctcctgaagctattaaagagcagaagacatcggacactgag

SEQ ID NO: 150916 - DNA, 209 bp, Arabidopsis thaliana columbia
  unsure (1)..(209): unsure at all n locations
gcgcagacgccgngnnacncagcggcgacggcgacggnaagaaccacacagcnaacaaacncgcaacacgncacgaacgagnnnggcnangngaagnangcgaacaagcaccagcacacgncacgngcaaagcggacgccgcngcgnaaagcgncacgngcgaccgcgananccacncagcnaaaccacncncncgccgccacgagcgc

SEQ ID NO: 150917 - DNA, 261 bp, Arabidopsis thaliana columbia
  unsure (1)..(261): unsure at all n locations
gggcgagacgccngaaggccaccgccnccgcgnnaacaacngcggnnnnnncggaagcncagcgacaangaancaaagnncaaacngnnacggcgancncngncncaaacaacaacaacaagcnnccangaaancaaccgncgaancaacncncncnccggggaccgcaccngnncncgaaaaccacgcggcggagnnagagancccgacgacgaagaagacagaggagaaaaaaccganncaaannccgacggagcaacc

SEQ ID NO: 150918 - DNA, 142 bp, Arabidopsis thaliana columbia
gaaagactgactacagggcaaggatccgtcttatcaaccaagacaagaacaagtacaatactcctaagtatcgttttgttgtccggtttaccaaaccaaagacatagtggcaacagaatggtatctggcaaggcatttgctt

SEQ ID NO: 150919 - DNA, 336 bp, Arabidopsis thaliana columbia
  unsure (1)..(336): unsure at all n locations
agcgaanaaagcagaacccgccatggataagactacgcccatcctccaccagctcctnttctcgacatgggtgagctcaaatcctggtctttctacagagctctcatcgctgagttcatcgctacactcctcttcctctacgtcaccgtcgctactgtcatcggccacaagaagcaaaccggtccttgtgacggcgttggtttacttggtatcgcttgggctttcggtggtatgatctttcgcctcgtctactgcaccgccggatctctggtggcacataacccagctggactttcggctgtcttgcccgaaggctcttgtgcgagctctggtcat

SEQ ID NO: 150920 - DNA, 367 bp, Arabidopsis thaliana columbia
  unsure (1)..(367): unsure at all n locations
gggaaaacnggggaggggtatacaagcgcagttgacttacaccnctccgaatgcgaatcaaatcggttttggtgggtccgagttttctttgatcaacaacaatggcgttatcggaatcggtaacgatcagtcttatcttgtcaataatctccagttgcagaaagatttcaaccaacatgctctgtttcatcatcagcatcatcaacaacaacagtttccttcttaaagctttttagctgctcagatggagaaacagaagcaagagatcgatcagttcatcaaaatacagaacgagaggttgagatatgtgttgcaagaacagaggaagcgaganatggagatgatttttacggaaatggagagtaaa

SEQ ID NO: 150921 - DNA, 261 bp, Arabidopsis thaliana columbia
  unsure (1)..(261): unsure at all n locations
tcaaggaacgnggaacaacggaagagaggacccaagatgcgccgagacctccatggactcgcaaccgatgcaaggacaacaacaaggccaaccatggcaaggacgacagggacaacaaggccaaccaagggaaggacagaaacaacaaggacaacaaagaagacaaggccaaccatgggaaggacagggacaacagggacaacaaggaccacagggacaacaaggccaaccatgggaaggacagggacagcagggacaaca

SEQ ID NO: 150922 - DNA, 239 bp, Arabidopsis thaliana columbia
  unsure (1)..(239): unsure at all n locations
ggaaaacaccgggccgacccacgcgnccggngagagaagaaangaagagaaaaattttgggttgtattggngnganganggaggcgagacggggccnnngggcacncnccgcaacaccccaagcagnaacagaggcngagccaggnnggangangaacnncnacaaggacacgngnccncaggccgaagacaancgccgngaacaagncaaacnccncaacaaacgccacaagaacacc

SEQ ID NO: 150923 - DNA, 254 bp, Arabidopsis thaliana columbia
  unsure (1)..(254): unsure at all n locations
ggccgagccacgcgnncgagaggacgcaagggccggngcngaggagaaaataccaatagtgaacncaggggaccacaagcgaaaggagaaaatgnggannaaacccgcccccaccaacgctataanagnnnctaagggggataacatatttgcacatttccgtggcaacaacagctttgagctttgtgggtttacaagtctggacggagttgtctcttgaaagacttagagctgatgggataatcaccaagaac

SEQ ID NO: 150924 - DNA, 299 bp, Arabidopsis thaliana columbia
  unsure (1)..(299): unsure at all n locations
gacgccagcctgcagttttaaggactttcagccagagactctgccggggtttcaatgatgctgaaaatggatttgtcgatgatggatggtctccaatgagtagcgatggaggagaggatattacgaccatgantaactcttcctctgctaaatangctggctcccaatacggaagctcatttctttccaagttttggaagtggtgtgctctgtgccaaagctctatgcttgtgcagaatggtccaccccttgtattgattcggatcctgagagaacaccgagctgaaaggcagactatg

SEQ ID NO: 150925 - DNA, 339 bp, Arabidopsis thaliana columbia
  unsure (1)..(339): unsure at all n locations
caaatggatacaagntctatgttggtgggaaagatggttgggtcccgactccttccgaagattattctcattggnctcaccgaaaccggtttcaagtcaacgacactcttcattttaagtacgccaagggaaaagattcagtgttggaggtgactgaacaagagtacaacacatgcaacacgacacaccccctgactttccttctagacggagactctctcttcctacttagccactcaggttcctactttttcattagtggcaactcttaaaactgccttaaaggtcagaagctagccgncaaggtcttgtccaccgtccaccacagacactcttctc

SEQ ID NO: 150926 - DNA, 187 bp, Arabidopsis thaliana columbia
  unsure (1)..(187): unsure at all n locations
gaaaccagcnnggcccacgccccaccaagacggcggcnagaggaaaaccgncgcncacaagagcnncgcccnccnncaaaanngncgccagnggcgncaagaagancaagaccgacaagcccnncggaannaacggcagcanggaccngagggacggcgncgacgcccccggcagaaagggcaaggg

SEQ ID NO: 150927 - DNA, 265 bp, Arabidopsis thaliana columbia
  unsure (1)..(265): unsure at all n locations
gcgaccagcngagagancagacaccgaagccagcgaaacagacgcccaacgacacgaacgggagcacaaacgcaggagncaaagagcgncgaaacacagacaaagcccgcaccaccgacaagaacaacaacccagacggcnnaaaacagaagaagacaacnaccgacaacagcaaaaacaacaggaaccggaagagaaccgggccaaacaacgaaacggaaaaaaggaaacggaccaaggagagacaaaaaacaaaccggacaag

SEQ ID NO: 150928 - DNA, 201 bp, Arabidopsis thaliana columbia
  unsure (1)..(201): unsure at all n locations
aacaaaacaaaacnngcacaanggttaacnaatatgaggnacaaaaaccanagngggacggggggaagaaaaaggcaggccccgccccccacaccnnagagancgaaccagggacgaagaacaacnnnngggncccnaaggaaacccnaaagaagaannccggnaccggaaaaccaacgaaacccganaaaccnaaaaagc

SEQ ID NO: 150929 - DNA, 286 bp, Arabidopsis thaliana columbia
  unsure (1)..(286): unsure at all n locations
agaagggcaaagaggggggggcgaggangaagnagaacgcggcaccaccaccgcgccaaangnnacaagaaagngaagaaggggcnnngcaagggcccnncaaaaagagaccaanngnncgangaaaagnccaacanngnnancancaaggnggnnggcngnagnccngagaggancaaggacaaacncngnnccaaaggcgngcggcgcgaaaagaccaaagaganncgcgagccacccaagccnccncagccacaaccccaacaaccaccgcagaaaccgaaag

SEQ ID NO: 150930 - DNA, 161 bp, Arabidopsis thaliana columbia
  unsure (1)..(161): unsure at all n locations
ggcncaggccacnanggncgcncctataaattgacttaagnccnccgcngccaacggagccgcccgcaaggcnaacaaccacaccacccccaccacaagcaacggcggaagagnnaaccgcangcaggngnggccnccgangggaaagaagaagnnngaga

SEQ ID NO: 150931 - DNA, 107 bp, Arabidopsis thaliana columbia
  unsure (1)..(107): unsure at all n locations
aaaaaaaangagagccacgtcanacacccaaggcggncaatgnggaaaccagatcggagcaaagttctgggaagtgatctgcgacgaacacggcattgatcacaccg

SEQ ID NO: 150932 - DNA, 306 bp, Arabidopsis thaliana columbia
  unsure (1)..(306): unsure at all n locations
ggccgggcangcgtacggtggagcgagggtgacaacangattgagagtantatcaaccnngacngnnacaagggaccggcgcgacnagaggaantcgaccacacccacgagcccaagaggccgncagacaagcccctncgnctcccacttcaggatgtctacaagattggtggtattggaacggcgccagtgggacgtgttgagactgggatgaacaagcctggtatggttgtgacctttgctcccacaggattgaccactgaggtcaagtctgtngagatgcaccacgagccacttcttgaggca

SEQ ID NO: 150933 - DNA, 115 bp, Arabidopsis thaliana columbia
  unsure (1)..(115): unsure at all n locations
aagcnngagagaagngannagncngnagaagaagaagagnnaaaaccanncaccaaagaagaaanggagaaccagagacaggcanggagancaaancnnaccaaaancaagcaga

SEQ ID NO: 150934 - DNA, 100 bp, Arabidopsis thaliana columbia
tttttgaaaaccagggctaattggctcccaacactattttcgtctgaacgatgaaaatgcggttatggttccgctgaaaaactatttggatgctcaatac

SEQ ID NO: 150935 - DNA, 437 bp, Arabidopsis thaliana columbia
tgggattcagttcccggatgttgtccacgcgttgaaacctaacccgaaaacaaacatccaagagtactggaggattctggactacatgtcccacttgcctgagagtttgctcacatggtgctggatgtttgatgatgttggtattccacaagattacaggcacatggagggtttcggtgtccacacctacactcttattgccaaatctggaaaagttctctttgtgaagttccactggaaaccaacttgtgggatcaagaatctgactgatgaagaggccaaggttgttggaggagccaatcacaggcacgccaactaaggatctccacgatgccattgcatctggcaactacccccgagggggaactttttattcaggaccatggatccctggcagatgagggataagtttggacctttgacccactttgatgtga

SEQ ID NO: 150936 - DNA, 314 bp, Arabidopsis thaliana columbia
ccaccggcgccgtttttcgaacccggcgagctcaaatcttggtctttctacagagcagggatagctgagttcatagccactttccttttcctctacgtcaccgttttgacagtcatgggtgttaagagagctcccaatatgtgtgcctctgttggaatccaaggcatcgcttgggcttttggtggcatgatctttgctcttgtttactgtactgctggaatctcaggaggacatattaatccggcgggtgactttggtttgttcttggcgaggaagctatctttaaccagagctctgttctacatagtaatgca

SEQ ID NO: 150937 - DNA, 179 bp, Arabidopsis thaliana columbia
gagtaccttgtaatctcccagctgaagtttcagttctctgtgagaagttccgttcttactaccttgggacacataccggtagaagattgtcctggcaaacaaacatgggcacagcagatatcaaagccatctttggaaagggtcagaaacatgaactgaacgtgtcgacttttcagatg

SEQ ID NO: 150938 - DNA, 326 bp, Arabidopsis thaliana columbia
cgtgttatcttctgaatatatatcatggcatcctctggactgggaaaaggagtaggcacttcgagatctgccaaaggtttaaagagctcttctagttctgtcgattggttgaccagagatttggctgagacgaggataagggacaaagtagagaccgatgatgagagagatagtgaaccagatattattgatggggctggtgctgagcctggtcatgtgattagaaccacacttccgggtcgaaaaggtcaaataagacagacaagtagttacatattataacatgttgttggtactggttcctttggcatggttttccaagctaa

SEQ ID NO: 150939 - DNA, 140 bp, Arabidopsis thaliana columbia
tgtgctctgtgagaaggcttctgtcgagctatatcaatgctgggatgatcgaaagttatgtgtttggtggtgttactgctaaaaggaacgtgtgaatacgcttcatgcgtacgatgttgttgatcagaaaatgggttgag

SEQ ID NO: 150940 - DNA, 334 bp, Arabidopsis thaliana columbia
agaaaggggtttctggaaacaaggagttcataattcgcgatcttgatctatcgatcttcatttatatataaaagcgtgaatgagattatgatggagtcgaaaggtggtaaaaagaagtccagcagtagtagttccttattttacgaagctcccctcggttacagcattgaagacgttcgtccaaacggtggaatcaagaaattcaaatctttctggctactcaaactgctccaagaggccatcctgagtaccagcgtgcaccgatcttcataatatagttatagctttttttactttccaggttataatttttttcttttcaaagctccttttc

SEQ ID NO: 150941 - DNA, 229 bp, Arabidopsis thaliana columbia
tcctgagaggactgcattcatttccccaagctgctggggtaaactattctctaagttcatcgaacactgcgaatttgaaccttgtggctggttacaccaagttcctttttttatcagactcttactaaacccacgcttggagtgatttcagcaacttattcccaaagacctggacaatcagaatgtgactacttcatgaagacaggggagtgcaagtttggagagagat

SEQ ID NO: 150942 - DNA, 457 bp, Arabidopsis thaliana columbia
  unsure (1)..(457): unsure at all n locations
atcgtaaccatagtgaaagtggttcaaagatcatcagcanaatcgattatacgaatcttgttgagaagtttacaagagatggaaatctctctggagcatatgacttgttacagtctttacaagataagaacatatgtttgcctatttcggtttcaagaaccttcttgcagcggcgggtgagctgaacgatatgaaagcttcttgtagaagtcttcagaagaggtctttgatctttgccggggtaaggaaccattgagttcagattgtatctcaaccttgctagagcattcattaacacggatgattgcacgtatttgacgagtctgcttaaagagatatcagagtcttcactttcgtataggttaatagtaatgaacagaatcatctttgcatttgctgaaactagacagatcgattaaggtcttatgatactaaaggagatgaaagagtgggaatg

SEQ ID NO: 150943 - DNA, 183 bp, Arabidopsis thaliana columbia
acgccggaaggatggccaccttggcttattgctgcttgtggcgattcgatcaaagacttaacacctcgcagagctaccacatacgaaaagctcgagaagattgggcaaggaacgtatagcaatgtgtacaaagcgaaagatttattgagtgggaagattgtagctttgaagaaagttaggttt

SEQ ID NO: 150944 - DNA, 308 bp, Arabidopsis thaliana columbia
  unsure (1)..(308): unsure at all n locations
gctgggaacagtgatgcggtcactagggcagaacccaacagaagctgagctacaagacatgatcaacgaggttgacgctgatggaaacggaaccattgacttccctgagttcttaaacctaatggctaaaaagatgaaggacacagactcggaggaagagctgaaagaagctttcagggtgttcgacaaagaccaggaacggttcatatccgctgcagagcttcgncatgtgatgacgaatctaggtgagaaactgactgatgaaagaggtcgagggagatgaattcgtggaagccagatgtttgatg

SEQ ID NO: 150945 - DNA, 229 bp, Arabidopsis thaliana columbia
agtagcagctgagaacatcgaggtgccaccaccaaaggctgtggagtcggaaggagtcaccaccgtctccgagtctcttgcagctccggtaacagaatcttcaagcgcctgtcgaagtaacaaactaaagatttggtcggggagagacagagaaccaatcgaggaaacagaggaagctcaagttgaaactcccgaggtttgtggagatcaagaaagatgaagaagctcc

SEQ ID NO: 150946 - DNA, 355 bp, Arabidopsis thaliana columbia
cggtgactggaacggtgctggtgctcactgcaactacagtaccaagtcaatgagggaagaaggcggttacgagatcatcaagaaagcaatcgataaattgggactgagacacaaagaacacattgctgcttacggtgaaggcaatgagcgtcgtctcacaggacaccacgagactgctgacatcaacactttcctttggggtgttgcgaaccgtggagcatcgatccgagtaggacgtgatacggagaaagaaggggaaggatactttgaggacaggaggccagctttgaacatggatccttacattgtcacttccatggtttgaagaactacaatcctttggaatccttgatga

SEQ ID NO: 150947 - DNA, 181 bp, Arabidopsis thaliana columbia
caaatttctctcaaatgaaacaaattcacaccaaaatcatcaaacacaatctcaccaacgatcagttactagttcgtagcttataaggttttttttcttcgagaaccatacctttttgcttaacaactaattctttattacctgactatgatagacttttgtatacacctggagttctttt

SEQ ID NO: 150948 - DNA, 459 bp, Arabidopsis thaliana columbia
tagtgcaaaagcatctgaagctgtaaaaaacattcaacaagctagcatatcagatagcttggacacttcaacagatgtagatatgggaaatgctcaatcaaatggcgattctcttgatgatgttaaatggatggagacgctcttccatttcattatctcctctttcaaatctggaagagcttcgtatctgctagacgtaattgctggattcctctatccagtgatgtccttacaggaaacatcacataaagatctgtcaatattggccaaggcagcctttgagctgctgaagtggcgagttttccagagtctcatctacagaaagttattggagtcattctttcttttgctgatgactctaactggcggataagatcttaaccctgacatatctgcgaacttttatgtataggcatactttcatccttactcatgaagataaacaaaaaaatctggaaa

SEQ ID NO: 150949 - DNA, 317 bp, Arabidopsis thaliana columbia
cacattctgtcggaaactgtgtgaaacgtgttgtggttattgtgagctctgtcatcttcttcaagacacccgtctcgcctgttaatgctttcggaactggaatcgcccttgcgggtgtcttcttatactccagagtgaagggtattaagccaaagccaaagactgcttaagcaaatatcggctaatacctaatgtcatatcactcccgcgctttggatttgtatacaatttctcgagctaaagttttcagatagatggttttattcttttgcggggtttttcacgaagtttcatcattccctttttaagctttttcg

SEQ ID NO: 150950 - DNA, 241 bp, Arabidopsis thaliana columbia
cctgcgacccgcgttcgaagtcgtggcgctttaccaacaacggaacatccggcggatgcggctgtacgatcccaaccaggagactctcaacgctcttcgcggctccaatatcgagctcgtgctcgatgttccaaaccccggatctcagcgggttgccttcagccaagcggaagccgacacatgggttcccaacaacgtccgcaactttgcaaacgtcacaatttgcttcatctctgtcggg

SEQ ID NO: 150951 - DNA, 259 bp, Arabidopsis thaliana columbia
gactcctgacaagaactgaagctaaacataactttgacttagctactcagttcttcaacaagctgggatgagcaaccagataatacacactacctgtaatcactcgaaatgacggccaaggctgcacagctgcacgcagaaacttacaaacaaggcttatgctcacaaccaatgggtcgcgttgaagctccagcaccgccgagcttaaaagcagtgaaagaataagaaagtagtggtgcccaatatgatgctatgggtt

SEQ ID NO: 150952 - DNA, 321 bp, Arabidopsis thaliana columbia
tcgaacttcggtagagtgacaaggactacaaagagccaccacctgcgccgttgttcgagcccggcgagctagcttcatggtccttctggagagctgggattgctgagtttatagctacgtttttgttcctgtacatcactgttttgactgttatgggtgtgaagaggtcaccgaacatgtgtgctttcgtcggaatccaaggtatcgcttgggctttcggtgggatgatctttgctctcgtctactgaaccgttggtatctccggtggacacatcaacccagcggttacgttcggtttgttcttagctaggaagctttcgc

SEQ ID NO: 150953 - DNA, 436 bp, Arabidopsis thaliana columbia
  unsure (1)..(436): unsure at all n locations
gactganctgtgtnttggtcttcccggtggagatacagtggctccggtaacccggaaaacaagagaggggttctcaggagacgggttggatctggaagctaaaatctgaataatgagcctgcaaacaaggaaggatctacgactcatgacgtcgtgacttttgattccaaggagaagagtgcttgtcctaaagattcagncaaacctccggtcaaggcacaagttgtgggatggccaccggtgagatcataccggaagaacgtgatggtttcctgccaaaaataaagcggtggcccggaggcggcggcgttcgtgaaggtttaaatggaccgagcacccgacttgaggaaaatccgatttgggggttgtataaaaactaccaatgagcctttttaatggcttggtttcaacaatggtcaagctttttttaaccatg

SEQ ID NO: 150954 - DNA, 350 bp, Arabidopsis thaliana columbia
gttgcagcgaaagagaaagtcacgaaaaagcggtaccaattcgacactttcactttttcggaagaactagagaagagatctacaaaagttgtttaggattttacttcttcgtaatgggttctgttgcgtcaagtgtaactcctgatcctctcctgtcgtcatttatcttacctacacgatcacagagttcttctgcgccacgccaaaccaaaacgtatccgagataaacagatagagcgcagagacagtgtcatttaccggctcgttaagatcggagagagaggccaatagagttgtcaagctttgcatagcatttcgtgagctatgccatcaaatggacatgagactat

SEQ ID NO: 150955 - DNA, 369 bp, Arabidopsis thaliana columbia
cttcttctaaaagtcttctacatgagaccaacatgggcagtggtgctattattggtgttattgactctggtatatggtcagaatcaggctcctttgacgatgatggatatggaccaataccaaaacattggaaaggacaatgtgtatctgcagaccagttcagtcctgcagattgcaacaaaaagcttattggagctaaatactacattgatggtcttaatgcagatctggaaacaagtattaacagtactacagaatatctatctcctagagatcatatgggcacgggactcaagtatcatccacggcagctggttccttcgtttctaacatgactttgcttggtctctcctctgggtcaatcatgag

SEQ ID NO: 150956 - DNA, 336 bp, Arabidopsis thaliana columbia
cgaaacttgcatagcttggagaattaccacatcaatctctatggagtctttccaaaacgtatggtccggtgatgcttttgaagcttggaagtgtcccaacggtcgtagtttcttcttctgagacggcaaaacaagttctgaaaatcaatgatctacattgttgtagccgtcctagcttagcaggggcataagagctctcttacaattacttggacattgctttctctccttttgatgattatgggaaagaattaaggaggatttgtgtccaagaactctttagtgcttagcgagttcactcttttcaacccatcaagggaagaagaagtgaggaaa

SEQ ID NO: 150957 - DNA, 294 bp, Arabidopsis thaliana columbia
  unsure (1)..(294): unsure at all n locations
taacaaagacttgaatctaccaacctctgttcaaggtcttgtcgttgctatgtcattgatcggtgcaacggtcatcacgacttgctcaggaccgatatctgattggctcggcagacgccccatgctcattttatcatcagttatgtatttcgtctgcggtttgataatgttgtggtctcccaatgtctatgttctgtgctttgctaggcttcttaatgggtttggtgccgggctcgcggntacacttgttcctgtttacatttttgaaaccgctccttcggagatcagaggaca

SEQ ID NO: 150958 - DNA, 376 bp, Arabidopsis thaliana columbia
  unsure (1)..(376): unsure at all n locations
gatgaatcaactggtactattgggaaacgtctcgctagcatcaacgttgagaacgttgaatccaacagacgtgctcttcgtgagcttctcttcactactcctggagctcttccttgcctcagtggtgttatcctctttgaagaaactctntaccagaagagctctgatggtacgccttttgttgatatgttgaagagtgcaggagttttgcctggtattaaggttgataagggtaccgttgagcttgctggaaccaatggtgagactactactcaaggtctngatggtcttggtgaccgttgcaagaaatactacgaggcttgtgctcgtttcgccaagtggcgtgcggttcttaagattggtgttaatgagccat

SEQ ID NO: 150959 - DNA, 338 bp, Arabidopsis thaliana columbia
  unsure (1)..(338): unsure at all n locations
tcgactttacggaccagtgtcagctttggcccgagaagcatcagtaaatataaagttaggtgacctagagattcccaagggcacaaccgtagtcatcccgcttttgaagatgcatagcgacaagaccctntggggatccgacgccgacaaattcaacccaatgcggtttgcaaacggcgttttccgagccgncaatacccaaacgctctcctagcaattctcgtcggaccaagagcttgcattgggcaaaactttgtcatgatcgaagccaagactgtgctcaccatgattcttaaacggtttcggttattagcctctgtgacgagtataagcacacc

SEQ ID NO: 150960 - DNA, 259 bp, Arabidopsis thaliana columbia
aaaacctcggtgccgagaaccgaaactgtcggttttttcggttcgggtttctcggtttcttccgaactcccaggcctagttagggtgtatttttcacgagttttgcttctcttttcatcggcgacgaccgacccctagtttctgtcaaaacgttaacgatccgacttgagcgtcgacagttagagaagaagacagcgattgtgtgtagatcgacggcgaacgtgtgtcgatccgtctcgatcgacgggaatacgtttcg

SEQ ID NO: 150961 - DNA, 455 bp, Arabidopsis thaliana columbia
ggagaaagtaaaggggaagattgtgatgtgtgatataggaattaatgctagagttcaaaaaggggatgtggttaaagcagcagggggagttggaatgattctggctaacactgcggcgaatggtgaagagcttgttgcggatgctcatttgttaccggcgaccaccgttggtgaaaaagccggtgatataatccggcattacgtgactactgatcctaatcccaccgcttcgatttcaatcttaggaacagtcgtcggtgttaaaccatctccggttgtcgcagcgtttagctcacgtggaccgaattcgattacaccgaatattcttaaaccggatcttgatccgttcctggagtaaacatcctcgccgcgtggaccggtgctgctggaccaaccggactcgctttcgattctcgccgcgtggagttcaatatcatctctgggacgtcgatgtc

SEQ ID NO: 150962 - DNA, 459 bp, Arabidopsis thaliana columbia
gttcttgaagctccattccggtttgaaaaacgtccaattaataacagagtcattgtccaaattgctctctttgatgtcctccccagggaatgaagaaacagatccgaggaagctataaaagcggcatcggaaaagcagaaattggcagcctcatgggtccaagctgcgttagtcactaacttatcgcccttctctgtctactccagcaaacaagccaaacttgctgcctccaggagcaaacccgtgatcatactcgagagcccgggtaataattcctctagtaaaacccgtgggaatattcaaaacaagccaacgattggatctaaactcgtagcacaaggaatgatccgtaaacacagggagaacagtagcagccagaaagccacctcggtagcagggtcagagtctccaccgttaaactgggtgaaaggggaatgtctaaacgaggcaactgatctg

SEQ ID NO: 150963 - DNA, 314 bp, Arabidopsis thaliana columbia
  unsure (1)..(314): unsure at all n locations
ttagaacctcactaaaagggggacggagagacacattagtccgtgcaagtaccgacgacgaagctgcctcttcgcatgcactgccaggcttccgttcttcgaggctttaaaatccgcttagagcttgaccttttgagattatggcaagaatggtctcccatgttnctaccggancgcttctaaacttccgaccaaaaatcctgaagctcggcatgctcgaccgtatcctccgtttcaacgtcttactccgtcttaacctgctncaacctaaactttccgtgatgggttgaacggtttacgggcttggtccggtt

SEQ ID NO: 150964 - DNA, 418 bp, Arabidopsis thaliana columbia
acgcgtccgtcgctttttgctatttccttgtaacttaaaagaagaaaaaatgagaggtagcggagcagggatcgccggcgttttgccggggttgtgtgctattcatcgccggaacaatctccgcctttgaagacatagagaggttgaggatttggccgttaccggcacaagttagccacggtggccggagaatgtatctaagtggagatttcaagcttgttacggagggaagcaaatatggagacgcctcagggattttgaaagaaggatttgatagaatgcttggtgttgtgaggctgagccacgtcatctccggtgaccggaattcttcaagcaccggtggatctgctttgcttcaaggactttacgtcatcatctcctcctctaccgatgagttggaatatggagcaaacgagtc

SEQ ID NO: 150965 - DNA, 370 bp, Arabidopsis thaliana columbia
cacaaagagtcctaacttcgagttgaaacaaacaccatttctcatctctatctcagaaagaacaaaccatttcgtgttctttgtttctctattctcataaggaaatataattcctgaaactgttgagttcttgtgaaaggaaataaaaaacatgatgatgggcaaagaagatctaggtttgagcctaagcttagggttttcacaaaatcacaatcctcttcagatgaatctgaatcctaactcttcattatcaaacaatctccagagactcccatggaaccaaacattcgatcctacatcagatcttcgcaagatagacgtgaacaggttttccataaccggttaactgcgaggaagacacaggagtttc

SEQ ID NO: 150966 - DNA, 409 bp, Arabidopsis thaliana columbia
  unsure (1)..(409): unsure at all n locations
cgtncgaattaacaaagaacgagttaatcggattatttacatctattgccgtcctcatatacgttacatggctctggtacaccaaacgatgtggtacgagactacctccgggaccaaatccatggccggtgattggaaacattttccagctcgctggtttaccgccacacgactcattgactaaactttcacggcgtcacgggccaatcatgactttacggatcgggtcgatgctgacggttgtgatctcttcgagtgaagtggctcgggagatcttcaagaagcatgacgcagctttggctggccggaagatttacgaggcgatgaaaggagggaagagtagtgacggcttgctcatcacgacttagtatggtgcgtattggcggatgctgcggaggctttgcaccac

SEQ ID NO: 150967 - DNA, 434 bp, Arabidopsis thaliana columbia
gggccaggcccacgcgtccgtactgatattccccgtatcaactcataactgtccctcaacagttgcaatagtctttcggaatgctcctctctaatctcacaaaggcctctccgatctctcgctctctcagatctcctccatggatcccgcttcttcttcttcctcaaatcagcgcaaccgaatcgtctcttctggggaaagaccagtgatggctgataatggcgtccaacaggtttctcacgacgatggaaggaacattgtttcttcgtcttatagttcttccgtggttccttctcctgatcccgctccttattataacgttcttcaaacccctaccaatctctatcactacgattgggatatcgcaaattctggctatgcacaaggcatcaatacttgggatggatatccacgatatgctactactacccctg

SEQ ID NO: 150968 - DNA, 474 bp, Arabidopsis thaliana columbia
tggagtttcgagccaggcgttcgcaagcatgactcaaaacaacaacacttgacttcacaactggtttttccctcgcacgagaattggggaaaataagaagaagaaacacgaaacaaaaaagtatggtggaattggagattgtgtggttggttagaggcgcttggatcactgtttggatcgtctctatacttcctttggtgattgcttcgatacccacttcaaagctcaactcttttcgtgaactcgttttgagtttcgctggtagaggcaagattcttcacccttcttctcagaagtttacaattcctcagaaatgctttgcacacttttatgttattggagtggttggacaactctcctgcttgctgcaacttggatgtatgcttgcaaaatggcgcctttatcttctgaggagttccagttatccgacattgcaagccgtttagccggaggttcagatgttttctccgttca

SEQ ID NO: 150969 - DNA, 291 bp, Arabidopsis thaliana columbia
  unsure (1)..(291): unsure at all n locations
ctcacactcttatacaatcacctttttatttctacttcctcnctcccactcggaagggctttcttataaagcttggaaccaccctctacttcacaactctacctctcaaaatcatactcctcgatttaacttgtaacaaacccgacttttctctaatattcactccataaacaatcatcaaaacactctaaacatttacacctcattacataatacaacctaaattttcaacacaaaatcctctaacattacgaccctttacaaaatacttacttccaatacgatctctta

SEQ ID NO: 150970 - DNA, 420 bp, Arabidopsis thaliana columbia
cggacgcgtgggctgcaatgggagaaaaagcatgctaaagctagcgaagaggatgactgataatgtctgtggaggggtttgtgctggggcgttacagaaatggagcaaactcaacgttggcaacgtcgacgaagacgttaggataatgactaggaagagtgtaaacaatcctggcgagccgcctgggataattctaaatgcggcgacgtcagtttggatgccggtatctccgaggcggttgtttgacttccttggaaacgaacggcttagatcggaatgggatatcttatccaacggtggaccaatgaaagagatggcccatatagctaaaggccatgaccgttccaactccgtcttcctcctccgtgccagcgcgataaatgcgaatcagagtagtatgctgatattacaagagacaag

SEQ ID NO: 150971 - DNA, 446 bp, Arabidopsis thaliana columbia
aaaaaaacacagaccttaaaaaaataaaaatggttgatatggattggaagaggaagatggtatcatcagatttaccaaactcacctgagctgtcttcaaagcttcacgtaactattccatcaccgttcaaaatcgtccctgtttcatctccgatctcatgttcagcacctgctctttgctctgcttacgagctttaccttcgtctccctgagctaagaaagctctggtcatctcgtgattttcctcaatggacatcagagccgattctcaaaccagctcttcaagctttggagatcagtttcagattagttttcgccgtttgttctgatactagaccgtacatcaaccaccgtgaatgggacccggaggctagattctctcatcacgaagcagatccagcttgtagcagcgatctgcgaagatgaagaagaagaaggtatatcaac

SEQ ID NO: 150972 - DNA, 447 bp, Arabidopsis thaliana columbia
attcgaaatctccaaagaacccgacaaagcgccatgtcgctcactatcccggcgaatctcgttctcaacccgagatctaacaaatctctcactcaatccgtacctaaatcctccgcaagattcgtctgctccgatgacaaatcctcctcctccacacctcaatccatgaaagctttctccgccgccgtcgccctctcttccatcctcctctctgctcctatgccagctgtcgctgatatctcaggtttgactccttgcaaggactcaaaacagttcgctaaaagagagaagcaacagatcaagaagcttgaatcttctcttaagctctacgctcctgaatctgcccctgctcttgctctcaatgctcagatcgagaaaaccaaacgcaggttcgacaactacgggaagtacggattgttatgcgggtcagacgggtttccggaactt

SEQ ID NO: 150973 - DNA, 266 bp, Arabidopsis thaliana columbia
  unsure (1)..(266): unsure at all n locations
ttcatacatcgtaggacggtttattatctggatagagaatggccatactnaaccctttcatctatataagctcaaactcacacttccctatccacaatctcccttatgcaatcttcaaaccttaatcaaactcaaccccttatactaacttcactatccacgactaacttcttgacctcatcaacatacccgaaaccatacctttataatcctcttgatccttaacgacacaaaaccctttcttcaacctaaatcaaaccaactct

SEQ ID NO: 150974 - DNA, 437 bp, Arabidopsis thaliana columbia
gaaactacaatagttaatcaatcaaagagaagtaagagaaatggcagattctaactgtggatggggctcctcctgcaaatggggggactcttgcagttgcgagaagaactacaacaaggagtgcgacaactgtagctgtggatcaaactgcagctgtgggtcaaactgtaactgttgatgaaattattatggtctaaaatcatatatatggcagaaaaattggggaaaatatgtgttttatgctaagagatgtgtgtgtgttgttggaataaagacgtgaccgttgtgttgcgtatcaactctcttaagctttgacttttcccagctttgtattttcctatgtatggtaatggtgtgattgtgtaatgttttcatatgtaacgtaaaaaaaatatttatgtgacattgacttttgtgactaataaaaaaaataattt

SEQ ID NO: 150975 - DNA, 459 bp, Arabidopsis thaliana columbia
  unsure (1)..(459): unsure at all n locations
cgcgtncggatttgcatagaatcgtcgctgatcgaagtgattctgttttattttgctctcacttgaaagatctgagtgatttgtttcagatcttctccgaaaggatgaagcggattggagataaagaaatcgacggttctgggtctcaaaatcaacatccagtgggctcccctcgaaacgaattacaagggcaatctccaaaacctggaaacggtaacaccaaaaatgctttgacaaccgatgatgctttggcctacttaaaggaaataaaggacgtgtttcatgatcaaaagtacaaataccatctgtttctcgagattatgagcgacttcaaggcacaaaggaccgatacttctgtcgtgattgcacgagtcaaagacctgttaaagggacataaccatttaattctcgtatctaacaaattcttgccacatgggtttgaaattactcttgacgatg

SEQ ID NO: 150976 - DNA, 451 bp, Arabidopsis thaliana columbia
gaactctgctcttcttcttcttcctccgccatagctacaatgcttagtctctcaatcgctacgccggggacggcggcgatttttcgtagaggaactgcttcggcgacttcaacttcgtcttcattccatggtgtcagaatccagcaccaggtttctgctcgcgtccccgcggcggcgacgatatcgtcgtcgtctcctaaaccgtcggtggtgatgatgtcgaaaagagaggcggaattgaaagagataagatcgaagacgacggagcagttacaagaggaggttgttgaccttaaaggtgagctctttatgcttcgtctccagaaatcggcaaggaatgagttcaaatctagcgactttcgtcgtatgaagaaacaagttgcttcgatgttgacggttaaaagagagagggagatcaaagaagggataaagaaaaggttgtcgaggaaac

SEQ ID NO: 150977 - DNA, 449 bp, Arabidopsis thaliana columbia
  unsure (1)..(449): unsure at all n locations
caaaaaaaaaaatttcttttctctttctaacaccacagatttcgcaatcgtgttttgatctgattcttgcaggattctcccggtggcggagagaagaaacaaaggaaacccagaaagcatttttctcaatggcgtcgactacacgagaaaagtttgtatctttcataaacaacagatggctcgtcttcgtggctgccatgtggatacagtcttgtgctggcatcggttatttgttcggaagcatttctccggttatcaaaagctccttaaactataatcagaaggagctttccagacttggagtcgccaaggatctcggtgatagtgtcggattcatcgccggtactctctctgagatcttgcctctntgggccgctcttcttgttggcgccgttcagaacctcatcggttaccggatgggtttggcttatcgtcaccggtcgagcccc

SEQ ID NO: 150978 - DNA, 443 bp, Arabidopsis thaliana columbia
aaaatctgtagctttcgcatgtaaatctctctttgaaggttcctaactcgttaatcgtggctgggagtgactcgttcgagggaaaggctctgtctttagctcaaaccatggctagtaacaaccctcacgacaacctttctgaccaaactccttctgatgatttcttcgagcaaatcctcggccttcctaacttctcagcctcttctgccgccggtttatctggagttgacggaggattaggtggtggagcaccgcctatgatgctgcagttgggttccggagaagaaggaagtcacatgggtggcttaggaggaagtggaccaactgggtttcacaatcagatgtttcctttggggttaagtcttgatcaagggaaaggacctgggtttcttagacctgaaggaggacatggaagtgggaaaagattctcagatgatgttgtg

SEQ ID NO: 150979 - DNA, 415 bp, Arabidopsis thaliana columbia
  unsure (1)..(415): unsure at all n locations
aaaaacacanaccttaaaaaaattaaaattccctttttctttctttaagactaatactntttcagaagggtctccaaactcacctgggctgtcttcaaatcttcacttaactattccatcaccgttcaaaatcgcccctgtttcatctccgatctcatagttcatcaccttctcttttctcttcttacaagctttaccttcctctcccttagctaataaagctcttttcatctcgtgattttcctcaatggacatcacagcctattctcaaaccaactcttcaagcttttgagatcactttcagattattttttcccacttgttctgatactatacctttcatcaaccaccgtttatagaacccctagctatattttctcatcaccaatcacatccacctttttgcatccatctt

SEQ ID NO: 150980 - DNA, 407 bp, Arabidopsis thaliana columbia
cttggggttagagaagggtttggccggttcaggtaacccggcttaccccggtggacctgtgcttgaaccctcttgggtttgggaaagatgagaagtcactgaaggagttgaaactcaaggaggtcaagaacggtagactggctatgctcgccatcctcggttactttatccaaggactagtgaccggtgtgggaccttatcagaacctgcttgatcacttggctgatcccgtcaacaacaacgtcttgaccagcctcaagttccactgaggtgatcatcatctcatgtgtttttatgtctcttgtatcgtacaatatttccatctttcgctaccattggcttcttcgtattgtaacaccctgtgtaaacatattcgtgttttgtaagaaatgacaatgtcaatggcc

SEQ ID NO: 150981 - DNA, 432 bp, Arabidopsis thaliana columbia
cttttcttagggttcttgtttcgctatctcttaaacacaaacagctctgtccgaataatctctgttcaagtacctcttttttctgattctgtatatcgccatgaattactgatttccctctctataaacccatcaaagtaaaccaatttctcctgtgacttgtacctaactcgatcttaccagactggtgatggcgtctttgaaccctttcgatcttctaggagatgatgctgaggatccaagccagctcgctgtggctttgtctcagaaagtcgagaaagctgctgctgctgttcagcctcctaaggccgctaagttcccaaccaagccggctcctccttctcaagcagtgagggagtcgaggaatgctcctcaaggaggtcgtggtgggactggtgggacgtggtggattttcccgtggcaaggggtaat

SEQ ID NO: 150982 - DNA, 449 bp, Arabidopsis thaliana columbia
aaacaatttctcattagcttacaatggcggatacacaccgtgtcgaccgtactgatagacactggtaatttcagtcgccctatgaaggcggccgaggtcaaggtcagtatgaaggtgaccgtggttacggtggtggcggttacaagagcatgatgcctgaaagtggcccatctagtacccaagtattgtccctgttgattggagtccctgtcgtcggttcgctacttgccttggctggattacttctagctggttcggtgatcggcttaatggttgctttaccactatttctcctcttcagcccggttatagtcccagcggctctaactatcgggcttgcaatgacaggctttttagcctcggggatgttcggtctaaccgggcttagctcaatctcatgggtcatgaactatcttcgtgggacaaggagaactgtgcctgagcaattg

SEQ ID NO: 150983 - DNA, 449 bp, Arabidopsis thaliana columbia
acattttctctgtaaaaatgggaactaggttccaatcattcttgctcgtgttcttgctttcatgttgaatcctaatatcaccggcctgggggaaccaaatggggatgggaccattagaattggattgaagaagaggaaactagaccggagcaacaggctagcttctcagctttttttgaaaaaccgagggtctcattggtctcccaaacactattttcgcctgaacgatgaaaatgcggatatggttccgctgaaaaactatttggatgctcaatactatggtgacattaccattggtactcctcctcagaagttcactgtgatctttgatactggtagctccaatctctggataccatctactaaatgttacctatcggttgcttgttatttccactccaagtacaaggctagccagtcatcgtcatatagaaagaacggaaaacccg

SEQ ID NO: 150984 - DNA, 446 bp, Arabidopsis thaliana columbia
cacaaatctcatccccagagagagaacccagagagcgatattgaaaatcaaaactctctcctttgtatataatcccaatttacaaagctggttccctctctaaaaatttcttatctttgtataaaaagccttctcctttttcaaatcattcaccttcctttcgccttttcgggggaatttcttccaatctgttgggtttacgaaaccctagatttcgaaattccggattgctaactagcgaaagagaatggctgatcaaggaacggaagggagccagccagttgaccttactaaacatccttcagggattgttcctactcttcaaaatattgtctcaacagtgaacttagactgcaagcttgatcttaaagccatagctttgcaagctaggaatgctgaatataaccccaagcgtttcgctgctgtaatcatgaggatcagagagc

SEQ ID NO: 150985 - DNA, 459 bp, Arabidopsis thaliana columbia
cggacgcgtgggtctagggtttcgactctcgacggccggttcgatttttcaactgcttgttctaaggggtcatgaagcctgtctgttgcggaaactttgagtatgatgctcgtgagagtgatcttgagcggcttttcagaaagtacggcaaggttgagagggttgatatgaaagctgggtttgcttttgtctatatggaagatgaaagggatgctgaagatgcaattcgagcgcttgatcgctttgaatatggtcgcacaggacgcagactccgtgttgagtggacaaagaatgaccgtggaggtgctggaagatcaggtggttcgaggagatcatcttctggcttgagaccttccaagactctgtttgtgatccaactccgttgcacaaaacactaggactcgggacttggagaggcactttgagcccgatggtaaaattgttaatgttagaatcaga

SEQ ID NO: 150986 - DNA, 452 bp, Arabidopsis thaliana columbia
gataatagtagattatgtccaaggcagtttgtgtatcatccactagatcctagcctaatgggagtggggactttggatggcgagggggttgttctcaatcacgaaagtgggaaaattttccgttacatcccatctaatggatctcaaagtaccatcttgggactttgttggctcaagatatatccatctatggttatagctggctcagccaatggctcattgaagctgtacgacatccaaaaagcgtcatccacggttactactagcagtcattccacttctggttctgtcacttttgatgagtttgaccaattaacgtcggttcatgctaattcgacggaccaactatttcttgctagcggatactcgaaggatgttgctttgtatgacatttggtaggggaacacgcctacaggtttttgctaatatgcatcaagagcatattaacgtgg

SEQ ID NO: 150987 - DNA, 443 bp, Arabidopsis thaliana columbia
atcagatgaaactttggaatccgagcccctgcacatgattgtaaatcctgacgatgcaaacaagaacagagtagtcaatggggcagatactgaaattggtgtttccaacttgagccatgtaaacgcagccatgagtcatgttattcctgaagagcaagcttcgctgcagggagatattcttattgatatcaatgaccggtttcctcgtgacttcctctctgaaatattctcacaggcaatctcagaggatacatccactgtccgtccatatcctcacgatggagctgctgttagcatgaatgtgcaaaatcacgatcgtaaaaactggtcatattttcagcagctggctgaagatcagtttatccaaagaagatgttgtacttgaccaagctgattctcgcattccatctgaccgtaaagatggtggagagagcttcagattg

SEQ ID NO: 150988 - DNA, 453 bp, Arabidopsis thaliana columbia
  unsure (1)..(453): unsure at all n locations
gctgcatagagcatgcgaccgggattatggaggaagagagggctccagagaatctgtcgaatggaatgtcaactatatcactaaacaatacagctgcgcaggtggaggagaagtacctgttagacaaactggatgtgtatgaatctgcggttggggattcaaacacgaaaacagccccaaagattgaacggttcccaccggcattacaatctataccgcgtaatccgattgttctagaccttgcctacaactgcatcgacttcccagttattgaaaacaggatgaagaaaaaaggaggcttctttagtagccgaatttcttctctctggtaaaagctttaaaccggctttctctctaaggttaaaaaaggatctcggattcattctccctttttatttaccagactcagaaactngttgttgctctttcgtagcttttgaaacgaaatgcatg

SEQ ID NO: 150989 - DNA, 438 bp, Arabidopsis thaliana columbia
aattcacttaattctcactcactctctttccttctctactctctgtttctttcttccatggagctcggctcactctcttctcttctccgactctccactctcttcgttttctacatcttcaagtttgttttcaaaagaagaaaccagagaaactgctacatgcttcactacgagtgctacaagggcatggaagagagaaaactcgacaccgagacttgtgctaaggtcgttcaacgaaacaagaacttgggtcttgaagagtacaggtttctccttcgtactatggctagttccgggataggagaggaaacgtacggcccaagaaatgtgcttgaaggtagagaagactcttctactctccttgacgctcactccgaaatggacgagatcatgttcgacactctcgacaagcttttccacaagacaaaaggctcaatc

SEQ ID NO: 150990 - DNA, 448 bp, Arabidopsis thaliana columbia
cccacgcgtccggccgcgcaagaagacgattctctctcttgagttgaagaaatgaagcacaacagggggatccccaatggtcactggaaaaagcactggcagaattatgtcaagacatggttcaaccagcctgccaggaaaaccagaagaagaattgcgaggcaaaagaaggctgtgaagatcttccctcgtccaacttctggacctctccgccctgttgtgcatggtcagactcttaagtacaacatgaaggtcagaaccggtaaaggattcactcttgaagagctcaaggctgctggtatcccaaagaagttggcgcctacaattggtattgctgttgaccatcgtcgcaagaaccgatctttggagggtcttcaaacaaatgtccagaggctgaaaacctacaagaccaagttagtgcattttcccgcgtcgtgcccgcaaggtc

SEQ ID NO: 150991 - DNA, 437 bp, Arabidopsis thaliana columbia
ctctgcaggagatgctaacagcattagtgttggagctggtaccaatattcaggacaacgctcgggtggacgttgctaagaccaacgtaagtgggaaggtcttacctactgtcattggagacaatgtcaccattggtcatagtgctgttttacatggctgcactgtcgaggatgaggcctatattggtacaagtgcaactgtcttggatggagctcatgttgaaaaacatgccatggttgcttcaggagctcttgttaggcagaacactagaattccctctggcgaggttcttagccacgctcttatatgttgaccttctcaaacgtttgttattcgcttaagctctggtgaaattacaattctggttttccttgcaggtttggggaggcaacccagctaaatttctgaggaaggtgacagaagaagaaagagtcttc

SEQ ID NO: 150992 - DNA, 448 bp, Arabidopsis thaliana columbia
tcgtcttcttcttcttcttcttctagatcgagagtttcatttgtcttaccagccgccgttgaggactacgacgaccattctcttgctcttcatcttctctccttctgcttttctctatttcctattctctccaaattcaccatttccttccaccactcagagatctccctttcttattagctatgtcttcttctaacacgccatcttctagcgccgccgctgccggatcgatagattcttccgccgcccggagaaattccaagagacccaagtattcgaaatttactcagcaagagcttcctgcttgcaaaccaattcttacgcctggttgggtgatttcaacgtttttgatcattagtgttatcttcattccccttggtgttatttctctctttgcttctcaagatgttttttgagatccttgatcggtatgatagtgcattccttc

SEQ ID NO: 150993 - DNA, 455 bp, Arabidopsis thaliana columbia
  unsure (1)..(455): unsure at all n locations
aaataattgaaaagaacaaaagaaacaaaagtgactttnaaagagttttggcgatgaagaagaaggcactttgtctactgtgcgttgtggtgttaccngcgatagcctgtggtaggaaaccggagaagaaggtaacaatttcatcctctgggaggaaggaagatgaccttgttaccggtttgcccggccaaccaccggttaacttcaaacactacgccggttacgtgaatctggggcctgaacagaagcaaaaggcacttttctattggttcttcgaagctcaacaaaaactcttctcgtcgtcctctcgtcctttggctcaatggaggaccgggttgctcatcaatagcctatggagctgcacaagaactaggcccttttcttgttcacgacaacggtggcaaacttacctacaatcatttctcttggaacaaagaggccaatatgttgttctt

SEQ ID NO: 150994 - DNA, 456 bp, Arabidopsis thaliana columbia
ctgctgctgggtttcccgagtcgcctgaagctgcttcggaagccgggcttgtaagtgggaaaggtaacatcattgataggagtatccaagatgcttacattcatgcaatcagacgtgctaaggatttcatctacgttgaaaaccagtacttccttgggagttcttttgcttgggcagccgatggtattactcctgaggacatcaatgccctgcacttaatcccaaaagagttgtcgctgaagatagttagcaagattgagaaaggagagaagttcagggtctatgttgtggttccaatgttgccagaaagtctcccagagagtggatcagtgcaagctatattagactggcagaggaggaccatggagatgatgtacaaggatgtgattcaagctctcagggcccagggtcttgaagaagatccaagaaactatctgacattcttctgtcttggaa

SEQ ID NO: 150995 - DNA, 428 bp, Arabidopsis thaliana columbia
cgctttgtcttcctttcccaggttgtttttttttgctctctctgccttcttgactttcaaaggacgctttctttcttttggggggattttggattctagggctctctttcttttagtgggtttttgttgttgttgccgtggtctctctgatgattactgaacttgagatggtgaaaggtgagagtgagcttcagctcggtctatggctgcgtcttggccgtggaacggcagccaagattggtaaatcaggtggtggtgacacccggggagagcgtggtacgcttttgacggctaacgattttccttctgttggttctaaacgtgctgctgattctgcttctcatgctagttcatctcctcctcgttcaagtcaagttgttggattgcctgctatagaggcacacaggatgaacagtttgctttattac

SEQ ID NO: 150996 - DNA, 379 bp, Arabidopsis thaliana columbia
cttctttcttctctctaacctaaaaaaatctgtctctttccttcttcctcaggaaaatttaagatagttgttgataaggatatggggaagaaccttttgaaatttttggcaaagttgaaggtgaaatagatacaaaaaaaatgggctcagaggaaaacaacagcacaagctttccaccaacagagccaaagctctgtgataacggatgtggattcttcgggtcaccatccaacatgaatctctgctcgaaatgttacagaagcttaagagccgaggaagatcaaaccgcggtagcgaaagctgcggtgaagaactctttaaagcttccatcttgcagtatcattgcacctggacaaaaacatcctctggaaattaaacc

SEQ ID NO: 150997 - DNA, 362 bp, Arabidopsis thaliana columbia
ttcacattttcgtagccgcaagactcctttaaaatttttacttgcagctatgggtaaagagaagtgtggcattaacattggggtcatgggtcatgttgattctggaaaatcgaccacaactggtcacttgatctataagcttggtggtattgacaagcgtgtcatcgagaggttcgagaaggaggctgctgagatgaacaagaggtccttcaagtacgcatgggtgttggacacacttaaagccgagcgtgagcgtggtattaccatcgatattgctctatggaagttcgagaccaccaagtactactgcacagtcattgatgccccaaggacatcgtgatttcatcaagaacatgattact

SEQ ID NO: 150998 - DNA, 439 bp, Arabidopsis thaliana columbia
gtctggtcattttgcagcagcaacatgctattccattcctagcttttgctaaggaagctgctgggccggcctttaaaggagatgagatgttgaagggtgtcttttttgatatcaagaacaaattccaggctgctgttgatattctccgtaaggaaaagatcacccttgatccagaggacccagctgccgtaaaacagtatgcaaatgtaatgaagaccatcaggcaaaaggcagacatgttctcagaatctcagcgcattaaacatgacattgatactgagactcaagacattccagatgctcgtgcatacttgttgaagttgcaagaaattcgcaccaggagggggcttactgatgagcttggtgctgaggccatgatgttcgaggctttggagaaagtcgagaaggacataaagaagcctctcctgagagtgacaag

SEQ ID NO: 150999 - DNA, 440 bp, Arabidopsis thaliana columbia
aaacagagagcgagtcacgcgccgagttttcctcacttgttctcaataaatctctctctctttgttcgctatcgctttcattttgctcctgcagatctcgattccaatctctctccctctctacttccttcaacagaaatggaaacgttcctatttacctctgaatccgtcaatgaaggacacccagacaagctttgtgaccagatttctgatgcgatccttgatgcttgcttagagcaagatcctgaaagcaaagtggcgtgtgagacatgcaccaagaccaacatggtgatggtgtttggtgagatcactaccgctgcgaaagttgactatgagaagattggtagatccacttgcagggagattggtttatctctgctgatgttggtcttgacgctgacaaatgcaatggtttggttaacattgagcaacagagccct

SEQ ID NO: 151000 - DNA, 459 bp, Arabidopsis thaliana columbia
gactcctccaaactctcatctctctctctttgcctcttcctcatttgcattatctatctccccgaagagtctctcgcatgcgggtcttgcaacccacttaagggcggaaagcactcccctaaagcccctaagctaccagttcctccggtgaccgtccctaagctaccagttcctccggtgaccgtccctaagctaccagtccctccggtgaccgtccctaagctacccgttcctcctgtgaccatccctaagctacccgttccaccagtgactgtacctaagctacccgttcctcctgtgaccgtccccaagctacccgttcctccagtgaccgtccccaagctacccgttcctccagtgacagtccctaagctacccgttcccccggtaactgtacctaagctacccgttcctccagtgaccgtccctaagctaccccttcctccgatttcagggcta

SEQ ID NO: 151001 - DNA, 498 bp, Arabidopsis thaliana columbia
  unsure (1)..(498): unsure at all n locations
gcgccacagcgtccgcaatagtcttttttagaactagtcnntttctttaaattttttcctttatattaaannaaatatatnntaaaaactcaagtcaagaattataattattccacaaggagacacgcaatttttgttatgcttttaatatatttannatttgatctgtatttttttttaaattctaacccttttttcaagcactttttttagtcgccaaattgccagaggcctacgcctttttgaatccaatcgtagatgttatgcccgtaatacctcttttctttcttctcttagcctttgtttggcaagccgctgtaagttttcgataaaattcttaatactgtcttaaacaaattcacgattttgatttttccaacaattcaaaagatccaaaaaatcttgacgtatgaacgaactctcaattcaaacatttaatttttttggtagccatactaaatctggatcatttctatttcctaaattntatcctctttt

SEQ ID NO: 151002 - DNA, 452 bp, Arabidopsis thaliana columbia
gttaaccttcttgaagtggctaaagcagctaattcacaacctgcgattgtttgggcttgctcgagctctgtttacggtctgaacgactgagaatccattctctgaagaacaccgaacagaccaaccagcgagtctttacgcagcaaccaagaaagctggtgaagagatcgcacatacttacaaccacatctacggtctctccttaaccggactccggttctttacggtttacggtccatggggaagaccagacatggcttacttcttcttcactaaagacatcctccacggtaaatcaatcgacatttacagaactcaggacaatcaagaagtggcgcgtggacttcacctacatcgatgacatcgttaaaggttgtgtcggtgcgttagacacggctgagaaaagcaccggaagcggcggaaagaagcgaggacaagctcagctacgtgtt

SEQ ID NO: 151003 - DNA, 446 bp, Arabidopsis thaliana columbia
gttagatctcaaatctttaactttgcatacccaaaataggaagaaagaagagtcaagtcactaaaataactttcacagtctttgattcgaagatctttgtcgccgagagatatccactctgatttgagttcttaactattctctggaggaggttgaggtctgaaatcatggaacaacttggttagagtgtggaattttagctgatttgatctttgattcatctgtgatcataataactatgaagatggacaaaaagactatagtttggtttagaagagacctaaggattgaggataatcctgcattagcagcagctgctcacgaaggatctgtttttcctgtcttcatttggtgtcctgaagaagaaggacagttttatcctggaagagcttcaagatggtggatgaaacaatcacttgctcacttatttaattcctggaaggctc

SEQ ID NO: 151004 - DNA, 363 bp, Arabidopsis thaliana columbia
tcctctctcccccttctcttctctatttcctattctctccaaattcaccatttccttccaccactcacaaatctccctttcttattacctatctcttcttctaacacaccatcttttatctccttctcttccttatcgatacattcttcctccctccggataaattccaatatacccaagtattccaaatttactcaacaatagccttcttctttcataccaattcttacacctctttttattatttcaacatttttaatcattactgttatcttcattccccttgacgttatttttctctttgcttcttcattattttgtttacatcctttatccctattatattgcattcatacctttatc

SEQ ID NO: 151005 - DNA, 431 bp, Arabidopsis thaliana columbia
cgccgtcttcttcaaacgccgattcaatcttcttttagtccccggcgaccagagcgtgggtatgttctagaaccaaacacgtggcggacggaaaccgctcgattctccgagataactcgtcgattagctccgatccctttagattcctctgagaccgaatcgggtaatggcaaacccaaggtttcaaatttatgtgtggctttaagatatcggcgaggatttcgtctactaagtggaagagtagctttctattgcatcgaagagagagattttccggtgaatttctaggtctggttgatgtaacagcgaaatgttcgaggaagtataagattgatggatcaagtgggtgtgaaggagagaaccatttagcgtatgagattggtgtgtctctgtcgattcctgttcttcttaaggttcttgttatgtactct

SEQ ID NO: 151006 - DNA, 458 bp, Arabidopsis thaliana columbia
cttcttcttcttcttctaagctaaaacaacattcacaccaaagcttctcagagtctctgagggaacacactatcgaagacgctgaatccatcatccatcgatggatttcaccagaacacgtccactcttcttccttctgcttcatctcatcgctattttcaaccgaaaaccgcgaagaagcgaaacgattcatcgacgctgttaccaccttacactccggtatgataagactaatctcagtgaatccaacgtcaatgaaactcgttaaagcagagaatctaatgcgtatctcaatgactcatctctccaaagagttttaccgcattctcaaatcgaaccgacgttatctcgaccccgaatccgtctctatccgttccttcaaaagcttccgattccgactccgattccgattccaacaccatggatgatctaaagatgatcgcggattgtatgatatc

SEQ ID NO: 151007 - DNA, 454 bp, Arabidopsis thaliana columbia
cgtctctcttctctctctcttctctctctctctttttttttctaccgtccttctagggtttcttgagtcacattcaaatttggcgccgggtaatctcaatcctgtaagaatcagaggatatggattccaattggatcaattgtccctctgttttctcctcatcctcttcttcttccagacgctgtcaatcccgatcagacttgtatttaggaggagggtacgaggatcttgaaggagaagacgatttgaaggcagagtttatatgccctttttgcgctgaagattttgacattgttgggctttgttgtcacattgatgaagaacatcctgttgaagccaagaatggggtctgtcctgtatgcactaagaggggtgggattggatatcgttggccatattacgacgcaacatgcgaatttctttaggtacagcgaaagagaaggttgcgaagagg

SEQ ID NO: 151008 - DNA, 60 bp, Arabidopsis thaliana columbia
ctctcccgcaaccttcgattttcgtttattcgcatccatcggagagagaaaacaatcaat

SEQ ID NO: 151009 - DNA, 339 bp, Arabidopsis thaliana columbia
cgtatcccaaagatctcatctttcgtcgagtggttcataaccaaaatcaaaacttgagtgaatgataatcgtcgtctcgtcgccggagaaaatgatcggcggtggtagggtttattgggggaagaagttagataaagagatggaagatgcggcggttgttgacggtggtggatctaacggtgttgttgtgatctttgtttggagctcgatttacgagaaccagcttatgaatttcgttgatctttattcttctcttggctggaattctcttgtttgccgcgctgatttttctcacccgcggtttattctgaagatgggggtgtgtttaacatttcattc

SEQ ID NO: 151010 - DNA, 465 bp, Arabidopsis thaliana columbia
cgcgtccgcggacgaatcatgactctgcttccgatttcaatcttcttcttctttttattttgcattccttgggcagtaatcgccgccgctaacgatgacgatataccgacggcgtacactctcctccaaagctacaactttcccgtcgggattcttcctaaaggagtggtgtcatatgatttagataaatctactggtcaattccacgcgtatttcaacaaatcgtgcagtttcgctcttcaaggctcttaccaattggattacaaatcgacaatctctggatacatatcggagaacaagatcacgaagcttaccggcgtgaaggtgaaagttctcttcttgtggctcaacatcgttgaggttattaggaacggagacgaactcgagttctccgttgggatcacatcggcgaacttcgagatcgatgagttttacgagtcgccacagtgtggttgcggatttgat

SEQ ID NO: 151011 - DNA, 460 bp, Arabidopsis thaliana columbia
  unsure (1)..(460): unsure at all n locations
ctcctatcgaagagactgtgagggcgatgaactacgtgattgataagggttgggccttctattggggaaccagtgaatggtcagggcaacaaattacngaggcatggggagctgctgaccggttggatttggttggtccaattgtcgaacagccagaatacaacatgttcgctaggcacaaagttgagacagagtttcttcctctgtacaccaaccatggtataggtctcactacctggagcccacttgcatctggtgtgctcactggtaaatacaacaagggagctattccctcagacagccgatttgcattggagaactacaaaaaccttgccaatagatcacttgtggatgacgtgctgaggaaagttagcggtctcaaacccattgcagatgagctaggtgtaaccttggctcagcttgcaatcgcatggtgtgcttcaaatcctaatgtgtcatc

SEQ ID NO: 151012 - DNA, 455 bp, Arabidopsis thaliana columbia
  unsure (1)..(455): unsure at all n locations
aaagtttttagctctgggtttgtctctgtgtcttgttctctcaagcttctatcaagtttcttggcaggatgaatgaactggaagggtgagtactttanatctaattgagcatgaatatcaaactagtgtcaattctctccaaggcaatgaagcagtagatcaaactgagaccagtggtcagaaaaacagtacagtgtctgataacaacactatttctttgtctctatctgaagaacctgcattggaaactcttaaagaatctgttgatacatcagctgagttaggagctgttactgatgaagtcgataaaccttcaagtatgttggaccatattgaacttgagttcgaagcacatatcaatgaacttaaagaaactggatctgatggtatcaacaaagttgaggaatctaaagatgatgaagaagctgcaaggagacataaaatgttggaagcca

SEQ ID NO: 151013 - DNA, 439 bp, Arabidopsis thaliana columbia
  unsure (1)..(439): unsure at all n locations
gatgagcgacggagacgacgctgctagactccgttccgcggcggtgactgattaccgggggaagctccttcatcacaaggggctggaatcccntntccgaacagctagggagaatttaagagcagctaagaaggaattcaacaaaactgaggatgatttgaagtctcttcaaagcgttggccagattattggagaagtactacgtcctcttgataacgagcgattgattgttaaggcaagtagtggccctcgttatgtggtgggttgtcgtagcaaggtggacaaggaaaagcttacttctggaactcgagttgtcctggatatgactacgctgacaattatgcgagcccttcctcgtgaagttgatcctgttgtttataacatgttgcatgaagatccaggcaacattagttactcagctgtgggtggtttaggtgat

SEQ ID NO: 151014 - DNA, 449 bp, Arabidopsis thaliana columbia
gggtgaccttaaaggttcaaattcaccacttcatataacacctatggttccttctcctatcttcctggggagatttaaggtggttttgggtctgttttgggctttatgttgctgcaagattggatgggattcagttatgagaatgagtatcgacctgcgagatttatttttgtatgaagcgtttctttattacaatcctcttcttcttgtgacaatgatggtttggctgtggggagtgaacttatgggtgttctctcaaggaagtgttaattattccaaagtctttgatcttgatcataaccaccttactcatagagagatgtggaagtgtagcatgtggatgacaatcattgtcccaactagcatgacagcgtatctatatctgtattctcatggggaagtatctttggctgcttcacaaccggtgctcctgtacattgcttttgctt

SEQ ID NO: 151015 - DNA, 477 bp, Arabidopsis thaliana columbia
  unsure (1)..(477): unsure at all n locations
tccggggtcggcccgggcgtccggcacgaacggcgtcgggttagtccgacggaggaaccatgtcctcgtctcttcttctctccggtgctggggtatcttcttcgtttgtcggtccatctaagccttctctcgtacgaaattccagtaagacatcactgttaccatttcgtaatgtttcgagaagcttcaaaaccgtcaagtgcaccgttgattcttcatatggaggcaatgttcccacgttccctcggacgagagtttgngacccgtacaaacgtctaggagttagtccatatgcttccgaggaagaaatctgggcctctcgtaactttcttttacagcagtacgctggacatgaaagaagcgaagagtctatagaaagagcctttgagaagcttctcatgtctagttttatcagaaggaagaagactaaaatcaatctttaaatcaaagtgaagaaaaaaagttgaggaatctcct

SEQ ID NO: 151016 - DNA, 441 bp, Arabidopsis thaliana columbia
atagtttctttcaaatcccctaaaacctagaaaaacaccaatgtctctctctctttttgttttggtccgaaagccttttacctttgagatgtttctatataattgccagatccttcgttactactgatgctagctcctttagggctttttctcgtttactcatgtcaaattaccttcttgtcccttggtgtttaaggctctgatcctatataataatacttcataggaaggaagaagagcccttcgtcgtggtttacttggtcccgatcggagatggagagagaatgtgggtcgaaggagttgttcagcaaagaggagcttccaagaaataaagtggagtccatgtgggagacgattacgtcgaggtcatgtgtggctgcaccagccaccgttacggagacgccgttgcgaggcttaagatattttcagatggagaacttc

SEQ ID NO: 151017 - DNA, 465 bp, Arabidopsis thaliana columbia
cgcgtccgaaaaaaaagaaaacacaaaaccaaagattataatggtttcctcaaccatggctttgtcctcccgggccttcgccggaaaggctgtgaagcctgccgcatcagatgtcctcggaagcggccgtgtgaccatgaggaagactgtcgccaagccaaagggtccatcaggcagcccatggtacggatctgaccgagtcaagtacttgggtccattctccggcgagcccccgagctaccttaccggtgagttccccggtgactacggatgggacaccgctggtctatccgccgacccagagaccttcgccaggaaccgtgagctagaagttatccacagcagatgggccatgctcggagccctaggctgcgttttccctgagctattggctaggaacggagtgaagttcggagaagcgggttggttcaaggccggttcacagatcttcagcgacggaggatt

SEQ ID NO: 151018 - DNA, 455 bp, Arabidopsis thaliana columbia
  unsure (1)..(455): unsure at all n locations
attatcatcacttttgttcttccttcactcaaaatttctttcaaaatcgngatttcatcntctggggtgtttattgagacagaggggaagaatatcattgatgtagcgctaaaacacctagcgttcgtgagaattgcaacgatccatattctggcttccgtctcaaatctctacgaatacgctaaacaaaactccggtcctctcaaatccgccgtggaaaaggtcgaaggagccgtcaccaccgtcgtcacccctgtctatcagaaattcaaagatgttcctgattctctcctggtctttctagatcacaaggtgggtgaagtttcgtacaagtttgatgagcatgctcctccaatggctaagaaagtggtgaatcaagcacatgtattgatctacaaggcgacagagaaaagctaaagctttgtgaaagaggctcgtaccggtggtcccaaagc

SEQ ID NO: 151019 - DNA, 430 bp, Arabidopsis thaliana columbia
  unsure (1)..(430): unsure at all n locations
ccacgcgacgaagaccagctcanatgagtctgtagtttccaagttttaattctctctacctcnatttnagcagatcctgttttactctcatcctgatcatctctcatcatcnanattcatantctctttttccccttggattcttccaaggttagtgagctgctatggcaactcatcatcaaactcaacctccttccgattttcccgctcttgccgatgaaaattcccaaattccagaggctactaagcctgctaatgaggttcagcaagctaccatatctcaggatcctccaacatctgtgtttaagaattctgaaccaatacgggaagatcaaattcagaacgctatcaaattcctttcgcacccgagggttagaagctctcctgttatacataaaagatcttttcttgagaggaaaggtctcactaa

SEQ ID NO: 151020 - DNA, 335 bp, Arabidopsis thaliana columbia
  unsure (1)..(335): unsure at all n locations
cgtaaatggattgatcataactcgttgtcccattgttctgtttttcttgnggacccagtcatgggcaagacgcgttttaccatctgtaacgaccacttaactcaccataacnantttatttttctaaaacatattnactcntaccataaatacaaatctattcaaataaccatttcttacaatcattttnnantcaaacttattcaaataattcccatatatctacacttntacttccattttattaacaactactacactcacttttaaatatacccaataanttttatctcaaacccnacaatcaacattcaaagaaaccgctattccttccc

SEQ ID NO: 151021 - DNA, 456 bp, Arabidopsis thaliana columbia
cgtacgcgtgggtccagctgcagcagcggcggcttttttttctatgggtggtggttctgttccggcggcgtctcctcctaaggaaggatgggctcgtaggtacaaatatgtctggccgcttctccttaccgtcaatctcgccgtcggaggttatctgttctttagaactaagaaaaaggacctagatcctgtagttgaagagacggctgctaaatcgagttcagttgcagctcctgttactgtggaaaaaactttgtcttccacagtggttgcagagccagtggtgatcaaagcacgtgagccaattccggagaaacaacaacgtgagctcttcaaatggatgttggaggagaaaaggaaagtaaatccgaaaaacgcaaaagagaagaaacggaatgacgaagagaaagcgattctcatacagttcatcggctccaaaaccattcctactttctg

SEQ ID NO: 151022 - DNA, 444 bp, Arabidopsis thaliana columbia
gtttgaaaattatcctgacatgcatgcttgtcgtgatttcatcactaaggcccttgctaaatgtgaagaggagcctaataaactagttgtcttgacacctgctgaacaacttagtatggcagaatttgagctacgcttcaagcttcttcgagaaaatagtgagttgcagaaattgcataagcaatttgtggaaagtaaagtcctgacggaagacgaattctggtctacgaggaagaaattacttggtaaagattccattagaaagtcaaaacaacagatggggctcaaaagcatgatggtttcaggcatcaaaccgtctactgatggccggactaatagggtgacgtttaacttaacgtctgagataatttttcagatttttgctgagaagccggctgttcgccaggcattcataaattatgttccgaaaaaggtaacaaagac

SEQ ID NO: 151023 - DNA, 439 bp, Arabidopsis thaliana columbia
cacgcgtccgcttcaatggaaaagtcatacatttacctaaccagaccttcttcgcatcttcgtcttcttccttggggatctctcaaattctctgggttttaaagtcctaaatcaaaaccctaaacccataaatccaatccctccattcgaattcttcattctctctctctctctctctcacaattactgatcggttctgaaatttgtagctatgcaggcaacggctttatcatctgggttcaatcctctaacgaaacgtaaagatcacagatttcccaggtcatgctctcagagaaattctctgtctttgattcaatgcgatataaaagagagatctttcggagagtctatgacgatcacgaatcgtggattgagttttaagacgaatgtgtttgagcaagctcgttctgtgactggagactgttcttatgatgaaact

SEQ ID NO: 151024 - DNA, 451 bp, Arabidopsis thaliana columbia
  unsure (1)..(451): unsure at all n locations
cacgcgtncgntctcgtccacatctttctcctttggtggcaaacacaacgacagatagagagaaacgatggcggcgaactcgcttatgagctgtggcatagccgccgtgtacccttcncttctctcttcttccaagtctaaattcgtatccgccggagttccactcccaaacgccgggaatgttggtcgtatcagaatggctgctcactggatgcctggcgagccacgaccagcttaccttgacggttctgctcctggtgactttgggtttgacccacttggacttggagaagttccagcgaaccttgagagatacaaagagtcagagctcatccactgtagatgggctatgctcgctgttcctgggattttggtaccagaagcattaggatatggaaactgggttaaggctcatgaatgggcagcactaccagggggtcaagccacttac

SEQ ID NO: 151025 - DNA, 476 bp, Arabidopsis thaliana columbia
  unsure (1)..(476): unsure at all n locations
cacgcgtncgactaaacacagaagaagaagaagaagaagacgagactacgaatccagaaacaganagagagggggagagctttgaatatctgattggacacaatcttcttcgcatggaagatttctgtttctcgtcactctgatatccaaaaatgtctggatctgattttgatttcgcggcgtttcgagttcaatgctaaaacatcgaagcggtttcgaatctctgagaatcgaaggaaaacgaagcgtgtaggttagggaacttaagattacgttgaagagaagcaagttctcttaaatcgcaactttggagaagtttcgttgttggtttttggtaaagcgatggagtcacgaatggatcagtacgagcttatggaacagatcgggagaggagcgtttggtgctgctattttagttcatcataaagctgagagaaagaagtatgttttgaagaagatcagattagctagacaaac

SEQ ID NO: 151026 - DNA, 312 bp, Arabidopsis thaliana columbia
  unsure (1)..(312): unsure at all n locations
cggacgcgngggacgancncancccaaannanngannannnaaacgcaanccncncancacacggggaggnggagaaacgccggcccgaaacnancggaaaacnnncncagagnaccggcggacaacaccgcngaacacaaaaganngancgacgaccccgacgcnccgcgaccccaaccccaacaacgagancngnngccacgaaagaaaggaggangncgacgccagcaaggaagagcgcaaagaggganngcaagaggnngcagcaagacccacccgcgggaagaagcggagcgccacaggacaacaac

SEQ ID NO: 151027 - DNA, 92 bp, Arabidopsis thaliana columbia
  unsure (1)..(92): unsure at all n locations
gagaaaacgcgaaacaannnnncnaaagcgcanaggaaagcggaggagagaagagcgacggcagaggcaaagagagggacagaggnngcaaa

SEQ ID NO: 151028 - DNA, 466 bp, Arabidopsis thaliana columbia
  unsure (1)..(466): unsure at all n locations
gacccangcgtncgnttcttctgtagacaccattgatatcctctaaattgttccccgtcgtagaaactttaggtaatcgttgccgtcgagctgagatttgtgaaggggaaaccctggttcgataagggattgtaaagttgcacaagtttgcttatccccagaacctgctctgcaacacaacaatggggaaaaaaggagggactttgaagagaagtagcaaaagcacaaaaactcgcaaagatatcgtcgaagaccaatacgacgacgagattgacgcctttcataaacagagggatatagttcccttggatgttaatgatgatactgatgaatcggatgaagatgatgtgcaacctgtatttgatttacagggtgtggatgatgaaagtgaggaggatgaagatacagaagacgaagaggaggccgagaatggacttactgcgaaaatgattaggcagaagaaata

SEQ ID NO: 151029 - DNA, 444 bp, Arabidopsis thaliana columbia
gtaaaatctttgactacgatctctacacaatcactgatctcaagctgtttccatttggtaatgcggaactctccgataatctgactgtcacttgccagcatggtgaagaggaatgcaaactaaacgcccttgaagcttgcgcattaagaacttggcccgatcagaaatcacaatactcgttcatacggtgcgtcgaaagcgatacgaaaggctgggaatcatgtgttaaaaactctggacgtgagaaagcaatcaatgattgttacaatggtgatctttctagaaagctgatacttgggtacgcaaccaaaaccaagaatttgaagccgccacatgaatacgtaccatgggtcacactcaacggcaagccactcgatgacagcgtacaaagtacggatgatctcgtaactcaaatctgcaatgcatacaaaggaaagactactc

SEQ ID NO: 151030 - DNA, 435 bp, Arabidopsis thaliana columbia
  unsure (1)..(435): unsure at all n locations
aagagcttgaaaangagnacagccacttncnnagagannatnctagctatcgggtggcctcctctcggcgtctttctcaaatttnnttgcaaggttgagttttggatatgtttgattttgacgctgtttggttatcttcccggaatcctttacgctctttatatcatcaccaagtgatttttcctatctcctctgttctttcctcttgctcctcgtaagctctctttctccacgatctctccccctcaatgtatattaatctaatcatacaaacatacatgcgtagcttcgatgaatatagaaccagaatttaagatgaaatatctttgattaactatatatgttttccacaaagaaattacgaatatcttcttaataaaattaaataaaaagaaaaataaattaatgttaggtgaaccacatttttagtgagat

SEQ ID NO: 151031 - DNA, 133 bp, Arabidopsis thaliana columbia
ccaacgcgaacggatttcctctcaaaatcccaacttggcctctgttttttctttcttttatgttcttttcttctgtaaaaaccatctcatacgtccaagaatttctctcacagagaccaacaactcaaaattt

SEQ ID NO: 151032 - DNA, 448 bp, Arabidopsis thaliana columbia
  unsure (1)..(448): unsure at all n locations
annnnnnaaaaaaaactctccatatancnatnacttctacgctaggtagagagggagattaggggtcgtaagtgatggaggaaggaaagaanagggattgtatggagaaggcaaggccattcatttcaatggtagtgttgcaagtagggctagcaggaatggatattctctcaaaggctgttctaaacaaaggcatgagcaattacgtccttgttgtttaccgtcacgccgttgcaaccatcgttatggccccgttcgccttctatttcgacaagaaggtgagaccgaagatgacactgatgatattcttcaagatatcactccttggtttactcgagccagtgatcgaccagaacttatactatctcgggatgaaatatacgacagctacatttgcaaccgccatgtacaacgtcctacccgcaatcacnttcgtccttgcctatat

SEQ ID NO: 151033 - DNA, 427 bp, Arabidopsis thaliana columbia
  unsure (1)..(427): unsure at all n locations
aaatcttaaacgttttactttgtgctgcactactcaacctcaatggccgcctcaacaatggcgcntctgctcccctgccttcggcggtaaggccgtcaagctttcccccgcggcatctgaagtccttggaagcggccgtgtgacaatgaggaagactgttgccaagccaaagggcccatcaggcagcccatggtacggatctgaccgtgtcaagtacttgggtccattctctggcgaatcaccgagctaccttaccggagagttccccggagactacggatgggacaccgccggactttcagctgaccccgagacattcgcaaggaaccgtgaactagaagttatccacagcaggtgggccatgctcggagccctaggctgcgtcttccctgagcttttggctagaaacggagtcaagttcggagag

SEQ ID NO: 151034 - DNA, 313 bp, Arabidopsis thaliana columbia
  unsure (1)..(313): unsure at all n locations
ctctgcnncgcccncncannnccgggggagaaaaggcggagnccgcnccagnnannnggcggagccancganncnnagaggggagaanggnngancaagnncagcaccccacnanngcgcagaaagcngccgggcagnncaagcgnncaagngnnnccaaggacgnncaagngggnnaccagaggccnncnangnancaaagacangcaaccnacggaaaccaccccaangcngcannncaannnccnccgacancccggaggggggcaacaaccgcnncncccgngnnnngccaaaccccaggagagaaggg

SEQ ID NO: 151035 - DNA, 321 bp, Arabidopsis thaliana columbia
  unsure (1)..(321): unsure at all n locations
ggagagaagagaagaagagaaaaaanagggaggcaaaggngnganganggnggcganaccccggcggngggcacncncgggaggcagggaagcagnaacagaggcggagccaggnnngangaagaacnncnacaaggacacgngnccncaggccgaagacaacgnccgngaacaagncaaacnccnctacaaacgccacaagaacaccgcnnncnctnggctccgnaacaacnnccaagacngcgccgnngagncaagngangcgncgcnnnngcngganncgacaagaagagagccaggagagaaagaacacgacaggag

SEQ ID NO: 151036 - DNA, 357 bp, Arabidopsis thaliana columbia
aaagggatggtaacccatgaatacttgtactctagtaattcatcagcctatgtatcacgtgaaactttttactaccagggcgtgttcaaattaatcttgcgctctctaccatcaatccttacccatcaaacgaatcaagctctgtttacgaggagctatatcatccgacgtacaaagaaactacaaagaaacgacctcctacgtcgaagaggcacacgaagatgatgagtcatcatcatcctacggagaagttaacaagatcattgcaagcctaaccgcacaggaaggagccatggagtaccttatcgagcgaaaagacggccatactacgtcatgcactacatctagctacatcac

SEQ ID NO: 151037 - DNA, 440 bp, Arabidopsis thaliana columbia
gaaaaccgggccggcccacgcgtacgcgccgaatttgcagtattgagactaaaatatggtttacttttgcgactaccgcaactatggagggacctttaaaagaccacggggtccttactaaaaagaacttcttgattctgaattgaagctggttggtgagtatggtcttcgtaacaagcgtgagctctggagagttcagtactctcttagccgtatccgtaatgctgctagagatcttttgactcttgatgagaagagtccaagaaggatctttgaaggtgaggctttgcttcgtaggatgaaccgttacgggcttcttgatgagagccagaacaagctcgattacgtcttggcttttactgttgagaacttttttgagcgtcgacttcagactattgtgttcaagttggtatggctaaaactatccattactttcgtgt

SEQ ID NO: 151038 - DNA, 408 bp, Arabidopsis thaliana columbia
ggccgattcaaaaggcggagggggtaccataaaaaagggatcaaaataatccgatcggactctcaggtgtttatgtttctcaactccaaatgtaagaggtatatccacaacaagatgaagccatttaaactatgctggactgctatgtaccgaaagcagcacaagaaggacgcaacacaagaggctgtgaagagaaggagacgtgcaactaagaagccttactcaaggtcgattgacggtgctactttggaggttattcataagaagcgagcagagaagcctgaagttcgtgatgccgctagagaagctgccctacgtgagatcaaggagagaatcaagaagaccaaggacgagaagaaggcaaagaaagtctagtatgcattaaagcaacagaagtcacaagtgaac

SEQ ID NO: 151039 - DNA, 447 bp, Arabidopsis thaliana columbia
  unsure (1)..(447): unsure at all n locations
ggctggggaaccatggnattccattggagcttctaaataaggtgaagaagctgagctcagattggtacaaaacagagagagagggagcattcaagacttctagtcccgtgaagttgctcaacgaattggttcaaaagaactctggcgagaagctagaaaacgtggactgggaagatgtcttcactctcttggaccataaccaaaacgaatggccatccaacattaaagagactatgggagaatacagagaagaagtgaggaagctagcgagcaagatgatggaagtgatggatgagaatttgggtttgcctaaaggttacataaagaaagctttcaatgaaggaatggaagatggagaagagacagctttctttgggactaaagtcagccattaccctccttgtcctcatcctgagctagtcaatggccttcgagctcatactgatg

SEQ ID NO: 151040 - DNA, 477 bp, Arabidopsis thaliana columbia
ccacgcgtccgacatatttgtagcatccatacataaatacatacatttcgagggaaagagatgaaagatcgggtggagcgattattgatattgccggtttcgttagggtgttcaacgcaatcttgcgtcgctgtggccactactcatcaacaaaagaaaccaaaccaactcatcaagagaagagaagaaagtcatgagaatggatcatttgaaaaagaatacacaaagatggacagaaacggtgctaatatgttagatggaagagtagaaagtgatgcaaagggctcatttagaaaggattacacaaagatggagaacaacaacaacggtgctaatatctcagatggtatctacagaattattcgcagcttcaagagtttctcgcactttttcatacgttacgaagaggagacgaaagagagagaagcggagatggagataggatttccaaccgacgtgaagcacttgagccacatt

SEQ ID NO: 151041 - DNA, 450 bp, Arabidopsis thaliana columbia
  unsure (1)..(450): unsure at all n locations
agaacaagaaagaaagagaaganatatacatagaaaaggagagancaaanggagngggagaggnggnactnagangcgggngtggngccaagngctnnactnatgangnnnggnnaccacaactatttgtggtataaggttcgaaccgatcctttctgcaccattgttggtacaaattcccgcgcccgtcgatcttgggtagcagccatcatgaaggacaacgagaagaagaacatcttagcggtacaaacactacgaaacacgataatgggagggacgttaatggcaaccacttgcatcctcctctgcgcaagtctcgctgccgttttaagcagtacttatagcatcaagaaacctttaaacgacgccgnatatggagctcatggtgacttcactgttgcactcaaatacgtaaccatcctcacaatctttctttcgcctcttctctca

SEQ ID NO: 151042 - DNA, 462 bp, Arabidopsis thaliana columbia
gcgtccggaaaaaatgagttggtggtgggctggcgccatcggagctgccaagaagaaactcgacgaaggtgaaccatcacaaagctgcgagagcgtcgctctcatcatgggcgttactggaatcgtcggaaacagcttggcggagattctccctctttccgacacacccggtggtccatggaaagtctacggcgtcgctcgtcgtcctcgtcctacctggaacgccgatcatccgatcgattacatccagtgcgatgtctccgacgccgaagacacaagatccaagctttcccctttaaccgatgtcacacatgtcttctacgtcacctggaccaatcgtgaatcggaaagtgaaaactgtgaagcaaatggctcaatgctccgtaacgttctccaagcgattatcccatacgcgccaaatctccgacatgtttgtctccagacagggacaaagcactacct

SEQ ID NO: 151043 - DNA, 452 bp, Arabidopsis thaliana columbia
ccaacgcgtccgaataaacgagcccactgttgcagccattgcttatggtcttgacaagaaggccacaagtgttggagagaagaatgttttgatctttgatcttggtggtggggcttttgatgtctctcttcttacaatcgaagagggtatctttgaggtgaaggcaacagctggtgatactcatcttggtggggaagattttgacaacagaatggttaaccattttgttcaagagtttaagagaaagaacaagcaggatatcaccggtcaaccgagagccctcaggagattgagaacagcttgtgagagagcaaagaggactctttctttcaccgctcaaacgaccatcgagaatgactctttatatggtggagctgacttctattctccaatcacccgtgcttgattcgaagagatgaacatggatctctttaggaagtgtattgagcctg

SEQ ID NO: 151044 - DNA, 443 bp, Arabidopsis thaliana columbia
  unsure (1)..(443): unsure at all n locations
aagagtagagactctttcaatcccggcggcgaattttaantacagcccaagagtgacctctggtcgcgtgaagaacatgaagggtcatttcacagcttcctccatcgagaggcgtgtgataatgagctctcctctctccaccgatcttcgtcagaagtacaatgtcagatccatgccgatccgtaaagactacgaggttcagatcgttcgtggtacttacaagggacgtgaaggcaaagttgttcaggtttaccgtcgcaaatgggtgattcacatctagagaatcactagggagaaggtgaatggaacaaccgtgaacgttttgattcatccgtcgaaagttgtgataacgaagcttcgtcttgataaagataggaaatcgcttttggagaggaaggctaagggacgtgctgctgctgataaggagaagggttctaagttta

SEQ ID NO: 151045 - DNA, 295 bp, Arabidopsis thaliana columbia
  unsure (1)..(295): unsure at all n locations
caccgncgcnngccncccacccgccncnncnncnnccncaacnnccccccccncgncnncccgnnccgnnccaacgcnnanccgnaacgagccagnnnnngccgcnccngcgccnancanngccccnnannggagngaagagangggaaccgaagcanacgacgaggcnanngaagcncncaagaagcnncncancgagaaggaagagccaaagacggnngcagcggcaaagggggagcagancacagcggcncnncagacaggaaccccanccgacaagaaagcnnncgacccc

SEQ ID NO: 151046 - DNA, 339 bp, Arabidopsis thaliana columbia
cgaatacgagatcggagacatggcggagagtcactgtggtggtggtggttgctgtccgccgatggatctgatgcggtcagaaccgatgcaactcgttcaagtcattgttcccatggaatctgctcatcttaccgtctcttatctcggcgatctcggtctcgtccagttcaaagatcttaattctgagaagagcccatttcaaaggacttatgctgctcagataaaaagatgtggggaaatggcacgaaaaatacgtttctttaaagagcaaatgtcaaaggctggagttactcccaaagagaccctagatagagaaaatgatattgatttggatgatgt

SEQ ID NO: 151047 - DNA, 445 bp, Arabidopsis thaliana columbia
  unsure (1)..(445): unsure at all n locations
ncagattttattatccttcctcgaaacaagagcttagctaagatgacgaagaactacccaaccgtgagcgaagattacaagaaggctgttgagaagtgcaggaggaagctcanaggtttgatcgctgagaagaactgtgcacccatcatggtccgactcgcatggcactctgctggaactttcgattgtcaatcaaggactggaggtccattcggaacaatgaggtttgacgctgagcaagctcatggagccaacagtggtatccacattgctcttaggttgttggaccccatcagggagcaattccctaccatctcttttgctgatttccatcagcttgctggtgttgtggccgttgaagttactggtggccctgacattcctttccaccctggaagagaggacaagccccaaccacctccagagggtcgtctttctgatgcta

SEQ ID NO: 151048 - DNA, 459 bp, Arabidopsis thaliana columbia
cgaatattttcgagtcatggagagaagcgccgttgcctcaggttttcatagaaattacatccgctgtgcttcacgcgccggcacttccacgacgcgcctccactctttgtcctccctcagaaactttccctcttcctctctcaggattcgtcactgtccttctcccatctcttccaatttcatcgttagtgaagtttcccgaaaccgacgatgcgacgccgtttcttccagcaccaccgatgtgactgaattagccgaaattgattgggacaagattgattttgggcttaaaccaacggattacatgtacgccatgaaatgtagccgtgatggtgaattctctcaaggtcaattgcaaccttttggtaacattgacattaacccagcagctggtgttctcaactatggacaaggtttgtttgaaggtctaaaagcttacagaaaacaagatgggaatat

SEQ ID NO: 151049 - DNA, 444 bp, Arabidopsis thaliana columbia
  unsure (1)..(444): unsure at all n locations
gacccacgcgnccgcggncctagacttggcgggtttcgaaccgaggcattcagggaaactgcactcgtggcaatgtggcctactggcattgttgaaatgctcatgcaagagaatctgtggtcaacaatgtttgccggaattgttggtagagccaggactcatgaacagataatggctgatgctgctggaaacttcaatggaaatctccaaataatgagtgctgagtaccaagtgctttccccgctagtcacaacccgcgaaagctacttcgtccgctactgtaagcaacaaggagagggtttgtgggcggtggtcgatattttcatcgaccatctccttccaaacatcaaccttaaaatgtcgtcgccgaccctctggatgtctgattcaagaaatgcataggggttacttcaaggatacatgggtggaacatgtggaagtaga

SEQ ID NO: 151050 - DNA, 442 bp, Arabidopsis thaliana columbia
gagcagacgagggagccgctcgatgataaaagaatagaggaagatagttcagaagaagaagaggaggaagaggataaccgagaacctcaagtagatgtaactcaacttacagggagacaaaagaagttgtttgagttgagacttaagatgaatgaagcaagaaaatccaatcagacggatgtcgggagtgaaaagaagaaaatggaagcaccaacagagacaaaaggaatctcaaaacagaaatggttggaggggaggaagaaaaagattgggaaacttcttgatgctaatggtttagatatgacacaggcttatatgctcgatactcaagaagcagctgaatcaaaatacaaaaaatgggaaaaggaacctacgcctgcgggttgggatgtctttaaccagaagacgttatacaacgcatacaagaaacggacaaagaaca

SEQ ID NO: 151051 - DNA, 457 bp, Arabidopsis thaliana columbia
accattttctcttcttcttctccaagaaaacactgaagaagaaatggggttccttaagccagccatggcgattctttttgtagcgatggtcgccgtttcatcagccgtggacatgtcaatcatctcctacgacgagaaacatggcgtctccaccaccggtggccgtagcgaagccgaggttatgagtatctacgaggcatggttggtgaaacacggcaaggctcagagccagaactctcttgttgagaaagatcgacggttcgagatctttaaagacaatcttcgtttcgtcgatgaacataacgagaagaatcttagttatagattgggtttgactcgttttgcggatcttactaacgatgagtatagatccaagtatcttggagctaagatggagaagaaaggtgagagaaggactagcctacggtacgaggctcgtgtcggtgatgagcttccg

SEQ ID NO: 151052 - DNA, 376 bp, Arabidopsis thaliana columbia
ggccggccgacgcgtacgattgaacttggaggatcaatggccgacgttcgcactcactcgcaccagcttcaagtgcacccgcaacgccatcatgaaggagggggcaaactcctttatcctcagagtggcccttcttccactcaggtgctagccgtgtttgtcggtgtaccgataggaggaacgctgctgactatagccggtttgacattagccggttcggttataggactaatgctagcattcccgttgtttctcatctttagtccggttattgtaccagcagcctttgtcatcggtctagctatgactggattcctggcttcaggggccataggtctcaccggactatcatccatgtcgtgggtactcaactaca

SEQ ID NO: 151053 - DNA, 430 bp, Arabidopsis thaliana columbia
taaacctcaagccgtcgtctccaaagttcccccttatagacgaaagaaatgaagaccattttgggctcggagactatggacatccgggacggcgtcgccattaaggtaaacgccaaggtgattgaggtcgaaggtccacgaggtaaactcactcgtgacttcaagcatctgaatctcgatttccagttgattaaagaccaagtcactggaaaacgtcagcttaagattgattcttggtttggttctcgtaagacaagtgcttcgattagaactgctttaagccatgttgataatctcattgctggtgttactcaaggttttctttatagaatgagatttgtgtatgctcattttcctatcaatgcttctattgatggtaacaataagagtattgagattcgtaacttccttggtgagaagaaggtgagga

SEQ ID NO: 151054 - DNA, 449 bp, Arabidopsis thaliana columbia
cacaacctctcttctcactctatatactcccaaaatggcttatagctaccgttttgccattcgtgtcgttctcctctccgccaccgtcggctttaccgcagccgcgttgaagcctccggttcgaaccttgaacggaaacattactcttaatctcatttggtacggaaaattcaccccaatccaacggtccataatcgtcgatttcatccgctctatcagttctgtcaccgccgccaaaggtccatccgtcgcgtcgtggtggaagacgacggagaagtacaaaaccggcgtttcaactcttgttgtcggtaaacagctcctccttgagaattaccctctcggaaaatccctaaagagcccttaccttcgtgctctgtcaagcaaacttaacgctggtggtgctcggtcaataaccgtcgtcttaacggcgaaagacgtcaccgttgagg

SEQ ID NO: 151055 - DNA, 360 bp, Arabidopsis thaliana columbia
  unsure (1)..(360): unsure at all n locations
gagctcccaggccggggggggaggaccncanccggcgagnagnatcgnnacagaactangagcagactctncaaaaacacccagncangggctctgnggatattccctctggttggcacgttgaagaaggagaccatgaagatggaggaattaagcctgatatgttggtatctttgactgccccaaaattatgtgcaaagagattccgtggccctcatcactttttaggtgggagatttgtaccaccttctgttgcagaaaagtataagctggagctccctagttacccagggacatctatgtgtgttagaattggtaaacctcccaaagttgacatatctgctatgagagtgaactatg

SEQ ID NO: 151056 - DNA, 454 bp, Arabidopsis thaliana columbia
gtttcgatcccgacaatgaccttgtcaaagttggttttgcaaaccaaacaacgatgctaaagggagaaacataggagataggaagattactcgagacaacaatgatgcgcaagtatggagtggaaaatgtaagcggacatttcatcagcttcaacacaatatgcgacgctactcaagagcgacaagacgcaatctatgagctagtggaagagaagattgacctcatgctagtggttggcggatggaattcaagtaacacctctcaccttcaggaaatctcagaggcacggggaatcccatcttactggatcgatagtgagaaacggataggacctgggaataaaatagcctataagctccactatggagaactggtcgagaaggaaaactttctcccaaagggaccaataacaatcggtgtgacatcaggtgcatcaaccccggataaggtcgt

SEQ ID NO: 151057 - DNA, 331 bp, Arabidopsis thaliana columbia
  unsure (1)..(331): unsure at all n locations
gagcncnncaggcgcgnngcgcaagaaccgcgcangnnagcccacgagcggcgcanncnaacaaacccgcgcnnncnncgnncncgcngaccggcgccncncgcagganacngnannnncgnngacggcagcgacgngagggacgggaccccagcccgcancaanggcggagaanannccgnnannnggnanaagaaagaaaccgaagaaagcagaagaagaagcggcggagaacgngaaagaaggcnnngagacggcggagaaaggcgnngangcggcggagaaaggaanagaagcggcggagagaggggnagagacggcagagaaggaa

SEQ ID NO: 151058 - DNA, 393 bp, Arabidopsis thaliana columbia
  unsure (1)..(393): unsure at all n locations
acggacaagcgngnggctggaaaancnggcgaagngaanctcaanctttactacgaatcactttgtcccggttgtcaggaattcatcgtcgatgacctaggtaaaatctttgactacgatctctacacaatcactgatctcaagctgtttccatttggtaatgccgaactctccgataatctgactgtcacttgccagcatggtgaagaggaatgcaaactaaacgcccttgaagcttgcgcattaagaacttggcccgatcagaaatcacaatactcgttcatacggtgcgtcgaaagcgatacgaaaggctgggaatcatgtgttaaaaactctggacgtgagaaagcaatcaatgattgttacaatggtgatctttctagaaagctgata

SEQ ID NO: 151059 - DNA, 439 bp, Arabidopsis thaliana columbia
  unsure (1)..(439): unsure at all n locations
ggctgggggcgaagcacaggacctngctganncacaagacggggcgnccatcgaccgggcactggactnaannnngggagggcagcgagacacaacnacaggnggagannatccacagancangaaagacanngnnggacataganngcctaaatttacaactgagcagaaagcaaaactgaaagcttctaccgatttcgttgggctcaactactatacttcagtgttttcaaaccatttggagaaacctgatccttcaaaaccaagatggatgcaagattctcttattacatgggagtctaagaatgcgcaaaattacgccattggtagcaagcctttgaccgctgcattgaacgtttactcgagaggttttagaagtctgttggagtacattaaggacaaatacgcaaatccggaaattatgatcatggaaaacgga

SEQ ID NO: 151060 - DNA, 435 bp, Arabidopsis thaliana columbia
atctctttctcagttctttagggttttcaatacttacaccaaagggtaatgccgatcaacgaggagggtcctagtgggttaagaatactcgttgtagacgatgatacttcatgcttgttcattctcgagaaaatgcttctccgtctcatgtaccaagttacaatttgctcacaagctgatgttgcgttaaccattctaagagaaagaaaagacagttttgatttggtgctaagtgatgttcatatgcctggtatgaatggttacaatcttcttcaacaagttggtcttcttgaaatggatcttcctgtcattatgatgtctgttgatggaagaacaactacagtcatgactggaatcaaccatggagcttgtgattatttaatcaaacctattcgtcctgaagagcttaagaacatttggtcacatgttgttaga

SEQ ID NO: 151061 - DNA, 377 bp, Arabidopsis thaliana columbia
  unsure (1)..(377): unsure at all n locations
ggcaggnnctnnggatgatnggngngagaccaanngcnganacngggggaagagngaaccggggcgagccngngagcnnagaagaacnaggaaggccgaggancgangnagnngnnaacngcncaggggncnnccgngagcncccaaacaaccagaggaaccgncnngaccgagcnancaagaagggggcggagcnagaagagcccgnagagcaaaaacnngnaaggaaacacgcgnnggaacaagcagaggcgcnnggcannganannagagaggcagcgacaagagagnncgcaaacgccccagggncacacncagccaacaacagncgngcngnngaaaacncgncanggaacgangagaaacagccncaggac

SEQ ID NO: 151062 - DNA, 448 bp, Arabidopsis thaliana columbia
gactgccaaagaactaatttctacgagggtatcgggttaaacacaaaggagttcgatatgcatgtcatcatcgagacaaaccgaaccacggcaagaatattccctgcggtgctggatgttgagaaccctgagttcaagaggaaactggatagaatggttgtgagctatgagaagctgctggctataggagaaacagatgatgcttccttcatcaagaccctcaagaggattcctttggttacttctttagcctctgagatcttggctgcttatctcatgcctcctgttgagtctggctctgttgatttcgccgagtttgagcctaatcttgtctattagtagctgcaatgtcaagtcttgagtttacggctggttcttgatttcttgtaattgaatgatcgaaactgagaaacatcgtcttttttttttttgcaataaacttttactg

SEQ ID NO: 151063 - DNA, 409 bp, Arabidopsis thaliana columbia
caagtaaattccaaaagataaaaacaatcaaatgatgaatgccacaaagtttgtgcttctcgtgattggcattttgggtgccattgtcaccgcaagggaggtcgaagaagtgtccaaagagaccaaattaggcacctctcttccaaaatctactaacaaaggcattggagctcagctttctgctgctggtcttacttacagcggcagcagtgtctctagctctgctagtgcttttaacaatcccaaaggtccaggggccagtgcatccgaaagtggctacacaagtaccatcggacaagtcattgccaagggtcgcaaggcaagagtttcttctgcaagtgcttctgccgctacaggtgaggctgcagctgcagtgactcgcaaagctgctgcttgacgtgcaaagggt

SEQ ID NO: 151064 - DNA, 399 bp, Arabidopsis thaliana columbia
  unsure (1)..(399): unsure at all n locations
gagctgaatagntggcttatgaagtgtcttttctatgaacctgaggaaactccagatggaatcgttcctttttctcctgggcggattggggctccaatgattttcgtgatctgtaaccagtgggaacaagctctagatagaatatcagaaaaggaagttatcgaggctatacgccgtttcacaacgagtgtgcttcatctttgggaacaagataggttagcaacccgggagaggattatagggcatggtgatcctaggaatatggaccgagaggaacagagaatacagaaagagattcaagaattggaaatgaaaatggttctggttggtccaggggaagataacattgtctaccaaagcgacactagtaacgagagtttacagggtagtcttcaacgt

SEQ ID NO: 151065 - DNA, 189 bp, Arabidopsis thaliana columbia
  unsure (1)..(189): unsure at all n locations
gaagaaagatcaaaccttccaagtttacacaaaatgaaaaaagaacgatggctcttgtcaccttcttgtttattgctaccgttggagcaatgacntcacatgtcaatggttacccccgaagaggttgggtcaacgcacacgccacattctacggtggtggtgatgctttcggcacaatgggaggtgctt

SEQ ID NO: 151066 - DNA, 374 bp, Arabidopsis thaliana columbia
  unsure (1)..(374): unsure at all n locations
gaagncacgagaancaacgangacggcgacgaacaagcaagncagggggaaagacnacgnggggggggggccnacggaanccgagggcgannncacnaccaccaccgncgaacnnagggnnccggaagggaccaacncnnggcnagngaagaancncnacnngncangcganccnnacangagaanncgcanggggaaaccnganccnnccacngcngcncnngcncaagcnnacacncccggccagccaanccaagggnanggaggggcnagaanaanagaancnggacanccagannacaagaaaggagannnacccnggggnanagnngcangggaggaggacagngnnancacnccaangacncacgcgc

SEQ ID NO: 151067 - DNA, 305 bp, Arabidopsis thaliana columbia
  unsure (1)..(305): unsure at all n locations
cccactcctactctttctccctcctctgctctcttatctacttcctgggtntnttcttcgcgcggggtgnagtttctaantccggggtcttccantggnaacaaaccatttatacactttgtctacacttgttgttatgctgctagtgtcagtgacaccgacagtgacatcaaaagacgaggttgtttcttgtacaatgtgttctttatgcgacaatccatgtagtcctgtccaaatcatctcctcgcacccttttcttcaccacccgcaacccccacaaccccaatgtcctccccctctttttc

SEQ ID NO: 151068 - DNA, 449 bp, Arabidopsis thaliana columbia
cctcacttcactcgtccttgaaacttgagcttcaattacaaagaatggctgcttcaagtgctggcaccgcaaactacgtcctcaagccacctccattcgcactggatgctttggagccgcatatgagcaaacaaactctggagtttcactggggaaaacatcacagagcttacgtggacaacctcaagaaacaggttcttggaaccgagcttgaaggcaagcccttagagcacattatccacagcacttacaacaatggtgatctcctccctgctttcaacaacgctgctcaggcgtggaaccacgagttcttctgggagtcaatgaaaccaggtggtggaggaaaaccatcaggagagcttcttgctttgcttgaaagagatttcacttcttatgagaagttctatgaagagttcaatgctgctgcagccactcagtttggagctggc

SEQ ID NO: 151069 - DNA, 436 bp, Arabidopsis thaliana columbia
  unsure (1)..(436): unsure at all n locations
caaaagtcgaatatcccaaattcgatccgttttccttcgataatctccgatctagatccgatggcgaaagaaccagttcgtgtgctcgttactggagctgcaggacaaatcggatatgctcttgtacctatgattgcaaggggtatcatgcttggtgctgaccaacctgttatcctccacatgttggatattcctccagctgctgaagctttgaacggtgttaagatggagttgatcgatgctgctttccctcttcttaaaggtgttgttgctacaactgatgccgttgagggatgtactggagtcaatgttgctgttatgggttgtggtttcccgaggaaagaaagtatggagagganagatgtgatgtccaagaatgtttccatctacaagtctcaggctgctgccttggagaagcatgccgctcctaactgca

SEQ ID NO: 151070 - DNA, 398 bp, Arabidopsis thaliana columbia
acattagcgttgagaaaaaaaaaaaagtaagaactagagagagattgccatgtctgcgaaaacaatcctatcgtcagtagttttggtggttcgcgtcgccgcatcaacagcggctaatatcggattcgatgagtcaaacccgatccgaatggtctccgatggtctccgggaggtagaagaatctgtttcccagatcttaggtcaatctcgtcacgttctctctttcgctcgcttcactcaccgatatggtaaaaagtatcagaacgtggaggagatgaagcttcgattctcgattttcaaggagaatcttgatttgatcagatccaccaacaagaaaggcttatcttacaaactcggtgttaatcaatttgctgatttgacacatgcaagagtttcaa

SEQ ID NO: 151071 - DNA, 344 bp, Arabidopsis thaliana columbia
  unsure (1)..(344): unsure at all n locations
gacccacgcgtncgctttgtaccaattagaaaccctagcgagcggaggatggagacaaagaacgagacttttgagggagtggagatttaaattttgagatcaaatcttgaaatcaacaaataggagaaagatttagtgatgggtaagaagaagaagagagctacagagaaggtgtggtgttattactgcgatagagagtttgatgatgagaagattcttgtgcagcatcagaaagctaagcactttaagtgtcatgtctgtcataagaagctttctacagctagtggcatggtgattcatgttcttcaggttcataaagagaatgttacaaaagttcctaatgc

SEQ ID NO: 151072 - DNA, 395 bp, Arabidopsis thaliana columbia
  unsure (1)..(395): unsure at all n locations
cacgcgnacgaaacttctctcttacttaccctctcaaacctatgtttcttccacctaaacaatctatattttcgttgagactctcaattgtgcggggctatcttaacatcaacaaacctgcaaaagatttatctattggtaaaacgaataagaaagctacagagaaggcgtggtgctattacttttatagagagcttgatcatcagaagattcttgtgcagcattagaaagctaagcactttaagtgtcatgtctttcataagaagctttctacagctagtggcatggtgattcatgttcttcatgttcataaaaagaatgttacaaaatgtcctaatgctaaagaccgtctatattcaactgatattgaaatatatggaatgcaaggaattcca

SEQ ID NO: 151073 - DNA, 448 bp, Arabidopsis thaliana columbia
atccgttcatcgagaaagtcggaatttttccgagaaaattcaaaagggcgaaaaaaagagcttgtgcgtacagttttcgaattgggctccttcgtacgggcaagctatggttcaagagaactatgaatgaaactgtggtgtaagagaatatcaatggttgttatctgctataatgttttttggaccaagtgagtttgatgctgatgaaatgggttatgcaatgagtagacttgagatagaatccgatctatgtgatactggaaaagacgtttgtggagttggtagtagtagtggtagtcacagatcaagtgaacatttggctgatctagaccatgaaatcagccaggttactaaattgaaatctagtcctcatcaacggtatagccgtgaagtccctgggagacatcagttacctgtgtctactgtgaggatgttggcaggtcgagaa

SEQ ID NO: 151074 - DNA, 420 bp, Arabidopsis thaliana columbia
tttaaaatggggagaaaggttaaagctggagacattataggggagaatgggggtgttatgctacagaccacaactgtgtggtgtgaggaccaaacgtttgggcgcaactgttgcgtatgaaccgtacaactttcttgaatattattcaggccaatgttggtgatggtaccataatcatgaattatctacttcagcatttggaaagaaatgaatgatccggtgatgacgaatgttctgctggagatagaaaacatgcttgcacggggtaaaatggatcttcctctcaaaatatgctttgctgcaataagagaagacgatttacttttacatcagttactaaagagaggacttgatccaaatgaatcggataacaatggcaggacacctttgcatatagcagcatcaaaaggaactctaaaa

SEQ ID NO: 151075 - DNA, 442 bp, Arabidopsis thaliana columbia
  unsure (1)..(442): unsure at all n locations
gatatttgttggactttggatcgaaaaattgaaaggtaaaagagggagagaagctctggattccggcgcttcccgtcgtcggcgacggtggttttgcccgttggctctgaggttatatcaggctttaatttaagtggattgtcatcttctgagatatggaacaagtttttgtctggccaagctgctaccactatcggcttttctcattccaagaagcgctcgattggcggtttcttgtacgttctgatttccttgtgggctctttcgttaactgcacttagtggtcaaaccctcttctatgatctttaggggaaggtgtgaggcaaatttctgagacagggctgaagtctgcaaattcttccttcgcatagtcctagagaaacctctttgntcctctctttcatatcttgttcttatgggtgctggttgaagaaagatacat

SEQ ID NO: 151076 - DNA, 451 bp, Arabidopsis thaliana columbia
aaaaaacacaaaaaagtttcaatggccgcctcaacattggctctctcctcccctgctttcgccgggaaggctgtgaacctttcccgggcggcatcagaagtccttggaagcggccgtgtgacaatgaggaagactgttgccaagccaaagggtccatcaggcagcccatggtacggatccgaccgagtcaagtacttgggtccattctctggcgagtcacccagctaccttaccggagagttccctggagactacggatgggacacagctggtctatccgctgaccccgagacattcgcaaggaaccgtgagctagaagttatccacagcaggtgggccatgctcggagccctaggctgcgtcttccctgagcttttggccaggaacggagtcaagtttggagaggcagtttggttcaaggctggttcacagatcttcagcgatggagggc

SEQ ID NO: 151077 - DNA, 440 bp, Arabidopsis thaliana columbia
atcaaatctctctctttctctctctaatggcggcgacattaggcagagaccagtatgtgtacatggcgaagctcgccgagcaggcggagcgttacgaagagatggttcaattcatggaacagctcgttacaggcgctactccagcggaagagctcaccgttgaagagaggaatctcctctctgttgcttacaaaaacgtgatcggatctctacgcgccgcctggaggatcgtgtcttcgattgagcagaaggaagagagtaggaagaacgacgagcacgtgtcgcttgtcaaggattacagatctaaagttgagtctgagctttcttctgtttgctctggaatccttaagctccttgactcgcatctgatcccatctgctggagcgagtgagtctaaggtcttttacttgaagatgaaaggtgattatcatcggtacatg

SEQ ID NO: 151078 - DNA, 387 bp, Arabidopsis thaliana columbia
  unsure (1)..(387): unsure at all n locations
tcccgcncgacccacgcgancgaaacatcttaattagaaaacaaaaaggagagacatattgatgaatgctattaagtttgttgtgcgtctcttgattggagttgtatgtgtcaatgttggtgcaattaggcaactcgagaaaagatccaaagagaccgaattaagcgtctctcttcccaaagctaccaaaggcgttggagctgaatttacagttactgtttatactcagtctataggtgatggcaatggctttggtgatgctaaaataaagggtcgcaaaggttccagcagcaatgcaattggaagcggctccggaattactagtggatatgtcattgcaaagggtcccaacgcaacagctttttctaggagtattgctttcggtct

SEQ ID NO: 151079 - DNA, 500 bp, Arabidopsis thaliana columbia
  unsure (1)..(500): unsure at all n locations
cgaaactctaaaatncaatctctcaaatcntctcaactcgtgtatcaagatgcanngatcttcgttagagagcgtctcaccggaaagaactatcagcccgntcgaggtggaaagcnnntctgacaccanntcgacaacnngttaagggcccaagatnnccaggataaggggaaggggtattcctcnncggatcagcnnagaggcttanntcttcgccggaaagggcagttgnngaggatggccgcnnacgttggcggattacaatatnccagaagggaatcnncaccctccacttggttctcaaggctccgtggtggtatgcnagattttcgttaaaaccctaacgggaaagacgattactcttgaggtggagagctctgacaccattgacaacgtcaaggccaagatccaagataaggagggtattcctccggaccagcagaggttgatcttcgccggaaagcaacttgaggacggcagaactttggcggattacaaca

SEQ ID NO: 151080 - DNA, 449 bp, Arabidopsis thaliana columbia
aaaaaaagtaagaacgagagagagaaagccatgtcttcgaaaacaatcctatcatcagtagtttgggtggttctcgtcgccgcatcagcagcggctaatatcggattcgatgagtcaaacccgatccgaatggtctccgatggtctccgggaggtagaagaatctgtttcccagatcttaggtcaatctcgtcacgttctctctttcgctcgcttcactcaccgatatggtaaaaagtatcagaacgtggaggagatgaagcttcgattctcgattttcaaggagaatcttgatttgatcagatccaccaacaagaaaggcttatcttacaaactcggtgttaatcaatttgctgatttgacatggcaagagtttcaaaggaccaagcttggtgctgctcagaactgctctgccactttaaagggcaggcacaaggtcacagaagcagc

SEQ ID NO: 151081 - DNA, 440 bp, Arabidopsis thaliana columbia
cagctatggtcatcaacaaatataagcttaggagttatatcaagagcttcaatctttcggggatgggctgcagcgcgggcctgatctcagttgatctagcccgcgacttgctccaagttcatcccaattcaaatgcaatcatcgtcagcacggagatcataacgcctaattactatcaaggcaacgagagagccatgttgttacccaattgtctcttccgcatgggtgcggcagccatacacatgtcaaaccgccggtctgaccggtggcgagccaaatacaagctttcccacctcgtccggacacaccgtggcgctgacgacaagtctttctactgtgtctacgaacaggaagacaaagaaggacacgttggcatcaacttgtccaaagatctcatggccatcgccggtgaagccctcaaggcaaacatcaccacaata

SEQ ID NO: 151082 - DNA, 402 bp, Arabidopsis thaliana columbia
  unsure (1)..(402): unsure at all n locations
gagtcttgaaggtcaacaacgtcgagaataatggcatcatttttttgggctttttctgccatcgctgccattttttttccaagtttcttgggtggtaagaaactgaggctgaagaagaagttgactgttccagctgtgtccaggccagatgcgtcggtgcgcgccgtcgcagctgatccagatagaccaatctggttcccgggaagcactcctccagagtggctagacggtagcctccctggtgacttcggatttgatcctcttggtctttcatcggacccggacagtctaaaatggaacgtacaagccgagatagtccactgccgatgggctatgctaggagcnncgcggatattcatcccagagttcctaacgaagatcggaatcctcaacactccgtca

SEQ ID NO: 151083 - DNA, 273 bp, Arabidopsis thaliana columbia
agagaaacaacaagaagtagtaatggcttcctctattctttcctccgccgctgtggttacatcggcgggtcagcccaccatggtcgcgtccattcaccggcttgaagtcatccgctgcattcccggtcacccgcatgaccaacaaggacatcactttcatcgcaagcaacggtggaagagttagctgcatgaaggtgtggccaccaatttggaaagacgatgcttagagactctatcttaccttcctgaccttagtgacgtcaaattgtctaa

SEQ ID NO: 151084 - DNA, 470 bp, Arabidopsis thaliana columbia
  unsure (1)..(470): unsure at all n locations
tgttaggtgacaaggnctcgtctcagcatctacgacccacaagtcactgaagagcagatccaaagagacttaaccatgaacaaattcgactgggaccacccacttcatctccagcccatgagccccaccactgtgaagcaagtctcagtcgcttgggacgcatacactgcaaccaaagacgcccacggtatctgcattttaaccgagtgggacgagttcaagaaacttgatttccagcggatctttgagaatatgcagaaaccggcttttgtttttgacggtagaaacgtggtcgacgctgataaactcagggagattgggtttattgtttactccattggtaagccattggaccagtggctcaaggacatgcctgctcttgcctaaacaacaaccaaacctcttccttagcttttttctccattttttccgaattctcatgagtttttccatatatctttaactacagg

SEQ ID NO: 151085 - DNA, 372 bp, Arabidopsis thaliana columbia
gaaaagtcagaataagaagaagaagaagaagaagaagagaaagagagtcagagacgacgacggacgaaacgacgctattcttacgctttcttcgatcgtcgatttgattttttcccttccttcttatttttctcggttgaagtaagataaagcatcgatacatgatggctgattgataagagttttctccggagaggttcggagttttttttttagaaaggaaacattaaaaaagatggcagtctcttttcctcgtcttccgaggtggttgtgtggtggtagtaacactaaagattgagagaagaaagagtcaatttctaaaggatctttctcacttagtcctttactgaagaagactactactagtaagac

SEQ ID NO: 151086 - DNA, 408 bp, Arabidopsis thaliana columbia
attttcttggcactaattgtcttaatccttattattggtctcaggatattcaaagcttggatgattcttgtttggcatccatttgtgttgaccagaagactcaaaaaccaaggaatctcaggcccaaattacagaatcttttacggaaacctcagcgagataaagaagatgaagagagaatctcatctttcgattcttgatcctagctccaatgatattttccctcgtattcttcctcattatcaaaaatggatgtctcaatacggagagacttttctttactggaacggaacagagccaaggatatgcatctcagatcctgaacttgcaaaaactatgttgtcgaacaagttaggtttctttgtcaaatcaaaggcaagacctgaggctgttaaacttgtcggcttc

SEQ ID NO: 151087 - DNA, 421 bp, Arabidopsis thaliana columbia
gaacaacaacactaagcgaaaaaagaaaaagcctcaagtccgctgagtagacatatggctatcaacaattcacggaggctcaagcagtggttcttacgcccaacgaacattcctttggccaggactaaaagcctcaaagcttttaacgccccttcgtgatggttgtctcttctcggatctgccaagtacactatgggaaatgatctttggtatggacctgacagagtgaagtactcaggaccctttttcgttcaaactccgtcttacctcaccggagaattccctggcgattatgggtgggacaccgtcggattatccgcagacccttgagcctttgtcaaaaacagagctcttgaggtgatccatgggagatgggcaatgctgggagcctttggttgcataacccctgaagttctttaaa

SEQ ID NO: 151088 - DNA, 457 bp, Arabidopsis thaliana columbia
  unsure (1)..(457): unsure at all n locations
gttctgggaagtgatctgcgacgaacacggcattgatcacaccggtcaatacgtcggcgattcgccgtgacagcttgaacgtatcgatggctatttcaacgaagctagcggtggaaagtacgttcctcgcgctgttcttatggatctggagcctggtaccatggattctctcagatctggtccgttcggtcagattttcccgcctgataacttcgtctttggtcaatctggtgccggaaataactgggcgaaaggtcattacaccgaaggtgctgagttgattgattctgttctcgatgttgtgaggaaggaagctgagaacagcgattgtcttcaaggtttccaagtgtgtcattcattgngaggaggaactggatctggaatgggaactctattgatttctaagataagagaagagtattcagatcgtatgatgatgactttctcagtgtttcct

SEQ ID NO: 151089 - DNA, 449 bp, Arabidopsis thaliana columbia
ctacgattcattcgttctatggcttccattgctgcttctgcttctatttcccttcaagctcgtcctcgccaactggcgatcgcggctagtcaagttaaaagctttagcaatggaagaagaagcagtctttcttttaatctccgccagcttcctacccgcttgactgtttcctgcgctgcaaaacctgagacagtggacaaggtgtgtgcagttgtcagaaagcaactctcacttaaagaggctgacgaaattactgctgccaccaaatttgctgcacttggtgctgattcccttgatacggtggagattgtgatgggactagaggaagagttcgggattgaaatggcggaggagaaagcacagtcaatcgccacagttgagcaagcagctgcgctcattgaggagctcttgtttgaaaaggccaagtagaatatctttattacattagc

SEQ ID NO: 151090 - DNA, 314 bp, Arabidopsis thaliana columbia
  unsure (1)..(314): unsure at all n locations
acttctcagagttcttcactttttctggttatttttctcatcaccatcaaccctaattgggcgcgattatatattctcggcagagcacattaacattacntatattaatatatcagaagcgttaatcttacattccttctaggtttcaaagaaactccaaaaggaagtaatatcaccttcgcttgttctccttcaggacccagtgtctcttgcaattccttctaatagagaaaagaaaagtatcgttacattgaaactgtttatcgtatttctctcaaatgtaaagaggttagagaataaattctattcacata

SEQ ID NO: 151091 - DNA, 464 bp, Arabidopsis thaliana columbia
gccactaaaaacctatctcccggacggggatatctttcttactgtcctaactaagcaaaatatgggtgacgatttttatggacaattgtgcagtaggcttcaaaatgaagaaagagaatctgaattccatgcaacagatgttcagtttatccctgcacaggtcaaggtcataaaatgcaatatcaggaacattgctgttgatatctcttttaatcaaacggcaggtctctgtgctttatgttttctggagcaggttgaccaactctttgggagagatcatcttttcaagcgtagcatcatccttgtcaaagcttggtgctattacgagagtcgaattcttggtgctaacactggattgatctcaacatatgcattggcagtactagttttgtacatcatcaacctgtttcattcatctttatctggccctttagcggttctgtataagttcttggattactatg

SEQ ID NO: 151092 - DNA, 476 bp, Arabidopsis thaliana columbia
  unsure (1)..(476): unsure at all n locations
cgcgtcccttgaagcagtcaaattcntttctgnaactcctaacattcgccatgtcccgagattctctcgggcgttgaggtcacataatggccgtgtcagctctcctcctctntgatgcctttggttggttccttccgaagactatcaccagagcgagtatgtttctgcacgagacaaacgccgtgagttcgtgtctggattcagtggaagtgcaggtttggcacttatcacgaagaaggaagcaagactttggacagatggtcgatacttcttgcaagcattgcaacagcttagcgatgagtggacactaatgcggatgggagaagatcctcttgttgaagtttggatgtctgataatctacctgaagaggcaaatataggtgttgattcatggtgtgtctcggtagacactgcgaatagatgggggaaatcgtttgccaagaagaatcagaaactaatcaccacaactactgatc

SEQ ID NO: 151093 - DNA, 480 bp, Arabidopsis thaliana columbia
ccggcgaccacgcgtccggagaaacctgagaagagcctgcaccggcgaaacctgcgtctgcatcgctcgatagagatgtggaggtagctgatttgtcaaaggaaaagagattgtctttcgtcagagcgtgggaagaaagcgaaaagagcaaagcagagaacaaagctgagaagaagattgcagatgttcatgcttgggaaaacagcaagaaagcagctgtcgaagcgcaactcaagaaaatcgaggagcaactagagaagaagaaagcagagtatgcagagaggatgaagaataaggttgcagcgattcacaaggaagcagaagagagaagaggcaatgattgaagctaagcgtggagaagacgttcttaaagcagaagaaacggctgctaaatacagagccactggaattgtttcaaggcaacttgggatgtttctaatcttgaatttgcgaatcaaagtttcaagacttcgtaactgt

SEQ ID NO: 151094 - DNA, 310 bp, Arabidopsis thaliana columbia
  unsure (1)..(310): unsure at all n locations
agttaagaagcctgagatgaaaggtcctgaaatgtttatttttgaggaaattaaaaccgagtttggggaatccttgcttgctagagtaggagtaatgggtgtgacctatctgaaaacgatgccacccaaaggctctggtgaagagaaagaaactgagttctcattccgtgttgagggtactactgcagttaagagatttgctatgcagagttctcggatcagtagcttagggaacggtttgtttcacgtgagaactgctccatcagaagaaccaatccctatncttaaatatagcttgcaacctaaacta

SEQ ID NO: 151095 - DNA, 351 bp, Arabidopsis thaliana columbia
  unsure (1)..(351): unsure at all n locations
tactgaactactttcggaggtttcagaactcttttcatttggacactcggggacacggtttgtctgggtcggtttttggaagcgtgagagggtgaaggagaggaagcatttagagagtgtagacagatagcgtgtaaaaaatgtggcaatctccatgcctggtttcttacaaagaaatcaaaatctacagctagatggtgccaggattgcaaggaattccatcaagcaaaagatggagattgtttggttgaacaagctttccagcaacgttttgttcgggctattttaaaaagtttgatattctcncttgcttattgtttgtgcataccagcaaaattatatttaagcttt

SEQ ID NO: 151096 - DNA, 341 bp, Arabidopsis thaliana columbia
  unsure (1)..(341): unsure at all n locations
gggcgagccacgcgnacgcggacgcgtgggtccaattctacatcaatgtttttttatttcgatgcacctcactccatncgaacgactattatctacgtgactgtacaatttacaaatcatcctcatatcctactcacttaccatcacctttatgtacgtatctaatctatcttatgataattatacacaaccgacaaataatgtctacgactgcctctctggatcgtctgatgtatctcaatttgtatttgtttatttccgttacttccttcaccagcatacaattcaatcattacaacccttcaacttttaatgtttcttccaaccggatgagtgtttct

SEQ ID NO: 151097 - DNA, 415 bp, Arabidopsis thaliana columbia
attctgtggccggcgatttccctcccgatccacttctcgtctccggagccttcatctcctccggcggtgacggaaccctagacagtagtgcgaaacgacgaccgattcagggaggaatcggaatttctggttcgggagagagcgtacgcatcgggatggctaacggcactgatcaggtgaatcatcagacggaatcgaagtcgcggaagcgtgcggcgcctggagataattggttgcctcctggttggagagttgaagataagattcgaacttccggtgccacagctggttcggtggataagtactattacgaaccaaatacaggacgtaagtttcggtccaggactgaagtgctgtactacttggaacatggaacttctaaaagaggcaccaagaaagctgagaatacatattt

SEQ ID NO: 151098 - DNA, 437 bp, Arabidopsis thaliana columbia
ccaccaccacttcctctacctatctaattccgaatctggttttggatttggatctcatttcggtgcagcgatgaaggtggttgataagatcaaatccgtgacggagcaaggccaaacagctttctccttcgagtttttcccaccgaagacagaagatggcgtcgagaatctctttgaacgaatggatcgattggtctcttatggacctaccttctgcgatatcacttggggtgctggtggatccacagctgatctcactctcgagattgcttctaggatgcagaatgttatctgcgtcgagactatgatgcatctcacttgtaccaacatgccgattgagaagattgatcacgcgcttgagacgattagatctaatggaattcagaatgtgcttgctcttagaggagatccttctcatggacaagataagtttggtc

SEQ ID NO: 151099 - DNA, 409 bp, Arabidopsis thaliana columbia
  unsure (1)..(409): unsure at all n locations
accacagctaataacatgaatagcttcttttttcatcgatctcgtgttcgncacctccctcgatgctctcttctccatcaacggggactcaataaacacatgagacattccaaatctcttctcaaaattcttctgcgacattaacgaatatttctcaagctcatcatatccttcaagcccttcctcaatatctttcaaatcaaaaatcgcctccttccatgatcgttttctactatagctgctcatcgntttatcatcactcttcttcttagtcttcttctttagtttcgagaacaagctcttgattcctgatgtcttcttcgaccaatcttatttgtgattactgttaccttcgtcttaacaacattagatccacgaccgccaacaatcacatgtcattttctttctt

SEQ ID NO: 151100 - DNA, 218 bp, Arabidopsis thaliana columbia
  unsure (1)..(218): unsure at all n locations
agtaattaactaacaacaaatggcgaacattctttttcttgtttgcgcagctctcncccggtntttcatcctcaccaacgctggcgtctatcgcaccgttgncgagttctacgaagattacgccagtaaccccattttcccaatacagaaatgtcagaaggagtttcagcaagaccagcacctaagagcttgccagagatggatgcgcaagcaaatgt

SEQ ID NO: 151101 - DNA, 246 bp, Arabidopsis thaliana columbia
ctcccgcaaccttcgattttcgtttattcgtatccttcggagagagaaaacaatcaataggcggccatgttggtgtaccaagatcttctcaccggtgatgagcttctgtctgactctttcccttacaaggagattgagaatggaatcctctgggaagtagaaggaaagtgggttactgtgggagctgtagatgttaacattggtgccaatccatctgctgaagaaggtggagtggatgtaggtgtt

SEQ ID NO: 151102 - DNA, 454 bp, Arabidopsis thaliana columbia
gaaggatttcaaattaaaaaatttttcaaattttttaatgggggggatcaaatggaccaattggtcttccaagggttttttttttggtggccaatttaaccgccaaaaccttggttttaagaaacttaaaataaaatcttggaaccagggctggtttcgattgtgggcgaagaatccaacttgggcattgggtacctatgggaattttctttggatcggttggtcagctactcaccgggaatctggggttcatatcaagcttcgtcagatcaacgaaattagactcttggagcccggagcagctcaggacaatgatgttttggtggtaacaaccgtgctcaggttttcttcaagcaacatggatggactgatggtggcaaaattgaagctaagtatacttcaagagctgctgatttgtatcggcagattcttgctaaaagaagtgcgaaagcga

SEQ ID NO: 151103 - DNA, 453 bp, Arabidopsis thaliana columbia
cgaaacgcaagcttcacgcttgaaaatctccgttcgttttctacctcgtttagatcggagatggcggagaagccggcgcaagagcaagagcagaagcgagcgatggaacctgcagttctcgacgatattattcgtcgtttggttgagtttcggaacacgagacctggatcggggaagcaagttcatctcagtgaaggtgaaattcgtcagctttgtgctgtctccaaagaaatatttcttcaacagcccaatctgcttgaattggaagctcccatcaagatctgcggtgatattcatgggcagtattcagatctattgaggctttttgagtatggagggttccctcccgaagctaattatttgttcttgggtgattatgttgaccgtggcaagcaaagcttggaaacaatatgtcttcttctagcttacaaaatcaagtaccctgagaacttt

SEQ ID NO: 151104 - DNA, 462 bp, Arabidopsis thaliana columbia
cttgattccaatccattcttcttcaagtgccgggttctcgggtcggatcttctaagtctagcgtgagggataatggctactgtcactactcatgcctcggcctcgattttccgaccttgtacttcaaagccaagattcctcaccggttcttccggtaggttgaaccgcgacttgtcgtttacatcgatcggttcatcggccaaaacgtcgtcgttcaaggttgaagctaagaaaggagaatggttgcccggtttggcatcgcctgattatctcaccggcagtcttgccggtgacaatgggtttgacccgttgggtctagcagaggatccagagaacttgaaatggttcgtccaggcagagctggtcaacggacgatgggctatgctcggtgtcgctgggatgcttttgccggaagttttcaccaagatcggaatcataaatgttcctgagtggtacgatgct

SEQ ID NO: 151105 - DNA, 330 bp, Arabidopsis thaliana columbia
  unsure (1)..(330): unsure at all n locations
cacgcgtccggtgaaacacaaaaagatgcttaatctgagcttttttattcaagaagaaagaatcgtgctgggtgatataacatattcttgcgggtgccacantcttacctctgcaatctttgcatgcttcttggatatgaagggttatcggataaaatttactcgttagcgtgagaggtacttaaaaagttttctgccgtagatgtcactcatacgaagttatctacaaatgaactctcacagacggcgagtttttttatttcctcaactgnacgtgtgcttgcatcccttagtctctacacataatataaggttttaatacattttcca

SEQ ID NO: 151106 - DNA, 158 bp, Arabidopsis thaliana columbia
acccgttcttttaaaaccctggtcttttccgatttttttcttaacttccgggtggttccgttttggggcaggtaaagatggaaaattaggttctgtaatggcttaacaaagcctgggttttggttggttaacttggagccaccattttttttggccgt

SEQ ID NO: 151107 - DNA, 398 bp, Arabidopsis thaliana columbia
gaaaataatggctatgacacaagtttttgtgatttttattcttctagcaacgtcgttgtgcaagtccaatgctttgccttcatcggtaatcaacggatttggatatgattattgcattgtagaatgttcaataacttttttagatgatgcatgcaagccattgtgtatagacagggggtactcggatggaggatgtattggtttatcaccacattttaaatgttgttgtaagaaatgatataaatcaatagttaactggcgatttgatatctggtttgttttttgatgaaataaataaagcttatgcgttgttgtggagattttttatttttttcctatatttttttttattttttaaattgtttttttttttaaatataatattttatctaattttt

SEQ ID NO: 151108 - DNA, 147 bp, Arabidopsis thaliana columbia
ccacgcgtccgagttaaacaaagattacgattatggccacataagttttccaacaatcctccttcgccggccaaacgggtttaaagccctccagggacctaatccaaaaggtgggcgttttgggggggggccgggtgaccatgcgtc

SEQ ID NO: 151109 - DNA, 456 bp, Arabidopsis thaliana columbia
caaatcttgaattgtgttatacgcggtaatggagatgggattctagttccggttccacagtatccacggtactcagctaccatatcactgttaggtggtactcttgttccttactatcttgatgagtctgaaaactggggacttgatgttgctaaccttcgacaatccgttgctcaggctcgttctcaagggataacagtaagggcaatggtgatcattaaccctgggaacccaactggccagtgtctaagcgaagctaacataagagagatattaagttctgttataacgagaaactggttcttctgggagacgaggtttatcagcagaacatataccaggatgagcgtccctttatcagctccaagaaggttttgatggaaatgggttcgccgttcagcaaggaagttcagcttgtatcttttcacacagtctctaaaggatattggggtgaat

SEQ ID NO: 151110 - DNA, 430 bp, Arabidopsis thaliana columbia
caagcccatccacgttcaagactgttgctctcttctctaataaaaagccagctcctgctaagtgcaaggctgtctctgagactagcgatgagctcgccaagtggtatggtcctgacaggagaattttcttgcctgatggtcttttggatagatcagagatcccagagtacttaaacggtgaagttgctggagattatggttatgacccatttggtcttggaaagaagcctgagaactttgctaaataccaagcttttgaattgatccatgcgagatgggctatgttaggagcagctggtttcatcattcctgaagctttaaacaaatatggcgctaactgtggccctgaagctgtctgggttaaagactggtgctttgcttcttgatggaaacacattgaactactttggcaagaacatccctatcaacc

SEQ ID NO: 151111 - DNA, 280 bp, Arabidopsis thaliana columbia
cagagaagtaagaagaagaagaacaaaagtttaaattatttacaacgagagggaaaagcggttgtacttttttaatctctccgagcaaacctaaatatactattaaatggtggattcgattaataaagttgctcatcttgatgtgtagctaactgtcgaagagaggaattttttatcttttgggtacaagtatgtgatttttgcaagtagagcatcattttataatactatcttccatttgtgcagattgaatagtcctatcgaaattatcaaatttttt

SEQ ID NO: 151112 - DNA, 410 bp, Arabidopsis thaliana columbia
gctctctcaaaagtcgaatatcccaaattcgttctcttttccggcgataatctcctagctagatccgatggcgaaagaaccagggggtgtgctcgttactggagctgcaggacaaatcggatatgctcttgtacctatgattgcaaggggtatcatgcttggtgctgaccaacctgttatcctccacatgttggatattcctccagctgctgaagctttgaacggtgttaagatggagttgatcgatgctgctttccctcttcttaaaggtgttgttgctacaactgatgccttctttggatgtactggagtcaatgttgctttatatggtttgttggttttcctaggaaaggtatttttgttccatgttttttaataaatttctaaatattatttccatttattatttt

SEQ ID NO: 151113 - DNA, 260 bp, Arabidopsis thaliana columbia
  unsure (1)..(260): unsure at all n locations
tcgaaccgtataattacatttgtatttatttgtataaaaagaagaccacactacggntcgctatctttctttctctctagtgggtctctatctatcttatttcttcctacatcaatgtctactcaaggtcatcttatcacttgcaaatctgctgtggcttactatcctaacaagcctcttgtcatctaatattttcaagtctctccacctcaagcttttttttttcatatcaagatcctccacactgctctttttcacac

SEQ ID NO: 151114 - DNA, 336 bp, Arabidopsis thaliana columbia
gagaaagagagatcagattccggtgttccaaggaatcacatattttaagatccagaatcgcctgagagatgtctaccttcaggggcgatgagaccgctcctttcttcggcttccttggcgctgccgctgcgctcgtcttctcatgtatgggagctgcgtacgggacagcaaagagtggtgtgggagtggcatctatgggtgtgatgaggccggagttggtgatgaagtctattgtcccagttgttatggctggtgtgttgggtatctatggtttgattattgctgttatcatcaatacctgggattaaccccaaggctgaaattctactaccttct

SEQ ID NO: 151115 - DNA, 462 bp, Arabidopsis thaliana columbia
caaaacccaattagccggagatggccgcaacatccgccgttgctgcagctgcttcttccatcaggggtactcgggtggctcccgggatccatcccggttcaggtcggttcacagccgggttcggtttcggaaagaagaaggcagctcccaaaaagagtgccaaaaagccggtgactacggaccgggctctttggtacccaggcgccattttctctgactggcttgatggttccttggttggagattacgggtttgatcccttcggtttaggcaaaccggccgagtatcttcaattcgatatcgattcactagaccagaatctggctaagaacttggccggagacgtgatctgaaccccgtacggaagctgccgacgccaaatcgacgcccgttcagtcgtacagtgaggtgttcggaattcagagattcagggaatgcgaactcatccacggacggtgggcg

SEQ ID NO: 151116 - DNA, 265 bp, Arabidopsis thaliana columbia
aaaataccctaatcacattttgtaacaataatacatttattcattaaaactctccgacgatgcctgaggcaccgatgccagagttctctagctcggttaaactcaagtacgtgaaacttggttaccaatatttggttaaccatttcttgagtttgcttttgatcccgatcatggctattgtccgcgctgagcttattcagatgggttctgtacagattcttaatgtttggaattgactgcagattgacctagtgaaggttttatg

SEQ ID NO: 151117 - DNA, 415 bp, Arabidopsis thaliana columbia
  unsure (1)..(415): unsure at all n locations
aactctatctcacaatgagattctgngcttcttttgtattcaactaaaacccaacccacgggcgggttatacttctatcagagccgggtaataaaaccaaatcggttccggttatgacttgtccatgttctcactgcaatcacaatggccacaactctcggacttgtcccaatcgcggcgtgaagctttttgttgttcggctcaccgaatgttcgatccgtaaaagtgcaagtatgggtaatcttagccattacacggtttctggatcgggtgggcatggaaccttgtccaacactcctggttctccgggtgatgtccctgaccatttcgctggttattgttacgcttctgaggattttcttgctggcttctttctctaacctctagagaaataaaggaactccatttacagagg

SEQ ID NO: 151118 - DNA, 359 bp, Arabidopsis thaliana columbia
  unsure (1)..(359): unsure at all n locations
gaaaaaaaaaactttcattttattcgtcgtcttttttatcttgttgcttcggagcgagcgagagttatcgtcggagaatttatcggctctctctctgaaaattctgatcggtgaagaatcgtcggatcgaaagtttcataagctttccatcaactagcagtatctgccaatatcacagacagataattcgtaatgggagacgtatatttcaaccatttcgctcagcaactgcagatgtctgaccaagagaagggtgaaatgtcaagacattcacaccctcattcaatcaatgaacaatctgagtcgtcaactctggaaagggtatctncataatcattaaccaacaaagtccttgatag

SEQ ID NO: 151119 - DNA, 214 bp, Arabidopsis thaliana columbia
gtactgcctcacttccaagattccactcgtttttatatttctattcctccattcaattgtccgcgtaatttttctgtatcgaaggtcgctcctcctttaatctccttaaactcccttgtccttaaacctccaactcaaatatctttaatttgtcatcacattttacatttctttcacttatccccattcttaaaattttttatcattttcatta

SEQ ID NO: 151120 - DNA, 329 bp, Arabidopsis thaliana columbia
cgcgtccgcttcgatcgtagaaaccttgaaaatccgagtcttctacaatgccgccaaagttggatccgagtgagatcgttgacgtgtacgtgcgggtaaccgcgtgagaagttgcagcagcgagttctctagctcccaaaatcggcccgctacgtctcgcaccacagaagatcggccaagatatccctaaagaaaccgcagaggcatggataggattacttggaaccgtcaagcttacattgtcgaattaccgagctaccttaccggagagtcatccgcagactacacttgggacaacgccttactatgatctgaccccggatacgttc

SEQ ID NO: 151121 - DNA, 275 bp, Arabidopsis thaliana columbia
ccgatctatcagatggtttggttggttatattctttctagggttccatttacatctctaatctcagtgcgatctacttgtaaaaagtgtaatgctttatcgaaaaatcagatctttggtagaaaaacagcatcaaggaatcaatttctagagttcatgattctagattctagagtttgttctttgagattagatcttcaaggaatccgtaacgaagacaaagaagacttcgttgatccatctatgaagctaataagtatacctagtaatgatgat

SEQ ID NO: 151122 - DNA, 162 bp, Arabidopsis thaliana columbia
gtccgaaaaaggggtcatttactatcttttaagagacgacttttttagttttcgaccaagaaaggaaaggggggtgacctgagttcttcaacacataacataatggccggagttttaaaaacggttacgtttcttgtttgggttttcgctgccccgtgtgtc

SEQ ID NO: 151123 - DNA, 364 bp, Arabidopsis thaliana columbia
  unsure (1)..(364): unsure at all n locations
caaaaattcaattttcccgagatttttgtttctctttatcgattcaacacctaaagattgaagctttggctcgtgggttatgtaaagtttccacctttcgtcttctttctgatctgggagcaaaaatgggacaacagcaatcaaagggggaattgctgtatcagcaaggttagttatggtaactctgaaaggaattcgagctcttcatcgagatggggggagaccttgagtgggagggatagagaaaggaaaacttccgttgatccttggcttgtatgaactccgagctatttgatgttgctaagactttgattgaggtgggttctaatgttaatgcttatcgtnctggtcgtcatgctgggac

SEQ ID NO: 151124 - DNA, 470 bp, Arabidopsis thaliana columbia
tctttttcgaattcggagctcaagttggaaatccgttgattttagagagttttctgagatggctggtcctaagcaaacagttcgtaggtctactgggaggaaaggctcctaggaagcagcttgctacaaaggctgcacgtaagtctgcaccaaccactggaggagtcaagaagccccatcgttaccgtccaggaactgttgcactacgtgaaattcgtaagtaccagaagagtcccgagttgctgatcaggaagctccctttccagaggctagttcgtgagattgcccaggatttcaagactgacttgcgtttccagagccatgctgtgcttgcactccaggaggctgctgaagcataccttgtgggtctctttgaggacactaacctctgcgccatccatgccaagcgtgtgaccataatgcccaaagacattcagctcgctcgcaggatcaagagagaacgtgcttaa

SEQ ID NO: 151125 - DNA, 141 bp, Arabidopsis thaliana columbia
tttagatggcctcttggttccgtcgaaatcttctttagttttaattgcccttgggggattcctggggggggcaagcttaagattctagaccgttttgcttacataaacacaatggttaatcctttaacttttattccttta

SEQ ID NO: 151126 - DNA, 304 bp, Arabidopsis thaliana columbia
gcttacatcaacacaattgtttatcctttcacttctattcctctacttgcctattgtactattccggccgtttgtcttctcaccggcaagttcatcattcctacgatcaacaatttcgcaagcatatggttcttagctctgttcctatcaatcattgcaacggctatcttagaactccggtggagtggtgtaagcataaatgacctctggcgtaacgagcaattctgggtgattggcggtgcctcagctcatctcttcgctgtctttcaaggtcttcttaaagttctctttggtgttgacacta

SEQ ID NO: 151127 - DNA, 131 bp, Arabidopsis thaliana columbia
gaaagatatataaaaaaaattgtaggcaaaggtgttattatggtggctatacttttcctttgtgcagggtctgcaacatctcaagcagggacacaagcttcgcccattttttttgttaacttattccatga

SEQ ID NO: 151128 - DNA, 425 bp, Arabidopsis thaliana columbia
  unsure (1)..(425): unsure at all n locations
caggggacatatagagagcggaagacatcccgaatactacttgaaatactctgttgaaagtggggaaaccgcagtgttggatttgttcnaangatataccacagccccacatttgagacggtctcagtgaaagaagaagattgaaaaccccataaaactttccttttcggtttgcccacattagaattaaccatttatatcattctttgaattcattccattttcatgtggtggcagtgttgagattggtttccaggcttctggtgaatagtctctcactcttttgtacttgtaagcatatttgttgtgtgttgtttgtttgttaccaaatttcattacttcattgttgatataaattgttgaattttgtgacttttgttgtactagtttcttcataaacccatctaaaagcattttgatttttt

SEQ ID NO: 151129 - DNA, 444 bp, Arabidopsis thaliana columbia
ctacattttaaccatgaagcttcttgggttctccttagctattctattagttgtggcgggtgggaaacctgaagaagaggggaggggcaaagagaactttccattcacatgtagccaaacagatcgtttcaacaaacaagatttcgaaagcgacttcatcttcggtgttgcatcttctgcttaccagatcgaaggcggcagaggtcgtggacttaacgtttgggatggcttcactcaccgatacccagagaaaggtggagccgatttgggcaatggagacactacttgtgactcataccggacttggcagaaagatctagacgtgatggaagagcttggagttaaaggctacagattctcctttgcgtggtcaagaatccttccaaaaggaaagaggagtaggggaatcaacgaagatggtattaactactacagcggtcttat

SEQ ID NO: 151130 - DNA, 431 bp, Arabidopsis thaliana columbia
  unsure (1)..(431): unsure at all n locations
ccggaannnaaggnccggcccacgcgtcccgtacatgctatctacctctctcactgcccctccttctttctccggtctccgccgcatttctcccaaggtcgactctgccggcgggtgcggccaccaatccttcttccaccgcgtcaattcctctacccgtctcgtttcttcctcttcttcttctcatcgctcccccagaggtgttgttgccatggctggatccggaaagtttttcgttggaggaaactggaagtgtaacgggactaaggactccatcgccaagcttatctccgatctcaacagtgcaaccttggaagcagatgtagatgttgctgtgtcacctccatttgtctacatcgaccaggtcaaatcctcgttgacagacccgattgacatatcaggtcagaactcttgggttgggaaaggtggag

SEQ ID NO: 151131 - DNA, 486 bp, Arabidopsis thaliana columbia
  unsure (1)..(486): unsure at all n locations
cacgcgtnccgagcctctcttccggaaggtgttcgaggggttgnngttgttgtgttttctccgatgaccttcgngatggagctgcgtggggtacatcagcagctgcgagcgtgcggcnggcnngcnnagcagcggcgaaggaaggaagcccgtcgtgtgagaagaaaaggnngagaataatcggaggagaagaaagacccggagaagagctgtatgctgcgaagatatacanctgggcttagagctcaaggtgattataatttgcctaaacattgtgataataatgaagtccttaaagctctttgtgttgaagctggttgggttgttgaagaagatggtactacttatcgcaagggatgcaagcctttacctggtgagatagctgggacttcatctcgagtaactccatattcatcacagaaccagagccctctttcatcagcctttcaaagtcccatcccatcttaccaagttagcccgtcttct

SEQ ID NO: 151132 - DNA, 391 bp, Arabidopsis thaliana columbia
gagaaaacgaagaagaagaagatatgacgattaaaccggtggttcgtatttccgacgggaatgtgaggatcaaaaaccggacgggtcgagaccggtgtaccagataatgtcatcacgacgtcagcatcggaagctggaccggtagaaggagtcttcgtcggagctgtatttaacaaggaagagagtaaacacatcgtaccgatcggtacgcttcgcaattcccggtttatgtcttgtttccggtttaagctctggtggatggcccagagaatgggagaaatgggccgagatattccctacgagacgcagttcttattggtcgagagcaacgatgggtcccaccttgagtctgacggagctaacggcgtcgagtgtaaccagaaagtttaca

SEQ ID NO: 151133 - DNA, 444 bp, Arabidopsis thaliana columbia
cggacgcgtgggctgggcactatatcccagcttttgcttcccgagtccataaaggaaacaagggtaatgagggagttcatattagagctaaagggattcgctattggaaatgggcttacagatcctgcactccaatacccagcctatcctgactacgctttggaaatgggtctaatcacgcaaaaagagcatgatcgcttagaaaagattgtcccactgtgcgaactatcaatcaagctttgtggaactgatggcacaacttcttgtttggcatcatatcttgtctgcaactctttgttcagtggtgtaatgagtcatgctggtggagtaaactaattacgacatcaggaagaagtgcgtgggaagtttgtgctacgatttctcaaacatggagaaatttttgaatctgcaatcttgggagaagtcacttggtgttggggacat

SEQ ID NO: 151134 - DNA, 404 bp, Arabidopsis thaliana columbia
  unsure (1)..(404): unsure at all n locations
gactttgtagagtaaagacagataagttttgaacttactgaagcaatttttagattcctcaagtcaatttctctccccaaacaggttccntgaatgacaaattgctaaatctaaggggtttgcttcagaatgcttttgaaacattaaagttcaacacttcagcacttgggatcttaatgctgtttcttgtttactctgatctaggagtgtagcttttaccatttacttgtgtctgtttttggtgctgttgtttgatctgtaatgcatacttcaatttcttttctttgggaattagttcaagaaccaggcatgcttactcttttcaagattcatatgatactcataccaatactcttctttatattgcctcctccccccattgctctacattgctatacctaaaa

SEQ ID NO: 151135 - DNA, 408 bp, Arabidopsis thaliana columbia
aagatagagaaaaaaaatgggaggcaaaggtgtgatgatggtggcgatactttgcctttgggcactctgtgcaacatctgaagcagtggcagaggctgagccaggtttgatgatgaacttctacaaggacacgtgtcctcaggccgaagacatcgtccgtgaacaagtcaaactcctctacaaacgccacaagaacaccgctttctcttggctccgtaacatcttccatgactgcgccgttgagtcatgtgatgcgtcgcttttgctggattcgacaagaagagagctaggagagaaagaacacgacaggagcttcggacttagaaactttaggtacatcgaggagatcaaggaagctctcgagagggagtgtcctggtgttgtctcatgttctgacattctcgtctt

SEQ ID NO: 151136 - DNA, 401 bp, Arabidopsis thaliana columbia
  unsure (1)..(401): unsure at all n locations
tagacaaaagataagagagaatagagagagagagagcaatggccaatgcgaagcccttttgtgtcctcggcttcttttgtctggtgttacagttattctccatcttccatatcggaaatggggaattggagatgaactattacaaagagagttgtccaaaagcggaagagataataagacaacaagtggagacgctttactacaaacacggtaacacagccgtatcttggctccgtaatctcttccatgactgtgtcgtcaagtcgtgtgatgcgtcgctgctgctagagacagcgagaggtgtggaatctgagcagaaatcgaagaggagttncggtatgagaaactttaagtacgtaaagattatcaaagacgcactcgagaaagagtgtccttccaca

SEQ ID NO: 151137 - DNA, 306 bp, Arabidopsis thaliana columbia
ggaggattttcgtccatgggttcaatgggatctggaagacttgaaagtggtttcaatgaattgagcatatccagtggtggcggcggtggttatggaagtggttctgggtttggcatgatttcagatgtcgaccctatctatacccaaccacaagatcgctcacggggtcttctgttactgctcctcctaagagttctggcatgaaacttggcaagtcgggaaagaaccagttaatggagtcccttaaagcaaaaggtgaagacgttattgaagattttaagccttctggccaatccaaagcagttt

SEQ ID NO: 151138 - DNA, 440 bp, Arabidopsis thaliana columbia
agaagataaaaaaatacgagactgtattaaaaattatgtccaaaaaaatataagaatatcctgtggtatggagggaattgcacgtattgaaattcaaaaaagaatcgatctcatccagatcataatctatatgggatttcctaaattattaattgaagataaaccccgaagagtcgaagaattacagatgaatgttcaaaaagaactaaattgtgtcaatagaaaactcaacattgctattaccagaatttccaatccgtatggggatcctaatattcttgcagaatttatcgctggacaattaaaaaatcgcgtttcttttcgaaaagcaatgaaaaaagctattgaattaactgaacaggcgaatacaaaaggaattcaagtacaaattgcaggacgtatcgacggaaaagaaattgcacgcgttgaatggatcacag

SEQ ID NO: 151139 - DNA, 423 bp, Arabidopsis thaliana columbia
aaaaaagtttgcattttttttctttgttgtgataatcgaaaaagagactaaaacctaagaatcgtgcagaggagaggataccacaccacacccagaaattgaaactaccaaaaagtttatgaatttgatttcaatttcaactttttatgagacccatttgattctttagggattttgaagatcgttgtgaaatttggttcgtgattcgttgcattgcaatagctagacggatcgggattgacccactttaggtttctcatcttaaagattgcgaaattttctaatttggcatcggattgtttggatttgattgcttataagctatagttggagcatgagtgtagcctgaagctagattgctggctggtatgtggtgatcggaatggtctcctcaaaggtcttttaacttttgttctatttact

SEQ ID NO: 151140 - DNA, 439 bp, Arabidopsis thaliana columbia
ggaagaagaaggcagcccagatatcatcatcgttggcgccggtatctccggcctttccaccggtgggggactacacaggcttgggatgagaagcatggtgctggaatcttcggagacactgagagcgacaggatttgcatttaccacttggttcaatgcttggaaggccatggaagctctcggcgtttctcagcatattcgcagtctccatgatcgccttgaaggatgggtggttggaacaatttctgcaggaactcctcccacagagatgctttccagaatccgaagaatatgagtctcgatgcgtacagaggaagctgttgttagaggctctagcaggtgagttgcctgaagagaccatcaggttttcgtctaaggttgttcatattgaattgtctggatgctacaagatggatcatttttcctacggttccattct

SEQ ID NO: 151141 - DNA, 417 bp, Arabidopsis thaliana columbia
atcaaaatcgtcgctctctgtttgctggcgtaacttagccttgttcttcttcttcatcgcgatatgtccggtgtcttcttcgggtccagcagaagaagaagctctctgtatccatccatatcgaaaaaccagagatcggaggaaggagagagagataccaatctctgttgctttggttttaagggtttagaggagatgtcaaaccacccgaagatcacatcggcgcatcagaatgtggaggagaagctaagggaacttcaggagaggttctgtcatcttcaagctgctaggaaagaagggcggcatggtgaccttgcgcttttagaagcccaaatctctcagaatattcgggagtggcaagctgaactcactgctccttctcctgaatcttctctgttgggtgaaggtattagccaa

SEQ ID NO: 151142 - DNA, 443 bp, Arabidopsis thaliana columbia
caaacttctctctgaatctcagtgaattctcataaaatgagagggatggtgagttttgccgtttgggctctctttgctgctttactctcacagcagctctttgcttctgttgcttccgtaaggtttgaggatgccaaaacatactacttatctcctccctctggctcacatggaactcctccatcacacacgcctccttcttctaactgtggaagtccaccttacgacccttctccttcaactccttctcacccttcacctccatcacatactccaactccttccactccatcacacactccaactccacacactccatcacacacgccaacttcacacaccccttctttgaactgtggaagtccaccttcccacccttccacgccttcacaccctttcactccttcgcacccaacgccatcacacccttcttttggtggata

SEQ ID NO: 151143 - DNA, 433 bp, Arabidopsis thaliana columbia
caaacatctgtttcgtaagtttcagcaatgtacagtggaactgtgaagagggtatcaccactgcaagatattaaactgcgtgtgcagattacagtttctttggaaatggaggataatgatccgaataaagaatatttgtatgctaaaggcttaagtgaatttgttacttggctaaatgctgataagaaaccgcttcacgatgtgctgggatttagaaaagagataaatggtaccaccataaacattgcgctttaatggtgcgtagatggatattcaaacaaaattctgggatacgccaatggcatccgcaccatggatggtggaacatacatagatggtgtgaaagcgtcaataacaagaactctgaacagccttttggagaagtctaagcttgttgaggacaaggatattatctttactgaggagcatgtta

SEQ ID NO: 151144 - DNA, 347 bp, Arabidopsis thaliana columbia
ctaatctgtatgatcgatcttgtgctgaagatatctaaaagatgtcatctttgggtaggattgtgtctgtttcctacccaccgggtccgtacacttggcggttttcacagtataagctgtcttcttcactagggcgaaatcggagactcagatggcgattcacggcgttggatcctgaatctttctaactcgactctgaatccttcgccgataaattcgcttccgggttttgtataatataagggcctgtaacagtacaggactttgccaaaatgcaattacatgagattcaagataacatttcgatagccgactaaacaagatcttcttgcacatggatgaggttc

SEQ ID NO: 151145 - DNA, 429 bp, Arabidopsis thaliana columbia
gttgtctatggagacttgagtatctctccgctttatgtctttaagagcacttttgctgaggagattcaacattcagagaccaatgaagagatctacggtgttatgtcttttgttttctggactttaactttggttcctttgcttaagtatgtcttcattgtcctccgagctgatgataacggagaaggtggaacttttgctttgtactcattgatctgccgtcatgtcaaagttagcctcctcccaaaccgacaagtctctgatgaggcactgtccacttataagctggagcatccaccggagaagaaccatgactcgtgtgtgaaaagatatctggagaaacacaagtggttacacactgctttgctgcttcttgttcttcttgggacttgtatggttattggagatggacttctcactccagctatc

SEQ ID NO: 151146 - DNA, 399 bp, Arabidopsis thaliana columbia
aagatttttaactttaaacgagagtttcgtttatttactcaaaaatttacttctgaaatctctatttgaatttcggggaaaaaaatcctaagtaagggaatgcagagagatggtcggagtatcgccggtgaagactaagctgtgtgatcggtttaaccgatccgtcggcggcaggaattgccaccggaaacacgtcgaggacgggtgatccagttttctaaactctcgtctctcgaattcttcgaagatatcgaaaaactgtaaatcttttttttcttctacttttttacaaaattctctaatcatcgttgtaaagtaaaaaaccatggtcggagcaaaaccggtggagaatggatctgacggtggtagtagtacggggctgctttacgggccgttcca

SEQ ID NO: 151147 - DNA, 432 bp, Arabidopsis thaliana columbia
ccacattattttcactgagcgcataacatttttgagacaagagactctctctctctctcttggctctttctctccccctctctgcggcgatggttgttgctatggaccaacgcaccaatgtgaacggagatcccggcgccggagaccggaagaaagaagaaaggtttgatccgagtgcacaaccaccgttcaagatcggagatataagggcggcgattcctaagcactgttgggttaagagtcctttgagatcaatgagttacgtcgtcagagaccattatcgccggccgcggctttggccatcgctgccgtgtatgttgatagctggttcctttggcctctttattgggccgcccaaggaacacttttctgggccatctttgttctcggccacgactgtggacatgggagtttctcagacattcctctact

SEQ ID NO: 151148 - DNA, 447 bp, Arabidopsis thaliana columbia
agagaattggtcccttgcttatgcaaatggagaagagaaatggtaaggctgaagatactggtgagttaacagagaaggagatcataagagctgagagaaatgccggatacattagcagtagattgagagagattcagatgcaaaactatttgaagaagaaagaacagaaagctcaacgggagaaggatcttcgtgaagggctgcaattttccaagaatggtaagtatgaggaagcattggagaggtttgagtcggtgttaggttctaaaccaacaccagaagaagcatcagttgcaagttacaatgttgcttgttgctactcaaagcttaatcaggttcaagctggtctctcggctctggaagaagcattgaagtcaggatatgaagattttaagagaatcagaagtgatccagatctggaaactctcaggaagtcgaaggatttct

SEQ ID NO: 151149 - DNA, 340 bp, Arabidopsis thaliana columbia
tttaagggtgttgaagatcttgctgatgctgttaaagtcaccatgggtcccaagggacgtaatgttgtgattgagcaaagttggggtgctcctaaagtgacaaaagatggtgttactgttgccaaaagtattgagttcaaagacaaaattaagaacgttggtgctagtcttgtgaagcaagttgcaaatgctactaatgatgttgctggtgatggtactacttgggctacttgcctcacccgggctatatttggccgaggatgcaaatcaattggcgcaagaatggatgcaatggacttgcgaagaggtattttcaatgcagtttgatgcttgtggtgac

SEQ ID NO: 151150 - DNA, 442 bp, Arabidopsis thaliana columbia
gccacacactcacaaattaaaaagagagagagagagagagagacagagagagagagagattctgcggaggagcttcttcttcgtagggtgttcatcgttattaacgttatcgcccctacgtcagctccatctccagaaacatgggtgcaggtggaagaatgccggttcctacttcttccaagaaatcggaaaccgacaccacaaagcgtgtgccgtgcgagaaaccgcctttctcggtgggagatctgaagaaagcaatcccgccgcattgtttcaaacgctcaatccctcgctctttctcctaccttatcagtgacatcattatagcctcatgcttctactacgtcgccaccaattacttctctctcctccctcagcctctctcttacttggcttggccactctattgggcctgtcaaggctgtgtcctaactggtatctg

SEQ ID NO: 151151 - DNA, 432 bp, Arabidopsis thaliana columbia
ccccttgcctccatgggtgcttgaagagatcagcaagaaccctgatcttgtctacacagacaaatgtgggagaaggaaccctgaatatatctccttgggatgtgattctgtgcctgtcctaagaggaagaacacctatccaggtctactcagatttcatgaggagcttccgtgaacgatttgaaggctacataggaggagttattgcggaaattcaagtaggaatgggaccttgtggagaattgagatacccatcataccctgagagcaacgggacctggagattccccggaattggagagttccagtgctacgacaaggtattttaaactagcagaaaaagccttggaattcattagaacacttgtcaagagattagacatataccagagaagatcatgtatacttatgcttacttatactccatttgctt

SEQ ID NO: 151152 - DNA, 421 bp, Arabidopsis thaliana columbia
cacaaactccatagctagctagagagtaaaaagaacaaagatgtcgaaagaagtgagcgaagagggcggaacccaccatggaaaagactgcgtggatcctccaccagctcctcttctcgacatgggtgagctcaaatcctggtctttctacagagctctcatcgctgagttcatcgctacactcctcttcctctacgtcaccgtcgctactgtcatcggccacaagaagcaaaccggtccttgtgacggcgttggtttacttggtatcgcttgggctttcggtggtatgatcttcgtcctcgtctactgcaccgccggtatctctggtggtcacattaacccagctgtgactttcggtctgttcttggcccgtaaggtctctttggtgcgagcttttggtttcttgattagctcaatgtct

SEQ ID NO: 151153 - DNA, 411 bp, Arabidopsis thaliana columbia
cggctatgtctcttgtgcgtccgatctatcctttcttggccagaagcaagagatggtttccggttcgaaccggattaaaatcggtttgcttaacaacgaccagagccgaaacaagcggtgttgacagagaggagaaagtagtgattgttgggggcgggattggcggacttgccactgccgttgctcttcaccggcttggaatccggtcggtggtgttggagcaggcagagtcgcttcggacaggaggagcatcgctgacgctatccaagaatgggtggcgtgttcttgacgccatctccatcggacctcaactccgaaagcagtttcttgaaatgcaaggggtggtattgaagaaggaagatggaagagagcttcgttctttcaaatttaaagacaatgatcaaagccaag

SEQ ID NO: 151154 - DNA, 441 bp, Arabidopsis thaliana columbia
gtcgtcgtcttcttcctttgctccgtcgtcgagatctcgtcgaacctcaaatctcaaatctgctgtggccagatcgtctaattatccgatctgcgtttcgaatctcagatcgaagatgccggtggctgcttccgccatctattttctgaatctccgtggcgatgtactcataaatcgcacctaccgagatgacgtcgggggaaacatggtggatgcatttcgtacgcatataatgcagacgaaagagttagggaattgtcctgtgcgtcagattggtggctgctcctttgtttatatgcgaatcagcaatgtctacatcgtcattgttgtcagtagcaatgctaatgttgcttgtggattcaaatttgttgttgaggctgtagctttgttcaaatcatactttggtggagcttttgatgaagacgctattagaaataactt

SEQ ID NO: 151155 - DNA, 430 bp, Arabidopsis thaliana columbia
cggacgcttgggagaagcttctcttttgattctctttctctctctttcttcatcgcctgttggagcttcgatggttgggggtaggctcttcaccggtggtgctggttacatcggaagtcacacggttcttcagcttcttctaggatgctataacaccgtctttatagacaacctttacaattcctctctcttttcgatccaactctttaaggatttttccgcaaatcattgacaatatcttaccgttcaccatgttcactttttactattaactctcactttgataaggttttctcctaaacaaagtggggggcagcaatgccttttgctttaattttaaccaatttattaataactctgtccaaaactcttttttttttattaacaataacttttatttttgcccttttttactttttttaactaatta

SEQ ID NO: 151156 - DNA, 415 bp, Arabidopsis thaliana columbia
aagaaacaatggcagctatgaagctcctactctctcaagctcgccgccaaggtctaagggaggccttttcgtctccatttcaacgaatcccaagactcttctcttcatcttcatcttcatcttcatcttcatcttcatcatccgattcgaatccatctcccgattcaaacgaatctcgcaaaaaggctgttacaatcgagccagtatcgtacgcggccaaacccaaggatcagaaatctgaaccgaaaaatgttgaatcgacggagaaccttcagtctccagaatcagcgaactggactcgtgaagaaatccgatatgtgaaagactctccttcgatcaatccggtttcttacgctcagcgtgtggctccacttccggaggatcgtgtcgccggtgagaatgaaggagatagaac

SEQ ID NO: 151157 - DNA, 410 bp, Arabidopsis thaliana columbia
gttgtagtatatactggagactagtgtgtacccactcgagccagaggttctcagggagcttaggaacattactcataacgagccctcaagctggtatggctactgcaccagacgctggccagttgatggggatgctgctgaatctggtaaatgcaagaaagactatcgaggttggggttttcactggatactctcttctcctcactgctcttacgctaccagaagatggcaaggttatcgccattgacatgaatagagactcgtatgaaataggattgccggttataaagaaagctggtgttgaacacaaaattgatttcaaagagtctgaagctcttccagccctcgacgagcttttaaacaataaagtgaatgagggtggattcgacttcgcatttgtggatgcagac

SEQ ID NO: 151158 - DNA, 432 bp, Arabidopsis thaliana columbia
atggagaaagcattgtaagaaatcttaggggttctatttttagagttatttacgcacacaaggtgtgtgatgaattgacggtgagagagaaatcaagaaacgactctcccaacatgtcttacgcgatgtttgaagaagcctaataggaaatgtgactagactttatagaaggtcagatcccttgttcatcttggtattttttgtttaatggaagttttaaagattgaggaaggggacaaatatgttaaaatagttgaagataagaagaaactttttgcaaatttgagtcaagtcttgacgagaatttagtcttattaatttttttttgttcggttttgtagtgaggattaaggttcacggaggtcggtgttgattatgtgtcattgagaatgacatacctaatattgtagtcttcctttttaacaccactta

SEQ ID NO: 151159 - DNA, 368 bp, Arabidopsis thaliana columbia
  unsure (1)..(368): unsure at all n locations
gagaaaagtgctactcttttcaggccaaaattgattgttgctggtgcaagtgcttatgctagattgtatgactatgcccgcatcagaaaggtctgtaacaagcaaaaagctgtaatgctagcagatatggcacacatcagtggtttggttgctgctaatgtaatcccttcaccgttcgactatgctgatgttgtaaccaccacaactcacaagtcacttcgtggaccccgtggagccatgattntcttcagaaagggtgttaaggaaattaacatgcaagggaaagaggttttgtatgattttgaagacaagatcaaccaagctgtcttccctggtcttcaaggtggtccacacaaccacactatcac

SEQ ID NO: 151160 - DNA, 442 bp, Arabidopsis thaliana columbia
attctgagctgcgatgcttctttgattcacttgagagtgttttggagttttgactacgacttgtgatggcatctagacaaggatcaaaatcgagaaaagcagggttaaagggtgctgattctactgcatcttcgacaacctcgtcttcgaagctttatcaagagacttctatagatggccatagctcccctgcttcttcatctgctcaaagcaagcagcagttcttctcaccagatcccttaccacaaactgctcagcggtctaaagaaaacgtcacagtgacagttcgctttcgcccactcagtccaagggaaattcgccaaggggaggaggttgcatggtatgcaaatggagaaactatcgtgcgaaatgagcataatccgacaatagcttatgcctatgaccgtgtctttggacctacaaccacaacacgcaatgtcta

SEQ ID NO: 151161 - DNA, 436 bp, Arabidopsis thaliana columbia
ttagttttacactgtgagcggtctctcttctttttttaatccgccgtctctcactttttcggcggcggggttagatcgtacagagctcagatctacggggcttttgatcctgcgattactgttgctttttgtttgttaatcagagagaatgttgggaatcttgaggcaaagagccatcgatggagcttcgactcttaggaggacgcgattcgcattggtttctgctaggagctatgcatctggtgcaaaagagatgacagtcagagatgctctaaattctgcaattgatgaggaaatgtctgctgatcctaaagtatttgtcatgggtgaagaggttggccaatatcaaggtgcctacaagatcactaaaggccttttgggagaaatatggtcctgagagagtttacgatacccctattactgaggctggatttac

SEQ ID NO: 151162 - DNA, 428 bp, Arabidopsis thaliana columbia
ccgggtgcgacccacgccgtccgttatgaagtatcatgcctgtgtcagaaacaaaccagtagttggtcaaaggactagattcaaggcctggtggtgttgttggtgatggaaatggtgatgttggtttgggtgtcaagtgttctaaggaagttgctactgccattagaggagctattattcttgctaagctatcagtggttccggtgaggagaggttattgggggaataagattgggaagccacacactgtgccttgtaaggttactggtaaatgtggttctgttactgtgagaatggttcctgctccgagaggttctggtattgttgctgctagggttcctaagaaggttcttcagttcgctggtattgatgatgtctttacttcttcaagaggatctaccaaaacccttggaaactttgtcaaggct

SEQ ID NO: 151163 - DNA, 425 bp, Arabidopsis thaliana columbia
ggatagtgttagttccggttccagcacaaagacatttaactccaatgatgcagcttggcacagccctaaacatgaagggcttctgtattactgttgttgaaggacagttcaataaagtaagctcatctcaaaactttcctggttttcaatttgtaaccataccagatacagagagcttgccagagtctgtgctcgagagactcggaccggtcgagtttttattcgagatcaacaaaaccagtgaggcaagcttcaaggactgtataaggcagtcgttgctgcaacaaggcaatgatatagcatgtatcatctacgacgagtatatgtacttctgtggagctgcagctaaggagttcaacctttctagtgtaatattcagcacacaaagtgctacttaataagttttccgttgcgttttaagaaaa

SEQ ID NO: 151164 - DNA, 418 bp, Arabidopsis thaliana columbia
cgaagaataaaagataagaactttgacgttttgattcttaaagcttgaaacttgtttcatccgtggcggctcgtagagtgtctgctcttttatctcgatctttttcagcttcctctcccttactgtttcgttctcaagggagaaattgttacaatggagggatcttaaggagatttggaacctcttctgctgctgctgaggaaatcataaacccatctgttcaagtttctcacacacagctcctcatcaatgggaactttgttgactctgcttctggtaagacgtttccgactcttgatccgaggacaggcgaagtcattgctcatgtagctgaaggcgatgctgaagatatcaatcgagctgtgaaagctgcaaggacggcctttgatgaaagaccttggcctaaaatgagtgctta

SEQ ID NO: 151165 - DNA, 388 bp, Arabidopsis thaliana columbia
ctcttcatctttaccttcgtcatcttcctccaatgtctaaatcccaccggagctgccacgtggcgatcctgatgatgaagcggggcttctagctttcaaagcgggtataacccgagatccttcgggtattctcagttcttggaagaaaggtaccgcttgttgttcttggaacggtgtcacttgtctcaccactgaccgtgtctctgcactctctgtcgctggacaagccgatgttgctggaagcttcctctccggcactctctcgccgtcgttggctaaactcaagcaccttgatgggatttacttcaccgatctcaagaacatcactggttcttttccttaattccttttccaattaccaaatcttaagtacgtatacattgagaat

SEQ ID NO: 151166 - DNA, 298 bp, Arabidopsis thaliana columbia
gccgtctcaagaatcccggtcacacagcgactgcagtctaagagtgccattcactctttccctgcgtgagatgctcctccaagaggctagaagtcgctgaattctccggtctgcgtatgagtagtatcggtggggaagcatctttcttcgatgctgtagctgcacaaatcatccctaaggctgtgacaacatcaactcctgttagaggagagacagtggccaaactgaaagttgcgattaacggttttggaaggattggtaggaactttcttaggtgttggcatggtcgtaaagactc

SEQ ID NO: 151167 - DNA, 304 bp, Arabidopsis thaliana columbia
tggagacagaggagaaaaatcaaagagctcgaaagataagaaatcaaatggaccggattgaaggggaccaggccttgtatgtaagataacttgcaaggttccatataagactgtacttaaagctcacaatgcgttggttctcaaggccgagagcatggttgataagaatgaatggataaataagctgcaaaaggttatccaggcccgaggaggccaagtgggtagcgcttccatgagacaaagtctttcagaaggctcacttgataagatggtaaggaaaccggtcgacccggaagaggaatta

SEQ ID NO: 151168 - DNA, 437 bp, Arabidopsis thaliana columbia
ctaagatgatatacgtatacatgcatattgcaaaaatcagtggtcccataccattttgagtcatcatgagcgtatgagagtaaattcttctcacatattaataacaacccttcaaagttataagatttttagagagagagctaccacgttttcgtatctccgggaacgatggatgaatcaagtattattccggcagagaaagtggccggagctgagaaaaaagagcttcaagggctgcttaagacggcggttcaatctgtggactggacttatagtgtcttctggcaattttgtcctcaacaaccgggtcttggtgtgggggaatggatactacaacggtgcaataaagacgaggaagacaactcaaccagcggaggtgactgcagaagaggcggcgttagagaggagccaacagctcaaggagctttatgagacac

SEQ ID NO: 151169 - DNA, 399 bp, Arabidopsis thaliana columbia
gcttgcttctctcggaaattgtgctacatatctcgtgaagaaacgaaccgacagtaatgctccttggatctttgatgtgaactatatgaatttggcagcatctataatatatggatatgcaataattgtgcctctgggattttattttgcactccgttatatggggtccaaagctgatcttctaagattctggtgcctttggggatactctctcttcattttcgatccaacctctcttccattgcttattccagtagagtttctgagatgggtgattatactcttagctggtagagcatcatcgtgttttggtgccctgaatctacggacttacctcgagacgaacaatgatatcacggctgtaatggctgtaacatttagactgcaaatggttctttc

SEQ ID NO: 151170 - DNA, 453 bp, Arabidopsis thaliana columbia
  unsure (1)..(453): unsure at all n locations
ggttcttcgggtcttgatctttcataagtctagcttagggataatgggctagctgtcannctactcatgcgcgcnnggcctcgannttttccgaccccttgtaccttnncaaagccannagattcctcaaccgnngttcttccggtagggttgaaccccgcgacttgtcgtttacaatcgatcggttcaatcggcccaaaacgtcgtcgttcaagggttgaagctaagaaaaggagaatgtgtttgcccggtttggcatcgcctgattatctcaccggcagtcttgccggtgacaatgggtttgacccgttgggtctagcagaggatccagagaacttgaaatggttcgtccaggcagagctggtcaacggacgatgggctatgctcggtgtcgctgggatgcttttggccggaagttttcaccaagatcggaatcataaatgtttctgagtg

SEQ ID NO: 151171 - DNA, 410 bp, Arabidopsis thaliana columbia
  unsure (1)..(410): unsure at all n locations
aaaaactcttgaatttttncaagaacaaaagaaaaagacatctttaatggcggccatgaactggagtgttctcacttgcagctacgcaattgctggctctggctcggtagagcttaaccagaaagttggtttggtgaattcatcagttgggtttggtcagaagaaacagatgattatgcctgggatcaaagctcaacgcgttgttggtgatgatgttgatggatctaatggaagacgatcagccatggttttcttagcagctacactcttgtccactgctgctgtttctgcttctgctaatgctggcgtcattgacgaatacctcgagaggagcaaaaacaacaaagaactttatgattagaagagattggcaacaagtggagcaaactttgcgagagcattcacttgtt

SEQ ID NO: 151172 - DNA, 252 bp, Arabidopsis thaliana columbia
gtgatggccaaagcacttcaagatggacggctattttacgtcccattgagtacagcgtgttagaaacttattcttggtcaggaggttgatttgcatgatattgtattatttgacgctgaacttggcaagaccttgcaagagctgcgtgttgttgttgcccgcaagcactatctggagggagtaggtggtgtcaattattatttcgatttttgatttattgtaactttttttcttctttaatttttcattttt

SEQ ID NO: 151173 - DNA, 400 bp, Arabidopsis thaliana columbia
  unsure (1)..(400): unsure at all n locations
cggacgcgtgggcggacgcgtgggcggacgcgtgttctttcaaactctctctcacaagccatgcaaggcgcgtatagaaccaccaatgatccgntanacataattgagaaagtgacatggagagatctgcaagacggatctttcaccgcagaactcaagaggcttatctgctttgcggctcctatggctgccgtggttatcattcagttcatgatacagataatctcaatggtgatggtgggtcacctcggtagactctccctcgctagcgcttccttcgcagtcttcttctgtatactatactggcttcagcttcagtataggattgtcatgttccttaaatactttgagtggtctagcttatggagctattctatatcttaaactatgtgtttaagtt

SEQ ID NO: 151174 - DNA, 427 bp, Arabidopsis thaliana columbia
  unsure (1)..(427): unsure at all n locations
tttatatatacacctttctctcccgcatcttcaacatatatccagtgccattgcaattttgtctagaaagtgacggaaaagggcgcctcanctgcaaaattgagattcggattctcccttctttcgtcactctcattcattctcgcctgtatcaggcgtacacgcgttgttatcatctgttgcttatatttgaaccatggcgcaaccaaggtacactaggatagataacaggaggccctcatcaaattattgctctacagtgacagtagttgtgtttgtggccctatgcttagtctgtatctggatgatgacatcatcttctgttggaccggctcataatgttgattaggtttcttttgacatcatagatgtggttaagtaacagattactttatttgcttatgtgggtttttttctattttttgaa

SEQ ID NO: 151175 - DNA, 449 bp, Arabidopsis thaliana columbia
ctcaacatggctagatccttgttgctctcgctaactcctcacattcctcttcgccggaagtgtgtcagctcgtgactggaagatgctgagccagctcaaaggaaccacaaccaccacgaagactagccaaaccggcgtcacatctttgaaagctcccaacctaaacggatactgtgagagctggagagtcaacgtggagcttaacaacataagggactttaaggtggttccacaggaatgtgtatggttcgtccaaaagtacatgacctcatctcaatacgaagatgacgtggagagagccgtcgatgaagccatcctctacctcggaaaaacttgttgcgagaagaagacatgcgatggcatggatgcttggatctttgacattgatgacactcttctctcaaccattccttaccacaagagcaacggttgtttcggtggtgagcaac

SEQ ID NO: 151176 - DNA, 418 bp, Arabidopsis thaliana columbia
ctctctggttgacccgataatttctctctcgcagacgcacagatctctcttcgaatctgctagatcggttccttttcttacatcgggagtgcgaaacctctgatcggaaggtttcgtttacagatctaccgatacgagtttcgcagtatttccgagttccgacgtatgctttgttttcagatctgggtttgttgtatatctagaaatggcggagactttgaaagaagattcgattatgattcgagaggtttgggattacaatttggttgaagaattcgcgttgatccgtgagattgttgacaaattcagctatatcgctatggatactgagtttccaggtgtggttttgaagcctgttgctactttcaagtacaataacgatcttaactacaggactctcaaggaaaatgtcgatttg

SEQ ID NO: 151177 - DNA, 416 bp, Arabidopsis thaliana columbia
  unsure (1)..(416): unsure at all n locations
cgacaatggcggaaactatcaagagcgtatctccattattcgaccccgattcaccntattatctcgctccagatattaatcaaccgtgggatttctctatcgaaaaactcancgaagccgaagacaactacgtcatctggaaatttcgatttcgctcttttctcgaactcactaacaaaatcggtttcattgacagtactctcccgcagccagaaccttcctcgccgctctatcatccatggaaacgatgcgacacaatagttaagtattggctgatgaatttgatgagcgaagagcttttaaagtctgtgatgtacgcgaatactgctcattaagctttggaaaaacttaaacttatattcgtttctttgcgtttatttgtagatctaccaacttctttttatgctttttacttt

SEQ ID NO: 151178 - DNA, 446 bp, Arabidopsis thaliana columbia
ggatcttgatactattgagtggcttgaaggttatttgcaaaagcaagatgtgcctatggttagtatgtcacatgacagagcctgtcttgatcagttatgtactaaaattgtggaaactgagatgggtgtgtccaggacatttgagggtaattattctcagtatgtgatctcaaaggctgagtggatcgaaactcagaatgcagcgtgggaaaagcaacagaaagatatcgactcaactaaggacttgatcgccaggcttggtgctggtgccaattctggtcgtgcttccactgcagaaaagaaactagagaagcttcaagaacaggagctaatagagaagccatttcagcggaagcagatgaagattaggtttccagagcgtgggacaagtggaagatcggtagtcaatgttaaaaacaatgattttggtttcgaggataagatgc

SEQ ID NO: 151179 - DNA, 435 bp, Arabidopsis thaliana columbia
cttcaatctctcccaaagcctaaagcgatctctgcaaatctctcgcgactctctctttcaagaggcgaatcttcgtgaaaacacgcactggcaagactatcactctcgaggttgagagctctgacaccatcgacaatgttaaggcaaagattcaggacaaggaaggcattcctccggatcagcaaagattaatattcgccggtaaacagctagaagatggccgtaccttggccgattacaacattcagaaagaatcaacccttcatttggttctccgtttaagaggtggtatgcaaatctttgtcaagactctgactggcaagaccattactttggaggttgagagctctgacactattgacaacgtcaaagcaaagatccaggacaaggaaggaatccctccggatcagcaaagacttatctttgccggtaagc

SEQ ID NO: 151180 - DNA, 338 bp, Arabidopsis thaliana columbia
acttcttgaagagaactaggaagaacaatgcagggtactcacaagaggaattgaaagagaaggaattgcttaggaaacgtgttagtagtttgattcgaaggaaaaggattattgacgcattaaaagtggtgaaaagtgaaggtaccaaaccatggggacgagctacacaagctaagcttggaagccgtctgctagaactattgatcgaagcagcttatgtgcaacctcccttgacccagtctggggactctatacccgagtttcgacctgcattcagacacaagtttaaaactgtgactaaatatccaaggtctaagcttgtgaggaggtattgagtt

SEQ ID NO: 151181 - DNA, 449 bp, Arabidopsis thaliana columbia
gattttattatccttcctcgaaacaagagcttagctaagatgacgaagaactacccaaccgtgagcgaagattacaagaaggctgttgagaagtgcaggaggaagctcagaggtttgatcgctgagaagaactgtgcacccatcatggtccgactcgcatggcactctgctggaactttcgattgtcaatcaaggactggaggtccattcggaacaatgaggtttgacgctgagcaagctcatggagccaacagtggtatccacattgctcttaggttgttggaccccatcagggagcaattccctaccatctcttttgctgatttccatcagcttgctggtgttgtggccgttgaagttactggtggccctgacattcctttccaccctggaagagaggacaagccccaaccaccttcagagggtcgtcttcctgatgctaccaaggg

SEQ ID NO: 151182 - DNA, 420 bp, Arabidopsis thaliana columbia
atcagctttcagagaaaaaagtatacctacagagagagttatggcggagagtggtggacgaaggatcggagtggcggtggatttctcggactgcagtaagaaggctctgagctgggcgatcgataacgtggttcgcgacggagatcatctgatcctaatcactattgctcacgatatgaattacgaggaaggcgagatgcagctctgggagaccgttggatcaccttttattcctatgagtgaattctctgacgctgctgtgatgaaaaagtatgcattgaagccagatgctgaaacccttgacattgtcaatactgccgctaggaagaaaacgattacagtagtgatgaagatatattggggagatcctcgtgagaagatttgtgcagcagctgaacagattcctctctcaagccttgt

SEQ ID NO: 151183 - DNA, 438 bp, Arabidopsis thaliana columbia
gaagaaagatagagaaaaaaaatgggaggcaaaggtgtgatgatggtggcgatactttgcctttggggactctctgcaacatctgaaggagtaacaaaggctgagccaggtttgatgatgaacttctacaaggacacgtgtcctcaggccgaagacatcgtccgtgaacaagtcaaactcctctacaaacgccacaagaacaccgctttctcttggctccgtaacatcttccatgactgcgccgttgagtcatgtgatgcgtcgcttttgctggattcgacaagaagagagctaggagagaaagaacacgacaggagctttcggcttagaaactttaggtacatcgaggagatcaaggaagctctcgagagggagtgtcctggtgttgtctcatgttctgacattctcgtcttgtccgcaagagaaggcatcgaagca

SEQ ID NO: 151184 - DNA, 444 bp, Arabidopsis thaliana columbia
ccataaccaaaccatcatcatcatcatctcttggtgacagaagaaaagagttgaggaacagagaaggtggcagcacaagcacttgtgtgttcttcacttacctcctctgttcagacagctagacagatatttggctcaaaaccagttgcgtctgcctcacagaagaagagttcctttgttgttaaagctgctgcaactccacctgtcaagcaaggagccaacagaccattgtggtttgcttcatcgcagagtctctcttacttggatggcagcttacctggtgactatggattcgaccctcttggtctttcagacccagaaggtactggaggattcattgagccaagatggctagcatacggagagatcatcaacggacggttcgccatgttgggtgcagctggagctattgctcctgagattttaggaaaggctggtctgatt

SEQ ID NO: 151185 - DNA, 447 bp, Arabidopsis thaliana columbia
gggtcctttggctgctccagtgcttcaacacctgactaaagaagacttgagcaagctttactgtggcaatttccagattctggagattaatggttccacatgtttccttaccaggactgggtataccggggaagatgggtttgagatttcggttccagatgagcatgctgtggatctagcaaaagcaatcttggagaagtccgagggtaaggtaaggcttacgggtctaggagcaagagacagtctcaggttagaagcaggactttgtctatatggaaacgacatggagcaacacatttctcctgttgaagctgggctcacatgggccatagggaagcgtagaagagccgaaggtggatttcttggcgcggatgtgattctccagcagcttaaagatggacctacaatcagaaggggcggtttcttctcctcaggaccacccgcaag

SEQ ID NO: 151186 - DNA, 436 bp, Arabidopsis thaliana columbia
gaagagcgtcttcataaacgcccttcttcttcttcgtcttcttccctgcaaatctagtttctggatcttttctttcttccgcgagacgaaaatgagagagtgcatttcgatccacattggtcaggccggtatccaggtcggaaatgcttgctgggagctttactgtcttgaacatggcattcagcctgatggccagatgccgagtgacaagactgttggcggaggtgacgatgctttcaacaccttcttcagtgagaccggtgcagggaagcacgtcccacgtgctgtctttgttgatcttgagccaactgtgatcgatgaggtcaggactggtacttaccgtcagcttttccaccctgagcaactcatcagcggtaaagaagacgcagctaacaatttcgcccgtgggcattacaccatttggaaagagattggt

SEQ ID NO: 151187 - DNA, 408 bp, Arabidopsis thaliana columbia
tcttgctttatcaacagttcggtaactacgacaaataaaaacaggcgggaaaccaaatcaatggaggattcttagctttttctctgtaactcccattatcgtatcttcagcttagtgagatagatggaggaaattggcggcggaagcatcagcagcaatggtgtggtgatgaagaaggaaggattagggttttctaaaaggggaattaaaatagagaatccttttgcttttaaggctcttcaagtcttcactggatttggcgttggttgtggagttggtattggtagtggtgcacctttgaatctcggtagtattccaatggtgggggaaattttgaattcagctagaggagcaaccaatgtattttcgggtgccacacaccacgtgaatggcgctttgcggaagctt

SEQ ID NO: 151188 - DNA, 441 bp, Arabidopsis thaliana columbia
cgaggaaaaagaagaagagtgaaagttgcttagcgagaaaaaatggcaaccatgtctgctcggagagctcttttacttctctggctctatctcccagctcttccttcctcggccagcgtttaatttccccgatttccctctccgtcacttctccggtcaagcccgctgagaacccatgtcttgttcttgcaaagctcaagcgttgggaacgaaaagaatgcaaaccaaacagtcttccgattctccacaaaatgcatgtcaagtttggagatacagtcaaagtaatatctggacgcgacaagggtaaaatcggagaggttactaagattttcactcacaacagtaccattgtgatcaaagatgtgaacctcaaaacaaaacacatgaagagccgagaagagggagagcctggtcaaattgtcaagatagaagcacctatcc

SEQ ID NO: 151189 - DNA, 259 bp, Arabidopsis thaliana columbia
atttgattcgcatgcttgcttttctttttttttttatcattaaatttcaatctactgttacactcttatgtttgatctcatgacctttttacgacattactaacgttcaaatattctttcacaaactttacaaaattcttccattcttactatatctcatctatactccaacgtaccataattttcatcatcaacaaatatttaccaacttttaactatttattcctctttttaatttattctccatattcacaaaacc

SEQ ID NO: 151190 - DNA, 409 bp, Arabidopsis thaliana columbia
cggacgcgtgggcaaagagtaaacacttaatcaaatcaattttgtcctactcttaggggatcgccaatgaagaacttaaagatgggtttcttcaagatcctctttatctctttaatggcaggattagccatgaaaggatctaagatcaacgtagaagatctccaaaagttcttccttcaccatacacagaacaacctccaaaccataagccttctattggttcttggcggttttgtgtggatcctctacatgttaacccgacctaaacccgtttaccttgttgatttctcctgctaccttccaccgtcgcatctcaaggtcagtatccaaaccctaatgggacacgcaagacgtgcaagagaagcaagcatgtgttggaagaacaaagagagcgaccatttagttgact

SEQ ID NO: 151191 - DNA, 451 bp, Arabidopsis thaliana columbia
gagaacttgagaaaggcctcttcagcaacaaacattgttgatgatctcagttcaatatttgggggctgccaatctggtgggtttgaagatgttgatggagaaactgaagagagacgacgtgccaggctggaacgtcaccagaggacacaggagcgggctgcaaaagcacttgctgagaaaaatgaacgtgatcttcaagtacaaagagaacaagctgagaaagataggattggtgggaccctggatgttgagataagacgttggggtgcagggaaggagggaaacttgcgtgctctgctttcaacattacaatatgttctttggccagaatgcggttggcagcctgtatcgttgaccgatttaattaccggtgcatctgtcaagaaagtttacaggaaggccactctctgtatacatcctgacaaagttcagcaaaaaggagccaatcttc

SEQ ID NO: 151192 - DNA, 482 bp, Arabidopsis thaliana columbia
taccggaacggaagggccgacccaagcgtccgcgaagggaaatatcccgagacaatcgcgcttgttctttgttgaactgacaacatcaaaacatagtggggagtctcttgggcaggttctttggatgattggtgtgagaccaattgctgatacttttggaagagtgaaccgtgtcgagcctgtgagcttagaagaactaggaaggccgaggatcgatgtagttgttaactgctcaggggtcttccgtgatctctttatcaaccagatgaaccttcttgaccgagctatcaagatggtggcggagctagatgagcctgtagagcaaaattttgtaaggaaacacgcgttggaacaagcagaggcgcttggcattgatattagagaggcagcgacaagagttttctcaaacgcttcagggtcatactcagccaacatcagtcttgctgttgaaaactcgtcatggaacgatgagaaacagcttc

SEQ ID NO: 151193 - DNA, 423 bp, Arabidopsis thaliana columbia
  unsure (1)..(423): unsure at all n locations
ggcatagaccaaaccacacgggacagtttatgctctatcatacagtggagtgtgcnnaaataccggagacaattgaggagatcacttagaagtttttgatantgatgagaacgatgnttgggtgtgttccaacccgttcatactttcaatgggtttgattaatggtttagttgagaaacgtcagatggaaaaggcggttgagatattagacgagatgacattggcgggtgtaagtgcaaacgaacatacttacacaaagatcatgcaaggctatgcatcagtcggtgataccggaaaagcctttgagtattttacaaggctttaaaacgaaggtttggatgttgacattttcacttacgaggcgttacttaaagcttgctgcaaatcaggaagaatgcagagcgcattagctgtcacgaaaga

SEQ ID NO: 151194 - DNA, 238 bp, Arabidopsis thaliana columbia
  unsure (1)..(238): unsure at all n locations
cacaaacagaacaaacaaaaaatcaattgaatagtctctcagtcgttaggggaagcaaagtaggaaatggctagctttactgccggcgcttccaccgtctccgccgctcgtccggctctccttctcaagcctaccgncgccatctctgctcctgttcttggtttgcctccaatgggtaagaagaagggaggagtgagatgttcaatggagacatagcaaggaaacgtctcagtcatgg

SEQ ID NO: 151195 - DNA, 436 bp, Arabidopsis thaliana columbia
  unsure (1)..(436): unsure at all n locations
gagaagtgagagaaagacgaanaagatgaagagcatattgctttttctgtccccagccggatgtttaccgagtccgtaaccgaggttgaacaanttagtggatggcttcatcgtcgtctagaactaggagtcgttctcctttctcgcaccgtagacctccgagtccttactcttcggcttcgtctacttcttcgtctcttataaataatcgtctattacctcgttcttctttcacacctacttctaccgtttacaattccggcggtgtaaccgggtcccgatctatgtcgattactcgcaccatttccgattccggtcccatcggcggctccgggacttatggagcccaatcgtacccatcggaggggctcattggcgagtctgggcagacgattacctctgagcgagatagcatctccctcaccgttcgatttcg

SEQ ID NO: 151196 - DNA, 437 bp, Arabidopsis thaliana columbia
  unsure (1)..(437): unsure at all n locations
ctctcttcaatcctttcctttcattgtagttaaactaagattacgattatggccacatgancgatccaacaatcctccttggggggccaaacggctctcaagccctccagcgacctcatccaaaaggtgggcgtcttgggcggtggccgtgtgaccatgcgtcgtaccgtcaagtctactccccaaagcatctggtatggaccagaccgtcccaagtacttgggaccattctcggagaacacaccgtcttacttaactggagaataccccggagactacggctgggacaccgctggactctcggctgacccggagacattcgctaagaaccgtgagcttgaagtaatccacagcagatgggctatgttgggtgctctcggatgcacattccctgaaattctctccaagaacggtgttaaattcggagaagccgtgtg

SEQ ID NO: 151197 - DNA, 296 bp, Arabidopsis thaliana columbia
atgttattgagcttctttatatctacttttttaatcactgtcgtgacctcgcaaactcgatgcggaaatttcaagtcgatcatcagtttcggcgactcgattactgatactggaaacttactcggcctctctagtcctaacgatcttcctgagtcagcctttccgccatacggagaaaccttcttccaccatccgtctggtcgtttctccgatggccgcctcatcatcgacttcattgctgaattcttagggattccacatgtgcctccgttttatggatctaaaaatggaaactt

SEQ ID NO: 151198 - DNA, 380 bp, Arabidopsis thaliana columbia
gtggtgtggctaaaaacattggcaggaagcaaaatgctgcgagtatccagtgttccgagcaggctgaagattaatgctaaggtcgccaaaaaggaatatagttgtgcaatactcagcaggctttaggattaggaagtgggactcaaagcacttacttctcatagtcaagaaccatctcgaagctaaagaaaatctaaaatatggaagacatagatacaagcttacgtgttgaaaagccgagcactaaaagtataaaaatgaaacaaaggtggaaagaaactgctttctctatctcatgtctgttttaaggattcttcggtcacttaagagacaaaaggcattgttttgatcactctttgaatcactcttatttttgaatt

SEQ ID NO: 151199 - DNA, 91 bp, Arabidopsis thaliana columbia
tcggaagggtttggcaaaaccttcctttaatggggctgtttttgctcctgaccatcgtcgcctctccagcaaatgcagatggacctgtttg

SEQ ID NO: 151200 - DNA, 202 bp, Arabidopsis thaliana columbia
cttccgaacctttttggttccgccttctccgattcgctttacactacttcttccctcgtctctctctctcgcgcttcactgtgaattaatcgagagatctaaatatccgccatggacagagcacaattgatcttgttaggtctacctatattcttgttttgttcggatctcttcaacctcttcactcctcacgcctcctaaa

SEQ ID NO: 151201 - DNA, 426 bp, Arabidopsis thaliana columbia
gattatcctggggatcaaatccggctagctataagaactccggtgaagccgattgttcgatgacggggtttcgaatttccagagaagggggtgaggtcttcaattacggcggacgaggcgaaagaggattgattactcaacatcacagaagaaaaaaggcagtcctgcatgcgaagaagaggtgtgatcgcgattttttgttttatcaaattggttacaaaggagagaagatgcgtcaacagagattcggatatcgaaaaacagagattctatcatcagattcgtcaatggagatacctgtttgtcgaggtctggaagctgattttagaggtaaggaagatggcgaatgaaacggggttggacttcactgagcagattattactttggagaacaagtatagacaggcaccggaaaaaatctttaca

SEQ ID NO: 151202 - DNA, 435 bp, Arabidopsis thaliana columbia
attacagtctgatttgagctaagttctctcatcattaactctccttggagaatcatgggtatggcaaaagctcttatcgctggcggttctcatatctcttcttgttctccaactcgtccaggctgatgtcgaaaactcacagaagaaaaatggttacgcaaagaagatcgattgtgggagtgcgtgtgtagcacggtgcaggctttcgaggaggccgaggctgtgtcacagagcgtgcgggacttgctgctacaggtgcaactgtgtgcctccgggtacgtacggaaactacgacaagtgccagtgctacgctagcctcaccacccacggtggacgccgcaagtgcccataagaagaaacaaagctcttaattgctgcggataatgggacgatgtcgttttgttagtatttactttggcgtatatatgtggatcg

SEQ ID NO: 151203 - DNA, 448 bp, Arabidopsis thaliana columbia
attcaaaaatccgattccagatccattcctgggcaaacaaaggttggtgtttctctaatctcaaagcttttttcaaattcggaaaaagcaaatcgtgggaagagattcatcttctctctgtgcgttcatcggatctcggagcttttggttcgtcgtcaatggcggaagagacggagaaaaagtacattacgaacgaagatcttaaaaaacacaacaaatctggagatctatggatcgcgattcaaggcaaggtctacaacgtctccgattggattaaaactcatcccggaggcgacacggtgattctcaatctcgttggtcaagacgtcaccgatgctttcatcgcatttcatcccggaaccgcttggcaccatctcgaccatctcttcaccggttaccacatcagagatttccaagtctccgaagtctcacgcgattaccgtcgtat

SEQ ID NO: 151204 - DNA, 449 bp, Arabidopsis thaliana columbia
gcagaagaagaagaagaagacaacgacgacgactttgaataagaacaaactcttccttcaatctcaaggtctctctcagatgggttgtggtggaactttgttctacccacttctcataactctctccgttgctctaatcacttacaacatcatcatctccgctaatgctcctctcaaacaaggcttcccaggccgatcttcttcctccgatatctccattgacccagtcatcgaattaccacgtggcggcggatccagaaacaacgatggtaaaaggataagacttttccacacggcggtgacggcgtctgattccgtctataacacttggcaatgtagagttatgtactattggttcaaaaagattcaagcttctgctggacccggttctgaaatgggtgggtttactcggatcttgcattcccgtaaacccgatcagtatatggatg

SEQ ID NO: 151205 - DNA, 437 bp, Arabidopsis thaliana columbia
acaaaatctctctctactaatatctctctctctctctctctattgttgaagaagactcatagggggagattgtttgtttttgggtggctctgtaaattggagaagttttgttagagatcaaatggctgggatttgttgcggtgttgttggagagactgaaccggcggcaccggttgattcaacttctcgagcttctcttagacggaggttagatctacttccgtcgatcaaaattgttgctgactccgccgttgctcctccgcttgaaaactgccgtaaacggcagaagcgtgagacagtagtgctctcgacgttaccgggaaatctagatctggattcgaatgtgaggagtgagaataagaaggctagatcagcggttacgaattcaaattctgttacggaagcagagagtttcttttccgatgtacctaagatcg

SEQ ID NO: 151206 - DNA, 442 bp, Arabidopsis thaliana columbia
  unsure (1)..(442): unsure at all n locations
cttcagttgtttcagctggaaagcattcagtttctcttgaggttggggcttctttgattgagggcattatagggaaagaaggagcgacgcanatgaaacttgaagaggaaatgggagtgaagatcattcttccatcatcaaggaacaaagatcatatcagcattgaaggcggttcagtggattgtgtgactaaagcttcaaaaagaatagcaaccattatcgatgaggttgtaaggagtccaagtctcgactactcacactttgtatcacttccattagccatacatcctgagttagtggacaagctagtgaattttcagaattctatcctcgggatccatagcatagctagtgataagcaagacgaccaagctaatagagcaaccacaagtgtggcagttgatctaaaagctaatagtgaaacaaaccaggtcaatgtggg

SEQ ID NO: 151207 - DNA, 441 bp, Arabidopsis thaliana columbia
gtgaaccactacacacactaacacaatgagagagatccttcacattcaaggtggtcaatgcgggaacgagattggttccaagttctgggaagtcatctgcgacgagcacggcatcgattccaccggacgttacagtggagacactgcagatctccagcttgaacgtatcaatgtctattacaatgaagcttcaggtggaagatacgttcctcgtgctgttcttatggatcttgagcctggtactatggatagtatcagatccggaccgtttggtcagatcttccgtcctgataactttgtctttggtcagtctggtgctggtaataattgggctaaaggtcattacactgaaggtgctgaacttattgatgctgttcttgatgttgttcgtaaagaagctgagaactgcgattgccttcaagggtttcaggtgtgccattc

SEQ ID NO: 151208 - DNA, 446 bp, Arabidopsis thaliana columbia
gttctaacttgattaccagtgagaagtaggctaagatggaaatcatgtcaagagagaatgagactgctttgtcaggtcctaggccgagggaatggtctaccgtcccacacagtgcttttcagggacctggtcccaatggcaagaaccggacctcgagcttggaagcacctatcatgttgctaagtggacatccgagtgctgtctataccatgaagttcaatcctgctggaactctgattgcatctggatcccatgacagagaaatcttcctctggagagttcacggggactgcaaaaacttcatggttttgaaaggtcacaagaacgccatccttgatcttcattggaccagtgatggctcccagattgtatcagctagtccggataaaactgtaagggctgggggatgtgagacttggaaacaaatcaagaagatggctgaacat

SEQ ID NO: 151209 - DNA, 224 bp, Arabidopsis thaliana columbia
cttccgcctatttttatcgacaaagataagagaactcagaagcttttactcttaaaatggcaactttctctgagttccaaaactaccctcagtcggttcttgatcctcttcttttccctacacctcactcctccattaatctcactaggttcatcgatcaaaaccatctctatccactaccaaacatttccacagttgaagacatttcctttcttgaatataat

SEQ ID NO: 151210 - DNA, 378 bp, Arabidopsis thaliana columbia
gcacaaactgcttaaattgaagagacgactatgtgcgtaaaacgaagagactcaaaacaattttgggattcgtgagagatattgatgcgctgcaatggaagaatctgttcatcaatcgatacgattcggctcagttgcagatttaatcatgtggaagaatcgacgcggagggtttcttctacttggatcaacgacattgttatggttcctctttgagaaatgtggatacagtttcttcccctttgttgttaatactcagcttctctccgtcgttatactcttcctctgggccaaatctgctattctcttcaataggcctatgcctcaactacctaatcttgaaatcactgaggaatttgtgtttatgggtgctgatgc

SEQ ID NO: 151211 - DNA, 419 bp, Arabidopsis thaliana columbia
  unsure (1)..(419): unsure at all n locations
ggaatacccacaggaccgacactgaagacctggatgcttgttcttgacgtatcattccctgacacatcttttggaggtaaacgaaaactcttttatttatcaaaacaacaagttgtaggtttacactgttccacaacttacactatatctaatcagaatacttgagtggatccaaaatgttccaattgattagagtgacatgtggctagagtagcatcatttgactatcaatcacaatgacaacatanataggtgtgttcattagaagaaatagagactgttggtgcgaattcaaatngtttgtaggataatagtttggtagatagaactatngacaacgtttggcttgtgtaggtgaaggcagtgaacaatcaatgagccttacgcaaccaagggagagcgagaagatgtcattgcct

SEQ ID NO: 151212 - DNA, 450 bp, Arabidopsis thaliana columbia
cttcaatgtcacaaataatcgaatcacacaatattaaacactaaattattcacagttttcttggagaaaagattcaagtacaggggcaagcagagaaagtgagagagagagaaatgatgggtagcttgaaaataatatctccaccacctccggcgacaagattccggcaacgagtaacggcgaacggagatgggtttccgacatttcttccgaaggagatacaaaacataaaagatccattcgcaagagctttagctcaaaggattgtacgaattcctgttcctcttcagatgggaaactttagaggcagtgtaatgagtagctgtatcaaaccacttgttcaattacacgacaaaagtcccgttgttcttctccattgtttcgacagttcttgtcttgaatggagacgtacttatcctctgcttgaacaagcttgtcttgagacttggg

SEQ ID NO: 151213 - DNA, 449 bp, Arabidopsis thaliana columbia
gagaaaaaatggagttggatcttacacctaagttgcccaagaaggtttacggaggagatggtggatcgtactctgcctggtgcccagaggagttgccgatgctcaaacagggtaacattggagccgctaagcttgctcttgagaagaatggcttcgctgtccctcgttactctgattcctctaaggtcgcttatgttcttcaaggatctggaactgctggaattgttctcccagagaaggaggagaaggtgatcgcaatcaagcaaggtgattcgattgctcttccctttggtgtggtcacatggtggttcaacaacgaggatcctgagcttgttatcctcttccttggtgaaacccacaagggtcacaaagcagggcagttcactgagttctatcttactggcacaaacggtatcttcactggtttctccactgagtttgttggcaga

SEQ ID NO: 151214 - DNA, 391 bp, Arabidopsis thaliana columbia
  unsure (1)..(391): unsure at all n locations
gctgtgcagtaggtcagactcttgtagtgaatttattgcaaagtaagggaaagcttggctgtngaatttagttgaacaaggcagcgattcanactaatgtgtatagtttgattcgtctggggagcttttgagagatagcaatttagttttccgcttacgaatgatctttttctgatgcgtcattttgattaagtgtgtacttctgcaatggaggcttctctagctgttatacagaggcctcaagctggagcttcgaatacggtttataagagtggccctctcttcatatcatcaaaaggactaggttggacatcctggaagaagcgttggtttatccttacccgaacttctttggtctttttcaaaaatgatccaagtgcatttaccacaa

SEQ ID NO: 151215 - DNA, 69 bp, Arabidopsis thaliana columbia
gtgcttttttagtcgttctcgtcgagagacttatttatacacgaaaaaaggaagaaaaaaactgttgaa

SEQ ID NO: 151216 - DNA, 436 bp, Arabidopsis thaliana columbia
  unsure (1)..(436): unsure at all n locations
aaaccactatctctctctctctcttcatatcgcaacaatggagtccgtcgctctatctcgcatgggtctcgccggtctcgcaggcgggggacaaaacctcgccttaaacatcgccgttaaaggattcccaatctccgtctccaatcgaaccactttcaaagtcgacaaaaccttagatcgtgcctccaacgaaggaaaactcccagtcgctggtcaatactcgcctcgcgatttcgttctctcgatccaacggcctagatccgttataatccttgtcaaagccggtgctcccgttgaccaaaccatctctgctctctctgaatacatggagcctggtgattgtatcatcgacggtggaaatgagtggtatcagaacacagagcgacgaatcgttgaagctgagaagaaaggatngctttatttaggtatgggagtc

SEQ ID NO: 151217 - DNA, 346 bp, Arabidopsis thaliana columbia
  unsure (1)..(346): unsure at all n locations
aatctaaaagaacaaatcaaacaaatgatactatatatatttttggccataaataacaacncaggtgggctactattcattctggggcgaccgncaatagcctcaaatataaaccgcacaacaaggtaacaatttcatcctctagtatgaagcgaagatgaccttctaaccggtttacccgcccaaccacctgttaacttcaaacactactcactttactataatctctttcctgaacagaagcaaaaggcacttttctattggttctttaaagctcaacaaaacttttctactaatcctctccagcttttgctcaatacacgaccaagtttctcatcaataacct

SEQ ID NO: 151218 - DNA, 362 bp, Arabidopsis thaliana columbia
  unsure (1)..(362): unsure at all n locations
cgtgatcatcgcctgaaaaaaatttgagataatgttcagaaagttcttcgtcggaggcaactggaaatgtaacggaactgctgaggaggtgaaaaagattgtgaacactcttaatgaagctcangttccttcacaggatgttgtagaggttgtggttagccctccatatgtttttcttcccctggttaagagcacattgaggtctgacttttttgttgcggcacataactgttgggttaagaaaggaggtgctttcactggtgaagtgagtgcggagatgcttgtgaacttggatattccatgggttatccttggtcactctgaaaggagggcaatcctttaatgaatcaagcgagttcgtc

SEQ ID NO: 151219 - DNA, 445 bp, Arabidopsis thaliana columbia
ctcacttgggaggtgaggactttgaccacagtttgtttgagtacttcatcaagttgatgggggggaagcaccagaaggacaggaggaaggacaacaaggctcttggtaagctccgaagggaatgtgagagggcaaagagagctctaagtagtcagcaccaagtccgtgtagagattgagtcactctttgatggtgttgatttttctgagccactcaccagagctcgtttcgaggagcttaacaatgatttgttcaggaagaccatgggacctgtgaagaaggccatggatgatgccggtctacagaagagccagatcgatgagattgtccttgttggtggaagcaccaggatcccaaaggttcagcaactgttgaaggacttctttgaaggtaaagagccaaacaagggtgtgaaccccgacgaggctgttgcctatggtgctgc

SEQ ID NO: 151220 - DNA, 434 bp, Arabidopsis thaliana columbia
gctgctcttgttgttgcctcggctctgttgagggattcagcactgataacaagccttgtactggcgacaccaccagaacctgggggcctgcattggctactgcagctttcagtaccattgctttcgtgcttggtgctgttacctctgttctatctggtttccttgggatgaagattgctacatacgctaatgctaggaccactttggaggcgaggaaaggtgttggaaaggcgttcattgttgcattcaggtctggtgctgtgatgggtttccttcttgcagcgagtggtctattggtgctttacattactatcaatgtgttcaagatctattacggagatgactgggaaggtctttttgaggctattactggttatggtcttggtgggtcttccatggctctctttggccgtgttggtggtgggatctacact

SEQ ID NO: 151221 - DNA, 441 bp, Arabidopsis thaliana columbia
aataaactcacacagcccactcttcttcctcgctctctctttcgccttctcttagcctacccgttttccttcctcctctccgagggttcctccgtcagtaaaagaaaatcaaaatggcttcacacattgttggatacccacgtatgggccctaagagagagctcaagtttgcattggaatctttctgggatggtaagagcactgctgaggatcttcagaaggtgtctgctgatctcaggtcatccatctggaaacagatgtctgccgctgggactaagttcatccctagcaacacctttgctcactacgaccaggttcttgacaccaccgccatgctcggtgctgttccacctaggtatggatacactggtggtgagatcggccttgatgtttacttctccatggctagaggaaatgcctctgtgcctgccatggaaatga

SEQ ID NO: 151222 - DNA, 464 bp, Arabidopsis thaliana columbia
  unsure (1)..(464): unsure at all n locations
cggaantnccggggcggcccgagccgtccgcccacgcgtccgcccacgcgtccgctcttctgacgtgtttcccttcttcggtttctcatcctgacgggcgccgaatttcgagggagcggagaaaaaaaataacaacaccaacaaaagccttttgagatatggacagcttctggcaattaggtgatgagctacgaggtcagacgagagcatcagaggatcacaaatggtctactgttgcaacgaagctagctgagcaaactagaatgaaaggggagaggatgaacaatcttgatctctccaaaggttacactgagtttagaccaagtgagaaattcagtttccaggagaacaatcttaacttcaacatgttgaatttggatggtaaatttggtgaaagcatcatggggaagacttcgatgcagagcaatgtttataatatgaatactgttttccagaagaatgac

SEQ ID NO: 151223 - DNA, 442 bp, Arabidopsis thaliana columbia
  unsure (1)..(442): unsure at all n locations
cacaaatccaattcacactggaaactgttgggtcggatcctgagtgatatttcnagaccgatggtggggaaaaacattgctgggggggcgaaggcagcggcagcggcaagaacacacggatctcggcggtgcttttccacagcgattcctggtccttgcatcgtccacaagcgtggtgctgatattcttcacgatccatggttcaataaggacacaggttttcctttgactgagagagatagattagggatacgaggcttgcttcctcctcgtgttatgacctgtgtacagcaatgtgatcgtttcattgagtcgtttcgttcgctagagaacaacacanaaggagagcctgaaaacgttgttgcattagctaaatggaggatgttgaatagattgcatgaccgtaatgagactttgtactaccgagttcttattgataaca

SEQ ID NO: 151224 - DNA, 176 bp, Arabidopsis thaliana columbia
cttccggacaaaccatcttcaagatcccttacctacttacccaaaaccggttttaaccaaagaagaacaggaggtggactaaaaaatggtgagcttgcaagcaaagagtatcgtgaacaccgtggctttccctatggttctcaaagccgccttcgagcttggcgtcatcgacacca

SEQ ID NO: 151225 - DNA, 443 bp, Arabidopsis thaliana columbia
gccggtggagttgactgcggcggcgtcggaatccttggtatcgcgtgggcttttggtggcatgagcgtcatccttgtctactggagcggcggtatctcaggtggtcacataaaccctgcggtgacgtttggtttgttcttagcccggaaggtatcgctgattagggcggtgctttacatggtggctcagtgtttgggtgctatttgtggagttggtttcgtcaaagcctttcaaagctcttactatgatcgttacggtggaggagccaactctctagcagacggctacaacacaggcaccggactagccgcagagatcattggaacattcgttctcgtctacacagtcttctccgctactgatcccaaacgtaacgctagagactcccacgttccggttttggcgccacttccgattgggtttgcggtgtttatggtacattt

SEQ ID NO: 151226 - DNA, 417 bp, Arabidopsis thaliana columbia
  unsure (1)..(417): unsure at all n locations
aaccgaaaagaacataagaaacacaacagacttgtattaattttggcgatcaataataacggagtgggtctactgcgcattggtggtgttaccgccnatagtctgtggtaagaaacccgataagaaggtcacaatttcatcctctgggaggaaggaagatgacctttgaaccacctatggacgctcaaccaccagttaacttgaaacactacgccccttacatgaatatacagcctgaacagaatcaaaaggcacttttctattggctcttcgaaactcaacaaaactcttatagacgaactatcctgctttggctcaatgtacgacccagtagctcataaatagcctatagagcttcacaataaactatgccctttgttgttaagacaacggtggcacacttaacgacaatcattt

SEQ ID NO: 151227 - DNA, 444 bp, Arabidopsis thaliana columbia
gaagaagagaaaattcgtacaattccgccattaaagcttcaacctttaatggcgacaacggcgctttcttccttctctctggggggtgtcctcaacttctccataaacccacaaagcctcttcctttcctcttccttcttcctcgattcaatcggagatttcgaagtctcactatcacttcttcttctacaacttcttcaaacaatttcagtagtaattgtggcgatgatggcttctctcttgacgatttcactctccattctgattctcgatcacctaaaaaatgtgtcctttctgatcttatacaagagattgagccattagatgtgagtttgattcagaaggatgttccagttactactttggatgcaatgaaaagaacaatctcaagcatgttgggtcttcttccatctgataggtttcaagttcatattgagtcacttt

SEQ ID NO: 151228 - DNA, 486 bp, Arabidopsis thaliana columbia
  unsure (1)..(486): unsure at all n locations
cgggtgcgccgccacgcgtnccgcggacgcgatgtgtcaaaacacaattcgtagcaaattatttatctcaactcaattgtgttatcaaccgggaggtagattatctaaacacatatggcgtgttcgcttttgtaggttcattcacactgctattgttcttgacagttgttcatctgttgcatcacgtggatgcaattaataacatgntggcacatgtggcatagtagcttgagtccatgtctaggctacctatcaaagggtggggtggtgccacctccgtgctgtgcatgagtcaaaaagttgaacgttatggcttaaaccacacccgaccgtcaacaagcattcatatgcttacagtccgctgcaaaaggggttaatccaagtctagcctctggccttcctggaaagtgcggtgttagcatcccctatcccatcttcacgagcaccaactgcgccaccatcaagtgaagtggggaataacgacat

SEQ ID NO: 151229 - DNA, 444 bp, Arabidopsis thaliana columbia
cttcttcttcttcctctctgtatttttctcattctcttcgatttgtttgcttgctagtgactagtgagtgagagagtatggagagaagtactccggtgagaaagccacacacatcgaccgcagatctacttacttggtcggaagttccaccgccggattctccttcctccgcttctcgctccgccgttcgttcccaccaggtacttgcaccgtttcgaaattcatgaaatttcactttgattttgatcaatctggtaatagtatttgtttcaattttggtttaatgtgtttgtagccatcggatgggattagcaaagtggtgtttggtggtcaagtcaccgatgaagaagttgagagcttgaaccgcaggaagccttgctcagaacataaaatgaaggagataactggcagtgggatcttttctcgtaacgaaaaagatgatgc

SEQ ID NO: 151230 - DNA, 423 bp, Arabidopsis thaliana columbia
agccttccgaattttcggattcggccttgttgaaaatatatttactattttaattgagagattttgtgacaggtggagtgtcaatggatggtgtggtgcacggaatcatcaaaacacaccatgttgaaccttttgagattctccttcaaggtctttgtggtgttaaacgcgaacgtttaagagttcatgagttatgcttaagaagcggaccaaatcttgcagttgtgtcatcagaagttaggctattatgtgatctcgatcaacccgaacccacatggacagttaaacatgtttgtggtgcgatgagaggtgcaggagctgatcaaatctctgttttggttagaaatatgattgaaagtaaagtaagcaagaatgctttgcgtatgttctatgcactcggttacaaactagaccatgagcttc

SEQ ID NO: 151231 - DNA, 395 bp, Arabidopsis thaliana columbia
  unsure (1)..(395): unsure at all n locations
cgggncggcccaggccttccgaactaagcaaaaaataaaacctttctctctctgactatcttttccctaattactggttctccggtcggcgtctaaaaagatgggggtcctttccaataaaatctccacagacgatgtgaaaccaggcgatcacatctattcatggcgtcaagcctacatttacgctcatcacggaatctatgtatgtaatggacaagtcaaccattttactcgtggtgatggtcaaaagactggaactgggactttcttggacaacatcattgttagttcatctcataatcatggagacaacccatgtcctgattgtggagatcgatccaatcttggcggtgttatatcttcctgccttgaatgtttgctttgccgatgtgatc

SEQ ID NO: 151232 - DNA, 237 bp, Arabidopsis thaliana columbia
aaacaatactcggaaatcaatcctctgattttacttttattggggaaaatcagatcatcaaacgggtgtgttctcatggaatgtgggtggaaacaactcatactgaagcaaacattgattaatgaaatattcaataacatcaatcttctttgagagaaggattatctctaaatttctaggaataaagagcacttattgaaagatagtaataccacagagggaatttagaatgcgcac

SEQ ID NO: 151233 - DNA, 413 bp, Arabidopsis thaliana columbia
gaacaatgctcgtgaatcaatccactgattttactgataatggggaagattagatcatcagaggggggtgtgctaatgggatgggggtgaaaacaactgaagttgaagcaaacattgatgaatgaaatattcaagaagctgaatcttctttgagagaaggattatctctcaatttctaggaagcaagagcacttcttgtaagattgtaataccacagagggaatttagaatgcgcacttcgtgtctttgaaggtatcgacctttaagcagctatccagcggttacaggtctccgtgcctcttgagaaaccggctactaagaaaaactcgccccctgaaccgcaggaatcactttatcagcatgctgcttacttggtccttgaagctatctacttgaaaaccaaatcccttcaa

SEQ ID NO: 151234 - DNA, 425 bp, Arabidopsis thaliana columbia
ggaatatctgtgtactgttcgatgtggtgttttttttagagatgaagaagtgcttcagggccgtcttacatagtcagctgggtggaaaccaataaacgatttgatcgagaggaaggttgcagataatggtaatggacggacgagcgaagatgattgggttgaagtgaaagctagtgatgattctctgttgaataatgaaaaacaggatttttatgaagctactgcggagatcaatgatgcggaaccttgcacttcgattacagttcgtctcctctcccttcaggataaaagatgtgcacttgtagatgaagtttatgtatttgctgatcctgttgatccaagtgagtcagagaatgaagaagcaactggaacaggaaattcatctagtagttcgttgatggctatgtttatgcctgcttttttgc

SEQ ID NO: 151235 - DNA, 404 bp, Arabidopsis thaliana columbia
  unsure (1)..(404): unsure at all n locations
ctcttccattgcttattccagtagagtttctgagatgggtgattatactcttagctggtagtgcatgcgtcgtgttttgttgccctgaatctacggtcttacctcgagacgaacaatgatatcacggttgtaatggctgcagcatttggtctgcaaatggttctttcaatcttcatcaaggtctggttctttccttaatctccatgagacggtcaacaccagacaaaacatatatatgtaaaaacctttagattntgatgtgctgcggtagaactaagaatgtcgttaccagaaaatgaaacccacanagtagaagaaggaacatatncgctaaatcattcggtttcgtttttactggcggattttcatcgttgcttgtaacggatgggtttttcattttttgg

SEQ ID NO: 151236 - DNA, 375 bp, Arabidopsis thaliana columbia
gtccgttccaacgaaccaccgcgaaaaaccgaccaaccatcgtcttcatcggcatcggcatcggcatcgccggcattgtttttgtcactgcgcgtggaaatcatttcgatgatcttagcccgcgtcccaaaacgatattacccaatcctctgctccgtctccaagaacatgcggagtcttgttcgctcgcctgaaattcacaaggctcgatctttactcggaaaagattatctctatatcggcttcatcgacgaaaattatcgccccgtatacgactactggtacactctccggagaatcgagaacagtacgaccgagaatctcttcgaatccattgagttcccttatccttccgagcctaatcgattttccatg

SEQ ID NO: 151237 - DNA, 322 bp, Arabidopsis thaliana columbia
atgctccacaatcaatcctcggattttaatttttatttgtcaaaatcagatcctcagagagggtgtttctaatgggattggcgtgaaaacaacttaatttgaatcaaaacttgattaacgaaatattcaagaagcttaatcttctttgagagaaagatcatctctcaatttctacgaagcaagagcacttattggaatattgcaataccaaagagggaatttataattctcacttctagtctttgaaagtatcgacctttaaacaactatccaaccactacaggtttacatgccttttgagaaaccggctactaataaaaac

SEQ ID NO: 151238 - DNA, 418 bp, Arabidopsis thaliana columbia
gaacaatgctcgggaatcaatccgcggattttagtgagaatggggaagatgagatcgtcagagaggggtgtgctaatgggattggcgtggaaacaactgaagttgaagcaaaccttgatgaatgaaatattcaagaagctgaatcttctttgagagaaggattatctctcaatttcgaggaagcaagagcacttcttggaagattggaataccaaagagggaatttagaaggcgcacttcgtgtctttgaaggtatcgaccttcaagcagctatccaacggttacaggtttgcatgcctcttgagaaaccggctactaagaaaaactcgccccgtgaaccgcagcaatcagtttctcagcatgctgctaacttggtccttgaagctatctacttgaaagccaaatcccttcaaaagct

SEQ ID NO: 151239 - DNA, 295 bp, Arabidopsis thaliana columbia
atcaattccttcatattcacaaagctcttcattactttatcggtgatctcatcatcttctgcgggtttagcctacaggaggtgggggtgataacaactaattccaaaacatacctaaagagaggaaaaatcggtccgcttcttttgataagtataaacgatcatcactgagttgtgaggaaaccctagctctgaatccgagtgagaaacaccttaaagaatgtttagaggctccacttcctgtctgtatagaacatgctcacaatgcaattattcacatttgatcttcttatgaa

SEQ ID NO: 151240 - DNA, 435 bp, Arabidopsis thaliana columbia
aacgaaactcaactaattttgttatcacccaaaaagaagttcaaacacaatggctttcgcttggaggttcttcacatgccttggtgtaacggtgtgcatagttgcatcagtcgatgctgcaatctcatgtggcacagtggcaggtagcttggctccatgtgcaacctatctatcaaaaggtgggttggtgccaccttcatgttgtgcaggagtcaaaactttgaacagtatggctaaaaccacaccagaccgccaacaagcttgcagatgcatccagtccactgcgaagagcatttctggtctcaacccaagtctagcctctggccttcctggaaagtgcggtgttagcattccatatccaatctccatgagcactaactgcaacaacatcaagtgaaatggaagcttacgtcgtcgttttggcgttaagagtat

SEQ ID NO: 151241 - DNA, 444 bp, Arabidopsis thaliana columbia
attttgggtttcaatggcggtttcaagtgctttctttgtttgtccaaagcttgagactttatggagggaccataatctatctcggtgtgcttcttcttcgtcctctgtttcacagacaccattgggtcttaatggggttcgtgttcttccgaagaacaatagaaccagacgaggtttgatccaaaaagctcgttgtgagctctctgcttcttctgattctgcgtctaatgcagctagcatctctgctcttgaacaactcaagaactctgcagctgatcgatatacaaaggaaagaagcagtattgatgtgattggacttagtattcacacagctcctgttgagatgcgtgagaagcttgctatacctgaagctgaatggccaagagctattgctgaattgtgtggtttgaatcatattgaagaagctgctgtgcttaatacttg

SEQ ID NO: 151242 - DNA, 430 bp, Arabidopsis thaliana columbia
  unsure (1)..(430): unsure at all n locations
gaacaatgctcgtaaatcaatcctcagatcttacttatattgggcaagattagatcatcagaggggtgtgtactaatgggatgggggtgaaaacaactgaanctgaaacaaacattcatcaatgaaatattcaagaagctcaatcttctttgagagaaagattatctctcaatttctaggaagcaagagcactttttgtaagattgtaataccaaagatggaatttataaggcgcactccatgtcttttaatgaatccaccattaaccatctatccaaccgttacagaattgcatgcctctttgtaaaccggctactaataaaaaccatcccccttaaccgcagcaatcactttctcagcatgctgctaacttgctccttgaaactatctacttgtaaaccaaatcccttcaaaagctttggagaataac

SEQ ID NO: 151243 - DNA, 381 bp, Arabidopsis thaliana columbia
ccatgtgatggatttagcagatggccatatttctgcgctcaggaagctatttgctgggccaaaaattggttgtactgctggcaatctagggactggtcaaggaacgtctgtgttagaaatggttgcagcttttgaaaaagcttccggcaagaaaatcccgattaagctctgtccgagaaggtcaggagatgcaacagcagtttatgcttcaacagagaaggctgagaaagaacttggctggaaggcaaaatatggagtggatgagatgtgcagagatcagtggaaatgggcaaacaataatccatggggttaccagaataagctttgaatttacttcttttgtttggagttaccatttctaattactcaaatctaaaagaa

SEQ ID NO: 151244 - DNA, 179 bp, Arabidopsis thaliana columbia
gaaacaatgctactcaatcaatcctcggattttacttatactgtctaatattagatcaccagacgggtgtatgctcattagattggggtgaaaacaactcaacttgtatcaaaccttcatcaatgaaatattcatgaacatcaatcttctttgagagaacgattatcactcaatttcta

SEQ ID NO: 151245 - DNA, 433 bp, Arabidopsis thaliana columbia
taccaatgctcgtgaatcaatcctaagatcttacttataatgggcaagattagatcatcagaggagtgtgtactaattacattggggtgaaaacatactgaatctaaacacacattcatcaacgaaatattcaagaagctcaatcttcttcgagagaaggattatctctaaatttctaggaatcaagagcacttcttgtaagattgtaataccacagagggaattttgatggcgcactgcctgtctttgaaagaatcgactcttaagcatctatctcaccgctacaggctaccaatgcctcttgagagaccggctactaataaaaaccgtaacacttaaccacaggattcactttctgagcattctgctaacttcctccttgaaactatctacttgaaaaccaaatgccttcaaaaactttggagaataactt

SEQ ID NO: 151246 - DNA, 350 bp, Arabidopsis thaliana columbia
ctcacgccttgtccaaacacacacataaaatacatttctcacaccattgtcaaacactccctgagagaatccacacacagtgggtggtgcttttaggcactaaaactatctccacctgacagattcaatctctgcattacacaaatcatatctaacagttggcacaatttcacggtctcttgtcccatgtgataatacacactataaaatgcttgaaagggatcacactaccagatgatctgcattgactacaaaaactcaatgatctagactctaactgctcattctcaatcaactttaaactaacaggtcgctactataggcactgatttaagtatagcctacgatct

SEQ ID NO: 151247 - DNA, 445 bp, Arabidopsis thaliana columbia
cccacgcgtccgcgctacttccaaaaccagagcattattacacctctcctcatcacctcttgttttgtgttctgtctccatgttcctctctgctggcttttggtttataagtcagggcttggtaatcttggaggagccttagctctcagtttttcgaactgtctttataccattatccttggatctttaatgtgcttctcctctgcctgttctgagacacgcgcaccgctctccatggagatatttgacggcattggagagttcttcagatatgctcttccttctgcggctatgatttgcctggagtggtggtcatatgaactcataatattactctctggtctcttacccaacccacagctggagacttctgtgctctctgtctgtcttcaaacaactgcgacagtctattcgatacatcttgcaatcgcagctgcagcaagca

SEQ ID NO: 151248 - DNA, 379 bp, Arabidopsis thaliana columbia
  unsure (1)..(379): unsure at all n locations
cagccgcatcatccttctcccttgtgcgatatcgtttgcgtgagatttgtctgaaaagtagctaaccatgggtaaagagaagtttcacatcaacattgtggtcattggccacgtcgattctggaaagtcgacaaccactggacacttgatctacaagttgggtggtattgacaagcgtgtgatccagaggttcgagaaggaggctgctgagattaacaagaggtccttcaagtacgcatgggtgttggacaaacttaaggctgagcgtgagcgtggtatcaccattgacattgctctctggaagttcgagaccaccaagtactactgcactgtcattgatgctcctggtcatcgngatttcattaagaacatgatcact

SEQ ID NO: 151249 - DNA, 177 bp, Arabidopsis thaliana columbia
aaaagttcaaggaagttgctgagtctgaagaatttttgttgagagcattgttgccgttgacgctgttggccttcttgagaaattgactgtagaagagacaaaaaccgaggatataaccgaagcgaaagctgttgtgacagtagatactgtaatgaaagcagacgagatgaatgagag

SEQ ID NO: 151250 - DNA, 397 bp, Arabidopsis thaliana columbia
ggaaaactgcctacaaggtcatcacttctctatattttcttcctcttggccgacttcatcagccagcgtggagtcaccaccgaagcagccgtcgaaccagttgatgacatcaatggacaatctctcctcacaggcgtcaactactacatcttgcctgtaattcgcggacgtggaggcggactaaccatgtcagacttaaagaccgaaacctgtcccacaagtgtgatccaagaccaatgtgaagtctctcaaggactaccggctaaattctcaccatatgacaaatcaagaaccatccctgtctcaactgatgtaaacatcaaattctctccaacttcgatctgggaattagccaatttcgacgagacgacgaaacaatggttcatttcaacttgtg

SEQ ID NO: 151251 - DNA, 379 bp, Arabidopsis thaliana columbia
cccacgcgtccgcgctacttccaaaaccagagcattatttcacctctcctcatcacctcttgttttgtgttctgtctccatgttcctctctgctggcttttggtttataagtcagggcttggtaatcttggaggagccttagctctcagtttttcgaactgtctttataccattatccttggatctttaatgtgcttctcctctgcctgttctgagacacgcgcaccgctctccatggagatatttgacggcattggaaagttcttcagatatgctcttccttctgcggctatgatttgccctgagtggtggtcatatgaactcataatattactctctggtctcttacccaacccacagctggagacttctgtgctct

SEQ ID NO: 151252 - DNA, 351 bp, Arabidopsis thaliana columbia
cccacgcatcctctctactcctaaaaccagagcatttttacacctatcctcatcacctatagtttcgcgttctgactacatgttcctctctgctggctttaggtttataagtcagggcttgggaatcttggaggagccttatctctcacttattcgaactggctttatagccattatccttggatctataatgagctatttctctgcctgttctgagacacgcgcaccgatctccatggtgatatttgacggcattggagagatcttcagatatgctcttccttcttcagctatcatttgcctggagaggtggtcatataaaactataatattactctcgggtctcttacc

SEQ ID NO: 151253 - DNA, 355 bp, Arabidopsis thaliana columbia
accggggattctttggattcgacgtcccgtatgtttttttcccacattctaagagaggagcactacaacacaactcgaggtgtgccaaaagcgttgcagaattacaagaatttgcaagatattatcgccattctgcgaatggatgagctaactgaagatgacaagctgactgttgcccgtgcccgtaagatccagagattcttgagtcagacattccatggtgctgaaatcttcactggtgcccctggaaaatatgtcgaccttaaagaaaacatcaacagtttccaaggtttgttggatggcaagtaccatgatctttccgaacaatcgttttacatggttggaggtatcgatg

SEQ ID NO: 151254 - DNA, 414 bp, Arabidopsis thaliana columbia
gtcaatttgaaaaaatgtcgcaatcaaccgtttattttccgccaaagggtgggtttagctgcggtctgtgtaagagaaaggatatgcttacacaaaagggtcttaaagctccgtcttttttgaagactggaacaaccattgttggtttgattttcaaggatggtgtgatactaggggcagataccctagcaactgaggggccaattgttgctgataagaactgtgagaagattcactatatggcaccaaacatatattgctgtggtgcaggaactgcggctgatactgaagcagtcactgatatggtcagctcacagctgcgattgcatcgttaccagactggtcgagactctcgggtcattactgctttgacccttctcaaaaaacatcttttcagctaccaaggtcatgtct

SEQ ID NO: 151255 - DNA, 441 bp, Arabidopsis thaliana columbia
gggaggcgagggaatggagagttgctgtcggagcgttatagcttcaaggacgtttcatctgcggtcaagtggccgtctatttccctctcttagcttaactcatctcaagggcaagctatctctctccatcaactcgttttcctccaagattcagtctcatgctctccgaggagttggtataggcgagtcagataagaaaaatcccctgccgcgaggggccggagaaggagtcaaggaagatgcgaggagtaagctgcttcatgtagttttggtctctcctcagattcctgggaatacaggttgcattgcaagaacatgtgctgcctcagctgttggtctgcatttagtcgggccattaggttttcaagtggatgacgccagagttaagcgagctggtttggattattggccctttgtggttgtcaaagcgcatagctcatg

SEQ ID NO: 151256 - DNA, 463 bp, Arabidopsis thaliana columbia
cttccttttgattctctctgccactctcatgtgacacaattataccattttttctttgatattgggtacaaaaaacataacattattttctctctattttcattaactcatttctgtatttttcattaactataagaaagtacagaaataaatataatacgcattaaaatgaagaaataataaaacgagagaaaaggtttaaggaaagggaaagggttagtgtagtgttgacaacgccactcttgactctctttctcttcttcttctcgagatcctgaaaatgtgactgacagattcttcaacttcactctcttcttcttccattcactgaactcaaaccaccccctgtgagctatgacccaccaaacccatcagcgtcgtcgccgtcgtcactccgacgtctgtcaccgtcatccttcttacaaacccaccactggtttctgtgccacctgtctccgtgaac

SEQ ID NO: 151257 - DNA, 365 bp, Arabidopsis thaliana columbia
  unsure (1)..(365): unsure at all n locations
ntaaaaatgaaaagcctttctttcaacttttttattttcctctctctatcaaccctcgggaccatcttcaacacacggaagggtaatgttaatcacatttactcgtttgttacaaacccacctctaaactactaatcttggtctgtcaaaaaccacttccttcttcaccacactctatattttagctacactaatggaactaactctcttctcgatctcaacacggctttttacactcttgtaatacaaaaaatcccttctaaacagtgtactattgacattctgagaactttcttgatctatatagtcccttttactttataattggctatcaagataacttcaagaagcgtcaaaagcttaat

SEQ ID NO: 151258 - DNA, 446 bp, Arabidopsis thaliana columbia
cgagaatggaagaggcgtttacttagtactgttgacaagttaaaagatgcgttttgtcgccagcatgccttggatctcatttttactgaggaaggagatagccatctgtctgcggatatgtacgtaaacatagatgaaaatggcgaggatgtggacttctttccatctctgatattccaggaactttttgccaaacttaacaggatggcaagtctagcagcagatatgtttgtaggaagagaaagattcgccatatctttgttgatgcgattaacagagactgtgatcttatggctttctggagaccagagcttttgggatgacattgaggaaggtcctcgacctttgggacctcttggcctacggcagctgtatttggacatgaagtttgtcatatgctttgcatcccaaggtcgctacctatcgaggaatttgcacaggggaac

SEQ ID NO: 151259 - DNA, 419 bp, Arabidopsis thaliana columbia
  unsure (1)..(419): unsure at all n locations
ccgganccgaattccgggccacgacccacgcagactaagacgccatggcagcctctctccaatccaccgcttcattcctccaggcgcagaacagcgccaccgctccttctcgcgggagggctcacctccgatcgactcaagccgtcggcaaatcttttgggctcgaaacttactcggctcgcctcacttgctccttccagactgactttaaggacttcaccggtaaatgctccgacgctgtcaaaatcgccggattcgctcttgccacctctgctctcgtcgtctcgggagcaagtgcggagggagctccaaagagattgacctatgatgagattcagagcaagacatacatggaagtgaaaggaactgggacggctaaccagtgccctactattgacgggggctctgagactttctcg

SEQ ID NO: 151260 - DNA, 455 bp, Arabidopsis thaliana columbia
aagtgttggtgagaagaacgttttgatctttgaccttggtggtggtacattcgatgtctctcttttgaccattgaggaaggtatatttgaagtgaaggcgactgcaggagacactcatcttggtggtgaggatttcggcaacagaatggtgaatcactttgttcaagagttcaagaggaagaacaagaaggacattagtggaaacccgagagctctaaggaggttgagaaccgcctgtgagagagcgaagaggactttgtcatctacggctcagaccaccatcgaaatcgactctctgttcgatggtattgacttctacgctcctatcacccgtgccagattcgaggagcttaacatagatctcttcagaaagtgtatggagcctgttgagaagtgtcttcgtgatgctaagatggacaagaactcaatcgatgatgttgtccttggtggtggct

SEQ ID NO: 151261 - DNA, 454 bp, Arabidopsis thaliana columbia
  unsure (1)..(454): unsure at all n locations
cagagatttgnagattttatcgatcgaagatgaattttgtcttcactgccttggagaaggcaggggacccagtggttgatcggagggctgcttttactaaagtcgtcggcaatttcagcactctcgattacctccgtttctctactatcaccggcatctccgtcaccgtcggctatctctctgggattaagcctgggattaagggaccgtcgatggttactggaggattgatcgggctcatgggaggtttcatgtatgcgtaccagaactctgccggtagactcatggggtttttccctaatgatggtgaagttgctagttaccagaagcgtggtggtttctccaaatgaatgactttagtgatttattttctggatctggcttcattttggaatttgaaaccctctctttttctctgtaatttgattgcatttctctgctgtttgaggataat

SEQ ID NO: 151262 - DNA, 426 bp, Arabidopsis thaliana columbia
gaaagttcgataaaaatctactgatacatcgacttctggaagcgatctcgatctctctagaattgtttcgacgacgaagatgaagaagattcaaattggtgcggtggcgctattggtgtttctatctgtggcctctctctttgaaatcggattggcttctccgaacacagttcctgctttcctctggtctccgcatctccagtctgctaatggtgaattggatgaggctgtaaattatcaggtcatgtctgcaaaggatctagttggttctgttttcactcaaggaggttggtcaaactttctgtgctcagagatgaagcttgagcaacctgttgatgttgcacttgtgttcataggcagagagctactggcttttgatgtttcttcaaaaaggaacttacaacctggccttgtaacacattggat

SEQ ID NO: 151263 - DNA, 454 bp, Arabidopsis thaliana columbia
gtggtcggagaatggcgtctctcaaaattccagcatatattcctcttcccgaagaagactccgagcagctccacaaggcattcaaaggatggggaactaatgaagggatgatcatatcaattttggctcatagaaacgcaacgcaacgcagtttcattcgtgccgtttatgctgctaactacaataaggatcttctcaaggaattagacggagagctttctggtgactttgagagagttgtgatgttgtggactcttgatccaacggagagagatgcgtatttggccaatgaatctaccaaattgttcaccaaaaacatttgggtcctagttgaaatcgcttgtactagaccttctcttgagtttttcaagaccaagcaagcataccatgttcgctacaagacctctctcgaggaagatgttgcataccatacatctggaaatatccgaaagct

SEQ ID NO: 151264 - DNA, 444 bp, Arabidopsis thaliana columbia
attgttcattttataggtagtttttttctcataatccgtccattttattgatattttaccttgatatatatttttgttatagaggtttaattatatatttcttttttatatttcaggttttattatctatagtaattaaaatggatggatcatcggaaaaaactaccaataaattagtatcgattctaccaaattataggattggtaagactcttggacatggatcctttgcgaaagtgaaattagcactgcatgtagctactggtcacaaagttgctatcaaaattcttaatcgctctaagattaagaacatgggtattgagatcaaagtacaaagggagatcaaaattctcagatttttgatgcatcctcatatcatccgtcaatatgaagttatagagacgccaaatgacatttatgttgtgatggaatatgttaagtctg

SEQ ID NO: 151265 - DNA, 454 bp, Arabidopsis thaliana columbia
ccgaaaccctaatccccaatttctctttcaagttttcgatcacgatctctggaaaattaagagagaaattcaaaaacttcgggagttcaaagtctcattcagacattccagaaggtattctagtcgactgagtaaacaatcatgagaatcagaaaaggaagtagagttgaggtatttagcaacaaagaggcgccttatggtgcgtggcgatgtgctgagattgtctcgggtaatggacatacctacaatgttagattttactctttccaaattgaacacgaggaggcagttatggagaaagttccaaggaagataattaggccttgtcctccacttgtggatgttgagagatgggatactggtgaattggtggaagttcttgataatttttcctggaaagctgccacagttcgagaggagttatctggacattactatgtggttcgcttacttg

SEQ ID NO: 151266 - DNA, 457 bp, Arabidopsis thaliana columbia
ccaaaaaccaaaattcactgccaaaaaaaacacatcaaaacgatgccgtcggaagcggagagctcagcgaattcagctccggcaactccggcgccaccaccgaatttctggggaaccatgccggaggaagagtactacacttcacaaggagtacgtaacagcaaatcatacttcgaaacaccaaacggcaagctcttcactcagagcttcttaccattagatggtgaaatcaaaggcactgtgtacatgtctcatggatacggatccgatacaagctggatgtttcagaagatctgtatgagtttctctagttggggttacgctgttttcgccgccgatcttctcggtcacggccgttccgatggtatccgctgctacatgggtgatatggagaaagttgcagcaacatcattggctttcttcaagcatgttcgttgtagtgatccatataaggatc

SEQ ID NO: 151267 - DNA, 463 bp, Arabidopsis thaliana columbia
cgctgttgtttctcctccatttctctatctttctctctcgctgcttctcgaatcttctgtatcatctgcttcttcttcaagtgaaaaatggccgatggtgaggatattcagccacttgtctgtgacaatggaactggaatggtgaaggctggttttgctggtgatgatgccccgagagcagtgttcccaagtattgttggtcgtcctaggcacactggtgtcatggttggtatgggtcagaaagatgcttacgttggtgatgaagctcagtccaagagaggtatcctcactctgaagtatccaatcgaacatggtattgtaagtaactgggatgacatggaaaagatatggcatcacactttctacaacgagcttcgtgttgcccctgaggagcacccagttctactcacagaggcacctcttaaccctaaagctaacagggagaagatgactcagatcatgt

SEQ ID NO: 151268 - DNA, 453 bp, Arabidopsis thaliana columbia
cggacgcgtggggttgagaagcttgccaatttcgacagggaacggattccagagcgtgtggttcatgccagaggagccagtgctaaaggtttctttgaggtcactcatgatatctctaacctcacttgtgctgactttctccgagctcccggtgttcagactcctgtcattgtccggttctccaccgttatccatgagcgtggaagtcccgagaccttgagagaccctcgtggttttgcagtcaagttctacaccagagaggggaactttgatcttgttggaaacaactttcctgttttcttcatccgcgatgggatgaagttccctgacatggtccacgctcttaagccgaacccaaaatctcacatccaagagaactggagaatccttgacttcttctcccaccaccctgaaagtttgaacatgttcactttcctcttcgatgatatcggt

SEQ ID NO: 151269 - DNA, 457 bp, Arabidopsis thaliana columbia
gagagttttatttttctttccgagaaaattcgagattaataatctgggacaaaaaccatcgttcatttcttatagagaaagcttgagtgagggaaaagctttctacacgaaactagtctccagctttttgctctgtatttgtccagatttgtttgttgttgaggccaacatttgaagatattttcaagaaaatgggagtgaaagtagcaacaagctccaccttccatcaatgggtggctcatcctatagttcatcattcctcttccctttctcaaaccctagcttcctccgccgtttcttctccttcaagacgacggatcatcggaaacgacggacgttcttctctgtcttgtcgttccgtgatgcagagccagaggcttaatccttcttctcccttcggcacttcttcgacaaatctccgtcactccaagtcctgtgagctctgggaatcaacaaa

SEQ ID NO: 151270 - DNA, 459 bp, Arabidopsis thaliana columbia
  unsure (1)..(459): unsure at all n locations
tttttcctctcgatggtgagatcaattattaatattcatttggagaataatcgtctcttttctccatggctatggctctctcaactactccttctcagatgtccgttgcacttccaactagaatggatgggtcgagccgatctatgattaaggttcaaagtataagcttcactgataagtcatggggtcctcctctgctgagactagattcgaaatctagaagcttaggtgtgaaaaaaaggtccacaatatgcatgtcacttcagcaatcaagcaaatccaaagtcttggttactcctctagaacttgaagatcccaaagagactcccttaaacttgtttaggcctaaggagccttatactgcaactatngnttcggttgagagaattgttggtccacaagcacctggagagacttgccacattgttattgatcatgatggtaatgttccttactggg

SEQ ID NO: 151271 - DNA, 456 bp, Arabidopsis thaliana columbia
  unsure (1)..(456): unsure at all n locations
aatttttaaatccagaggagaccccattcattgattgattgaataaaataattcgtaacgaagaagcggtcattatcattctctcgattgctcatactagcgataatagatcgacgctgttgatcgcatgtggtagttcctttttggatcagtggtttttgaaatggagaaagtttcgtcgccgtcttcctctttttcacggaggtctgcttatcttgaagctcttacacaagagattaagaagaagcttacacgggctgttgtctctccagcacaaacacgcaacttgttacaagacttatttgctgatatagctctcgaagtagacgatcgagccaaagcagatgtgatccttagcaaagaagaggatttgattacttctgatgaagcagatgctgatggtccgntatgctttttcgatgtccttgctgattactatgtgaaagtgtctgagag

SEQ ID NO: 151272 - DNA, 434 bp, Arabidopsis thaliana columbia
attgcttcatcattaccaaatcatcaacttaatcgtttctctcaaatttagggttttctcttttctcgaaagtcttgcggttttctgaatcatctctatctggtttgagggtttcgtttgatatctggagaaaggggtttctggaaacaaggagttcataattcgcgatcttgatctatcgatcttcatttatatataaaagcgtgaatgagattatgatggagtcgaaaggtggtaaaaagaagtccagcagtagtagttccttattttacgaagctcccctcggttacagcattgaagacgttcgtccaaacggtggaatcaagaaattcaaatcttctgtctactcaaactgctccaagaggccatcctgagtaccagcgtgcaccgatcttcataatatagttatagctttctttactttccagtttata

SEQ ID NO: 151273 - DNA, 458 bp, Arabidopsis thaliana columbia
tgtatacacacatatagttacaaacacacatacacataacacagatatataaaaatgtcttggtataataaagcactattgatcggcaacaaagtcgtcgttatacttgtattcctcttatgtttggttcactcgtcagagtcacttcgaccactgtttgcatgtgatccagcaaacgggttaacccggacgctccggttctgtcgggccaatgtaccgatccatgtgagagttcaagatttgctcggaaggctcacgttgcaggagaagatccgcaacctcgtcaacaatgctgccgccgtaccacgtctcggtattggaggctatgagtggtggtccgaggctctccacggcatttccgacgttggtccaggcgctaagttcggtggtgcttttcccggtgccaccagcttccctcaggtcatcaccaccgcagcttctttcaaccagtctctatg

SEQ ID NO: 151274 - DNA, 457 bp, Arabidopsis thaliana columbia
ttttgctaccgtagatgccgaggagctctctggtgctcatcctgctgaagtacagagctttgggcagggaaagtggataggatcggcaaatcataacacgcttctagatcctctaaatggagaaccgtttatcaaagttgcggaagtggatgaatcaggaactcagccatttgtggacagcttatcccagtgcccgaaacatggtctccataaccctttcaaatctccagagagataccttttatatggagatatctcgacaaaggcagctcatatgctcgccttacctaaggttgctgatttcttcgcgaggttaattcaaagggttgctccaaagagttaccagcaagctgctggagaagtctttgtcacacggaagtttttagaaaacttttgtggtgatcaggtgcggttcctggcacggtcttttgcaatccctgggaatcatcttgggcag

SEQ ID NO: 151275 - DNA, 451 bp, Arabidopsis thaliana columbia
tgaagataaaggaaacagaaagcgcgagatctgagtgacggagtaatttcaaagggaggttttcgagatcagaaatggcgcaacccctcgtgaagaaagacgatgatcacgacgatgagttggagtattctccattcatgggaattgagaaaggagcggttcttcaagaggctagagtctttaatgaccctcaggttgatcctagacgatgctcccaggtcattacgaagcttctttatttgcttaaccaaggggagtcattcaccaaggttgaagcaacggaagttttcttttcagttacaaagctttttcaatcaaaagacacgggtttgaggagaatggtctacttgatcattaaggagttatctccatcatctgatgaggttatcatcgtaacaagctctctgatgaaggatatgaatagttaaattgatatgtatcgagcaaatgc

SEQ ID NO: 151276 - DNA, 452 bp, Arabidopsis thaliana columbia
agagagagaagacacttagtaaagaaggtctgtgtgctgttctctccgaaattcctttttttggtctcgagggtttttcagactgtgaagagacatagctgtggcaaagatgagaggacctttaggagcagtgattggaagatatacttcaagtgatgggagtgctccaaatgatgggatcatcaagcacaatagaaagtgcagagatattacgtttctcatcatcttcattgccttttgggtttcaatgattgtcaattccagctttggtttcaaccaaggcaacccattaagactcacatatggattggactatgaagggaatgtgtgtggtagcaagcatcgtcaccgtgaccttactcaacttgagcttagatattggttaaaccctaaccaagtttatgaaagtggtttgaaagatggggaacttaaattggctaatgctagaacta

SEQ ID NO: 151277 - DNA, 452 bp, Arabidopsis thaliana columbia
ggcgaccacgcgtccgaaacattctcagagcaaatttcaagtttatttcattcaatttcgatccgagtaaccatggagtgtagatcattggatctgacgattatatctgcggaggatctcaaagacgttcaattgatcggtaaacaagacttgtacgccgtcgtttccatcaacggcgacgctaggacgaagcagaagacaaaggttgataaagattgcggcaccaaacctaaatggaagcatcaaatgaagctcaccgtcgatgacgcagcggcgcgtgacaatcgtcttactcttgttttcgagatcgtggcggatcgtcccatcgctggtgataaacctgtcggtgaggttagcgttccggtgaaggagcttttggatcagaataaaggtgacgaggagaaaacggttacttacgccgtgaggttgcctaacgggaaggcgaaaggatc

SEQ ID NO: 151278 - DNA, 458 bp, Arabidopsis thaliana columbia
aatttccttaaatctttactcaaaagatgaggctcctcttcagcttctgcttcttcttcttcatgatcatctttaccgcaactgcttatgatccattagatcctagtggtaacattacaatcaaatgggatattatgtcctggacggcagatggctatgtggctacggtaactatgaacaacttccaaatctaccggcacatacaaaaccctggttggacattaggttggacatgggcaaagaaagaggtgatttggtcaatggttggtgcacaaacaacagaacaaggagactgttccaagtttaagggaaatgtacctcattgctgtaagaaaacccctacagttgttgatctcttgccaggtgtgccttataatcaacagttctcaaactgttgcaaaggaggtgtaattggagcttggggtcaagatccatcagccgctgtatcccagtttcag

SEQ ID NO: 151279 - DNA, 452 bp, Arabidopsis thaliana columbia
ctctactcccaacaaaaccagtttactcctcttaagaatcatgtgtaattcaaaaccatcttctgcttcatcttccttattatcttgtaaagacaaaacccatatctcaaaactcgaaacctgtgatacagataatcctcattattctgaattcagggatactgattctctagaccttaaaagatggccaagttttctggagggcttagaggaagtgaaggcgatcggaaaaatctctgggccgacggcgatgaccgggcttcttatgtactcaagagcgatgatatcgatgctgttcttaggctacctcggtgagcttgagttagccggaggatctctctccataggctttgccaatatcaccggctactccgtcatctccggtttgtccatggggatggaaccaatctgtggccaagcatacggagctaaacaaatgaagcttttaggac

SEQ ID NO: 151280 - DNA, 460 bp, Arabidopsis thaliana columbia
  unsure (1)..(460): unsure at all n locations
aacaaaatggctcgagtctcttctcttctttctttctgcttaacacttttgatccttttccatggctacgcggctcaacagggtcagcagggtcagcagtttccgaacgagtgccagctcgaccagctcaatgcgctcgagccgtcacacgtactgaagagcgaggctggtcgcatcgaggtgtgggaccaccacgctcctcagctccgttgctcaggtgtctcctttgcacgttacatcatcgagtctaagggtctctacttgccctctttctttaacaccgcgaagctctctttcgtggctaagggacgaggtcttatgggaaaagtgatccctggatgcgccgaaacattccaagactcatcagagttccaaccacgcttcgaaggtcaaggtcaaagccagaggttccgtgacatgcanccagaagtggagcacattangagcggtgataccattg

SEQ ID NO: 151281 - DNA, 445 bp, Arabidopsis thaliana columbia
caaaaatcgcaaaaaaagatttcaactttcgataaacccagatcgaaaaatcagatttttccagatcaatcagagagttagagatggagtataataacaacaatcagcaatctttttggcagttcagcgaccagctgagagttcagacaccgaatctagcgaatctgtctctcaacgactcgatctggagcacaaactctgtcttcaaagagcgtcgaaacttagacatagccgccaccaccgacaagaacaacaaccagatcgactattatcagaagaagacaacttccgacaacatcaattccaactggaactggaagtcttctggttcaaacaacgacatgggtttaggattcggacctgtgggttcaaaatccaccgtcgatttaaacccaatcgacaaattcaactcaccgttcaacgacacgtggaaattcaactcagt

SEQ ID NO: 151282 - DNA, 455 bp, Arabidopsis thaliana columbia
ggcagaagacacagctttagatatcatggacgtattaaacgaacttgctctgtttttagctagagctgtgattgacgacgtcttagctccacttaaccttgaagatatctcaaccaagctgcctccaaaatcaaccggaaccgaaacagtccgctcagccaggtctcttatctccgccagacacgcaggagagagactcctaagaagctggggaggtggaaccggctggatagtggaagatgcaaaggacaaaatctcgaaactcctagaagaatacgaaacaggaggagtaacatcagaagcttgtcaatgtatccgcgatctagggatgccttttttcaaccacgaagtagtgaagaaagctttggtgatggcaatggagaagcagaatgatcggttactgaatctgcttgaggagtgttttggtgaaggattgattacaactaaccaaatga

SEQ ID NO: 151283 - DNA, 469 bp, Arabidopsis thaliana columbia
ggccgacccacgcgtccgataccataaaaaacatgaaaatcctctcactttcacttttcttgctcttggccgctacggtctcggcatccgttccagggctcatcgaactcgtcgattcgaaaaccatctttgggaacgtagccgaactcttagagaaagagaaactttccatcaactacgccaactgcagaagctggcaccttggtgttgagacctctaacatcatagacttcgacacggtgcccgcaaattgcaaagactatgttgaagactacttgatcacttccaaacagtaccaatacgactccaaaaccgtgtgcaaagaggcttatttctatgccaaaggacttgccctaaagaacgacaccgtcaatgtttggatctttgacctagatgataccctcctctctagtattccctactacgcaaaatatggatacggaacagagaagaccgacccgggggcgta

SEQ ID NO: 151284 - DNA, 457 bp, Arabidopsis thaliana columbia
ctatcttaaaacttcttacctaaaatagaaatttgattttttgagaaatggcttcaaaaatttgagcctctcttgtcattttcctcacattcaacattctttttttcactttaaccaccgcatgtggcggtggctgcagttccacccctaaacccaaacctaagcccaagtccaccggaagctgccctaaagacactctcaagctcggcgtttgcgccaatgttctcaaggatcttctcaaaattcagttgggaacaccaccagtgaagccttgttgttcgctcctcaatggtttagttgatcttgaggctgccgcttgtctctgcaccgccctaaaggctaaagttttaggcattaatcttaatgttcccgtctctctcagccttcttctcaatgtttgtggcaagaaggttccttccggcttcgtatgtgcttgatatatctatccactcttcga

SEQ ID NO: 151285 - DNA, 457 bp, Arabidopsis thaliana columbia
cccacgcgtccgtccacgcgtacgcaagtacttcgttcttggtcttcctcaccgtgatgctacggatgacaaagttactattgaaagtgctgaagctactaagaagtacaatgtggcgatcaagtgtgccaccatcactccagatgaaggccgtgtcacggaatttggcttgaagcagatgtggagaagtccaaatgggaccatcaggaatatcctgaatggaactgtatttagagagccaattatctgcaaaaatgttcccaagcttgtcccaggctggacaaagcccatctgcattggaaggcatgcttttggtgatcagtaccgtgccactgatgctgtaatcaagggaccaggaaaactgactatgacctttgagggaaaagatgggaaaactgaaaccgaagtctttacatttactggtgaaagtggtgttgctatggcaatgtacaacact

SEQ ID NO: 151286 - DNA, 433 bp, Arabidopsis thaliana columbia
  unsure (1)..(433): unsure at all n locations
tttgtttttcgtttcttctccgattgttcagaggaattgcgaattaagataaagatgaggccagtgttcgtcggcaatttcgagtatgaaactcgccagtcggatctggaacggttgttcgacaagtatgggagagtcgaccgagtggacatgaaatctggaacttttcttcaaaggaacaagatttgccatcttcttcttcttcctgcaaaatcatttctacattttcatacctgcctttatcatcttgtgcctaccaatcttcactgactctagagaaactttggaatttgtctgtctattaccaatcatcgatgcttcagatggaagtctattgaatccatcattgccatgccttgccttccatatctgaactcctccactcagaatgtttaagcatgcctggcanatcactcagattttttaaatataa

SEQ ID NO: 151287 - DNA, 459 bp, Arabidopsis thaliana columbia
cccacgcgtccgattaaattaagtctctggaccctgaagtccccacacaagcaagcttcgatggatcccaagaacctaaatcgtcaccaagtaccaaatttcttgaacccaccaccaccaccgcgaaatcagggtttggtagatgatgatgctgcttctgctgttgtttccgacgagaatcgcaaaccaacaactgagattaaagatttccagatcgtggtctctgcttccgacaaagaaccaaacaagaagagtcagaatcagaaccagcttggtcctaagagaagctctaacaaagacagacacactaaagtcgaaggtagaggtcgacgaattcggatgcctgctctttgtgctgctaggatttttcaattgactagagaaatgggtcataaatctgatggtgaaactatccagtggctgcttcaacaagctgagccatcgattattgcagctact

SEQ ID NO: 151288 - DNA, 440 bp, Arabidopsis thaliana columbia
caggtttttaagaaactgtgcaagtacgaatcaggagcttgttgttgatggagaaaccggaaatgggtcgatttcggagctccaaggagatgcagcaaatggttcgatttcgccggtggaagtggaagcagaagtagaagaagtgaaggtagatgatttggcgactcagagcatttggggacagatgaaagagatcgtcatgtttaccggacctgccgcgggattgtggctatgtgggccgttgatgagtctcattgatacggcggtgattggtcaaggaagctcactcgaactcgctgctttaggtcctgctaccgtcatctgtgattatttgtgttatacgttcatgttcctctcagttgcgacttcaaatcttgttgctacctctcttgctcggcaggataaagatgaagtacaacatcagatatcgatcttgcttt

SEQ ID NO: 151289 - DNA, 459 bp, Arabidopsis thaliana columbia
ttcgattgcagagtcttcaattggaatttggatcgtgggattttggaaatggcatcgaaacggatttggaaggaattgaaggatctgcagaaggatcctcctacttcatgtagcgcaggacccgttgcggaagacatgtttcattggcaggccactataatgggtccatcggatagcccttattctggaggagtttttcttgtaaccatccatttccctccagattacccatttaagcctcctaaggtggcttttaggacgaaggtgttccatccaaacattaacagcaatggaagcatctgcctcgacatcttgaaggagcagtggagtcctgctctcacaatttccaaggtgctgctatcgatctgttctttgttaacggatccaaacccagatgatcctttggtccctgagatagctcacatgtacaagacagacaagaacaagtacgagtccact

SEQ ID NO: 151290 - DNA, 456 bp, Arabidopsis thaliana columbia
acgagcttttcggtttcttcttggatgatactatgacttactcctctgcagtattcaagtcggatgatgaggatctgagaactgcacagatgagaaaaatctcgcttctgattgataaggcgagaatagagaaggaccacgaggttttagagataggatgtggatggggaactttggccatagaagttgtgagaagaactggatgcaaatacaccgggattacgctatctattgaacagcttaaatatgctgaagaaaaagtgaaagaagctggacttcaggactggattacttttgagctccgcgattatcgccaactatctgatgctcagaaatatgacagaattatatcttgcgagatgctagaagcggtcggacatgagttcatggagatgtttttcagtcgatgtgaagccgcacttgcagaaaatggcctaatagtcttgcagttcatat

SEQ ID NO: 151291 - DNA, 440 bp, Arabidopsis thaliana columbia
agaaagaagatgaaagtccatattggaggatatgtgttgatacttgccttgacggtttctgttatattacagcagcctgagttggtcactggacaagctagagttcctgctatgtttgtacttggagactcattggtcgatgctggtaacaacaactttctacaaactgtagctcgagccaatttcctcccttatggcatcgacatgaactaccagcctactggcagatttagcaacggcctgactttcattgatctgctagctcggttgttagaaattccatcaccccctcccttcgcggatccaaccacatcaggcaatagaatcctccaaggagttaactacgcgtctgcagctgctggcattcttgatgtattaaggctacaactatggtggaagattcagcctgaaccagcaaatggtgaatctagagacgacac

SEQ ID NO: 151292 - DNA, 469 bp, Arabidopsis thaliana columbia
  unsure (1)..(469): unsure at all n locations
gacccggcgnccgtgagagtttaccgaaaaaaaaaaaaaaaaaaacacctttttatttttaatcaacgaaacttatggaacgtgaagcacataaattcttccgggcatctaattttgccgttgatgaccttttagttgatttctctaacgatgatgacgaagaaaacgatgttgttgctgattccaccactaccaccaccataaccgacagctctaacttctccgctgctgatcttcccagtttccacggtgatgttcaagacggcactagcttctccggtgacctttgtataccttctgatgatttggctgatgagttagagtggctttcgaacattgtggatgaatcattgtcgcctgaaaaatgtacacaagctcgagctaatatccggttttaagagtcgaccggacccgaaatccgataccggaagcccggaaaacccgaatagcagcagtccgatttttacta

SEQ ID NO: 151293 - DNA, 414 bp, Arabidopsis thaliana columbia
  unsure (1)..(414): unsure at all n locations
ggtgttttcagatcgagtgtcgagtggtgagagtagaggaacagcgagtgcaagtgaaacggcgtcgtattccggtagcgggaattgtgggccggaggtgtcgcatcttggatggggccgatggtatactctgagagagcttgaagcggccacgaatgggctttgtgaagagaatgtaatcggagaaggtggttacgggattgtgtatcgtggcattttaactgatggaaccaaagtcgccgtcaagaacttgcttaacaataggggtcaagcagagaaggaattcaaagtagaagtggaagtcattgggcgagtacgacacangaatcttgttaggcttttagggtattgcgtggaaagtgcatacaggatgctcgtgtatgactttgtcgacaatggtaatttggagcaatg

SEQ ID NO: 151294 - DNA, 341 bp, Arabidopsis thaliana columbia
  unsure (1)..(341): unsure at all n locations
cacatggggggaggctggctacatgaagatggctcgcaacattgccaatccaagaggcgtatgtggcatcgcaatgcgagcttcataccctctcaagaactcgttttctacggataaagtttcggttgcctaataatatgaactaaatgtatgccatggaacggatcggttaagccattatcgttattcgactttgaaggaaactaaaaaataatgtggtcgattggtttggttttgttatatattatgcatttgtatgggggtcagtcaatgtttgaactttgtataatatttctttgggtctagtgataaatattttccccnnnnaaaaaannnnnnnn

SEQ ID NO: 151295 - DNA, 457 bp, Arabidopsis thaliana columbia
catcacatgtatacacacatatagttacaaacacacatacacaaaacacagatatatagaaatgtcttgttataataaagcgctattgattcgcaaccaaagtcggcggtatacctggattcctcttatgtttggttcactcgtcagagtcacttcgaccactgtttgcatgtgatccagcaaacgggttaacccggacgctccggttctgtcgggccaatgtaccgatccatgtgagagttcaagatttgctcggaaggctcacgttgcaggagaagatccgcaacctcgtcaacaatgctgccgccgtaccacgtctcggtattggaggctatgagtggtggtccgaggctctccacggcatttccgacgttggtccaggcgctaagttcggtggtgcttttcccggtgccaccagcttccctcaggtcatcaccaccgcagcttctttcaacca

SEQ ID NO: 151296 - DNA, 457 bp, Arabidopsis thaliana columbia
ccacgcgtccgtttttccattttatcagtttcttctcttccaaattggttttttctttcagtctttgggagtggggtgatacagtgaaaaggtcgtgttttttttgagggggaaggatttctgggtttgctcttagggttttgtcttttcaatcgccggagcctgaaataatccggcagatatggcgtctgaattgccgatgagccctcatttggagcagattcacggagaaatccgtgaccatttccgagccctcgcgaatggcttccagaggttggataagatcaaggattctagtagacaaagcaagcaactcgaagaacttgctgagaagatgagagactgtaaaaggttggttaaggagtttgatcgtgaactcaaaaactgggaagtctcgaaagtatcccttaagcaaataagcagtttaatgcagagaaacaatctatcgtttatggac

SEQ ID NO: 151297 - DNA, 431 bp, Arabidopsis thaliana columbia
tctgcttttatcttgaccgtttctatgttgctcggagaggtcttccaacactgaatgatgttggcttgacatcctttcacgacctagtttatcaagagatacagtccgaggccaaagatgtgctactagcacttattcataaagaacgtgaaggcgaacagattgatagaacactagtgaaaaacgtaatagatgtctattgtgggaatggggttggacagatggtaatatacgaagaggattttgaaagcttcttgcttcaagatactgcatcttactattctcgcaaggcctcaaggtggagccaggaggattcttgtcctgattacatgctaaaggctgaagagtgtcttaaattggagaaggaaagagtcactaactaccttcattctaccactgagcccaaactagttgagaaagtacaaaatgaa

SEQ ID NO: 151298 - DNA, 460 bp, Arabidopsis thaliana columbia
cttcttcgctgtaacgctttatacctaatcggagataaaacaatgcaatcgtcgaaaggacggcgggaagttggctccacaaccggcggagccggtatagattcggcggagaagctcgacgagctcttgatatcgtctgccatttgtaacggtgaagatttaggaccatttgttcggaaaactttcggtacagggaaaccagagactcttcttcaccatctcaagtttttcgcacgatctaaggaatcagagatcgaagaggtatgtaaagctcactatcaagactttatccacgccgtagacgatcttaaatcgcttctctcagatgttgaatcgcttaaatctgcgctttccgattcaaactctaaactccaatctgttgcggcgccgcttctttcgtctctcgattcgcttgttgaggctcagactgtgtctaagaacgtcgatctggcgattggag

SEQ ID NO: 151299 - DNA, 437 bp, Arabidopsis thaliana columbia
  unsure (1)..(437): unsure at all n locations
ccgggccgagccacgcgtccgggcggtctcagctttccgtggcacgcggttaccgtttttttaccattctcagtttcccgtcgcgggaactgtgtcaggaacgtcgaagaagatgatcggagccaggaatttcaagggttttgttcttacagcccagtattcgcaaactcaggaccttttcacttctcgtcttcaaagccagatagagaaattgcccaaattggttgaggatatagttcagacatcgataaacacaggtccacgaggtgtgacacgccttgtccaaggtgttcaagcctttgtaggggttggaggagagtggctaaatgatntatctaagtctacaagcgcgtctggtggattaccaagtgaattgcaacttggtctactgtctcctctatatttgaggaaaactttttgacgcatgggagcttctt

SEQ ID NO: 151300 - DNA, 474 bp, Arabidopsis thaliana columbia
ccgggccggcccacgcgtccgacaatcaatcatttctttgttgctaaccaaacttgttatatggcgacaccgaatcaggaagccgccgacactttcatcagcatcagcggcgcttataacgccgtcacccttcaaaaactcgaggagcatcgtggtgatcttaatcaagcagtgaatgcatatttcagcgaatgagatcgaaatgtagtacgtgaagcgccggttaatgatgatgatgaaatggatatagatgatgtgattccggctccacaatctcctctctctatgttcaatgcagctagaacaattggccgtcctcccttttcgcttttggatttcggactttgctagacgtgtatttgatagcgatcctcttatgccacgccctccgtttgttagtcatcctagagaggttaggcaaatacctatagaagttaaggatagcagtgggccatctggacgatctagtgatgc

SEQ ID NO: 151301 - DNA, 434 bp, Arabidopsis thaliana columbia
caaatttagagcgagcaataatgagggtttctcaatctctaatcccttttgccataattgcttgggtcctttcctttgtcaatgcttatgatccaagtccactccaagacttctgtgttgccattgatgacctaaaaggcgtttttgtgaatggtaggttttgtaaagacccggagcgagtcgatgcaaaagattttttcttctcaagtcttaatgggcccgggaacaccaataatcaagttggctctaatgtgaccactggtaatggtgatcagatccccgggctaaacaccatgggaatatcattggtccgcatagactacgcaccgcatggccaaaattcaccttacacgcacccttgtggcttaaagatccttgtgcttgtcgaaagaacattatacgtcgggtttgtctctttcaatcaagataacaac

SEQ ID NO: 151302 - DNA, 432 bp, Arabidopsis thaliana columbia
gaacaacaacactaagcaaaaaagaaaagctcaagccgagagagacaatggcatcaacattcacgagctcaagcagtgttcttaccgcaacaacattccttggccagactaaagcctcaagctttaacccccttcgtgatgttgtctctctcggatctcccaagtacactatgggaaatgatctttggtatggacctgacagagtgaagtacttaggacccttttccgttcaaactccgtcttacctcaccggagaattccctggcgattatggttgggacaccgccggtttatccgcagaccctgaagcctttgccaaaaacagagctcttgaggtgatccatgggagatgggcaatgttgggagcttttggttgcataacccctgaagttcttcaaaagtgggtccgtgtggacttcaaagaaccagtct

SEQ ID NO: 151303 - DNA, 455 bp, Arabidopsis thaliana columbia
gcagagcgagaaaaaatggcaaccatgtctgctcttcagagctctttaacttctctttctctatctccgagctcttccttcctcggccagcgtttaatttccccgatttccctctccgtcacttctccggtcaagcccgctgagaacccatgtcttgttcttgcaaagctcaagcgttgggaacgaaaagaatgcaaaccaaacagtcttccgattctccacaaaatgcatgtcaagtttggagatacagtcaaagtaatatctggacgcgacaagggtaaaatcggagaggttactaagattttcactcacaacagtaccattgtgatcaaagatgtgaacctcaaaacaaaacacatgaagagccgagaagagggagagcctggtcaaattgtcaagatagaagcacctatccacagctcaaatgtgatgttgtattcaaaagaaaaagacgt

SEQ ID NO: 151304 - DNA, 459 bp, Arabidopsis thaliana columbia
gaagaacaacaacactaagcaaaaaagaaaagctcatgccgagagagacaatggcatcggcattgacgagctcaagcagggggcttaccccaacaacattccttggccagactaaagcctcaagctttaacccccttcgtgatgttgtctctctcggatctcccaagtacactatgggaaatgatctttggtatggacctgacagagtgaagtacttaggacccttttccgttcaaactccgtcttacctcaccggagaattccctggcgattatggttgggacaccgccggtttatccgcagaccctgaagcctttgccaaaaacagagctcttgaggtgatccatgggagatgggcaatgttgggagcttttggttgcataacccctgaagttcttcaaaagtgggtccgtgtggacttcaaagaaccagtctggttcaaagccggttcacaaatct

SEQ ID NO: 151305 - DNA, 454 bp, Arabidopsis thaliana columbia
ctggaaacaatggggagcttggggacgatgctgagatatccggatgacatatatccgctcctgaagatgaaacgagcgattgagaaagcggagaagcagatccctcctgagccacactggggtttctgctattcgatgctccacaaggtttctcgaagcttttctctcgttattcagcaactcaacaccgagctccgtaacgccgtgtgtgtgttctacttggttctccgagctcttgatactgttgaggatgatactagcataccaactgatgaaaaggttcccatcctgatagcttttcaccggcacatatacgatactgattggcattattcatgtggtacgaaggagtacaagattctaatggaccaatttcaccatgtttctgcagcttttttggaacttgaaaaagggtatcaagaggctatcgaggaaattactagaagaatgggtg

SEQ ID NO: 151306 - DNA, 452 bp, Arabidopsis thaliana columbia
gtttaaggcaaattaagatcatcttcataaatcttctcagatctcttccaattttctagaaaaaacatggcttgctgtggtggaagctgcggttgtggatctgcctgcaagtgcggcaatggttgcggaggttgcaaaaggtaccctgacttggagaacaccgccaccgagactcttgtcctcggtgttgctccggcgatgaactctcagtacgaggctttcggcgagactttcgttgccgagaatgatgcttgcaaatgcggatctgactgcaagtgcaacccttgtacctgcaaatgaagaacttcataaaccctaagtctgtaataaccctaatgttatgttaggtttgcttatatgtaataattggctgatttttcccgtagttttgccggcgacgatggtctttctctttttctgtgtgtgtttttatgggttggtcattaaaatat

SEQ ID NO: 151307 - DNA, 445 bp, Arabidopsis thaliana columbia
  unsure (1)..(445): unsure at all n locations
caggaccttatccacagtccacacacagcgagactttatttactcgccggcggaagaacaaaatggcgggaagagcgattttctctgtatcttgttcatctactccttccttgtgtatcccttattcaactgcttcgttttcatcgatgaatcgactggcgctccccgccgtccggatttctccccgaaccaacagatttcccaggattcactgctctatgtctgctaacgacatcaaagcgggaaccaatatcgaagtcgatggtgctccttggcgtgttcttgagtttcttcatgttaaaccaggaaaaggtgcggcatttgtgagaactaagatcaggaactatgtgaatggtagcacagtcgagagaacatttcgtgctggaatttctgttgaggaaagctatatatataaagaaaccaaacanttcacatacaaagatgg

SEQ ID NO: 151308 - DNA, 480 bp, Arabidopsis thaliana columbia
ccgaacggagggccggccacgcgtacggaaagaggagattgttgaagagacaaagaaaggcgtgacccctgatcaaaagcggtgagtgagggttgggctagcttcggagctggctatgtcccaagaccggtcacgttcatattcgagaaggtatctgttttcctcccggaggaggtgaagactaaagaaataccggtggaggaagtgaaagctgaagaacctgccaaaactgaagaaccagccaaaaccgaacgaacaagtggtgagaaagaggagattgttgaagagacaaagaaaggcgagacccctgaaaccgcggtcgtggaggagaagaaaccagacgtagaggagaagaaggaagaggctactccggctccggcagtggttgaaactccaattaaggaaccggagaacacgacgacagcgccagtggctgaaccaccaaagccttgatttgttctcaagatagaatgattactt

SEQ ID NO: 151309 - DNA, 454 bp, Arabidopsis thaliana columbia
acaatatctagtttttcccttgtttctgatcagtgtgttcacgtagagtgccttgaaggagaacgaggaaacaaaaacaaaggaaagcgggatacctttttcaagaaaccttaagctctaaccctaaaactccaattgttgttgatgatgataacgagttgggtttgatggccgtgagacttgccaacgccgccgcctttcctatggttctcaaagccgccctcgagcttggtgtctttgacactctctacgccgcagcctctcgcaccgactcattcctctcaccctatgaaatagcaagtaagctaccaactacacctcgtaaccctgaagcgccggttttgttggaccgcatgcttcgtctactcgctagctactccatggtcaagtgtggtaaggccttatccggaaagggcgagagggtctacagagccgagccgatttgcaggttctt

SEQ ID NO: 151310 - DNA, 447 bp, Arabidopsis thaliana columbia
gttaaagagaggtttatcgagaaaaatccaagatttactaaaaaaccactatctctctgctcttcctcggtctacattaatgtaattgggatcatcggattgggtgaaagaaacatcaaactcctaaaagagaagcctttaaagtttttttttaatcaaaaacaaaaggaagaaaattttcctttttgttttagatggcatgaatcatcatcatcgctttgctttcttgattctctatttcgcttgatgggatttgtttttctgggaatttattcattcacctgctgccatggctaaattatctttcaaggattctcttaaagctcttgaagccgatattcaacacgctaatacactagctttagattatcctcgggagaaggatggagcgcgcgttcagatgagattatcatacagcccgactgctcaatttttttctttttcttg

SEQ ID NO: 151311 - DNA, 398 bp, Arabidopsis thaliana columbia
cagctatggtcatcaacaaatataagcttaggagtaatatcaagagcttcaatctttcggggatgggctgcagcgcgggcctgatctcagttgatctagcccgcgacttgctccaagttcatcccaattcaaatgcaatcatcgtcagcacggagatcataacgcctaattactatcaaggcaacgagagagccatgttgttacccaattgtctcttccgcatgggtgcggcagccatacacatgtcaaaccgccggtctgaccggtggcgagccaaatacaagctttcccacctcgtccggacacaccgtggcgctgacgacaagtctttctactgtgtctacgaacaggaagacaaagaaggacacgttggcatcaacttgtccaaagatctcatg

SEQ ID NO: 151312 - DNA, 469 bp, Arabidopsis thaliana columbia
  unsure (1)..(469): unsure at all n locations
acgacacaatctaatccaaaaaatcaaaagatgaatgccacaaagtttgttgtgcttctcgtgattggcattttgtgtgccattgtcaccgcaaggcangtcaaagatttgtccacggagaccaaattaggggcctctcttccaaaaactactaccaaaggcattggagctcagctttctgcaactggcacaacttacagcaccagcagtgtcgttagctatgctaatggttttaacaatcccaaaggtccaggggccaattcattcgaaagtgccaacacatttaccagcggacaagtcactgccaagggtcgcaaggcaagagtttcttctacaagtgcttctgccgctgaaggcgatgctgcagctgcagtgactcgcaaagctgctgctgcacgtgcaaacggtaaggtagctttcgcatcaaggtgaagggttcctctgagaagaagaaggcaaaggaaaaagg

SEQ ID NO: 151313 - DNA, 304 bp, Arabidopsis thaliana columbia
acggcttttcagagagagaaacaatatttctaatctattacaagtaacatgatcggccaacttatgaacctcaaggccacggagctctgtctcggcctccccggcggcgctgaagcagttgagagtcctgccaaatcggcggtgggaagcaagagaggcttctccgaaaccgttgatctcatgctcaatcttcaatctaacaaagaaggctccgttgatctcaaaaacgtttctgctgttcccaaggagaagactacccttaaagatccttctaagcctcctgctaaagcacaagtggtgggat

SEQ ID NO: 151314 - DNA, 446 bp, Arabidopsis thaliana columbia
gaatgactcgtttacccttacctttccttttcttcttcctcacgtcaatacccttatctgtcttttcgcagttcaacgaccagtcaacgcttctgaacctgaaacgcgatctcggagatccaccgtctctccggctgtggaacaacacatcttcaccgtgcaactggtcggagatcacttgcaccgccggaaatgtcaccgggatcaatttcaagaaccagaacttcactgggacagttccaacgacgatatgcgatttgtcgaatctcaatttccttgacttatcgtttaattacttcgccggcgagtttccgacggttctttacaattgcacgaagcttcaatatctcgatctctctcagaaccttctcaacggctcacttcccgtcgacatcgaccgtctctcaccggaactcgactatctcgacttagctgctaacggattc

SEQ ID NO: 151315 - DNA, 459 bp, Arabidopsis thaliana columbia
ctcacccaagaagacaaaaacacagagagagaaagagagagaaatggcgacgacaacaacagaagcaacgaagacatcatcgaccaatggagaagatcagaagcagtctcagaatcttcgacatcaagaagttggtcacaagagtctcttacagagcgatgatctctaccagtatatactggagacaagtgtgtatcctagagaaccagaatcaatgaaggaactcagggaagtgacagcaaaacatccatggaacataatgaccacatcagctgatgaaggacagttcttaaacatgcttatcaagctcgttaacgccaagaacacaatggagatcggagtttacactggctactctcttctcgccaccgctcttgctctccctgaagacggcaaaattctggctatggatgtcaacagagagaattacgaattgggtttaccgatcattgagaaagc

SEQ ID NO: 151316 - DNA, 317 bp, Arabidopsis thaliana columbia
  unsure (1)..(317): unsure at all n locations
acgacaagaggnaccctttttttttttatatttttatttataagaaagtgtggaaaggccggttggggtgacttgttgtatggggagggaatttgatattaatgggatctctttgtaaaccaaattaggggtctatattccaaaaactactaccattggccttggagctcagctttctgcaactggcacaacttacagcaccagcagtgtcgttagctatgctaatggttttaacaatcccaaaggtccaggggccaattcattccaaagtgccgacacatttaccatcttacatatcactgcctaaggtcaattgg

SEQ ID NO: 151317 - DNA, 437 bp, Arabidopsis thaliana columbia
caaaaataaaacacacaatctcaagattttctacttcttattacaaagattcaatcttcttgtggcttcttgcaaccatgagtcttgttgcagatcttgttaaccttgacatctcagacaacagtgaaaagatcatcgctgaatacatatgggttggtggttctggtatggacatgagaagcaaagccaggactctccctggacctgtgaccgatccatcaaaacttccaaagtggaactatgatggttcaagcactggtcaagctcctggtcaagacagtgaagtgatcttataccctcaagcaattttcaaagatccattccgtagaggcaacaacatccttgttatgtgtgatgcttacactccagcgggagagccaatccctactaacaagcgacatgctgcggctgagatctttgctaaccctgatgttatt

SEQ ID NO: 151318 - DNA, 453 bp, Arabidopsis thaliana columbia
gccatttttatttttctctttcttctctcatttttattttcttttcttttttttcacctttttttttttcctttttttttctttcttcttcttcttacttgattttgaaccctagcttaaggggaattttctcgggaaacaaaagagatatttttatcgcagtgagaaagaaacacaaaaaatgcagaatcaaaggcttattaagcagcaacaacaacaacaacaacagcaacatcaacaagctatgattcaacaagctatgatgcaacaacatccttctctttatcatcctggtgttatggctcctcctcagatggagcctttaccaagtggaaaccttcctcctggttttgatccaactacttgccgtagtgtgtatgctggaaacattcatacgcaggtcacagagattcttcttcaagagatttttgcaagtactggtcctattgaaag

SEQ ID NO: 151319 - DNA, 374 bp, Arabidopsis thaliana columbia
ctgaggcagggaagcatttaagggttgttgtactttttgggcttggtcatgttgctgttaagattggcaaagcttttggcttgaaagttactgtcattagttcttcttctacgaaagcagaggaagccattaatcatcttggtgctgattcgtttcttgtcacaactgatcctcagaaaatgaaagctgcaattggaacaatggactacattatcgatacgatatcagcagtacatgctctgtatccgttgctcggtttactcaaagtcaacggaaagctcattgctttaggcttacctgagaagcctctcgagctaccaatgttcccttcttgttctcggaaggaaaatggttggaggaagtgacgtgggagg

SEQ ID NO: 151320 - DNA, 434 bp, Arabidopsis thaliana columbia
aacaaactcaatcccagcctcctcctcctccttcttctcccttattcccttttcgtttaatcccccaattttttcaattaatccctccttttctcctcttaatctgaatccgaagcaacgcataatccataacaaagtctggaaaatttcttccgggataataaagagatccattaggagtaaattatctgacaagagaatacaaagggcaatttcattttagttgaattagggatttgggctcgtcatggctcctggaggcagtgctttgaaagaagtcatggaatctaattcaacgggaatggattacgaggttaaaacggcaaaagtggaagttaataataacaaacctacaaagccagggagtgcagggattggaaaatatgggatccattcgaacaatggtgtttacgagcttcttgaatgtcccgtct

SEQ ID NO: 151321 - DNA, 274 bp, Arabidopsis thaliana columbia
gcctccttctctctctctgttagctgcgtttttcttctagctagctctctgcttgtactctagaataatggaggaagagcttcgtgttcggctgaatgaccatcaagtgtcaaaggttttccctgtgaagcccaaatcaacggcgaaacctgtttccgaatcggagactccggaatcgaggtactggtcctccttcaaaaatcattccacacctaatctcgtctcctccgtagccgctttggctttctctccggtccaccctcactccttggcc

SEQ ID NO: 151322 - DNA, 409 bp, Arabidopsis thaliana columbia
ctcctcttctctctatcacactactactactttctttatggctgtctccactagaggctcccgcttattcttcttcactacacgtgttcttctctccacccatatccatgcaagagacagttacttctttggaaaattccacagagaatcccccaaagatcaaaaccttaacagtttcatccctctggagactagcgagaaaaccacagtagaagaatccgtcctcaacaagaaagagcaagaacaagatcctacctttgtccccgagtccggaaacgggtatggcttgtatggtcacgagaccacatacaacaacaacatcgtcatcaaagaagagttcaacaacaacaacaagaacgatgtaaaagtcaacagcaagacttttttcacttcaagcctgagcgagacc

SEQ ID NO: 151323 - DNA, 173 bp, Arabidopsis thaliana columbia
gcccctaagggttgtggtttcttttggaacacgagcacggtggtgagaaaacagcaaaagctgatggcactgaagcacctgccataaaatcttcttatacaaaagcagaggatgccattaatcatcttggcgctgattcggttcttggccaaactgatcctcagaaaatgaaa

SEQ ID NO: 151324 - DNA, 439 bp, Arabidopsis thaliana columbia
ttctgccacgaggcggtcccaagtttcacaacctatttctaagaaagtcaagccggcgaataagcggccaacgatgtcgacaagcggtttctccggcggaacgacaaaggagttgacttggaagtgcgtagaaggttgtggagcttgctgtaagattgcaaaggacttttcctttgcaacacctgacgaaatcttcgacaaccctgatgatgttgagctgtatcgaagcatgatcggagatgatggatggtgtctaaactacgacaaagctacacgcaaatgctctatttatgctgatcgtccatatttttgtcgggttgagccagaggttttcaagtcactctacgggattgaagaaaagaaattcaacaaggaagctgtcagctgctgcattgacacaattaagacgatatacggccctgattcaaagaattggata

SEQ ID NO: 151325 - DNA, 386 bp, Arabidopsis thaliana columbia
atttgaagaaaccgagagagaaagtgagcggattctttatttttccgggaaaatctccgagatccgaccggaaatcaccgacggttgtcaccgtccagccgtcttctcccagattcccgatcagcacacctactgctggagctcaacgtaagatcgggatcgctgtcgatctaagcgacgagagtgcgtacgcagttcaatgggctgttcagaactatctccgatcaggtgacgccgttgttctccttcatgttcaaccgacgagtgtactttacggcgccgattggggcgctatggatttgtcgccgcagtgggatccaaataacgaagagtcgcagaggaagcttgaggacgatttcgacattgtcacttataagaaagcgagc

SEQ ID NO: 151326 - DNA, 263 bp, Arabidopsis thaliana columbia
ctgaggcaaggaagcatttaagggttgttttacttgttgggcttggtcatgttgctgttaagattggtaaagcttttggtttgaaagttactgtcattagttcttcttctacgaaagcagaggaagccattaatcatcttggtgctgattcgtttcttgtcacaactgatcctcagaaaatgaaggctgcaattggaacaatggactacattatcgatacgatatcagcagtacatgctctgtatccgttgctcggtttactc

SEQ ID NO: 151327 - DNA, 370 bp, Arabidopsis thaliana columbia
ggaaccctacgccaatatgcattatgtttcaatttttggaggcatagtgaacaatacattgagaccaaccgtgccaaactactgtgacccggagtggagaatgctgatggagcagtgttgggctcctgacccattagttcgacctgcgttcccggaaatagccagacgtctccgcaccatgttctgctctgcggtccacacaaaaccacacgctgtcaaccaccaaatgcacaagtaatctatcaatttattatcgctggtacgtaaatcgtaaaaaagggttggtgtttaaaatatttccttgctggttttttcggatctgagtgctacagtttcaaggatgggtgtggatttgtccaagaaaccctaa

SEQ ID NO: 151328 - DNA, 465 bp, Arabidopsis thaliana columbia
ctctctcagacgagatttcctcttcatctcaagatttatggctgtatccaaggtagtggttccagagtctgtgctaaagaagatcaagaggcaagaggaatgggcattggccaagaaagatgaagctgtagctgctaagaagaagagtgttgaggcccgcaagcttatcttcaagagagctgagcagtatgccaaagaatacgctgagaaggataacgagttgatccgattgaagcgggaggctaagttgaaaggaggtttctacgttgaccctgaggctaagttgctctttatcattcgtatccgtggtatcaatgccattgacccaaaaaccaagaagattctgcagctcctgcgtttgagacagatcttcaatggtgtgtttcttaaggtgaacaaggcaacagttaacatgctgcgccgagttgaaccatacgtgacttacggatacccaaacttgaagag

SEQ ID NO: 151329 - DNA, 446 bp, Arabidopsis thaliana columbia
gagatagagagatagagttatggcttagtctatgatgatccgaaacgcagcttcgaagcgaggaatgactccgatctccggtcggttcggtggtttgagatctatgtcttcatggtggaagagcgttgagcctgctcctaaagatccgatcctcggagttaccgaagcttttctcgctgatcctagtcctgaaaaagttaatgttggtgtgggagcatatcgtgatgataatgggaagcctgttgtcttggaatgtgtcagagaagctgagaaaaggcttgctgggagcactttcatggagtaccttcctatgggaggaagtgccaaaatggtggacctaacattgaagcttgcctatggggacaatagtgaatttatcaaagattataaaattgctgcagttcagactctgtctgccactggaacctggcggcttttttcagact

SEQ ID NO: 151330 - DNA, 131 bp, Arabidopsis thaliana columbia
gattccaaacaagagactagaaacatccgccaccagctcggtttattgatggagcggatctaaagaagtggtctttctacagagcatttatcggagagtgcgcagcctctctcctcttattatacatcacc

SEQ ID NO: 151331 - DNA, 436 bp, Arabidopsis thaliana columbia
  unsure (1)..(436): unsure at all n locations
naacaacataacttaaccgcttaacttggagctgttcttcttttcctaaagggccgcctcaacaatgggtgtctcctcccctgccttcgccggtaaggccgtcaagctttcccccgcggcatctgaagtccttggaagcggccgtgtgacaatgaggaagactgttgccaacccacagggcccatcaggcagcccatgccacggatctgaccgcgtcaagtactcgggtccattctctggcgaatcaccgagctaccttaccggagagttccccggagactacggatgggacaccgccggactttcagctgaccccgagacattcgcaaggaaccgagaactagaagttatccacagcaggtgggccatgctcggagccctaagctgcgtcttacctgagcttttggctagaaacggagtcaagttcggagaggcg

SEQ ID NO: 151332 - DNA, 451 bp, Arabidopsis thaliana columbia
atagtcgtctcgtctcaccgtcaccatcaccgtcttcttcttccattgacaggatcttgtttagattctgcaatggctttcaggcaaactttatctataaggtccaggcttttcgctcgtcgtaaccaaccagtttatcatattatccctcgtgagagtgatcatgaaagggattcattctgtcaagaaacatctcagagaagttaccatagctttcttcaccaaagatccgttaacaattctgatttctccaaagtttctggaggaagcttacatttgcctcttgctcccacgtctggttttgctttctatcgttatatgtcaagtgcacctggtgttggttcagagaagattggtgtgatgtctgacattgcagaagtcataaccgactcaacattgcaagatgtgccagctcaagctgctgctgctgtcagtgaagttacacttgcag

SEQ ID NO: 151333 - DNA, 445 bp, Arabidopsis thaliana columbia
ccggttagctgttttaaacgtagccgataaccgtttctctttttcaattccaaaatcattaaccaatctctctagcttaatgcatttagatctccgtaacaacttaatctccggtgtaatcccgtcggacgtcggaagattaaaaatgctcagccgtgcgttattatccggtaaccgaataaccggtcggatcccagaatcattaaccaatatctaccggttagctgacgtggatctctccggtaaccaactctacggtacaatcccaccgtctctaggacgtatgtcggtactagccacacttaacctcgacggaaacaaaatctccggcgagatacctcaaactctgatgacgtcgtcggtgatgaatctgaatttgagccggaacttgctacaagggaagatacctgaagggtttggaccaaggtcttacttcacagttctt

SEQ ID NO: 151334 - DNA, 353 bp, Arabidopsis thaliana columbia
gatcgttaaaaagataatttatgcaacttttgtcctaactataaattcttttgttaaattggaatctttaaaagaggtctatggactcatatggatatttgtccctatattttctcttgtattgggaatcataacaggtgtactagtaattgtgtggttagaaagagaaatatctgcagggatacaacaacgtattggacctgaatacgccggcccgttgggaattcttcaagctctagccgatgggacaaaactacttttcaaagaaaaatcttcgtccatctagaggaaatactcctttatttagtattggaccatctatagcagttatctctattttactaagtttttca

SEQ ID NO: 151335 - DNA, 331 bp, Arabidopsis thaliana columbia
ggaagctgtgatctggagagggccaccttataacgtccttatcaagcagttcttaaaagacgggtactgtggagagatggatggcctcatttttgatgccccacctagaacctcagatgaacacatattcatcgcacagtgccttctacccacggtgatcgacggagccatcatttgcacgacaccgcaagaagtctgcttgagtgatgtcagaaaagaagtgagctcttgcaggaatgtcggagtgcccgtgcttggagtagtaaagaacatgagtggcttatctcagccgtagtaggatgtcaagttcatgaagctggcgacagagacc

SEQ ID NO: 151336 - DNA, 433 bp, Arabidopsis thaliana columbia
aaaaaaccttttcctctttgaaggagacatcatcgaggctatggaggatcaaagggattcagacttttacgcttcctgatcttccttacgattatggcgcattggaaccggccattagtggagagatcatgcagattcatcaccagaagcatcaccaggcttatgttactaattacaataatgctcttgagcagcttgatcaagctgtgaacaagggagatgcttccactgttgttaagttgcagagcgccatcaaattcaacggcggaggtcatgtcaaccattcgattttctggaagaaccttgctccttccagtgaaggtggtggagagccaccaaaaggatctcttggtagtgccattgacgctcactttggctcccttgaaggtctggtgaaaaagatgagtgctgagggtgctgcagtgcaaggctc

SEQ ID NO: 151337 - DNA, 444 bp, Arabidopsis thaliana columbia
gccaaccagaggattgctaggatttcagcttatctttctcctcagatggaggccaagaactgtgtaatcggacgggaaaactggggagctaaaggtggtaatccaggattcaaagtagcaattcttggagctgcaggtggaattggacaatctttatctttgctgatgaagatgaaccctcttgtctctttacttcatctctacgatgttgtcaatgctcctggcgtcactgctgacgtcagtcatatggacactggagctgttgtccgcgggttcttgggagcgaagcatcttgaggacgcgctaacgggtatggatcttggatcataccagccggtataccgaggaaaccagggatgacccgcgatgatctgtttaaaatcaatgctgggattgttaaaacactatgtgaaggtgtagcaaaatgttgtcctaatgctattg

SEQ ID NO: 151338 - DNA, 463 bp, Arabidopsis thaliana columbia
gtccggaaagatttcgaggctgaccatggaaaaaagatgttaaaacttttctattgccaccagaacgaagatgggggatggggattacacatcgaaagcaagagtgttatgttctgcaccgtgttgaattacatatgtttacgtatgcttggagaaaatcctgaacaagacgcatgcaaacgagctagacaatggattcttgaccgcggtggagtgatctttattccttcttgggggaaattttggctctcgatacttggagtctatgattggtctggaactaatccgacgccaccagaactcttgatgctgccttcttttcttccaatacatccagggaaaattttgtgttatagccggatggttagtatacctatgtcgtatctatatgggaagaggtttgttggtccaattacacctcttattttactcttgcgcgaagaactttacttggaaccttatg

SEQ ID NO: 151339 - DNA, 363 bp, Arabidopsis thaliana columbia
agccagctcaaaggacccacacccaccacgaagactagccaaaccggcgtaacatttttgaaagctcccaacctaaacggttactgtgagagctggagagtcaacgtggagcttaacaacataagggactttaaggtggttccacaggaatgtgtatggttcgtccaaaagtacatgacctcatctcaatacgaagatgacgtggagagagccgtcgatgaagccatcctctacctcggaaaaacttgttgcgagaagaagacatgcgatggcatggatgcttggatctttgacattgatgacactcttctctcaaccattccttaccacaagagcaacggttgtttcggtggtgagcaactg

SEQ ID NO: 151340 - DNA, 439 bp, Arabidopsis thaliana columbia
ctcaccgccaattgtttgaggcacaacaggatgatgatgattcatatgatgatgaggttagtgttgaagaaactccagtgataggattctggagcggatttgcttggctcgttgggatgacaatagtcatcgcattgctatcagagtatgttgtggacacgatcgaggatgcatcggactcatggggactatcagtgagtttcataagcatcatattgcttcccattgttgggaatgcggctgagcatgctggagccatcattttcgcattcaagaacaagctcgacatatctctaggggttgcgttgggctctgcaactcagatttctttgttcgtggtcccattgagtgttatcgttgcgtggatcctgggaataaaaatggatctcaactttaacatccttgaaactagctctctagctttggccattatcatcac

SEQ ID NO: 151341 - DNA, 440 bp, Arabidopsis thaliana columbia
tcaaagtgtaacagaagatgatttgaagtcagtttttggtcaatttggtgaactagttcatgtgaaaatacccgcaggaaaacgttgcggatttgttcaatacgccaatagggcatgtgctgagcaagcactttctgtgttgaacggaacacaacttgggggacaaagcattcgtctttcatggggtcgcagtccttccaacaaacagactcaacctgatcaagcccagtatggtggtggtggaggatactatgggtatcctcctcaaggatatgaagcatacggatatgcaccttcttctcaggaccctaacgcctactacggtggttatgctgggggcggctatggaaactaccagcagcctggtggttaccagcagcaacagcagtgaagcatgatgtgtaagtcgcgatcgagctgaagttgtagatagctgttac

SEQ ID NO: 151342 - DNA, 439 bp, Arabidopsis thaliana columbia
gcgacggctttcgctcccactaagctcactgccacttttcctctgcatggatcccatgagaatcgtctcttgctcccgatccgataggctcctccttcttctttcctcggatccacccgttccctctcccttcgcagactcaatcactccaacgccacccgtcgatctcccgtcgtctctgtccaggaagttgtcaaggagaagcaatccaccaataataccagcctgttgataaccaaagaggaaggattggagttgtatgaagatatgatactaggtagatctttcgaagacatgtgtgctcaaatgtattaccgaggcaagatgtttggttttgttcacttgtacaaaggccaagaggctggttctactggctgtatcaagctccttaccaagactgactctgtcgttagtacctaccgtgaccatgttcatgccc

SEQ ID NO: 151343 - DNA, 418 bp, Arabidopsis thaliana columbia
ctaaagggaaacatcaagcaactattgtttgtgttataatggctaggggacaatggctcgagggggtcccagcttttggagaccggtccccttccaaatatcaaatggatttgcccgactgctccttctcaaccaataagtttatttggtggttttccctccacagcttggtttgatgttgtggacatcaatgaagatggacctgatgatatggaaggattggatgtggctgctgcacatgttgcaaatctgttgtcgaatgagcctgctgacattaaatcaggtgttggaggattcagcatgggtgcggcgacatctctatattctgcaactttgttttgctctcgggaaatatggaaatggcaatccataccctattaatataagcgcattcataggcttaagcggctggctttct

SEQ ID NO: 151344 - DNA, 452 bp, Arabidopsis thaliana columbia
aacagattcgcatcaaaccctaagaaactgaagattaggccgttcctgatgaaaggacatgaacgtccattgacgtttctgaggtacaacagagaaagagatctgcttttctcctgcgccaaggaccacacacccaccctctggtttgccgataacggcgagcgccttggaacttaccgtggtcacaacggtgctgtttggtgctgtgatgtctcccgagactcgtcaagattgatcactggtagtgctgatcagactgcaaagctgtgggatgtaaaatctggaaaagaattgttcactttcaagtttaatgcccctacgaggtctgtggatttcgctgttggagatcgtcttgcagtgattaccactgatcacttcgtggaccgtaccgctgctattcatgtgaagcgtattgcggaagatcctgaggaacaggatgctgagtctgtgct

SEQ ID NO: 151345 - DNA, 216 bp, Arabidopsis thaliana columbia
  unsure (1)..(216): unsure at all n locations
cacacttgaaaaaaaaacatcttaattataatancttctttgagagacataaanatnaaggctagtaagttttctatactgtggaagaattacacttctctctctcaatgctggtgcaatttagcaactctagaaaaaatccaaatagaccctattaagcgtctctcttcccaaaactaccaaaagcgttggaactgtatttacaaatactgttta

SEQ ID NO: 151346 - DNA, 384 bp, Arabidopsis thaliana columbia
cttcatcactcatcaccagctacgcatctttttcttctgctagatcttctctcgtttgtagaggtcctacgatcggaatatgcgagatccgatcgattaattctgtcaatcacacaaaaaccgaaaaccaaaaaaaaaccatggcgtttgagaagatcaaggtggcaaatcccatcgtcgagatggatggtgatgaaatgaccagggttatttggaagtctatcaaggataagcttattactccttttgtggagttggatatcaagtacttcgaccttggtcttcctcaccgtgatgctacggatgacaaagttactattgaaagtgcttaaactactaagaagttcaatgtggcgatcaagtgtgccaccatcactccagatg

SEQ ID NO: 151347 - DNA, 449 bp, Arabidopsis thaliana columbia
aatggactgagtctccaggatgggcagccagagtcttagttatttggctttttaaggaatggggaggcggcaaaaggaaccccgtaagggttcctttagaaaccttaacccgaccgcaaatttggtttctggatgaacctactagtggtttggacagtgcttctgctttctttgtgattcaagcgctaaggaatatcgctcgagatggtggtagaaccgttgtttcatcgattcatcaacctagtagcgaagtttttgctctctttgatgatctttttttgctctctagtggtgagactgtttattttggtgaatccaagtttgctgttgagttctttgctgaagcggagtttccttgcccgaagaaacggaatccttctgatcatttcctaagatgtatcaactcagactttgataccgtacagctacactcaaaggatctcaaagga

SEQ ID NO: 151348 - DNA, 446 bp, Arabidopsis thaliana columbia
cgaaggcggttaaaaaaggagacactatcttggttttacattacctcttcactggtagtgaaacaacttcagtttggcttgaggttgaagaagttaaaggagatgatgtcatttgtatttcaaggaatgctgctactctgggtggtccgttattcacattgcacgtctctcaagttcacattgatatgccaaccctaactgagaaggataaggaggttataagtacatggggagttcagaataagatcgactttctctcattatcttattgtcgacatgcagaagatgttcgccaggcccgtgagttgcttaacagttgtggtgacctctctcaaacacaaatatttgcgaagattgagaatgaagagggactaacccactttgacgaaattctacaagaagcagatggcattattctttctcgtgggaatttgggtatcgatcta

SEQ ID NO: 151349 - DNA, 393 bp, Arabidopsis thaliana columbia
atttttgtcgccgaaaccctaaatctggacctcattccttgaaccatggctgaaggactcgggtggaaaggcacaatgtgtgcccacactgatatggtcaccgccattgctacaccggtcgataactccgacgtgattgtaacttcgtcgcgtgacaaatcaatcatcctctggaaactcacaaaggaagacaagtcatacggtgttgctcagcggaggatgactggtcactctcacttcgttcaagacgttgttctctcctccgatggacaattcgctctctccggatcttgggacggagagcttcgtctctgggatctcgctaccggagaatctactcgtcgtttcgttggtcacacgaaagatgttctctctgttgctttctctaccgat

SEQ ID NO: 151350 - DNA, 445 bp, Arabidopsis thaliana columbia
ggcaggcaagcctcctgttcaacctttgagcacttttcttattcagagaatttcctctatatgggggaatcaatgggagataggtcttacaagcctaatcctcgtttggctcgagtgctggacatcctcttcatactgcaagctgaacatgaaatgaactgctctactgctgctgctaggcacctttcctctagtggtggtgatgtgtatactgctgtttcgggaggtgttggagccatttatggtccccttcatggtggtgcagttgaggctacgattaacatgttatcagagattgggactgttgaaaatattccagagttcattgaaagcgtgaagaataagaagaggaggttgtcgggttttggacaccgcatttacaaaaactacgatcccagaggaaaagtcgttaagaaactggcggatgaagtgttctccattcttg

SEQ ID NO: 151351 - DNA, 452 bp, Arabidopsis thaliana columbia
ctccgattggaaagaagaagcttgagtctctctctttccttcctgaccttaccgattccgagggggctatggaagttgactaccttatccgcaacaagtggattccttgtgttgaattcgagttggagcacggatttgtgtaccgtgagcacggtaactcacccggatactatgatggacggtactggacaatgtggaagcttcccttgttcggttgcaccgactccgctcaagtgttgaaggaagtggaagagtgcatgaaggagtaccccaatgccttcattaggatcatcggattcgacaacacccgtcaagtccagtgcatcagtttcattgcctacaagccaccaagcttcaccggttaatttccctttgcttttgtgtaaacctcaaaactttatcccccatctttgattttatccctagtttatctgcttttttcttctttcttg

SEQ ID NO: 151352 - DNA, 435 bp, Arabidopsis thaliana columbia
gttgatcagaagtttcaagtcacagagaattcattttcagcaatagctgctgctgagcagacgagtgagcaatgctggttgtgctataatgaaaaaccggtatgttttaaccggtgccacgtgggttacgggtgcgtttaacagagtgagtaaagctgctgaagaagttggacaaaaggcgaaagagaaagttggtttggctgaggaagaagaagaagagaagaagaaagtggttgatgaagttgctatagttcatctgactgaatcaccaaaggctttagaccaatcagaacaagattcaaaactccctgaatcaaaatcacagccacacatggagcttaacgcaagtgttgtttgagctcaaccttgagatacgtataaagaaacttctccaaacgttttttggaacaatgaatctgactctttagacaaggc

SEQ ID NO: 151353 - DNA, 447 bp, Arabidopsis thaliana columbia
tgtttcgatatcttcaagtctagtttttttttttttcaatcgagtttttgatttagatcacaaatcgacagatctgtttaggcgtttttctgggtatcgattcttttcaacatccatgccttaatttcaagttttccccaattttcttaaccctaatatttatgtgttcatcagatctgcaaatttatttagggcttttgttcctcgtgctgaaagttaatcgattgtttgaatttggactcttgatttcatgtttttagccgcggattgaaaaatctagggttaggttttcgaatttggggttttttttttatttttaatatctgtttaaagtttgactttttgactaaaaattaaaaaattacactaccctagattgctaaatcaattcaggttgttaaaataaatgggatttaagcgaccttatgatgctgaaaagatgcaaaa

SEQ ID NO: 151354 - DNA, 459 bp, Arabidopsis thaliana columbia
  unsure (1)..(459): unsure at all n locations
ntccgcaaaaccacttgggttaggacatggccactggtctggtttttttcaactctcctcctaacgactgttttggctaaagacctctgccttaaagatgacaaaactcccctcctcaagatcaagaaatccctaaacaacccttaccacctcgcctcatgggatcccaaaaccgactgttgctcttggtactgcctcgagtgcggcgacgctactgtcaaccaccgtgtcacttccctaatcatacaagacggcgagatctccggtcagatcccccctgaagtcggtgacttaccgtatcttacatcccttatcttccgcanactcactaacctcactggtcacatccaacccactatcgccaagctcaagaacctcacttttctcagactaagctggaccaatctcaccggtccggttcctgagtttctgagtcagctcaagaatcttgagtacatt

SEQ ID NO: 151355 - DNA, 454 bp, Arabidopsis thaliana columbia
accacacaaaattaaacacagcctctgcctaactctccgtttttccggccactgcgccatctccggggtcgagttcgtcgtacttaatggaactatgaactctcatgatatcgatgatcagttagaagcagatgtttacagtaactggccttctcgaaatgattcttcaacagggaggagaaatcgaaactcgtgtagatcgaaacactcagagactgagcaacgaagaagaagcataatcaatgaaagatttcagagtttaatggatattatacctcagaatcagaatgatcagaaacgagataaagcttctttcttgttggaggttatagagtatattcactttcttcaagaaaaagttcacatgtatgaagattctcaccaaatgtggtatcaatccccaaccaaattgattccttggagaaatagtcatgggtctgttgcggaggaaaat

SEQ ID NO: 151356 - DNA, 435 bp, Arabidopsis thaliana columbia
ggattcttcagtgaggattgtaattgtcggatcttcagacaccgcttgtgaggcccaagaggaagaagacttgggttgattactttgtcaagttcagatggatcattgtcatcttcatcgtccttccattctcagccacattctacttcctcatctacctcggggacatgtggtcagagtccaagtcctttgagaaacgtcagaaggaacacgacgagaatgtcaagaaagtcatcaaaaggcttaagggtagggatgcttccaaggacgggcttgtctgcactgctcgtaagccctggatcgctgttggaatgaggaacgttgactacaagagagcccggcatttcgaggttgacttgggggagttccgtaacatccttgagatcaacaaggagaagatgactgctagagtggagcctcttgttaacatgggac

SEQ ID NO: 151357 - DNA, 448 bp, Arabidopsis thaliana columbia
ctcaaacagacaatttaattccaaaagatttaaactatcaaaagatgaatgccacaaagtttggtgtgcttctcgtgattggcattttgtgtgccattgtcaccgcaaggcaggtcgaagaagtgtccaaagagaccaaattaggcacctctcttccaaaatctactaacaaaggcattggagctcagctttctgctgctggtcttacttacagcggcagcagtgtctctagctctgctagtgcttttaacaatcccaaaggtccaggggccagtgcatccgaaagtggctacacaagtaccatcggacaagtcattgccaagggtcgcaaggcaagagtttcttctgcaagtgcttctgccgctacaggtgaggctgcagctgcagtgactcgcaaagctgctgctgcacgtgcaaagggtaaggtagcttccgcatcaagggtgaa

SEQ ID NO: 151358 - DNA, 445 bp, Arabidopsis thaliana columbia
gaagaatcaatactcaaatctcaatcatctctctttcttatcttcttctccgatatgaagctcgccgctagcctcaaccgcctgagccccaaacgtctcttccgtaccaaatcaaaagcttccgtctccagatctgagccttcttccttcagctccaatgcttcttcctcttcctctgatggatcttacggtaacctcaaacaaggtccaaccgcgactccgatcagtgttctccctcaaaactccggcgatttttacactgagcttgttcaagcttttaaactgatcgatcgtgatgacgacggtgttgtttccagaggagatctcgcggcgttgattagcaggttaagtcatgaaccaccgagtcaagaagaggtgagtttgatgctaagagaagtagacggcggagacggtggttgtatcagccttgaagatcttgctagcc

SEQ ID NO: 151359 - DNA, 451 bp, Arabidopsis thaliana columbia
catttctctaccccaccttctgctctgctttcgtattctcagtgtacctcgccatggaaccgggcaccatggccagcttggacgatgagcatcgtcattcctcattctcggctaagatttgcaaagtctgtggcgatgaggtcaaagacgatgacaatggtcagacttttgtggcgtgtcacgtgtgcgtttacccggtttgcaaaccttgctatgaatatgagcgtagcaacggttacaaatgttgccctcaatgcaacactctttacaaacgccacaaaggctctccaaaaatcgccggagatgaagaaaacaatggtcctgatgattcagatgatgagttgaatatcaaatatcgccaggatggttcctccattcaccagaattttgcctatggatcggaaaatggagactacaacagttagcagcaatggcgtccaaatggtcgagc

SEQ ID NO: 151360 - DNA, 265 bp, Arabidopsis thaliana columbia
  unsure (1)..(265): unsure at all n locations
atttcacatnctctnctctctcgatataatctatttctttctcggtctcatttccgcaaatgggctgccaggaaatccaaattcggattcaacggtttcggaagaatcggccgtttggttgctagagttgttcttcagagggatgatgttgagctcgtcgctgttaacgatcctttcatcaccaccgagtacatgacatacatgtttaagtatgacagtgttcacggtcagtggaagcaccatgagctaaaggtgaaggatgaca

SEQ ID NO: 151361 - DNA, 407 bp, Arabidopsis thaliana columbia
ctcttcgctttttcttctctctttctttctcttgtttgtagtgtgatcttacgaagctttgagtagagaaaaagcatatacggggtgtctttcttaatcgactgataagtccttaggatcagatggaacaaatgggtggctactcaaaacaacaaggtccatttttagtttgattaaaggatttggatctgagcttacttcatcaactttgtcggaatatacatttgctttgtgtggatttggaagttgtccctgaatggcgtccgaggatttgaatattgttgcggaatcaaaaaaaggggaagagaatgtttttgttgataattccaaggacatgaatagacctgagaatcttgacttatctactgagaaaactgatactgccaatgagaatggtccaaaagatg

SEQ ID NO: 151362 - DNA, 456 bp, Arabidopsis thaliana columbia
acactctctctcttctctatcaacactttttttcatctctcgccggaaaaacccataaccacagcaatggccaccgaaacccaaatccgaatcggagtaatgggttgcgccgatatcgctcgaaaagtctctcgagcaatccacctcgctcccaacgccacaatctccggcgtagcaagccggtctttagaaaaagccaaagcctttgccaccgccaataactacccagaatcaaccaaaatccacggctcttacgaatctcttctcgaagatccagagatcgatgcgctctatgttcctctccccactagtctccacgttgagtgggctattaaagcagctgagaaagggaaacatatccttttggagaagcctgttgctatgaacgtaactgagtttgataagattgttgatgcttgtgaagctaatggtgttcagattatggatggtactatg

SEQ ID NO: 151363 - DNA, 456 bp, Arabidopsis thaliana columbia
cttaaacgtttaactttgggctgcactactcaattttttttgttcgcctcaacaatggctctctgctcgcgtgccttcgccggtaaggccgccaagctttcccccgcggcatctgaagtccttggaagcggccgcgtgacaatgaggaagactgtcgccaagccaaagggcccatcaggcatcccatggtacggatctgaccgagtcaagtacttgagtccattctctggcgaatcaccgagctaccttaccggagagttccccggagactacggatgggacaccgccggactgtcagctgaccccgagacattcgcaaggaaccgcgaactagaagttatccacagcacgtgggccatgctcggagccctaggctgcgtctttcctgagctcttggctagaaacggagtcaaattcggagaggcagtttggttcaaggccggctcacagatcttc

SEQ ID NO: 151364 - DNA, 393 bp, Arabidopsis thaliana columbia
ttgaaaagaatcagggctgtatgcacatgacttgttctctgtcttgtaaatatgaattttgttggctatgtcttggtgcatggatggatcacggtgaaagaactggtggtttttatgcttgtaaccgttatgaggtggccaagcaagaaggacagtatgatgagacagagaggaggagagagatggccaaaaattcgctagagagatacacacactattatgaacgctgggcaagcaatcaaacgtcgaggcaaaaggctatggctgatctgcagcaagcgcagatgcagaatctagagaagcttagtgataaacagtgcacaccaaagtctcagctcaaattcattttagaagcttagcttcagatcatcgaatgtaggcgagtcttgaaat

SEQ ID NO: 151365 - DNA, 269 bp, Arabidopsis thaliana columbia
ttaaaaaccttggctggcacccaacaaaattacggttttaagctgagactttctacttctgttacacaaaaatacccaatgagtaaagcttcgaggctcctatacattacgagaggaatactggtgctcttgcttcgttcttattcaccgaagaagaatggtgaccacaatcaccaccatggtggtcacaatcaacatcaccgtttaaaactccagtcttctttcaattacaaacccacttcgtacgatccaactccgtttgtatctct

SEQ ID NO: 151366 - DNA, 344 bp, Arabidopsis thaliana columbia
agagaatcagctttcagagaaaaaagtattctctacttagagagttatggcggagagtggtggacgaaggatcggagtggcggtggatttctcggactgcagtaagaaggctctgagctgggcgatcgataacgtggttcgcgacagagatcatctgaccctaatcactattgctcacgatatgaataccaaggaaggcaaaatcatcttttggaaaaccgtggaacaacctttaattccaataagggaatcttttgcccctgttgtaataaaaaagtttccttggaagccaattcctgaacccctggccattgccattcctgccgttaggaaaaaaccatttc

SEQ ID NO: 151367 - DNA, 445 bp, Arabidopsis thaliana columbia
tccgctgtgggggtgatccgtcggttacttaaacggaatctagtttctaaccgcctgtccgaaatggtcagcttaaggccaacctaagttccgtattccccaacccccgccaaaggtggtcattctgcggattcttccatgggattgcgtcgaaaaggagctcatcgacctttgcaaacgattcggcaagatcgtcaataccaagagcaatgtcggcgccaatcgcaatcaagctttcgtcgaatttgctgacttgaatcaagctatatcaatggtttcgtattatgcttcatcttcagagcccgcacagattcgtgggaaaactgtctatattcagtactctaatcgccatgagattgttaacaatcagagtcctggagatgtccctggaaatgtcctcttggttacctttgaaggagtggaatctcacgaagtcagcatcgat

SEQ ID NO: 151368 - DNA, 398 bp, Arabidopsis thaliana columbia
  unsure (1)..(398): unsure at all n locations
gaaagaagctagctagggccaggtattggatgtcattggccgttgacatgtcttccaaacaaccaaccaaagactttttctcctttccagccctctctctatctctcgctgggatattccggaatgcatcctccggcagcaccaaccctgaggaggatttcctgagcagaagagtagttgacgatgaggatcgcactgtggagatgagcagcgagaactcatgacccacgagatccagatcagaggaggatttggagggtgaggatcacgacgatgaggaggaggaagaggaggacggcgcatctggaaacaagggcactaataagagaaagaggaagaagtntcatcgtcacaccaccgatcagatcagacacatggaagcgctattcaaagagaca

SEQ ID NO: 151369 - DNA, 453 bp, Arabidopsis thaliana columbia
aattatataatttgctccaatcttctctttatctttccaccaaacccaagttcgcaagatttcaaggtgtctaacaaagttcttcacttgtactctcaaagctttcatctttcattcaactacttaagctccaagtatggcaggatccgcaccggaaggaacacaatttgatacgcgtcagtttgaccagaggctgaatgaagttctcgatggacaggatgagttcttcacctcatatgatgaggtccatgagagctttgatgccatgggtttgcaagagaatcttcttaggggtatctatgcttacggtttcgaaaagccttctgctattcagcaaagaggaattgtacccttttgcaagggtcttgatgtgatccagcaggcacagtctggtactggaaaaaccgccactttctgctctggtgtcttgcagcagcttgactatgcccttct

SEQ ID NO: 151370 - DNA, 456 bp, Arabidopsis thaliana columbia
gaaacaatggtgtttgtgaagtcctccaaatcgattgctttcttcaagaggtaccaagtgaagttcaggagaaggagagatgggaagactgattacagggcaaggatccgtcttatcaatcaagacaagaacaagtacaacacccctaagtaccgttttgttgttcgatttaccaacaaagacattgtggcacagattgtatctgcaagcatagctggtgacattgttaaagcttcggcttacgcacatgagcttcctcagtatggactcactgttggtcttaccaactatgctgcagcttactgtactggccttcttttggctcgtcgtgttctgaaaatgctggaaatggatgatgagtacgagggaaacgtagaggccactggagaggacttttctgtggaaccaactgattccagaagacctttccgtgctcttcttgatgttggacttatc

SEQ ID NO: 151371 - DNA, 323 bp, Arabidopsis thaliana columbia
  unsure (1)..(323): unsure at all n locations
aaaagagatagctatagagacacacagtttttncctgnttacacanngaaagcactgcaaaaggagtgttatccagatggtaggaacgtaatttgcggccactttgctaattgtgagctacgttcaatggtcatcgccgatagaagtatgttgggatcggacagatcggtaactgattatccaagaaagattccaaaggggattgatcttccaagtgatgctgttgtagatgataacaacattaaagttgagtgattctttattatggacacttcattgtcttcaaccttatctatttattcattacacaaacacacttcttt

SEQ ID NO: 151372 - DNA, 406 bp, Arabidopsis thaliana columbia
ggagctttggccggtggatttaggaacattttgactctcccaccctacagaatgagttcggcatcgtccaaagctgaaaaggaatatatccaaatcgatgattttggtcagtctagcagaaaagatctttacagtaagaaagcaagcaacaccgagacaagaccaagttttatgcctcctcatccatcttctagtgatgaagacgactcagacatgcaacatccaggaagaacagaaacaaaatcagattccttatatagtcattcccgtgtcaaccatgatgactcggaggaagaaaaactcccaacacggtcttcttcaagaattcaagagaggagtcataagccatcaacaggaataagggttcagaagagaacgaacttcaagatgccagtttcagcatcgt

SEQ ID NO: 151373 - DNA, 446 bp, Arabidopsis thaliana columbia
  unsure (1)..(446): unsure at all n locations
ggctcctgatgttccaaaagcacaggacttacctgtatgtttgtggggagatcatgttggagtactcaaaggaagtgatgaagtgagcggagttaatgtttgaaattttatcagaagctttagggttgagtcctaaccacctcaaagaaatggattgcgcaaaaggtttatggatgctctgtcattgttttccaccctgtcctgagccaaaccgaacattcggcggcgctcagcacacagacagatctttccttactattcttcttaacgacaacaatggaggacttcaagttctctacgatggatactggatcgatgttcctcctaatcccgaagcacttatctttaacgtaagagatttcctccagcttatctcgaatgacaagtttgtaagcatggagcatagaattntggcaaatggaggtgaagagccgcgcatttcggtc

SEQ ID NO: 151374 - DNA, 234 bp, Arabidopsis thaliana columbia
ttaatacacattaacaaatctgcttctgtttctcatgtcatcaggctgataaaaagggtcgaggcttgatcaaaaaaaagaaacgaagggctgttacctcctgttttacactatcctcttatattcagattcttactcttcaccaaaaccctaaagaaaataactgttttcttttgagaaatatgaagattcaatctatatgtctgtgaaaaagctctctccactctcatattt

SEQ ID NO: 151375 - DNA, 423 bp, Arabidopsis thaliana columbia
  unsure (1)..(423): unsure at all n locations
ccgggncgacccacgcttatcgttgggttaatgtaacaagacgtagccaatgctcactttcaagcattngaagtcccttcagctagtgggcgtttttgtgtggtcgagcgtgtctttcaccactcctagattgttaacattctacgtgagctttacccaaatcttccactacctgaatggtgtgaggacgagaatccctacttgccaacgtatcaagtgtccaaggataaaacgaggagccttggcatagactacatacccttgaaagttagcatcaaggataccgtcgagtccttgaaggaataaggtttctcacaattcttagaaagcatgttgacccaatggatttaatccagattagataaaatatttggaagactatttcaaaaattaattttggaacatgtcaattttctcaaggag

SEQ ID NO: 151376 - DNA, 438 bp, Arabidopsis thaliana columbia
gtccggtttaaggcaaattaaaatcatctccataaatcttttcaattctcttccaattttctagaaaaaacatgtcttgctgtggtggaagctgtggttgtggatctgcctgcaagtgcggcaatggttgcggaggttgcaaaaggtaccctgacttggagaacaccgccaccgagactcttgtcctcggtgttgctccggcgatgaactctcagtacgaggcttccggcgagactttcgttgccgagaatgatgcttgcaaatgcggatctgactgcaagtgcaacccttgtacctgcaaatgaagaacttcataaaccctaagtctgtaataaccctaatgttatgttaggtttgcttatatgtaataattggctgatttttccggtagttttgccggcgacgttggtctttctcttcttctgagtgagtttttat

SEQ ID NO: 151377 - DNA, 465 bp, Arabidopsis thaliana columbia
ccgcaaccttcgattttcgtttattcgcatccatttttgagagaaaacaatcaataagcgaccatgttggtgtaccaagatcttctcaccggtgatgagcttctgtctgactctttcccttacaaggagattgagaatggaatcctctgggaagtagaaggaaagtgggttactgtgggagctgtagatgttaacattggtgccaatccatctgctgaagaaggtggtgaggatgaaggtgttgatgactctactcaaaaggttgttgacattgtcgacaccttcagacttcaggagcaaccaacttatgacaagaagggattcatcgcttacattaagaaatacattaagcttttgacacccaagctcagcgaagaagatcaagctgtcttcaagaagggtattgagggagctaccaagtttttgctccccaggctcagtgacttccaattcttttgtggggag

SEQ ID NO: 151378 - DNA, 417 bp, Arabidopsis thaliana columbia
gcggttcccaaagccattattctacctatcttgcttctcatctgtggagctgctctcggagctgctgcttctgaaggttatcttcgtaatggaaacttcgaagagtcaccaaagaaaaccgacatgaagaaaacagttctactaggcaaaaacgccttgcccgaatgggaaaccaccggtttcgtcgagtacatcgccggcggtcctcagccaggaggcatgtacttcccagtggctcatggagtccacgccgtgaggctcggaaacgaagctacaatctctcagaagttagaagtgaagccaggttctctctacgcactcacgtttggtgcgtcgagaacttgtgcacaagacgaagttcttagagtctctgtaccttctcagtccggtgacttgccacttcaaacactttacaac

SEQ ID NO: 151379 - DNA, 422 bp, Arabidopsis thaliana columbia
  unsure (1)..(422): unsure at all n locations
accacgcgtncgtttctctgatgggaggaaacagtacgacgtggatgaacacggcggttctggttacttgtataagaaacttgcggcgaaatcgtggtcctgtttcagggattcttaaaggatacgttggtttaagtactgcgattttcacggatctatgtaatgctctgttttcctctgacccagcttcgtttcttgtcctcctctccgtcgtgccttttgccgtttgtcttacggcggttttcttcctccgtgaaatccctccgtctactaccttcgccgaggataacgaagagtctaaatactttgctgtgtttaacatcgttgcggttgttgttgctgtgttcccttcagtcttacgacatcattcggattcaaaacaggagctttctcaatcgcattcgttttcatacttcttatac

SEQ ID NO: 151380 - DNA, 343 bp, Arabidopsis thaliana columbia
  unsure (1)..(343): unsure at all n locations
ccgatcgacccgcacgacctgtcatgataaatctccggatccaatccaattctgcatcgactcttcaaagttttattgggtcattggagatttttttcggttgaggatggctaacaatgaggagcatcctcctcgagggaatgaatgggaagtcgtctcgctcacttcatcagcttatgctgctgctcctggtccgtataacgttgaatcaagagatgtgcgcaagtatgatgcttactatggagcggaaacttcacgtgatctgtacatgtctgaacactntgtattcccacctagtgagcatgagaanttacccattggtgaatctttattcgtggcggag

SEQ ID NO: 151381 - DNA, 290 bp, Arabidopsis thaliana columbia
cgaatcgacccactcgtcctgatgattcttaccggacctttacaagtttttaagttttttaacaagcttatttcatgggtcctgaactcagggttagagcagcatttgcatatatacaaggtgttttggtgacaattgatagactctaagatgggttctgggaatttgattaaggcaataattagattgaagaagagtaaacaaggaactgaaaagaaaaaaactagtgctgtgaaaccaaaaaaaggttccaagaagaagggtacatcactagttactcgtagtgagga

SEQ ID NO: 151382 - DNA, 460 bp, Arabidopsis thaliana columbia
cggacgcgtggggaacaaacaaaactctctctttttttctctttttctaataagtaaggttttgatcttttgcaagatcaaacaaaaacaatggagttagagagtacgagcaatggccgacgtccgccgccaccggcagagattggccgtggggcgtacttggcgtgggaagatttgacggtggttataccaaactttagtggtggtccgactcgaagattgctcgatggattaaacggtcatgctgaaccaggtcggattatggccattatgggtccttccggatccggcaagtccacgcttcttgattctctcgcaggtagactcgcaagaaacgtgattatgaccggtaatcttctattgaacggaaagaaggcaagactagactacggtctcgtcgcttatgtaacacaagaggacattttgatgggaacactaacggtgagggagacaataacat

SEQ ID NO: 151383 - DNA, 413 bp, Arabidopsis thaliana columbia
ggcgagcttcaccggcgctggttaacggcggccctctcaatctccagtattctcgggtcaatagaagcttcaaaaaaagaagaaaaaaatcgaaaattcactaaaatatatattaatttcaattttccatatttgaattcttccagatcttatggttccttgttcttcgttctcgtggcggtttttgaattgttgatgcgacgatctcatgcccgttctagggtgaagaatagtagtagtagtaaatccgatatggatccgattaagttccagatccgttctgggaaccgagcaccgtcttcttcatcgacctatacgctaacaaaaccgaattcgaaacacgcgaaatcgaatctcttgttaacaagtggttctatatctgtagtgttggggggtctctttctttgctattc

SEQ ID NO: 151384 - DNA, 405 bp, Arabidopsis thaliana columbia
gatgatgcttaccgaaaacatattttgtaaaatacaaaattcttatatccgaatgtgagctaatttgagaaagacggtctctatacgtatataaaatatatgtatatatgcctctctattctttgatgaacttcagtcagggtaattaatttactaaaactcttccaaaatgtcacattccttcttcaatttattcctaatctctcttttcctctacaacaattgcattgcgcatcactatacattcacggttagggaagttccatatacgaaactgtgtagcacgaaggcgattttaaccgttaatagtcagtttcctggaccgattataaaggttcacaaaggagacactatttatgttaacgttcaaaaccgagctagtgaaaacatcacaatgcattggca

SEQ ID NO: 151385 - DNA, 455 bp, Arabidopsis thaliana columbia
gccgcaaaccattttttgtcaatctagggttcttcttcgtacttgcagatttcgcctccgttttcactacgatctgtgaagatgttctccgctcagaacaagatcaagaaggacaagaatgctgagccaacagaatgcgaggagcaagttgctcaggctttgtttgatttggagaacactaaccaggagttgaaaagcgagttgaaagatctctacatcaaccaagctgttcacatggatatctctggaaaccgcaaagctgttgtgatttacgttccattcagattgaggaaagctttccgcaagattcatccccgtctcgtcagagagcttgagaagaagttcagtggaaaggatgttatctttgttaccacaagaaggatcatgcgtccccccaagaagggtgctgctgttcagaggccacgtaacaagactcttaccttagttcatgaagc

SEQ ID NO: 151386 - DNA, 448 bp, Arabidopsis thaliana columbia
gagaaacctctcctctctctatctatagtcatggctgctttcacttgtacctctcgtgctccgatttctctccgctccgagaccagaatcgtatcctcatcaccatcggcttcttctctctcttctcggcggatgttcgccgtcttaccggaatcatcaggtttgagaatccgtctttctctctctccggcttcgttgacctcgattcatcaacctagggtttctcgattacgaagagccgtcgtctgtgaagctcaggaaactactaccgatattcaagtggtcaatgactcgacatgggactctctagttcttaaagcaactgggcctgtagttgtcgacttttgggcaccatggtgtggaccttgcaagatgattgatccgcttgtaaacgatctagcacagcattacactgggaagatcaagttctacaaattaaacactgatg

SEQ ID NO: 151387 - DNA, 441 bp, Arabidopsis thaliana columbia
ctctcacaattcagcaatggcttcttctatagttacctctagcttgaagcctttagccatggccgattcttcctcttctaccattttctcccatccttccatctcctctaccatctcttcctccagaattcgcagctccagtgtttccctccttaccggacgcattaacctgcccctctctttctctcgcgtctctctatctcttaaaaccaaaacccaccttaaaaaatccccctttgtctccttcgttgcccagacttcggattgggctgaagaaggtggagaaggaagcgtcgctgttgaggagaccgagaacagtttagagtcacaagatgtgagcgaaggagatgagagcgaaggagatgcgagcgaaggagatgtgagcgaaggagatgagagcgaatgagatgtgagcgaaggagctgtgagcgaaagagctga

SEQ ID NO: 151388 - DNA, 437 bp, Arabidopsis thaliana columbia
gattttattatccttcctcgaaacaagttcttagctaagatgacgaagaactacccaaccgtgagcgaagattacaagaaggctgttgagaagtgcatgaggaagctcagaggtttgatcgctgagaagaactgtgcacccatcatggtccgactcgcatggcactctgctggaactttcgattgtcaatcaaggactggaggtccattctgaacaatgaggtttgacgctgagcaagctcatggagccaacagtggtatccacattgctcttaggttgttggaccccatcagggagcaatttcctaccatctcttttgctgatttccatcagcttgctggtgttgtggccgctgaagttactggtggccctgacatttctttccaccctggaagagaggacaagcctcaaccacctccagagggtcgtcttcctga

SEQ ID NO: 151389 - DNA, 378 bp, Arabidopsis thaliana columbia
  unsure (1)..(378): unsure at all n locations
tttaagggtcttttacagtttccgatctatccaaatcatagattcttttatcttcacaatctgttagtgtctcgtagctctaattaggtaataactaatgggagtgtcaaagaagaaatcaggtgagattagaggagatttaatcccagggttaccagaggaattagcaattgagtgtttggttagagttccttttcagtttcattcttccatcaaatctgtttgccgatcatggaaatgcgttatctccagtcgttcttttatcaaggaacggataggttttggtaaagctgaatctcttctctgccttgttcaacctctgacttcaccaccgtctnncgcgatgatggaaggtggtgagatgagtcacaagaagaa

SEQ ID NO: 151390 - DNA, 361 bp, Arabidopsis thaliana columbia
ggatcgtctaaagcttaatttctccgttttcgttttgtctttttttatcgtctcggtttcgtcgtctgatgtcaacgacggcgatgatctcgtgatccgtcaggtggttggtggagccgagcctcaggttttgacctcagaggatcacttttctctcttcaagcggaagttcgggaaggtctacgcttccaacgaggagcatgactatagattctcggttttcaaagcgaatctcaggcgagcgaggcgtcaccagaagttggatccgtcggcgactcatggtgttacgcagttctcagatctgactcggtctgagttccgtaagaagcacttgggggttagaagtggctttaagctttct

SEQ ID NO: 151391 - DNA, 480 bp, Arabidopsis thaliana columbia
  unsure (1)..(480): unsure at all n locations
cgcgaagatatttttacaaggctctttttccactaagccccttctcttcttcttctcttggccctctcactgtgaatctcccacanaagcgatcaatcacaanattcttcttctctctctctcttnttcgtcccttaagaatnncaattatgaaagggagctannaatcaaagacctgaaacccaggagccctccaagctctctgtgaccaagaagnccggcttaaaggagcccagggcgtggcaaagctgctgctaagggaccccaaccaaaccaaagaggccagccagtgctttcttcgttttcatggaaagatttccgtgagactttcaagaaggaaaaccccaagaacaagtctgtagctactgttggaaaagctgctggagacaagtggaagtccttgtctgattctgagaaagctccttatgttgctaaggctgagaaacgcaaggttgaatatgagaagaacattaaagctta

SEQ ID NO: 151392 - DNA, 459 bp, Arabidopsis thaliana columbia
  unsure (1)..(459): unsure at all n locations
gttgttttgaagctctctctttcaaatnctggtcttctctcgtgatctctctctctctctcagagagctccgaaactttcacgcagagttaagtgaagcaggatgggattgtcattcgccaagctttttagcaggctttttgccaagaaggagatgagaattctgatggttggtcttgatgctgctggtaagaccaccattttgtacaagctcaagctcggagagattgtaaccaccattcccactattgggttcaatgtggagactgtggagtacaagaacatcagtttcacagtgtgggatgtcggcggtcaggataagatccgtcccttgtggaggcattacttccagaacacccaaggtcttatctttgtggtggacagcaatgacagagaccgtgttgttgaggctagagatgaattgcaccgaatgttgaatgaggaccagcttcgtgatgct

SEQ ID NO: 151393 - DNA, 420 bp, Arabidopsis thaliana columbia
  unsure (1)..(420): unsure at all n locations
ctaatttctcttcttttccccaaaaaaaatgntctgttgttgagtaccggtgctttgtcggcggccttgcctgggccaccaatgatgaagatcttcaaaggacgttctcacagttcggcgacgttatcgattctaagatcattaacgaccgcgagagtggaagatcaaggggattcggattcgtcaccttcaaggacgagaaagccatgagggatgcgattgaagagatgaacggtaaagagctcgatggacgtgtcatcaccgtgaacgaggctcagtcgagaggtagcggcggtggcggaggaggccgtggtggaagcggtggtggttaccgcagcggaggcggtggtggatactcaggaggcggtggcggcggatactcaggaggaggcggtggtggttactagagacgtatcggag

SEQ ID NO: 151394 - DNA, 335 bp, Arabidopsis thaliana columbia
cgtttttgtgggttataactgataaatccaacagttaaacgaaaacagaaggagaagaagagacagagattgagaagatagctggattcagacacgagcttgaagaggttgggatgattgtgtcgtggtgttcgcagatagaggttttaagtcaccgagccgtaggttgttttgtgactcattgtgggtggagctcgacgctggagagtttggttcttggcgttccggttgtggcgtttccgatgtggtcggatcaaccgacgaacgcgaagctacttggaagaaagttgaaagactggtgtgagggtaagagagaacaaagatggttttgttgg

SEQ ID NO: 151395 - DNA, 456 bp, Arabidopsis thaliana columbia
agcgctttgaggcttgttcgttccatgctacctcttccgcatcttaaagttggatatctaactgcaccacctgtgggcaactcacttgctcctcacagtgattggaaacgcacagagtttgaactcaatcacgagaggcttctacaggtactgaaacctgaaccaagagaaatgggacgaaacctgtcaggaaaagcagagacaatgagcacaaacgtggagaggaagacggtaaaagtgaacattacagagattgtatcagtaacaccttgtgctgatctcactctacctcctggtgctggtctctgcattgataccattcatggcccagttttcttggttgcagattcatgggagtctttagatggatggcttgacgcaattcgtttggtttacacaatttatgcgagagggaagagtgatgttttagccggtattatcaccggttaataaata

SEQ ID NO: 151396 - DNA, 310 bp, Arabidopsis thaliana columbia
gcatatgagactactgcaacagtggatactaatcattttgaccactatctggtaagcggttctgagccttctgagtgacggctcacttgtaccctttcctcaaagatctgatggatcgacagaaccggactcctaccattgttgaggtctgatctgtactctaggcttatatcttcacggcgttgtggggtaggagtgatccctacactagccgagtcactggcccgaaaattcttgaatgtggaatcaactgttgtgaagcgagcaaatatttacctgtcttgagggttcaaaaaaacacacaatttaa

SEQ ID NO: 151397 - DNA, 458 bp, Arabidopsis thaliana columbia
  unsure (1)..(458): unsure at all n locations
cttttctcttcccccaccctcaaagatctctcaaagtatggctttcgcggctgttgcatcgatggttcttgaccctaaagcatcaccggccttgatggatctatccaccgcagacgaagaagatctctatggccgcctcaaatcgcttgaacgacaactagagttcaccgatatccaagaagaatatgtgaaagacgagcaaaagaatctcaaacgagagctgttacgagcacaagaagaggtcaaacgaattcaatccgtgcctttggtgataggtcagttcatggagatggtagatcagaacaacggcatcgtcggatctactactggctccaattactatgtcagaattctcagcacaatcaatagagaactcttaaagccttctgcttccgtcgctcttcaccgtcactccaacgcccttgttgatggtttgcctncggaggctgattctagca

SEQ ID NO: 151398 - DNA, 356 bp, Arabidopsis thaliana columbia
tcggaagaatcatgggacaaggaccatcgggtgtattgttactgcaaggagatcggaaagctgatgggggagataagaaagagaagaagtttgagcctgctgtaccaccggcttgtgtagggaggaagcataggaagcagaaagggccagaggctgtggcgagacttacgacggtgactccgtctactaagtgtaagctccgggtactgataattggaacggatcaaggattatttgttgatggaggaagagtctgatgcttatcaagaataggttgaaacctctggaagagaaagtttatgaagatatatctaaggttgaagatctttgtagttcaccttttagtgtttggtatt

SEQ ID NO: 151399 - DNA, 341 bp, Arabidopsis thaliana columbia
  unsure (1)..(341): unsure at all n locations
ggccgaccccccgtccggagaaatcaaattcggaggagaagttttaatttttttgagtaagatccaagggaagagaccacggaaggggttnccaacatgaacttggctgttgatacccacaagaagaatcggggtcaagtttccaacactaagaaaccattgttcttctacgtcaatctcgccaagaggtacatgcagcagtacactgatgtcgaattgtctgcactatnnntnnctattgccactgttgntacggtcgctgagataatgaagaacaatggctttgctgtngaaaagaagatcatgacatcgactgtggatatcaaggatgattcaagggg

SEQ ID NO: 151400 - DNA, 343 bp, Arabidopsis thaliana columbia
agaagaagcacctctcatggcgaaccagtttctttttcatcttccgattccttttgctgtccaccgtcacttctacctgctaaacgccgccgttttatagcttctcctcccgaaaatgctaaacccacattcctcaaatctctcaccgacgcttttttagattcttgtagaggaagagaatatttttaaggaggttgttttcgatggagcattacgaggttcttgagcaaattgggaaagggtcttttgggtcagctcttcttgtgaggcataaacatgagaagaaactttatgttttgaagaaaattcggttagctaggcagactggttgaacaagaagggc

SEQ ID NO: 151401 - DNA, 422 bp, Arabidopsis thaliana columbia
  unsure (1)..(422): unsure at all n locations
acaagcgtagaaaacaaaactcaactaattgtgttatcacccaaaagagaagagcaaacacaatggctttcgctttgaggttcttcacatgctttgttttgacagtgttcatcgttgcatcagtggatgcagcaataacatgtggcacagtggcaagtagcttgagtccatgtctaggctacctatcaaagggtggggtggtgccacctccgtgctgtgcaggagtcaaaaagttgaacggtatggctcaaaccacacccgaccgccaacaagcatgcagatgcttacagtccgctgcaaaaggggttaatccaagtctagcctctggccttcctggaaagtgcggtgttagcatcccctatcccatctncacgagcaccaactgcgccaccatcaagtgaagtggggaataacgacatcat

SEQ ID NO: 151402 - DNA, 458 bp, Arabidopsis thaliana columbia
ggaactgagaaccaccttgttctctgggatctttgtcctcttggattgaccggaaacaaggttgagaagctctgcgatctgtgcagcattacattgaacaagaacgcagtatttggagacagtagtgctcttgctcctggaggtgtaagaatcggtgcacccgcgatgacatcgagaggattggtggagaaggactttgagcagataggagaattcctgagccgtgcagtgacactgacgttggacatccaaaagacatacggtaagttgttgaaggacttcaacaagggtttggtgaacaacaaagatctcgatcagctcaaggctgatgtcgagaagttctcggcgtcttatgagatgcctggattcctcatgtctgagatgaagtacaaggattagagatctttctctatatgcaagagtaatcttctattattatctaccatatatattaaata

SEQ ID NO: 151403 - DNA, 362 bp, Arabidopsis thaliana columbia
gcttcttgtacaacagccgaaacaattataccatgacattaaaatccagatttttttcagtcattttcgtattatttgtttaaaagtaaagtttttcttccatcaaaatggaaaatgtgatctggtttttttcttagaagatattaaaacaatcggagagaggattgcaaattttttatttttgttaatttgctgtgtgatgggtctggttgattctttgttaggaaaagatgcaagaaaatttctcaaaaggaaagatagtgatgctgcagaagcaggacgagctttggaagaactcagaagttctttgtacaatgagcttaaaacatcagaaggagctaaaaggcaacaacagagatttt

SEQ ID NO: 151404 - DNA, 448 bp, Arabidopsis thaliana columbia
  unsure (1)..(448): unsure at all n locations
aaaaaaaagaaaacacaaaaacaaagattataatggtttccttatccatggctttgtcctcccctgccttcgccggaaaggctgngaaaaaaanngcatcagatgtcctcggaagcggccgtgtgaccatgaggaagactgtcgccaagccaaagggtccatcaggcagcccatggtacggatctgaccgagtcaagtacttgggtccattctccggcgagcccccgagctaccttaccggtgagttccccggtgactacggatgggacaccgctggtctatccgccgacccagagaccttcgccaggaaccgtgagctagaagttatccacagcagatgggccatgctcggagccctaggctgcgttttccctgagctattggctaggaacggagttgagttcggagaagctggttggttcaaggccggttcacagatctttagcga

SEQ ID NO: 151405 - DNA, 407 bp, Arabidopsis thaliana columbia
cggacgcgtgggtttgtaaaccaacgaaattcaatttttctctctgtgccttttttcctcttttctcgttcccctctacttcatttagggtttatcatcctctaccaatccgccgattctatacatacacttttcatatatatacatacatcgtctccactctcgttggctcatttttcattcaccgccacgaagcaagaggagattcgtattagccaccatgtctttgagacctaacgctaagactgaggttcgccggaaccgctacaaagtggcggtggatgctgaggaaggaagacggaggagagaggacaacatggtcgagatccgtaagagtaagcgtgaagaaagcttacagaagaagcgtcgtgaaggccttcaagctaatcaactacctcaattcgctc

SEQ ID NO: 151406 - DNA, 406 bp, Arabidopsis thaliana columbia
gaacaacaacactaagcaaaaaagaaaatttcatgttctgagagacaatggcatcaacattcacgagctcaagcagtgttcttaccccaacaacattccttggccagactaaagcctcaagctttaacccccttcgtgatgttgtctctctcggatctcccaagtacactatgggaaatgatctttggtatggacctgacagagtgaagtacttaggacccttttccgttcaaactccgtcttaccttaccggagaattccctggcgattatggatgggacaccgtcggtttatccgcagaccctgaagcctttgccaaaaacagagctcttgaggtgatccatgggagatgggcaatgttgggagctttaggttgcataacccctgaagttcttcaaaagtgggt

SEQ ID NO: 151407 - DNA, 288 bp, Arabidopsis thaliana columbia
gatgattctcagattcacaagcttttatttttctatattgacaggcgagctagaaatgtcggcgttctttttaagaagcgaccacggaagaacattgattttaagggcttttttgtttgtttccgattcttgcggcagatatggcgtcaagtgttataaagtgtgtgaccgtctgagatggtgccgtctgaaaaacttgcatgctcatttctttacactagtaatacttttcctactgattatgtgccaactgtttttgacaacttcattgctaattgtgttgttgat

SEQ ID NO: 151408 - DNA, 275 bp, Arabidopsis thaliana columbia
  unsure (1)..(275): unsure at all n locations
gtccgcttctttctctcgtctctgcgttaattctctctggttcgaagtagtaactttacgtccgcgattgggnctctctctctctctctctttctatccgataaatctcaggagaagttagtcgaggtagtctgcttctatgccattttgccgagaaaatgggagaagttaagggatgttggaaattaggacgaatgctttcaaaggataactctgcaaactcctacaacgtctnccttctcttatctcctggtggttctgtttgggattgtatt

SEQ ID NO: 151409 - DNA, 458 bp, Arabidopsis thaliana columbia
  unsure (1)..(458): unsure at all n locations
caagaatcagattcaagatagaagtttttcaaacattgtctattcctctgggncactttcagattcttggttttcttcatgctttgcttatcttctcagctgagtcccgcaaaacccaattgctgaacgataatgatgttgaatctagcgacaagagtgcaaaaggcacacgatgggctgttttagttgctggatcaaatgaatattataactacaggcatcaggctgacatatgccacgcgtatcagatactccgaaaaggcggtttaaaagatgaaaacatcattgtgtttatgtatgatgatatcgcgttttcctcggagaatcctaggcctggagttatcattaataaaccagatggagaagatgtttataaaggagttcctaaggactacacttaagaagcttgtaatgttcaaaacttctacaatgtgttacttggaaatgaaagtggcgtc

SEQ ID NO: 151410 - DNA, 368 bp, Arabidopsis thaliana columbia
ggaaacttcatttgtttttttccgtttttaaccaatatttttaaaaaagctttcttctgaacgttaatcgtggagagtttcgggtcgggtcgggtcgtaaaaggcgggtttcacggtggtgatagattcacctcctgcttccttctgagggggttagccccgaggctcttcgcctcggcgggtttcaaattcccccaaatctaacaaactcacagattcattttctccattttttttggttggtgaaaatttgaatccacaaattttgaattcatttgtaaccgttcgttgaagaagaagaagatgcctgctctagcttttggtgatactcccatcgataccttttccagtatctttacaccgtcgtc

SEQ ID NO: 151411 - DNA, 376 bp, Arabidopsis thaliana columbia
gtgaaaactgcaactgtgatccatggcggaggatatggctgccgacgaagttacggctcctcctcgtaaggttcttatcatctccgctggtgctagccactccgtcgctcttctctctggtgacattgtttgttcttggggtcgaggagaggatggacagttaggtcatggcgatgcagaggatcgaccttctccgactcagcttagcgctttagatggccaccaaattgtttccgttacctgtggtgctgatcacactgttgcttattcacaatcaggcatggaagtctacagttggggatggggtgattttgggagattaggccatggtaactcaagcgacttgtttactccgctaccaatcaaagcattgcac

SEQ ID NO: 151412 - DNA, 413 bp, Arabidopsis thaliana columbia
gggcaggttaaaattatgccatctattcaaatcgttcctattctcagatcttaactcttttctctacgagattcggcatctgggttttattcttcttgagcaaaatgcaatcggataatggaaagcttttcatcggtgggatatcttgggacaccaatgaggaacgtctcaaggagtatttcagcagttttggagaagtgatcgaagctgtcatcttgaaagatcgtaccactggtcgtgctcgtggtttcggttttgttgtttttgctgatcctgctgttgctgagattgttatcaccgaaaaacataatattgatggcagattggttgaagccaaaaaagctgttcccagagatgaccaaaacatggtaaatagaagcaacagcagtagcatccaaggttctcccggtggt

SEQ ID NO: 151413 - DNA, 414 bp, Arabidopsis thaliana columbia
gcttttgctgctatattcacagtgccgttaggagtcaacaatgacgggtctgcagtggtggtgggccgagcatcattcaagatcttcttcatcttcaacgcactcgcgttgtttacgtctctggcggttgtggttgtccagatcacattggtgagaggagagacaaaagctgagaagagggtagtggaagtgatcaacaaactcatgtggttggcatcgatgtgtacatctgtggcatttttggcatcttcatacatagtggttgggcgtaagaacgagtgggcggctgagctggtgaccgtggttgggggtgtgataatggctggtgttcttggaaccatgacttattacgtggtaaaatcgaagaggacaaggtcgatgaggaagaaggtgaagagtgctcgcaggagtggt

SEQ ID NO: 151414 - DNA, 444 bp, Arabidopsis thaliana columbia
  unsure (1)..(444): unsure at all n locations
agagaagagagaaagagagaaagagatatagagattatggcgtacagngcgtgttgggtacacgggagcgcattggcttgatcaggcgcacaatcatcatcttcctcctcatcccagcgtcacgtgtcgctctccaaacctgttcagatcatctggaaagctcaacagtctcatgaagacgataactccgccgtctcccgccgtcttgctctcactctcctcgtcggcgccgctgctgttggttccaaagtatctcctgctgatgccgcctacggagaagctgcaaacgtgtttgggaagccaaagacgaacacagacttcttgccatacaatggagatgggttcaaagtgcaggttccagcaaaatggaacccaagcaaagagattgagtttccaggacaagtccttaggttcgaagacaacttcgatgctactagcaatctc

SEQ ID NO: 151415 - DNA, 437 bp, Arabidopsis thaliana columbia
accacacaacgccatggaagctgctcttgctgcatgtgctctttcatcgctccgaattctcaagacgaaacggcgtttcagatgttccttctccaatccaagcctacccatttctcctaattcccttatcacccgcaaatcaagtcgattcacaaccgcagtatcatcaccaccatcatcatcagccgctacgtcaacgaattctccaccggaacctgaagccctattcgaacccgggtcggataagttcgattggtacgctaattggtacccagtgatgccaatttgcgatcttgacaagaaggttcctcatgggaagaaagttatggggattgatttggttgtttggggggataggaacgagaagcaattggaagtgatggatgacacgtgtcctcatcggcttgctcctttggctgatggaaggattgatcaat

SEQ ID NO: 151416 - DNA, 452 bp, Arabidopsis thaliana columbia
  unsure (1)..(452): unsure at all n locations
aaacaaacaaggtctagctttttataaccaaactctgcttctgaacagagttagtcaaagagagagaagccatggaagctatgaaggagactgtggaggagagcttgagagagatgagagagacgtttgcgagtgggaggacgaggagtctgaagtggaggaaggcacagatcggagctatatacgagatggttaaagacaacgaagacaagatctgcaatgctctgtttcaagatttgggcaaacacagtactgaagcttttagagatgagcttggtgttgtcttgcgaacagctactgttgcaatcaactgtcttgataaatgggccgtccccaaacatagcaaactttctctgttgttctacccagcanaagggaaagtcatatcggaaccctatgggacgggtcttgttctgtctaactggaatttttctatatctttgtctctggat

SEQ ID NO: 151417 - DNA, 432 bp, Arabidopsis thaliana columbia
gctggccgccgcaatcgccgccgttaagcaaaatgctttctatatgcagcgcgctatcgactccaacaatctcaaagacgctctaaagttttctgctcaaatgctcagcgagcttcgtacttccaagctttctcctcataaatactatgaactctatatgcgagtttttaatgaattggggactttggagatattcttcaaggaagagacgggacgtggttgctccatcgcagagctctacgagttagttcagcatgccggtaacattttgccaagattgtatcttttatgtaccataggatctgtatatatcaaatccaaggatgttactgctacggatatacttaaggatcttgttgaaatgtgtcgagctgttcaacatcccttgcgtggtcttttcttgagaagttatcttgctcaagttactaggga

SEQ ID NO: 151418 - DNA, 324 bp, Arabidopsis thaliana columbia
gaccacgcgtccgagaaactgatagttgaaaaaaaagttttgaagaattttggtgttgacaatctatgctcctttattcgcttcttcaaagagagctgttgtgacattggtggagaagggagtatcattcgaaactgtcaatgtcgatctcatgaaaggagaacagagacagcctgagtatctcgcgattcagcctttcggtaaaatcccagtcctcgtcgacggagactacaaaatctttgagtcgcgtgcgatcatgaggtatatagcagagaagtatagatcacaaggacctgatctttttggggaagactatttgaagag

SEQ ID NO: 151419 - DNA, 325 bp, Arabidopsis thaliana columbia
cgtccggaggaaaccagaagtagcggaaagttcaaagagtgttgttgtttcggagaaaaaggaagaaaccgcggcagcacgcaaaaggcaaccgagacgtgataattagaacaagattttaaagtagttttcgaagatgtgaaagaaaagttcagatttatttttctgtttttggttttgggttgaatgttgttttctgctgtagcctataatggtgtaacaccaagtttgagaaatttttgtctttgggcgaagaaaagaaaggaggaatatgtatgtgaagacggtttgttgacagccaaattgtagcttctatttctttttc

SEQ ID NO: 151420 - DNA, 400 bp, Arabidopsis thaliana columbia
gcttgaaacgccgcttcttcttcttcttcttccactgtcgttctctctgtaaatcgcttcttcaatcatctctgtggatttgtctctattcataacttggtgaagaagatgttgacggaagaggagctcaaaagattgtacagaatccagaagacgttgatgcagatgttaagggatcgtggatattttatcgcggattctgaacttacgatgactaaacaacagtttattaggaaacatggtgataacatgaaaagagaggatcttgttactcttaaggctaagcgaaatgataatagtgatcagctctatatattcttccctgatgaggcgaaagttggtgtgaagacgatgaaaatgtacacgaacaggatgaaatcagagaatgtgttcagagcta

SEQ ID NO: 151421 - DNA, 400 bp, Arabidopsis thaliana columbia
ggaacttagacgtaccggttacttgcaagattcgtttattaaaatcaccagcagatactgttgaattggctaggagaatcgagaaacttggtgtaccagctcttgctgtacatgggaggaaaattgcagacaggccaagagatcctgctaaatgggatgagattgcagatgtggtggcagcattatccattcccgtcattgcaaatggcgatgttttagaatatgatgatttttcttgcattaaaaccgcaacaggcgctgcattagttatggttgcaagaggagctatgtggaatgcttcaattttctctccaaaaggaaaatcacactgggaagatgtgaaaaagaaataccttagaaagagcatttttgtggaataacgatggttaagagcacgaaa

SEQ ID NO: 151422 - DNA, 423 bp, Arabidopsis thaliana columbia
ggaacttagacgtaccggttacttgcatgtattcgtttattaaaatcaccagcagatactgttggattggctaggagaatcgagaagcttggtgtaccagctcttgctgtacatgggaggaaaattgcagacaggccaagagatcctgctaaatgggatgagattgcagatgtggtggcagcattatccattcccgtcattgcaaatggcgatgttttagaatatgatgatttttctcgcattaaaaccgcaacaggcgctgcatcagttatggttgcaagaggagctatgtggaatgcttcaattttctctccaaaaggaaaatcacactgggaagatgtgaaaaagaaataccttagaaagagcatcttgtggaataacgatgttaagagcacgaaattcacgataaaggagatgatagcg

SEQ ID NO: 151423 - DNA, 468 bp, Arabidopsis thaliana columbia
gggccacgcgtccggacattatggtgtcatggttgggatgaattatatttttgcgtatgttggtgatgaagcacaaggcaaaagaggtatcctcacattgaaataccctattgagcatggtgttgttagcaactgggatgacatggagaagatttggcatcacactttctacaatgagctccgtattgctcctgaagagcacccggttctacttaccgaggctccttttaacccaaaagccaacagagagaagatgactcacatcatgtttgagacctttaattctccagctatgtatgttgccattcaagctgttctatcactttacgccagtggtcgtacaaccggtattgtgttggactctggggatggtgtgtcttacactgtgcctatctacgagggtttctcacttccacatgctatcctccgtctcgaccttgttggtcgtgaccttactgattacctcat

SEQ ID NO: 151424 - DNA, 398 bp, Arabidopsis thaliana columbia
caaaaccgatccaaattccgagaaagacttccaaattttccttttcctctgcaaaaatgtttattgagagcttcaaagttgagagcccgaacgtgaagtacacagagaatgagattcactctgtgtacgattacgagacgacggaggttgttcatgagaagaccgtcaatggcacttaccaatggattgtgaagccaaagactgtcaaatacgatttcaaaaccgatattcgtgtccccaaattaggggttatgctttggggtttgggaggaaacaatggatcaactctcaccgctggtgtgattgcgaacaaagaaggaatcttgtgggcaacgaaagacaaagtgcaacaagccgaatacttcgggtcactaactcaagcttcattgattcgtgtc

SEQ ID NO: 151425 - DNA, 462 bp, Arabidopsis thaliana columbia
ggcaaaaagattattttcacaaacgttgggaacctttatgctttatgacagaagccattgacatttcctcgccaggtggttgcgctttgccaagctccgtttctactagatgacccaaatgttggaatgctatttccagctgatgctattgcaagagctaaacattatctttccttgacttcaggcggtttaggtgcttacagtgattcaagaggccttccaggagttaggaaagaggttgctgagttcattcaacggcgtgatgggtatccaagtgacccagaactcatctttctcactgatggagctagcaaaggtgtgatgcaaatcttgaattgtgttatacgcggtaatggagatgggattctagttccggttccacagtattcacattactcagctaccatatcactgttaggtggtactcttggttcttactatcttgatgagtctgaaaactgg

SEQ ID NO: 151426 - DNA, 410 bp, Arabidopsis thaliana columbia
cgatcttatcgcaggaggtaagagtaagtattaccattaggactgctcctaagtccgatgatgtgtacctaaagcttctcgtcaagctttaccggtttttggtgaggagatctaacagcaacttcaatgctgtgattctgaaaaggcttttcatgagcaaagtcaacaaagctcctctttcactctctaggcttgtagagttcatgactggcaaggatgacaagattgctgtgttggttggaactatcactgatgatttgagagttcatgagattcctgccatgaaggttactgccttgaggtttactgagagggctagggcttgaattgagaaagctggtggagagtgcttaacacttgaccagcttgttctcagagcttcattgggacagaacacagttctttttaga

SEQ ID NO: 151427 - DNA, 420 bp, Arabidopsis thaliana columbia
  unsure (1)..(420): unsure at all n locations
ngtntttctgnctcttnctctttctttctctcttataaactctntctccaataatggcagaggcaagtttctatatcggagtcataggaaatgtaatctccgtactagttttcctctcaccagtggagacgttttggaaaatagtgaagcggagatcaacggaggagtacaaaagcttgccgtacatttgcacgttgttaggatcatcgctatggacatattacggcatcgtcactcccggagaatatcttgtctccaccgttaatggctttggtgctcttgttgaaaccatctacgtttcactttttctcttttatgcccctcgacatctcaagctgaaaacagtggtagtggtagcgatgttgaacgtgttttttccaatcgcggcgattgtggcaacgagaagtgcgtttgaagatg

SEQ ID NO: 151428 - DNA, 245 bp, Arabidopsis thaliana columbia
gaccacgcgtccgattttctcaaactctaaaatcaattttttaaatctttcaaccgcgatcaagatgcagatcttcggtaagactctcaccggaaagactatcaccctcgaggtggaaagctctgacaccatcgacaacgttaaggccaagatccaggataaggaaggtattcctccggatcagcagaggcttatcttcgccggaaagcagttggaggatggccgcacgttggcggattacaata

SEQ ID NO: 151429 - DNA, 256 bp, Arabidopsis thaliana columbia
tgttctgggtctcctgctgttgttgaaacgaaggagtttgctgctttgtttgatagagattatgggagtaacaatgcttttaagattgattttgatagggaaggatttatagatgcacttcatcgatctaggagttcgattaagctcttgtttgattactagcattctccggatcatcctgatacacctgtgttttgtggtggaacactttgtaatgaagccgttgtaacgtttggtaatgagaattttgtttctt

SEQ ID NO: 151430 - DNA, 452 bp, Arabidopsis thaliana columbia
cccgatcatcagtccgttcctctgcctttcctctctgttttcttatgactagattgtagattcatgatcttgccactcaaatctggttctcttcttttcttttttttatccccaattctggtttatctggaaaatcgatctttgatcccttttcgatgatctcaagaaaattggggaaataaatcgtaaaacatttccgcatacattggtatcatgatcaaatctgcaatcttggtgttgatttgtgttttgtttcacattggttgacaaaagtcatggtgaaagagactgaatactacgagatcttaggcgtcaaaactgatgcttcagatgctgagattaaaaaggcttactacttaaaagcaaggaaagttcattcagacaagaaccctggagaccctcaagctgctaaaaactttcaggttttaggtgaggcttatcaggttctaagc

SEQ ID NO: 151431 - DNA, 421 bp, Arabidopsis thaliana columbia
  unsure (1)..(421): unsure at all n locations
ctttacttcacactactctctcactttctgggcagttactttgtggatctagaagaacacactaatcagaagagtgaaaaagatgaacgacttgatgacgaaatcgtttatgagttacgttgacttgaaaaaagcagcgatgaaggatatggaagcaggacctgactttgatcttgagatggcttctacgaaagcagacaagatggatgagaatctgtcatctttcttagaagaagcagagtatgtgaaagcagagatgggtttgattagtgagacgctggctcggatcgaacagtaccatgaagagagtaaaggtgttcacaaggcagagtctgtgaagtctcttcgtaacaagatctctaacgagattgtgtctggtttgaggaaggcgaaatcgattaagtcgaagctngaagagatg

SEQ ID NO: 151432 - DNA, 326 bp, Arabidopsis thaliana columbia
aacaagatggatgccactacccccaagtactccaagtgccaggtacgatgaaatcatcaaggaggtgtcttcctacttgaagaagggtggttacaaccccgacaaaatcccatttgtgcccatctctggatttgagggtgacaacatgattgagaggtccaccaaccttgactggtacaagggaccaactctccttgaggctcttgaccagatcaacgagcccaagaggccgtcagacaagccccttcgtcttccacttcaagatgtctacaaaaatgggggtattggaacagtgccagtgggacgtgttgagactggtatgatca

SEQ ID NO: 151433 - DNA, 439 bp, Arabidopsis thaliana columbia
cgtccacatctttctcctttggtggcatacacaactacagatagagagaaacgatggcgtcgagctcgcttatgagctgtggcatagccgccgtgtacccttcgcttctctcttcttccaagtctaaattcgtatccgccggagttccactcccaaacgccgggaatgttggtcgtatcagaatggctgctcactggatgcctggcgagccacgaccagcttaccttgacggttctgctcctggtgactttgggtttgacccacttggacttggagaagttccagcgaaccttgagagatacaaagagtcagagctcatccactgtagatgggctatgctcgctgttcctgggattttgggtccagaagcattaggatatggaaactgggtttaggcttatgaatgggcagcactaccagggggtcaaggcccttactt

SEQ ID NO: 151434 - DNA, 353 bp, Arabidopsis thaliana columbia
gagaaatccctaactctttgctcttctcttcccgtttatctatctctccgatttgggtattgaaatggcaactcctatggttgaagatacgtcaagcttcgaagaggatcagcttgcttccatgtccaccgaagatatcactagagctactcgtcttctccacaacgagattcgaattctcaaggaagacgcgcaaagaacaaatctagaatgtgattcttacaaggagaagattaaggagaatcaggagaagattaaactcaacaagcagctgccttacttggttggcaacattgtcgagattttggagatgaatccagaagatgatgctgaggaagattgtgcaaatattg

SEQ ID NO: 151435 - DNA, 378 bp, Arabidopsis thaliana columbia
cattaccaaaaatgttcacaaaatctattcttttggcttctcttcttatcatcatcctcgtctgtgcaactgaatcagctcgtcaaaagagcgggaacgatggtttaggattcggtggtgtacccggatccggatttatacccgggtttggaaacgggtttccggggactggagttggtggtggatacggtggagggtttggtggtcctagcggagggtttgggaaaggaggtgtggtgagaccaacggttacttgcaatgagaatggtccttgtaacggccagaagcttatgttgtctgctaagtgttcaatatttttagccgctctgggaaaggatatctggtgtggatgtggccggttgttggatgttcttttgg

SEQ ID NO: 151436 - DNA, 423 bp, Arabidopsis thaliana columbia
  unsure (1)..(423): unsure at all n locations
agtttttctccttgattcactggttttttccatgttctcaatcncaaggganncagcggcttcggggttttgggaatatctagctctatcactcgtggcggttttctttctggatcaaagttttctgagatctctgcgatttctgggattcgaaaattggagaattagggcttttttacggtaacagggtttcgaagagcataagataagaatgccttcggtgccctctaagcttcttcctctcctgtctttgattccttcgttgactccttatcattctgggttgagttctaaatcgttgaaacctcttgaatagtgtgattggcgtgggaatcttagttaacatttcctttccttcttctttcctttttaccctttcttctttcgcccttcgttacttcttgagattttcttagcttgatt

SEQ ID NO: 151437 - DNA, 301 bp, Arabidopsis thaliana columbia
ttgctcattattcatcatcaatctactactccgtatactttgcttcctctgtttggattagctcagaagagatatgggaagtactccgactgatttacccggtgaggatgtcgccgataacagatccggcgtcggcggtggtatttctgacgtctacggtgaggattccgccaccttggaccagcttgtcaccccttgggttacctctgtcgctagtggctacacattgatgcgtgatccgagatacaacaagggacttgcgtttactgataaagaaagagatgctcattacttaactggt

SEQ ID NO: 151438 - DNA, 406 bp, Arabidopsis thaliana columbia
aaaataatcaactaaatcgttcttctcaaattaaggttttttttttttctcgaaggtcttgcggttttctgaatcatctctatctggtttgagggtttcgtttgatatttggagaaaggggtttctggaaacaaggagttcataattcgcgatcttgatctatcgatcttcatttatatataaaagcgtgaatgagattatgatggagtcgaaaggtggtaaaaagaagtccagcagtagtagttccttattttacgaagctccccttcggttacagcattgaagacgttcgtccaaacggtggaatcaagaaattcaaatcttctgtctactcaaactgctccaagaggccatcctgagtaccagcgtgcaccgatcttcataatatagttatagctttctttac

SEQ ID NO: 151439 - DNA, 425 bp, Arabidopsis thaliana columbia
aagcagcagatcaagataggaaagaggaaagaatcatcaaaaaatgggaataatggaggcagagaggaaaacaacaggctgggctgccagagacccatctgggatcctctctccttacacttacactcttagagagactggaccagaggatgtgaacataagaatcatttgctgtggaatctgccacaccgatcttcatcaaactaaaaatgatcttggcatgtctaattaccccatggttcctgggcatgaagtggtaggggaagtagtggaggtgggatcagatgtgagcaagttcaccgtaggggacatagttggagttggttgcctcgttggatgttgcggaggttgtagcccctgcgagagagatctggaacagtattgtccaaagaagatttggagctacaatgatgtttacatcaatg

SEQ ID NO: 151440 - DNA, 435 bp, Arabidopsis thaliana columbia
aatggctccaggaactttgactgagctagccggagagtctaagctcaactctaaatttgtcagggacgaagatgaacggcccaaagtcgcttacaatgtgtttagcgacgaaatcccggtgatctctctcgccggtatcgatgacgtcgatggaaaaagaggagagatctgccgtcagatcgttgaggcttgtgagaattggggcatcttccaagtggtcgatcacggcgtcgatactaacttagtggcggatatgactcgtctcgctcgtgacttctttgctttacctccggaagacaagctccgtttcgacatgtccggtggtaaaaaaggaggattcatcgtctctagtcacctccagggagaggctgtgcaagattggagagagattgtaacgtatttctcgtacccggtgagaaacagagactactcacg

SEQ ID NO: 151441 - DNA, 453 bp, Arabidopsis thaliana columbia
gttcgaaggccattttctttggacgaccatcggcgttaaggagagagcttagatctcgtgccggcgtgcgacgttgttttccggcttgatcaaaatggggttgtcattcggaaagttgttcagcaggctctttgcgaagaaagagatgcgtattctgatggttggtctcgatgctgctggtaagacgactatcctctacaagctcaaacttggagagatcgtcaccactattccaaccattgggttcaacgttgagactgttgaatacaagaacatcagcttcaccgtgtgggatgttgggggtcaagacaagatccgtccattgtggagacattacttccagaacacacagggacttatctttgttgtggacagcaatgatcgtgaccgtgttgttgaagccagggacgagcttcacaggatgctgaatgaggatgaattgagggatgcagt

SEQ ID NO: 151442 - DNA, 449 bp, Arabidopsis thaliana columbia
  unsure (1)..(449): unsure at all n locations
gcgaagaacaaagtttgaaccttttctttatccatttctctccgtcgcttcttcctaacganngcttcactcgaatcaggtttgtgaaggttttttctagggtttcgaaaagatgccggcgacagcaggaagagtgcgtatgcccgcaaacaatcgggtgcatagtagtgcagcgcttcagactcatggaatatggcagagtgcgattggttatgatccttatgcaccaactagtaaagaagagcctaagacgacacaacagaaaaccgaagatcccgagaactcgtacgcgagttttcagggacttttggctcttgctaggattacgggttcgaataacgatgaggctcgtggttcttgtaagaagtgtggccgtgttgggcatttgacgtttcagtgtaggaatttcttgagtactaaagaggataaggagaaagatcctggtgcga

SEQ ID NO: 151443 - DNA, 453 bp, Arabidopsis thaliana columbia
agaacaatggcttcctctatgctctctttcgctactatggttgcctctccggctcaggccactatggtcgctcctttcaacggacttaagtcctccgctgccttcccagccacccgcaaggctaacaacgacattacttccatcacaagcaacggcggaagagttaactgcatgcaggtgtggcctccgattggaaagaagaagtttgagactctctcttaccttcctgaccttaccgattccgaattggctaaggaagttgactaccttatccgcaacaagtggattccttgtgttgaattcgagttggagcacggatttgtgtaccgtgagcacggtaactcacccggatactatgatggacggtactggacaatgtggaagcttcccttgttcggttgcaccgactccgctcaagtgttgaaggaagtgggagaatgcaagaaggagtac

SEQ ID NO: 151444 - DNA, 233 bp, Arabidopsis thaliana columbia
  unsure (1)..(233): unsure at all n locations
gacagccacaccgncaggagacaagggagagagaatnggggaagaggcagaagctttggccactactgcaccgctagctccaggcaccaatcagcgaaaagtacagaacaatctgcaggaaacaatacacaaaaccatacatggcaagagcattatcagctgcagatacagagcactctaatggaacaaaatgtcacgaccgcaaacgaatgaggtataggcaacaacatgtt

SEQ ID NO: 151445 - DNA, 382 bp, Arabidopsis thaliana columbia
accatcggtttcaattttcgtcttgagaaagaaaattaaattggcttcgatgggtggattacacggtgcatctccggcggttcttgaaggaagcttaaagatcaatggctccagccgtctgaatggctctggaagagtggcggtggctcaaaggtctagacttgtcgtcagagctcagcagagtgaggagacttctcgccggtccgtgattgggcttgttgctgctggtttagctggtggctcgtttgttcaggctgtcctcgccgatgctatttcgatcaaagttggccctcctccagctccttccggtggccttcctgggacagataactcagaccaagcaagagactttgcattggcattgaaagacaggttttactta

SEQ ID NO: 151446 - DNA, 421 bp, Arabidopsis thaliana columbia
gaccacgcgtccggaaaaaaaaaactcagagggccaaatctaaatggctttgttttctcgcaacaccggcacgcgcgggcctttgctcctccaatctcagcgcgccgtcgccgctgcctcggtctctcacctccacacatcccttcccgctctctctccctccacatcaccgacttcctacaccagacctggtcctccttcgacctcccctcctcctcctggtctctctaaagcggccgaatttgtgatctccaaggtcgatgatctcatgaactgggctcgtaccggatcgatctggcctatgacctttggtctcgcttgctgcgccgtcgaaatgatgcataccggtgctgctcgctacgatctcgatcgattcggtatcatcttcaggcctagtcctcgccagtctgattgtatgatt

SEQ ID NO: 151447 - DNA, 431 bp, Arabidopsis thaliana columbia
gtcactgatgaacttgaatttcaagaaaaagagattgaacattgctcacttcaagaaaagttggatatggagctaaaggaattggataagagacttgaagaaaaggaggctgaaatgaagcgcttttcaagtggtggtacatctgttctcaaacaacactatgagaaaaaagtttatgacctagaacagaaaaaaagagcactacagagagaaatcgaaggtttgagacataatcttgctagcataccatctggaccaggagatggtgcccagaaactgaaggaagaatatgttcagaaactgaacacgcttgaaacacaggtttctgttctgaagaagaaacaagatgcacaggctcagcttatgagacaaaagcagaaaagtgacgatgccgcaataaaattgccggatgaaatacacagaattaagtc

SEQ ID NO: 151448 - DNA, 435 bp, Arabidopsis thaliana columbia
attttgaatacattatatataacaaaaatagtattttaagagatcgtcgcctacgatggcttcaaaagcattgctttttttaagtctcattgttgttcttcttatagcttctgaggtggtagccagagacctcgctgagaaatcggcagagcagaaaaacaatggtacataataaaattcagactagttttatttttgttcccataaagttataaattactcgagatcgttgtatatttgtaacataacgaccatgttattctatagatcactttcaaagtatggtttattgtacaaagacctaatcctccttattcacaacccttaataatttggcctgctttaattacaaaaaaactcatactaatcacgaatcgctcatgtttattacaaatactttataaagtagtgacaatatctgaatatatcattaag

SEQ ID NO: 151449 - DNA, 367 bp, Arabidopsis thaliana columbia
  unsure (1)..(367): unsure at all n locations
cttgagactacattcaaacggcaaagagtataacagtttctgatatatnggaatgggcgaatgctgaagtgtgaaacaacggatgcaaaacacgcatgtacagtttcagggacaagagcttatccgatggggtatttttcttggagctgctgagttcagtgcagccaagatccgtaaactggagtcttgttacaaacggagttacagatgaagagaaaaagatgaatgcaacttatgtgattagcatagccaggaaacttggttgctccattttcttactccctgaagatataatcgaggtgaatcagaagatgatgctgacattgacggcgagtataatgtattggactctaaagcaaccttttta

SEQ ID NO: 151450 - DNA, 255 bp, Arabidopsis thaliana columbia
gtatataccacatactaactgaccaatttttgttctcttgtcaccaacccaaaacacgtgtctggtacatttataaacggcaagactaaaactcgaatctagtctatgttatgcaccaatcagatagacgaaaataatgctgttacagactaactttataaaatggacattattctaaataggaattcctatctagagatattgtcttcttaaattaaacaccataactattaccgatatcatggtataaaacaa

SEQ ID NO: 151451 - DNA, 341 bp, Arabidopsis thaliana columbia
caataatataatggtcacaaaactgatgtctctatcattgacgctcatcttcgtcctcctcggatctaccgtatccgtgaactcgacaccaagaaacctctcgcaggctgctgaaaacaaaggagtatggtgcatagcgggtgacaaagcgacagataagcaactgcaagcgaatatagattgggtttgcagcgacgaaggaggattccgtgactgtggagcgctcaattccggtggaccttgctttgaaccaaacacggtaagagatcacgcgtcgttcgcaatgaacttgtattaccagaaccttggtgccaccaaggaacaatgcaatttcataacac

SEQ ID NO: 151452 - DNA, 403 bp, Arabidopsis thaliana columbia
ggataatagctgaagagcttttactcaaatcgatacttcgagatgcgatttttgcttcggttgccacaaattcattttcggaaactctcgtgctcgatgtctgtactcatgggttcgaagcaattcctcgaattttgtcttcttccttcttttgcctcatacccttcttctccttcttattcttcaagtagacaagtatcttccgtttctagaagatttcgaccagttttggcctcgagacctgtgtccaaaaacagtccttattaccaaaggaccaatggtttatcatcttacaattcaatccccagagtcccaactcctgttgatactgaagtagaagcagataagagggttgttctatctagattagtgactttgaggcgtaaattggcggacagggagt

SEQ ID NO: 151453 - DNA, 427 bp, Arabidopsis thaliana columbia
cggacgcgtgggttttctaggaaaattctcatattcatctccgcgatactaacagagaggggagcacttataaaaatgggtgttggacctacaataataggtctagctggacttgctgtgatgggtcataacctatctctcaacattgcatagaaaggcttaccaatctttttttacaacagaactacttccaaagttgattagacccttctaacgagccaaaaaggaaggcaatctttctctttacggcttacatgaccccgagtcttttgtcaagtccattcagaagccacgctttattatcatgcttgttaaggctggtttttccgttgaccagaccatcaagaccctctctgcttattttgagaaaggtgactgtattgtcgatggtggtaagaatggtatgagaacactgagaggagagaaa

SEQ ID NO: 151454 - DNA, 460 bp, Arabidopsis thaliana columbia
gagaaaatccaaaccaaaagtagttttgtaacagatagatagatagaaagctcttgaagagctagaccaaaatctacttttggtcttcttcttcttcttttcataaattttcggagtggtcctatttattgtttcttggatcattagagagacagctatcgatggatgaagatggaaacttgcagattagtaatagtaattacaatggagaagaagaaggagaagatccagagaacaacactttgaatcaaccactgcttaagagacatagaactctttcttcaactcctcttgctttggtcggtgccaaggtttcacacatcgagagtttagattatgaaataaacgagaatgatctgttcaagcatgactggagaagcagatcaaaagcacagtgtttcaatacatattcttaaaatggacattagcttgtcttgtggtctcttcactggtcttatcg

SEQ ID NO: 151455 - DNA, 465 bp, Arabidopsis thaliana columbia
cttgacccggacgacgtgagtgaacaattaaaacgccaaggtgcatcaatccctctagtccggcctgggaaaagcactgctctctgcatcaaaaccgtaagatcttttctccctctctccttgatcaatttttacaaacttcccattttggtttatcatctaacaactatctgaaaatgtctcgctctgattgcaatatcaggtccttggccggatatcggttcttggttctgcatttctggctgttcttagctgctggtcctgctgtagtcgaacagatcactcacttgacagcattcagaggatttgcaggcacttctgttctgatccttgtcgggtgtgcgacagatactgcaagaaaggttcaagcagagataatctcgcaaagtacaagacattgagttttacgagcttgacaggtatgatccatgaactggaccttctgttttacatataatacccatc

SEQ ID NO: 151456 - DNA, 384 bp, Arabidopsis thaliana columbia
gatcaaagccttgcctggccattcagatgaggatggtctacctgagctccaagataataccgtgctggctagagctgagacagatggtgagcagcttgcgcttcttggagctgcgtttacaatacttgacgaacttttaccaagatcacttgttaaagtctggaaactccagattgaaaatggcggaggagaaggtgagaatagtgccgctctaaacagtagtgctgcaccggaactgaaagaatggaaacgccatatggttcaagcatttgacaaactcagaaactacttctgtctgcagtttgtcttgagcttcatctactctagggaaggactaacgcgattagacgcactcatttatttaaccgaaacaccagatgactt

SEQ ID NO: 151457 - DNA, 388 bp, Arabidopsis thaliana columbia
ataaaacgaagatgtgaagagtgaagaccgagagatatttatagcagaggaaagtgaaatcatgaaagggattctagggtttgaatgcgggatagttcaagcgccattaggaccagatatctccggaccagagcttgtagccgccgtcgctaatgcaggagggattggtcttctcagatgtcctgattgggagtgtcctgattacttgagagagcttataagaaagacaaagacattgacagagaaaccatttgggatcggtgttgttcttgcgtttcctcatgatttgaacattaagacaatcttagaagagaaagtggctgtcttgcagctttattggggtgattgttcacaggagcttgtggatgatgctcactttgccggtgtc

SEQ ID NO: 151458 - DNA, 374 bp, Arabidopsis thaliana columbia
ggtcggcccacgcgtacggaagcactttctggatttgctgaggttgttcagatggaacctgagaaagctgactggggtttgaaagctcttaagcagactgtgaagatctattatcgtctaggtaaatacaaagaaatgatggaagcctatacagagatgcttacatatatcaagtcagcagtcaccaggaattacagcgaaaaatgtataaacaatatcatggatttcgtctctggatctgctagccagaacactggcctgctgcaagagttctatcagaccactttgaaagcccttgaagaggctaagaatgagagactctggttcaagacaaatcttaaactctgcaacatctggtttgacattggtgaata

SEQ ID NO: 151459 - DNA, 350 bp, Arabidopsis thaliana columbia
gaaaatcaaagcagcagttatggccgacgtagcatcaaagcaccccatggaagatgaggtgaggaagactgaggcgtctagtttggtggggaagctagagacagacgtggagatcaaggcttcggctgataagtttcaccacatgttcgctgggaaaccacaccatgtctccaaagcaagtccaggcaacattcagggatgtgatctgcacgaaggcgactggggcacagtcggctctatcgtcttctggaattacgtacatgatggggaggcaaaggtggcgaaggagaagatcgaggcggtggagccagataagaacttgatcacgtttagggttatagaaagtgatc

SEQ ID NO: 151460 - DNA, 325 bp, Arabidopsis thaliana columbia
taaaaactcaaaaatctctgctaattcttgtttcttcggagccggagagagtgagagagagagaggggtactaactaaggtaacggttcgtttcaccggcgacggagagaaaaaacgcaggcgaggttgaagaagaactcaacatcgcagattctcaggaagaatgagtcagaagcgatctttagtcttcgccattcgagactttccaccaggctgtggaactcacatcgatgtttcgtcgagtttgaatcatccagctgagaaggccttcaagcatccaagaactggtgatgtctctggcgagaatctgagttttgctgaggct

SEQ ID NO: 151461 - DNA, 368 bp, Arabidopsis thaliana columbia
ctcagatctgagaatcatttcttcttcttcttcctcactttgttcatcatcttcttctccgagctaagacaacaatggcgacaccaggagcttcctcagcaagagatgaattcgtatacatggcgaaactcgccgaacaagcagagcgttacgaagaaatggttgaattcatggagaaagtcgcgaaagctgttgacaaagacgaactcaccgtcgaagaacgtaatctcctctccgtcgcttacaaaaacgtcatcggagctcgtcgtgcttcgtggagaatcatttcatcgatcgaacaaaaggaggagtctcgcggtaacgatgaccacgttttcgttgatccgtgactacaagaagcaaaatcg

SEQ ID NO: 151462 - DNA, 471 bp, Arabidopsis thaliana columbia
  unsure (1)..(471): unsure at all n locations
accggnnggaannccggggcggcccacgcgtccgaacaaaacaaaaatgtatttcgccgccatatctttttcacgacaaagctttttgtcaagcgatgtgagtttccaacacaggtgtggacccaaatccaatgttaacctcactcgtcctaattcaatctgttgtaaatcttcacaccacgacgacgaaactgattcttctttttaaaattaaaaatcagctggcgaagttggcaatcgcgacgctagcggttggcgttttggctttgggaagtgttggggatgcgtttgcggccaaaagcggtggaagaatcggcggtcaagcgtttcggtcttcagctcctcgtcctgctcccagaattaacaatcgatcaaggaccaacatctacgtgaatcctcaggttgcaccacctttgatcggtggctatgatatgtttacagaggttacggatggtcaaccgtttccttttt

SEQ ID NO: 151463 - DNA, 447 bp, Arabidopsis thaliana columbia
agaagagccacacactcacaaattaaaaagagagatatgagagagagagacagagagagagagagattctgcggaggagcttgttctgcgtagggtgttcatcgttattaacgttatcgcccctacgtcagctccatctccagaaacatgggtgcaggtggaagaatgccggttcctacttcttccaagaaatcggaaaccgacaccacaaagcgtgtgccgtgcgagaaaccgcctttctcggtgggagatctgaagaaagcaatcccgccgcatttgtttcaaacgctcaattccctcgctctttctcctaccttatcagtgacatcattatagcctcatgcttctactacgtcgccaccaattacttctctctcctccctcagcctctctcttactggcttggccactctattgggcctgtcaaggctgtgtcctaactggtat

SEQ ID NO: 151464 - DNA, 276 bp, Arabidopsis thaliana columbia
ctccattggacctacaataaacattctccaacctttttcttcatcactatatccacaattggggcgagacctaaagcccgcttcattaagccctccagaatctatcactttaattcacaaccccatcaacctatactatattaacccaccattcaccaacgctggtcgaccaattttccaacggtaacgctacggcactgctaatagcttcgacgcagacctctactctttcttgagctctgcctcagcggcgtattcaacacacaccgaccaaga

SEQ ID NO: 151465 - DNA, 377 bp, Arabidopsis thaliana columbia
  unsure (1)..(377): unsure at all n locations
ctttattggagaaaccctaatcggcgacaatgggtatttctcgtgactctatccacaagaggggtgcgactggaggcaagcagagagcagtggaggaagaagcgaaagtatgagatgggaaggcagccagccaacaccaagctctcaagcaacaagacggtcagaagaataagagttcgtggtggaaatgttaagtggcgtgcgttgaggctcgatactggtaactactcgtggggaagtgaagcaactacccgcaagaccagagtccttgatgtggtctacaatgcctccaacaatgagcttgtacgtactaagacactngtcaagagtgctattgttcaggttgatgctgctccgttcaagcagaggtacccttt

SEQ ID NO: 151466 - DNA, 312 bp, Arabidopsis thaliana columbia
gcaaaaaaagctaaatccaaaaagcttcaaatccttccaaacaatgacaatcgttaaaccgtgggagtgttcattctccggcgggggatgttccccgttatgttcactcaaaagctcactcctcaccgtcgctattctcactttcatttccctcttctacctctctctcaatttcttacgcacttcgccgccgtctcctgtcatcgtggtaacaccgattcatgttcctcataccttcgtgaatgagtataagactgataacgaaacaccgacgatggaagaagaaacctactccgatgtttatcactcacc

SEQ ID NO: 151467 - DNA, 370 bp, Arabidopsis thaliana columbia
  unsure (1)..(370): unsure at all n locations
agtatctcctgctgatgccgcctacggtgtatctttaaacgtgtttgggaagccaaaggcgagcacagacttcttgccatgcaggggagatggnttcaaagtgcaggttccagcaaaatggaacccaagcaaagagattgagtatccaggacaagtccttaggttcgaagacaacttcgatgctactagcaatctcaatgtcatggtcactcctaccgacaagaagtccatcactgattacggttctcccgaagagttcctctctcaggttaattacctcctagggaaacaagcttacttcggtgagactgcctttgagggaggctttgacaacaatgcagtggcaacagcaaacattttggagtcatta

SEQ ID NO: 151468 - DNA, 364 bp, Arabidopsis thaliana columbia
ctagccgctttactctcttgcgatatctctgagatttgtttgacagtctctaaccatgggtagagagaagtttcacatcgacagtgtggtcattggccacgtcgattctggaaagtcgaccaccactggacacttgatctacaagttgggtggtattgacaagcgtgtcattgagaggttcgagaaggaggctgctgagatgaacaagaggtccttcaagtacgcatgggttttggacaaacttaaggctgagcgtgagcgtggtatcaccattgacattgctctcttgaagttcgagaccaccaagtactactgcactgtcattgatgctcctggccatcgtgatttcattaagaacatgatc

SEQ ID NO: 151469 - DNA, 459 bp, Arabidopsis thaliana columbia
cccacgcgtccggaagatctcgttgacgccccaattaataaccagaggtaatggttccgcttgcatgggagctagaggaagatagactgtctcgacttgcagcccaatctcttgttcgattcagatccgtttgcaaacgatggaattatcttttcgatgaaaagagtttcatcaaaaaccacttcgctcgtgcttgtcctcagttcatcttcatgaccgattccaatatttattcgatagagatcatcggtctcgacggcgttgatccaacgattaagttacgtgtgctagactcctctggtatcccttaccgtgactggaaatttgcttacataaccatcactgcttgcgatgggttcttgttttgaactcttgggctagtcctaaggggcagctttttggaatcccgggttgaaacaggttaaatggatcgagtacgaggataaaggtttcaatgtc

SEQ ID NO: 151470 - DNA, 383 bp, Arabidopsis thaliana columbia
ctttattggagaaaccctaatcggcgacaatgggtatttttcgtgactctatccacaagaggcgtgcgactggaggcaagcagaagcggtggacgaagaagcgaaagtatgagatgggaaggcagccagccaacaccaagctctcaagcaacaagacggtcagaagaataagagttcgtggtggaaatgttaagtggcgtgcgttgaggctcgatactggtaactactcgtggggaagtgaagcaactacccgcaagaccagagtccttgatgtggtctacaatgcctacaacaatgagcttgtacgtactaagacacttgtcaagagtgctattgttcacgttgatgctgctccgttcaagcagtggtacctctcgcactat

SEQ ID NO: 151471 - DNA, 389 bp, Arabidopsis thaliana columbia
  unsure (1)..(389): unsure at all n locations
ttcttcttttgcttgagctttaggttttgagagcaaagaaaaacgaagacgcgtcaaaggtgcgtgaaatgtgtctattgcggcttgcttctgntttatgggtccctgcgacattttgagagtgttgtttggtttaggtgtctggtgtattgcttatataactgttgcaatctttgcgtcttttagaatctttcactgtatttgttaatttcaagagcttttgtggagaggttctgcttgcttgctacaatgggttacgcccagctagttattggtccagcaggcagtggaaagtcaacttattgctcgtctttgtatgaacattgtgaaactatcggtcgaacaatgcatgttgttaaccttgatcctgctgcggagatctttaacta

SEQ ID NO: 151472 - DNA, 386 bp, Arabidopsis thaliana columbia
ctcttcttctctgctcttctctctctgtagacactagaataagaacaaaaatgctcaaacagtttcggcttctccaatccttctgcttggtcctcttcaatgtagttatcgtcggaggaagaacattcggcggcggtttctcagcggaggagaatccatttactccaaaagcatctctagttcgttactggaacaaagagattcgtggccaatctcccagatcggagtttttaatctcaaaagcttcaccactcaacgccgtagactcagcaactttctcaaaactcgccgccgcgaactcgctgccgactcgttttcccgatttctgctccgccgcgaatctcttctgttttcctgatttaggagcgagtctcgagaaacacgac

SEQ ID NO: 151473 - DNA, 372 bp, Arabidopsis thaliana columbia
atttttctcctctccttattgtctatatattttttctctttagctctttcatttcgaaatggggacgggtgaggttgaacaagggactgcagtatcagtagagaacgttgaggtaccaacaaagacagtggaggagacagtggtggagacagaggtgacccaacagccggaagaattcgtccccgccgtgacagaacaaaaatccgaagcaccaattgtagaaacaaacgaagaagtggttgtggaagaggcagagaagaaagatgaagaaaccgagaagaaaacagaggagaaagacgagaagacagaagtgatcacggaaactccggtagttgaggaggaggagaagaaagcttgtgaagtgaccgaaac

SEQ ID NO: 151474 - DNA, 361 bp, Arabidopsis thaliana columbia
accgaattttgttgttgctttgttttcttgggcgattaaaagaggataatttagtggcggggttttggagaaagagagagaaagaatgagttttcaagatttagaggcgggaagaggaagatcattagcttcttcaaggaacatcaatggtggtggtagtagacaagacacgactcaagatgttgcttctggtatatttcagatcaatacaagtgtttccactttccatcgtcttgtcaatactcttggtactcctaaagatacgcctgagctcagagagaagctgcataagacaagattatatattggacagttagtgaaagatacatcagctaaacttaaagaagctagtgaaactgat

SEQ ID NO: 151475 - DNA, 459 bp, Arabidopsis thaliana columbia
  unsure (1)..(459): unsure at all n locations
gggagagagaagagaagaagaagacaccctttaagcaaaacagaggattttcattctctgttgggttggaattattactaatctgtgatgttgttgttctcttcgtcgacaatgtcgggaaacaaagaagaagaggatcctcgtatccatggaatcaaaactaagatccgtgtcgttccagattttcccaagaaaggaataatgtttcaagacataacaacagtgttgttggatccgaaagccttcaaagacacaattgatctgtttgtggagaggtacagagacaagaacatctcagtggttgcaggaatagaggctcgtggtttcctattcggtccaccgatcgcgctagccattggagcaaaatttgttcctctgcgcaaacccaagaaactactggtgaaacaatatttgaggaatacgagttggaatatggaaatgaccgnctagagatgcaca

SEQ ID NO: 151476 - DNA, 475 bp, Arabidopsis thaliana columbia
  unsure (1)..(475): unsure at all n locations
gcgtccgtccctctctctctctctccaaaccagtcctacttctctctctagaaacctagggaagaagaagaggacgggttaancgagcgatgggttcggacgactaangaagagaggagtatctcttcaagattgttgttatcggcgactctgccgtcggtaaatctaatcttctatctcgttacgcacgtaacgagttcagcgctaactccaaggcgacgatcggagtcgagtttcagacgcagagcatggagattgaaggtaaagaggtcaaggctcagatttgggacactgctggtcaggagcgtttccgtgccgtcacttccgcttattaccgtggcgctgtcggtgccctcgtcgtttacgacattacccgccgcaccactttcgaaagcgttggacgttgctcgatgagcttaagatccattcggatacgacggtggcgagaatgcttgtggggaacaagtgtgatcta

SEQ ID NO: 151477 - DNA, 363 bp, Arabidopsis thaliana columbia
gttgtctcagaagctgatatctttgtcaccaccaccggtaacaaagacatcatcatggtcgagcacatgaggaagatgaagaacgacgctattgtgtgcaacattggtcactttgacaatgagattgacatgcttggacttgagacttaccctggtgtgaagcgtatcaccatcaagccacagactgacaggtgggtgttcccagagaccaaggctggaatcattgtcttggctgagggtcgtctgatgaacttgggttgtgccactggtcacccaagtttcgtgatgtcttgctctttcaccaaccaggtgattgcccagctcgagctctgggacgagaaagcaagcggaaagtacgagaag

SEQ ID NO: 151478 - DNA, 418 bp, Arabidopsis thaliana columbia
cttccttatctcttggaaaccaagaagcatggatcgtgtggtcttcttcttcctcatcgcaggtacgttactagcagggtctcggggatctaccgtcatctccggcgaggttaccgacggtttcgttaacccgatcaggcaagtcgtcccggaggagaacgatgaacaactcctcaacgcagaacatcacttcactctattcaaatccaagtacgagaagacttacgcgactcaggtagagcacgatcatcggttccgtgtcttcaaagctaacctaagacgagctaggcgtaaccagcttctagatccgtctgccgtccacggcgtcacgcagttctcagatcttactccgaaagaattccgccgcaagtttttaggactgaaacgccgaggtttcgtcttcctactgatactcaga

SEQ ID NO: 151479 - DNA, 453 bp, Arabidopsis thaliana columbia
gtctctctgtttcagtgttcttcgcggcctttaccagtttttcagttctttgacgagcttctttcagtggtcctgaactcagggttagagcagcatttgcatatatacaaggtgttttggtgacaattgatagactctaagatgggttctgggaatttgattaaggcaataattagattgaagaagagttaacaaggaactgaaaagaaaaaaactagtgctgtgaaaccaaaaaaaggttccaagaagaagggtacatcactagttactcgtagtgaggattgggctgctactcggattcagactgcttttaaagcctataaggctagaaaaagcttacggcgtctaaaaggaattgcaagagcaaagttatcaactgagaaacaatctgtgaagaccaagctttggtcacattgaaggatcttcactcatggaagtaaatacagtcagaga

SEQ ID NO: 151480 - DNA, 446 bp, Arabidopsis thaliana columbia
gcctatttgggggatcatcaaccttctatcatcatcatggatccttacaagtatcgtggttggggcgcgtacaacgccccgttcgacaccacaaacggtggtgctccagtctccaacaacatctcttccctcaccatcggagaaagaggtccggttcttcttgaggattatcatttgatcgagaaggttgctaatttcaccagagagaggatccctgagagagtggttcatgctagaggaatcagtgctaagggtttctttgaagtcacccatgacatttcaaacctcacttgtgctgattttctcagagcccctggtgttcaaactccgggtattgtccgtttcttcaccgttgtgtcactaacgtgccagtcctgaaaccatgagggatatcctggctttgttgtcaagttttacaccagatgagggaaactttgttcttgttg

SEQ ID NO: 151481 - DNA, 465 bp, Arabidopsis thaliana columbia
atcttttttctcttcccaattttctcatcgatcactgaatcttcttcttcttcttcttccttggctgaagaacagattttttttaaacgagcttgatcaataaattctctcaagatctatggcggaagagcatcgatgtcagacaccagaaagcaaccgtctctgtgttaacaactgtggcttcctcggcagctccgccaccatgaatctctgttctaattgttacggcgatctttgtctcaaacaacaacaacaatcctcctccatcaaatccaccgttgaatcttccctctctgtatctcctccgtcgtcatcatcatcggagatctcttctccgatcatccctcctctccttaaaaatccatcagtcaagctagaggtaccggagaaaaaggcgtgatttcgctgccgacgacggagcagaatcagcaacagaggccgaatcggtgcacgacgtgtaggaaa

SEQ ID NO: 151482 - DNA, 461 bp, Arabidopsis thaliana columbia
aatgaaacactacgagcacgttaagttacaacactcttaattcatgtcttccatttcttctcgcgcagggtattttgattaatagatggttgtatcctaaccaccattgaagaaaagctcttgaggatatagctatggcatccattaccccggtggcatttgagaccgatcgggtttgaataccgacccataggcatacgctgaggtgaaggtgaaagagctcaagaacggaagattggctatgttctctatgatgggattcttcgttcaagccatcgtcactggttagggacccatagagaaccttgctgaccatttggccgatccagctaacaacaacgcatgatccttcgccaccaactttgtttccggaaagcgagccaagttttatctgcatttgcttcattctttgctttcggagtgttagaggagaaagagagctttgttagatgtaaaatttg

SEQ ID NO: 151483 - DNA, 377 bp, Arabidopsis thaliana columbia
tggatttcgaggagggtagctacagtgagatggatgatgaagtggaggaggaacaagtagaagggtgtgaataggaggaagaagaagatgatgatgatgatgacgttggcaatcagaatgccgaagaacgtgaggtggaggattatggtgatacaaaaggtggggatatggaagatgttcaggaggaaatagctgaagatgacgacaaccatattgatattgagacagcagatgatgatgagaaaccaccatctcctattgatgatgaagatagggaaaagtatttccaccttctttcacttccttctgatggttctgaagtttttattggtgggctctcaaaggggatgttggagaagaggaccctgagggatcta

SEQ ID NO: 151484 - DNA, 423 bp, Arabidopsis thaliana columbia
cggacgcgtgggttcttcttcttcttcttcttcgatagcttgagagtgctgcgtaaaaatgggtgatgcgtattgtatcttaggaggttgtattgaacaagctagcgttggtgtggtcgaacgttggggtcgattcgagcatatagctgaaccgggatgtcatttcttcaaccctctcgccggtcaatggctcgccggagttctctccactaggatcaaatctcttgatgtcaaaattgaaaccaaaactaaggataatgtgtttgtgcagctggtttgttcgattcagtatcgtgtagtgaaagctagtgctgatgatgcgttttatgagcttcaaaaccctaaagagcagatccaagcttatgtctttgatgtggttagggcttttgtcccctgatgacgcttgatgctctttttgaacaa

SEQ ID NO: 151485 - DNA, 459 bp, Arabidopsis thaliana columbia
ctccactaaaaaattcatagctctacaagagtcacctcatagagaagtgaagagacagagataggtgtgacagagagattcatggcggaagcttgcggagtgagaaggatgaagctgggaagccaaggccttgaggtatctgcgcaaggccttggttgcatgggcctctccgctttctacggtgctcccaagccggaaaatgaagccatcgctctcatccaccacgctattcactccggcgttactctccttgacacctccgatatctacggccctgagaccaatgaagttctcctcggaaaggctctcaaggatggggtgagagaaaaagtggaacttgcgaccaaatttggaatcagttatgcagaggggaaaagagaggtcaaaaggagatccttatatgtaagggctgcttgtgaggcaagtttaaagaggctagatattgcctgcatcgatctc

SEQ ID NO: 151486 - DNA, 441 bp, Arabidopsis thaliana columbia
ctcagacaagaaaggcgtgtgttcattgttgaatcttcccatttcctcatccaaattccgacgtaactatcctagccgccatttggtctccacattacaaaaccctcagcagcttcaaaactcttccgatctctccctcacgctcgcaattctctcgtctccattttaatagtttttcttctcggaatcacaaatcttcggcttcttgttccttggcgtgtgtgtgtgttgttgaatggctcttgttcagcggattccaatttcctcctccagtattcggaattggcaacaagcgaggaccaatttgactcctatttgttgtttacattacaatactgcatcttcttcttcttcaccctttacagagaagcactctgtggagagataccaagggatcaatggctgtacaaagcggttgaaccaacgccaccatcgactcca

SEQ ID NO: 151487 - DNA, 249 bp, Arabidopsis thaliana columbia
  unsure (1)..(249): unsure at all n locations
caatcgcacttcctttaccagatcagacgtcaatttcaacttttcagtgaagagatttctttcaccggattttctactccgatcgatcaattgaagattgaaatggaagctaattcaggcggaggaggaggagctgcaggcggatgagcgataaccggaggaggagtaggaggaggagggagcgataccaaattcttgagcangacgttacacgcggagcatacagagtaatcttgtgatcttaaagag

SEQ ID NO: 151488 - DNA, 463 bp, Arabidopsis thaliana columbia
cggacgcgtgggcaaaaatggagtcatcagtgaaactccaatcctttcctctccttctctggtggcattcaccaccagtgtgcccggttcagctccgacctctccgcccgaatcgaagacacgaaacgattcgccgaaaccctagctactcgacgtttctctcttcctactccgccgcctttcgcctccgtctcacaatccaagtctggaaccccgacgacgacgttgagtccatctcttgtcgctaaagctctcgctgggacgtcggtgtttacagtcagtaacaccaataacgaattcgttcttatctcggatcctaccggaggcaagtctatcggtttgctctgttttcgacaagaggatgctgaagcttttcttgctcaggcgcgacctggagaagagaattgaaaaccaatgcgaaggttgttcccattactctggaccaggtgtacttgctaaaagt

SEQ ID NO: 151489 - DNA, 446 bp, Arabidopsis thaliana columbia
ggatgaaactcgatgtggttgcttataacactgtgattcgagccattggagcgtcgcagggtggtgaattcggtatcagggtatttcgggagatgagggaaagaggttgtgaacctaatgttgcgactcataacacaatcattaagcttctatgtgaagacgggaggatgagagacgcgtatcggatgcttgatgagatgcctaagagaggttgtcaacccgattcgattacttacatgtgtctcttttcccgtttggagaaaccgagtgagatcctaagtctgtttggtaggatgataaggagtggagtgaggccaaagatggatacttatgtgatgctaatgaggaagttcgagagatggggatttcttcagccggtattatatgtgctaagacaatgaaagagtctggggattctcctgattcaacggcatttaatgctgtga

SEQ ID NO: 151490 - DNA, 460 bp, Arabidopsis thaliana columbia
acaaaactcaactaattgtgttatcacccaaaagagaagagcaaacacaatggctttcgctttgaggttcttcacatgctttgttttgacagtgttcatcgttgcatcagtggatgcagcaataacatgtggcacagtggcaagtagcttgagtccatgtctaggctacctatcaaagggtggggtggtgccacctccgtgctgtgcaggagtcaaaaagttgaacggtatggctcaaaccacacccgaccgccaacaagcatgcagatgcttacagtccgctgcaaaaggggttaatccaagtctagcctctggccttcctggaaagtgcggtgttagcatcccctatcccatctccacgagcaccaactgcgccaccatcaagtgaagtcggaataacgacatcatttgcctgaagagtatggtttcgtatacgtaaaataagacggctatctaagct

SEQ ID NO: 151491 - DNA, 198 bp, Arabidopsis thaliana columbia
attacaaacaaaaatggttttgcaaaagcttcctctcattgtgctgttttgctcctgaccaatggcgggctttcaacaaattgagattggccttttttgccgccctcgaacaaactataaccggccaggtttcctgaaggttttttatttggcaccgctactgcgggataccaagtcgaaagtgccattaatgaaact

SEQ ID NO: 151492 - DNA, 362 bp, Arabidopsis thaliana columbia
gagactttctggccatggcagcctctctccaatctaccgttacattcctccagtcggcgaagagcgcgaccgttccttctcgcggaagtgctcacctccgatcgactcaagccgtctgcaaatctcttgggctcgaaacttcctcggatcgcctcacttgctccttccagtctgactttaaggacttcaccggtaaatgctccgacgctgacaaaatcgccgcattcgctcttgccacctttgctctcgtcgcctcggcagcaagtgcggtgggagctccaaagagattgacctatgatgagattcagagcaagacatacatggtagttaaaggaactggtacggttaaccagtgccctact

SEQ ID NO: 151493 - DNA, 461 bp, Arabidopsis thaliana columbia
cgtcaactttaaacatcttccaatctctgaaagccctttttttttctccatttcgtgcttcatggtgggcgtcgtcgcttcggggctgacctctcatggaagggaacttcttcatcaggtctgatgctcaacgagcacatgacaatggcttcatagccaaacaaaaacctaatctcaccacggctccaacagcaggtcaagctaatgaaagtggctgttttgactgcaacatctgtttagacacagcccatgatccggtggtcactctctgcgggcaccttttctgctggccttgcatttacaagtggttacatgttcagttatcttctgtctccgctgatcagcaccagaacaattgccctgtttgtaaatccaacattactatcacctctttcttcctctctatggaagaggcatgtcttcgccttcttccacgtttggctccaagaaacaagacgcac

SEQ ID NO: 151494 - DNA, 468 bp, Arabidopsis thaliana columbia
ctcagagaaaacactcgacagccctccacacgtgtcatccctgccggcgaaccattccatacagagatgtgacgccgtatttcacacgtgtgtcatcatagctctcatgtatcaccatgtacactcaattgtcaacgcaaacaacactctaataacatgtcttcttctcctctccgatattgttctcgccttcatgtgggcaaccacaacttccctccggttaaacccgattcatcggaccgagtaccctgaaaaatatgctgctaaaccggaggactttccaaagctggacgtttttatatgcacggctgatccgtacaaggagcctccgatgatggtggttaacaccgctttatcggtgatggcttacgagtatccgtctcataagatctcagtgtcgtatcggacgatggaggatcttccttgactttgtttgctcttatggaggctgccaagttctctaagcat

SEQ ID NO: 151495 - DNA, 442 bp, Arabidopsis thaliana columbia
gtcggatcttctaagtctagctagggataatggctactgtcactactcatgcctcggcctcgggtttccgaccttgtacttcaaagccaagattcctcaccggttcttccggtaggttgaaccgcgacttgtcgtttacatcgatcggttcatcggccaaaacgtcgtcgttcaaggttgaagctaagaaaggagaatggttgcccggtttggcatcgcctgattatctcaccggcagtcttgccggtgacaatgggtttgacccgttgggtctagcagaggatccagagaacttgaaatggttcgtccaggcagagctggtcaacggacgatgggctatgctcggtgtcgctgggatgctattgccggaagttttcaccaagatcggaatataaatgttcctgagtggtacgatgcttggaaagagcagtatttgcatcgt

SEQ ID NO: 151496 - DNA, 426 bp, Arabidopsis thaliana columbia
aagaaaacgaaactcaactaattttgttatcacccaaaaagaagttcaaacacaatggctttggctttgaggttcttcacatgccttgttttaacggtgtgcatagttgcatcagtcgatgctgcaatctcatgtggcacagtggcaggtagcttggctccatgtgcaacctatctatcaaaaggtgggttggtgccaccttcatgttgtgcaggagtcaaaactttgaacagtatggctaaaaccacaccagaccgccaacaagcttgcagatgcatccagtccactgcgaagagcatttctggtctcaacccaagtctagcctctggccttcctggaaagtgcggtgttagcattccatatccaatctccatgagcactaactgcaacaactcaagtgaaatggaagcttacgtcgtcgttttg

SEQ ID NO: 151497 - DNA, 459 bp, Arabidopsis thaliana columbia
caaaagcctatttgggggatcatcaaccttctatcatcaccatggatccttacaagtatcgggcttcaagcgcgtacaacgcccgattctacaccacaaacggtggtgctccagtctccaacaacatctctttcctcaccatcggagaaagaggtccggttcttcttgaggattatcatttgatcgagaaggttgctaatttcaccagagagaggatccctgagagagtggttcatgctagaggaatcagtgctaagggtttctttgaagtcacccatgacatttcaaacctcacttgtgctgattttctcagagcccctggtgttcaaactccggttattgtccgtttctccaccgttgtccacgaacgtgccagtcctgaaaccatgaggattttcgtggttttgctgtcaagttttacaccagagagggaaactttgttcttgttgggaacaacac

SEQ ID NO: 151498 - DNA, 372 bp, Arabidopsis thaliana columbia
caatcgcacttcctttaccagatcagacgtcaatttcaactcttcagcgaagagatttctttcaccgggttttctactccgatcgagcaggtgaagattgaaatggaagctaattcaggccgaggaggaggagctgaaggcggaagagcggtaaccggaggaggaggaggaggaggagggagcgatgtggaattggtgagcaagacgttgcaagtggtgcataagactatactattttgatcataaagagaatcctccgtattaggtttcttaagatattgctacaagaccgctcgctacttagtacaacacatcattgtgtccgttggtacggctatctttttgttgttccttgatcttctttaaccttct

SEQ ID NO: 151499 - DNA, 445 bp, Arabidopsis thaliana columbia
aaggagaatgggagatctctacgctttggacttcgatggagttctctgtgatagttgtggagggagctctctatctgctgttaaggcagccaaagtgagatggcctgatttgttcgaaggagttgattccgctttagaggaatggatcgtcgatcaaatgcatattgtgagacctgtggttgaaactggctatgaaaatcttctacttgtgcggctgttattggagaccaagataccgtctattcgaaaatcttcagttgcagaggggttgacggttgatgggatactggagagctgggcaaagtttaagcccgtgatcatggaaacttgggatgaagatagagatgctttggtagatttgtttggaaaagttagagatgattggatttcaaggacttgacaacttggattgtgccaatagattctacccaggagtttcagatgc

SEQ ID NO: 151500 - DNA, 440 bp, Arabidopsis thaliana columbia
attccatatagaagtgattctttgtttagtttgatttagcaacattacaaatagtcttgtttggggttcaaagacatggggattggtcctcatcctactccatatgcaggaaatggacttttgggttgttattactattaccctttcacaaacgcacaattgaaggagcttgagagacaagcaatgatctacaagtacatgatcgcatctattcctgttcctttcgaactacttgcttcttcaccatcctctgcctcttcttgtaacaataaaaacatcgccggagatttagagccgggaagatgccggagaacagacggaaagaaatggagatgcgcgaaagaagtcgtctctaatcacaaatactgtgagaaacacttacacagaggtctcctcgttcaagaaagcatgtggaacctccttattctcgccctaacaac

SEQ ID NO: 151501 - DNA, 456 bp, Arabidopsis thaliana columbia
gagagaaggagaagagtcgaaatcgccattgaaatttctctcaaagcttcacctgttaccggagtattccctcctctccggcctactgcttcttcttccccttcgacttcttctaatcgcccttgttccctcaggattctccctctcagaacatctttcttcggtaactcaagtggagcgctgagagtgaatgtgttgagattagcttgtgataatagactcaggtgcaatggtcatggtgctactatgaatctttttgaacgattttctagagtggtcaagtcatatgcaaatgcgctcataagctcttttgaagacccggagaaaatcctggagcaaactgtcattgaaatgaatagtgatttgacaaagatgcgtcaagccactgccaggttttagcatcacaaaagcagttacagaacaaatataaagctgcacagcagtcttctgatgatt

SEQ ID NO: 151502 - DNA, 193 bp, Arabidopsis thaliana columbia
caatcgcacttcctttaccagatcagacttcaatttcaacttttcagtgaagagatttctttgagccgattttctactccgatcggtcagttgaagattgaaatggaagctaattcatgcggaggaggaggagcttaaggcggaagagcggtaaccggaggaggaggaggaggatgagggagccttttggtat

SEQ ID NO: 151503 - DNA, 289 bp, Arabidopsis thaliana columbia
cagaggaggagcgaggacagcctccatgtatccagtttgttcatcggtggccagcgcaatcggaggaggaggattataaattcgcggtggggaatatttattcattgaaggttatcacctcagatgaattcaaagggatcgtcatgtcttacgaccccatccccaactttgtctttttttaatagggtacaaaacctatacctgtgcattttaagaacactctgatggagaatgcgagttttattacagggcttttttatttatgcaaaacttaaaatccactttattc

SEQ ID NO: 151504 - DNA, 433 bp, Arabidopsis thaliana columbia
ctgagagataatttaacaaatttcttcttcttcttctgtttctgaaccaccaaatgtgccgttctcaattagctatgggcgtcgctgttctaaatccccaggattgcttgaaagatccattctctcacatgaaacaacatcgtaatcctagcgcatgtcccaacaggcagaagaagacggtctccaacaaccgtacacgccggagtcctcctcgtagtcaatcctccagatcttcttctcctcctgtagcgccgccgcttcctcctcctcgtgcggctgtctctgctttcgttccaaagggaacccttaagaagagtcttagcaataccgttgccgttagccaggtgagaatccttaagcgcggcgaagaaatccccaaggagacttctatctggttgtggaaatgtcagatctgggatctactcgtcggatt

SEQ ID NO: 151505 - DNA, 442 bp, Arabidopsis thaliana columbia
ggaccgccctttttttttgatttctgaaatatgtttattcttcttcgaaggccattgcggaaggatgctctgctgtgaatggccagtgacatgcaatcaaaaccggtaagagaaaacgaagaggaagtcaataatcaccatgctgttcagcagccgatgatgtatgcagatccctggtggaaaaacaactcctttggtgttgtacctcaagcgagaccttctggaattccatcaaattcctcttctttggattgccccaatggttccgagtcaaacgatgttcattcagcatctgaagacggtgcgttgaatggtgaaaactatcgcacttggaaggattcacaagctgcaacttcctctcgttcagataatcacggaatggaaggaaatctccagcgctctctatccgtaacatgcatgatcagccacttgtacaaccacc

SEQ ID NO: 151506 - DNA, 460 bp, Arabidopsis thaliana columbia
  unsure (1)..(460): unsure at all n locations
aaaagaaattgagaagaaaaaagaaaaaaaggtgaccgtattctccgtcgattgtagccgcccggaggagtatcttctcctctctgggttgaccacnaatttgctctgatattagtgtttctctagccatggcgaacgcggcatctggaatggctgtgcatgatgattgcaagctgagatttctggaactgaaggctaaaaggacacaccgtttcatagtttacaagattgaggagaagcagaagcaagttgttgttgagaaagttggtcaaccgatccaaacttacgaggagtttgcagcatgtcttccagctgatgaatgccgttacgccatttacgattttgactttgtaactgctgagaattgccagaagagcaagatcttcttcatcgcgtgtgtccggatattgctaaggtgagaagcaagatgatctacgcgagctccaaggacaggttcaag

SEQ ID NO: 151507 - DNA, 415 bp, Arabidopsis thaliana columbia
agctttcatttttcaatctcatcagagagaaattaatctatggcgaagaagattggagtaacggtggaagttgggaacgatggtgttgctgtcatcaccatttctaaccctcctgttaactctttagccagtccaattatttctgggttgaaggagaagtttcgtgacgccaatcaaaggaatgatgttaaggccatcgtgttgatcgggaacaatggaagattttcgggtggttttgatatcaatgtctttcagcaagttcataagactggggatttatcgcttatgcctgaagtatctgttgagcttgtgtgtaacctgatggaagactccaggaagccggttgttgctgcagttgaaggattagctcttggtggtgggttggaacttgaatggcgtgtcatgccagagttgc

SEQ ID NO: 151508 - DNA, 428 bp, Arabidopsis thaliana columbia
cgaccattttagaaaaagcttctcaaattctctccttatccccaaaaattcaaacttttttctggttggaaaattctgaggcaaggatgcggcgtaattgctgccatgtttcatttgcttcaaccctcaagatccttaattttgtccaagctttcattggtgtttcgatcattatctactccatatggatgctccatgaatacagccgtcaccttcccgtggacccgccttcgtcagcttcatcaagctccggaaccgagatcgctactagtgtatctgagcccttgaagaatcctattgattttgtggcgagtatcattctcgggtctaatggtggtgatcatgggtttaacctacgctcgttggaccttcctgctccatggttcatctctctttcatggcggttggtatattggtctgcattggta

SEQ ID NO: 151509 - DNA, 430 bp, Arabidopsis thaliana columbia
cgtcaacctccatgatcgatctcatggcagcaatcatcaaaggagagcctgtaattgtctccgagccagctaatgcctccgcttacgagtccgttgctgctgaattatcctctatgcttatagagaatcgtcaattcgccatgattgttaccacttccattgctgttcttattggttgcatcgttatgctcgtttggaggagatccggttctggggaattcaaaacgtgtcgagcctcttaagcctttggttattaagcctcgtgaggaagagattgatgatgggcgtaagaaagttaccatctttttcggtacacaaactggtactgctgaaggttttgcaaaggctttaggagaagaagctaaagcaagatatgaaaagaccagattcaaaacgttgatttggatgattacgcggctgatgatgatga

SEQ ID NO: 151510 - DNA, 315 bp, Arabidopsis thaliana columbia
ctgacgcgtgggcaagcctatttgggggatcattatctcttttatcatcaccatggatcgttacgaggtatcattcttcaagggcggacaactccccattctacaccacaaacggtggtgctccagtctccaacaacatctcttccctcaccatcggagaaagaggtcctgtatttcttgaggattatcatttgatcgagaaggttgctaatttcaccatagagaggatccctgagagagtggttcatgctagaggaatcagcgctaagggtctctttgaagtcacccatgacattacaaacctcacttgtgctg

SEQ ID NO: 151511 - DNA, 454 bp, Arabidopsis thaliana columbia
  unsure (1)..(454): unsure at all n locations
attattgcaaccatttctctgctgtttctttttcttttagcttcagaggacgacaatggggtgtgctagagagagagatggatcgatcnncnacctttttaattcgctcgtaattcgttttgattttcgtgtttttgcaacgaatttaacaacttctgtgtgtgtgtgtgtgagtttcttaagagaagtcagaaacaatgattgggttgtttaaagtaaaggaaaagcaaagagaacaagctcaaaatgctactagaggaggagcttctgttaagaagcaatctgctggcgaacttcgtcttcacaaagatatatcagtatttaacctttctagctcttgttcaatatcttttccaaatggcaaaaattatttgatgaactttgaagtttcattaaacctgatgatggatattaccacaatcgtacgtttgtttttacattccaagtcttttct

SEQ ID NO: 151512 - DNA, 381 bp, Arabidopsis thaliana columbia
  unsure (1)..(381): unsure at all n locations
cgtccggttctttcaaaaatcaaatttttatttctgggttttttttttttttgtgatcatggncgtcagggaggtcttctaatctaatacgactggggaanctngtggtttgatctcgccgtcgccgccgtcttccgtcaccagtcaagaatcaggagcttcttctaacaacgatcacttttgaaatggaatccatgatgagatcggagtccacgtggcgagatccgactgtggtgagagtttttaagcgtgatatgagagagcttcacgagctcttgtctaagcttaatcctattgctaaagagtttattcctccttcacttactaaagccagttgtaatggttttaacggcggtttctttgcccgtaataatggctttg

SEQ ID NO: 151513 - DNA, 378 bp, Arabidopsis thaliana columbia
  unsure (1)..(378): unsure at all n locations
ggtcgcgcacgcgtacgctcctgtttccgttttactcgacatcgttccgactacttttgacctggaatcaacgcantggcgtcaggttaactattgcacttggttgggtgacaatggacaaaggagcacctcctagtatttttgtgaatgatgggtcattcatggaaagattcagacagcttcaacaggagaaagataaagacaaggataaggttgtccaagttgaggattctaagccggtgaagattatatcaaatcccaaacctgctgctaataaaatttccattggattaaagcccaatgatgcccacaagaaaggtggtaagcttgctttcagctttgagcaaaaatctaagcttcttgcaccttctgtgaagc

SEQ ID NO: 151514 - DNA, 471 bp, Arabidopsis thaliana columbia
cgcgtccggcaaagcttatttcgatttttgattctcttattgaacaatgtgcactatctagaccaattaagggtgagggtgctcttaagggtgggcggaaaccaggaagaatgcttcttaatttggatgaggatgaacagccaaagaagaaaatcagaattggcagtcctgcttgtcagtggatctcagtctataatgctcgtcgtcccatgaaacagagatatcactacaacgttgcagactcaaggttgcatcagcatgtacagaagggtaatgaggatggccttttaattagctgtgtagcatcagcagctaatctctgggccctcataatggatgctgggactggattcacctctcaagtttatgaattgtcaactgtcttccttcacaaggactggatatggaacaatgggaaaagaactactatatcagttccatagctggttcagataacgggaactcattagt

SEQ ID NO: 151515 - DNA, 459 bp, Arabidopsis thaliana columbia
aaacatataaacataaacgccaatcgcagcttttgtacttttggcggtttacaatggagaaaggtttggcgatgtcttgtgttttggtggtggttgcattcttagccatggttcatgtctctgtttcagttccgttcgtagtgtttcctgaaatcggaacacaatgttctgatgctccaaatgctaacttcacacagcttctcagtaacctctctagctcacctggcttttgcatagaaattggcgagggaaatccaataggcgcttcatggttaataccacttacacaacaagcggaagtagcgtgtgattaggtgacgcaaatggaagagttgagtcaaggatacaacattgttggaagagctcaagggagcttagtggctcgaggcttacttagttctgcgaaggtgggcctcctgttcacaactatatatccttggctggtcctcatgctggcac

SEQ ID NO: 151516 - DNA, 457 bp, Arabidopsis thaliana columbia
  unsure (1)..(457): unsure at all n locations
ccataattgcttcgatttctctgcaaagacacaacacaaaaagtgctttttttaatcagatatgttctgggcttcactttaactgggttggtgcttggttttccgatcttagtcgttactaattgagtcggagactgttcatttcctgattctgaagaaagttttggagaaggagaagatgtcaactctgcgagtgagctagggtttagtgtgttttccgatttttgagctcttggggattgttgttttctcttaaagagtcgattttgaatggcggtggagtatgtatgttgcagcccaaacttctttatacatatagctgtgattgtgtttcttgtcttgttcgctggactcatgtctggcttaacattgggtcttatgtctttgagttttgntgatctgaagttctcgctaaatccggtacacctgaacatcgttaatatgcagcaaagatatt

SEQ ID NO: 151517 - DNA, 402 bp, Arabidopsis thaliana columbia
cccacttcaaaaaccctttcttttcataatcttatcaatcaatctcatctttcttcaagcagagacaactactcaaatctgtacggagaagacttatgttatccacatggataaatctgccatgcctttaccttacactaatcacctacaatggtactcttcaaagataaactctgtaacgcaacataaatctcaagaagaagaaggtaataacaacaggatactctacacttaccagactgctttccacggtttagcagctcagcttactcaagaagaagcagagaggcttgaggaagaagatggtgttgtagctgtgatacctgagacaagatacgagcttcacactacaagaagtccaacgtttcttgggttagaaagacaagaaagtgagaagtttgg

SEQ ID NO: 151518 - DNA, 333 bp, Arabidopsis thaliana columbia
ctcccacctgatttgagctgtttctttctctttcgaactctccgtcacttccatttcagtgtctgtttgaatcttctcaaagctaggcagatctctgaaatcgaaaaagcttgagctgtgttaatggcggaggagaaatgggtggtgatggtgacggcgcagactccaacgaatatcgccgtgattaagtattggggaaagagagattaggttcggattcttcccattaatgatcgcattagcgtcacgcttgatcctgatcaaccttgtactctcaccaccgtcgctgttagtccttcctttgatcgagatcgaatgtggctcaatggcaag

SEQ ID NO: 151519 - DNA, 309 bp, Arabidopsis thaliana columbia
aattatcttctcctactatcattattctctataatttttctcaacctcttcttgctcgggatcgctcttcctccaaaaaaggatggggaccaataacttaaattctactaacggtgacgcacgctttagtttccctaaaagacctaatatgccgaacataaccaccttttcatcaaacagaggtagcgaaatctcccacgacaattgtgttccaactataaattccacaaccatctattagcctcattcgttacagaataaacgatctcctcctaccacaccatacaaccaaaactccatcccttcttt

SEQ ID NO: 151520 - DNA, 443 bp, Arabidopsis thaliana columbia
gacagcaattcttagtttctcttttatttcctttctgggttttgtttgaacgctggctcgctttggatccagtggttgtaagttaaaggtaaatttatcgaaagtaagtagattcctaatggcagcttccaatcattcatctggtaaacctggaggagttttaagtgatgctttatgtagggagctctggcatgcctgtgctggacctcttgtaaccctacctcgtgaaggggaacgagtttattatttccctgaaggccacatggagcagctcgaggcatcaatgcaccaaggtttggagcaacagatgccttccttcaacctcccatctaagatcctctgtaaagttatcaacatccagcgcaaggcagagccccgagttacgaagtatatgcccaaataaccttattgccagaactggatcaaagcgaacccactagccc

SEQ ID NO: 151521 - DNA, 405 bp, Arabidopsis thaliana columbia
ccctgtcaagatcctgaatcatctgatctagaaggaaactagagtttgtgaaatgagattaaatcttgtgagaaatgtctgaaaaagctgcaggtttctatacttctgttagtactctaattcaaccgagaaagtcgaatacatacacacattcataacacttttgaggaagatgttaagtggaaacaatggaaacactgcaccaccggttttcatgaacgagaaccagttgcaataccagacaaacctacgatcgaatcagcttcacttgctcggaaacatgggaggtggatgcactgttgatccagtaaactactttgctaacgataacctcgttccaatgatccgccctaacaaaagaggaagggaagccgtaagcctagtaacaacatccaaagacaacag

SEQ ID NO: 151522 - DNA, 383 bp, Arabidopsis thaliana columbia
  unsure (1)..(383): unsure at all n locations
gaaataacaaaatggctcgagtctcttctcttctttctttctgcttaacacttttgatccttggccagggctacacggctcaacggggtcagcanggtcagcagtttccgaacgagtgccagctcgaccagctcaatgcgctcgagccgtcacacgtactgaagagcgaggctggtcgcatcgaggtgtgggaccaccacgctcctcagctccgttgctcaggtgtctcctttgcacgttacatcatcgagtctaagggtctctacttgccctctttctttaacaccgcgaagctctctttcgtggctaagggacgaggtcttatgggaaaagtgatccctggatgcgccgaaacattccaagactcatcagagttccaacca

SEQ ID NO: 151523 - DNA, 454 bp, Arabidopsis thaliana columbia
ggaaaaatggcgtgtttcgcaaccaaacagccttttttgttgtctctcctccttgccattggcgtctgtgtggtggctgcatctgccggaaacttctatgagagctttgatatcacttggggtaatggtcgtgccaacatattcgagaatggacagcttctcacttgtactcttgacaaggtctccggctcaggttttcaatccaagaaggagtacttgtttggtaagatcgacatgaagctcaagcttgtcgctggaaactctgctggcaccgtcaccgcctactacctatcgtcaaaaggcacggcatgggatgagattgacttcgagtttttgggaaatcgcacaggacatccttacactatccacaccaatgtgttcaccggaggtaatgcgaccgtgagatgccagtccgtcttttgttcgatcccactgcggatttccacacctacac

SEQ ID NO: 151524 - DNA, 242 bp, Arabidopsis thaliana columbia
gccgatgagttgatcgccaacgctgtctacattggcacacctggaaaaggtatggtgggtgctgatgagtccactggtaccattggaaagcgtcttgcgagcatcaacgtcgagaacgttgagaccaacagacgtaaccttcgtgagcttctcttaccgcccctggtgctcttccatgcctcagaggtgtcatacttttcgaagagactctgtaccaaaagagatccgatggtgagcttttc

SEQ ID NO: 151525 - DNA, 431 bp, Arabidopsis thaliana columbia
  unsure (1)..(431): unsure at all n locations
cgggntttcctccgatacatctncctcgtcgccgttcttctgattttcactcttctgctcgagaggggagtgcttgagaatcattgaagaaggtgatcgctggtgctgttttgataactcaaagccgttttgctgaaagagggttaccaaagttagaagctcaagaacttggagctgtgtcttctttttgtatcatgccatattttattcagaggcttttcaatacttgcaagtcatctctctcacctaatggtcctgtgtctgaggaggccttagacaaggttcgcaatgtcttggagaaaatcaagccgtctgatgttggtctcgaacaggaagctcaattggtgcgtaattggcctggtcctgggaacgagcgtaatggaaaccatcattctctgcagcaataaaataccttcagttacatgagtgtg

SEQ ID NO: 151526 - DNA, 436 bp, Arabidopsis thaliana columbia
ctttcgaactctctctttatctctcttgcaatgaatctctctatgcgtttgatctcagctgttctcatcatgttcatgatgttgggcgccactgggatgggaccagtcactgtggaggcacgcacttgtgagtcgcagagccataggttcaagggtacatgcgtgagtgcatcaaactgcgccaacgtgtgccacaacgaaggctttgtcggaggtaactgccgtggattccgtcgtcgttgcttctgcaccagacattgctgatctacccattctcatgcataattcaagctttgatccatcgtcgtgtgtcacttctttcttatctaatcttccgtacagtaccatgaagtaccgtacattagtgtgttctcaaataagtctttggatttggtgtttccggtttaaatgtaatgttaaatcaactaatgacttt

SEQ ID NO: 151527 - DNA, 434 bp, Arabidopsis thaliana columbia
gggatttttgttccgatctacttctccggcttatcaccgatttagatctaagcctgaggtttccttttgcattttagagattccgagaatgagacaacggcaactattttccgtgtttttgcttctcttagctttcgtttcgttccagaagctttgctactgtgacgatcaaacggttctgtatgaatcgttcgatgagccttttgatggccgctggatcgtttcgaagaatagtgattacgaaggtgtatggaagcatgcaaagagtgaaggacatgaggattatggacttctcgtgagtgagaaggctaggaagtatggaattgtgaaagagcttgacgagcctctaaacctcaaggaaggaactgttgttcttcagtacgaggttcgtttccaggaaggacttgagtggggtggtgcttacttgaagtacc

SEQ ID NO: 151528 - DNA, 445 bp, Arabidopsis thaliana columbia
gagaaaccagtcacaaatccttcaccgacgtaacctgcgtctgcatcgctcgatagagacgctaaactaactgacatgtgagacgacaatagattgatttttgactgacccaggaatgaaagcataaagaacaacataacaaccaaagctgtgaatacaattgcctatgaacatgcttgggaaaacagcaagaaagcagttcacgcacctcaacttatgaaaatcgaggagcaactagagaagaagaaagcatattatgccctgcggatgaagaatacatttgcaccgattcacatggaatccgcagacagaagagcactgctcgaagctgagcttagcgaagacgtccttcaagcataagaaacggatgttatatacaaagccactggaattcgtccaatagcaacttctggatgtcactaatctcgaattagcgaatcaaagt

SEQ ID NO: 151529 - DNA, 447 bp, Arabidopsis thaliana columbia
cccgaatgcttgaatggtgaatttgtgagggttgttccaaaccccaagtttgatgctgtcgctggatatcactggtttgatggagatgggatgattcatggggtacgcatcaaagatgggaaagctacttatgtttctcgatatgttaagacatcacgtcttaagcaggaagagttcttcggagctgccaaattcatgaagattggtgaccttaaggggtttttcggattgctaatggtcaatgtccaacagctgagaacgaagctcaaaatattggacaacacttatggaaatggaactgccaatacagcactcgtatatcaccatggaaaacttctagcattacaggaggcagataagccgtacgtcatcaaagttttggaagatggagacctgcaaactcttggtataatagattatgacaagagattgacccactccttcact

SEQ ID NO: 151530 - DNA, 445 bp, Arabidopsis thaliana columbia
agaagtacctctcttttcaagatgttgaagtgaagcgtttcaattcttcaaaaacggtttggggattgtcaaaagctcttccgggtgaaacactcaaagaccgtgcaaagggatttatcttgtacggtgaagaacatgagttcggtgctcatgtgaagattgtttcacgacccgcctcttttggtgaagatctcccttttcacaaattctcttggactattcgtgatttcgctcttctggaacagaatgattacgtatccaaaacctttcacatgggagaaaaggattggactctaaagttgtatccaaagggggactctgaggcagatgacaagttaattcagcatttgcatttagctgacggtgaaactttagccaagggtgagctgattttcgtgcgagtaaacctgaaggttctagacccgcgtggatccaatcacctaac

SEQ ID NO: 151531 - DNA, 187 bp, Arabidopsis thaliana columbia
tgtttttactaaatagtgttagtcagcgttcattggctcaaacccttgttctttctgcttatggaatgcgaagttcagatgcatcaaatcaatatgtgaaggacctcatggctcatatgacatcatctctagtggacttgtccaatagtagtgaccttaaaaaattgggctcaacaaccctgatatt

SEQ ID NO: 151532 - DNA, 445 bp, Arabidopsis thaliana columbia
caagaatgggtagatccaacgagcaagatctgctctctaccgagatcgttaatcgtgggatcgaaccatccggtcctaggggcggctcaccaacgttctcggttagggtcaggagacgtttgcctgattttcttcagtcggtgaacttgaagtacgtgaaacttggttaccactacctcataaaccatgcggtttatttggcgaccataccggttcttgtgctggtttttagtgctgaggttgggagtttaagcagagaagagatttggaagaagctttgggactatgatcttgcaactgttatcggattcttcggtgtctttgttttaaccgcttgtgtctacttcatgtctcgtcctcgctctgtttatcttattgatttcgcttggtacaagcccttcgatgaacacatggtgacatatgaagagttcatagaactagcgag

SEQ ID NO: 151533 - DNA, 400 bp, Arabidopsis thaliana columbia
  unsure (1)..(400): unsure at all n locations
ctccatttgcttaatctcattttcgtttcaccgccttctctctctatatcaaaatggggcggcgtatctcaggaggaaggtctgcccctcaccctcatcctgctgctgcacgcatcccaactcctcaacctgtacaccgtgcacctcctccagctccagctcattccatcggttgtggtggtggcatgttctcaggcattggttcaaccattgctcatggtatggcttttggtactggaagtgcagtttcacacagggctgttgattctgtgatgggtccactaaccattcancatgaggctgttgaggctgcttctgcatcttcagcccctgctggaagcgccatgctttctaacacctgtgacattcatgctaaggctttccaagattgcatcggcag

SEQ ID NO: 151534 - DNA, 443 bp, Arabidopsis thaliana columbia
cacatttcttttccttattttaatcaaaacatttgtttgcatcattcacaggcaaataaaaagcctccgtttttcttagattggtactaggtataaagtagagagtgcacatagatgtaattatcaaacgaggaagcatcattatcattatcattatcatcattactgcttcatagattcatattattgcttatctaaaagtttgcttttgtagtagttggtggtcaagtaggatttgatttgatcttctagaattacagatcgagaaacagcaaatctgaggttttagaaaatgggatcttcttctgggcaaagtggatacgatctgtcttttaagaacttgttgattggtgattctggtgttggtaaacgcagcttgcttgtcagcttcattcatagctccgttggagatcttgctcctactattggtgttgatttcaaga

SEQ ID NO: 151535 - DNA, 443 bp, Arabidopsis thaliana columbia
ctgcggaacgaaacggtaccgtttcaagaaacctataggaagcccttttacaacaatatggagggttgggttcttggcttggagggaaagaaaggagagttaccctgcgcatccaagtcttttgaacggttatgacaacaccacggttccacacacagagatgcttaagtgtttagacaaagccgcaatttccaagaacgagagctctcctagctcgaaggacttcgaagagaaggatccgtggatcgtttcgactgttacacaagtcgaagaagtgaaactcgtgatgaaattggtaccgatttgggcaacgaacattcttttctggacgatttactcccaaatgacgactttcacggtcgaacaagcgacgtttatggaccgaaaactcggatctttcactgttcctgcaggctcttactctgctttcctcatactcacaa

SEQ ID NO: 151536 - DNA, 456 bp, Arabidopsis thaliana columbia
cggacgcgtgggctctccagtctccactatgggcatttttctctccttctttcttatttcttgtcgaacactaaccctcgtcctgatttccgtcacaggagaaacccttgaatctaatttcttgcatcacaagaaagagaaactaactcatttcagagtatactggcacgatattgtaaccggccaagattcgtcttcggtgtcaatcatgaatcctccgaaaaaatacacgggggcaacgggctttggtctcatgcgtatgattgataaccctttaacgctcacaccaaaattaagctccaaaatggtgggaagggcacaagggttttatgcaagcacatctaaagaagaaataggattattgatggctatgaattttgcgattcttgatgggaaatacaatggaagcacgatcacagtgttaggaagaaattcagtgtttgataaggtgagggt

SEQ ID NO: 151537 - DNA, 426 bp, Arabidopsis thaliana columbia
  unsure (1)..(426): unsure at all n locations
gcgatttattgttcttgcgctttgcatgcttatgtttcttgaaaccacaaangattgagatgggcataacaaagatgtggaatgggagaatagcttgtgggagctataccaacggtggaggagtcaccacactgttgctaggagccttgaagagaaagctaagaggttcaacgtgttcaagcacaacgtgaagcacattcattagaccaacaagaaggataaatcttacaagctcaagctaaacaagtttggtgacatgactagtgaagaatttaggagaacatacgctggttcaaacatcaaacatcataggatgtttcaaggcgaaaaaaaggccacaaagagcttcatgtatgcaaatgtaaatactcttccaacctccgttgattggagaaagaatggagccgtcactcctgttaaaaacca

SEQ ID NO: 151538 - DNA, 444 bp, Arabidopsis thaliana columbia
  unsure (1)..(444): unsure at all n locations
aaaaaaaacacaaaaaagtttcaatggccttctcaacaatggctctctcctcccctgctttcggcggaaaggctgtgagggttggccctgcnncatcagaagtccttggaagcggccgtgtgacaatgaggaagactgttgccaagccaaagggtccatcaggcagcccatggtacggatccgaccgagtcaagtacttgggtccattctctggcgagtcacccagctaccttaccggagagttccctggagactacggatgggacacagctggtctatccgctgaccccgagacattcgcaaggaaccgtgagctagaagttatccacagcaggtgggccatgctcggagccctaggctgcgtcttccctgagcttttggccaggaacggagtcaagtttggagaggcaggttggttcaaggctggttcacagatcttcaacg

SEQ ID NO: 151539 - DNA, 434 bp, Arabidopsis thaliana columbia
aagaaagtaagctctatcctcaatgaagaatatgaggcaagtaaagattatattccacaaaaacgtgactggctggcaagtcactggactggattcaagtctccggagcagatttctaggattcgaaacaccggagtgaagccagagattttgaagaatgtgggaaaggcaatctcaaccttccctgagaactttaagccacacagaggagttaaaagagtttatgaacaacgtgctcaaatgattgaatcgggagaaggcattgactggggacttggagaagcacttgcttttgctacactggttgtggaagggaaccatgttcggctaagtggtcaagatgttgaaagaggaactttcagtcatagacactcagtgcttcatgatcaagaaaccggggaggaatatttgcccctcgatcacctaatcaaaaa

SEQ ID NO: 151540 - DNA, 487 bp, Arabidopsis thaliana columbia
  unsure (1)..(487): unsure at all n locations
ggcggatttctttcaaccatataaccanngagaagaaacctttttcaaactcannttcccctttcattcaaacaagtgttggggtgtatcaaatgcaaagtggggatggagcctcaaactcgggaatacaatgaaccacaatgtggaatgattggatgaagggcgtgcgaaacttagacnttctttagtttccttaagccttcnncaagatcgcctggaaaagagagcaatgatgattntttctgatgatgatgacgaaaacaacaatgagattggtgtagagctcgatctcgaatcagtaatgtctgacacttttgtctctgtcgggaaataccgagtcagatcgggttcatccactatactaagtgctgtcatcgaaaagcacggagacattgctcaaaactgtaagctggaatcggattcaatgcgatcacgttacctcgagtgtttatgctcactgatgcaggaacttaggtcaaccccggta

SEQ ID NO: 151541 - DNA, 450 bp, Arabidopsis thaliana columbia
ccatgatggaagagactccaccattgatgcaacatcaaggtggtgtgttaggagatggattagtcagaacgacatcgtaccaatgacccggtttaaattggtactcttcttaatcaaatgtgtttcgccgccggtgtgaagaattttccggtgacagtgaagatttttttccgattggtggggtcatttgcatgcattatataatttgagatttgtgtatatgttttgggttaattaattggtcacaggggttagaggaagaagattatttagagagcggagaagaagtgaggcaacatatagaaaacataggtttaaaaaatattactgtttgttaagtttaatgattaaatgtataaatcttatacttagatgtttatatatagtttgtatagatgcatatagtttctctcaatgctattttgagattgtattttcttgtaaaggaat

SEQ ID NO: 151542 - DNA, 360 bp, Arabidopsis thaliana columbia
gtccgaaaaaccctttaaaaaaccctgcaccgccgaaaccttcttttgcatcgttcgataaaaatgtgagggtggcttatttgtcaaaggaaaggagattgtctttcgtcagaccgtgggaagaaagcgaaaagagcaaagcagagaacaaagctgagaagaagattgcagatgttcatgcttgggaaaacagcaagaaagcagctgtcgaagcgcaactcaagaaaatcgaggagcaactagagaagaagaaagcagagtatgcacagaggatgaagaataaggttgcagcgattcacaaggaagcagaagagagaagagcaatgattgaagctaagcgtggagaagacgttcttaaag

SEQ ID NO: 151543 - DNA, 451 bp, Arabidopsis thaliana columbia
  unsure (1)..(451): unsure at all n locations
atcaggcagtggcaaaaccactcttctatcacctcttggtggccgtctctccaaaactttctcggggtgaagtcatgtaccaacggtggaggcgtttctcntggctgcatcatagcgcacaacagggatcttgttgctcagggatgatgtccctgtacctctcaacctcacgggtttggagagactcttcttctttactcgcactttctacgggctacccaagcaagcttgacgaggagacgagaatagcaagagcattggggacagaagttattgcttgaactccgattgaattcggtgtacaaacagcatgataggaggacccactctcagaggaatatcaggaggtgagaaaaaaagggttagcatcggtcaagaaatgctgatcaaacctagcttgctccttcttgatgaacccacttcaggtcttgattcaaccactgctcatcgc

SEQ ID NO: 151544 - DNA, 355 bp, Arabidopsis thaliana columbia
cttttcggaactagcttgttaagaaggagaaggagtaacaacttctccgtcaggtcttgtggaagccgaacaacgacgacccatgaagctaaacagtcttctccaacaagggttgctccaaaaaaccacaaaagcaaccaacttgatgagattctgagagattacgaagctgtaattgggatagagactcatgttcagctctctacattgacaaaagccttttgtagttgctctaacaattacggttcttatccaaacacaagtatttgtcctgtttgtatgggtttgcctggtgctttgcctgttttgaattccaaagttgttgaatttggtgttagattgggtttagctttga

SEQ ID NO: 151545 - DNA, 323 bp, Arabidopsis thaliana columbia
gaaacttatcatgaatccactgttttctactgattctgatattgctgctactttagcgtgtgggctcacttttattggagctggagttacacaacatacaacttctggtcaacctttcgaatgtatcgcaagtcaacctactgcacctggaaaaatacgaaccactttatcgcttatcatggctattatggaagctttaacaatttatgttctgattgtaagattcacccacttattgacgaatccttttgacaaagaccataaatcacaaaaatctggattttatgtgcagcattcttaaagctactaagattaacttctac

SEQ ID NO: 151546 - DNA, 445 bp, Arabidopsis thaliana columbia
aaaagagctttttcccggaaagttgttctcatcttttaaaatcaaatctcggaaacgcagtcgtgaggtaaatcatgagcaacgagtgcgattatctgttcaagcttttgttgatcggtgactcctctgttggaaaatcgtgtcttcttctccgattcgctgatgatgcttacattgacagctacataagcaccattggtgttgacttcaaaattaggacgattgagcaggatgggaagacgattaagctgcaaatttgggatactgctggacaggagcgtttcaggaccatcactagcagctattacagaggagctcatggaatcattattgtttatgactgtactgagatggaaagcttcaacaatgtgaagcagtggttgagtgagatcgatagatatgccaatgagagtgtttgcaagcttttaatcggtaacaataatga

SEQ ID NO: 151547 - DNA, 382 bp, Arabidopsis thaliana columbia
aggacaaatggattggttgcttccctgttaagtggcatttcgttaaagatatccctaatagggccgggaggcatataactctggagagcaatgagaacaagccggttactaatagcagagacacacaggaagtaaagctcgagcaaggcattaaagtcatcaagattttcaaggaccacgcaagcaagacatgcatcctcgatgattttgagttctatgagaatcgtcaaaagattatccaagaaaggaaaagcaaacacctgcagatcaaaaaacagacattggtggccaatgcagacaaaggtgtaatgtcaaaaattaatcttgtgaaacctcaagagtctactacagcctcagaagatgcaacagcactaggagttgc

SEQ ID NO: 151548 - DNA, 432 bp, Arabidopsis thaliana columbia
cggacgcgtgggcaatttctcaaaatcttaaaaactttctctcaattctctctaccgggggcgagatgcagatctttggtgagactctcaccggaaagacaatcaccctcgaggtggaaagctccgacaccatcgacaacgttaaggccaagatccaggataaggagggcattcctcccgatcagcagaggcttattttcgccggcaagcatctagaggatggccgcacgttggctgattacaatatccagaaggaatccaccctccacttggtcctcaggctccgaggtggtatgcacattttcgttaaaaccctaacggtaaagactattactcttgaggtggagagttcttacaccatcgacaacgtcaaggccaagatccaagacacagagggtattccttccgaccagcatatgctgatctttgtcg

SEQ ID NO: 151549 - DNA, 401 bp, Arabidopsis thaliana columbia
ccgaatgccaggtcggccaggcgtccggcagtctcccactgattcagcagctctttgaactactcttcgacaatggccgaacgtggtggggaacgtggtgttgagcgtgggggagaacgtggtgatttcggacgaggattcggaggccgtggaggtcgtggagatcgtggagggcgtgtacctggtggccgaggtggtcttcgtggatggcgtgccattgaagaagagaaatgggttccagtgaccaagcttggtcgtctcgtggcggctggtcatatcaagcagatagagcagatctatgggtatgtactcccggatgaggagtaccagatcattgatatgctcatcggtccaacattgaatgatgaggtaattgaaaatatgccggttcagaaacaaac

SEQ ID NO: 151550 - DNA, 449 bp, Arabidopsis thaliana columbia
  unsure (1)..(449): unsure at all n locations
tttcaaaagtacaatcatggaccagactcttacacacaccggatcgaagaaggcttgtgtcaggggtggcgacgggaaacttagcctctattctcatcaagcatttgcttcaaagtggctacaaagttaacactacagttagagatccagaaaacgagaagaaaatagctcaccttaggaaacttcaagagcttggcgacctgaagatcttcaaggcagatttgactgatgaagacagtttcgaatcctcattctccggctgtgaatacatcttccatgtcgcaactccgatcaactttaaatccgaagatcccgagaaagacatgatcaagccggcgatacaaggagtgatcaatgtgttgaaatcttgcttaaaatcgaaatcagtcaagcgtgtgatctacacatcttcagctgctgctgtttccatcaacaatctntctggaacc

SEQ ID NO: 151551 - DNA, 443 bp, Arabidopsis thaliana columbia
ctgatccttctctcatcctcagaaagaatggctcaaaccatgctgcttacttcaggcggcaccgccggccattttttgaggaacaagagccctttggctcagcccaaagttcaccatctcttcctctctggaaactctccggttgcactaccatctaggagacaatcattcgttcctctcgctctcttcaaacccaaaaccaaagctgctcctaaaaaggttgagaagccgaagagcaaggttgaggatggcatctttggaacgtctggtgggattggtttcacaaaggcgaatgagctattcgttggtcgtgttgctatgatcggtttcgctgcatcgttgcttggtgaggcgttgacgggaaaagggatattagctcagctgaatctggagacagggataccgatttacgaagcagagccattgcttctcttcttcatctt

SEQ ID NO: 151552 - DNA, 432 bp, Arabidopsis thaliana columbia
ctcaaatgttcttaagaaatttcgaaacttttcacattcaccactcgattgaaccgggcccggttattcaatggatccagaggaggggtccaagattgccttcttctacgttgagacgactgtaccaaaacgaggtcaacgcttcgcgattctagaattcgggtcaatcctcgtttgcccgaagaagctaacggagctccgaagctacacgactctcgtccaacctgcagatttgagtctcatatcttccttgtccgtgaggtgcaatggtatcaaacgtgacgacgtcgctttggcacctctgtttgccgacatcgctgatactgtctacgacattctccatgggaggatttgggcaggccataacatattgaggtttgattgtgcacggatcagagaagcatttgcagagattggtcgtaaccacccgag

SEQ ID NO: 151553 - DNA, 403 bp, Arabidopsis thaliana columbia
gaaaaaaccaccaaacaagccattcctcaattgctctattttctccctctgctttcctccttagcggcggttacatcaacaggactgatggctaactccactaatatgactccaccctctccatccatcctacacaccaaataccaaacgctgtttcattaatcacaataactaacatcttatcagcaatcgatgctcatgcaaaacacgcaacgccctggtgttttttacatccctcgacaacgagttttatttgaaagacgacatcgacaacccacaatgtcttcagcaagaacaccatatccttcagcagtgctgcaacgagcttagtcaggaagagccactttgagtttgccccactctaacacaggctgactaggccgctagccttcaaggacaacac

SEQ ID NO: 151554 - DNA, 452 bp, Arabidopsis thaliana columbia
  unsure (1)..(452): unsure at all n locations
tctctctctgcaatggactctctggtagcgagctactcttcttcggacgaagaanaagatctggaaccgcgtctagaagctttcgctgtaaaatcctcagaaccttccgcttcgtctctattctcagctattcctcaacctaaagaactcaaatcctccgaagatggtgatttaggctcatcttcctctcgaggaaaatcttcttctttcctctcatctctccctcctcccaaatcctcaatttcacggaaaaaaaaatcccaatccgtcgtcaattccgaaacgtgtcgtccagatcaggcttccagtaaaccctaaaccgagcaatcttgacgacgaagacgacgaagaagaagagaaagctaggaagaagcgtaaacagatggaatctgcttccgcatctcacgattcatcagtaagatcgttcttatccgccatgcctgcacctaaat

SEQ ID NO: 151555 - DNA, 448 bp, Arabidopsis thaliana columbia
gatcaccattccaggaccatccattttgaggagttttcttccaccaaaaataaatgggaaacgtggggctacacttaatggaatggcatgtgtcaatccaagcacccccatgaggcttgcggatgaccataaagtgaaaggagattatatgttagattttccagacagaccacttgatgaaaaacttccacgtttgtccagctctatcatcaacgcaacatacaagggctttatacaagttatcttccagaacaatgacaccaaaatccagagctttcatattgatggatatgcattttacgtggttgcgatggactttggtatatggtcagaagacagaaacagttcttataacaactgggatgcagtagcacgaagcacggtggaggtctatccaagagcatggactgctgtacttatttctctcgataatgttggagattggaat

SEQ ID NO: 151556 - DNA, 447 bp, Arabidopsis thaliana columbia
  unsure (1)..(447): unsure at all n locations
aaattcncaaagtcagagctaaagcaaccgaggtattgtttaaaagtcccagtagtgtagcctctttggaacctaaatacaggggctagggtataacaactgatatgctcaaaggaaatgcttcgtctttgaatgctgatggagctgtactgaatgaacaaagcagagctctaccaaattcagccatacctacctctgagcacaatcagactactgaagctaatcaagccgtcaaagaaacaggagttttacacactagatctcgtggagttggtttggaggagacatttatctccacacaaggagtcaagccatctgaagatactaataccgctcctcaaagtggaactgctgtagatgactttaatgatcaagatggcgattttatccaacctacttctactatctgaaacaccacaaatgctgtcttggttcttgggcaacttt

SEQ ID NO: 151557 - DNA, 377 bp, Arabidopsis thaliana columbia
aatttctccaattcattgatcagatcagccatggaagacgagattgaattgaaaactggtccggctgatttccggtttggtacaacaaatcaaactaggcactgcttcactcggtacatcgagtttcacaggtgtacaactgcaaagggagaggagtctaatgactgtgaaaggtttgccaagtattaccgtgccctctgtcctggagaatgggttgacaagtggaacgagcagagggagagtggaacttttccagggcctcttttgaccaagccttcaatcttgatgaagaggcaatcaagtccgtaataatacattggttcaaagttaatttcttgcttgcgtgtgtatgttttggccttattatttcctcttta

SEQ ID NO: 151558 - DNA, 399 bp, Arabidopsis thaliana columbia
caaaaaaaaacccttcaaaacatttccttattctttcttcttcatctacaacaatgggtggaggtgcctttggttcctgggatggttcattcagcttggcttctctaagagcttacctcgctgagttcatctccactttactctttgttttcgctggtgttggctctgccattgcctacgcaaagctgacgtcggacgctgctcttgatacaccgggactagtggccatcgcggtttgtcatggttttgctctcttcgtggccgttgcaatcggagccaacatctccggtggccatgtgaacccagccgtcacttttggtcttgctgtcggtggtcaaatcacagtcatcaccggagttttctactggatcgctcagcttctcggctccaccggcgctt

SEQ ID NO: 151559 - DNA, 389 bp, Arabidopsis thaliana columbia
ggactggcaaaggatggtccaagaggagaccaaacacatgtgtctacacgtgttatggggacttacggatacgctggtgcagaggatgtcatgacagggcatttgacatccagaagtgatgtgtatggattcggtgtacttctccttgtgatgctccttgggaagagggcaatggacaaaagcagagcttgcagggagcataacttggtagagtgggcacgacctcttttgaatcacaacaaaaagcttttgaggatcatagaccctctaatggatggacagtacggcactaaggcgttgatgaaagtagctggtttggcataccaatgcctaagccaaaacccgaaaggaaggcctctcatgaatcatgttgtagaaattcttgagac

SEQ ID NO: 151560 - DNA, 450 bp, Arabidopsis thaliana columbia
cgtccgcttccttcttccttcttcttctttaaacacaaaaaaccgacaaaagcctctgtctcggacaggggcagagaaacagaacagagggggaacaatggctgttacacaaatacttgtcgtctttgcttctgcattactcctatcaatgttcttcactggcgtcgattccacaaggtctaatgaaacatggcatgaacatgcagttgagaatccagaggaagtagctgccatggtggacatgagcattcgaaacagcacagcgagaagaagattaggatacttctcatgctcaaccggaaatccaatcgatgattgttggcgttgtgaccggagatggcaatcccggcgaaaacatctagccaattgcgcaatcgggttcggtcgcaatgcaatcggcggtagagacggtcgttactacgtagtgagtgatccaaacgacgataaccc

SEQ ID NO: 151561 - DNA, 449 bp, Arabidopsis thaliana columbia
gctaaacattgttagagagaaagagagagcgatattggcgatgaggggcttcacgtggttttcgatccttgtgttggctttgtgcgcttcgtctatcagaagcgaagagacggagacgaaggagttcgtgttgaccttggatcacactaacttcaccgataccatcaacaaacacgatttcatcgtcgtcgagttctacgccccatggtgtggacactgcaagcagcttgctcctgagtatgagaaggctgcgtcagctttgagcagtaacgtcccaccagtggttcttgctaagattgatgccagtgaggaaacaaacagagaatttgcaactcaatacgaggttcagggtttcccaacaatcaagattttcagaaacgggggaaaggctgttcaagaatacaacggacctcgtgaagctgagggtattgttacttacttgaagaaac

SEQ ID NO: 151562 - DNA, 481 bp, Arabidopsis thaliana columbia
  unsure (1)..(481): unsure at all n locations
ggggcccgacccagcgcgtccgcttcggaaacttgtcctcaaacacaccggttggtggggtttttaatgaggctgtgcaagcacctacactttggtggcgaacataaancttgggttcattgtactttgtgggcatgccagtcgctattctgtttgggtttgttttcaaacaagggtttccaggtctctggttcgggttgcttgcagctcaagcaacttgtgcttctctcatgttgtgtgcacttttgagaacagattggaaagtccaagccgagagagctgaagagctgacgtcacaaactcccggaaagtctccgccccttctccccatcgcaagctcaaagagccggtctacctccggtacagaagatatgatgagaaccatgttggtttagattgatagctattctctggaggcatttgccatcaacattgacgtacatatatgttcttgtcatcattttttggagtttatagtgct

SEQ ID NO: 151563 - DNA, 437 bp, Arabidopsis thaliana columbia
atcacattttgtaacaataatacaattatacattaaaactctccgacgatgcctcaggcaccgatgccagagttctctagctcggtgaagctcaagtacgtgaaacttggttaccaatatttggttaaccatttcttgagttttcttttgatcccgatcatggctattgtcgccgttgagcttcttcggatgggtcctgaagagatccttaatgtttggaattcactccagtttgacctagttcaggttctatgttcttccttctttgtcatcttcatctccactgtttacttcatgtccaagccacgcaccatctacctcgttgactattcttgttacaagccacctgtcacgtgtcgtgtccccttcgcaactttcatggaacactctcgtttgatcctcaaggacaagcctaagagcgtcgagttccaaatgag

SEQ ID NO: 151564 - DNA, 411 bp, Arabidopsis thaliana columbia
tttagttagtaactccacgactactcgtcaaagacatcgggcaaaccaaggccaatcaagattgggacagaattcagagagtttagttagtaacaccacgactactcgtcaaagacatcaaacaaatagaagtgcaacttctggttcttctcaagcttggccagcactaaaccgaggcccggcagaaatatcaattacaagcagggtacaatcttctggtgcttctgctcaatctcaatctaggcaccatgacagagttgaaagtactagaactcttgcttctgcagttccacaagatgctcgtaccacagttggtggatgctcatctggttcttctctgagttccgccaatgcaacaaagaggaataatcatcactcgtcttcaacccctaaaatgtcttgaacaagatc

SEQ ID NO: 151565 - DNA, 283 bp, Arabidopsis thaliana columbia
ctcataaccctactgctctatgtctagatatctacttaactaacactcgactatgcttgggtggtaacattttcctttgcggggtgcatcctcttccataaagatttccactacttctgctttctttgcctaccattgtcatatatctctgcctttcagttaatactgttccagatcattgagaattacatacaaccttttcatctaatgtatcgatccttatctgctctactacaatcagcttttactatgttgaggactgtgctcctcatctatggtgaaa

SEQ ID NO: 151566 - DNA, 396 bp, Arabidopsis thaliana columbia
  unsure (1)..(396): unsure at all n locations
cccacgcgtccgcccacgcgtccgatttctcacattttcgtagccgcaagactcctttcagattcttacttgcagctatgggtaaagagaagtttcacattaacattgtggtcattggtcatgttgattctggaaaatcgaccacaactggtcacttgatctataagcttggtggtattgacaagcgtgtcatcgagaggttcgagaaggaggctgctgagatgaacaagaagtccttcaagtacgcatgggtgttggacaaacttaaagccgagcgtgagcgtggtattaccatcgatattgctctatggaagttcgagaccaccaagtactactgcacagtcattgatgccccaagacattgngatttcatcaagaacatgattactggtacct

SEQ ID NO: 151567 - DNA, 444 bp, Arabidopsis thaliana columbia
  unsure (1)..(444): unsure at all n locations
cggacgcgtgggctttgacactgatgctgctgagtttgatcaaggattcgatggaagaatgtattaccaagcaccttccgaatttggctttggaaagaatggtgagatggttaagaaatcaagtggaaacaggagcccgagatcgattgtggaaccagctaagtatgcggaaaagccagcgaaatggggaaaccagagggttgctgctgctccgagaaacatccaccagcctcgctgaagagatatgttgttaactagtcagagaagtcagagcagttcggtctgtgtatctttagccaccactgtacctttgtaatttttagtatttgcttccacaacaaaaatctgaaactttgtatctttatgatgttcattctcaaacttgctatcacanaaatgtaaaaacataaaaaaaaaaaaaagtaaaactttgaagagaaatga

SEQ ID NO: 151568 - DNA, 254 bp, Arabidopsis thaliana columbia
tgcttaatcataaactactctttcttccacgttctttctttgttagcctttagaagaaaaatggctaccaattacaacgagaagcttcttcttaagtatgttcccggttacgttatgcttccggtgggagttgtgaatgaggctaatgtatttgcggacgcataaacgcttgtaacgcatcttcaacgtattaaagaagatgctagccttgattgcctgatgggcctacttcgagggggacacctacacttcaa

SEQ ID NO: 151569 - DNA, 404 bp, Arabidopsis thaliana columbia
cttccaaggaaatagtttggagatttctcgtaaagatgtttaagaaaatggataaaaaagcagcgcagagaattgcgatggaatacagagctatgatctcgaaagaatctttgttcagtattggtcaaaactcgaacaatatatacgaatggactgcagtgatccggggtccagatggcactccctatgaaggaggcatgtttaatctcagtattaagtttcctacggattatccttttaaaccacccaagtttacgtttaaaactccgatttaccatccaaatatcaatgatgaaggatcgatttgcatgaacattctttaagacaaatggactcctgctcttatggttgaaaaggagcttctgtcaatactttttactattgggaaaaccaaacccagatga

SEQ ID NO: 151570 - DNA, 274 bp, Arabidopsis thaliana columbia
  unsure (1)..(274): unsure at all n locations
gattaacactgtgatgaaaagggttttgtgaaaatcaattttcaaacctggaaaatgatgatcaaggacccttatatccgacaattttcttctttcttctgtacattgnaatatatagaaaattaacattttttctctttctttcttttttttctttagatattaggttaggttatatagaagagaaagtttgtttctgggaaatgggttttttggattttggtttgtaatttagggaaaaaaaatctttagtatatagtgtttgctggaaaaa

SEQ ID NO: 151571 - DNA, 265 bp, Arabidopsis thaliana columbia
tgcttaatcataaactactctttcttccttgtcgtttcaaatggcgcaattgtattcttccgtgaaacccacgccaatgttgaaagatgagctagacattgtgatacctacgattcgaaacctcgacttccttgagatggggcgacctttctttgagcagtatcatttgatcattggtcaaagaggggatccttcgaaagtcatcaacattccaagtaggtttgacttcgagctctacaacaagaacgacatcaatcgaatcttg

SEQ ID NO: 151572 - DNA, 321 bp, Arabidopsis thaliana columbia
gcgatccaagtcggaagttcacttaccttcttatatcgcgactctgacctatcggaaatattgcatggacctcatatggagtgtgtctaattgctagaggttgtgaggcttattgaagtcttgggaatagtatatagaggatgctattgtagtaaagaaagtatggaagatcttcggctatcaccgctgaaattaggtagctttaagtcttcattgtcagggaggtctactccaaggggttcacctacacttcggaaagtgcattcaggcaggactccacgtagagagggtaaaggtagcggtggagctgctcaatggttc

SEQ ID NO: 151573 - DNA, 273 bp, Arabidopsis thaliana columbia
acagcgatccaagtctgaagttcacttacctttttatttctcgactctgacctatcggaaaggggacattgtcctcatatggagggaggctaatcgctactgtttttgaggcttattgaagtcttgggaatagcatattgaggatgctattgttgttaagaaagtatggaagatcttcttctatcaccgctgaaattaggtagctttaagtcttcattgtcagggaggtctactccaaagggttcacctacacttcaaaaagtgcattcaggc

SEQ ID NO: 151574 - DNA, 440 bp, Arabidopsis thaliana columbia
aaaagttcgaggctgtgggcgttcctaggagctgtttactggatatctttggtcacatattgcgtcttgtggaaagcttataagcatgtctcttcattgagagctcaagctctgatgtctgctgatgtaaaacccgagcaattcgctattcttgttagggatatgcctgcaccacctgacgggcagacacagaaagagtttattgattcttatttcagagaaatataccctgagacattctacagatcgcttgtcgcaacagaaaacagcaaggttaataaaatatgggaaaaattggaaggttacaagaagaagctagcgcgagcagaaacaatattagcagcaactaataaccgtcccacgaacaaaaccggcttctgtgggctagtcggttaacaagtagacagcattgagtatttcactgagctaatcaacgagtc

SEQ ID NO: 151575 - DNA, 394 bp, Arabidopsis thaliana columbia
cacgaatcaagaacatcgaactgttgactttagacagagagagacggagatggagtttagtgagttaaaggaagcaatagagaagatagagctcgttgatgctcacgcacacaacattgtctctcttgactcatcttttccgttcatcggaactttctccgaggctgccggcgacgctttaaccttcgctcctcattctctctccttcaagaggaacttgagggagattgctcaactttatggcactgaagtatctttagaagcggttgaggaacatcgtaaaacctcgggtttgggattcttttacttccaagagttttaaagaagctcgaatctctgctctcctcattgatgatggattaaaagctagacaagaaacatgttattgaatggc

SEQ ID NO: 151576 - DNA, 319 bp, Arabidopsis thaliana columbia
gtcagatcaaaaaataccttcgagagcgcctttcgtcctgtaaattgacaaaaatgcgggctgggctcgctgcaaagcgtctggtaaggatccgtcaagttgtccatcatccaacctctcacgtgactcgtcgctgatctacgggcttaaactaccatcgggattctgctgataacaaacccggtcctccatgggagtgtgcagaggctaaccaatgtaaggttcaagagattgtctgttactatgcatgcaattacaagcagtacgcagttattcctctgctagatcttgcgcaacagcagcatggaggctggctccc

SEQ ID NO: 151577 - DNA, 437 bp, Arabidopsis thaliana columbia
caaaatctgcacacacactcagaagaagaagacgtcatctctctatctctggctttctgctaatttcacgaagaatctgagaatatgccaaccatcagtgttggcagagaccgtttgttcgctgctcttggagaatcctatactcaagaaaaattcgaggaactgtgtttcagtttcggtatcgagcttgacgatgtgactactgaaaaggcaataatcagaaaagagaagcacatcgatgaagaagctgatgatgatgaagaaatcatctacaagattgaaattcctgccaacagacctgatttgctttgcctcgaagggctagctcaatctcttcgcgttttcatcgagaaacaggagataccaacgtatactcttgctgacattagcaaagacaagatccttcaaatgaatgttaaacctgagacatcgaagat

SEQ ID NO: 151578 - DNA, 402 bp, Arabidopsis thaliana columbia
  unsure (1)..(402): unsure at all n locations
tacatacacctatacattcacgttgcgtgtgataatctactgagggtcctatctatattaatcctgcggtgcttccttcaatctaattgcaaatcaaatggatcgtcttaagctttatttctccgttttcgtttagtctttctttatcgtctcggtttcgtcgtctgatgtcaacgacggcgatgatctcgtgatccgtcaggtggttggtggagccgagcctcatgttttgacctcagaggatcactnttctctcttcaagcggaagttcgagaagagctacgctttcaacgaggagcatgactatagattctcggtntcaaagcgaatctcaacgagaaggcgtaccagagttgatccgcgctactcatgtgttccagtctcaatctactcggctgagtc

SEQ ID NO: 151579 - DNA, 457 bp, Arabidopsis thaliana columbia
ccgatcttctcgttccattcttcttcctaattacaccatgcccaacatcaccatgggtttgaaacccgacccggttgctccaacgaacccgactcatcatgagagtaatgctgccaaagagattcgttacagaggcgttaggaaacgtccatggggaagatacgccgctgagatccgagatccggttaagaaaactcgagtctggctcggtacgttcgacaccgctcagcaagcggcgcgtgcttacgacgcagccgcgcgtgactttcgtggtgttaaggctaagaccaatttcggtgttatcgttggtagtagtcctactcagagtagcaccgtcgtcgactcttccacggcggcacggtttataacacctccgcaccttgagctcagcttatgcggcagcggcgcgtgtcgtcgtaagatcccgcttgtgcatccagtttactactataacatg

SEQ ID NO: 151580 - DNA, 246 bp, Arabidopsis thaliana columbia
tccaggtccgaccacgcgtccgattctactaacagagagaaaaagcaaaagcaaaattggctcgatctttcgctattgctgagagctgggtcgtcctcatcgccggcgtgactggtcaagctccgacttcaccaccaaccggtacaccagctccaccaactgcaacaactcctgcaccagcagcaacttcttcttctgtctcagcaccaccaccagtcacaacatgttcctcttcagtcaccactg

SEQ ID NO: 151581 - DNA, 419 bp, Arabidopsis thaliana columbia
  unsure (1)..(419): unsure at all n locations
taatgctgcagtcatcagaggtgcattgagagcagtgagaccagagctgcttacagtaattctaccccaaagtttgaaaaaacaacctgctgagagccaagaactattgtctaaagtacaaaacgtggtagaaaagccacataatgaccatttgccattgttagaagccagcaggttgtgtaatatggacatcatatcacaagttcaacaagtgatctgcttcgcgtttcatgacagtaagcttcttatggagacatgtcaagaagccaaaaatctgcgcaagattgtcactctcttctacctcgattgattcacattcactctttattttcttctcgntacaaaacagagaagataatcctccttggtaattatgaatcttgatttaacaaacacacacaaccacaattatatttctt

SEQ ID NO: 151582 - DNA, 353 bp, Arabidopsis thaliana columbia
  unsure (1)..(353): unsure at all n locations
ctcttactggcgcttgtcaacctccggtgatgactccggcgaaagagtcgacgaggaaaaagagagtcggtctggagtgaaggcggctagcgcggcgtgcgaggagaaggttcttgtcataatggccggagatgacttgccgaggtttctggccacgccggcggcgaacaaatgcatgtgcggtcacgagggtagaatggtaattttcaaggaggatggtattggtgctggagaggagaaaatgggagacagagagaaagccaatgaaaatgaagaaacaacgagtcagggagcttnttggtttccttttctctcttcagccttgccttttttttttggggggggaattttcc

SEQ ID NO: 151583 - DNA, 241 bp, Arabidopsis thaliana columbia
cccacgcgtccgtctacagagaacttgattattttttctgatctgagaaaaaaaatggcgaatggagctaatagagtggatctcgacgggaaaccgatacaaccgttgacaatatgcatgatcggcgccggaggtttcatcgggtcacatctctgtgaaaaggtcttgaccgagacgccacataaggtgcttgcgctcgatgttttcaaccattagatcaaacacttgcttgagcctgata

SEQ ID NO: 151584 - DNA, 447 bp, Arabidopsis thaliana columbia
gcgtccgcttgttctttggacgaccatcggcgacagtgtttattctagagtcttcttcttcttcggcggaggtttttccccggcttgaaaagggggtctatccttcggaaagttgttcagcaagctctttgcaaagaaagagatgcgtatcctcatggtgggtctcgatgcagctggtaagactacgatcttgtacaagctcaagcttggagagatcgtgactacgattccaaccattggtttcaatgtggagactgtggaatacaagaacattagctttaccgtgtgggatgtcgggggtcaagacaagattcgtccattgtggaggcactacttccagaacactcagggactttatcttgtggtggacagcaatgatcgtgaccgtgttgtggaagccagagatgagcttcacaaaatgttgaaccaagattaattgagagatgc

SEQ ID NO: 151585 - DNA, 300 bp, Arabidopsis thaliana columbia
  unsure (1)..(300): unsure at all n locations
caccctagccgttttactctctggcgatatctcttagatttgttggccagcctctaaccatgggtaaagagaagtttcacatcaacattgtggtcattggccacgtcgattctggaaagtcgaccaccactggacacttgatctacaagttgngtggtatagacaagcgtgtcattgagaggttcgagaaggaggctgctgagatgaacaagaggtccttcaagtacgcatgggttttggacaaacttaaggctgagcgtgagcgtggtatcaccattgacattgctctctggaagttcg

SEQ ID NO: 151586 - DNA, 367 bp, Arabidopsis thaliana columbia
gagcatgaagataaaatttattcaagtaactagtaatatcatttaactcggttgtatgctgaaacaacaaacagaaaaaaaaaaaaaaaaaaatctaaggaaatcaaacgttttgccgtcttggtcaagtttccaagtagatgaagctctcactcttatccatagaattcaagtcgaaatagcattctttatcaaaccaagagtctggtactcctttgatttcaacctttctcaagtcattgctttgcaagttgtaatacagaatgtagaatcgagaatgcatctccaccggtgccaagatcaccttgccgtcttgagttgtaccttttacgatcaattcaatgtcttcgactaaatgcctttgaca

SEQ ID NO: 151587 - DNA, 268 bp, Arabidopsis thaliana columbia
  unsure (1)..(268): unsure at all n locations
cgtccgatatacacttcatatctaaacatcctttaaagccttttttaaaactcatccatcccaagcaggtggggaagctacaactgtgctgacgaagacccantgcataaagatgggaacctgctacaccttcgacatcttcatgactcacgtgagctacaagaaggccatgatcattgactactagacctaaaagaacaacgcaaattgcaagtgctagtgcagctcctcttgcagcttccttaactgcacttactatcccaactaa

SEQ ID NO: 151588 - DNA, 413 bp, Arabidopsis thaliana columbia
  unsure (1)..(413): unsure at all n locations
atccaaattaggtaaagtaggtcactttgtggtagctgtcttctacacaagaccagaagagaggcaaacagaggaatacgcttctgcacaatgacagaagaatacgaggttgatgagcagaagcaagctgctgctgatgtgttgtttagttattccaagtttgcaatggcctgcattggtaaccatactcgtcctactgacatgaggttgcatttgatgaaagagatctctggaatgccaacttctctgaaaggaagagactcttctagagcagcttctcctgatccacttggcgaatcatcaagctccggtactgccaggctagatataacggatagtttcagggcactttgattttagnttttctccacttgtcagggtctcataagatatatgctagtggattacaggat

SEQ ID NO: 151589 - DNA, 110 bp, Arabidopsis thaliana columbia
atttagatattgcagagagagattctaaagagagtgagagagagagttctgcctagaggaatcgctcggggccgtttagctgaagagaggaaatcgtggaggaagaatca

SEQ ID NO: 151590 - DNA, 401 bp, Arabidopsis thaliana columbia
acataaacaaactgaaattttcaatcacattttctttatgctacactctctccatcagggagggatgatcacaagccaaaggtccagtcaaccaccaattcctagtgatcaacataagtcgctacaccaattacagtcccatctaatacaaccctgacttacgtggccttcgcaccctttattgtcaacttccaactctttttctacaacacaaccccaatcgcatacactctcaatctcagaatcggaaacagagtccaaaaatccactctcatatgactttaagaagcaaactcattctctccggtcaaagaagacagccactcttactttttattcaatactgatacctcgaactcgctgaagtcaatggacgcttgttttggcaaacttacacattt

SEQ ID NO: 151591 - DNA, 464 bp, Arabidopsis thaliana columbia
caaaaacaaacgaaaagaagcgacttttgcctcttttggtctctccccttctccggagagatctgctctctctatctatctctcaatctgtaagaagaagattcccacttcagtaaaagccctaactttacttgggaaagttcttcatctatcatcctccacctactcaatccgatgatctatctcactcccactctacttcctctactaccttcagcttcttcttcctcagatccatcactcttgaggtctctctccttaagtcgactcaacgccggagctcctgagttcgttcctggtcgaactactcctccgctgcctcaacctccgaggatgattatcccgcctcctccgccgcacggtatgcttcatatgtatcaccacaccagaaccaataccagaacaacaaccacagccattaccaaaaccacaaccacaatgggcgaggatatcatcatcatcat

SEQ ID NO: 151592 - DNA, 217 bp, Arabidopsis thaliana columbia
  unsure (1)..(217): unsure at all n locations
gcggaaaaaaaacagagctttacaatttctctctacaggagatcgaagatttggaaggcaaggaagaggacgttagagttggagctaacaggttcccggagagacaaccaatcggaacatcagctcagagtgacaggactcaggaanaccacagctcgtttcgaccgggagttttaggctttgaagtggacgtggtatgtcttttttttacatatgt

SEQ ID NO: 151593 - DNA, 261 bp, Arabidopsis thaliana columbia
  unsure (1)..(261): unsure at all n locations
tctctctctacccaaaaccttttacttcttcgaaacggctctatttctcttctctcttctgtccacacacagaattatctcgacctaggtttctaaaatcggattctctatctcaaacgctaatcgaagagttttctctgaatcgttttcttaaatctaatctcgcgaagtttcagtgacagattcaatcaaacttcaaatcatcatcagntctggaatattacgagatatctcccgtttcaagcttaagcatttcgaaat

SEQ ID NO: 151594 - DNA, 437 bp, Arabidopsis thaliana columbia
attacagtctgatttgagctaagttctctcatcattaactctccttggagaatcatggctagggcaagagctcttatcgcttctgttctcatatctcttcttgttctccaactcgtccaggctgatgtcgaaaactcacagaagaaaaatggttacgcaaagaagatcgattgtgggagtgcgtgtgtagcacggtgcatgctttcgaggaggccgaggctgtgtcacagagcgtgcgggacttgctgctacaggtgcaactgtgtgcctccgggtacgtacggaaactacgacaagtgccagtgctacgctagcctcaccacccacggtggacgccgcaagtgcccatatgaagaaacaaagctcttaattgctgccgataatgggacgatgtcgctcttgtagtatttactttggcggatatttgtggatcgatt

SEQ ID NO: 151595 - DNA, 403 bp, Arabidopsis thaliana columbia
gctaacagtaccgttgtgttggcgatcatcttcttcggatgtttatttgcgttgtcctctggagtagaagaggctacgaagttaggatcagtgatagggatagatcttggtactacttactcttgtgttggtgtttacaagaatggtcatgtcgaaattattgccaatgaccaaggaaaccgtattacaccttcatgggttggttttactgactctgaaagactcattggtgaggctgctaagaatcaagcagctgttaatccaaaagaggactgtcttcgacgttaagagattgatcgggcgaaaatttgaggattaggaggttcaaaaggattggaaacttgtaccttaccagattgtgaacaaggatggttagccatacattcaagtcaagatcaaggat

SEQ ID NO: 151596 - DNA, 353 bp, Arabidopsis thaliana columbia
ctcatcaccagcttcgcatcttcttctccggcttgatcttctctcgtttctagatctgcgacgatcggaatatcaaatccgatcgattaattctgtcaatcacacaaaaaccgaaaaccaaaaaaaaaccatggcgtttgagaagatcaaggtggcaaatcccatcgtcgagatggatggtgatgaaatgaccagggttatttggaagtctatcaaggataagcttattactccttttgtggagttggatatcaagtacttcgaccttggtcttcctcaccgtgatgctacggatgacatagttactattgaaagtgctgaagctactaataagtacaatgtggcgatcaagt

SEQ ID NO: 151597 - DNA, 396 bp, Arabidopsis thaliana columbia
ggataaacttgctatgaacatcacaaccgagcatggtaagactttaaaggattcacatggagatatcttccgtgggttagaggttgtggagcatgcgtgtggaatggcaaccttacagatggtgacatgtggtaatacctttattctgaagccatcagagaaggatcccggtgcttctgtaatacttgccgagttggcaatggaagctggtttacctgatggggttctcaatatcgttcacggaaccaatgatactgcgaatgctatctgtgatgatgaagatataagggctgtttcttttgttggctccaacacggctggaatgcatatatacgcaagagcagcagcaaaaggaaaacgtattcagtcaaatatgggggcgaaaaatcatggact

SEQ ID NO: 151598 - DNA, 392 bp, Arabidopsis thaliana columbia
ctctctcagaacgccgattgatgataaccggtaaagggttttaacttcacctgacgagcgggggattgactcagtggcttggacgggtaaccaaagcatgccacgtaaatccatgtctacaggttggaaactagctgaattgtacagcccggctagttcaccgggccaaccggaggagaatctcgactggtatacgctgaggttaccacaagagatacatgaccagcttgtgaactccagcctgggaaagcaagggtcaaaaggccaactggccttacctcaagaaaggagctcggttagagggttcagaaccggaagcctttggacctgaaaagaactatttctactttgaacggtttgatcaaaacggtcggttggaccggagaccattt

SEQ ID NO: 151599 - DNA, 279 bp, Arabidopsis thaliana columbia
caaaaaacagaagagaagcgttttgaaacgaagaaccaaacaggttcttcgtcccttttgcctttagggcacaaaggggaagcctttttcactgggtatgtgttgagaatttggggtttttaggtttttggctcagaagagagaatctgggatcttaaaaatcgaaactttctagatgtggttttagttcaacttagttgtagaagatgggatcaaatcaaggttcttccaggttagataccgtagagattaaagctctcatttaccgggaaattggga

SEQ ID NO: 151600 - DNA, 446 bp, Arabidopsis thaliana columbia
caaaaacttgtgaccaaggaatgcaacgacgctttagatgagtattttgatgtatacaagatgcttgacatgtacagtctgtacgctccaaagtgtgtccccacctccacgaactcctctacttctcattcagtcgccggaaaccgccccctacccgcattccgaagcattctacgaccccgtctcatctctcacaatgaaggatggaggaggatggccgccgggtacgatccatgtgcatcagagtatacagaaaaatatatgaacagaaaagatgttcaggaggcacttcacgctaatgtcaccaacatctcttacccttggacccaatgcagagacactgtctcattctggtctgacgctcccgcttctatgcttccaaccttaagaacacttgtttcagcgggattacgcgtatgggttttcagtggggatacagacgggcg

SEQ ID NO: 151601 - DNA, 357 bp, Arabidopsis thaliana columbia
acttatctcacggatctccgccgcgcaaacctacccaaatacaccagctgcttcatcggggtgggaggactctactactgcgggaacgttgactaagcccggtggagttaaagagggtaaaggaaaaagggcaccagaaagttgcaggacaagaaaagcttcacaggaaccgttctatccagatttagatgcacttgatgctgtgctagagacgatcgaagctctgactacgatcgtgttcagcggagtagctagattgctcgaggtacgattaactctagcagagctgggtgaagcgtttatgttacatggaggagatcgagcagagaggagcaaagaggttaatgcgaagaacat

SEQ ID NO: 151602 - DNA, 361 bp, Arabidopsis thaliana columbia
gagactgttggtggtggtttcggacacaaatcttggaacacaagctttgatcccgaccaagcttatgatgagttctgtcttttattccttagagcgctctttgatcccacacttgactatatcctcggtgtcaagtggagttcctgagtgagagtatctccaggatcccatccgccagaataattcatacagagagatgctttgcttgcttcataaatttctcatagtcgatactagagttgagttcctgtacttgaatgtgtgtactgcttgggttgtacccattggttgtggaagaaatgtttatactcagcaggtcacgagagtgagaattggggattagctacatctgatgagtttg

SEQ ID NO: 151603 - DNA, 450 bp, Arabidopsis thaliana columbia
tatttgtcaagaggtagtttatacagacttttgcataaaagtggagcaagggagcaattagatgagagacgtcgcctgagtatggcttatgatgtggctaaaggaatgaattatcttcacaatcgcaatcctccaattgtgcatagagatctaaaatctccaaacttattggttgacaaaaaatatacagtcaaggtttgtgattttggtctctcgcgattgaaggccagcacgtttctttcctcgaagtcagcagctggaacccccgagtggatggcaccagaagtcctgcgagatgagccgtctaatgaaaagtcagatgtgttcagcttcggggtcatcttgtgggagcttgctacattgcaacaaccatggggtaacttaaatccggctcatgttgtagctgcggttggtttcaagtgtaaacggctggagatcccgcgtaatctg

SEQ ID NO: 151604 - DNA, 430 bp, Arabidopsis thaliana columbia
acttcatgcacagagatgaggagatcaattactacccctcaaagttagatcctgcccgctgaggtgagaaagttcccacccctacaaactcctacactggaattcgaacaaagtgcgtcatcaagaaagagaacaacttcaaacaggctggagacaggtacagatcatgggcaccagacaggcaagacaggtttggtaagagatgggtggagattctatcggagccacgtctcacccactagatccgcggcatctagatctcttactggtctcaagctgatcgatccttgggacagaaacttgcaagccgtctgaacgtgatgccaaccatttagaggccaatctccatataagctcaatctatgtgaagcacaatcaatctcatcgatctatcatcgcttggtcgttaaatccgtcaaaaagataatca

SEQ ID NO: 151605 - DNA, 464 bp, Arabidopsis thaliana columbia
acctgcaatcactctcaatggctgtatcacttccaaccaagtaccctctacgacctatcaccggcatgccaaaaagccaccgtgcctcgcttctccgtgtacgtgtcacctgctctgttactaccaccaagcctcagcctaatcgtgagaagcttctggtagagcaacgcactgtgaatcttcctctgtccaacgaccaatctctgcaatcgaccaagcctcgccctaaccgtgagaagcttgtggttgagcaacgccttgccagccctcctctgtccaatgacccaactttgaaatcgacatggactcaccggttatgggttgcagcgggctgcaccactttgtttgtctctttagctaaatctgtcattggagggtttgattctcatctttgcctcgaaccagctttagccggttatgcagggtacatcttagctgatctaggttccggtgtctaccactgg

SEQ ID NO: 151606 - DNA, 292 bp, Arabidopsis thaliana columbia
gttgaaaacattaaatcgatatatcagaactaaaccggatctgaaaaatggcgaacgacgcaagtgattcttcttgattactggccaagcatgttcgggatgaggacgaagatggctttggctgagaaaggagtcaagtatgagtacaaggaaacagatccatgggttaagactcctttactcatagagatgaacccgattcacaagaagattccggttctcatccacaacggtaaaccgatttgagaatctcttattcagcttgagtacattgatgaggtttggtccgatg

SEQ ID NO: 151607 - DNA, 408 bp, Arabidopsis thaliana columbia
aattccgaacaccaaatttcgaatttctgccacttgctttgtgatctgatcgttcgaaattgaccggagaattcttctgtgttcttagatctgtcgcgaatttgttaaagctcctcagaaggttttggttacagatcttctctgtggtcttcaccactatggccgctccgtttttttcaactccatttcagccttatgtctaccagagtcaacaagatactattacaccgttccagattttgggtggtgaatcccaagttgttcagataatgttaaagtcagaggagaaagtcattgctaagcctgcttccatgtgctacatgtctggctccatcgagatggaaaatacatacactcctgaacaaagaagtggagttctgcagtggattctgggcaagagtgtaagca

SEQ ID NO: 151608 - DNA, 440 bp, Arabidopsis thaliana columbia
tgaaaaccaaacaagaccatatgggcactcgaatactccattttgttatcggctacttccactagcgtgctccttcgctgcgtctcctgtttctctacttcacgattactcgctagattcattgaagcagttgtgagttaagttggagaaaatggttgtgttagggaatgtttctgcggcgaatttgccttatcaaaacgggtttttggaggcactttcatctggaggttgtgaactaatgggacatagctttagggttcccacttctcaagcgcttaagacaagaacaaggaggaggagtcctgctggtcctttgcaggtagtttgtgtggatattccaaggccagagctagagaacactgtcaatttctaggaagctgctagtttatctgcatccttccgtagtgctcctcgtcctgctaagcctttgaaagttgaaa

SEQ ID NO: 151609 - DNA, 392 bp, Arabidopsis thaliana columbia
atcgaagtcggacttggcccggccggtgaactactttatccttcttacccccaaagccaaaggtgggtgtttcccggcatcggagaattccagtgttatgacaagtacttgaagaaagatttcaaggaagcggcgggcgaaagcagggcaccctgagtgggacttgccagaggaccccggaaaatacaatggcaaggccggaggagactgggttttttaaagaaggtgggacttatgtcttggaaaaaggggaagttttcatgacatgggactcgaacaaactaaattttcatggggatcagatcttatgagaagccaacaagatctttggctggactaaaaagtaacttgctgccaaggtttctgggattcactggttgtacaaccaccac

SEQ ID NO: 151610 - DNA, 461 bp, Arabidopsis thaliana columbia
cggacgcgtggggaaaaaaaggatatcttacttttgttttttgtttgttttccaaacctatagtgggttaggattcgaaaaaggaaataaagattaaaaaatttattcataaaggcaattagatctcacatgccaaaactaaatttttgtaggaatccaaacaacattcgagattttctcttataaatagagatttagttgatggcctcctcacacagactctttcatagactttagatcatcaccatcatattactcaaagcaagaatgtctgttgcagagatcttcgagaagagtcgacaaaaacaaagatgggaaaatctcatgggacgaatttgctgaagcgattcgcgccttttctccttcaataacatctgaagaaatcgataacatgttcagagagattgatgtcgacggtgataaccaaatcgacgttgcggaatatgcttcttgcttgatgc

SEQ ID NO: 151611 - DNA, 378 bp, Arabidopsis thaliana columbia
agaagatccagacgaagtggtttgccttcagggaacgagagagagaaagagattttaacaaaggatgtcgctgaggccgagcacacgcgcggagctaaagaagaagatatacaagacaggcgtcgatgccgatgaggccaggcggaggagagaggacaatctcgtcgagattaggaaaaacaagcgtgaggatagtcttctcaagaagcgtcgtgaaggaatgatgcttcagcagcagctgcctctcggagctggccttgatgagtcccagaccgctgccgccgttgagaaacgattagaaggtatcccaatgatgggacaaggtgtttattctgatgatcctcaagctcagctagaagcgactacccaatttagaaa

SEQ ID NO: 151612 - DNA, 406 bp, Arabidopsis thaliana columbia
caaatcgtgtcacatctccttcttctccactttaccaaatcgtgtcaaattttaggggttttggttttcgtacttcatcaaattctggaatctggttttttcttagttttcttctatatacctttgaatcgcatctttgatccaaattcattttagatatcaccttgaagtcgaatttgtgattttttcttttcctctcgaattctcaaagtctcacgcaactatgaaagaagacatggaagtactatcgctcgcttcactaccggttgggttcagatttagtccaacggacgaagagttagtccggtactatctccggctcaagatcaacggtcacgataacgacgttagagtaattcgtgagatcgatatctgcaaatgggagccttgggatttgcctgatttt

SEQ ID NO: 151613 - DNA, 434 bp, Arabidopsis thaliana columbia
gttagatgacatcatcaggtatggatcaattttgctttttgctagtgaagatgatgaagcaggggagtctggaaaaattcattatgatgatgcggctatagacaaattgcttgatcgtgatctcgtggaggcagaggaagtctcagtggatgatgaagaggagaatggattcttaaaggctttcaaggtggctaattttgaatatatagatgaaaatgaggcagcagcattagaggcacagagagtcgctgctgaaagcaaatcttcagcaggcaattctgatagagcaagttattgggaagagttgttaaaagataaatttgagctgcaccaagctgaggagcttaatgctcttggaaaaaggaagagaagtcgcaagcagttggtatccattgaagaagatgatcttgctggtttggaagatgtgagctctg

SEQ ID NO: 151614 - DNA, 341 bp, Arabidopsis thaliana columbia
  unsure (1)..(341): unsure at all n locations
gaccacgcgtncgaattttctcaaactctaaaatcaatctcttttatctctcaaccgngatcaagatgcagaggcgggttaagactctcaccggaaagactatcaccctccaggtggaaagctctgacaccatcgacaacgttaaggccaagatccaggataaggaaggtattcctccggatcagcataggcttatcttcgccggaaagcagttggaggatggccgcacgttggcggattacaatatccagaaagaattcacccttcacttggttctcaagctccgcggtggtatgcagatttttcgtaaaaccctaacgggaaagacgattactcttgag

SEQ ID NO: 151615 - DNA, 382 bp, Arabidopsis thaliana columbia
aaaaaattggttagcacggaggttagctgcagatccatagggccttagagagcggttgaggagttcgggcttaaaggcaacggttttgagccaccatcctttagatctggctcattttagcatccatcgagccggattgaatcgtcgaaactcatgttgtttgagtactttcggtttggaagagaacggctaccgcccagaggattgagttgcttcttcaggatccgatttcgtcgatgtgcctagtcagagcaactagctttccgggagatctgctgtgggttggtgcatctgagggatggttttgatgatgatcaccggtctctctcagtggaagattcccgatcttcggtggtgaccacgaaacggtagctcttgagcc

SEQ ID NO: 151616 - DNA, 452 bp, Arabidopsis thaliana columbia
acgatactttctctgcaacacgcctacaatacgccatcgaatatttatatcatcaaaccactctattgtgttcatttttcaacaaaattcatctttaatttttcgatccaaggagcttctctgatcctaattaacctaaacaaaacattcattacaggtatcttaaagattatggaggaagaagacaagaaagtgatgaagtgttttagcttctagagaatcatgaagaggaagaagaaagaggaggaggaggagaagttgatagtgactagagaattcgcgaagagatggcgagatcttggcggtcaaaaccattgggaagggatgtttcagccgctggatcaagatctccgggaatatatcatacattatggtgagatggctcatgctggttacgatactttcaatatcaacaccgaatctcagttcgccggggctagcatctactctag

SEQ ID NO: 151617 - DNA, 445 bp, Arabidopsis thaliana columbia
cggacgcgtgggttttaagttctcgcttggttggacttgttccaatgctgatcaaaattgatgctgggaattccttgattgaggattatgccgcctgccttgagggacgacttgaagagggtgaagttgtagagaacagttgtgatgatctaggggtccttattatgcagcttctggttgataatatcaaccggcctgccccaagtatcacacatttgcttctgaagtttgatcttgatgcccctgtggaagggacagttttgcagccgaagtttcactacagttgtctgaaggtcattcttgaaatgctggagaagcttccaaaccctgatataaacttcttactctttgagtttggcttccaacttttgtgtgagttgaatttggatccactaactagtggtccaaccatggatctattgagcagcaaaaaatatcagttttt

SEQ ID NO: 151618 - DNA, 206 bp, Arabidopsis thaliana columbia
tttctctaacaatggagatttttcaaaaggccaaagccgttcgtctacggagccatcacgacaaggacctagtcgccgatgaagacgaagaatctgtaactcaagaacgtaacggctcagcaggtgcagccaaatggaccgttgagataatcccaggctcaacatatctcatccgtctcaaaagcgcttatggcaaatacttaaca

SEQ ID NO: 151619 - DNA, 403 bp, Arabidopsis thaliana columbia
aaagaagctgaattgattcaccaaatacacattataaagtttcaatctgtttcttcttttaggggttgggagatttttaatcggagatctcgaaaagatgatagatttcagtcgaatccagaaagagcttcaggactgcgagagaaaccaggattcttcgggtatccgggtctgccccaaatccgataacctcacccgactcaccggaaccattcctggtccaatcggtactccttacgaaggcggtacatttcagatcgatatcactatgccagatgggtatccatttgagcctccaaagatgcagttttcaactaaagtttggcatccgaatattagtagccatagcggtgcaatatgcttggatatcttgaaagaccagtggagtccagctcttactctg

SEQ ID NO: 151620 - DNA, 426 bp, Arabidopsis thaliana columbia
ggttctcgggtcggatcttctaagtctagctagggataatggctactgtcactactcatgcctgggcctcgattttccgaccttgtacttcaaagccaagattcctcaccggttcttccggtaggttgaaccgcgacttgtcgtttacatcgatcggttcatcggccaaaacgtcgtcgttcaaggttgaagctaagaaaggagaatggttgcccggtttggcatcgcctgattatctcaccggcagtcttgccggtgacaatgggtttgacccgttgggtctagcagaggatccagagaacttgaaatggttcgtccaggcagagctggtcaacggacgatgggctatgctcggggtcgctgggatgcttttgccggaagttttaaccaagatcggaatcataaatgttcctgagtggtacgatg

SEQ ID NO: 151621 - DNA, 375 bp, Arabidopsis thaliana columbia
gtgaagagtgaagaccgagagagatttatagcagaggaaagtgaaatcatgaaagggattctagggtttgaatacgggatagttcaggcgccattaggaccagatatctccggaccagagcttgtagccgccgtcgctaatgcaggagggattggtcttctcagatgtcctgattgggagtgtcctgattacttgagagagcttataagaaagacaaagacattgacagagaaaccatttgggatcggtgttgttcttgcgtttcctcatgatttgaacattaagacaatcttagaagagaaagtggctgtcttgcagctttattggggtgattgttcacaggagcttgtggatgatgctcactttgccggtgtc

SEQ ID NO: 151622 - DNA, 464 bp, Arabidopsis thaliana columbia
cattatcacccgagtcgatcgacgtcagtttcgtctaacagaaaatggtaggctctctggaagtatccaagcctccagagcacaaggttgagtccaagatcgtcatagccgatgaagaagaagaggatgaaaacgacagtccaatcgaagaggtccgtttaaccgtaccgataaccgacgatccatctctaccagttttgacattccgtacatggttcttaggaatggtttcttgcgtggtactcgcgttcgtgaacaatttcttcggttaccggtcgaacccgctcacggtatcttcagtcgtggctcagatcatcactctccctctaggaaagctcatggccacgactctaccaacaacaaaactccgtttacctggtacaaattggtcgtgttcgttgaaccctggaccattcaacatgaaagaacatgtactgatcactatattcgctaataccggagct

SEQ ID NO: 151623 - DNA, 423 bp, Arabidopsis thaliana columbia
gataagctcaaagctctttgatttctttccaaagggagtttcctagagatcacataagagccaagtatacaatagtgcgaaagagagttgcaagttttgaacaagcagtgagaggtgttacgagggactattctttttcacccaggaaggcgatggtgtgaccactgtgagtggaacagtttctggccttaagcctggtcttcatggtttccatgtccatgctcttggtgacaccactaacggttgcatgtctactggtccacatttcaaccccgatggtaaaacacacggtgcccctgaggatgctaatcgacatgctggtgatctaggaaacatcactgttggagatgatggaactgccaccttcacaatcactgattgccagattcctcttactggaccaaactctattgttggtagggc

SEQ ID NO: 151624 - DNA, 262 bp, Arabidopsis thaliana columbia
cacctacactctcctgctacaatggcgactttcctaacagatgttagggacaatcaaacctacaatagatctcattcacagtccgaatccttcactcctttgcatacacgggtcaatgtattctcctcgaaaccctttccttctctcgctggaactttctcccggagctctagaacgagattcattccttatgctgtaacggagacggaagaaaaacccgccgctttggaccctagttcagaagctgccaggcgtgtgtata

SEQ ID NO: 151625 - DNA, 414 bp, Arabidopsis thaliana columbia
tccgattttttttctctaacgtttctaaaacatcctctctctctctctctcataacatggctgaaacatctgatgtatcgccattgaagcgttacagagaacaagaaaccctagtcgaggaagaaacgaacaaacgacaaaagccaacttcgtcatcatcctctgcctcttacaaccaaattctctgtcttctcaacgattcagacgaacaaaaccaacacaacaatgacctaacttccttcataaacgctcttcagcaagaaatatcatcggatgaccaatacgccgtcgtttcagaaacctccaacgtcgaagactcgttttcttcatgtgtttcctcaaaggaagaagaagtggaagatgacagcaaggagaaagtgatgcagcatcttttggaaagcttcgatgacgaac

SEQ ID NO: 151626 - DNA, 283 bp, Arabidopsis thaliana columbia
cttttacattaagagaaaacacttgcaaaactaattgctatctctctgcttcttccttctcctaacaacttatttaccatgagtctcttcaacactgaaaacacatgggcctttgtctttggcttgctcggcaaccttatctccttagccgagttcctatctcctgtgccaacgttctataggatttggaagaagaagacaacagaagggtttcagtctattccttatgttgtggcgctcttcagtgcgacgctttggctttactatgcgacacagaagaaag

SEQ ID NO: 151627 - DNA, 296 bp, Arabidopsis thaliana columbia
atttttgaatctcagcttcccggttagtactaccctcaaatcaactaagtttcatgtctgaacttgactcccaggttcccactgcctttgatccgtttgctgatgcgaatgttgaggactcaggtgccggaacaaaagaatacgttcatatccgtgtccagcagcgaaatggtaggaaaagcttgacaaccgtccagggcctgaagaaagagtacagctataccaagatacttaaggacctcaagaaagagttttgctgcaacggcacttgtggtcaggattcagaactcggacag

SEQ ID NO: 151628 - DNA, 376 bp, Arabidopsis thaliana columbia
  unsure (1)..(376): unsure at all n locations
ggctccaaagattccaatcattgcagatgcagatactggtggaggaaatgctctcaatgttcaaagaaccgtcaaggacttaatcgcagcaggtgctgctggttgcttccttgaggaccaggcatggccaaagaggtgtggacatatgcgtggcaaagaggtcatacctgcggaggaacacgctgctaaaatagcatcagcaagagacgctattggagatgctgacttttttctaatcgctaggactgatgctcgtgcactttccgcaaaaacaggactttcagacgccattgaccgtgctaatctttatatggaggcaggagctgatgcttnctttgttgaggcaccgagggacgatgacgagcttaaggaaatc

SEQ ID NO: 151629 - DNA, 453 bp, Arabidopsis thaliana columbia
gaaggaaacaacggaggtgttaatgtcgtcgttaaggagaagagactttgtgctggtgatttgagcagttttaaaagatccaacgagcaagatcaaaaattctttatcgggtggaaatcgaaatccgggttggatctagagacgggtcgggttatgagattgtttggggttgatatttctttaaacgccgtcgttgtagtgaaggaaacaacggaggtgttaatgtcgtcgttaaggtgtaagaagcaacgagttttgtaataacaatttaacaacttgggaaagaaaaaaaagctttttgattttaatttctcttcaacgttaatcttgctgagattatttatgttggaagttgtaacaagtggaaaaaattaattaggtgtcaaacaaatcttgtgttaatattctttgtataatggatggatgagctgttattaattactgtaatttttt

SEQ ID NO: 151630 - DNA, 408 bp, Arabidopsis thaliana columbia
gcggatgcagtgaggaaatgaaccatttgtaccgattttggtcgtatttcctcagagacacatttgttctctctatgtatgatgactttcagaagtttgctcttgaggatgcagctggcaattacgattatgggctggagtgtctctttaggttttatagttatggtctggagaagcactttgatgaggacctttacaaggactttgagaagctatcgcttgacttctaccacaagggaaatctgtatggcttggagaaatattgggcattccaccattatcgaggcaaagaagaaccgataacaaagcaccctgagctagagaaactactgaaggaagaattccgtagcatagacgatttccgagcaaaggaaacaatcaccaaccaaaaagaaaacaagtctcact

SEQ ID NO: 151631 - DNA, 448 bp, Arabidopsis thaliana columbia
gctaaactcacctacacgttcgcatcacgctctgatcatatacatgcttgtaaaagtgtacataatgtcaacttcattgagaaaatcggctttagcggctcttgccaaaacattaactgtaccgcagttagcgtatcttcgggagcaattcacattgttggggccaagcaaaaatggatatatctcgatgcagaattacaaaacagcaatcctaaagagttcaacagatgctatgaaggattctcgagtgtttgattttgttcacatgataagttgtcttcaatacaagaaactagactttgaagagttttgtgcttcagcattaagcgtttatcagctcgaagcaatggagacatgggagcaacatgcacggcgtgcttacgagttgtttgagaaagacgggaataggcccatcatgattgaagaacttgcatcggaactcggacta

SEQ ID NO: 151632 - DNA, 449 bp, Arabidopsis thaliana columbia
cacaaaaactcattcatcgtcctctctcgcttgacctacaacacccgattctctaatcgaaaccgtttctctctttttgatcagatctcagatctttccctctttgattcttcttccttagatcgattctctctagaaacaacaatggcgtctgggcgtgaagagttcgtatacatggctaagctcgcggagcaagcggagaggtacgaagagatggtagagtttatggagaaagtctccgccgccgttgatggcgatgaactcaccgtagaagagcgaaatcttctctccgtcgcttataagaatgtgattggtgctcgccgtgcctcgtggcgtatcatttcatcgatcgagcagaaggaagagagccgtggtaacgatgaccacgtcacggcgatccgtgaatataggtctaagatcgagacggaactctccggaatctgcgacgg

SEQ ID NO: 151633 - DNA, 436 bp, Arabidopsis thaliana columbia
gcgagatctcactctcactgagatagcttagcaatggagcagtcagaagagggtcaacagcaacagcaacagggagtgatggattatgtacctcctcatgcttatcagagtgggccagtaaatgcagcttcccatatggcattccaacaagctcaccacttccaccaccaccatcagcagcaacaacagcagcagcttcagatgttctgggctaaccaaatgcaagagatcgagcataccactgatttcaagaaccacacccttcccctagcccgcatcaagaagatcatgaaagctgatgaagatgtgaggatgatctctgcggaggctcctgtgatttttgccaaagcctgtgagatgttcattttggagctcactctacgtgcttggatccacaccgaggagaacaagaggaggaccttgcagaagaacgaca

SEQ ID NO: 151634 - DNA, 462 bp, Arabidopsis thaliana columbia
cttaaacgttttactttgtgctgcactactcaacctcaatggccgcctcaacaatggctctctcctgccctgccttcgccggtaaggccgtcaagctttcccccgcggcatctgaagtccttggaagcggccgtgtgacaatgaggaagactgttgccaagccaaagggcccatcaggcagcccatggtacggatctgaccgtgtcaagtacttgggtccattctctggcgaatcaccgagctaccttaccggagagttccccggagactacggatgggacaccgccggactttcagctgaccccgagacattcgcaaggaaccgtgaactagaagttatccacagcaggtgggccatgctcggagccctaggctgcgtctttccctgagcttttggctagaaacggagtcaagttcggaggagcgggttggttcaaggccggttcacagatcttcagcgat

SEQ ID NO: 151635 - DNA, 474 bp, Arabidopsis thaliana columbia
gttcggctaaacacacccacacgtacgcacacacacaaagacaatgcctcctttcaaaatattcttcttcacgactcttctcgtggcggcgttttcagtgtcggctgctgatttcaacactgacgtcaacgtagcttggggaaatggccgtgggaagatactcaacaacggccagcttcttactctctccttagacaaatcctctggttccggttttcaatccaaaacagagtatttgtttggaaagattgatatgcagattaagcttgttcctggtaactctgcaagaacagtcacaactttttacctaaaatccgaaggatccacttgggatgagattgattttgagttcttgggtaatatgagtggagatccttatactttacacactaatgtttacactcaaggtaaaggtgacaaagagcaacaattccatctctggttcgacccaaccgccaatttccacacttactc

SEQ ID NO: 151636 - DNA, 240 bp, Arabidopsis thaliana columbia
cgcgttctaaagaatcaacataccaaaattcgcagagactctatttataaccttcgtttgtgtctcagagggggcgaaagctttgagtcaggggagaaattccgcgaatcgtgacagatccatgatcagcagctgcgaacggtaacccaagcataacggctaaaggatcgagcacagaactaatacttggaagaaccgctcacaacacgtctttttcttctttgaggaaaaaatcagacc

SEQ ID NO: 151637 - DNA, 474 bp, Arabidopsis thaliana columbia
cccggggaagctcttttcaatggaggtccttgcgagctcttcattatccccaatttcttttactaagcctaacataataaaccctaatttctcaatccaggtgaaattgtgggtaaaacaacctccaaagatttcaaaagctagcaaatttagttatgctcgtagtcggaggtacatttcaaggagcaatgcagcaaacccaggagtcgtgttcgtctgtaatagatttctgtgtgttatcgaaagaaatgatcagaggaaattatctgggaaggttatgatgaaatcttctgttaatttcagacagaatctctctgttgcattaattcggatcgtttctgttctgcttgtctcttccatttctgttggtaccactgattcaccaccatcatggggtcttactgaagagaatcttctcttcctcgaggcttggagaacaattgatcgtgcttatattgataaaacctttaatgg

SEQ ID NO: 151638 - DNA, 451 bp, Arabidopsis thaliana columbia
ggcgcccgtaacggtagttgttgctccattaacggttatcaacggctgaagcaaaggatgttgcaagtaccgtggcgctgggtacgcgactcctctcgccggtatgtctgggccatcggggaagcttatctacgcatccgcgcgttacaccggatctggaatagataaaccggattatttgccaacggtggatgtacatccaagctcgccttcgtatgcaagcgttattcatagatgaccaatgccttttgttggtgatgagcttcatcattctggttggaactcttgttgttattgccatggtgatgcttctgatgattagacgctttctcatgttaccgtttcttatatctggtcgcatgtatgcgattgatacttaggcaaacccgagggctccgtctctgtataaggatgttgatcctaaagagattgctaatacgactggattggc

SEQ ID NO: 151639 - DNA, 442 bp, Arabidopsis thaliana columbia
ggcgacggaaacggaagttgtagctccggtatcggtaagcaacggcggaagcaaaggatgttgcaagtacggtggtcctggttacgcgactcctctcgccgctatgtctggtccatcggagaaacttatctacgtaaccgccgtctacaccggaactggaatagataaaccggattatttggcgacggtggatgtagatccaagctcgccttcgtattcaagtgttattcatagattaccaatgccttttgttggtgatgagcttcatcattctggttggaactcttgtagttcttgccatggtgatgcttctgttgatagacgttatctcgtgttaccgtctcttatatctggtcgcatttatgcgattgatactaaggaaaacccgagggctccgtctttgtataagtatgttgatcctaaagagattgctgataagact

SEQ ID NO: 151640 - DNA, 459 bp, Arabidopsis thaliana columbia
attttctcaaactctaaaatcaatctctcaaatctctcaaccgtgatcaagatgcagatcttcgttaagactctcaccggaaagactatcaccctcgaggtggaaagctctgacaccatcgacaacgttaaggccaagatccaggataaggaaggtattcctccggatcagcagaggcttatcttcgccggaaagcagttggaggatggccgcacgttggcggattacaatatccagaaggaatccaccctccacttggttctcaagctccgtggtggtatgcagattttcgttaaaaccctaacgggaaagacgattactcttgaggtggagagctctgacaccattgacaacgtcaaggccaagatccaagataaggagggtattcctccggaccagcagaggttgatcttcgccggaaagcaacttgagggcggcagaactttggcggatacaaca

SEQ ID NO: 151641 - DNA, 464 bp, Arabidopsis thaliana columbia; identical to SEQ ID NO: 130733

SEQ ID NO: 151642 - DNA, 307 bp, Arabidopsis thaliana columbia
gagaaaataagcgaggaggtagctcatccggaaactctcctccaattctgtgtcgaggtctcgaaagagatcgacgaacatcttttggccgaggaatagaggagtactactactcttcgtgtttgaatttaaatgcaataaataaggactaagagccatgtctttgtgagatatatgaatgtgagtgtgcatcatgaatgtatgtatactaagatcgttttacgttggctactgtaactttgagaagcaatgtgtagtagctgtgatgaagctagtataaatatataataagtatgttatataaaaa

SEQ ID NO: 151643 - DNA, 466 bp, Arabidopsis thaliana columbia
caaacacataaaagagagatttaatacaaaagaaagtgaaaaaagaaagatatggcaggactcagcaacaagatcggagacgcactccacattggaggaggcaacaaggaaggtgagcacaagaaggaagaggaacacaagaaacacgttgacgagcacaagagtggtgagcacaaagaaggtattgttgacaagatcaaagacaagatccacggtggtgaaggtaaaagccacgacggagaaggcaaaagccacgacggtgagaagaaaaagaagaaggacaagaaggagaagaaacatcatgatgatggtcaccacagcagcagcagtgacagcgacagcgattaaggtggagaaagtgaagaggatcgcttgaataaaacagatctggttctggctattattaattaatggtgctgtatgttcttatcatcttagagagaggttaagacaggagaaccgtgca

SEQ ID NO: 151644 - DNA, 461 bp, Arabidopsis thaliana columbia
caaaccttcacataaaaaaaatacttttgaatccgtgtttcattcatcgaatctttttccgataactatggctgaggaaatcaagaatgttcctgaacaggaggtgccaaaggtagcaacagaggaatcatcggcagaggttacagatcgtggattgttcgatttcttgggaaagaagaaagacgaaacaaaaccagaggagactccgatcgcttcagagtttgagcagaaggttcatatttcagagccggagccagaggttaaacacgaaagtcttcttgaaaagcttcaccgaagcgacagttcttctagctcctcaagtgaggaagaaggttcagatggtgagaagaggaagaagaagaaggagaagaagaagccaactactgaagttgaggtaaaggaggaagagaagaaagggtttatggagaagttgaaagagaagcttcctggacacaagaaac

SEQ ID NO: 151645 - DNA, 467 bp, Arabidopsis thaliana columbia
gcaacatcttctgctaaagtagatgccatcttgttttctcctggaatggaagctgcgaaaaaggatatatcctctctaagtgctggtgcaaccacagcccagctggttagtcatggtctggttgcgataccattcctcagtgcattagttggtctgagagttctcaatctctcaggaaatgctatagttagaataaccgctggtgctcttcctcgaggtttacatgcattgaatttgtcgaagaacagtatctcggggattgagggcctacgtgaactcactcggcttcgagtattagatttgagttacaaccgaatactgagacttggtcatggtctggcttcgtgctcctctctgaaagaactatacctagctgggaacaaaatcagcgaaatcgagggtcttcatcgacttttgaaattgacggtcctggatttacgcttcaataagttttcaaccaccaaatg

SEQ ID NO: 151646 - DNA, 182 bp, Arabidopsis thaliana columbia
  unsure (1)..(182): unsure at all n locations
ggggaagaagaaaaatgtataaatcaccattaacgttgctcacacttcttactatttgttttggatgcttcgatctcagcagtgctctggatggatcttcgtcacctgtggttcagctcactgcttctaactntaagtccaaggttcttaattcaaatggaagttgtttggtagagttcttt

SEQ ID NO: 151647 - DNA, 341 bp, Arabidopsis thaliana columbia
ctcgacggtcgcataacaaaagtccatttcttcgttctgttaggaggatcaccatctatggaggaagagcactaagtcatagttcgggactctgctctcaaggatggcatcctcagtggtctatcttatctacgatggccttaaggtacttcacatctgcagtaatgactactactgatggagagtcaacttgatttaaatccaatcaggtgtggaaaaagttcagggaataatagatggccactgcctattgttggtctagcgcagactacaatggtgtcatgctgccatagttcatgacatctaactgcaagctggttcagacccttattcatacggat

SEQ ID NO: 151648 - DNA, 340 bp, Arabidopsis thaliana columbia
ggcgaccgtaacggaagtcgtagctccactttctttatgcaacgccggatgcaaaggaaggagcaagtaccgtggagctgggtacgcgactcctctcgccgatatgtctggtccatcggagaaacttatctacgcaaccgtcgtatacaccggatctggaatatataaaccttattatttgccaacggtggatgtagatccaagctcgccttcgtattcaagcgttattcatagattaccaatgccttttgttgagtatgagcttcatcattctgattggaactcttgtagttcttgccatgtggatgctgctgatgatagactctttctcgtgttaccg

SEQ ID NO: 151649 - DNA, 458 bp, Arabidopsis thaliana columbia
atttaattccaaaagataaaaacattcaaaagatgattgccacaaagtttgttgtgcttctcgggattggcattttgagtgccattgtcaccgcaaggcaagtcgaagaagtgtccaaagagaccaaattaggcacctctcttccaaaatctactaacaaaggcattggagctcagctttctgctgctggtcttacttacagcggcagcagtgtctctagctctgctagtgcttttaacaatcccaaaggtccaggggccagtgcatccgaaagtggctacacaagtaccatcggacaagtcattgccaagggtcgcaaggcaagagtttcttctgcaagtgcttctgccgctacaggtgaggctgcagctgcagtgactcgcaaagctgctgcttcacgtgcaaagggtaaggtagcttccgcatcaagggtgaagggttcctctgagaagaagaag

SEQ ID NO: 151650 - DNA, 363 bp, Arabidopsis thaliana columbia
attttcttccgatcaatacagagagatcagtttctgagagagaagaagatgtctatagaggaagaagacgttccaacgactgttgactgaggagctgccgatacaacggtgaaatctccggagaagaaaccggcggcgaaaggtggtaaatctaagaagacgacgacggctaaagcaacgaagaagcctgtgaaagctgctgctccaacgaagaagaaaacaacttcctctcaccctacctatgaagagatgattaaagatgcgattgtaacgttgaaggagagaactggatctagtcaatacgcgattcagaaattcatagaggagaaacataaatcactgcctcctacttttaggaagctt

SEQ ID NO: 151651 - DNA, 395 bp, Arabidopsis thaliana columbia
agcagctgcaaacatggcaagaggtttgaagaagcttctaaagaggctcaatgctcctaagcgggggatgcttgacaaacttgggggtgccttcactcccaaaccatcttctggacctcacaagtcgagggagtgtcttcctcttgtcctgatcatcaggaacaggttgaagtatgctttgacttaccgagaagttatctctatcttgatgcaaaggcatatccaagttgatggcaaagtcaggactgacaagacttaccctgctggtttcatggatgttggatccatccccaagaccaatgagaacttgcggcttctctacgacaccaagggacgtttccgtctccactccatcaaggatgaggaagcaaagttcaagctttgcaaggttagat

SEQ ID NO: 151652 - DNA, 409 bp, Arabidopsis thaliana columbia
cggacgcgtgggcggacgcgtgtgcggactttttttctttcaaactctctctcacaagcgatagaagactcggagagaaccagcggtgatccgttagacagaattgagaaagtgacatggagagatctgcaagacggatctttcaccgcagaactcaagaggcttatctgctttgcggctcctatggctgccgtggttatcattcagttcatgatacagataatctcaatggtgatggtgggtcaccttggtagactctcccttgctagcgctttcttcgcagtctccttctgtaacgtcactggcttgagctggattataggattgtcatgtgccttagatactttgagtggtcatgcttatggagctaagctatatcggaaactaggtgttcaagcttacacagcta

SEQ ID NO: 151653 - DNA, 385 bp, Arabidopsis thaliana columbia
ggcacccgtaaccgaactcgtagctccactctcttttttcaacactcgatgcaacagacgatgcaagtaccgtagagatggacaggcgactcctctcaccgatttgtctgagccacatgagaagctcatctacacaaccgtctgatacaccaactcaggaatctataaaccttattatttgccaacggtggatgtagatccaatctcgccttagtattcaagtgttattcatagattaccaataccttttgttgatgatgagctgcatcatcttggttggaactcttttagttatcgccattgtgttgcatctgatgatagactctttctcttgctaccgtcccttatatctggtcgcatatatgcgatagatacttaggaaaac

SEQ ID NO: 151654 - DNA, 283 bp, Arabidopsis thaliana columbia
attaacatgttatctgagtttgggactgttgaaaatattccagagtgcattgaaagcgtgaagaataagaagaggaggttgtcgggttttggacaccgcatttacaaaaactacgatcccagaggaaaagtcgttaagaaactggcggatgaagtgttctccattcttggaagggatcctctggttgaggtaggagatgctctagagaaggcggcactttctgatgaatattttggtaagagaaagctgtacccaaatgttgatttctactctggattaatca

SEQ ID NO: 151655 - DNA, 373 bp, Arabidopsis thaliana columbia
ggcaccagtaacgttacttgtccctccactttctttaaccaacacttggaccaaaagaggatgcaagtaccgttgagaacggcacgagactcctctaacatatttgtctgaaacataggcaatgctattctactcaaccgtcttttacacctgatctgaaatatataatcctgattatttactaacggtggatttatatccaagactgtatatagctacaaacgttattcatagataaccaataccttttgttgatgattagcctcatcatcttatctggcactcttgtaggtatcgccatggtgatgcttcctattacagacactttatcgtgataacgtttcttacatctgaacgcatttataagatctat

SEQ ID NO: 151656 - DNA, 394 bp, Arabidopsis thaliana columbia
aagcttggtacctctggtgggtatagatgtttgggagcacgcctactacttgcagtacgagagaggtgaggcctgagtatcggaagaatgtatggaaagtgatcaactggaaatatgcaagcgaggtttatgagaaggaaaacaactgaatcgtttacacgatgacataaggagatgaaccagttccagctcagcttttgttttaaggttgtctgaaacaaacttacagtgtctctttggtttttaagatttgctcaactcagctgtgtggtacgttgttttacaatgaaagttttcaagaataaaaatttgctattattgtcagaaagcgctattgtttattctacgaagaaaacaaaacggaatcttattggtataataattacctcatttc

SEQ ID NO: 151657 - DNA, 439 bp, Arabidopsis thaliana columbia
cggacgcgtgggcggacgcgtgggcggacgcgtggggtctcgttctctagtcttcttcttccggtttgttgtctaggtcgtcccgtgtctctcccatggaaccggaggagaccacgacgacgatgaggcttcgcacgttaagagttccgatctcaaatccaaatccttaatctccgtcaagatcgcatgtcttgtcatcatctttgtcctcacgttcataagcggagtatctgcttatttctagaaatggagccaagggtttttggttcttggtacacaattcgccggaggcgtgtttcttgcaaccggcttgatgcatttcttgtcggacgctgatgagacgtttcgtggttttgtgaccgcagaaggagagtcggagccatctccggcttacccatttgcttatatgttggcttgagctggtttatgttgaccatgc

SEQ ID NO: 151658 - DNA, 455 bp, Arabidopsis thaliana columbia
ttggtattctattaagaattacaaaccggagagcttggagttaggttctaaaggtgttggttgagttgctgctggtgaggtgaagaagcatgatggttttgggttgaagaagagcggaaagaactggtctaaaggatggaacttttggggattgattcagaggaaaactgatgtggcgaagaacgaaatgaaaaccgagcaaagtttgaaacttggaggaaatactatggagggttctcttgctgagtctttgttgaagcttaggagagtggctaaaggagaaaccaatggtgatatcagatgcattgtacgagaaagtgaacaaaaactgcgatttcaaacaaaaacttgtgaccaaggaatgcaacgacgctttagatgagtattttgatgtatacaagatccttgacatgtacagtctgtacgctccaaagtgtgttcccaccttcacgaac

SEQ ID NO: 151659 - DNA, 420 bp, Arabidopsis thaliana columbia
tattgatcttgttagtaatgataaaatgaaggcctttaatattgttcgacacattgctattaagaaggataaggcagccatggagggggtgattcctgatattatcagttgctatagcagtggaggccaaactattattttcgctgaaactaaagttcaagtttctgagctttctggtttgttggatggatcaagagccttgcatggtgaaatacctcaatcacaacgtgaggttactcttgctggatttaggaatggcaagtttgcaacattggtggctacaaatgttgctgctcgtggtctagatatcaatgatgtgcatgtaattatccagtgtgagcctccacgtgaagttgaagcatatattcatcgttcaggccgaacaggaagagctggcaacacatgatttgcggcttcact

SEQ ID NO: 151660 - DNA, 429 bp, Arabidopsis thaliana columbia
cttctctctcacctaaatcaagggatttgttctgatcaactttgaacagaatttacaacaaaggcctagaaaaatctgacccttggttcttcctcaggaagatttaagatacttgttgataaggatattcggaagaagcttttgaaatttttggcaaaggtctcatttgatccgacttttctgttgaaggtgaaatagatacaaaaaaaatgggctcagaggaaaacaacagcacaagctttccaccaacagagccaaagctctgtgataacggatgtggattcttcgggtcaccatccaacatgaatctctgctcgaaatgttacagaagcttaagagccgaggaagatcaaaccgcggtagcgaaagctgcggtgaagaactctttaaagcttccatcttgcagtatcattgcacctggcaaaaaca

SEQ ID NO: 151661 - DNA, 260 bp, Arabidopsis thaliana columbia
attttcttcaaagaacaaatctcccaaatctttattctttctcttctctcttcgtttccatgagcatgtctgcgaagaagattgtgttgaagagttccgatggtgaatctttcgaggttgaggaggcggtggctctcgagtcacaaaccatagcgcatatggttgaagacgactgcgtcgacaacggagtccctcttcctaacgtcacgagcaagatcctcgccaaggtgatcgagtattgcaagaagcacgtcgaggct

SEQ ID NO: 151662 - DNA, 307 bp, Arabidopsis thaliana columbia
cgccccaagagcattctcaagcccatggggcttttttccgtacactaggaccgaaatggaaagcacttactgctagggacggaacaagccatatataacatatcagcgttaaagatggccactgctattgttctgtcccgacttgtacagatggtcccaagagcattctcaagcccatgaacgccctctcatttcctactcacgactctataaaacaacaaatgtttgccaaatccaaacctaggagagtctccatcaatctccccgacaacgaaatcagccaccatctcaacttccgcgaggatgc

SEQ ID NO: 151663 - DNA, 277 bp, Arabidopsis thaliana columbia
cgccccaatagcattatcaagcccatcgctctctcttccctacacttgtacccaaatgggaagcacttattgctaaggacggcaggagccacctctaacatatctgcgttaaagatggccactgctattctattgtccagttttatacaaatggtcccaagtgcattctcatgcccatgtactccagctcatatactactcacgactctataaagcaacagatgttagtcatatacagccctataacagtcttcatcaatctcccctacaacgagat

SEQ ID NO: 151664 - DNA, 433 bp, Arabidopsis thaliana columbia
gtgaagtttgataagaacggtcctgctgctattgctaaatacgaagaggagtgtttagcgtttgggaaatctgatgggaataggaattcacagtttgttctccaggatttgcaagatgctactttagggtctttgttatcttctttgatgcaacattgtgatcctcctcaaaggaagtatccgttggagaaagggacgcctccgccttggtggccaacggggaatgaagaatggtgggtgaaactcggtctgcctaaaagccagagtcctccttaccgaaaacctcatgatctcaagaagatgtggaaggttggagttttaacggcagtgatcaatcatatgttacctgatattgcaaagattaaaaggcatgttcgtcagtcgaaatgttttcaggacaagatgacagcttaagagagtgcgatttggtttg

SEQ ID NO: 151665 - DNA, 464 bp, Arabidopsis thaliana columbia
tttttggccccttatcgtcgtgggggaaaaattggactattcggtggggctggcgtgggtaaggcagtactaattatggaattgatcaacaacattgctaaagctcatggtggtgtatccgtatttggtggagtaggcgaacggactcgtgaaggaaatgatctttacatggaaatgaaagaatctggagtcattaatgaacaaaatcttgcggaatccaaagtggccctagtttatggtcagatgaatgaaccgccaggagctcgtatgagagttggtctgactgccttaactatggcagaatatttccgagatgttaatgagcaagacgtacttctatttatcgacaatatcttccgtttcgtacaagcaggatccgaggtatccgccttattgggtagaatgccttctgctaggggttatcaacccacccttagtaccgaaatgggtactttacaagaaag

SEQ ID NO: 151666 - DNA, 452 bp, Arabidopsis thaliana columbia
gtcgaaagaagacgaacataaactcgtctccggtaaccaaaaatggtttccatgactacttcaggttgttcgtacggaacattctgtacagtcgtcaacagttctagacctaattcctcagcaacctttctcgtcccttccttgaaattctccaccggaatatcgaatttcgcgaatctgagtaatgggttttctctaaaatctccaattaatcctgggtttctcttcaagtctcgtcctttcactgtccaagctagagctgctgcagaaaaaaccgttcacgatttcaccgttaaggacattgatgggaaaggatgttgctttgaacaaattcaaggggaaaagtatgttgattgtcaatgttgctttcaagatgtggttagacatcatcaaattactcagagctttcacatctgtacgagaaataccaaaactcaaggatttgagattct

SEQ ID NO: 151667 - DNA, 450 bp, Arabidopsis thaliana columbia
ttcttctcccataagaaaaaaaaaataatcaaatcctcctcctctgcttcaccaccaaaaagcggattcttctctcgtcttctccggttaatcaaaatctctccgtgtgaatcgtttgtgaatggtggaaactaatccgatcggtggtaagtttacgctctccctttccatcaaaagggcgagcttttctcttcctctctcgacatcctctgttttcgctttcggatcttgcaaagaaggctggtactttcgctgccttggcctcgacccgtgaacgattcgcccctaaaattcacaacccggaaccctaatttcctaaaaagtggctctttttttattgattctgttacttgtgagatttgctctgttttttgttctctcgatttcgaagatgttgctctacaacaagcagaagaagaaccaaaacgcttaagggaataggattctcat

SEQ ID NO: 151668 - DNA, 464 bp, Arabidopsis thaliana columbia
  unsure (1)..(464): unsure at all n locations
catcgctaagtataaggctggtatcgtccccgtctcttaccgcaggatcccatgtaggaagaagagaggaatcagattcacaatggatggattcaagtacttcaacttggtgctggtcactaacgtagccggagctggagacgtcattaaggtgagtgtgaaaggatccaacacacaatggttagatctgagccggaactggggacaaaactggcaatccaacgcacttcttgtcggccaatctctttctttccgagtcaaaacctctgatggccgaagctccacctccaacaacattgctcccagtaactggcaatttggccagacctactccggcaagaacttccgcgtctgatttctagaatatgaaaaagagtcgtgtggcggaagatactaaagcttttttttatatcaaatatatatatttacgtgtctntgatttagtttacgatttggaaattggg

SEQ ID NO: 151669 - DNA, 465 bp, Arabidopsis thaliana columbia
cattgcttcatcattaccaaatcatcaacttaatcgtttctctcaaatttagggttttctctgtgctcgaaagtcttgcggtttgctgaatcatctctatctggtttgagggtttcgtttgatatctggagaaaggggtttctggaaacaaggagttcataattcgcgatcttgatctatcgatcttcatttatatataaaagcgtgaatgagattatgatggagtcgaaaggtggtaaaaagaagtccagcagtagtagttccttattttacgaagctcccctcggttacagcattgaagacgttcgtccaaacggtggaatcaagaaattcaaatcttctgtctactcaaactgctccaagaggccatcctgagtaccagcgtgcaccgatcttcataatatagttatagctttctttactttccagtttataattttcttctttcaaagctccttttctgct

SEQ ID NO: 151670 - DNA, 438 bp, Arabidopsis thaliana columbia
gcctatttgggggatcatcaaccttctatcatcaccatggatccttacaagtatcgtccgttgagcgcgtacaacgccccattctacaccacaaacggtggtgctccagtctccaacaacatctcttccctcaccatcggagaaagaggtccggttcttcttgaggattatcatttgatcgagaaggttgctaatttcaccagagagaggatccctgagagagtggttcatgctagaggaatcagtgctaagggtttctttgaagtcacccatgacatttcaaacctcacttgtgctgattttctcagagcccctggtgttcaaactccggttattgtccgtttctccaccagtgtccacgaacgtgccagtcctgaaaccatgagggatattcgtggttttgctgtcaagttttacaccagagagggaaactttgat

SEQ ID NO: 151671 - DNA, 413 bp, Arabidopsis thaliana columbia
cgccccaagagcattctcaagcccatggggcggtcaaccgtagacttggaccggaatggcaaggccttgttgctagggacggcgggagccatggagaacatagcagcgttaaaggtggccactgtgatggttttgtccgggtttgggtggatggccccaagagcattctcaagcccatgaacgccgccgcatctcctactcacgactctagaaagcaacagaggtttgccaaatccaggcctaggagagtctccatcaatctccccgacaacgagatcagccgccagctcagcttccgggaggatccacagcactctcccctcaagcccggcgagatcggtctccggagcaccagaacggctctggaagtgctgagtgagctagacgcaaacgtgctggctcttcaagacgtc

SEQ ID NO: 151672 - DNA, 434 bp, Arabidopsis thaliana columbia
accaaaaaaaaaaaaacagaaagtaacatgagatctctcttattagccgagtgcctggttcttgcttgacactgcggtgaagcagccgtgtcttgcaacacggtgattgcggatctttacccttgcttatcctacgtgactcatggcggaccggtcccaaccctctgctgcaacggtctcacaacactcaagagtcaggctcaaacttctgtggaccgtcagggggtctgtcgttgcatcaaatctgctattggaggactcactctctctcctagaaccatccaaaatgctttggaattgccttctaaatgtggtgtcgatctcccttacaagttcagccctttcactgactgcgacagtatccagtgagacaagcagaaaatcttaaaggaagctactacaagaactataataacctaataattaataaatga

SEQ ID NO: 151673 - DNA, 460 bp, Arabidopsis thaliana columbia
ttcgttttctcttaaatacttaattcttttttttcccaaacagtttctctgaaactaagaaacgctaacagagaatccggatgcttttctctgattcttctactctttcctaatttaccgattttctcgggaatccaaaatcccgtttctctttttctcgagttaaaaaactttcgatctgaagtcaattcagattcttcttggaagctcaaagaagaagaagagagaagagagagagactagtgatttggtttagttcgttggatcagaaaggtctctgctttgatctttgtagtacacgtggcgaaaagggtcggaatttggagttgtgttgatgatgttccaagtctcagatttcttgtaataacattctcttggctttcttcaatgtctttgtcttgattctcagaaaaagatcttcagatccggttactctgaggggaaagagacgaatagtttt

SEQ ID NO: 151674 - DNA, 432 bp, Arabidopsis thaliana columbia
gattggtcacatagcaaagttctcaaatgtcaaagttatactcaatggtggacagaagattacgtttctcaggcctgatggatactttacttttcatgaagtgcctgctgggactcatttgattgaagtatcagcaatgggttacttcttttctccggtacgagtagatgttagtgctcggcatcgtggcaaggttcaagcaacactaacagaaaccaggaggagtcttactgagctggttttggagccattgaaggaagagcaatattatgagattcgagagcctttcaacattatgtcgatcgtgaaaagtccaatgggtctcatggtgggattcatggtcgttagtgtgttcctaatgcccaaatttatggaaaacatagatccagaggagatgaagcaagcacatgaggaaatgaggagacaaggcgt

SEQ ID NO: 151675 - DNA, 408 bp, Arabidopsis thaliana columbia
cactgctatccatggattcaggtgcttttactcatgaagaatcagagagggatatgaatgggtctctgatacttactggaccgcctgatattaatctaccactctcttctgaagctaggccatctctgcttttgtggaacgaacactgtgacatcttagacgttggacttggacctcagctatatgagcctgaggctgttgttcatgtgcctaaggttgctaagaagtacaacaagcgtgttgatagtgcatggggtgcttggcttttcttcagtttctacttcaaacctgttttggatgagaagtctaaaagtaagttaacgagggacagcaatggcttgtctgggtatgataaatctgatttgcagctcgactcgttcttggttcagcatgacatggagaatatgt

SEQ ID NO: 151676 - DNA, 459 bp, Arabidopsis thaliana columbia
  unsure (1)..(459): unsure at all n locations
cttaacaaagggaaacgtgtaccccgatccattattctttctaattccatggatccaacaaggtgggctgtttctgctgtcgatttaaacttaaagttaatgagatggcgagcattaccgtctcttaacttaaatgtattgtcctctgtcaaatgccttcttcttggagctggtacattgggttgccaagttgctcgtacccttatgggttggggaatccgcaatatcacctttgttgactatggaaaagttgccatgtctaatccagtcaggcaatctctctataattttgaagattgtctaggtcgtggtgagtttaaagctgttgctgctgttaaaagccttaaacagatatttccagcaatggaaactagtgnagttgttatggctataccgatgcccggacatccgatttctagccaagaagaaaattctgttctcggtgattgtaaacgcctt

SEQ ID NO: 151677 - DNA, 402 bp, Arabidopsis thaliana columbia
gacaaatttcactcgctcatctctgtctgaatctcacaagaagaagtgaaagatggtgaagatgtgttgtattggagctgggtatgttggtggaccaacaatggcagtgattgcattgaaatgtccagacgttgaagtagcggttgttgatatctctgtaccacgtatcaacgcttggaacagtgacacgcttccgatttacgagcctggtcttgatgatgttgtgaagcaatgccgcggcaagaaccttttctttagtactgatgttgagaaacatgttagggaagctgatattgtgtttgcttctgtcaacacaccgactaagactagaggtcttggtgctgggaaagctgcggatcttacgtactgagagagcgctgcgcgtatgatcgctgatggttc

SEQ ID NO: 151678 - DNA, 455 bp, Arabidopsis thaliana columbia
catcgctaagtataaggctggtatcgtccccgtctcttaccgcaggatcccatgtaggaagaagggaggaatcagattcacaatcaatggattcaagtacttcaacttggtgctggtcactaacgtagccggagctggagacgtcattaaggtgagtgtgaaaggatccaacacacaatggttagatctgagccggaactggggacaaaactggcaatccaacgcacttcttgtcggccaatctctttctttccgagtcaaaacctctgatggccgaagctccacctccaacaacattgctcccagtaactggcaatttggccagacctactccggcaagaacttccgcgtctgatttctagaatatgaaaaagaagcgtgtggcagaagatactaaagcttttttttatatcaaatatatatatttacgtgtctttgatttagtttacgatttg

SEQ ID NO: 151679 - DNA, 362 bp, Arabidopsis thaliana columbia
ctttggtggagatccttataatccctctaaccaggacagacccatccctgtctggatcaaagagcatggctgtgataagggctttgaaaacacgaaaccagtacttgaaaccataaagaacaaaggcataactgccattggagccgcagggatgtgttggggtgcaaaagtagtggtggaactgtctaaagaagagcttattcaagcagctgtgttgcttcatccttcttttgtcaatgttgatgatatcaaaggtgggaaggctccaattgctatattaggagcttgaattgatcaaatgttcccaccagcactgtgggagcaatttgaggagattctatcttccaaacccgaggtgaata

SEQ ID NO: 151680 - DNA, 379 bp, Arabidopsis thaliana columbia
attacttacgacaccgcgagctctcaatcttcttcttacactctattgcttgagtttcctcttcactggaacagtttcgtgtaccaaaggcagttctttcttttgtcccaagagctaaagaaaacatgggaataccagatgcagctcaagacttgtcgacagagatggaagttgatgcttttagaagaatcttccctcttcgtttctttgagcgtcatctctctgaatctcttcgtcctgatggaagacaacttggaaaagctagagacaccattgttaatcttggacttgtttcaactgctgatgggtctgctcttgctaagattggttccactactatgctggctgctattagaatggaagttatgactccttctac

SEQ ID NO: 151681 - DNA, 443 bp, Arabidopsis thaliana columbia
tttgtgttttagaaatgaagattctgctcccgagaatccggagcattttgtgcctgaggaatgagttaagccagatcaagattctccatgtacagataaaacagattggaaggcaacttttcaaaaggctgcagatgcagttttgaaggccattgggactcgttggaaggtaccatggactgtcgagaccattgtgcaggtaatgcttctgtgggtagccgctttctggttcattggttcatggatgatcccattcatggctcatatatcaggtttccacaaagaatccctaacatttaaaggccaagctttgttcagtctgataaccgatgtaacagaaggcctagccgggattgctatcctccaccgttgcctctccatgttccgtccacttgcaagtgattgggtccgctttacccttaaaaggatactggcaactagat

SEQ ID NO: 151682 - DNA, 412 bp, Arabidopsis thaliana columbia
acaaccgctaatgttaaggtgcctattgctttagttggtgaaaatgggaactttgcttcatggctatacattgcagctgtgaaaatgaattccttggaaaagattgagacggatctttctgagatgattgaggcaatgaagacagctcctatttttgctcagtttacaaaggatccctctgttcctagagggacaagattggctgctattagggatgcttgtgatcaagcaaagtttgccgaacccactaagaacttcctctctttgttagctgagaatggaaagctgaagaacctagatgccattgtgaagaaatttatgcagctgacaaacgcacataggggagatgtcaaagttttggttaccacagtcattccgctttcccctgctgaggagaaagaactggctgaga

SEQ ID NO: 151683 - DNA, 453 bp, Arabidopsis thaliana columbia
ggatgatctaaagatgatcgcgggttgtatgatatcatctggctacagcaaagaatgctttaaaaggtacaaaagaatccgtaaatcgatcattaacgaagcgttaaaccaactcggattcgagaatttaacgttttcgcagattcagaaacttgaatgggaagttatggagaagaagatacgtaaatggttaagaacaacaacaagagcagtgaatactctgttttccggtgaacaaatcctctccgatcatgtcttctcttcatcatcatcaacaattcgtgaatctgcatttgcagaaatcacatcacaaaccgctttagctttgttcactttcccggaaaaaatggcgaaatgtcgaaaatctccggagaagatcttcctcactctcgatgtttatcaaacgatcgttgatctattacctaagatcaacgaactctttagctttgattc

SEQ ID NO: 151684 - DNA, 369 bp, Arabidopsis thaliana columbia
gggaaaatgggtagcaagatgttgtttagtttgacaagtcctcgacttttctccgccgtttctcgcaaaccttcctcttctttctgtgcttctcctccgtcgccgtcttcgaggactcaatggactcagctcagccctggaaaatcgatttctttgagaagaagagtcttcttgttgcctgctaaagccacaacagagcaatcaggtccagtaggaggagacaacgtcgatagcaatgctttgccctattgtagcatcaacaaggctgagaagaaaacaattggcgaaacggaacaagagtttctccaagcgttgcaatctttctattatgatggcaaagcgatcatgtctaatgaagagtttgataac

SEQ ID NO: 151685 - DNA, 465 bp, Arabidopsis thaliana columbia
gttgaccgcgacgaatccgtcggaaaccggaatcaccatggattttcctccgacgaagcttgagtatcatgtagacatgttcaatcttcagtctcattccagatttctctccttatttaaggcgcaagatggacgcatagctctaatactagaatcaacggtgtttcatccacaaggtggtggccagccgtcagacaccggtttaattgttttctccggttcggatttgaaattttccgttcaagatgttcgatcgaaagacggaattgttctccattacggagttttcgaaggttcgaatcctgaaagtggaattgatagtgagaaagggaaagaagtttacttaactgttgatgaatcaaggcgtaaactcaattccaggttgcactcagctggacacttgctagatatgtgtatgcagaaagttgggttaggacatttggagcctggaaaagggtaccattt

SEQ ID NO: 151686 - DNA, 461 bp, Arabidopsis thaliana columbia
cttgaagacggcttcttcttctcacaaacctcatctctgctaatcaaaaagtctctggttgcagatgaggagtttcaacacattcttcgtgtgttgaatactaatgttgatggtaagcagaagattatgtttgcccttacctctatcaaaggtattggtaggcgattggctaacattgtctgcaagaaggctgatgtcgacatgaacaaaagggctggtgagttatctgctgctgagattgataacctcatgacaatcgttgcaaacccacgtcagttcaagatcccagactggttcttgaacaggcagaaggattacaaagatggcaagtattctcaagttgtctccaatgctcttgacatgaagctgagagatgatcttgaacgtctcaagaagatcagaaaccaccgtggtttgaggcattactggggtctccgtgtcagaggacaacacaccaagac

SEQ ID NO: 151687 - DNA, 454 bp, Arabidopsis thaliana columbia
ggaaaactaccaatgacatggtatccacaagattacgtggccaaagtgccaatgacggtaatgggcatgagagcatccggtaattatccaggaaggacatacagattctacaaaggtccagtagtatttccatttgggttcggtttaagttacactaccttcactcatagtttggccaaaagcccattggcccaactatcagtttcactctccaatctcaactctgccaataccattctcaactcttcatcacactccatcaaagtgtctcacaccaactgcaattcatttccgaaaatgccccttcacgtcgaagtatcaaacacaggtgaattcgatggaacacacacggtgtttgtatttgctgagccgccgataaacggaataaaaagattgggtgtgaacaaacaattgatagcgttcgagaaggttcatgtcatggcaggggcaaaac

SEQ ID NO: 151688 - DNA, 358 bp, Arabidopsis thaliana columbia
aaaagagataacacacacaaaaaaaaatggcatcaacctcactcctcaaggcttctccggtgtgggacaaatccgaatgggtcaagggacaaagcgttctcttccgtcagccttcttccgcttctgtcgtcctccgcaaccgtgccacctccctcaccgtccgtgccgcttcctcctacgccgatgagcttgttaagacagcgaaaactattgcgtctcccggacgtggaatcttggcgatggacgagtcaaacgcgacttgcgggaaacgtttggattcgatagggctagagaacactgaggcaaatcgtcaagctttccggactttgctggtctctgcaccgggactcggacagta

SEQ ID NO: 151689 - DNA, 410 bp, Arabidopsis thaliana columbia
aacaacaacaatctccaccgtctccaatctgtttccttcgccgttaaagctccgtcgaaagcgttgacagttgtttccgcggcgaagaaggctgttgcagtgcttaaaggtacttctgatgtcgaaggagttgttactttgacccaagatgactcaagtcctacaactgtgaatgttcgtatcactggtctcactccagggcctcatggatttcatctccatgagtttggtgatacaactaatggatgtatctcaacaggaccacattttaaccctaacaacatgacacacggagctccagaagatgagtgccgtcatgcgggtgacctgggaaacataaatgccaatgccgatggcgtggcagaaacaacaatagtggacaatcagattcctctgactggtcctaattc

SEQ ID NO: 151690 - DNA, 421 bp, Arabidopsis thaliana columbia
  unsure (1)..(421): unsure at all n locations
ctccgatctcagatccattcaacaatctacaaagatgatggaaccagtctcttcatggggtaacacctctctcgtctncgtagatccagagatccacgacctaatcgagaaggagaaacgtcggcaatgtcgaggaatcgaacttatcgctttcgagaatttcacttccttcgccgtcatcgaagctctcggaagtgccttaaccaacaaatactccgaaggtattcctggtaatcgttattacggaggtaacgaattcatcgatgagatcgaggatctttgccgttcaagagctctcgaagctttccattgtgatccagcagcgtggggcgttaatgttcagccgtattctggatctccggcaaatttcggtgcttacacggctttgcttcagcctcacgatcgtatcatggggcttgat

SEQ ID NO: 151691 - DNA, 389 bp, Arabidopsis thaliana columbia
ctgagatttgttgacagtctctaaccatgggtaaagagaagtttcacatcaacattgtggtcattggccacgtcgattctggaaagtcgaccaccactgggcacttgatctacaagttgggtggtattgacaagcgtgtcattgagaggttcgagaaggaggctgctgagatgaacaagaggtccttcaagtacgcatgggttttggacaaacttaaagctgagcgtgagcgtggtatcaccattgacattgctctctggaagttcgagaccaccaagtactactgcactgtcattgatgctcctggccatcgtgatttcatcaagaacatgatcactggtacctcccaagctgattgtgctgtccttatcattgactccaccactggt

SEQ ID NO: 151692 - DNA, 394 bp, Arabidopsis thaliana columbia
gtctcttctctgctctgctttgctctagatcacaaattaaaagacttcattagtcttcctgtctccaccattaccttcttcctttttaactcagccacgacgagcagactattgttctgttttccttgtataaaaatggcgtcgatgatgtttaccgattgctcctccaccacgacgtcgcgtctcatccatttgaaccgaagcagcggtactttcctcctccgtcaatgcgtcggccaactccgtttacagaccactgcttctggccgtggctgctgcattcgctcctcttcttctcccatttcttccatttccgctgatacaaaatcaagaggtggcgcaattgtaatagatggaaaggctgtggccaaaaagattagagatgaaatcacaa

SEQ ID NO: 151693 - DNA, 426 bp, Arabidopsis thaliana columbia
tcttcgatcagaccagattcaatcgcttctcacttcaaacgcacttcgcttccttcgcatcccatagtcttcttcttcccccgacgctgctcagactcctctaaccaccgctccttatggctcctggaaatctccaatcaccgccgacatcgtttccggagcttcaaagcgtcttggcggcaccgccgtcgattctcatggccgtctcgtcttgctcgagtctcgccctaacgaatccgggagaggagttttggtgctacaaggagaaacatcaattgatattactccaaaagacttcgctgtgagaactttaacacaagaatacggtggtggtgctttccagatttcatcaaatgatacacttgtgttctctaattacaaggatcagcgattgtacaagcaagacattactggtaaagattcatc

SEQ ID NO: 151694 - DNA, 476 bp, Arabidopsis thaliana columbia
tccaggtcgaccacgcgtccgatggcattgaaatccgcattgctagaatcttcaacacatatggtcctcgaatgaacatcgatgatgggcgtgttgtgagcaacttcattgctcaagcactccggggtgaggcattgacagttcagaaaccggggacacagacccgcagtttctgttatgtctccgacatggtggatggacttatccgtcttatggaaggcaatgatactggccctatcaacatcggtaacccaggtgagttcacaatggtggaactggctgagacggttaaagagcttattaacccaagcatagagataaagatggtggagaacacaccagatgatccaagacagaggaaaccagacattagtaaagccaaaagagtgttgggttgggagccaaaggtgaagctcagagaaggacttcctctcatggaagaaagattccgactaaagcttaacgtcccaagaaac

SEQ ID NO: 151695 - DNA, 440 bp, Arabidopsis thaliana columbia
gtcgtcaaaagctttggaatttgatactttagatttttcgagaatcttgaaaatcagtcatgggttctggaaaagagcgtgacactttcgtctacctcgctaagctctctgagcaagctgagcgttatgaagaaatggtggaatcaatgaaaagtgttgcgaaattgaatgttgatctgacggtggaagagaggaacttactctctgtgggttacaagaacgtgattggttcaaggagagcttcgtggaggatcttctcgtcgattgaacaaaaggaagcagtgaaagggaatgatgttaatgtaaagaggatcaaagagtatatggagaaggttgagttagagctttctaacatatgcattgatattatgtctgtcttagatgagcatctcattccttcggcttccgagggtgaatctactggcttcttcaacaagatg

SEQ ID NO: 151696 - DNA, 441 bp, Arabidopsis thaliana columbia
ctccgatcatcggaaaaagcagtaatcaagatgcagaagctcaacgacatcttctccggtggaggagacggcgacggaacaaccgatagtttccttgaagatggatcggagggtctctgtgctctctccaccacccagagaatgtacggattcgccgcgtctttagccactggtctgctacttatgttcctgtctatgattgtatttgggatccccatcaaatttgcactgctcttcacatttggaaatgttctagctattggaaggtatgttgtcgcctgaagattgcggcgagaagaacttgttgttcgactaacatttcgagatttcattcatggcgattcagttatttacatccatagaattgaatggttctctttttatcttatctttcatggactctcaattaagattagtcattttgatttctgatgctaactg

SEQ ID NO: 151697 - DNA, 404 bp, Arabidopsis thaliana columbia
acagtaatctgaccataggagattatgaagagtagataaaaacgacaagacagaaagaaacacagtctgcaggagagaaagagatatggctcgtccggataaacgcgatggcggtgacgtttgtggcgcacgcgctggcggtaatagcggcgattatggtactggcttggagtatcagttacagaggtggattggcctgcgaagctactaacaagaatctcatcttcaatctgcatcctgttctgatgctcatcggatttataatcttgggaggagaagccatcataagttacaaatcgctttcgctggagaaaccagtgaagaaagtgatccaccttatactccatgccattgctctggctcttgggatatttggcatctgtgcagcctttaagaaccacaat

SEQ ID NO: 151698 - DNA, 411 bp, Arabidopsis thaliana columbia
cgacgactgctctctctctgaaccggagacggtgtcacgggacgaatctaatcgccgggaaaccgttttttttttctctcggaaaatcgatttgaatctccggcgatctgatcgggatgagtaacatcgatctgattgggatgagtaaccgcgatctgatcgggatgagtaacagcgagcttctcaccgtcgagcctctcgatcttcaattcccttttgaattgaagaagcagatctcttgctctctctatttgacgaacaagaccgacaataatgttgcctttaaggttaagacgacgaatccgaaaaagtattgtgttaggcctaatactggagttgttctcccgaggtctacttgcgaagttcttgtgaccatgcaagctcaaaaggaagctccttccgatatgcagt

SEQ ID NO: 151699 - DNA, 285 bp, Arabidopsis thaliana columbia
aacagaaagtaacatgagatctctcttattagccgtgtgcctggttcttgctttgcgctggggtgaagcagccgtgtcttgcaacacggtgattgcggatctttacccttgcttatcctacgtgactcagggcggaccggtcccaaccctctgctgcaacggtctcacaacactcaagagtcaggctcaaacttctgtggaccgtcagggggtctgtcgttgcatcaaatctgctattggaggactcactctttcttctagaaccattcaaaatgctttggaatt

SEQ ID NO: 151700 - DNA, 422 bp, Arabidopsis thaliana columbia
  unsure (1)..(422): unsure at all n locations
aggtgagagagatgggaggttgcgtgtcaacgcctaagagctgtgtaggaggtaagataaggtcaagcaaaaggagagagactcggacaagacgaaagattcagaagaagagagttgtttcttcttctcgcttatctgacggatctttcgataataatcccactttcagagcaagtgttgatgaagcatggtttgattccaatctcgcctttgaaaccgattgtgatgatgactttcatagtgttcaggaagatacgttgtcagtgaacggatgtgagcgtatctcagtatcgagtatgtcatctgttaaagactctaaccttggtggttccgctcggaattctctaagcgatgtcatctcacaatcaaaatcagagagtgctttgattgacactaagcangctgtttttattgacgagata

SEQ ID NO: 151701 - DNA, 411 bp, Arabidopsis thaliana columbia
gccaattcttgatgttgagtttatcgcgggtgggaagcagtttatctcgtggagtgatgtttctggcagaaatataagtgagaatgctgttatagtttgggatatttcgagagaggttcctttatctaatcaggtctatgtagaagcatacacatgcccttgcatcaaacgtcacccgcaagacccagtcttcatcgcgcaatcacacgggaactacacagcaatcttctcaacaaacccacctttcaaactcaacaaatacaagagattcgaaggtcactgggttgcaggtttcccaatcaaatgcaacttcagcccggatggagaaaccttagcctctggctcatctgacggttctgtatacatgtacgactacaaatccactgcgctcattaagaagctcaaagctta

SEQ ID NO: 151702 - DNA, 397 bp, Arabidopsis thaliana columbia
  unsure (1)..(397): unsure at all n locations
accacctccacaactccaaggaacggaccgggagatacaggactcaactgggtaaggtatgagttgctatggagggatttcttcaggtttataaccaagaaatacagctcagcgaagacgcacgtcgaggctggtccggctacagcctgtaccggtgcctttgcttaaacatttgaaaactctcaggtgaccggaaaagttagaagcgacctgtttctttgccctactctggtgtatggtggattaatttgctatccggacaggactttactgctctcttttgaaacttgagtgtcaggagaataaaatctaagcttctttttttggctcaatcaagttgtccgttccctgttctaaacatttcngatactcattccataaaaagtctttacaattt

SEQ ID NO: 151703 - DNA, 371 bp, Arabidopsis thaliana columbia
gagtttatagacttgttcattgctaagcaatttttgttccaaaggcagtggcagagagggtggtgagtatgcacggcggcaaggagttgatataatgggagatatgcccatttatgtaggatatcacagtgcagacgtttgggcaaataagaaacatttcttactgaacaagaaaggctttcctcttcttgttagcggtgttcctcctgacttgttcagtgaaactggtcaactgtggggcagccctctttatgactggaaagcaatggagagtgaccaatattcttggtgggttaatcgaataagacgcgcacaggacttgtatgacgaatgcaggattgatcactttaaaagatttgcaaggtttttgg

SEQ ID NO: 151704 - DNA, 421 bp, Arabidopsis thaliana columbia
gaagaacataagcatgatgaatctgtgatcgctcctgagccagctgttgaggttgtggagagagaatcgttgatggataagatatcggagaagatccatcacggtggtgattcttcttcgtcttcttcatcttctgatgatgaagacgagaagaagaagactaagaagccctcttctccttcgtcttctatgaaatcgaaagtttaccgcttgttcggacgagagcagcctgttcataaggttctcggcggtggaaagccggctgatatattcatgtggaagaacaagaagatgtctggtggtgtacttggtggtgctacagctgcttgggttgtgtttgaattgatggagtaccatcttctcactctgctttgccacgtgatgattgttgttctcgctgtgcttgttttgtggtctaatg

SEQ ID NO: 151705 - DNA, 402 bp, Arabidopsis thaliana columbia
aaccaccacatcctttcctgaaaccctaaccacaacaatcgccgccgtctctagaagtatcgcgatccacctacttcgggtttgtttatcaaattttgatgaaaccagatcgggtcttcctctagatccgttctaggttttctatttccaccgtcttatcattatcatcatcatcaattcatcatcatcatcaataatccagatgctcaccaaattcgtcattcatagacatgtctctgtttctgaaagacgattcgattcaaattcgcgaagtctggaacgataaccttcaagaagaaatggatctgatccgagatgtcgtcgacgactttccttacgtcgccatggacactgagttccccggcatcgtcgtccgacctgtcggaactttcaaatcaacgc

SEQ ID NO: 151706 - DNA, 391 bp, Arabidopsis thaliana columbia
cacgcgtccgggtcattgactacgtgtacaaagttttcgggtttacctatgagctaaaacgtttcagcgaggccagagaagtacctgggagatttggaaacatgggataaagctgaagcggatctcaaagaagctatagaagcttttggaaagccattagtgttgaacgaaggagatggtgcattttatggtccaaagatagacatcacagtttctgatgcaatgaataggaaattccagtgtgctactttacagcttgattttcaacttccgattcgcttcaacttggaatacgcagctgaggatgaagcgaaaaagagtagacctgtaatgatacatagagccgtgttgggatctgtggaacgtatgtttgccatattgttggagcatt

SEQ ID NO: 151707 - DNA, 415 bp, Arabidopsis thaliana columbia
aagaagcagagcaacaacaaagtcagaggctttagagttcttgctctccagatctgagaacagtactgtcaatagagttgagactcttctcaatttagacaccaaaccttactctgacaggatcattgctgaatacatttggatcggaggatctggaattgaccttagaagcaagtcaaggactatcgaaaagccggtggaggatccttctgagctacctaagtggaactatgatggttcgagtaccggtcaagcacctggtgaagatagtgaagtgattctatacccgcaagctatcttcagagatcctttccgtggaggcaataacatcttggttatctgtgatacttggacaccagctggtgagccaattccaacaaacaaacgtgctaaagctgctgagatcttcagtaac

SEQ ID NO: 151708 - DNA, 381 bp, Arabidopsis thaliana columbia
  unsure (1)..(381): unsure at all n locations
tagagatggagaactcagtgacccaagatggtatcgcgacagtattagccaatcagtccggggattcctcctctggtagacccgaaattgttgttcaagtcgtggatcttaagcctgctggaaatcgatatacgtttagtgccaatgatggaaagatgaagattaaagcaatgttaccagcgactttgacttctgatatcatctctggaaagattcagaatctgggtcttattcgtctccttgagtataccgtcaatgatattccaggcaaatcagaagaaaaatatatgcttataacaaaatgtgaggctgttgcttctgcacttgactcagagattaaggcggagattaaagcttccacaggcataatgtngaaaccca

SEQ ID NO: 151709 - DNA, 420 bp, Arabidopsis thaliana columbia
cagcttttagatgtgattgtggatcattttctcaaagacttttcgcgaagagtctgtgatccttaaatcgcttctcgctcgcttgacctcatttcgtcgtcgaaatcagatccttgtgaaaatgccgaaacaggatatggagaagatggagcttcgtaagaacttccgtaatgtttggcataccgatcttacccacagtatccagaacgatactccttattgttgcttcgcgttgtggtgtgccccttgtgcatcatacttgcttcgcaagcgtgcgctttacgatgatatgtcaaggtacgtctgctgtgccggttacatgccttgtagtggtaggtgtggagaagccaaatgtcctcaactttgtcttgccactgaggtcttctgctgcttgcaaactctgtggcctcaactcgcttt

SEQ ID NO: 151710 - DNA, 410 bp, Arabidopsis thaliana columbia
cggacgcgtgggctgcaagggtatctttagaactgacaagatcaaggacgaagacattgtcacacttgttgatcaggtccctggtcaatctatcgatttcttcggtgctttgagggcgagagtgtacgatgatgaagtgaggaagttcgttgagagccttggagttgagaagatcggaaagaggctggttaactcaagggaaggacctcccgtgttcgagcaacccgagatgacttatgagaagcttatggaatacggaaacatgcttgtgatggaacaagagaatgtcaagagagtccaacttgccgagacctacctcagccaggctgctttgggagacgcaaacgctgacgccatcggtcgcggaactttctacggtaaaacagaggaaaaggagcccagcaagtaaa

SEQ ID NO: 151711 - DNA, 410 bp, Arabidopsis thaliana columbia
atcgtttcgtctcttctctgatccatttttgaagatgtcgaagagaaaaacgtaaggggccaattgttgagactgtgactcttggaccttctgttcgtgaaggagagcaagtttttggtgttgttcacatctttgcatctttcaatgacactttcattcatgtgactgatctctccggtagagaaactctcgtccgcatcaccggtggcatgaaggtgaaggctgaccgtgatgagtcctctccttatgctgctatgcttgcagctcaagatgttgctcaaagatgcaaggagcttggcatcactgccatgcacgtgaagctccgtgctactggaggaaacaaaaccaagacttcaggtcctggtgctcagtctgcttctagagcccttgctcgttctggcatgaagatt

SEQ ID NO: 151712 - DNA, 241 bp, Arabidopsis thaliana columbia
ggagggaagaaaaaagttaggttcgaaactattgtaaactagttaggtgaaaagcgaaacagcactcttcatatctattgccgcgttctcttgccattacactaaatcttacttacttcttatctcctaataaattcttatctaatgtaccttcttaaacattcatttattattatattttccttttatttttttatttttattcttttaaatttttttattacattaataatattttatt

SEQ ID NO: 151713 - DNA, 428 bp, Arabidopsis thaliana columbia
ctgaatcttaatttcccccaaatcaaagcttttgacctaaatccgtttcccggggagaatagatcaacaaaccatcgccggaatcttcaatatctctccggtgaagaaaaaatgtcgcacaacgatacgattccgctttatcaatcatctcaatcagacattgacgagattgagaatatgatgaacgacagttttcaatcaggtcccggaaccgtgcttcctgctcgaccaccgagtccgatccgtccgtcgattcccgtttcatcctcaccgttcgttcaatccaatctcccaccgcttccaccgtcgtcttcctcctccactcagaaggtgatgcctgttccagctccttcaccactttcgtcagcaggtaacgaaggtaacaagagtattggaggtagcggattccgatcttcgccaatacattg

SEQ ID NO: 151714 - DNA, 400 bp, Arabidopsis thaliana columbia
aaaaaaagtaagaacgagagagagaaagccatgtctgcgaaaacaatcctatcatcggtaggtttggtggttctcgtcgccggatcagcagcggctaatatcggattcgatgagtcaaacccgatccgaatggtctccgatggtctccgggaggtagaagaatctgtttcccagatcttaggtcaatctcgtcacgttctctctttcgctcgcttcactcaccgatatggtaaaaagtatcagaacgtggaggagatgaagcttcgattctcgattttcaaggagaatcttgatttgatcagatccaccaacaagaaaggcttatcttacaaactcggtgttaatcaatttgctgatttgacatggcaagagtttcaaaggaccaagcttggtgctgctc

SEQ ID NO: 151715 - DNA, 423 bp, Arabidopsis thaliana columbia
agaattacaaacaaaaatggttttgcattagcttcctctcattgggctgcttttggtgctggccatcgtcgcctctccagcaaatgcagatggacctgtttgcccgccgtcgaacaaactaagccgggcaagtttccctgaaggttttttatttggcacggctactgcggcataccaggtcgaaggtgcgattaatgaaacttgtcgtggaccagccttatgggacatctactgtagaagatatccagagaggtgcaataacgataacggcgatgtggccgttgatttcttccatcgttataaggaagatatccaactaatgaagaatctaaacacagacgcctttagaatgtctatcgcatggccaagaatattttctcatgggagaaaggagaaaggagtgagtcaagctggtgtgcaatt

SEQ ID NO: 151716 - DNA, 405 bp, Arabidopsis thaliana columbia
  unsure (1)..(405): unsure at all n locations
aaaaaaccccaaaaactttacattcttaacaatttcaaccctatgggcttagttgagcatctctgggatgatactgtcgctggtccacggccagagaacggccttggcaagcttcgtaaacaccataccttcagtttccgacctagctccggcaatgatcaatcggaagctggaagtgcgagatcgtacggtgaggattcgctaccggaagaagcagtgaaagttacacgtagtatcatgataattaaaccaccgggttaccaaggcagttcagctccagcttcgcctgccggttcaactccgccgctatcacctttctctccgccgctgtctccgttctctgcaaacgcagggggaaaggaaccctttcgggttaggagacggtcgacgtcngatgcgttcgag

SEQ ID NO: 151717 - DNA, 394 bp, Arabidopsis thaliana columbia
cccacgcgtccgacagagctttcaaatatatccctctcctgcgagagcagagaaagagagagagactagtgagtgagagagtccatcgctttctttctttctctctctcgctctctcttcatctccaacagagacttctttctagagaaagagatcttcacaaatatgactgtgatgaatcaccgacacaagcaatgtcattttctcctcctccttctgatcactgtcttctctgccgcgttggatggtgtttcttccgagacagacgtcggagggtttgactacggtgaagcattgtctaaaagcttactctactttgaagctcagagatcaggaagacttccgtacaaccagcgcgtgacttggcgtgatcactctggtctcaccgatggtc

SEQ ID NO: 151718 - DNA, 401 bp, Arabidopsis thaliana columbia
  unsure (1)..(401): unsure at all n locations
tctgaacccatctgttcttgataagattgagctaagaccgacttcaatcgaaaaggagactttccctaagattgcagcagcgcaagggctctatgctatggtgctaccagggttttggatggacattgggcaaccccgtgactacataacgggtttgagactctacttagactccnttnngaagaaatctcctgccaaattaaccagtgggccacacatagttgggaatgttcttgttgacgaaaccgctacaattggggaaggatgtttgattggaccagacgttgccattggtccaggctgcattgttgagtcaggagtcagactctcccgatgcacggtcatgcgtggagtcccnnncaagaagcatgcgtgtatctcgagcagtatcatcgggtggc

SEQ ID NO: 151719 - DNA, 423 bp, Arabidopsis thaliana columbia
aacactttccgtggtttagtgttgaggacgatcactgtttgtaattcgatggcgaggaagaagatcagagaatatgactccaagagacttctcaaggagcatttgaagcgtcttgctaatattgacctgcagattcgctctgctcaggtgacagaatctacggatttcactgagttaaccaaccaggagtcatggctatcgtccacaaagctagttgtgaaaccggatatgctatttgggaaacgcgggaaaagtggtttggtagctctaaagctggatcttgctgaagttgcagactttgtcaaagcccgcctcggcactgaagtcgagatggagggatgtaaagcacctatcactacattcattgtggagccttttgtgcctcatgatcaagaatactacctctctatagtatctgataga

SEQ ID NO: 151720 - DNA, 412 bp, Arabidopsis thaliana columbia
aaagaagctgaattgattcaccaaatacacataataaagtttcaatctgtgtcttggtttagggtttgggagatttttaatcggagatctcgaaaagatgatagatttcagtcgaatccagaaagagcttcaggactgcgagagaaaccaggattcttcgggtatccgggtctgccccaaatccgataacctcacccgactcaccggaaccattcctggtccaatcggtactccttacgaaggcggtacatttcagatcgatatcactatgccagatgggtatccatttgagcctccaaagatgcagttttcaactaaagtttggcatccgaatattagtagccaaagcggtgcaatatgcttggatatcttgaaagaccagtggagtccagctcttactctgaagacagct

SEQ ID NO: 151721 - DNA, 421 bp, Arabidopsis thaliana columbia
  unsure (1)..(421): unsure at all n locations
atttggagtatcggcgaagtcaatgcaatgctcttacgacgacagaggaaatagtgtgccaacaatccttctcaggatgcaaaaacgtctatacactgaaggaggtcttaaagcagaaggaattttccgaataaatccagacaacggcaaagaagagcatgtccgtagacagttgaactgtggtgtggtaccacgtggaattgatgttcattgcttggcgggtttaataaaggcgtggttcagggagctacctacaggagtgcttgatgtgttgacaccagagcaagtaatgaggtgtaacacggaggaggattgtagccggctagtgatacttcttcctccggttgaatctgcgattcttgattgggccatcggtctaatggcggatgtggtggagcatgaacagtttaacanaatgaat

SEQ ID NO: 151722 - DNA, 423 bp, Arabidopsis thaliana columbia
agaacaatggcttcctctatgctctcttccgctactatggttgcctctccggctcgggccactatggtcgctcctgtgcaacggacttaagtcctccgctgccttcccagccacccgcaaggctaacaacgacattacttccatcacaagcaacggcggaagagttaactgcatgcaggtgtggcctccgattggaaagaagaagtttgagactctctcttaccttcctgaccttaccgattccgaattggctaaggaagttgactaccttatccgcaacaagtggattccttgtgttgaattcgagttggagcacggatttgtgtaccgtgagcacggtaactcacccggatactatgatggacggtactggacaatgtggaagcttcccttgttcggttgcaccgactccgctcaagtgtt

SEQ ID NO: 151723 - DNA, 426 bp, Arabidopsis thaliana columbia
taggctcggtatcgcggttgatgtcgcgcaaggacttgagtatttgcatactggttgcaggccgccgatcattcatagaaacgtcaagtgtacaaatgtattcttagatgaaagtttcaatgcgaagttaggcggttttggcctttcgagagcgtttgatgcagccgagggaagtcatttgaatacagctattgctgggactcctggatatgttgaccccgagtattacacatcaaacatgttaacagagaagagtgatgtgtacagtttcggtgtagttctattagagatcgttactgcgaaacccgctatcataaagaatgaggaaaggatgcatataagtcaatgggttgagtctttgctttcaagagaaaatattgtagagattcttgacccgagtctttgcggagactatgacccaaactc

SEQ ID NO: 151724 - DNA, 313 bp, Arabidopsis thaliana columbia
gttatctttttattttctctatctatctggatattattttttcacttggggattgggaggagacctctcctctctctatctatagccatggctgctttcacttgtacctctcgtcctccgatttctctccgctccgagaccagaatcgtatcctcatcaccatcggcttcttctctctcttctcggcggatgttcgccgtcttaccggaatcatcaggtttgagaatccgtctttctctctctccggcttcgttgacctcgattcatcaacctagggtttctcgattacgaagagccgtcgtctgtgaagctc

SEQ ID NO: 151725 - DNA, 421 bp, Arabidopsis thaliana columbia
gaaagaaagaacaaaaaaaaaacatccgagtgaaaatgagagaaattcttcatatggaaggaggtcagtgcggaaaccagatcggagctaagttctgggaagttatttgcggcgagcacggtattgatcaaaccggtcagtcatgtggcgatacagatctacagcttgaaaggatcaatgtctattttaacgaagctagcggaggcaaatacgttcctcgtgctgttcttatggatctggagcctggaactatggattctctcagatctgggccgtttggtcagattttccggcctgataacttcgtttttggtcagtctggtgctgggaataactgggcgaaaggtcattacacggagggagctgagttgattgattcttgtgcttgatgttgtgaggaaggaagctgaaaactgtgatt

SEQ ID NO: 151726 - DNA, 421 bp, Arabidopsis thaliana columbia
cccacgtctgtcttatccacaataaaaccgaccttagcttagcttagactcattaggcatgtgacaaaaacagagagagaaatagagagacatactttacaggcaaacgatcgttcaccagctcagtttgttaggctggataaaccgagagccgtagacgatctctatataggcaagagagaaaagatgcgtaggtggttgtgctgtgcttgccacgttgaagaaccttaccattcttctgaaaatgaacacctcagaagccctaagcaccacaatgattttgggcatcacactagaaaaccacaggcggctgtgaagcctgatgctttgaaagagcctccatctattgatgtgcctgcattgtcattggatgagttgaaagaaaagaccgataactttggatcaaagtcattgattggtg

SEQ ID NO: 151727 - DNA, 403 bp, Arabidopsis thaliana columbia
cccacgcgtccgagaagaatcatgggacaaggaccatcgggaggattgaatcgggggggagatcggaaacctgatggtggagataagaaagagaagaagtttgagccggcggcaccaccggctcgtgtagggaggaagcaaaggaagcagaaagggccagaggcggcggcgagacttccgacggtgactccgtctactaagtgtaagctccggttactgaaattggaacggatcaaggattatttgttgatggaggaagagtttgtggcgaatcaagagaggttgaaacctcaggaagagaaagctgaggaagatagatctaaggttgatgatctttcgggtacacctatgagtgttgtgaatttggaagagttgattgatgagaatcacgctattgtttttt

SEQ ID NO: 151728 - DNA, 351 bp, Arabidopsis thaliana columbia
caacatctcaagaagcagcctcaaaagacacagatctgacgaaagaagccgaatcggagaagaaaccaggaggaatctctctccgaatctggccaccgactcagaaaactcgcgacgccgttctgaatcgcctgatcgagaccttatccaccgaatcaatcctctctaagagatacggtactcttaaatctgacgatgcaaccaccgtcgcgaaacttatcgaagaagaggcttatggtgttgcttcgaatgctgtgtcgagtgatgatgatgggattaagattcttgagctttattctaaagagattagtaagaggatgcttgaatctggtaaagctagatctaatgcta

SEQ ID NO: 151729 - DNA, 302 bp, Arabidopsis thaliana columbia
cttccaacagagggccacattcatgctagcattgccaggtttcgtttaggtcaaggttctttccgttccacggcggttccttgtaccctaccaagacacgcaacctttttaaaacccgccgggaactccgatgaaaaaaaccctttctcttacactatttatctccaaccattacccatatatccaccgccgcaaaagatttcccaaccgtattcttcttcaccgcagccgtaatcgacgtcgacgatccatctctagataatccagatctcggtcctttccttctaaaattagctcgtgac

SEQ ID NO: 151730 - DNA, 348 bp, Arabidopsis thaliana columbia
atgagaatgtaaaacaggcaacggcatttgggatgaagagtgtggtgtatgtacctgggattaagccagagacagtatctgcgttgtctgcactatgtgacaaggccaccatggtgagcacaggggatgtcttgtagcaccaactctatccataggatctatacttcttcaacaggctgtgatcatggccttcttccactacaacaatgtaaagctagtggagtcaaggcctaatgcagcggatcttccttctgctgaagctatccaaattgcaaacaacatatcaaatgttggtcagatctacaacagagaggataggtcaactgatgtttaggcaagaggtcaagt

SEQ ID NO: 151731 - DNA, 417 bp, Arabidopsis thaliana columbia
acaaacctaactctttctctatacaagagcgcaagctcgaaggcgctcttgttctggcttcattttctccttaacaatcaccctcatagtaactttaaaactctctgtttctagtaattcacacacaaaatggctattaaactagcaattctatttaccacatttgttctttttagcctcgccgacgctagaatccccggtatttactccggcggcgcatggcaaaacgcacacgccactttttacggtggcagcgacgcctccggcacaatgggaggagcttgtggttacggtaacctatacagccaagggtacgggaccaacacggctgctttgagtacggcgctgtttaacaatggtatgagttgtggagcctgctttgagctaaaatgcgccaacgaccctcaatggtgtcac

SEQ ID NO: 151732 - DNA, 415 bp, Arabidopsis thaliana columbia
agcctttcaaaaacctcactctctcaactctcaaaccttatctccttccttctctggtcctgtcctctccgtcgagcttactatctccacaaaatggcgtcgacggtaggagttccatcactataccaagttcctcaccttgaaatctccaaacccaattccaaaaagaggtctaattggttatctttatctctcgataagcctttcttcactcccttatctcttgttcgtagaactcgtcgtatccattcctcttctcttcttgttccttctgctgttgctactcctaattctgttctcagtgaagaagctttcaaaagtcttggtctttctgaccatgacgaatatgaccttgacggcgacaacaacaacgttgaagctgatgatggtgaagaactcgctatctctaaactta

SEQ ID NO: 151733 - DNA, 424 bp, Arabidopsis thaliana columbia
ctctggcagaacagaaaacgatgactaacttctcccgatccaaatccaccggaactatcgggttcccggagtttaaacccactcgacccggtccagacaaatacgagaacatccacaacgatgacgacgagtacgaagaaggacatagcactacgagtacagactactacgacgcttcaacgccgttgagctcacacgcgtcaagatccgggaacgggtccggctcgggtcagttaacggtcgtagaccttcttgcggcggttctgaggaagtcgttggtgatgtcgtgtgcgatggagagaggggaagatgacgtggtggcgtctatggatataggttggccgacggaggttaagcacgtgagtcacgtgacttttgatcggttcaatggtttttttggtcttccttctgagctcgaaccgga

SEQ ID NO: 151734 - DNA, 416 bp, Arabidopsis thaliana columbia
ctcatcctctcactctctctctcctttggattcttcagtgaggagaggaaatgtcggatcttcagacaccgcttgtgaggcccaagaggaagaagacttgggttgattactttgtcaagttcagatggatcattgtcatcttcatcgtccttccattctcagccacattctacttcctcatctacctcggggacatgtggtcagagtccaagtcctttgagaaacgtcagaaggaacacgacgagaatgtcaagaaagtcatcaaaaggcttaagggtagggatgcttccaaggacgggcttgtctgcactgctcgtaagccctggatcgctgttggaatgaggaacgttgactacaagagagcccggcatttcgaggttgactttggggagttccgtaacatccttgagatcaac

SEQ ID NO: 151735 - DNA, 322 bp, Arabidopsis thaliana columbia
tatttgggggtgacgaaaagagcccgcctttgttttctaatttttggtaccagaatttttgaaaatccccaaatttttttggttctcttcttcataatcgttgaattagggttttacaatttcgagtttccccaaatctgaaatttgagttttttttttttcttgacttttcacgttttgattcgcctgttgtttgggtttgaaatggcgactgaaaccctagatgagaagacaccgtaagtgaattctccggcgaaggatgaaattgatgttgttccgaatgaggagaaggaggtagagaaataaaaagttgattccccta

SEQ ID NO: 151736 - DNA, 342 bp, Arabidopsis thaliana columbia
  unsure (1)..(342): unsure at all n locations
agatcaacttcttcttcttaccaaaactgtcggcgtcgtctcctctaagcggctggcatggaagcagaagaaggtcatcagcgtgaccgcctctgcgactattgcgactcctccgtggctcttgtctactgcaaagctgactccgccaagctctgcctcgcctgcgacaagcaagtccacgtcgccaaccaactcttcgccaaacacttcaggtcacttctctgcgactcctgcaacgaatctccctcttcccttttctgcgagactgaaaggtctgttctttgccagaactgcgactggcaacaccacaccgnctntttctnccttcatagccgcagaccc

SEQ ID NO: 151737 - DNA, 390 bp, Arabidopsis thaliana columbia
gagaagcaaaagaaaaaaaagctattgtttgaaagaagaagaagttaactatggcagaggatgtggaagccgttcccggagaaggatttcagacaagagactatcaagatccgccaccagctccgtttattgatggagcggagctaaagaagtggtctttctacagagcagttatcgcagagttcgtagccactctcctcttcttatacatcaccgttttgacagtcatcggttacaagattcagtccgatactgatgccggtggcgtagattgcggcggagttggaatcctcggtatcgcttgggcccttggtggtatgatcttcatcctcgtctactgcaccgccggtatctctggtggtcacattaacccagcggtgacatttgggc

SEQ ID NO: 151738 - DNA, 350 bp, Arabidopsis thaliana columbia
  unsure (1)..(350): unsure at all n locations
gacgaatctagctattagccatggacaaaccgtacggatacgcgagcgtgagcatgagcggcatagatcgttccgccggaaaggatattgatcttgagatgggagtcggagaagcgacgctttatcctgggctaagttacggcgagaatcagctccgatggggatttattcgtaaggtctatgggattctctcagctcagcttcttcttacgacgcttatctcncgccgtcgtgttcttaatcctcctggtaacgatctcttgaccggatctcctgggattcttcttttcctttgcaatcgtcccttcatcttaatctggcctctgcacatttaccaccagaagcattct

SEQ ID NO: 151739 - DNA, 421 bp, Arabidopsis thaliana columbia
  unsure (1)..(421): unsure at all n locations
agcacaatgactagatttgcggtattgtcactctctgttcttcttctcgttctctggttggtctgcactgagtcgggggctaagtcngaggagtctgaagaatacgacgtcgctgtgccttcatgttgcgggttttcgtctcctcttctgattaagaaagatcaatggaaaccaatcttcgagacgaagtttggacagatctcaaccgttcaaatcggcaatggatgcggtggaatgggaccttacaagatacattccataacgttggagccaaacacaattttgctccctcttcttcttcattccgacatggtcttcttcgttgactctggaagtgggattctgaattgtgttgacgaggaagcgaagagtaccgagatcagactaggagacgtttacaggctactgtccggttcggttt

SEQ ID NO: 151740 - DNA, 421 bp, Arabidopsis thaliana columbia
cttcacttctcttgcatccttcaaactcatccacagcaaggaatggcgacggcaggggcaccagcagtgatttcatggacaagatcaggcattgtgtccaaatccggacaaacccagaagaaatctgagatgaaagtttcttacataactggacttaactcatatggtggtctcaaggcacagaacaacaaggttgtctcaatgggatcaccactctgcacagaacagtgttttgctaacgttgtgatgtctctcaaaggaagaagaggtaatggaggagccttatccaccacgtgtaacgctgtcggagagattttcaagattgcagcaatcatgaacgctcttactcttgttggtgttgcagttggattcgttcttcttcgaatcgaaacttctgtttgagaagctgaagcagagtaaa

SEQ ID NO: 151741 - DNA, 374 bp, Arabidopsis thaliana columbia
aacagattcgcatcaaaccctaagaaactgaagatgaggccgatcctgatgaagggacatgaacgtccattgacgtttctgaggtacaacagagaaggagatctgcttttctcctgcgccaaggaccacacacccaccctctggtttgccgataacggcgagcgccttggaacttaccgtggtcacaacggtgctgtttggtgctgtgatgtctcccgagactcgtcaagattgatcactggtagtgctgatcagactgcaaagctgtgggatgtaaaatctggaaaagaattgttcactttcaagtttaatgcccctacgaggtctgtggatttcgctgttggagatcgtcttgcagtgattaccactgatca

SEQ ID NO: 151742 - DNA, 419 bp, Arabidopsis thaliana columbia
  unsure (1)..(419): unsure at all n locations
aaaaacatgaaaatcctctcactttcacttctcttgctcttggccgctacggtctgggcatccgttccagggctcatcgaactcgtcgattcgaaaaccatctttgggaacgtagccgaactcttagagaaagagaaactttccatcaactacgccaactgcagaagctggcaccttggtgttgagacctctaacatcatagacttcgacacggtgcccgcaaattgcaaagactatgttgaagactacttgatcacttccaaacagtaccaatacgactccaaaaccgtgtgcaaagaggcttatttctatgccaaaggacttgccctaaagaacgacaccgtcaatgtttggatctttgacctagatgatacccttctctctagtattccctactacgcanaatatggatacggaac

SEQ ID NO: 151743 - DNA, 422 bp, Arabidopsis thaliana columbia
ctaaaaccctagaaactcacttcctcagtttctccaactctgtacttcgtatcatgaagcgaaaccctaaaagaagcaatctttagtctcttctcttctttattttttctggggagaaagaaatttcacttttttttatccgatttctgcttcatctgggttttggatttttgcgatcgattttgagaaattagcaaacaatgtcgggttctggaggagtttcaatcgcacgtacagcgatccgtggtgagaatcggttttataatccacctccgatgcgtaggatgcagcaagaggcccaattgcagcaacagattagggagaagcaacgtcgtgatgatgaagatgaggttttgatggataaggaaaggagaaaggctgctactgttgctccgaggactactaggaaaggtcttggtgtg

SEQ ID NO: 151744 - DNA, 425 bp, Arabidopsis thaliana columbia
gctgatcttgagagaaagaagtcacaagaattcaatttttttcttggttattgacggggagggaaaagttgagattcttgagtttcctattttgatcgtagatgccaaaaccatggaagtcgtagacttattccacaggtttgtaagacccaccaaaatgagcgagcaagcaattaacaaatacatcgaaggcaagtatggggaactcggggttgatcgtgtgtggcatgacacagctattccatttaagcaagttgttgaggagtttgaagtttggttagctgagcatgacttgtgggataaagatacagattggggtctgaacgatgcagcttttgtaacctgtggaaactgggatataaagacaaagattcctgagcaatgcgtagtttcaaacatcaatctttcgccatattttatggagt

SEQ ID NO: 151745 - DNA, 265 bp, Arabidopsis thaliana columbia
caaacacagaaaagcttcttcttaaacgatgctttactataccagagatgacaacggcggggacgatttcgatgagtttgagccaacgacgaacagtggtggttacgacatcacggcgatctacggacgttcgattccaccttccgataagacttgttatcctctctcatctggtgtcgatgatgattcagaatacgagagacctgcatttactcagattcatcagccttctgcttacgtgaagtaagctcttaacacagagtac

SEQ ID NO: 151746 - DNA, 449 bp, Arabidopsis thaliana columbia
  unsure (1)..(449): unsure at all n locations
cggaanngcccggggcgagcccacgccgtccgaaaaagatgaagtgattgattaaattgaaatcgatcacatcaaccatctctttctggcgcgtgcaaagttatctccgtttcaaaccgaaccaatcaattcgggaatcttcatctttctacgtgttttctcagctatgtatctctgggttcgacttcagtcaaagcttcaccagccatggatttcgttaggggtttttcggaggaagcatagaaggaaggtcttggtgacggctggttgtttgggaagtgggtatttactctacaaactatacaattcccatactcgtaggcttgctgatttggaacgagaactcgctcacgagcgtgaaaatgacgaaatcatcaaaacccaaatgaaagcacatttcgagagtattcagatgattgcggattcgaccacactgccttacgcaatgc

SEQ ID NO: 151747 - DNA, 423 bp, Arabidopsis thaliana columbia
gaacgataatggagtcacaattatggaattggatcttacctcttttgatctcttcgctccgcatctccttcgtcgctttctatggattcttcgtcaaaccgaagcggaacggtctccgtcacgatcggaaaactgtttctaccgtcacctccgacgtcggatctgttaatattaccggagatactgtcgctgatgtcattgttgttggagctggtgttgctggttctgctcttgcttatactcttggaaaggataaacgccgagttcatgtgattgaaagagatttatcggagcctgatcgtattgttggggagttgttacagcctgggggttacctcaagttactggagttgggaattgaagattgtgtggaagaaatagatgctcagcgtgtgtatggttatgcactttttaaaaatggga

SEQ ID NO: 151748 - DNA, 408 bp, Arabidopsis thaliana columbia
cacattttaagaaagaaaaaaaaaaattgaaagttgagaaaagttcctagaggtgggggacatgaagttcacggagcttgtgttcattgtgttcatggtgggtgtcatggtttatccagtttcaatcagagcaactgaggtcaaactttctggaggagaagctgatgtaacgtgttattcaatacagcttatttcatgcgcaacaccaatgcttacaggagtaccaccgtctacagagtgttgcgggaaactgaaagagcaacagccgtgtttttgtacatatattcaagatccaaggtatagtcaatatgttggttctgctaatgctaagaaaacgttagcaccttgtggggttccttatcctacttgtttgattttgagatattgctaaacaaagttggtaatgat

SEQ ID NO: 151749 - DNA, 421 bp, Arabidopsis thaliana columbia
gtggcgtcacaggaggaaatggcaaagttgtgaaaagtggtcctaatgatagatatgttcatctattatgctgaccatggagctcctggcttaatagcgatgcccactggtgatgaagttatggcaaaagatttcaatgaagtcttggagaagatgcataagagaaaaaaatacaacaagatggtgatctatgttgaagcatgtgaatcaggaagtatgtttgaagggattttaaagaaaaatctcaacatatacgcagtgactgctgctaattctaaagagagcagctggggagtttactgtcctgagtcatatcctcctcctccttctgagattggaacttgtctcggcgatacatttagcatctcttggcttgaggacagtgaccttcatgacatgagcaaagagactttggagcaac

SEQ ID NO: 151750 - DNA, 426 bp, Arabidopsis thaliana columbia
acattttaagaaagaaaaaaaaaaattgaaagttgagaaaagttcctagagtttggagacggtgaagttcacggcgcttgtgttcattgtgttcgtggtgggtgtcatggtttctccagtttcaatcagagcaactgaggtcaaactttctggaggagaagctgatgtaacgtgtgatgcagtacagcttagttcatgcgcaacaccaatgctcacaggagtaccaccgtctacagagtgttgcgggaaactgaaggagcaacagccgtgtttttgtacatatattaaagatccaagatatagtcaatatgttggttctgcaaatgctaagaaaacgttagcaacttgtggtgttccttattctacttggtgatttttgagatattgctaaaaaaagttgttaatgataataatatttaacaaaca

SEQ ID NO: 151751 - DNA, 321 bp, Arabidopsis thaliana columbia
cggacgcgtgggtgattttattttttccggaattttgaaaatctgtgagctgatggatcttcgctaatcgcagagacgaatctgcgaaaattccaacaccagattccggcgccggagcgccgatgaacaatcaggtcgtttagtaaaattcgatgaatctcccgcggaaataattagattcgatttcgatttccgtggggaagttatgttccatttgatttttgtttcttttgtttcttgatgtgttttgttatattatgttttttgtagacttttatatatctatttttgttgtttttattattttaatttattattatt

SEQ ID NO: 151752 - DNA, 401 bp, Arabidopsis thaliana columbia
gttgagaaatctcgccgccgtttgaagaaagaagaagagatgggagttttcgtcatgcgtgtgcaaaagcaaaggcggagaatggaccgcaaagcaacacgaaggagatcttgaagcttcagcttcttccacctacgatctccagcgcaagcttgttcagactgctctctccgccgattcatctggcggcgttcagtcttctttctctcttgtctctcctacctccgccgtcttcgtggtggtcattggtggtggtggtggtggaggatttgctgccggaggaggtgcagctgctggaggtggtggtggtggtgaggctgccgcagccacaaaggaggaagagaagaagaaggaagaatctgaagaggaagagggagactttggatttgatctttttggtt

SEQ ID NO: 151753 - DNA, 405 bp, Arabidopsis thaliana columbia
caaaatcttaaaaactttctctcaattctctctaccgtgatcaagatgcagatctgtgttgagactctcaccggaaagacaatcaccctcgaggtggaaagctccgacaccatcgacaacgttaaggccaagatccaggataaggagggcattcctccggatcagcagaggcttattttcgccggcaagcagctagaggatggccgtacgttggctgattacaatatccagaaggaatccaccctccacttggtcctcaggctccgtggtggtatgcagattttcgttaaaaccctaacgggaaagacgattactcttgaggtggagagttctgacaccatcgacaacgtcaaggccaagatccaagacaaagagggtattccttcggaccagcagaggctgatc

SEQ ID NO: 151754 - DNA, 428 bp, Arabidopsis thaliana columbia
gaagaaggatgggttcccacaaaaattatagctggcttcaaaagggttaaagcaatgactatggatgttgattttatagtctatgcgttggggttttctaattctgttgaagtgcagggtgaccagatacgcaagcgtgacaagtggtctgactggattcctgcatctaaaaagtcaacctctgcggagacaattggagacggtgacaaagattccccaaaaagtataacaagcggggataattttggaaacccttcaaagggttcttcaaagcctaccgtgtccgatttctcttcagagggagctcagtcatcaagaaccaataattataaaagtggtaacctgaaatcatcagcagacgaaaaaagaaatgtggaggacttgtcaaacgatttttcaaacactttcttgcttgacgaggaactaga

SEQ ID NO: 151755 - DNA, 387 bp, Arabidopsis thaliana columbia
gctctctcaaaagtcgaatatcccaaattcgatccgttttccggcgataatctccgagctagatccgatggcgaaagaaccagttcgtgtgctcgttactggagctgcaggacaaatcggatatgctcttgtacctatgattgcaaggggtatcatgcttggtgctgaccaacctgttatcctccacatgttggatattcctccagctgctgaagctttgaacggtgttaagatggagttgatcgatgctgctttccctcttcttaaaggtgttgttgctacaactgatgccgttgagggatgtactggagtcaatgttgctgttatggttggtggtttcccgaggaaagaaggtatggagaggaaggatgtgatgtccaagaatgt

SEQ ID NO: 151756 - DNA, 423 bp, Arabidopsis thaliana columbia
caagaatcagattcaagatagaagtttttcaaacaatgtctagtcctcttggtcactttcagattcttgtttttcttcatgctttgcttatcttctcagctgagtcccgcaaaacccaattgctgaacgataatgatgttgaatctagcgacaagagtgcaaaaggcacacgatgggctgttttagttgctggatcaaatgaatattataactacaggcatcaggctgacatatgccacgcgtatcagatactccgaaaaggcggtttaaaagatgaaaacatcattgtgtttatgtatgatgatatcgcgttttcctcggagaatcctaggcctggagttatcattaataaaccagatggagaagatgtttataaaggagttcctaaggactacactaaagaagctgttaatgttcaaaact

SEQ ID NO: 151757 - DNA, 422 bp, Arabidopsis thaliana columbia
agagcttatcatctttgtgcttcctgcaaatagctctttgctgttgatctttctcgtccatcaacaaacatgggtaggacacgtggtatgggagctgggcgtaagctgaagagactccgaattaaccagaggtgggctgacaagcagtacaagaagtctcacttgggaaatgagtggaagaagccttttgctggttcttctcacgctaaaggaattgttcttgagaaaattggtattgaggctaagcagcctaactctgctatccgtaagtgtgctagagttcagcttatcaagaatggaaagaagattgctgcctttgtccccaatgatggttgtttgaactacatcgaggaaaacgatgaggtcttgattgctggatttggtcgtaagggtcacgctgtgggagatattcccggagttag

SEQ ID NO: 151758 - DNA, 365 bp, Arabidopsis thaliana columbia
ctctctctctcttttatctctgagattgcttcttcgctattgctcaattctgtctgtcacctaaccctaattattcattattcctgagattcatcggcgatgagttcggaggaagccaaggtcgttgttccgaggaactttagattgttggaagagcttgaaagaggtgagaaaggtattggagatggtactgttagctatggaatggatgatgctgatgatatttatatgcaatcttggactggcaccattcttggtcctcctaatactgcatatgaagggaaaatctttcagctgaagcttttctgtggtaaggagtaccctgaaagtccaccgactgtgaggttccagacccggataaacat

SEQ ID NO: 151759 - DNA, 344 bp, Arabidopsis thaliana columbia
ctgagtcttgaaggtcaacaacgtcgagaataatggcatcatctatttgtgcttcgtctgccatcgctgccatttcttctccaagtttcttgggtggtcagaaactgaggctggagaagaagtggactgttccagctgtgtccaggccagatgcgtctgtgcgcgccgacgcagctgatccagatagaccaatctggttcccgggaagcactcctccagagtggctagacgggagcctccctggtgactacggctacgatcctcttggtctttcatcggacccggacagtctaaaatggaacgtacaagccgagatagtccactgcccattggctatgctagga

SEQ ID NO: 151760 - DNA, 304 bp, Arabidopsis thaliana columbia
tctcccgcaaccttcgattttcgtttattcgcatccatcggagagagaaaacaatggataagcgaccatgttggtgtaccaagatcttctcaccggtgatgagcttctgtctgactctttcccttacaaggagattgagaatggaatcctctgggaagtagaaggaaagtgggttactgtgggagctgtagatgttaacattgttgccaaaccatctgctgtataatgtggtgaggatgtacgttttgatgacttttctcaataggtttttgtcattttctacacctttagactttaagttgct

SEQ ID NO: 151761 - DNA, 398 bp, Arabidopsis thaliana columbia
  unsure (1)..(398): unsure at all n locations
tatttttctcgctcgcgaattcctctttctcaccttttctcgctcctgggagatctgaagcagttcttctccgacgcctggatcgtgatttgattcgaactttcacataagatggctatggtagatgaaccgttgtatcccattgctgtgcttatagatgagcttaagaatgatgatattcagcttcgtttgaactcgatccgtcgcttatctactatagctcgtgctcttggagaggagcgtacaaggaaagagttaatcccttttttgagtgagaatagtgacgatgacgatgaggtgcttcttgcaatggctgaggagttaggagtttttattccgtttgttggaggaatngagtttgcgcatgttcttcttcctcctttggaatctctatgtac

SEQ ID NO: 151762 - DNA, 413 bp, Arabidopsis thaliana columbia
ctttattatttcgctttaatgagttttatctgatagaatctgctccacccaaaaacagcataagaagaaattcattgtcagagaaaagtgcaaaaaaaaaaaacgatcttcttcatcattctactaaatgggttcttgtctcagttctcgtgtccttaataagagcagtagtggtctcgatgatcttcatctctcgagctgtaaatcttcatcatcagctacagctcataagacagaaggagaaatccttagctcaacgaccgtcaaaagctttagctttaatgaacttaaactcgctactagaaacttcagatcggactctgttgttggagaaggtggctttggttgtgtctttagaggttggcttgatgagactactcttactcctaccaaatctagctctggtcttgtta

SEQ ID NO: 151763 - DNA, 389 bp, Arabidopsis thaliana columbia
ctctttctagtgtttgtttgatcctctgcgtactctgttcttcttctctcttcagagaaaacaagtcctgcatattgaagatctgatgtcttatcgattgctaagtgtggataaggatgaactggttacgtcaccttgtttgaaagaacgtaactacttgggtctctctgattgttcctctgttgatagctcaactattcccaatgttgttgggaagagcaatctcaatttcaaagctactgaactgaggctaggtcttcctgagtctcaatctcctgagagagagactgatttcggtttgctgagtccgagaacacccgatgagaagcttctcttcccgttgctaccttctaaagacaatggttctgctactacagggcataagaatg

SEQ ID NO: 151764 - DNA, 413 bp, Arabidopsis thaliana columbia
ttctcttcttcttctatttttgctgtgtgacgaacgagaagactcttttttttggagttttgattcttcttcttctgcgtttctttcgctacttcctcagcttcgtcaccgtcgaaaattcttcacgttttcctcggaattttccaattgtcttctccaattctcttgcgatcgttgaagatctgaaaaattcgaagcgtttgatcatggcttcgtacactcccaagaacattctcatcaccggagctgctggtttcattgcgtctcatgtcgccaacagactcatacgaagctatcctgattacaaaatcgttgtgcttgacaagcttgattactgttcaaatctcaagaatctcaatccttctaagcactctccgaacttcaagtttgtcaaaggtgatatcgctagtgct

SEQ ID NO: 151765 - DNA, 379 bp, Arabidopsis thaliana columbia
  unsure (1)..(379): unsure at all n locations
gtnataaatctctcctcccttttattttttacaacaaatttcattattgcatggcttttcaaaaacaaaggcctctcaatcatcctctaatcaacactattcttatcttcaatcttcatcttcttccacctactatctccatcgcaatctttttcaaactactctctcctcctattcatctttcgactttcattcttctttctcttatttatttcctaccatcctcttattttaatttatcatttctatttttttttaacctttttttattcatattttctttaaaaccctaactggaaagactattactcttgaggtggagagttctgacaccatcgacaacgtcaaggccaaaatccaagacaaagaaggtattcct

SEQ ID NO: 151766 - DNA, 401 bp, Arabidopsis thaliana columbia
caagcctggtatggttgtgacctttgctcccacaggattgaccactgaggtcaagtgtggggagatgcaccacgagtctcttcttgaggcacttccaggtgacaacgttgggttcaatgttaagaatgttgctgtcaaggatcttaagagagggtacgtcgcatccaactccaaggatgaccctgccaagggtgctgctaacttcacctcccaggtcatcatcatgaaccaccctggtcagattggtaacggttacgccccagtcctggattgccacacctctcacattgcagtcaagttctctgagatcttgaccaagattgacaggcgttctggtaaggagattgagaaggagcccaagttcttgaaaaatggtgatgctggtatggtgaagatgactc

SEQ ID NO: 151767 - DNA, 370 bp, Arabidopsis thaliana columbia
ttcacataaaaaaaatacttttgaatccgtgtttcattcatcgaatctttggccgataactatggctgaggaaatcaagaatgttcctgaacaggaggtgccaaaggtagcaacagaggaatcatcggcagaggttacagatcgtggattgttcgatttcttgggaaagaagaaagacgaaacaaaaccagaggagactccgatcgcttcagagtttgagcagaaggttcatatttcagagccggagccagaggttaaacacgaaagtcttcttgaaaagcttcaccgaagcgacagttcttctagctcctcaagtgaggaagaaggttcagatggtgagaagaggaagaagaagtaggagaagaagaag

SEQ ID NO: 151768 - DNA, 402 bp, Arabidopsis thaliana columbia
ctcttcttctcgacttcggaatctttcaaagcttcttcgatttttccagaggcaggcatggttaaaggtccaggactctacactgaaatcggcaaaaaggccagagatcttctgtacagggattaccaaggagaccagaaattcagtgtcaccacttactcttcaactggtgttgcgatcactacaacgggaacaaacaaaggaagcttgtttttgggtgatgttgctacccaagtgaagaacaacaacttcactgctgatgtcaaagtttccactgattcttctcttttgaccactcttacctttgatgagcctgcccctggactgaaagttattgttcaggctaagttgcccgatcacaaatctggaaaggctgaggttcagttttccatgactatgctg

SEQ ID NO: 151769 - DNA, 419 bp, Arabidopsis thaliana columbia
cgaccacgcgtccgaggaccttatccacagtccacacacttttagtctctattaactcgccgactgaagagcagagtggctgaaagagcgattgtctatgtatctcgttcatctactccttccttgtgtatcccttattcaactgctctgttttcatcgatgaatcgactggcgctccccgccgtccggattactccccgtaccaacagatttcccaggattcactgctctatgtctgctaacgacatcaaagcgggaaccaatatcgaagtcgctggcgctccttggcgcgttcttgagtttctccatgttaaaccaggaaaaggtgcggcatttgcgagaactaagatcaggaactatgtgaatggtagcacagccgagagaacatttcgtgctggaattttctgttgggaagctta

SEQ ID NO: 151770 - DNA, 417 bp, Arabidopsis thaliana columbia
cttcatcattaccaaatcatcaacttattcgtttctctcaaatttagggtgttctgttttctcgaaagtcttgcgggtttctgaatcatctctatctggtttgagggtttcgtttgatatctggagaaaggggtttctggaaacaaggagttcataattcgcgatcttgatctatcgatcttcatttatatataaaagcgtgaatgagattatgatggagtcgaaaggtggtaaaaagaagtccagcagtagtagttccttattttacgaagctcccctcggttacagcattgaagacgttcgtccaaacggtggaatcaagaaattcaaatcttctgtctactcaaactgctccaagaggccatcctgagtaccagcgtgcaccgatcttcataatatagttatagctttctttac

SEQ ID NO: 151771 - DNA, 391 bp, Arabidopsis thaliana columbia
ctttttatttcttttatcgttttttatgttgggaagtaaaatgaaaggcaattcttaatctaatctaatattgattgaatgtctgagcattccgagactttcatgagtatatatccaaagtatcttaggtccttttcaaaactattaatttaaatctctctccggctatccaatctaattgaagactcagtaagtggaactaaattagtagtggcaagtaaagatttacagatttccctccactactttaagttttccttgaatctgataggcaaaactttagggtagagaatagaacctcgcgagccaggggcttagaataatgaaaagaaagtataaagagtcttttcctacgtttgttatttaaagtttgttgctgaggcggcacccg

SEQ ID NO: 151772 - DNA, 381 bp, Arabidopsis thaliana columbia
aaaacaaaaaaggctcccattgcttttactctctctctttcttcaaccgaaccgcagagacttttcgagtcttgcttccatggctcaaccatctccgcagctcctatctccatcggtctcaaaccacgatctttctccgttcgcgccacaaccgctggttacgacttgaacgctttcacgttcgacccgatcaaggaatcgatcgtgtcacgtgagatgacgagaaggtacatgacggatatgatcacttatgctgagactgatgtcgtcgtcgttggtgctggatctgctggcttatctgctgcttatgagatcagtaagaaccctaatgttcaagttgccattattgagcaatctgttagtcctggtggcggcgcttgg

SEQ ID NO: 151773 - DNA, 381 bp, Arabidopsis thaliana columbia
aatttcggttccactttcctttcgtttttaaatacccatcccatcaaaaataaacaggagggcctaaagaagaatcctaaagactttacgggtcttgtttaggataaaagaaatgcctgccggtggattcgtcgtcggggatggccaaaaggcttatcccggcaaactcactccctttgttctcttcacttgcgttgttgctgccatgggcggtctcatcttcggatacgatatcggaatctccggtggtgtgacgtctatgccgtctttcctcaagcgattcttcccgtcggtgtatcggaaacaacaagaggacgcgtcaacgaaccagtactgtcagtacgatagcccgacgcttacgatgttcacattgtctttata

SEQ ID NO: 151774 - DNA, 363 bp, Arabidopsis thaliana columbia
aggaatcggatccaatgttttgtcttacttgatcatggtctgtgctggcctgcgtgattcgatccccaagtccatcgtatactgccaagtccgagaagcgaagcgcagtctcctcgaccatttctttgcggagctcggtaccatggatatgaagaggctctcgtcgctattgaacgaagatccagcaatcatggagagacgcagtgccatctcaaagcggctagaattgtatcgagcagcccaatccgagatcgatgctgttgcttggtccaagtgataccggcatgtcatgtccactgttttgctcggttctggtcggtgtggctcagactcggagcatagatttaagggtctgtatttgta

SEQ ID NO: 151775 - DNA, 378 bp, Arabidopsis thaliana columbia
gactcacatgattaaagagttttcctgtttaaaacctctctacctcgatgtgagcggatcctgatttactctcatcctcatcatctctcatcatcgagattcatagtctcttttgccgcttggattcttccaaggttagtgagctgctatggcaactcatcagcaaacgcaacctccttccgattttcccgctcttgccgatgaaaattcccagattccagaggctactaagcctgctaatgaggttcagcaagctaccatagctcaggatcctccaacatctgtgtttaagaattctgaaccaatacgggaggatcaaattcagaacgctatcaaattcctttcgcacccgagggttagaggctctcctgttataca

SEQ ID NO: 151776 - DNA, 399 bp, Arabidopsis thaliana columbia
  unsure (1)..(399): unsure at all n locations
ccggnanngcaggggcgacccaggcctacgcagacctgtattacacatcaagaaacacatcttttgtagatggagatcactaacgtcggcgcggatgatgcaatcgcagagcagaagctgcctaagatggtgtacgactactatgcatctggtgcagaagaccaatggactcttcaagagaacagaaacgcttttgcaaggatcctctttcggcctcggattctgattgatgtgagcaagattgacatgacaaccaccgtcttggggttcaagatctcgatgcccatcatggttgctccaactgccatgcaaaagatggctcaccctgatggggaatatgctactgctagagctgcatctgcagctggaactatcatgacactatcttcatgggctact

SEQ ID NO: 151777 - DNA, 324 bp, Arabidopsis thaliana columbia
ctccatcacacacaacaacaagaacattacaagcttctacatttctcttaacatagcagacagtttttgatctgggtgttcaagtccggtgttgatcccattgagtttcggatctaaaagatccgaatattcagacggatcaacaagagaacaagaaaaaaaaaatgaatcttgagaatgttttggaattcaccagctttgattactggtttaattggagagtgttactatgtgctatatgggtaatagttccaatgattgtttctttattagtcttattgaagtatgaagatagttcagttcaaactcaaccatcacttaatt

SEQ ID NO: 151778 - DNA, 392 bp, Arabidopsis thaliana columbia
aaggagggaaaggagccaacctatggttcgatggatcgacacatgacggcgtgacgaagattcagctcgcagcaggcatagacggaattcaatatgttcagtttgattatgtcaagaacggacaacccgaacaagctcctcttcgtggtaccaaaggccgtgttctcccagctgatccgtttgtgattaaccatccagacgaacatctagtttctgtagaaggttggtatagccctgaaggtatcattcaaggaattaagttcatctccaacaagaagacttctgatgtcattggatccgatgagggtactcacttcactctacaagttaaagacaagaagatcatttggcttcatgggtcttgccggggcaatccttaattctcttggggc

SEQ ID NO: 151779 - DNA, 420 bp, Arabidopsis thaliana columbia
aaaaaaactttctttcaaaatcgttctctgaggcattttaacgaacagatggcgggcttaaacggtgcgtattacggaccatcgattccaccgccgaagaaagtctctcacagccacggcagacgcggcggtggatgcggttgtttaggtgactgtcttggctgctgcggctgctgtatcttaagcgtcatcttcaacatcctcataaccatagccgtcttattaggcatagctgctctaatcatctggctcattttcagacccaacgctatcaaattccacgtcaccgacgctaaactcaccgaattcacactcgacccaaccaacaacctccgatacaatctcgatctcaatttcacaatccgtaaccctaaccgccggatcggtgtttactatgatgaaatcgaagtcagaggatac

SEQ ID NO: 151780 - DNA, 392 bp, Arabidopsis thaliana columbia
gcttccgctgccgcaagttccgccttttcactccttaagtccaccggcgctgttggttcctccgccggaactcgcgcacgtgcctcccttctgccaattccctctacctctgtttccgcgcgtcctctaggcttctccgccactctagattcccgtcgtttctctctccacgttgcttccaaagttgaatcggtgcgtgggaagggaagcagaggagtggtttctatggcgaagaagagcgtcggagatctgacctcagctgatttgaaggggaagaaggttttcgcgagagctgatctcaatgtacctctcgatgataatcagactatcactgacgataccagaatccgtgccgccattccaacgatcaagtatttgattgaaaatggtgc

SEQ ID NO: 151781 - DNA, 246 bp, Arabidopsis thaliana columbia
  unsure (1)..(246): unsure at all n locations
gcaggnaagagnnnnggcttctgagcatccatgctaacttgctccttgtgccaaggtcttatccactaagtctcggagggaaagttatttttgcaaaacggtgaagaaaggaagttggctttctgctatcaaaagggtttttactccacatttcaaagagaagctagccaatcaggaaccagagagaaagagtggcatagaaaagaagaagaaaggttttggggagcttacgcatggcgagaccaa

SEQ ID NO: 151782 - DNA, 412 bp, Arabidopsis thaliana columbia
gcaggtaagagttttggcttcagagcttccatgctaacttgcgccttgtgccaaagtcttatccactaatctcgggggggaaagtgatgttggcaaaatggtgaagaaaggaagttggttttctgctatcaaaagggtttttactccacattccaaagagaagctagccaatcaggaaccagagagaaagagtggcaaagaaaagaagaagaaaggttttgggaagctaaggcatggcgagaccaattcatttcttcccatcttcagagagcctagtagtatcgaaaagatcttgggcgaggctgagagagatcacaatcttgtcttcaggcctcctactcctgatcgaccaaatccatattcagcctctcctcctccgaggcctgcttctcctcgggtagcttccccaaga

SEQ ID NO: 151783 - DNA, 295 bp, Arabidopsis thaliana columbia
  unsure (1)..(295): unsure at all n locations
gctctctctaagtncaaatctagatctttcgagctatagagacccaacggaaagagggatcgtacgcaaaagttagggatataactctctcgtctagagctaacaacaccgtagtggtggcgatcatcttcttaggatgtttacttgcgttgacctctgcaatataagaagctacgaacctaagatcaggattagggattgaacttaggactactgactcttgagttggagctaacaaaaacgatcctgtctatatcattgccaatgaccaatgaaaccatattaccccttttat

SEQ ID NO: 151784 - DNA, 391 bp, Arabidopsis thaliana columbia
ggccggtcaagttctggcttgaaagcttatgctgaacttagtttctgatttccaggagaataaaccgttggctctagacccaaaatttgtgcaaggtctcggcagtgtgctttctgactcaagcttggacaaggaatttatagccaaagcaataacactacctggggagggagagataatggacatgatggccgtggcggatcctgatgctgttcatgctgttagaaagtttgtacgaaagcagcttgcatctgaacttaaggaggagcttctaaagatagtcgagaacaataggagcacagaagcttatgtctttgaccactcaaacatggcgaggcgtgctttgaagaatacagctctagcttatcttgcatctctcgaagatccagca

SEQ ID NO: 151785 - DNA, 420 bp, Arabidopsis thaliana columbia
ttccttacatataacaatctctcttcattacaacataagctacttcatttggatggtaacaagtttctgcttcccaaaagaaccaagtttcgtcgagatggagaggctaaactcgaagctgtactcgcaaaactgttatataataaaggagaacgagaggttgaggaagaaagctcagattctgaaccaagagaatcaacaacttctcttcgaactcaaacaaaagctctcgaaaaccaagaactctagtggatcaaatcaaggaaacaacatcaacaacaacaacctctcttcatcaagctctgcttctggataatcctgatgcaacaaaactctttaggacaagacttggattcggataattaggagaacccatcattcgtatctttgattttattggtgtaatgtaagaaaaattag

SEQ ID NO: 151786 - DNA, 414 bp, Arabidopsis thaliana columbia
atgagactgtctttccttcgtgatgctagtgaccgagttgagcttgaaaatagagaagctgattctgaaatcttgaaagcaatggagagtacagctccagtggctataggagggaaatgggatgaaaagctagaacctgttttcatcacaaacatcgggcgctacaggcgttacaaatacgatagcatccgtgacttgttacgagtcatcaggaacaaactgaatcatcatcgagaacttcctccggaaattcaggaacttgtcggaacagttccagaaggattcgacgagtactttgctgtacggtttccgaaattgttgattgaagtctatagagtcatctctctgcattgtagggaagaagaagtattcagaaagtacttcaaatgcgacatcatctaaaagactgtttcg

SEQ ID NO: 151787 - DNA, 388 bp, Arabidopsis thaliana columbia
  unsure (1)..(388): unsure at all n locations
acccaggcgtccggaaaaaaaagctattgtttgaaagaatttgaagtttactatggcaaaggatgtgggagccggtgccggagaaagatgtcatacaaganactatcaagatccgccaccagctccgtttattgatggagcggagctaaagaagtggtctttctacagagcagttatcgcagagttcgtagccactctcctcttcttatacatcaccgttttgacagtcatcggttacaagattcagtccgatactgatgccggtggcgtagattgcggcggagttggaatcctcggtatcgcttgagcctttggtggtatgatcttcattctcgtctactgcaccgccggtatttctggtggtcacattaacccaacggtgacattt

SEQ ID NO: 151788 - DNA, 392 bp, Arabidopsis thaliana columbia
  unsure (1)..(392): unsure at all n locations
acccaggcgtccgtgagttctaagtttgatatcggctcctttagcattttaatgactctgcttattagcgtcttaggattatctttggctccaaagcttgatgctgagctcgcaacggtccaacatgctccaaaccccgatggctctatcagttttctggtgattggagattggggtaggcatggactctacaaccaatcccaagttgccctccagatggggagaatcggggaggagatggatatcaattttgtggtatcgacgggtgataacatctacgataacgggatgaaaagtatcgatgatcccgcctttcaactcttctttagtaatatctacacttctcctagcctgcaaaagccttggtacctngtattggggaatcacgactt

SEQ ID NO: 151789 - DNA, 385 bp, Arabidopsis thaliana columbia
actacaggttactgctttatggagtatatgtcatgcttgagatagagagagatatgccaaaatgtctgacgtcggaacataaacgacgacggtgaattctgacttggcatccgtagccttctccggctgggagttgacataaatcgtcatgcactgactaacatgcgcacacagtgaattgactgattgtctctctcattgctgatggcttgcgtacgcggtgatatcttcaatctcggcggttgtcttcctgtaccagcttctttgccgtcccagttctacacagactggctttacacaatgagcactggagtatgggtgatccagactatttactacgattacatctacatactttgtagacatagacgtaccaagaattgtc

SEQ ID NO: 151790 - DNA, 387 bp, Arabidopsis thaliana columbia
  unsure (1)..(387): unsure at all n locations
ctccacactccgacttggttgagaagattaaagaagagatggcaggacacaaggttgcacatgcgacattgaaagggcctagcgttgtcaaggagttatttatcggtttggcactcggtttagctgctggtggtctttggaagatgcaccattggaacgaacagaggaaaaccagaactttctatgacttgcttgagagaggtgagatcagtgttgtagctgctgaagagtaattaagccgctcaataactggttcctgaagattgtttgatttccatttctgtctnttttttcttttttttgttgggttcttaagaaataaacaaatctgagaatgggatttgttacaaattcagatgtgatgttcatttaaacataatctctttt

SEQ ID NO: 151791 - DNA, 351 bp, Arabidopsis thaliana columbia
aactcgaaactggccttttatttatgagaagaaagtgttattacaagtgaggtgccgcagacacatattttacacgtacgttaaaggtaaagggacgtgattacaaactgaccatactttattaagaaaaagaaaaacgttttgatttaagcctcgacaatctcctcgatcaactgttgttgttgcctaccggcagcgcgggtcaaagtggtctcaagtgtgttgaacttgatcttcctagcttcctcgggagagatctggaaaccatttgatatgacctccaatggcaatgccctcaagagcgaggttctacccgccaaagtgctgatcattgcgttttcattagttttg

SEQ ID NO: 151792 - DNA, 414 bp, Arabidopsis thaliana columbia
  unsure (1)..(414): unsure at all n locations
ctgaggtcaatgttgtctagattcatacccaactcttctgttattacctgggctgcagtgagggcagctagatcatgtaaattggcctttcggttctctccaaaaccaggggccttcacagcacagaccttgatattagcacgaagtttgttcagaattagggtggcaagagcatcgctctccacatcctcagcaacgatcagcagcggcctttgcttcttgagggccagttctaatactttcaccattgcgtttatattggaaattttcttctcgtggataagaatgagaggatcttctagttcacatttttgtgttttcgggttagttatgaagtacggagagatgtatcccctgtcaatcttcataccctcaacaacttccagctcattaaacaaggtctngccatcttga

SEQ ID NO: 151793 - DNA, 416 bp, Arabidopsis thaliana columbia
gtttgtcatctacatcctcaaatgttgctaatctggctgactccttcaatgagcagagtcagagtttaagtcatcccatgacagatttacttcctcagttgttagcaatgcaagaaacgatgaatcaggtgatggcttcgcagaaggagatgcagagacaactatcaaatgctgccactggccctatcggaaaagaaagtaaaagactagaagttgcgttagggagaatgattgagaaatccagcaagtcaaatgctgatgctctatgggcccgcatccaggaggagactgttaagaatgaaaaggcattacgtgaccatgcccagcaaattgtgaatgcaacgacaaacttcatgagcaaggagttaaatgccatgtttgagaaaacgataaagaaagaattggctgcaattggt

SEQ ID NO: 151794 - DNA, 392 bp, Arabidopsis thaliana columbia
  unsure (1)..(392): unsure at all n locations
gaacaagaagncggttanagnnnnngattttaacatttaacatgtccgcttgactagatgggagctgatggcttatgctcacatggataacccgcatagtcctgatttcttgttagggaagctggaagaactgtaccccttcgttgaacaaatccatgaggaaacactgaaagagacactgtgttatgttatcaggatacttgcatgagggtttaagcagtctggatcaggagattgtgacacagctcttttactgattccttgttgcacgtctggactctcactacacaaagctagcagaactagtcgtaaaagctttccttctccataccctttaagaagcaagtggttaacacaacatcacaatcttcgcaccacgcaacgatgccttg

SEQ ID NO: 151795 - DNA, 346 bp, Arabidopsis thaliana columbia
  unsure (1)..(346): unsure at all n locations
gggcgcccacgcggncgaaaaaaacaaaaaacannnnccaacnctcncncnctcncncncgccagcnncaagaggaggaggcgcaaagnnccgaggacaggangaaannncncgacggcanggcnagcnccgacgaagnncnnnnnggcnnccccgacgaaggaaaccacncaccggaggannanaaccccgccgccggcgacgaanccgaagnagacaacganaccaccgannagaanncagaagagaacagaaaannnnggcaagaacacgaacaacnncnncaggcgacacngnanaggacaagnncaanagagacaaagnaaagacaagcaaccaaagaagc

SEQ ID NO: 151796 - DNA, 386 bp, Arabidopsis thaliana columbia
aaacaattgttagattaacgtaatctttttattgtttcccaagtcatggcaaaacggctggggtcttatctgttcatctgcatgtttgttctctcaggctttttggtattttcaagtgcaaagcagttaaaaacatgtacctcggtcataaaacttggccacccatgtgatattgaatcatgcctaaacgagtgttttcgagtttacaataccggatttgcaacttgtcgcggagacaagtactcacaactttgtacttgtgagtacaattgctaagcttagacgtactcctcatgtatgctgttaaactaaagcaaaaaatctttaatgttaagtaccttattctattccatgtaactggaggatatggtcaaatatatatgaat

SEQ ID NO: 151797 - DNA, 417 bp, Arabidopsis thaliana columbia
gaagaaacttcacatcagcatcagaatctctctttctctctctctcctggttcacgggcaaaaaaacaccaaaccatttttctttcttcattgtgccgacacttctttcccctctctctctctctctccaccgccatggattcctcctatggcgccacaaagttccttctcctcctcttcctcaccacctccattgcgaccgcattacccgataacaaaccagtaccgggtcaaataaactcaaactcagtcctcgtagctctcctggactctcactacacagagctagcagaactagtcgaaaaagctctccttctccagaccctcgaagaagcagttggtaaacacaacatcacaatcttcgcaccacgcaacgatgccttggaacgaaacttagacccactcttcaaatctttc

SEQ ID NO: 151798 - DNA, 415 bp, Arabidopsis thaliana columbia
ttttcatttaaatagaggccagaagctctatggaaaaatcgtggttcaattttatgttttctaagggagaattggaatacagaggtgagctaagtaaagcaatggatagttttgctcctggtgaaaagactactataagtcaagaccgttttatatatgatatggataaaaacttttatggttgggatgagcgttctagttattcttctagttattccaataatgttgatcttttagttagctccaaggacattcgcaatttcatatcggatgacaccttttttgttagggatagtaataagaatagttattctatattttttgataaaaaaaaaaaaatttttgagattgacaatgattttagtgacctagaaaaattttttatagttattgtagttctaggtatctaaataat

SEQ ID NO: 151799 - DNA, 392 bp, Arabidopsis thaliana columbia
ggggacagagaatacaagcggtgacacatatcctcacaaacccaacaacgaaaccatcactttactctcaattcttcatcggagccataattccaaactacgtatcgtgggattaccctccggtctattcgccgacgcatctccgtcaatggtgggtttctcagttcttcaaaagggtatcgagatttgggctgcctgatacatcgtggaggtcgaatagcccgtattatcagccaccggcggcggttatggctgtcggagttgaggaagggaaatgggggaaagaggagaggagagagtatgcgaggtagaggctgaggaggaagagattggtgaatgaagtgcattcatatattcctcttttagttccgaatttgctttagtttactctc

SEQ ID NO: 151800 - DNA, 416 bp, Arabidopsis thaliana columbia
gaaaaggggagaagcaaaaatggtttctctgaagctccagaagcggctggccgcagcagtgatgaagtgcgggaagggcaaagtttggctcgatcccaacgaaagctccgacatctccatggccaattcccgccaaaacatcaggaagcttgtgaaggatggtttcatcatcaggaagccaaccaagattcactctcgttccagagctcgcaaaatgaagattgccaagatgaagggtcgtcactctggatacggtaagaggaagggtacccgtgaagctaggttgccaacaaaggtactgtggatgcgtaggatgcgtgttcttaggcgtctgttgaagaaatacagagagacgaagaagattgacaagcacatgtaccatgacatgtacatgcgtgttaagggtaatgtgttca

SEQ ID NO: 151801 - DNA, 432 bp, Arabidopsis thaliana columbia
gcgactaccatgaatgctgctgtttctctcacatcttcaaactcttcttcttttggcgctacgagagttgtgccattgctcctgaaaggatcaggtttactaagggtgctttttactacaaaagcaacaatgtagtgacaggtaaaagagtgttttccataaaagcacaaatcacaacagaaacagatactcctactcctgcaaagaaagtagagaaagtgtcaaagaagaacgaggaaggtgtgattgttaacaggtacagaccaaaagagccttacactggaaaatgccttctcaacaccaaaatcacagctgatgatgctcctggagagacctggcacattggtttcagccattaaggagaaatcccgtacagagaatgacaatctgttggtgtgattgcagtatggaatgacaagtatggaaagcctt

SEQ ID NO: 151802 - DNA, 422 bp, Arabidopsis thaliana columbia
gaaaaagtaaagagaagtgcgctctctcttactctcatcgattttacaaaatatgagccatctccaaattacagagttctttctcaaacccaggtgtgttcctgtccctgcagagatggcttggtacttatgaatgtgtttatactaatcactaaactcggggattttggctgtataatcaagaatttcatttattaacattgtttggccttgaaggcggtgaggataaaccagagctcaaaacgggtgcactctgttgtattgtggcctcaaggccactggttacaacaaaatcttcaccccacagcggaagggatattcctcaatcaagtcaagctgaagccttgcaatggcggacaaatttcagcttctcacctgctgctggctatactagagatggtttgaacagggtatgagtgatg

SEQ ID NO: 151803 - DNA, 405 bp, Arabidopsis thaliana columbia
cttctttcctttatatttaaaaaccttcttcttttctctctgtacatcgtcacagcaaaaaaaaaacagaaggagaagaaacaaaaacaatattctcagcaaaaacaaatctctactcatcgaaatcgaaatcaaaatatagaaacgatgtcttgctccgtcgccgtatgtaattctccggtgttttcaccgtcgtcttctctattctgcaacaaatcttcgattctctcgtcaccgcaagaatctctttctctaacgctttctcatcgcaaacctcagacctcttctccttcctctccatccaccaccgtttcttctcctaaatctccatttcgtctccgtttccagaaacctccgtccggattcgctcctaggccattatcttttggatctgaatctagttct

SEQ ID NO: 151804 - DNA, 317 bp, Arabidopsis thaliana columbia
gtgagtttgttgattgtatttatcagttaatggcgacgtctatgatacggaggaggttcaagcaagggacgaatatcgtctgcttccgccgttactacgccgctcacgcctaagatctaggcaacgccgtccccaatgaaccagctatatttttgtagccaacatcatgatactttgaaaatggaggaacaattgatatcccacatcctttgaattcacttcaccatgaagtacaactcgctttagtgattgtacagatagcttaagatatacctgaatcaatagccatgtattacatttgaagatacgcggttgct

SEQ ID NO: 151805 - DNA, 416 bp, Arabidopsis thaliana columbia
caccaactccgcttataaactttctctcttctgaaaacagatctctctgctttgggtcttcactcgacttgtatctatcatccatggcttccgagaatcctttccgaagcatattgaaggcgttagagaagcctgatggtggtgaattcggtaactactacagcttacctgctttgaacgatcccaggatcgataaactaccttattccattaggatacttcttgaatcggccatacgtaactgtgatgagttccaagttaagagcaaagatgttgagaagattcttgattgggagaatacttctcccaagcaggttgagattccgttcaagcctgctcgggttcttcttcaggactttactggtgttcctgctgttgttgatcttgcttgcatgagagatgccatgaataatctc

SEQ ID NO: 151806 - DNA, 420 bp, Arabidopsis thaliana columbia
gaagcttcttgggttcgccttagctattctattagttgtggcgacttgcaaacctgaagaagagattacttgcgaagagaacgttccattcacatgtagccaaacagatcgtttcaacaaacaagatttcgaaagcgacttcatcttcggtgttgcatcttctgcttaccagatcgaaggcggcagaggtcgtggacttaacgtttgggatggcttcactcaccgatacccagagaaaggtggagccgatttgggcaatggagacactacttgtgactcataccggacttggcagaaagatctagacgtgatggaagagcttggagttaaaggctacagattctcctttgcgtggtcaagaatccttccaaaaggaaagaggagtaggggaatcaacgaagatggtattaactactacag

SEQ ID NO: 151807 - DNA, 351 bp, Arabidopsis thaliana columbia
  unsure (1)..(351): unsure at all n locations
gggggacccaggcggccggcttaaagncnctattattctctaattttttcttttccgacgacttctctcaccagagcgacgttttgatcatgcgacgatgagtatcccaatggagttaatgtctatcagaaaccctaattccaccttgctctatagagctcactctcgtccgcctgtgaagctctgtgctccacctcgttctctcctccctagccgacgccatttcagtgctcctcgagctgttgtttcgtatccaggaatacgtttcggctttacctcgccggaagtcttgcttaatcgatccgtcgttgctttcgctgcattccacgaggattcgggagaatcaagtgt

SEQ ID NO: 151808 - DNA, 418 bp, Arabidopsis thaliana columbia
ggagatactgagactcagtatgatctttctattgtatttcagtctgaggagcgacgataaattaaagagggttattgatacattaaagcagagactggaaacagcaaaagctgacacggaagatcttatctcaaggctgaatcaagagttagccgttcgacaatttctgtcaacaaaggtaagagatttagaggttgaacttgaaacaactcgagagagctgcaagcaaggcatggagaaaacagtcctagatgaaaaggaaagatttactcaaattcagtgggatatggaggaactccgcaagcaatgcatggaaatggaatcgtttttaaactctataaaggacgagaaaacacatattgagactgcaaatgagtcacttgttcaagaaaatcagatgttgctgcagcagatcaat

SEQ ID NO: 151809 - DNA, 396 bp, Arabidopsis thaliana columbia
ctcaatatttgttctcttctcttctctctctctttgcccgtgattactgattacggagttaattatttttattctgcgtacgttacgtaagagagatattgaggaatggctgcgaagaaagtttttggatcggcggaagcgagtaatttggtgacggagcttcgtcggagttttgatgatggtgtgacacgtggttatgaatggagagtgactcagcttaagaaactgatgattatttgtgataatcatgagcctgagatcgtcgcggctcttcgcgatgatcttggtaagcctgagcttgaatcttttgtttatgaggtatctctactgagaaactctatcaagttggctcttaagcagctaaaagactggatggctccggagaaggcaaagact

SEQ ID NO: 151810 - DNA, 406 bp, Arabidopsis thaliana columbia
cgtctatctgtctccacgatccacgccttgacctttgttttttttttctcagagggtagagaggactccgataaccaatttctcaatctttttgtagatccaatttttccaggaaaaaaagaggtttcgcgaagaagatgagttttcaagatttagaatcaggaagaggaagatcaacgaggaaattcaatggtggtcgacaagattcgacacaagccgttgcttctggaatattccagatcaataccggtgtctccacgtttcagcgactcgttaacacacttggtactcccaaagatacaccggagctccgggagaagctgcacaagacaaggttgcatattggacagcttgtgaaggatacttcagcttaacttaaagaagctagtgaaactgatcatcaaag

SEQ ID NO: 151811 - DNA, 415 bp, Arabidopsis thaliana columbia
gctgccgctgttgtttctcctccatttctctatctttctctctcgctgcttctcgaatcttctgtatcatcttctgcttcttcaagtgaaaaatggccgatggtgaggatattcagccacttgtctgtgacaatggaactggaatggtgaaggctggttttgctggtgatgatgccccgagagcagtgttcccaagtattgttggtcgtcctaggcacactggtgtcatggttggtatgggtcagaaagatgcttacgttggtgatgaagctcagtccaagagaggtatcctcactctgaagtatccaatcgaacatggtattgtaagtaactgggatgacatggaaaagatatggcatcacactttctacaacgagctttctgttgcccctgaagagcacccagttctactcac

SEQ ID NO: 151812 - DNA, 417 bp, Arabidopsis thaliana columbia
gaaccctagaattcgcctcctctttccaaaattcccaatttttgtaatgacgggatagaaaaattcccaatgtccgctttatctttcattctcgattagaattcttcaaccaaaggtcactctctctccgttccattgcttctggatttcgtttttaagggttttacatttttcctgccttcttttacccatcagaggaagtttcaagccattttgttaatcagctctctcataagctaagatgtcgtcatcgccttttccagtcttggacaaccgaccaattgataagtggaaggttacggaattgaaagaagagcttaaaagacggagactaacaacaagaggcttgaaggaggaattggttaggcgtcttgatgaagcacttcgtgctgagcaagaagagtctgaaaggatcaa

SEQ ID NO: 151813 - DNA, 387 bp, Arabidopsis thaliana columbia
cgtttccttcttcgctcgctgttcagattttgctttgaggctttaggctccccaggtctctaatcgccgcagctggaagaaatggagactttcctattcacatctgagtctgtgaacgaaggacaccctgacaagctttgcgaccagatctctgatgcagtccttgatgcctgccttgagcaagaccctgatagcaaagttgcttgtgagacatgcaccaagaccaacatggtcatggttttcggtgagatcaccaccaaggctacgattgactacgagagattgtccgtgacacttgccgttccattggattcatctctgacgatgttggtcttgatgctgacaaatgcaaagtccttgttaacattgaacaacagagcccagaca

SEQ ID NO: 151814 - DNA, 251 bp, Arabidopsis thaliana columbia
gttactttagaaaaccaattataaaattctcctctttcttcatcaaattccacagagcatcaggttcttctccttctccaagctctcgcatcactttcatcgatttttcctctctgcgtcgatccttcagacatcggcgtcggagtttccgacaggaatctaaaaatgtcacgtggaagaggagttcctatgatggacctgaaacgaagttatgatgttgaagacagggtggtgtccgtgtctataccatc

SEQ ID NO: 151815 - DNA, 416 bp, Arabidopsis thaliana columbia
tcaatctctcccaaagcctaaagcgatctctgcaaatctctcgcgactgtctcttgcaagatgcaaatcttcgtgaaaacactcactggcaagactatcactctcgaggttgagagctctgacaccatcgacaatgttaaggcaaagattcaggacaaggaaggcattcctccggatcagcaaagattaatattcgccggtaaacagctagaagatggccgtaccttggccgattacaacattcagaaagaatcaacccttcatttggttctccgtttaagaggtggtatgcaaatctttgtcaagactctgactggcaagaccattactttggaggttgagagctctgacactattgacaacgtcaaagcaaagatccaggacaaggaaggaatccctccggatcagcagagact

SEQ ID NO: 151816 - DNA, 421 bp, Arabidopsis thaliana columbia
cgtttatcctctactacaatggcgaaaaccctagacaaatctaagaagcgcaaactcgtgaaatccaaatccacgaatttcgataagaaacagaagattaacaaacaacaacaacaaccagaatcctcaacgccatattcaagttcaagctccagctctgattctagcgattccgaatcagacaacgaattcgacccagaagagctccgtgagcttctacaaccttattccaaggaccagcttgtcgatctagtttgttccgcttctcgaatcggatcttcgatctattccgccgtcgtagaagccgcagatcgtgatgttacacacaggaaaatcttcgtttatggtcttccatgggagacgactcgcgagactcttgttggagtctttgaaggttatggtgagattgaagagtgtaccg

SEQ ID NO: 151817 - DNA, 420 bp, Arabidopsis thaliana columbia
ataagatcaagcacttgcttgagcctgataccgttcaatgggctggtcggatccagtttcatcgtatcaacattaagcatgattctagacttgaaggactgatcaagatggcagatctgacgataaatctagctgcgatctgtactccagcagattacaatacgcgtcctcttgacactatctacagcaatttcattgatgctctcccagtggttaaatactgctcagagaacaacaagcgtctgattcacttttccacttgtgaagtgtatggaaaaactataggaagctttcttccaaaggatcatcctctgcgtcaggatcctgaattttatgtactcaaagaagatatatccccttgcatctttggttcaattgagaagcagaggtggtcatatgcttgtgcaaagcaacttattg

SEQ ID NO: 151818 - DNA, 390 bp, Arabidopsis thaliana columbia
accggtgtccattgaagtgtataatcctaatgggaaatacagagttgttagcacaaaaccgatgcctggaactcgctggatcaatctcttggtagaccaaggttgtcgcgttgagatatgtcatttgaagaagacaatcttgtctgtagaagatatcattgatctgatcggagacaagtgtgatggagtcatcggtcagttgacggaagattggggagagactctgttctcagctttgagcaaagctggagggaaagctttcagtaacatggccgttggttataacaacgttgatgttgaagctgccaataagtatggaattgctgtcggttacactccgggagtgttgactgagacgacggctgaactagctgcttctctttccttggc

SEQ ID NO: 151819 - DNA, 414 bp, Arabidopsis thaliana columbia
ggaaggagaggctatgaaactcccgtctttccctaacgccatctccatcggccaggggagcttctcccgcgttcggggctcctcttcgctatccgtttgttccgccgccgccgcttcctccgccaccatctccactgattccgaatccgtctctctcggccatcgcgttcgaaaagatttccgaattctccaccaggaagtgaatgggtcaaagcttgtgtacttagacagtgctgcaacttctcagaagccagcagctgtattggacgctttgcagaattactatgagttctataattccaacgttcatcgaggaatacactatttaagtgctaaagctacaaatgaaattgaggtagctaggaaaaaaagtggtcgtttcatcaatgcttctgataggagagagattggttt

SEQ ID NO: 151820 - DNA, 367 bp, Arabidopsis thaliana columbia
caagaccactatggaatgcagcctctcaaatccttatggccgtaggatatatactaatggctgtagccgtgcctaattcactctacatcggttcaatggtggttggagtatgttacggtgtccgtctagccataactgtaccaacagcttccgaactctttggtctcaaatactacggtctcatctacaacatcttagtacttaacttgccacttggctcgtttctcttctcgggtctcctcgctggcttcctctacgatgcagaggcaacaccaactcctggtgggggcaacacgtgcgtaggagctcattgctaccgtctcatcttcatagtcatggcattagcttctgttatcgtagtcggttt

SEQ ID NO: 151821 - DNA, 369 bp, Arabidopsis thaliana columbia
ccgctgcagagcttcgccatgtgatgacgaatctaggtgagaaactgactgatgaagaggtcgaggagatgattcgtgaagcagatgttgatggagatggtcagataaactacgaggagtttgtcaagattatgatggctaagtgatgatgataagaaaaaaatgaagaataaaagtggtgatgtgatgaccttttaggcttttactatctacaaaagaatgattcgacctttaatgtcttgggtttgatttgagcctagtagtttcttaaggttttaacagactgaattttgtgacttatcttttatattaatatttattatttattatttttttattatttattttttattttttaatttttttttt

SEQ ID NO: 151822 - DNA, 393 bp, Arabidopsis thaliana columbia
ctttcctctcaaacatttcctaattccatcctaataattttcaaagctttaattctaagaaataatatctacaagaaaatattatctcatgtatttcttcttcctccttgatttttaatctgatttttaacctttggatttggaaaattatatcttcttctgtcccaaatctatttttaggtttgtcaaaacgattattttgtttaataatcgtaataggtatggagactaccggagaagttgttaaaacaaccaccgggagcgacggaggcgttacggtggtgagatccaacgcgccgtcagacttccacatggctccgaggtcagaaacttcaaacacaccttccaactccgtcgctccttcttctctccaccgtcgcataactcctttac

SEQ ID NO: 151823 - DNA, 330 bp, Arabidopsis thaliana columbia
  unsure (1)..(330): unsure at all n locations
cgctatntttaaacacaaacaattctttcccaataatctctcttcaagtacctcttttttctgattctggagatcgccatgaattactgatttccctctctattaacccatcaaagtaaaccaatttcttctgtgacttgtacctaactcgatcttaccagactaggtgatggcgtctttgaaccctttcgatcttctaggagatgatgctgaggatccaagccagctcgcttgagctttgtctctacaagtccagaaagctgctgcttctaatcaagctccttatggcgttaaaatttcctaccaaaaacagcccccccctttttttta

SEQ ID NO: 151824 - DNA, 416 bp, Arabidopsis thaliana columbia
ccaccaccagtctcttctcctcctccttcttctcctccaccagctactcctcctcgagtcgcttctcctgctcctggcgttgcttctcctccaccagcaactcctcctcccgtcgctactcctcccccagctcctctagcttcccctcctgctcaagttccagctccagcaccgaccacgaagccagattctccatctccatctccgtcatctagcccacctcttccatcaagcgacgctcctggacctagcaccgattctatctctcctgctcctagccccactgatgtgaacgaccagaatggagctagcaagatggtttcgagcttagtatttggatctgttctcgtctggtttatgatctaagtggaatcttttgtgactgtgttactagcatttatttttatgtcggcttt

SEQ ID NO: 151825 - DNA, 400 bp, Arabidopsis thaliana columbia
agtttggctctccgttcaatctcactctcagcctcctatctatctctggatcgaggttcctccaaatgagttgcgttacttccaccgtcgatttccgtacacacatccccaacactccgatcactctccatctcttcccctcgattcactctacgcgccaccgcctcttccttgccggaggaacaaaacaaacctcaacctccccctccttctccgccgcagccgcaaggagcgaagctaattcctctcgcgatctccgtctcaatcggcctcatagtcagattcttaatcccaagaccagaacaagtaacctcacaaggatggcaattactctcaatcttcctcttcaccatctcaggtctcgtccttggtcctctccctgtaggcgcttgggctttca

SEQ ID NO: 151826 - DNA, 414 bp, Arabidopsis thaliana columbia
cttgcagctatggccacacatgcagctctcgccgtctcaagaatcccggtcacacagcgactgcagtctgagagtgccattcactctttccctgctcaatgctcctccaagaggctagaagtcgctgaattctccggtctgcgtatgagtagtatcggtggggaagcatctttcttcgatgctgtagctgcacaaatcatccctaaggctgtgacaacatcaactcctgttagaggagagacagtggcgaaactgaaagttgcgattaacggttttggaaggattggtaggaactttcttaggtgttggcatggtcgtaaagactctcctctcgaagttgttgtacttaacgacagtggtggtgtcaagaatgcatcccacttgcttaagtatgactccatgcttggaaccttc

SEQ ID NO: 151827 - DNA, 346 bp, Arabidopsis thaliana columbia
cgaatttcccttccacccacgcctacgcttttatcccatgccagatttattctatattttactccagaaacacttcgcctttgtagcaccatttcacattctggttaactctacctgagattctcaatccaaagtaccctacgatcgcagacacatcagtcgaagatttcgatcatacgttcagtgtcaacacacaaagagcgttcctgtgtaacaaggaagctgccaataggctaaaacaaggaggtggtggtcggatcatacttctgacatcttcccagactcgatctttaaagccagggtttggtgcctattgccgatcaaaggcagctgtggaaactttggt

SEQ ID NO: 151828 - DNA, 209 bp, Arabidopsis thaliana columbia
cggcacctatagaaccacacacatataaccagcgcacaaccaagaagggggcgccccgagaaggaggctctctaccgagatcgtaatcggggatcgaaccattcggacctaacgccgctaccaacgactcggtaggtcaggagacgttgcctgatttctcaatcggggaacttgaagacgcgaaacttgggaccactacctcataaacc

SEQ ID NO: 151829 - DNA, 429 bp, Arabidopsis thaliana columbia
  unsure (1)..(429): unsure at all n locations
cgcttttcttctcagctacttcaggcaggtnaaacacttttccgtggtttagtagttgagagacgatcagctgnttgtaatgtggatggcgaggatanaagatcagagaatatgactccaagagacttctcaaggagcatttgaagcgtcttgctaatattgacctgcagattcgctctgctcaggtgacagaatctacggatttcactgagttaaccaaccaggagtcatggctatcgtccacaaagctagttgtgaaaccggatatgctatttgggaaacgcgggaaaagtggtttggtagctctaaagctggatcttgctgaagttgcagactttgtcaaagcccgcctcggcactgaggtcgagatggagggatgtaaagcacctatcactacattcattgtggagccttttgtgcctcatgatc

SEQ ID NO: 151830 - DNA, 421 bp, Arabidopsis thaliana columbia
tacgccgcctattagtgaaaaaggttcgagcttcggaaactatggcagcagtccctaaccttaactctgaggctggatgtgaagaagctcgacgagcatcttctcactcgcagttacattactggataccaggcttcaaaggatgatatcaccgtctttgcagctcttgcaaagcccccaacttcacagtatgtgaacgcttctcgttggtacaatcacattgatgccctcttgaggatctctggtgtctctgctgaaggaagcggagtcattgttgagggatcagctcctatcactgaggaggctgttgctactccccctgcagctgattctaaggatgctgcggctgatgaagaagatgatgatgatgttgaccttttcggagaggagaccgaagaggaaaagaaagctgctgaagaga

SEQ ID NO: 151831 - DNA, 384 bp, Arabidopsis thaliana columbia
ctttcatcgtcttcctcaggcattgcatatgatacccagaaaccctacggaatcagggaagaatttaggggtttgtgcgtttctatcgtgtgcaccatcgatggattctcgtatatcagtttctaggctttctctgaatcatcccggctcgaaatttgggttctcactcgatactagggtgagaaatgagtttatcgttagagcagaagaaggtaacacagaagctgaatctgaagaatttgttgctgaaatcgctgatacggaaggaaatgtagaggtagtggtcgaagctaaacctacaagaaaacctaggatcaagctcggagatgtcatgggtgttctgaaccagaaagcaattgatgtagcagagaaagtgagacctgt

SEQ ID NO: 151832 - DNA, 420 bp, Arabidopsis thaliana columbia
catcaacctatagatctcactcacataatcaacctacaaaacaaaaacaagaatgggtagatccaacgagcaagatctgctctctaccgagatcgttaatcgtgggatcgaaccatccggtcctaacgccggctcaccaacgttctcggttagggtcaggagacgtttgcctgattttcttcagtcggtgaacttgaagtacgtgaaacttggttaccactacctcataaaccatgcggtttatttggcgaccataccggttcttgtgctggtttttagtgctgaggttgggagtttaagcagagaagagatttggaagaagctttgggactatgatcttgcaactgttatcggattcttcggtgtctttgttttaaccgcttgtgtctacttcatgtctcgtcctcgctctgtttatct

SEQ ID NO: 151833 - DNA, 416 bp, Arabidopsis thaliana columbia
cggacgcgtgggcgagacgaagatggttaagatctgtgtcgcagtcagggtaagagcgccggcgccggaaaacggagcttcactctggaaagtcgaagataatcggatctctcttcataaatcactcgacactccaatcacaaccgcttctcacgcttttgatcatgtgttcgacgaaagttctacgaatgctagtgtctacgagcttcttactaaggatatcatacatgccgctgttgagggttttaatggtactgcatttgcttatgggcaaactagtagtgggaagacgtttacgatgacgggctctgaaactgatcctggaattattcgaagatctgttcgagatgtggttgaaagaatacatttgatttctgatcgtgaggttttattcgggttcgtacatggataattac

SEQ ID NO: 151834 - DNA, 364 bp, Arabidopsis thaliana columbia
gttgcttaatacttttaaggttgttgggacacattctttagtggtcgaccgcagtgtaaggaatagatactctaatacaagattggataggtccagcaacaagtctcatggtcggaagaagctaaatcctctggctcctcggttctcactagcagatcataaacaaaatgtatatggctgtgaggtaaaccaagctgcaaatgactttggtgatagacatggctgttccacatcatcaccatctcaaaaagtggatgttaagaaactacttacgacgattcatggattgtcagagttgctaacacatgtacacagttcaaaactttcgatttaccaaatgagcagtatcttgatctcatcaact

SEQ ID NO: 151835 - DNA, 440 bp, Arabidopsis thaliana columbia
  unsure (1)..(440): unsure at all n locations
ccgtcccgcttcatctatcacctaaaaatctcagcttttgtcttctnncttattcctnncctttttctgcgtccgtgtccgattcttcatgcgcgccagcttgtcttcttcttcnttcttccgatatgtcntgcttctgattcctcttcctctcnttcccgttacctcttgacaccatcaactcccaaggttatcaaatgtgagtatgctgtccgtggagaaattgtcaacattgctcagaaattgcaagaagatttgaagactaacaaggacgcttatccctttgatgagattatctactgtaatatcgggaatcctcaatctcttggtcaacagcctataacattcttcagagaggttcttgctttatgttcctacacagccctgttggatgagagtgcaacacacggtttgttcagttctgattcgattgagcgtgc

SEQ ID NO: 151836 - DNA, 414 bp, Arabidopsis thaliana columbia
atctttttgaagccgtcataacttgcaagtaaagaatggtcagtctaatgttcgttagttcggcctcacctttatgctcttctccatcaaaaattcccaaggctagtttggacttcgagatgaagaaacttggtggcagcacaaaacttgttcggaacgtgaatttggagaaactaaagaacaattatttgtttcctgaaatcaacagacgtgaacttgagcacattgaaaagcatccaaatgtacaattgataagccttgggactggtgatacaacagagcctattccagagcaaataacctcacatatgtctaacttcgcacatggcctatcgaccgtagaaggatatagagggtatgggttggaacaaggaaataagaccctgcgaaaagctattgctgaaacgttttata

SEQ ID NO: 151837 - DNA, 415 bp, Arabidopsis thaliana columbia
ggcgattattactactactactgttcgtttcactgatggaacctctcccaccttctggtcctcagcttcgacaaagggttataatctccattttctctactcgaattcaacccaacgacttacgaatccgaaattcggaatcggcgggaagttgaaggtgacggtgaatccgtattcgtatacagaggaagtacggcctgaggaacggaagagtttgacggattttttaacggaagctggagatttcgttaattcagacggcggagatggtggtccgccacggtggttctcaccggtggaatgtggcgcacgtgctcctgaatctcctcttcttctctacttacctgggatcgatggaactggattagggctcattcgccagcataagaggcttggagagatatttgacatatgg

SEQ ID NO: 151838 - DNA, 441 bp, Arabidopsis thaliana columbia
gggcggggcacgcgtccggatacttgcaacctctctaaactctcaatttttttaatcgataaccgtaacaatggggtgcgaccgtaaaagtgaagaaagctttctgaggaagaaaaccacctggtgccccaaaaaccaaatcggtttcgaaatcgatgaaagccggtcttcaattcccagtgggaagaatcactcgtttcctgaagaaaggacgatacgctcagagacttggtggtggtgctccggtttacatggccgccgttcttgaatacctcgccgcagaagttcttgagcttgctggtaacgctgcgagagatagcagggaatcaaggataatttctaggcatcttgttctcgcgatacggaacgatgatagatcggggggacttctgtgtggagagacaatacgttacggcggagctttgcctaacatcaactctg

SEQ ID NO: 151839 - DNA, 419 bp, Arabidopsis thaliana columbia
ctctggtagccatggcttcggctactttctctgtggccaaaccatctcttcagggggtttgggagttctcaggacttcgaaactcctctgctcttccctttgccaagagatcttcttccgatgagtttgtttccttcgtcagtttccaaacttctgcaatgagaagcaatggtggatacaggaaaggggtgaccgaggccaagataaaggtagccatcaatgggttcggtaggattggtaggaacttcttgaggtgttggcatggtcgtaaggactctcctcttgatgtcggtgtcattaacgacactggtggtgttaaacaagcatcacatctcctcaaatacgactcaactcttggaatctttgacgctgatgtcaaaccttcaagagactcagctctctctgttgatggaaagatc

SEQ ID NO: 151840 - DNA, 412 bp, Arabidopsis thaliana columbia
caaaccacttgcaaaattcgaatcagatcttctcttcaatcgaaaaaagagaaaggatttgctctagattgttgaatcgaaaatgtcgacaagggaagagaatgtttacatggcgaaattagccgaacaagctgaacgttacgaagaaatggttgaattcatggagaaagttgcgaaaactgttgatgttgaggaactttcagttgaagagaggaatcttctctctgttgcttacaagaacgtgattggagcgagaagagcttcgtggagaatcatttcttcgattgagcagaaagaagagagcaaagggaacgaagatcatgttgctattatcaaggattacagaggaaagattgaatccgagcttagcaaaatctgtgatgggattttgaatgttcttgaagctcatctt

SEQ ID NO: 151841 - DNA, 415 bp, Arabidopsis thaliana columbia
aaaaagagagagagagagagagaggtttgaattttggagatgaagttcgacttcatcattggagctcttgtaatggtatctggtgtagctcttttaatggtgtccggtgagatttcaactgaagaaatttcaccggcgattgagcattcgtcgtctctgccgcaatcagaaaccgaaatgtctccatctccgacgatgtctaatgattacgattatccgtcatcgtctcaacttacggaatccaatgatctcaactacactgatagtaccagaccgggaggcgaagaagcatccgtaggtggtgaaaatggcggaggaggaggaaagaaaaccggaatcgctgttgttggatcgattgcagccgcgagtatggttggattcggtggttatgtgttgaagaaacggcgagagaaca

SEQ ID NO: 151842 - DNA, 416 bp, Arabidopsis thaliana columbia
  unsure (1)..(416): unsure at all n locations
tcgcggacgcgtgggcggacgcgtggggaatctcaatctttactacgaatcactttgtggcggttgtcaggaattcatcgtctatnacctaggtaaaatctttgactacgatctctacacaatcactgatctcaagctgtttccatttggtaatgccgaactctccgataatctgactgtcacttgccagcatggtgaagaggaatgcaaactaaacgcccttgaagcttgcgcattaagaacttggcccgatcagaaatcacaatactcgttcatacggtgcgtcgaaagcgatacgaaaggctgggaatcatgtgttaaaaactctggacgtgagaaagcaatcaatgattgttacaatggtgatctttctagaaagctgatacttgggtacgcaaccaaaaccaagaatttga

SEQ ID NO: 151843 - DNA, 351 bp, Arabidopsis thaliana columbia
agcaaagcaaaattcgaagagacacaattaaaccttcgtttgtgtctcaaaatgtacgaagttttgagtcagtagagaaatggcgggaatcgtgacagagccgtggtcagtagctgagaacggaaacccaagcataacggcgaaaggatcgagcagagaactaagacttggaagaaccgctcacaacatgtcttcttcttctttgaggaaaaaatcagaccttcgagtgattcagaaggttccatacaaaggtcttaaagattttctctctaatctccaagaagtcattctcggaacaaaggttggcattcttttttcgggcattcctggcggcattatttgcacctattg

SEQ ID NO: 151844 - DNA, 418 bp, Arabidopsis thaliana columbia
gctctacctaaccagcaaaccgtggattaccctagcttcaagctcgttatcgttggcgatggaggcacagggaagaccacatttgtaaagagacatcttactggagagtttgagaagaagtatgaacccactattggtgttgaggttcatcctcttgatttcttcactaactgtggcaagatccgtttctactgttgggatactgctggccaagagaaatttggtggtcttagggatggttactacatccatggacaatgtgctatcatcatgtttgatgtcacagcacgactgacatacaagaatgttccaacatggcaccgtgatctttgcagggtttgtgaaaacatcccaattgttctttgtgggaataaagttgatgtgaagaacaagcaagtcaaggccaagcaggtaacat

SEQ ID NO: 151845 - DNA, 329 bp, Arabidopsis thaliana columbia
  unsure (1)..(329): unsure at all n locations
aaattatttgacaaattggagaatgttgtgattctggatgatgacgttgtaggccagcgagacttatctcccctttgggacctttatatggaagggaaagtgaatggcgcttttaagtcgtgcactgtgagaatgggtcagctaaggagtctcaagagaggaaattttgataccaatgcttgtctctggatgtctggtttgaatgtncgtgatcttgctagatggagggcattgggtgtttcagaaacctatcaaaaatattataaagagatgagttgttgagatgagtcgagcgaagcaattgcatttcaagcaagcttgctcacatt

SEQ ID NO: 151846 - DNA, 415 bp, Arabidopsis thaliana columbia
cgccacctctgtcgcaaatacattcgttaattccctcagaagtctcaattccaagacatatccggctaacgttccgatcaccgttgaccacgatcttctattcaccgttggattaggaatcaaccgatgtcacagctgtaaagccggaaacttctcacgagtcgtcgccgccataaacaacattacattcaagatgcctaaaacggctctgcttcaagcgcattactttaacctaaccggaatatacacaaccgattttcctgcaaaaccaagacgggttttcgattttaccggaaaaccgccttccaatttagcaaccatgaaggctacaaagctttacaagcttccatataattcgacggtgcaagttgttttgcaagacaccggaaatgtagcgccggagaatcatccgatt

SEQ ID NO: 151847 - DNA, 446 bp, Arabidopsis thaliana columbia
  unsure (1)..(446): unsure at all n locations
ccggncggattcccgggggggccacgcgtccggccgggtatggtatctcgcaccactgatcagcttcatcctcttctcaaagtcccaggtaacgaggagcataaacaaattatgggcattggttttcagcaggaaggaaacaacaatattatggtgggcaatcaattttctggtcagttccaggatcagattcctgcatctcatgcatttccccaggaccagcagagacaggttgacgcctttggccaaggaagcatgtcagacaacatttaccgtggattcttgatgcagcggccagactggaaccccaattgtactcagataggagttaccgcacagcccctgttgagcaccgggcctttgttaaatcagaattggcaatttaggagcatgtgggcaaacacaaacggtgtcggatgtacaagccaaggcagtcaaaccgggac

SEQ ID NO: 151848 - DNA, 330 bp, Arabidopsis thaliana columbia
gggttggttgttttttttttaaaaaggaagggatttgcaaattgcaagtccacatctaaataaatggcgcaaaaaatgtttgttgcgttctcaaaacaatatttttagagggaaacttttgccaaatacaacttaagcaaaattgtttttttttaaataccaactttttcatttttttaaaggttccactggaaaagcaaagggctttaaaattgcttaatgtgctcatttggcactttttttcagcgttggggccttaatgattctcataaacttcgagctttatgggagcacccccccacctaaataactcttcattcattttgtctt

SEQ ID NO: 151849 - DNA, 375 bp, Arabidopsis thaliana columbia
gagagatttaatacaaaagaaagagaaaaaagaaagatatggcaggactcatcaacaagatcggagacgcactccacattggaggaggcaacaaggaaggtgagcacaagaaggaagaggaacacaagaaacacgttgacgagcacaagagtggtgagcacaaagaaggtattgttgacaagatcaaagacaagatccacggtggtgaaggtaaaagccacgacggagaaggcaaaagccacgacggtgagaagaaaaagaagaaggacaagaaggagaagaaacatcatgatgatggtcaccacagcagcagcagtgacagcgacagcgattaaagtgaggaagtgaggaggatcgcttgaataaaacagatct

SEQ ID NO: 151850 - DNA, 338 bp, Arabidopsis thaliana columbia
cttaagctttatttctccgttttcgttttgtctttctttatcgtctcggtttcgtcggctgatgtcaacgacggcgatgatctcgtgatccgtcaggtggttggtggagccgagcctcaggttttgacctcagaggatcacttttctctcttcaagcggaagttcgggaaggtctactctttcaacgaggagcatgactatagattctcggttttcaaagcgaatctcatgcgagcgaggcgtcaccagaagttggatccgccggcgactcatggtgttacgcattttttatatctgagggggggctgagttccctaagaagcacatattttgttatg

SEQ ID NO: 151851 - DNA, 419 bp, Arabidopsis thaliana columbia
cggacgcgtgggtaagacagagtcagaatcaatggcgaaatctccagaaacagagcatccgaacaaagtctttggttggggtgctagagacaaatccggtgttctctctccttttcacttctctagaagagacaatggtgaaaatgatgtgacagtgaagatcttgttctgtggagtttgccacactgatttacacaccatcaaaaacgactggggatactcgtattacccagtagttccagggcatgaaatcgttgggatcgctacaaaagttggtaagaacgtgactaaattcaaagaaggagatcgtgtcggagtaggagtgatcagtggctcgtgccaatcttgcgaatcttgtgaccaagatcttgaaaactactgtcctcaaatgtctttcacatacaatgcgattggatccg

SEQ ID NO: 151852 - DNA, 418 bp, Arabidopsis thaliana columbia
ggcagatgaggaatccatgggcggatggtccataatacataacccagtgcccaatccaacgaggagggagttacacctacaggtttaccatggaagaccaagaaggtacattgtggtggcatgcccacagtagatggctgcgagccaccgtgtatggtgctctcattatccgccctccgctctcttctcctcattacccttttccagttattcccaagagagagattaccctcctcttaggagagtggtgggacagaaatcccatggatgtcctcaacttagcccagttcactggagcagcaccaaacatctcagacgcctttaccatcaatggtcagcctggtgatctctacagatgctccagccaagaaactttaagatttctagtggggtcaggagagatagtcctcctcagggt

SEQ ID NO: 151853 - DNA, 412 bp, Arabidopsis thaliana columbia
aacaaaaccaaagcaaaaaatggtgaagatcgaagttggaagtgtgggagactcattcagtgtatcatctcttaaagcttacttgtctgagttcatcgcaactcttctcttcgtattcgcaggcgttggctctgctgttgcgtttgccaaactaacctctgatggagccttggacccagctggtcttgtagcaattgcaattgctcacgcgtttgctcttttcgttggagtttccattgcggctaacatttctggtggtcaccttaacccagccgtgactcttggccttgccatcggcggaaacataacactcatcacaggtttcttctattggattgctcagtgtcttggctccatcgtcgcttgtcttctcctcgtctttgttactaatggcaagagcgtaccgacccac

SEQ ID NO: 151854 - DNA, 402 bp, Arabidopsis thaliana columbia
gcagcgcgggcctgatctcagttgatctagcccgcgacttgctccaagttcatgccaattcaaatgcaatcatcgtcagcacggagatcataacgcctaattactatcaaggcaacgagagagccatgttgttacccaattgtctcttccgcatgggtgcggcagccatacacatgtcaaaccgccggtctgaccggtggcgagccaaatacaagctttcccacctcgtccggacacaccgtggcgctgacgacaagtctttctactgtgtctacgaacaggaagacaaagaaggacacgttggcatcaacttgtccaaagatctcatggccatcgccggtgaagccctcaaggcaaaccataccacaataggtcctttggtcctaccggcgtcagaacaac

SEQ ID NO: 151855 - DNA, 384 bp, Arabidopsis thaliana columbia
gattcatcccggagaaacaagaacgatgacaacacataaacatagaagaacagagaaaaatctctgttttaagcaatactacaaatggatcctctgttttatcctcactctctatttttttgcttccttctttgtcgaccatgatcaagatcatagatcttctacttccatatcaaagcatcttcttactaaccataaacctaagcttttcgcttctcgtgccatgtttgaatctaaaatccatgatcacaaacttgggtttacctctcaacaacctaacatcaaaacagacgtattcaacaatttgaaaatctacgtctatgacttaccttcaaagttcaacaaagactgggtagccaatgatagatgcaccaaccacctctt

SEQ ID NO: 151856 - DNA, 402 bp, Arabidopsis thaliana columbia
gtttgattcaaaaaatctccttcctcttcttactttatctcgtattatccattaatgcgtgaccctttagtctctccatcttccgcttcaacaatcagaatttgggtttggcgaaagatgctaactttgaaagtgagactaatcgtttgagtaaaaaacatgcgaattttgtgtgatgcttgtgagagcgccgccgctatcgtcttttgcgccgccgacgaagctgccctctgttgctcctgcgacgaaaaagttcataagtgcaacaagctggctagtcggcatctttgtgtaggctgagctgatccgagtaatgcaccaagctgtgacatatgcgaaaatgcacccgcattcttttactgtgagatagatggttgttccctttgtctacaatgtgatatg

SEQ ID NO: 151857 - DNA, 412 bp, Arabidopsis thaliana columbia
caatttctctgaatgagaaatcggtgcttctgctgttaaggtcttctcttgggttgcgaagcacagattggcctgtgaaaggcaatccttgtctgaactggaacggcatcaaatgtgatcagaatggtagagtaactaagatcaacatttcagggttcaaaaggacaaggattgggaatcaaaacccggaattctcagttggttctctcgtcaatctcacccgtctagcttccttcaacgcctcaaggttctatcttccaggtccaatcccggctttgtttggatcgagtctgttgactttagaggtgttggaccttagctcctgttcaatcacaggaaccatacctgaaagtttgactcggttatcacatctcaaagttctcgatctttcaaagaatgcgatcaatgggga

SEQ ID NO: 151858 - DNA, 414 bp, Arabidopsis thaliana columbia
caaagctttttgcttttttgtcttaatgggtttcatctcttgcatctcatttccgaggatcaattcaagaattctatcgactcaccacttttccaagcactcgacttcagcgtcttcttcatattcacttaagtttgctttgagacgtcaggaggataaacccaaagtctcgttttttcttccattaacgtcttcgttaatggcgacccctattcaagcctcttcttcctccaccattggtgagaccagtgatggcttgaaggtccagtctcatgtttcaattggagcaaacgatctgctgattgttggaccgggtgttcttggacgcttagttgcagaacagtggagacaggaacatccagagtctcaaatctttgggcagacagtaacaacaaatcatcatggtgagttggg

SEQ ID NO: 151859 - DNA, 414 bp, Arabidopsis thaliana columbia
gtttcgatcccgacaatgaccttgtcaaagttggtattgcaaaccaaacaacgatggggaagggagaaacagaggagataggaagattactcgagacaacaatgatgcgcaagtatggagtggaaaatgtaagcggacatttcatcagcttcaacacaatatgcgacgctactcaagagcgacaagacgcaatctatgagctagtggaagagaagattgacctcatgctagtggttggcggatggaattcaagtaacacctctcaccttcaggaaatctcagaggcacggggaatcccatcttactggatcgatagtgagaaacggataggacctgggaataaaatagcctataagctccactatggagaactggtcgagaaggaaaactttctcccaaagggaccaataacaa

SEQ ID NO: 151860 - DNA, 418 bp, Arabidopsis thaliana columbia
gcaattgcaaatagctcaataggagtttctctactgcggagattagaagagaaaaagaaggaagccgtagagaattcttcaagattcaagtctaaagctcaggaagctagaaacgacagcaagtggtatggaaaagaacgtccccgttggtttggtccaatcccatatgattatcctccataccttacaggagaacttccaggggattatggtttcgacattgcaggacttggcaaagatcgtttgacctttgataagtatttcaactttgaaatacttcatgctcgttgggccatgcttgcagcattgggtgctctaatcccggaagtatttgatctcactggaactttccattttgctgaacccgaatggtggcgagtcgggtactccaagcttcagggagagacattggagtacc

SEQ ID NO: 151861 - DNA, 409 bp, Arabidopsis thaliana columbia
aagagatctatagagagagagagagtagagatataaaggtgatgaatagaggtgtgtgggagagttcgccggttcagcagctgatggcagccggaaaccctaattggtggaacgtaagcggcggcatgaggccaccaccaccgttgatgggtcatcagcaggcgccgttgccaccacatatgactcctaataacaattatctccgaccacggatgatgcccactcccttcccgcacttcttgccatctccggcgacttcttcttcttcctcttcttcttcaccgtctttgcctaataacccggatctctcttcttggcttgaaagcaatgatctccctcctgagtcttggagccttagccaacttcttttgggtggattgatgatgggagaggaagagagattggagat

SEQ ID NO: 151862 - DNA, 417 bp, Arabidopsis thaliana columbia
  unsure (1)..(417): unsure at all n locations
cggccggaancccggggcgacgacgcgtccgaacaaatctagcggtcaacactatcctttctacattttccaacgaggcctcaaacgcactctcgtctttcaccgccgctatcccctctgctcctaagccactactccctcacggctctgcttctccgcggttctctcggcttctccaggaaagttggcggcggcagagcagtgtgtcgtgcagcggctacggtggacacaaacaacatgccgatgaccggagtcggttccagcctttcgaagaggtgaagaaagccgatctgccatccaatcacatctcatgcctcttggctgccagagttgccgccctgcgaggcagtcattaatgagcaaatcaatgtggaatacaacgctctatgtgaccattcaatgacgctactttgcaga

SEQ ID NO: 151863 - DNA, 328 bp, Arabidopsis thaliana columbia
cttcttctaccaatctaattcctctcttcatcttcttgtgttgtgacacatactcgtggggggcttgagatatggccgccggattttccaccgtcagtgccatcaacagagctccgttgagcttgaacggctcatgatcacgagctgtatcatccccagcattcaaccttcttgggaaagaaagttgtaactgtttcgtgattctcacagagcaacaagaagagcaacggatcattcaaggtgtaggctgtgaaagaagacaaacaaaccgatggacacagattgataggtcttgcctacggcggcttctgatgatcaacaagacatc

SEQ ID NO: 151864 - DNA, 313 bp, Arabidopsis thaliana columbia
gaagaaaaaagggtcgagtttcatttattatatctttctctgtgacactcttgagggtctacaatggctacactgcccaacattgtcccaactagtgccagctcgatcaactaaatgcgctctgaaccatgccaaatcatcaagagcgaggatggtcgcatcgagttcttggaccaccatgcaccctagctactttgctgctgctttgcctttgagcgtctcgtcattgagcctcagggtcttttcattgcccactttcttgaacgccggcaaactcacgtttgttttttacgggagggggtttattgtaaaa

SEQ ID NO: 151865 - DNA, 290 bp, Arabidopsis thaliana columbia
gcgcttctgagatttttccagaattcaatctttcgagtgttgttcaattcagcagtggcggtttcgtctgcactcaagctctcatcatcgtcatctccttgcatcatcaaacattaaggttcttcatcaagtattgacataaaactctctaagtacacctcacttactaaacccattcttcaacttgatgataaaagtcgacttcttcttgaccaacaagtttcacattctctatagctaaggccttacagaaaacgtgtcacttcgaaaacatgttcttaagtttgcca

SEQ ID NO: 151866 - DNA, 416 bp, Arabidopsis thaliana columbia
cggacgcgtgggaaaaaaacagagcacaatgactagatttgcggtattgccactctgtgttcttcttctcgttctcttgttcctctgcactgagtcgttggctaagtcggaggagtctgaagaatacgacgtcgctgtgccttcatgttgcgggttttcgtctcctcttctgattaagaaagatcaatggaaaccaatcttcgagacgaagtttggacagatctcaaccgttcaaatcggcaatggatgcggtggaatgggaccttacaagatacattccataacgttggagccaaacacaattttgctccctcttcttcttcattccgacatggtcttcttcgttgactctggaagtgggattctgaattgggttgacgaggaagcgaagagtaccgagatcagactaggagacg

SEQ ID NO: 151867 - DNA, 411 bp, Arabidopsis thaliana columbia
aaagaaaacaatggagaagaacaacaagttagcggtttgtcctcgtccatgggctgtgccacggcgcttggtgttggtacaaggtgaaaacgcatctggaggctgtaggtcactgtgtgaccgcggtggatctagctgcatccggtataaatatgactagattggaagagattcagactttgaaggattactgcaaacctttgcttgagttactgaactcacttggctcggatgacgataaggtgattcttgttgcgcatagtatgggaggaatacctgctgctctcgcttctgacatattccctagtaagattgctactattgttttcttgacagcttttatgcccgacacatgaaacctacctgcttatgtttaccaaaagctaatcagaagcgttccacaagaaggat

SEQ ID NO: 151868 - DNA, 416 bp, Arabidopsis thaliana columbia
ctcatcttcaagccatctccgatcatcatcagacaatggcagcagctatggcaacagcaaccaagtgcatgtctctaaacccatctcctcctaaactccaaaaccaaaccaaatccaaaccattcatctccctaccaaccccaccaaaaccaaacgtctctctcgccgtcacaagcaccgccctagccggagccgtcttctcttccctcagctactctgagccagctttagccatccaacagatcgctcagctcgctgcagcaaacgccagtagcgacaaccgtggcttagctcttctgcttcccatcgtcccagccattgcatgggtcctttacaacatcctccagccagctattaaccaggtcaacaagatgcgtgagagtaaaggtatcgttgttggtctaggtattggtggg

SEQ ID NO: 151869 - DNA, 421 bp, Arabidopsis thaliana columbia
gtacgtgaaaatatataaataaaaaatcaataaacgaaaatctttcctttttctctcacacatttttcttcatctccactcgaatccggaagaagaacaaaaaccaaaaaaaaaacccagaaaatcagagaaacataagcgaaccgacagagaaaaaaaatgtcttcgccaagcaaacgcagagaaatggatatgatgaagctgatgatgagcgattataaagtggaaacgatcaacgatggcatgcaagaattctatgttgaattcaatggtcccaaagacagtctctatcaaggaggtgtgtggaagataagagttgagcttccagatgcttatccttataaatctccatctggtggtttcattactaaaatttatcatcctaatgttgatgaactgtcgggttctgtttgtttagatg

SEQ ID NO: 151870 - DNA, 297 bp, Arabidopsis thaliana columbia
gtccctataagcacgaaactcattgactcataccgtacaaagcacactatcactgcgtgcgggtggatccacccatccagctggtttttctacttgtatctccgacttaatctatgagtccactcaccctgcccccgctgcctcaaactccacaggtctggatgatgatttgttgaatgcttgcgctgcaaacctcggtgatgattgacttcttgtaaacaatgccccagcaatgagtatggtcaatgaattcattgctggagtcggaacaaattcaccggtttttcattttggaga

SEQ ID NO: 151871 - DNA, 435 bp, Arabidopsis thaliana columbia
  unsure (1)..(435): unsure at all n locations
gaanncccgggggggggcacgcgtccgcttcttctccaatcaatcttatagaaaatatttttggcaacaaaccctaaagtctggttggacatgaccgtcggtggcaaatccacctttcgtatcgtgatggagctttacgccgacacaacaccagaaaccgccgagaatttcagagcactctgtaccggagagagaggaatcggtaaacaaggtaagccattacactacaaaggatcaagcttttaccgagtgattcctaaattcatgtgtcaaggaggtgatttcacagccgggaatggtacctgaggtgaatctatctatggatcggaggtcaaagactagaactttatcaataaacatacaggaccaggtattttgtctatggctaacgctggtgcgaacacgaatggatcttatttttttatttttacttat

SEQ ID NO: 151872 - DNA, 449 bp, Arabidopsis thaliana columbia
  unsure (1)..(449): unsure at all n locations
ggaannncccggggcgagcgccacgcgtnccgacaaaaacacttnttggttttnttcttcttcttttcttctaaatcataanaaacacaagttttgggcagatcaactgttttcttcgttacctgttcttcaatggcgtcacttcactgattctattcctatcaaacccacttacccattcccttttatatgcacaaattctcataaagttttcaattttattccatttttctcggaagccatggaagctgctaatgagcctgttaatggcggatccgtacagatccgaacagagaacaacgaaagacgaaagcttcctaatttcttacaaagcgtcaacatgaaatacgtcaagctaggttatcattacctcattactcatctcttcaagctctgtttggttccattaatggcggttttagtcacagagatctctcgattaacaacag

SEQ ID NO: 151873 - DNA, 414 bp, Arabidopsis thaliana columbia
gaaatttttcttagagaagaagatgaagaagcaaaatggccacaagcgcatcagctgtgctctcaccaaccacattctccactgcaatctcccacaaaaaccctaactccatctcattccatggccttcgtcccctccgtctaggtggctcctcctccgccctacccaaactatcaaccaccgggagaaaatcctcctccgctgtcgtgagagctgagctaagcccttccatcgtcataagtctcagcacaggtctctccctcttcctcggccgtttcgtcttcttcaacttccagagagagaacgtatcaaaacagggcttaccggagcagaacggaaaaacccatttcgaagctggagatgatcgtgctaaggagtacgtcagtcctcttgaaatcgaacgatccaattgga

SEQ ID NO: 151874 - DNA, 406 bp, Arabidopsis thaliana columbia
ctttgctctctctctctcaacgcggttcagatccgagtttgggagattcaagctccgtgaaaaaagccctttactctcgcttaccaactttgctccagcatggcaggatctgcaccagaaggcacacagtttgatgcacgtcagtttgaccagaaactcaatgaagtacttgagggacaagatgagttcttcacatcctatgatgatgttcatgagagctttgatgccatgggtcttcaagagaaccttctcaggggtatttatgcttatggttttgagaagccttctgctattcagcaaagaggaatcgtccccttctgtaagggtcttgatgtgattcaacaggctcagtctggtactgggaaaacagcaactttctgctctggtgttttgcagcagctggact

SEQ ID NO: 151875 - DNA, 412 bp, Arabidopsis thaliana columbia
gaatggataaagaaagcactagagacgatctatgagttcaatgtgatgaaagttaaaggagggacacgaggcgcagtgaacggaatgtcaacggaaggaaaagtggatacaaattcgttggtttcaaaggaagtttgggctggtactacttactctgttgcagcttgtatgattcaagaagggcaaagagaaaaagggtttcagacagcaagtggaatctacgaggctatttggtctgatcgtggtctcagttgctcgtttcagacaccagaagcgtggaacatgaatgatgaatacagatctctgtgttatatgagacctcttgctatatgggctatacaatgggcattgacacgaacacaatcttttggagaagagaagctaaagttagtggcaggagatgaagaagaag

SEQ ID NO: 151876 - DNA, 243 bp, Arabidopsis thaliana columbia
aaatatctacattaccaaaaatgttcacaaaatctatccttttggcttctcttcttatcatcatcctcggctctgcaactgaatcagctcgtcaaaagagcgggaacgatggtttaggattcggtggtgtacccggatccggatttatacccgggtttggaaacgggtttccggggactggagttggtggtggatacggcggagggtttggtggtcctagcggagggtgtggggaaggtggtg

SEQ ID NO: 151877 - DNA, 416 bp, Arabidopsis thaliana columbia
gcgataatggccatggcagagctctcatcccccaaaacgacgtcgccttttctcaactcttcgtctcggcttcgtctctcttcaaaattgcacctttcaaaccactttcgccatcttcttcttccacctctccacacaacaactcccaactccaaaatctcttgctccgtttctcaaaatagccaagctcctgttgctgtgcaagaaaatggattggtgaagacgaagaaagagtgttatggagtgttctgcctcacctatgatcttaaagctgaagaagagacaagatcatggaagaagttaattaatattgcagtttcaggtgctgcaggaatgatttctaaccatcttctcttcaaacttgcttcaggggaagtatttggtccagatcaacccattgcattgaaactgctagg

SEQ ID NO: 151878 - DNA, 414 bp, Arabidopsis thaliana columbia
aaaaaaagaagagaaaaggagttatatatggattgtattttacttattctgactactcttgttgccattttcatcgtcaagattgttctcctagtcactaaacctaacaaaaaccttccaccgtcgccaaatatatgttttccgatcatcggacaccttcacctcctcaaaaagccactgctacaccggactctcagccatctctcccactccctcggccccgtcttttctctacgcctcggctctcgccttgccgttatcatctcatctccaacggcagccgaagaatgcttcttgacgaaaaacgacatcgttttagcaaatcggcctcgtttcatcatgggcaagtatgtggcttatgactacacctccatggttacggctccttacggtgaccactggcgaaacctccgt

SEQ ID NO: 151879 - DNA, 416 bp, Arabidopsis thaliana columbia
gcgagatgaggccggagatagttctgttcggcgactcgatcacggcgcagtcttttaggtccggcggttggggatctgctcttgccgacgcttactctcgcaaggctgatgttgtggttcgaggctacggcggctacaacacccgatgggctctcttcttgcttcatcacatcttccctctcggctcttcggctcctcctgttgctacgacgatattcttcggtgcaaacgatgcagctctcaaaggaagaaccagtgatagacaacatgtgccggtggaagagtacacagataatgtcagaaagattgttcagcatttgaagaaatgttcacctacaatgctaattgtgcttataactccaccaccaattgatgaagctggacgtcaaagttatgcagaatcaatctacggtgag

SEQ ID NO: 151880 - DNA, 417 bp, Arabidopsis thaliana columbia
gcgccatcggagctgccaagaagaaacttgactaagatgaaccatcacaaagcttcgagagcgtcgctctcatcatcggcgttactggaatcgtcggaaacagcttggcggagattctccctctttccgacacacccggtggtccatggaaagtctacggcgtcgctcgtcgtcctcgtcctacctggaacgccgatcatccgatcgattacatccagtgcgatgtctccgacgccgaagacacaagatccaagctttcccctttaaccgatgtcacacatgtcttctacgtcacctggaccaatcgtgaatcggaaagtgaaaactgtgaagcaaatggctcaatgctccgtaacgttctccaagcgattatcccatacgcgccaaatctccgacatgtttgtctccagacaggga

SEQ ID NO: 151881 - DNA, 415 bp, Arabidopsis thaliana columbia
gttgatcgacggtggtgaatcttagacttttttgctgcgaagctcgtcgctttgttgcttcttgccttgcttttcaccaccagcgtcttagccgatgctgatgagccggaggtttctgaggctgccggatccgatggctcttccaagatccacctggatcagcttaatgccaagatccgtgccctagaatctcaaatcgatgagaaaacccgggaagttcagggcaaagacgaggtagtagcagagaaggagaaactactcaaagaaagggaagacacgattgcttccttgcagactgaagtctcatcactacagaaaaagggatcattagattctgcaaaacagttgggaaaggctcaagcacgagctgatgaattagagaagcaggttgaggttctcaagaactttctggagc

SEQ ID NO: 151882 - DNA, 415 bp, Arabidopsis thaliana columbia
caacagttcggtaactacgacaaagaaaaacaggcgggaaaccaaatcaatggaggattcttagctttttctctgtaactcccattatcgtatcttcagcttagtgagatagatggaggaaattggcggcggaagcatcagcagcaatggtgtggtgatgaagaaggaaggattagggttttctaaaaggggaattaaaatagagaatccttttgcttttaaggctcttcaagtcttcactggatttggcgttggttgtggagttggtattggtagtggtgcacctttgaatctcggtagtattccaatggtgggggaaattatgaattcagctagaggagcaaccaatgtattttcgggtgccacacaccacgtgaatggcgctgtacagtatagacaaacttgttcctgctct

SEQ ID NO: 151883 - DNA, 357 bp, Arabidopsis thaliana columbia
ggcccgataagcaccatgctcattgacttataccggacaaagcacactatcagtgggtgtacagggtccaccggtccagctgttgtagctactgggatctccgacttaatctatgagtgcactcagcctgccccccctgcctcaaactccagtggtctggatgatgatttggtgaatgcttggtctgcaaaccttggtgatgatggtcttgttgcaaacaatgccccagcaacgaatacggtcaatgaattcattgctggagtcggaacagatgcaccggatcatgaggaggaggaggtgctttctatacctactttcgtgattgattacatgcgggcttaaactcttttagaaact

SEQ ID NO: 151884 - DNA, 413 bp, Arabidopsis thaliana columbia
ggcccgataagcgcgaagctcattgacacataccgtacaaagcacaatatcactgcatctactgggtccaccgatccagctgttgttgctactgggatctcggacttaatctatgagtccactcagcctgcccccgctgcctcaaactccagtggtctggatgatgatttggtgaatgcttgggctgcaaaccttggtgatgatggtcttcttggaaacaatgccccagcaatgagtagggtcaatgaattcattgctggagtcggaacagatgcaccggatgttgaggaggagaatgtcttctctagaccttcggttgggtatgatgacatgtgggctaaaactcttttagaaacttcagaattggaggaagaagatgcgagatcaggttcatcgtctccagattctgctgg

SEQ ID NO: 151885 - DNA, 401 bp, Arabidopsis thaliana columbia
ggcgataagagagagaaagaggagaaagagtgagccagatcttcatcgtcgtggttcgggtgtcttcctcgatctctcgatcttctgcttttgcttttccgattaagatcgtagaccatggccgatgctgatgacattcaacctattgtctgtgacaatggtactggaatggttaaggctggattcgctggagatgatgctcccagagcggttttccccagtgttgttggtcgacctagacatcatggtgtcatggttgggatgaatcagaaagatgcgtatgttggtgatgaagcacggggcaaaagaggtattctcacattgaaataccctattgagcatggtgttgttagcaactgtgatgacatggagaagatttggcatcacactttctacaatga

SEQ ID NO: 151886 - DNA, 412 bp, Arabidopsis thaliana columbia
cttgttccctcccaattatctgaactatcttcttttatcaaaaactatattcacaggctgccgtgtaccttctccatccaaagatggcaactatagctactggtcttaacattgcaacccagcgtgtcttcgtcaccagcgagaatcggccagtttgtctcgccggtccggtccatttgaacaattcgtggaatcttgggtcaagaacaactaaccggatgatgaaacttcagccgattaaagcagcaccggaaggagggatatcggacgtagtggagaaaagcattaaggaagctgaggagacttgtgcgggcgatcctgtgagtggagagtgtgtagctgcgtgggacgaggttgaagaacttagcgcagcagctagccatgctagagacaagaagaaggctgatggttc

SEQ ID NO: 151887 - DNA, 415 bp, Arabidopsis thaliana columbia
ggaaggaaggagatgggaggggtgacgtcatcggtggcggcgaagtttgccttgttgccgccgagtccaccgtgttacaaggtggtgaccgacgagctcaccggactgttgcttctcagccctttcccccaccgcgaaaacgtagaaatcgtaaagcttcggaccaggagaggcacagagatcgtgggcatgtacgtgaggcatccgatggctacctccacgctcctctactcccatggcaacgccgccgatctgggacagatgtatgagctcttcattgagcttagcatccatctcaagggtaatcttatgggatacgattactccgggtatggacaatctactggaaagccgagtgagcataacacgtatgctgatatcgaagcttgttataagtgtcttgaagaaacctttg

SEQ ID NO: 151888 - DNA, 416 bp, Arabidopsis thaliana columbia
cgccgacggagacaccggctttggcggcaccaccgccaccgtcaaactctgcaagcttttcgttgaaagaggcgccgctggggtccacatcgaggaccagtcctccgtcaccaagaagtgtggccacatggccggaaaggtcctcgtggcagtcagcgaacacatcaaccgccttgtcgcggctcggctccagttcgacgtgatgggtacagagaccgtccttgttgctagaacagatgcggtcgcagctactctgatccagtcgaacattgacgcgagggaccaccagttcatcctcggtgccactaacccgagccttagaggcaagagtttgtcctcgcttctggctgagggaatgactgtaggcaagaatggtccggcgttgcaatccattgaagatcagtggcttggctcgg

SEQ ID NO: 151889 - DNA, 419 bp, Arabidopsis thaliana columbia
cttcgtcactgatctcccacgacgatcttccaaactcatttctctacgttcatcgatgtctctctttctcgtttgctctacgaaaatcagccatggatgaagagtacgaggttattgttctcggcaccggtctcaaggagtgtatcctcagcggtctcctttccgtcgatggtgtcaaggtgcttcacatggacaggaatgactactatggtggagaatcaacttcccttaatctcaatcagctttggaagaagttcaggggagaagagaaggctcctgagcatttaggcgctagccgggattacaatgttgacatgatgcctaagtttatgatgggaaatggcaagcttgttcgtacccttattcatacagatgttacaaagtaattgttcttcaaagctgttgatggaagctatgtt

SEQ ID NO: 151890 - DNA, 416 bp, Arabidopsis thaliana columbia
ctcgaaacaagtagatccacgattcgttgctgcgatcggcgttattatcgtcagctctctcgtttctgttctgtggttcgatattgctgagtttctaggctaatcttacgaatctgtgaaagtttttgagagatttggcttctgtagctcactcctgcttgatttagagcttagctaagatgacgaagaactacccaaccgtgagcgaagattacaagaaggctgttgagaagtgcaggaggaagctcagaggtttgatcgctgagaagaactgtgcacccatcatggtccgactcgcatggcactctgctggaactttctattgtcaatcaaggactggaggtccattcggaacaatgaggtttgacgctgagcaagctcatggagccaacagtggtatccacattgctcttagg

SEQ ID NO: 151891 - DNA, 416 bp, Arabidopsis thaliana columbia
gccaaatctgccacgggattctgacgtcatacgaaattgatgttgtcattgatgacgttatgagattcttgtcggagactcactcggagattgtaatcctggagataaggactgagtttggacacaaagatccttcggggttcgagacttacttggcagacaagttaggtcaattcttgatacatcaagatgatagcttgttcaacaagccggtatcagagattttgccgaaaagggttatatgcatctggaaacctagagagtctccaaagccgagccgtggtggaattctctggaactcagattatctaaaagataattggatcgatacggatcttccatggacgaaatttcagagcaatttgaagcatctgagtgagcagcagccgacatcttctagaaaattcttttaccgg

SEQ ID NO: 151892 - DNA, 281 bp, Arabidopsis thaliana columbia
gaaaaagccctttactctcgcttaccaactttgcttcagcatggcaggatctgcaccagaaggcacacagtttgatgcacgtcaatttgaccagaaactcaatgaaatacttgagggacaagatgagttcttcacatcctatgatgatgttcatgagagctttgatgccatgggtcttcaagagaaccttctcaggggtgggggatgcttatggttttgagaagccctctgctatttattaatagaggaatcgtccccttctgtaagggccttgatgtgat

SEQ ID NO: 151893 - DNA, 412 bp, Arabidopsis thaliana columbia
atcattaccaaatcatcaacttaatcgtttctctcaaatttagggttttctcttttctcgaaagtcttgcggttttctgaatcatctctatctggtttgagggtttcgtttgatatctggagaaaggggtttctggaaacaaggagttcataattcgcgatcttgatctatcgatcttcatttatatataaaagcgtgaatgagattatgatggagtcgaaaggtggtaaaaagaagtccagcagtagtagttccttattttacgaagctcccctcggttacagcattgaagacgttcgtccaaacggtggaatcaagaaattcaaatcttctgtctactcaaactgctccaagaggccatcctgagtaccagcgtgcaccgatcttcataatatagttatagctttcttta

SEQ ID NO: 151894 - DNA, 413 bp, Arabidopsis thaliana columbia
accagaaaaaaaaaaaaaagtagcagcattggcgacatctgttgcgactctatcttctgcaccaccagtatctctacctctcctctcatcatctcgctcttccttcttctccaattgcttcacagtcacgacccgaccaaacactcgttctctggtagcgattggacgcagaatccgacaagaaccaacgagaaagccactgacttgtaatgctttgtttggtctcggtgtgcctgagcttgctgtgattgctggcgtcgctgcgttgctttttggacctaagaaacttcctgagattggcaagagtattggcaaaaccgtcaagagctttcaacaggctgcaaaagagttcgagtctgagcttaagacagaacccgaagagtctgttgcagaatcatctcaggtagcaacga

SEQ ID NO: 151895 - DNA, 415 bp, Arabidopsis thaliana columbia
gctgcttctcgaatcttctgtattatcttcttcttcttcaagtgaaaaatggccgatggtgaggatattcagccacttgtctgtgacaatggaactggaatggtgaaggctggttttgctggtgatgatgccccgagagcagtgttcccaagtattgttggtcgtcctaggcacactggtgtcatggttggtatgggtcagaaagatgcttacgttggtgatgaagctcagtccaagagaggtatcctcactctgaagtattcaatcgaacatggtattgtaagtaactgggatgacatggaaaagatatggcattacactttctacaacgagcttcgtgttgcccctgaggagcacccagttctactcacagaggcacctcttaaccctaaagctaacagggagaagatgactc

SEQ ID NO: 151896 - DNA, 413 bp, Arabidopsis thaliana columbia
ggcggctcaagatcagcctcatgaaaaccttatattccctgaggaggttctaccacgtggaaacgctctttaatggaactttagctttagctggtcgtgaccaagaaaccaccggtttcgcttggtgggccgggaatgcccgacttatcaatttatctggtaaacttttgggagctcatgtagcccatgccggattaatcgtattctgggccggagcaatgaacttatttgaagtggcccattttgtacctgaaaagcccatgtatgaacaaggattaattttacttccccacctagccactttaggatggggggtaggtcctgggggagaagttatagacacctttccgtactttgtatctggagtacttcacttaatttcttctgcagttttgggctttggcggtatttat

SEQ ID NO: 151897 - DNA, 399 bp, Arabidopsis thaliana columbia
acgagattggtttgcaacagatctaaagcatctgatatagtcttccttgtctaaatgtttctcaacatgttagattttcagtttctacagacaaatctgtgcgctattttttcattcttggttttctctgttttggcaaattttggaggaaaggaatctgaagaggaaacaagaatggtcgtggtcgattggcttggtttgggattaggctctgttgctggagcttatgtctcggaaggcctgaaagctttgatttcagaggcaatgaacgtgttagctttcaaatttgtgtctaacgagctcgcatcgactatggagttattgctttcgttgatcaaagagatcgtatcgatgcaagattgactggtacttcaagatcttaaagacacgatcgattaa

SEQ ID NO: 151898 - DNA, 414 bp, Arabidopsis thaliana columbia
aaaatattttggatactcttaataatcaatctattgatgattgctcgttttgtgctcagcgttctaatcgtagcggcgatagtttctggtagtgagttttctgatactcgtgatgcaaaagtagaaaaaatcttaaagaaactcaacaaacctgctcttaaatctatcaagagtccagatggagatataatagactgcgttcatatgaataatcatccaatttatgagcatcctttattcaaaaactacacgattcagatgaaaccaagttcttaccctaaaggtaaaaataatgaatcttcagacaaagagaaacaaagtgttgtgactcaactatggacagttaacgggaaatgccccaaaaacagtattccgatcagatgaacgagaagaaaagaaattttgcgaaccgaa

SEQ ID NO: 151899 - DNA, 412 bp, Arabidopsis thaliana columbia
aaaacatcatcatatattctattgacttgattaatttcttctaagtgcaaaagaggagaaatggagtcaatgaagatgaagctcatagtggtgttgatggtggctattgtggctttctccgccgtaggaaacgtggctgcgcagacagaggctccggctccaagtcctacttccgatgctgctatgtttgtcccggcattgtttgcatctgttgctgctttggcatcagggtttctcttctaaaccaatctccacatttcattgagttaggttctaaattgttttgccttttacttgcgtggatgtcttatggcatgagctttttgttatttgtttctaatatttggactactatgtgttgtgtgtttatgattcataattaatactatttttatggatcgatttctttcta

SEQ ID NO: 151900 - DNA, 126 bp, Arabidopsis thaliana columbia
ggagataagtgcagggatcccattgtttgttttaatgactggaacgaacacatggaggaatgcataacctgcaccactgctgacaactcactcagcttgactgattatttgtggcactccattctg

SEQ ID NO: 151901 - DNA, 417 bp, Arabidopsis thaliana columbia
gcttctctcgcgacttccataagtggaagcttcagaattctggttaaatcatcttcgacgaggaatgggtttcctgtaatctctgatcaaaacccgagtttcgtcttgtttgcgaataaacgcagacatatctctagaacggcgatttttcaccgatctgcgataagtggttcgagtcaaggagaaaagatatcacctttagcatctggtgtatcttcaggtttatattcagctcagacttttgatttgacgcctcaaaacgttgatttggtgcttgaggatgttagaccgttcttgatctctgatggtggaaacgtcgacgttgtctccgttgaagatggggtagtctctcttaagctccaaggagcatgtaccagctgtccaagttcttcaacaactatgacaatgggaatagag

SEQ ID NO: 151902 - DNA, 349 bp, Arabidopsis thaliana columbia
cagagagagagagagagagagatatagaagagaagtgagtggcgtttggttaatcattttcagaagatggatccgacggcgccgttgcttacacacggtggcgaagtagaggaggattatgctccggcgaggagctggaccgatgtgaaacgagtcttatctacagagtcggccaagttgtggatgatagctgctcctgtggggttcaacatcatctgccaatacggagttagctcagtcactaatatctttgtcggtcacatcggctaagtcgagctctccgtcgtcattatttttgttttcgtcatcggtacattctcctttcggttttcttggcttaggtatgggg

SEQ ID NO: 151903 - DNA, 408 bp, Arabidopsis thaliana columbia
ggcaaattagagagatttctccttcaatttcaaaaaatcgccagctttatctctctgtgttttcacatcccatggctagatggtgaccactattcacgcataaactagggttcccccacaaatcatcttacacgtatcctctattccttccttcctttctccgtcatcatcatttttcccaccgacaacaatctctcggagtttggatcaataatggcgttgaagtctagttctgctgatggtaaaaccagaagctctgttcagatcttcattgtgtttagtttatgttgcttcttttacattttgggagcatggcaacgaagtggttttggttaaggagacagtattgctcttgagatgaccaacagtggagctgattgcaacattgttcctagcttgaatttcgag

SEQ ID NO: 151904 - DNA, 410 bp, Arabidopsis thaliana columbia
ctaactttctctctcttgcttctacgcttcttcttgtggcgtagattgttatagagagggaaaccaaaaaagggaatctcaaaagctcgagttcacagatttgacccgagtctttaatccaatctgctggttcgatttccacattcaaactcgactcttgaatatcaaatcagaagtctttgctatggctgctaccgctgctgcttctgttgtccgttacgcacctgaggatcatactcttcccaagccctggaaaggccttatcgatgatagaactggttacttgtacttttggaatcctgagaccaatgttactcagtacgagaaaccaaccccctctctaccttctaagttttctcccgccgattctgttagcttttccgttcaggttcaacaaactgatgcctatg

SEQ ID NO: 151905 - DNA, 421 bp, Arabidopsis thaliana columbia; identical to SEQ ID NO: 130818

SEQ ID NO: 151906 - DNA, 419 bp, Arabidopsis thaliana columbia
gatcctcgccgccaaattggaagaacattagatcgatctcgataagcccgaagttgaggacgatgatgataacgaagacgatgactctgatgacgatgataaggatgatgacgaggctgatggactagatggagaggcaggaggtaagtcaaaacaaagcagaagtgagaagaagagtcgcaaagccatgctcaagcttggcatgaaacccatcactggtgttagccgagtcaccgtcaaaaagagcaagaatatcttgtttgtcatatcaaagcctgatgtgttcaagagtccagcatcagacacatatgtgatctttggagaggcgaagatcgaggatttgagctctcagatccagtcgcaagcagcagagcaattcaaggcaccagatctcagcaatgtgatctcaaagggtgagt

SEQ ID NO: 151907 - DNA, 415 bp, Arabidopsis thaliana columbia
cttgactggttttgctcttgttggtggacctgcaaggcaggatcatcccagggctatcgaagccctgaaaaagctcgatgttccttaccttgtggcagtaccactggtgttccagacgacagaggaatggctaaacagcacacttggtctgcatcccatccaggtggctctgcaggttgccctccctgagcttgatggagcgatggagccaatcgttttcgctggtcgtgaccctagaacagggaagtcacatgctctccacaagagagtggagcaactctgcatcagagcgattcgatggggtgagctcaaaagaaaaactaaggcagagaagaagctggcaatcactgttttcagtttcccacctgataaaggtaatgtagggactgcagtttacctcaatgtgtttgcttcc

SEQ ID NO: 151908 - DNA, 416 bp, Arabidopsis thaliana columbia
ctcgcgactctctctttcaagatgcaaatcttcgtgaaaacactcactggcaagactatcactctcgaggttgagagctctgacaccatcgacaatgttaaggcaaagattcaggacaaggaaggcattcctccggatcagcaaagattaatattcgccggtaaacagctagaagatggccgtaccttggccgattacaacattcagaaagaatcaacccttcatttggttctccgtttaagaggtggtatgcaaatctttgtcaagactctgactggcaagaccattactttggaggttgagagctctgacactattgacaacgtcaaagcaaagatccaggacagggaaggaatccctccggatcagcagagacttattttgcccgtaagcacttgaaaacagaagaacttttt

SEQ ID NO: 151909 - DNA, 252 bp, Arabidopsis thaliana columbia
atctctttctctgctgcagcttaaactttaaataacactacaagaacaacttcttcaggttctataaagagattccgaagaagaatcttttccagaaacagcgctttaagatgactgctgaagttaaggttgaggagaaacatgtggtgtcagaggttggtattgctccagctggtgacactgaggagactactgctaatgctgctgtggaagagacttatgttgtagaagatgagagcaagcctcagggtg

SEQ ID NO: 151910 - DNA, 409 bp, Arabidopsis thaliana columbia
aaaagttgaaaaaattgtaaagtcagtctctccgactcttccttccttccgtgttcaccattgctacacgttctccacgaactttccgatgcccagtcgtcggagacatagctacaccgtcggatctcctgcaaccacatcttccaattacagtaacactactttcaccgatcgttccttcccgacaacccctgcccgtacatccaccgacacaaccaccttcatcgctcgtcgcatctccggtatcttcatcaactgcttcactcctcccgattccgtttcctccaactacatcgacaattcaaagtcctcttccgacaataatatccgtagtagacgtagctcaacaggaagtagtagtgtacagaggagttatggaaatgcaaacgaaacagagcttacaggattc

SEQ ID NO: 151911 - DNA, 341 bp, Arabidopsis thaliana columbia
atcgtcgtcttctattttttcttctttcttcgatttcataccaaaacaagaactctgtgttttcgacaaaaacgaaaccttgagatctattttgattgacttttaagaaagagagagatctttcttagaagattttgtctcgtcggcattgaagatccagggtttgtctttcgaaatttaaagagaaaaagggtggtggggcagagatccagggacctttaaaggctcaagcttcattttaaaaaattgacaagaaacataatgtgaaagggaagaggtttttgcaaaaagtcaagtattaattggtggagtttcattcattgccttgctttttaagagac

SEQ ID NO: 151912 - DNA, 414 bp, Arabidopsis thaliana columbia
caactttcttcaccaaatcgattcttcttcaaccatgtcttccttcacctccaaattcgccgatgagctgattgctaacgctgcttacatcggaacacctggaaaaggtatccttgcggcagatgaatcaactggtactattgggaaacgtctcgctagcatcaacgttgagaacgttgaatccaacagacgtgctcttcgtgagcttctcttcactactcctggagctcttccttgcctcagtggtgttatcctctctgaagaaactctttaccagaagagctctgatggtacgccttttgttgatatgttgaagagtgcaggagttttgcctggtattaaggttgataagggtaccggtgagcttgctggaaccaatggtgagactactactcaaggtcgttgatggtcttg

SEQ ID NO: 151913 - DNA, 360 bp, Arabidopsis thaliana columbia
gatccttgtcgacaaattggaagaacagattatcgatctcgacaagcacgaagtggaggactatgatgataacgaagacgataactctaatgacgatgatatggatgatgactaggctgatggactagatggagaggcaggaggttagtcaaaacaaagcagtaatgagaagaagagtctcaaagcacatgctcaagcttggcatgaaacccatcaattgtgttagccgagaaaccgtgaaaaagagcacgaatatcttgtttggcacatcaaatcctgatgtgttcaagagtgcaggagcagacacatatgtgagatttgtagaggcgaagatcgtggatttgagctttcatattcatt

SEQ ID NO: 151914 - DNA, 315 bp, Arabidopsis thaliana columbia
ctcggagcttagaccttccaatctaccggcggcgaaaatgggtttcaagaggtacgttgagatcgggagagtagcacttgtgaactacggagaagatcatggaaagctcgtcgttatcgtcgacgttgttgaccagaacagagctttggtggatgcccctgatatggagaggatccagatgaacttcaagaggttgtctcttaccgatattgtcattgacatcaaccgtgtgccaaagaagaaaggctttgatcgaggcaatggaaaaggctgatgtgaagaacaagtgggagaaaagctcatggggtaggaagc

SEQ ID NO: 151915 - DNA, 425 bp, Arabidopsis thaliana columbia
  unsure (1)..(425): unsure at all n locations
gtatccgtggtatcaatgccattgacccaaagacaaagaagattttgcaacttttgcgtttaagacagattttcaatggtgtgttcttgaaggtcaacaaggcaaccattaacatgcttcgccgtgttgaaccctatgtaacctatggatacccgaacttaaaaagtgtgaaggaattgatttacaaacgaggttttggaaagcttaaccaccagaggactgccttaacagacaattctattgtagatcaggggctaggaaagcatggcatcatctgcgttgaggatctgatccatgagatcatgacggttgggccacatttcaaggaagccaataactttttgtggccattccagttgaaggctccattgngagggatgaagaagaagaggaaccattacgtggaaggaggagatgcttgaaac

SEQ ID NO: 151916 - DNA, 418 bp, Arabidopsis thaliana columbia
  unsure (1)..(418): unsure at all n locations
atttatcattacagtctgatttgagctaagttctctcatcataaactctccttggagaatcatggctatttcaaaagctcttatcgcttctcttctcatatctcttcttgttctccaactcgtccaggctgatgtcgaaaactcacagaagaaaaatggttacgcaaagaagatcgattgtgggagtgcgtgtgtagcacggtgcaggctttcgaggaggccgaggctgtgtcacagagcgtgcgggacttgctgctacaggtgcaactgtgtgcctccgggtacgtacggaaactacgacaagtgccagtgctacgctagcctcaccacccacggtggacgccgcaagtgcccataagaagaaacaaagctcttaattgctgcggataatgggacgatgtcngtttgttagtattta

SEQ ID NO: 151917 - DNA, 411 bp, Arabidopsis thaliana columbia
acgcttagtatccagcgtgctattagtccccatagctgctcttgatcaacggagtcggaggttgcaatttgagtgaggagatgttttcccctcaccatacgattcataaggggaagggtgtggaactttctgacttgaatgagcaagttgctcaggctttctttgatttggagaacaccaatcaagaattgaaaagtgagctgaaggatttatacgtcaactcggctgtccaggtgatatcttctggggacgccaggcaattgttgtcaatgttccttacagactgagaaaagcttaccggaaaatccatgttaggcttgttcgtgaacttgagaagaagttcagtggaaaggatgtgatcctcattgctacaaggaggattgtgaggcccgcaaagaagggttcagcggc

SEQ ID NO: 151918 - DNA, 463 bp, Arabidopsis thaliana columbia
  unsure (1)..(463): unsure at all n locations
ggcgcacgcgtcacgcttcacagaccagtgtcttctgtagagcaaagtnttcataatcccttcaaagatgcgcttcaatggccagagagagccgctcctaacaccaacctccagacagattcntgtnnatgttcccaattcacttacccacanngatctgtggaaatgtacanaaaaagnccgaagcatcanttctgtgaccgccgaagaagtnagatctatcacaagacaaccgcgactgggaaaacagtctcaacgacggtgaacgtcacttcatcaaacacgtgctcgctttcttcgctgcatctgacggaatcgtactagagaatctcgcttctcgcttcatgtccgatgttcaagtctctgaggcgcgtgctttctacggtttccagatcgcgnatgaaaacatccactcggagatgtatagtctccttctcgatacttatatcaaagataacaaaga

SEQ ID NO: 151919 - DNA, 428 bp, Arabidopsis thaliana columbia
cacataaccacttctgtctctgcgaatctccataagactctttgagaagctttcctgtgtttctccgctgttatgggtagctccggcgacgttaactggaaacttgcggaccaccccaagcttcccaaaggcaaaactatcggtttggattgttctcgatggatggggtgaatctgatcccgatcaatacaattgcatccataaagctccaactcctgccatggattcccttaaagacgggaagcccgacacatggaggttgatcaaagctcatggtaccgccgttggtctccccagcgaagacgacatgggaaacagtgaagttggccacaatgctcttggagctggtcgaatttacgctcaaggtgctaagcttgttgatctcgcccttgcttcagggaaaatctatgaagatgaaggtttcaaat

SEQ ID NO: 151920 - DNA, 418 bp, Arabidopsis thaliana columbia
actcacttcacacccgtgaaaaaaccctaggaaccaaatatggtgaacctctcgagatccggcgcgttgatctctgtattcctccttcctttacttagcttctctttctccgtcgataatccgacggatcggcgtgttcttgttcttctcgatgatttatcactcaaatcctctcattctatcttcttcaacactctcaagtctcgtggattcgatctcgatttcaagttagctgaagattcgaagcttgcgcttcaacgatacggccagtacttgtacgatgggttgatcatcttcgccccatcaacagaacggtttggaggatccttggattcgaaatccattgctgattttgttgattccggtcgtgacttgatcttatcggcggatactgctgcatctgattggattaggggta

SEQ ID NO: 151921 - DNA, 358 bp, Arabidopsis thaliana columbia
gggatatccaaatcccttttattgaatgtaattcgcttgggttacaatccatgggaatacataactaatcatacaactgcagataaaactttatatagataacttaagtgagagacaaacagacacacacaaacaagttctagacaaacaaaaaaaaaagagaaaaagcaaagagattgaaacttgagatcggcgccacgaactgaggtttattactgatagtacatgagttgctgtgcggcggctacattctgaaagccaccatcatacatggctgcagttgctccagcggcatttattccatgagcctgccttagagggtgttgaccctgttgatgcattaacgcattcacacttg

SEQ ID NO: 151922 - DNA, 286 bp, Arabidopsis thaliana columbia
cttgttaagaagcttgctaagtcttaccatgctttcttggcttctgagtctgtcattaagcagattcctcgtcttcttggtcctggtcttaacaaggcaggaaagttcccaacacttgtgagtcaccaagagtcattggaagcaaaggtgaatgagaccaaagcaacagtgaagttccagttgaagaaagttctgtgtatgggtgttgctgttggtaacctttccatggaagagaagcagctcttccagaatgtgcagatgagtgttaacttcctcgtctcgctct

SEQ ID NO: 151923 - DNA, 204 bp, Arabidopsis thaliana columbia
acgacctgggctccgggagggggggatgtaagaaaaattacaaacttgactcttagcccaagtgttatatttggttatttactaaaatctccctttgggggagaaggatggattgttagtgtggacgatttggaagatataattggaggacatgtatggttaggttccatttgtatatttggtggaatctggcatatcttaacc

SEQ ID NO: 151924 - DNA, 402 bp, Arabidopsis thaliana columbia
acgcaaaattagggtttggagccagaaaagagcaaataggcggcacatcagttctcaacactcacgatggcgagaattaaggttcatgagcttagagataaatcaaagaccgatcttcagaatcagttgaaggaattcaaggctgaactcgctctcctccgtgtcgctaaagtcaccggaggcgctcccaacaagctctccaaaatcaaggttgtgaggaaatccattgctcaagtgttgacagtgatctcccagaagcagaaatctgctttaagagaggcatacaagaacaagaagctcttgcctcttgatctccgtcccaagaaaacacgagctatccgtagacgtctcaccaagcatcaggcttcgttgaagacagagcgtgagaagaagaagagatgt

SEQ ID NO: 151925 - DNA, 425 bp, Arabidopsis thaliana columbia
  unsure (1)..(425): unsure at all n locations
gtaactgctggtcccgtattaatatttattgcttcattccttattactaagcaacaaaagtcacgcgtgagatataaaagaagatcctttgcagtttctctgttcttgctccttcttcttcatctccctttattgatactgtctgagtaataataaaaattcactctttttgtcttctcaagacagatttcaaaatagaaatcattctccttttttctttttgaaaatttcgagtgatttaaggagggaaaataaagacagaaacaagaacaaaagcatcgtttgcgaataagacttctcgtactctgttttcttttctcgtgttcttatgacagatttataaaaaagattaggtttttgtcttgtcttggcgataatgcctagagagtgttttaaagatttgatttaaatactctnttatgtta

SEQ ID NO: 151926 - DNA, 426 bp, Arabidopsis thaliana columbia
gtcatttagtggagcgagccaacactcactcctcatttcgagacaaaaacgcggaaggcgacgacacgccgttgaggaggatccgactactcggaagtttcctgctcatctggaaattggggatcgttgctgagagagtttaattgagtgatcaagttccgttcgtcttccataaaccctaaggcgattgggatttctgaaaggtttcggcaaaaggaaattcaatgcttaagaaaaaactatccctagaagatgaagatgacgatagatcgtataacttaaggtcatcgcgttctaatgccaagtcgaaacccaggtcctctgctggtaccgcaacgaatcctagagcgtcaaagagagctcgcctttcgggtgctagtgcgactcaagaagactcgagtcttgtagataagattagattgtctt

SEQ ID NO: 151927 - DNA, 421 bp, Arabidopsis thaliana columbia
ccagcgttcggtctctctgccggagtcgtatcattaaacgctctcgtcttcgagatcgtgatgaccttcgggctcgtctacaccgtctacgccacagccgttgaccccaagaacggtagtctcggaacaatcgcaccaatcgccataggtttcatcgttggagctaacatcctcgccggtggagctttcagcggagcttccatgaacccagccgttgctttcggaccagccgtcgtaagctggacgtggaccaaccactgggtttactgggctggtcctcttattggtggtggactcgccggaattatctacgactttgtcttcatcgatgaaaatgcccacgagcaattgcctaccaccgattactgaagacgtcaaattcaacgtttgtaatctgatgaatttttcgtgattggctttt

SEQ ID NO: 151928 - DNA, 426 bp, Arabidopsis thaliana columbia
acgcgatccgatctcatctctctcatttcgaaaccatggttgagccggcgaatactggtgggcttccggtgaacccgactccgttgctgaaagatgagctcgatatcgtgattccgactatcagaaacctcgatttcctcgagatgtggaggccttttcttcagccttaccatctgatcatcgtccaggacggagatccatcgaagaagatccatgtccctgaaggttacgactacgagctctacaacaggaacgacattaaccgaatcctcggacctaaggcttcttgtatctcgtttaaggattctgcttgtcgatgctttgggtacatggtgtctaagaagaagtatatcttcaccattgatgacgattgcttcgttgccaaggatccatcaggcaaagcagtgaacgctcttgagcaacaca

SEQ ID NO: 151929 - DNA, 426 bp, Arabidopsis thaliana columbia
agctgagtcccgcaaaacccaattgctgaacgataatgatgttgaatctagcgacaagagtgcaaaaggcacacgatgggctgttttagttgctggatcaaatgaatattataactacaggcatcaggctgacatatgccacgcgtatcagatactccgaaaaggcggtttaaaagatgaaaacatcattgtgtttatgtatgatgatatcgcgttttcctcggagaatcctaggcctggagttatcattaataaaccagatggagaagatgtttataaaggagttcctaaggactacactaaagaagctgttaatgttcaaaacttctacaatgtgttacttggaaatgaaagtggcgtcacaggaggaaatggcaaagttgtgaaaagtggtcctaatgataatatcttcatctattatgctga

SEQ ID NO: 151930 - DNA, 409 bp, Arabidopsis thaliana columbia
  unsure (1)..(409): unsure at all n locations
cgtccgngcgaaatcaaccaatttaatccacctgtcttttatcatctcacgacccacctctgggggcgcagctctcataacgaggcagcgccctacctcctccaaaaatcgcatgcttaaactctgagagaagaagatgcctatgacgcacgagaaaccaacttccgacggcaaacgacgttggtgtctcttcaagattccatatcttaactcaagccgtcacagaaacgcctcttcaagtgctgctacttctccgcttccatctggagcttcttctatcttctacttcttctcatctacataaccactatcgacatcatcatcaacattaccattagcaccatcatcagcttgactataacggtcctcacagcgatgcatcgggtcaaaatcaacattcgactccttc

SEQ ID NO: 151931 - DNA, 326 bp, Arabidopsis thaliana columbia
  unsure (1)..(326): unsure at all n locations
cagcagtgaagcatgatgtgtaagtcgttatcgagctgaagttgtagaaagctgtaaccgtttgacaatggtgaatgaattattgaagtggatgtgtattagctcttcttgtctcagattctctcttcaactcttttttttttcttttggattatttttctttcgcgtggctattgttgagtgtccttgcaagtcataacaaaaagcttaaacccaagtgttttttgtcatgactaatatgaccattatgttttcttgctgtaccatttcttcttgtatcacctatgacttccaattattcagtagtaccctcataatttttcnnt

SEQ ID NO: 151932 - DNA, 230 bp, Arabidopsis thaliana columbia
caagaatcatgacgagctctattagcgttaagaagatcaagaccaacaggatttggttgaaccttgctcagaaaggcgtcgaacaatggccttgtgatctgttactacatgggttcactgagacatggtactcttggcgtcaccagatcgataccttgactagccatggttaccatatgctcaggccagatctgagaggctactgaggctccgattatctaccgagccac

SEQ ID NO: 151933 - DNA, 414 bp, Arabidopsis thaliana columbia
gcagaagaagaagaagaagacaacgacgacgactttgaagaagaacaaactcttccttcaatgtcaatctctctctcagatgggttgtggtggaactttgttctacccacttctcataactctctccgttgctctaatcacttacaacatcatcatctccgctaatgctcctctcaaacaaggcttcccaggccgatcttcttcctccgatatctccattgacccagtcatcgaattaccacgtggcggcggatccagaaacaacgatggtaaaaggataagacttttccacacggcggtgacggcgtctgattccgtctataacacttggcaatgtagagttatgtactattggttcaaaaagattcaagcttctgctggacccggttctgaaatgggtgggtttactcggat

SEQ ID NO: 151934 - DNA, 416 bp, Arabidopsis thaliana columbia
caccactcccaatttctccatctcctcctcaattctctctttcctcttctcctttatcaaaaacgcagcgattcatcactccaagccagggctctcgtctacggactttgtgtaccaaagtcatcataccaaacatgcaagattcaggatcaccaccactctcttatcttactcagcgagaagccgctgagattgatgagaccttgatgggtcctcttggtttctccattgatcagctcatggaattggctggtcttagtgtggcagcttcaattgctgaggtttataaaccggaagaatatagccgggttctagctatctgtggtcctgggaacaatggtggtgatggtttggtggcggcgaggcatttgcaccactttggatataaaccgtttatttgttatcccaaacgtaca

SEQ ID NO: 151935 - DNA, 418 bp, Arabidopsis thaliana columbia
cagatctagatctaaaagaagagcgtcttcataaacgcccttcttcttcttcgtcttcttccctgcaaatctagtttctagatcttttctttcttccgcgaaacgaaaatgagagagtgcatttcgatccacattggtcaggccggtatccaggtcggaaatgcttgctgggagctttactgtcttgaacatggcattcagcctgatggccagatgccgagtgacaagactgttggcggaggtgacgatgctttcaacaccttcttcagtgagaccggtgcagggaagcacgtcccacgtgctgtctttgttgatcttgagccaactgtgatcgatgaggtcaggactggtacttaccgtcagcttttccaccctgagcaactcatcagcggtaaagaagacgcagctaacaatttcg

SEQ ID NO: 151936 - DNA, 368 bp, Arabidopsis thaliana columbia
ataacactcacacacacactttctcttctcttattttctcagctcttttaactctttgctctacatatattcaaatggccaccatcgaggttgaacaagtgactccagtggcagctgagaacatcgaggtgccaccaccaaaggctgtggagtcggaggaagtcaccaccgtctgcgagtctcttccagctacggtaacagaatctcaagcgcctgtcgaagtaacaactaaagatttggtcgtggaagagacagagaaaccaatcgaagaaacagaggaagctcaagttgaaactccggatgttgcggagatcaagaaagatgaagaagctccggatgaaactccggtggttgtggaggatgagagc

SEQ ID NO: 151937 - DNA, 425 bp, Arabidopsis thaliana columbia
  unsure (1)..(425): unsure at all n locations
gcgacaatggcgaatttgatgatgagattaccaattagcttgagaagcttctctgtttcagcttcttcatccaacggttcgccgccggtgatcggaggatctagcggcggtgtaggaccgatgattgtggaattaccgttggagaagatacgaagaccgttgatgcgaaccagatccaacgatcagaacaaagtgaaagagcttatggatagtatccgtcaaatcggtcttcaagttccgattgatgtgattgaagttgatggaacttactatggtacttttcttgttctttgtgatatctgttctttgaaagcttataaatgataaattcttccattggtttagggttctcgggatgtcacagatacgaggcgcatcagaagctagggcttccaactatacgtngcaaaatccgtaaaggaaca

SEQ ID NO: 151938 - DNA, 415 bp, Arabidopsis thaliana columbia
cagagagagagaacaacaaccaaacactcatttttccacatcttgagagaaaaaaacagagcaagtatattagagatctcatggcgatggcggtctccggagctgtcctcagtgggcttggttcttcgttcctcaccggaggcaagagaggtgccaccgcattggcaagcggcgtaggcactggagctcagagagttggcaggaaaactcttattgtcgctgctgcggctgctcagcctaagaaatcttggatccctgccgttaaaggtggtggcaacttccttgaccctgaatggctcgatggctcgctaccaggagatttcgggttcgacccattgggtttggggaaagacccggcttttctgaaatggtacagagaggctgagctgatccatggccgatgggcgatggcagc

SEQ ID NO: 151939 - DNA, 410 bp, Arabidopsis thaliana columbia
agcacttcgtcttctttcatggaaatatagtcttttcctttcacgaaaaataacgagtgcatgctgatacacattggacaggctggtctccaggtcagaaacgcttgctgacagctgtactgagtggaacatagcatccatcctgatcgccagatgcctggtgacaagactggtagtggtggagacagatctttcaacacatgatgcagtggaaccgccgcacgtaagcacgtcccacgagctgactttgttgagcttgcaccaactgtgatcgactacttcagaactggagcacaccgtcagctctgtcaccctgaacaacgtatcagcggttaagaagatgcacctaacaatttcgcccgtgggcattacaccattgcgaaagagattgtagacctgtgcttagaccg

SEQ ID NO: 151940 - DNA, 416 bp, Arabidopsis thaliana columbia
accaaactctcaaatttctcttctcgttattagcctgcactctctaacacgagtgagggaacatatatcatcagctcacaatctcagccgtcgattatatcgccaccgtcgtagaagaagatggagaacactcaagatttctcgccaccacacatggatgcttctcggccgtcactaggattccctcttggcacagctctgcttcttatcatcattctcagcctctccggaatattcccttggtgttaccattgggacaaacatcgatctctccgccgctctttggccaatggtcgtgcctgcgccgacatgctatctaatccttacaaacccaaaccccctttttcggaaatgaagaaaccccataatctgagcgtaccggtgttaatgccaggagataatacacccaaattcat

SEQ ID NO: 151941 - DNA, 421 bp, Arabidopsis thaliana columbia
accaagatccagaagtgaggaaaatgttctatacccgagacaaaaccaaaaagcttaaatatcactctaatgctgatctctatgagtctcctgctgcgagttggagagataccttaagttgtgtcatggctcctgatgttccaaaagcacaggacttacctgaggtttgtggggagatcatgttggagtactcaaaggaagtgatgaagttagcggagttaatgtttgaaattttatcagaagctttagggttgagtcctaaccacctcaaagaaatggattgcgcaaaaggtttatggatgctctgtcattgttttccaccctgtcctgagccaaaccgaacattcggcggcgctcagcacacagacagatctttccttactattcttcttaacgacaacaatggaggacttcaagttct

SEQ ID NO: 151942 - DNA, 422 bp, Arabidopsis thaliana columbia
gatttatcatctcttttgttggtaaattgatgtctgtgttacagatcaaatgttgtgaactaattagcctaatgattcgattgattttggtgaacccgaggatcgtacaagtatgtagctatggaggaagatggagtctaatgtcatgagattcctgtagacaataaccttcgattggccgtcctaaacgtctcgacaacctcttaggttaaggctttactctgcacctatcaagaaaatcgtgtataaaattaaggaacttggcaagaggatcaacgatttatgtggtgttatgctcgtcttcatggaagggctgtgaactgttaattgtgaactgcaaagaagaagaagaagaagtgtggtcatcgcaaccatgattttttagaagccaaagaagattccaatcatgtttgctttgtatt

SEQ ID NO: 151943 - DNA, 428 bp, Arabidopsis thaliana columbia
  unsure (1)..(428): unsure at all n locations
acggaaaaaacataaaatctgttcttcttcttcggctgagagacaatggcggaggagcaaaagacgagtaaggttgacgtagaatctccggctgttttagctccggcgaaggaaccgactcctgctccggtggaagtcgcggatgagaaaattcataatccacctcccgtcgagtccaaagctcttgccgttgtagaaaaacccatcgaggagcatacacctaagaaagcttcatctggttcggccgatagagatgtgatacttgccgacttggaaaaagagaagaaaacgtcattcatcaaagcatgggaagagagtgagaagtcaaaggctgagaacagggcacanaagaagatctctgatgtgcatgcttgggaaaatagcaagaaagcagccgtagaagctcaacttaggaagatcgaggaaaa

SEQ ID NO: 151944 - DNA, 428 bp, Arabidopsis thaliana columbia
tatgcttcgtatagttcaaatcacgcttctttgtttcgttctcgccgccgggatctcgatctccgccgtgatcgccgagaatgaatctatagacgagatccttctagcgaatggattacctttggggctatttcctaaaggcgtgaaaggatttaccgttaatggcgaaacgggacggttctcggtttatttgaatcagtcatgccaggctaagtatgagacagagctgcattacgatgagattgtttcgggaacgataggttatgctcaaatcagggatttatcgggaatctcagcgcaagagctgttcttgtggttacaggtgaaaggaatccgagtcgacgtgcctagctctggtcttatattcttcgacgttggtgttctttgcaagcaatactctttgtctttgtcgagacaccaagagattg

SEQ ID NO: 151945 - DNA, 397 bp, Arabidopsis thaliana columbia
gtgctgagaaccagaacgaaaccctatttataatatcgccatgggtaaggtcaaaggagagcatcgtttggataagtactatcgtctcgctaaggaacgtggattccgttctcgagcttcctacaagcttctttagctcgacgccaagtactctcttctccactcagctcatgccgttctcgatctctgcgccgcccctggtggttggatgcaagtcgccgtcgagaaagttcccgtcggcagcctcgttctcggtatcgatcttgtcccgattctccctgttcgtggctgtgttactatgacgcatgatatcacaaggactgagtgtaaatcgaagatcaagcaagtgatggagcagcatggtgttagtgcttttaatttggttctgcacgatggg

SEQ ID NO: 151946 - DNA, 426 bp, Arabidopsis thaliana columbia
gaagactctcagtggttcgaacttcgagatcgaagtaaaacctgcagataaggtttgtgatgttaaaacggctatagaaactgttaaaggtgcagaataccctgctgctaagcagatgctgatccaccaaggaaaggttctaaaggatgagaccacattggaagagaacaatgttgttgagaacagtttcattgttatcatgttgtccaagaccaaggcttctccaagtggggcatcaaccgcatctgcaccagcacctagtgctacacagccacagacagtagctacacctgaggtttctgcttctactgcctcagttccagttcctacaagtggaactgcaaccgctgcagctccagctactgctgcttcggttcagacagatgtgtatggtcaagcagcatcaaaccttgttgctggaactac

SEQ ID NO: 151947 - DNA, 418 bp, Arabidopsis thaliana columbia
aactttaagtaccaaaaatggcgggctacaacctcgaagctatcgaagcggcacctttgaaagacgatctggatattgtgatcccaaccatcagaagcctcgactttctagagcaatggagaccatttttgcaccattaccacctgatcattgtccaagatggagacccttccatcaagatccgagttcccgagggttatgactacgagctctacaaccgtaatgatatcaacaggatccttggtccaagagctaattgtatctcctacaaagatggtggttgtcgctgctttggcttcatggtttctaaaaaggagtatatctacaccattgatgatgattgctttgtggcaaaggatccaagtgggaaagacatcaatgtgatagctcagcacataaaagaacctgaaacaccttc

SEQ ID NO: 151948 - DNA, 423 bp, Arabidopsis thaliana columbia
gaaaaaaaaaataaacacaaaatttcaataaccatggagggtgttagtgcaactatgcataagttaaggccttatttgttaatgatctttttgcaatttggagcagcaggaacatatattgttattatggccactcttaaccaaggccagaaccgttacgtcgtaattgtgtatcgtaatcttgtggctgctcttgtccttgcaccttttgcactcatctttgaaaggaaagtgaggccgaagatgacactatcggttttgtggaaaataatggcacttggtttcttagagccagtcttggatcagggttttggttacttggggatgaacatgacatcagcaacatatacatctgcgatcatgaacattcttccttctgtcacatttataatagcttggattttaagaatggagaaagttaca

SEQ ID NO: 151949 - DNA, 429 bp, Arabidopsis thaliana columbia
acacactctaatacttttaaggttttagattctaatcaatggcttcttcttctcttttggtcaccatcttcctctgcatctctgtcttcttcttttcgtccgtgaatgcaaatgaggttaccgtcggtggaaaatccggtgactggaagatccctccttcctcttctttctcctttaacgaatgggctcaaaaggctcgcttcaaagtcggcgactttatcgtattcaagtacgaagccggtaaagactcggttttgcaagtgacacgagaagcatacgagaaatgcaacaccactagccctaaagccagctacaccgacgggaacacaaaggtgaagcttgaccaagctggtccggtctacttcgtcagtggaacagagggtcattgtcaaaagggtcagaagctacgcctagtcgtcatcactcctt

SEQ ID NO: 151950 - DNA, 426 bp, Arabidopsis thaliana columbia
tggggacgacgttagatgtatcaagagcagagctagcacttgtggtaatgtatttgaacaaagcagaggcaagagataagttatgcagagctatacagtatggttccaagttcttgagtggtggacaacctggtactgctcaaaatgttgacaaatctactagcttagcaagaaaagtcttccgtcttttcaagtttgtgaatgacttgcatggtcttatcagtcctgtgcctaaaggaactcctcttcctcttgttttacttggaaagtcgaagaacgcacttttatctacattcttgttcctggatcaaattgtctggcttgggagatcaggaatatataagaacaaagaacgagctgagttacttggacgtatatctctcttctgctggatgggatcttctgtctgcacaactttagtcgagg

SEQ ID NO: 151951 - DNA, 416 bp, Arabidopsis thaliana columbia; identical to SEQ ID NO: 130823

SEQ ID NO: 151952 - DNA, 321 bp, Arabidopsis thaliana columbia
gaaaaaaaaagagagaagaaaaatggtgttgacaatctatgctcctttattcgcttcttcaaagagagctgttgtgacattggtggagaagggagtatcattcgaaactgtcaatgtcgatctcatgaaaggagaacagagacagcctgagtatctcgcgattcagcctttcggtaaaatcccagtcctcgtcgacggagactacaaaatcttcgagtcgcgtgcgatcatgaggtatatagcagagaagtatagatcacaaggacctgatcttttggggaagactattgaagagagaggaccaggtgagcaatggttaga

SEQ ID NO: 151953 - DNA, 432 bp, Arabidopsis thaliana columbia
cactctcatatctctccttcctacttcctcggtttcatcgtccactgtctcaacaatggcgtcattgtcggtaccttgcgtcaagatctgtgctctgaacaggcgggtcggatctctccctggaatctctactcaaagatggcagccgcaacccaatgggatctcctttccctccgatgtttctcagaatcattctgcattctggaggttgcgtgcaacaactaatgaggttgtttctaactccactccaatgactaatggtgggtatatgaacggaaaagcgaaaaccaatgttcctgaacccgccgagctctctgaatttatggctaaagtctctggtcttcttaagcttgtggattcaaaagacatagtggaacttgaactaaagcagctcgactgtgagatcgttattcgaaagaaggaagctttaca

SEQ ID NO: 151954 - DNA, 435 bp, Arabidopsis thaliana columbia
gggagaggctaaaatggtttcgttgaagctccataagcgtctcgcatcctcagtactcaagtgcgggaagagaaaagtatggctcgacccgaacgaaggaagtgatatctccatggccaattcgcgtcaaaacatcaggaagcttgtgaaggatggattcatcatcaggaagccaacgaagatccactcacgatccagggcacgtcaattgaatatagccaagagaaagggacgtcactctggttatggtaagaggaagggtacccgagaggcaaggttgccaacaaaagttttgtggatgaggaggatgagagtgctgaggcgtctgttgaagaagtatagggagaccaagaagattgacagacatatgtaccatgacatgtacatgaaagtcaagggaaacgtcttcaagaacaagcgtgtgttgatggaaag

SEQ ID NO: 151955 - DNA, 431 bp, Arabidopsis thaliana columbia
atctatctctctcttccagctgtttcatgatcgatttactcttaacttacagctgattacaattcactgtaatctctcaagaaccctagattcttttttttccttttcaattgtgatccgtcagcaatgcttgatctttaaatttactgatatctgaagatcgaattagggttctgatctacttgatatttatttgtttgggcttttattcagcagctcgatcttgggctgaagctatggctcagagtaattgggaagctgacaagatgcttgatgtttacatatatgattatttggtgaagaagaaacttcataatactgctaagtcgtttatgactgaagggaaggtttctcctgatccagttgcaattgatgcacctggagggttttctttttgagtggtggtctgtgttttgggacattttcattgg

SEQ ID NO: 151956 - DNA, 355 bp, Arabidopsis thaliana columbia
ggacaaatcaccgacgttactgatttctgaagatttatcccggaaaataatctctcttgccgccggtgaagctcatacaatcgctctgaccggcgatggatgtgtttactcatggggaagaggaatgtttggccgtctcggtacgggtaaggagtcggacgagcttgttccagttctagtcgagttcccaaatcaagcggaaggagatcggattcgaatcgttggtgttgctgctggtgcttatcacagtctcgctgtctcagatgatggctcggtttggtgttggggttacaacatttatggccaacttggttttgatggggaaaactccttggcaccatgcttgatcaaaaat

SEQ ID NO: 151957 - DNA, 427 bp, Arabidopsis thaliana columbia
tcttcatcgatttctctcttccaaatcttccataagatgtcgaaccctagagttttgttcgatatgagtctcagcggtactcccatcggacggatcgagatggagcttttcgctgatacaaccccaaacacggcggagaatttccgtgctctctgtaccggcgagaaaggaatgggaaagctaggtaagccacttcacttcaaaggatcgatcttccaccgtgtgattcccggattcatgtgtcaaggaggtgatttcaccgccaagaacggaaccggtggtgaatcgatctacggtgctaagttcaaggacgagaactttatcaagaagcatacaggagctgggattctctcaatggctaactctggtcctaacactaacggatctcagttcttcatctgtaccgaataagacgtcgtggttagat

SEQ ID NO: 151958 - DNA, 428 bp, Arabidopsis thaliana columbia
accttcttttgtatatctctcttcctatatcattaacctgcgctggttaaagctcttcacctacgcacatcgccggcgatttatgatcatctgagtctttcgggtatattcacaggctagagaaagagatcttaatcggaaaagtttatatggaggttatggttggttcgtcgtttggaatcggcatggcggcgtacgttagagatcatcgcggtgtttcggcgcaggataaggctgttcaaacggctctgttcttggctgatgaatcaggacgtggtggatcacagatcgggattggattaaggatgagtaataataataataagtcgccggaggaatcttcggatagttcgtcgtctatcggagaaagcagtgaaaacgaggaggaagaagaagaagacgacgccgtttcgtgccaacgaggaaca

SEQ ID NO: 151959 - DNA, 428 bp, Arabidopsis thaliana columbia
accagcctgtccgaaaacccaaacctgttttgatacacaaacaacacagaccacccgcaaaactcacatctatctctatctctcttctctgtctctcactctccactttccgatcaccgacgattcaacaaaacatagtaaaaaacaaagcaaattctttttttctccttagttacttcttctacagattatctcaatcttacagagcaccatggatcgttgtatctatggttgctccgtcattactatcttcttctccttcttcttcctcctcaatgcatccgctttagaatcgggtcaccacaacataactgggtcgggtcaaataaactcaaactccgtcctcgtagctctcctcgattctcgttacactgaactcgccgagctagttgagaaggctcttcttctccaaaccctcgaagacgccg

SEQ ID NO: 151960 - DNA, 423 bp, Arabidopsis thaliana columbia
  unsure (1)..(423): unsure at all n locations
aagaaatcgttttgtgcagatttgatcttgcgttaattttctaagcaaaatatggcgggagaagatagccgtgaagctcaacgaggcgacgaatatgaggaatcgagtcctctcttgaaggtgaacgagaatgacggcaagatctgctcgaaaagagatgccaaggcggcgcctcttgtgcctcctcccgcggcggaggaatacggctggacggcggatggattgcctgtgagccatggtagcgtgattggcgagccgatcaggagaaaccagtggaattctggtctttttacctgtcttggtcgcaatgatgaattttgcagcagcgatctcgaagtttgtcttcttggaagtgtggctccttgtgtgttgtatggaactaatgcagagagacttgngtctgctccgggaacattttcaaac

SEQ ID NO: 151961 - DNA, 425 bp, Arabidopsis thaliana columbia
gtttgctactaccgcaactatggaaagacctttatagggaccacgtcgtccttacgagaaggagcgtcttgattctgaattgaagctggttggtgagtatggtctgcgtaacaagcgtgagctctggagagtgcagtactctcttagccgtatccgtaatgctgctagagatcttttgactcttgatgagaagagtccaagaaggatctttgaaggtgaggctttgctccgtaggatgaaccgttacgggcttcttgatgagagccagaacaagctcgattacgtcttggctttgactgttgagaactttcttgagcgtcgtcttcagactattgtgttcaagtctggtatggctaagtctatccatcactctcgtgtcctcatcaggcagaagcatatcaaggttggaaagcaaattgtgaaca

SEQ ID NO: 151962 - DNA, 420 bp, Arabidopsis thaliana columbia
cttcttcttctgcattaaaatggcttggatttgtaacagcggtttgggttcaatccatctccggcaacaactacactttttcaaactactccggtgctcttaagtctctcatgaatctcaaccagctcgagctcaacaacctctctgtcgctaaagacgtcggaaaagcctttgggatcctggctggccttgcctctgaccgtcttcccactccggtcatcctccttattggttgctttgaaggtcttcttggttatggtgtacaatggctcgttgttagccgcaccatccaaccaatcccttattggcagatgtgtatattcctctgtatgggagggaacagcacaacgtggatgaacacggcggttctagtgacttgcatacgcaattttcgacgaaaccgtggtccggtctccggga

SEQ ID NO: 151963 - DNA, 385 bp, Arabidopsis thaliana columbia
atcatcgtcactttctcccggcgaatttcgttttatcgatttaagtaacgagatttgtgcaaagatgactcaggacgtggagatgaaagataacaacaccccttctcaatcgattatctcttcttctacctctactatgcagaatttgaaggagattgcagcactcatcgatactgggtcttacacgaaggaggttcgtcgtattgctcgtgctgtgcgtctcactatagggcttaggcagaaactcaccggctctgtgctctcttccttcctggattttgctttggttccaggatccgaagctcactctcgcctctcttcctttgttcctaagggtgatgaacatgacatggaagttgatactgcctcatcggccacacaagct

SEQ ID NO: 151964 - DNA, 434 bp, Arabidopsis thaliana columbia
tatcagcacgaaaagcccaacctgcctggcaaaaatcttgggaatctatcaggtcgcaacaaagcaacttaagagcgggaaagaaacaaagatggatgttctgattatggagaatcttctgtttggaagaactgtgaaacggctttatgaccttaaaggatcttcgcgggcgcgctacaatcctgactctagtgggagcaacaaagtcttgttggatcaaaacttgattgaagcaatgccaacttctcccattttcgtcggtaacaaagcaaaacgattgttggaaagagctgtctggaacgatactgcttttcttgcattgggtgatgtgatggattattcattgctagtaggcgtggatgaagaaaagaacgagctagttctcgggattatcgacttcttgaggcagtacacatgggacaagcatctagagt

SEQ ID NO: 151965 - DNA, 427 bp, Arabidopsis thaliana columbia
gcgtctctctcccgcaaccttcgattttcgtttattcgcatccatcggagagagaaaacaatgaataagcgaccatgttggtgtaccaagatcttctcaccggtgatgagcttctgtctgactctttcccttacaaggagattgagaatggaatcctctgggaagtagaaggaaagtgggttactgtgggagctgtagatgttaacattggtgccaatccatctgctgaagaaggtggtgaggatgaaggtgttgatgactctactcaaaaggttgttgacattgtcgacaccttcagacttcaggagcaaccaacttatgacaagaagggattcatcgcttacattaagaaatacattaagcttttgacacccaagctcagcgaagaagatcaagctgtcttcaagaagggtattgagggagctac

SEQ ID NO: 151966 - DNA, 425 bp, Arabidopsis thaliana columbia
aatagttcttgtaagcgcaacgtgtaagtagagacatacacacatttgtagtgttttgttttgtataataacatcatcgcatatagagaaaagaagttaagacgaccgtatatatcgttttgaaaaccgggtcggataaaaaaaaaccggtttctttaaccgagtcggcgcgcatggagctatgcaatcaaaacaatcacatcaccgccgtctcgggcgatccgttgaactggaacgcgacggccgaagctttgaaagggagccacctggatgaggtgaaacgaatggtgaaagagtataggaaagaggcggtgaagttaggaggtgagactttgacgattggtcaagtagccgccgtggctagaggaggaggaggatctacggtggagctagcggaggaggctcgtgccggagtcaaggcgagt

SEQ ID NO: 151967 - DNA, 429 bp, Arabidopsis thaliana columbia
  unsure (1)..(429): unsure at all n locations
aaaaaaatctctctcaatctctctcagatctgaatccatccatcaccgatctctaatggcggcaccaccagcatcatcctcggcgagggaagagttcgtgtacctcgcaaagctcgcagagcaagcggaacgttacgaagaaatggttgaattcatggaaaaagtcgctgaagccgttgacaaagacgaactcaccgtcgaagaacgtaatctcctctccgtcgcttacaaaaacgtaatcggcgctcgtcgtgcttcctggagaatcatctcttccattgaacaaaaagaagagagtcgtggtaacgatgaccatgtgaccacgatccgtgattacagaagcaagatcgaatctgagttatcgaaaatctgtgacggtattctaaagcttctngatactagactngttcctgcttctgctaatggaga

SEQ ID NO: 151968 - DNA, 254 bp, Arabidopsis thaliana columbia
  unsure (1)..(254): unsure at all n locations
cagnggggtactnnncggatggaggtattgtatttgtgtttatcaccacantttnntaaatgtgtgttgtaagggaaatgatatttaaatcaatagtaaaccttggcgatttgatattctggtttgtttttntgatgaaatanaatannaagctaatcttattatacctttgatannagcttagaaagttttaatatattttacaaanagctccccattatcataaggataagtgggtataataagatatttgc

SEQ ID NO: 151969 - DNA, 430 bp, Arabidopsis thaliana columbia
ctcgtccgttgttgcataagtgctatggatctcgcgtcgaatcttggtgggaagatcgataaatccgatgttctcaccgccgtcgaaaagtatgagcaatatcatgtcttccatggaggaaacgaggaagagagaaaagccaattatactgacatggttaataagtactatgaccttgctactagcttttatgagtacggatggggagaatccttccattttgcacaaagatggaaaggagaatcgcttcgagagagtattaagcgacacgagcactttcttgctcttcagcttggcatccaaccaggacaaaaggtactggatgtaggatgtggaattggtggaccgttgagggaaattgcaagattcagcaattcagttgttaccgggctcaacaataacgaataccagatcaccagaggcaaggaac

SEQ ID NO: 151970 - DNA, 428 bp, Arabidopsis thaliana columbia
catctgctgaagaagatgctttgaagtgtaacaccgattgcgtttactttctcgcttctcctttaacctgcaagaagggacctgaatgcgagtatcgtcacagtgagtatgcgcgtatgaacccgagggattgctattattggttgaatggaaactgtttgaatcccaaatgtggatttcggcatcctcctttggagggattgttgggaaatcaaggaggtgctcctgctgtttctgtacagccaatacatgcaaccgcgcagcatactagtgttgcaaaacagcctgttccatgtctgttctttcaaaaaggcatgtgtatgaaaggagatatgtgttcgttcttgcacacgccgaatcctgctgcgtataaaaaacagcatcctgtagaagctaagcctgctactgatcctcagtgttctaaaaag

SEQ ID NO: 151971 - DNA, 325 bp, Arabidopsis thaliana columbia
caaaaaaaaaaaaaaacagaaagtaacatgagatctctcttattagccgtgtgcctggttcttgctttacactgcggtgaagcagccgtgtcttgcaacacggtgattgcggatctttacccttgcttatcctacgtgactcagggcggaccggtcccaaccctctgctgcaacggtctcacaacactcaagagtcaggctcaaacttctgtggaccgtcagggggtctgtcgttgcatcaaatctgctattggaggactcactctctctcctagaaccatccaaaatgctttggaattgccttctaaatgtggtgtcgatctcc

SEQ ID NO: 151972 - DNA, 416 bp, Arabidopsis thaliana columbia
aaaacgctcgcctacttctcttctctctcaccatagagatagtttcaagctccaaaagttcttcaatcagattctggaaactaggttgttggtagaagttatggtgagaaatgaagcttagattgagatttaagttatgggttgtgtatttggccgagaggcggcgacaacaacaacagctgaagctaaacaagctaagagctctaaagctagtagtggagtagtagtagtaggagagagtagtgtgactaagagtaatggagttattgctgatgatgtagagaagaagaagaatgaggaggcaaatggtgataaagaaaggaaatcatccaaaggagatcgaagaaggtcgacaaagccgaatccgcggttgagtaatccttccaagcattggcgtggtgaacaggttgctgctg

SEQ ID NO: 151973 - DNA, 408 bp, Arabidopsis thaliana columbia
aaaaaaagtcactgaagatttattagactctcttcttcttcttcctccttggcgcaggttcgcaatttcgcaatcgcatcagtcaattatcgaatcgtcctcccagagattaccggagaaaatgaggattgatgagaacgaaggtgtctctgcttcaagcaagcacctagtcttcgcttactacgtcactggacatgggttcggtcacgccactcgagtcgtcgagggtgtccgtcacctgatcgcggcggggcatgatgttcatgttgtcaccggcgcgcctgattttgtcttcacatctgaaattcagtctccgaggctcaaaattcgaaagggtcttttggattgtggggctgtacaagctgatgcattgaccgctgatcgtcttgcctcgttagaaaagtatgt

SEQ ID NO: 151974 - DNA, 352 bp, Arabidopsis thaliana columbia
ctctctctctctctctctcgcttcgacctctctttcgactcctactccggctccagctgagcttgagaagagaaagcacaagctcaaacgtcttgttcagtctcccaattcctttttcatggtaatgtaaatttgaaacctttctccttcttttgaaccctttaggaacaaagtctctgtggttagaatctatgtaactactcgactttgtgaattgtatgtaagttttgagtctgtgggagacgtgggaggtcatcttcttactctagttcaccaagtcatctttttttttgtgtgggtttctctgttaaatcatttcttcctgtagccattgtagtcttttttctttact

SEQ ID NO: 151975 - DNA, 418 bp, Arabidopsis thaliana columbia
cgctcatcgcttactgaaaccagaaacatgtttagggtttttgcggaggtttcaaagttaacaatggcggaagagcacaagcacgaggaatcgatcatggagaagatctctgagaagatccatggtcacgatgactcttcttcttcttcttccgattcggatgacgataagaactctgcgtctctcaaaaccaagatttatcgtcttttcggaagagaacagcctcttcacaagcttttcggtggcggaaaacctgccgacattttcctgtggaggaacaagaaggtatcaggaggagtattgggtgctgcaactgtttcctggatcttattcgagttacttgagtacaatcttctcacactcttcggccacatttcaattcttgctctcgcagtattgttcttgtggtctagtgcta

SEQ ID NO: 151976 - DNA, 418 bp, Arabidopsis thaliana columbia
cggacgcgtgggcttccaagttttttcctttggctgtctcttgatcattggtgactatttcttgtctcaaggaagatccaaactctttgtaatcttcgaggtcgggttttatggtggtatcgtcttccctctccttaccatgttcccaagaattgcccttatgatatcgcctggactagcagcgacccacgagggtgctttaatgattgttggaaacaacgttggagttactattggacacacaatctttgctctgacaatgcaatggggagcttgtgttatctttggtttgactagtcctaattcagatccatcaatccgaagaggatctatcaaaagaacatcctctgacacaaagaatccaagaagaggattttacaggatgaagatactaaaaagtgttgttgaagcaagcgta

SEQ ID NO: 151977 - DNA, 426 bp, Arabidopsis thaliana columbia
  unsure (1)..(426): unsure at all n locations
atcaatccttctttaatttacttattcttagtataacgttcacaccttttcttacacatttacaactatatatggagtcgtcacggagcctcgagcacgtgctctccatgcaaggtggcgaggatgacgcgagctacgtcaaaaactgttacggtccagcggcagctttagccttgagcaaaccaatgctgacgacagccatcaactccataaagctcaccgaaggttgctcctctcacctgaaaatagccgatttaggttgcgcaatcggagacaacacgttttccacggtggaaacggtggttgaggtgttagggaagaagctagccgtgattgacggtggaaccgagccggagatggagttcgaggtcttcttctctgacttgtcttccaacgatttcaacgcgtngtttcggtcgttggatg

SEQ ID NO: 151978 - DNA, 410 bp, Arabidopsis thaliana columbia
cacaaagcgatgtcgcaactcttatcgactcctctaatggcggtcaactccaatcctcgctttctctcttcgtcttcagtactcgtcaccggaggttttgcagtgaaacggcatggattcgccttgaaaccgacgacgaagacggtgaagctcttctcggttaagtctcgccagacggattacttcgagaagcagaggttcggtgactcttcttcttctccttcacctgctgaaggattgcctgctagattttacgtgggtcattcgatatacaaagggaaagctgcgttaacagtggacccaagagcaccagagtttgtggctttagactctggagctttcaagttgtcaaaagatggtttcttattgctccagtttgctccttctgctggtgtacgacaatatgattg

SEQ ID NO: 151979 - DNA, 415 bp, Arabidopsis thaliana columbia
gctaagtctgaaagaatgacgaaggatgagttgacggaggaagagtcgctctccggcaaggactacttagacccaccgcctgtgaagacgttcgaggtgagagagctcaagaagtggtccttctacagagctgtcatcgctgagttcatagctactttgctctttctatacgtgactgttttgacagtcatcggctttaagagccagactgatatcaacgccggcggcggagcttgtgccagtgtcggcctcctaggcatctcttgggcctttggtggcatgatattcatcctcgtctactgcactgccggcatctctggtggacacatcaatcccgcggtgacgtttgggctattcctagctagcaaggtatcattggttagagctgtgtccgacatggtggctcagtgtctcg

SEQ ID NO: 151980 - DNA, 401 bp, Arabidopsis thaliana columbia
atcagatgtcctcggaagcggccgtgtgtccatgaggaagactgtcgccaagccaaagggtccatcaggcagcccatggtacggatctgaccgagtcaagtacttgggtccattctccggcgagcccccgagctaccttaccggtgagttccccggtgactacggatgggacaccgctggtctatccgccgacccagagaccttcgccaggaaccgtgagctagaagttatccacagcagatgggccatgctcggagccctaggctgcgttttccctgagctattggctaggaacggagtgaagttcggagaagcggtttggttcaaggccggttcacagatcttcagcgacggaggattggactacttgggcaacccgagcttggtccacgctcagagca

SEQ ID NO: 151981 - DNA, 427 bp, Arabidopsis thaliana columbia
attcggtggtggaggaatgcctcctgcgtctgctcaattccgatcatttaatttcggagctactcgtcagagaacagctaataacaatcaagcacctgatgcaggtttcaatgctcgtatacttctccagcttcttcctgttgtcttcatacttctgctcaacttcatgccttcttctcaaccagtttaccaactctctgcaacttatccttaccagtacaagttcactacacagaaaggtgtcaattactttgtgaaatcgtctaaattcgagcaggattatccacgagatagcaacgatcgacacacgctggaagaacaagttgagagagattatgtgtctatacttagtcagaattgtaggtatgagatgcagaggaaacaatggggatttgttcgtgaaacgcctcattgtgacatgatgagg

SEQ ID NO: 151982 - DNA, 442 bp, Arabidopsis thaliana columbia
aatcgcaggttcgacccacgcctacgcgttgctactaccgcaactatggaaagacctttaagggaccacgtcgtccttacgagaaggagcgtcttgattctgaattgaagctggttggagagtatggtctgcgtaacaagcgtgagctctggagagtgcactactctcttagccgtatccgtaatgctgctagagatcttttgactcttgatgagaagagtccaagaaggatctttgaaggtgaggctttgctccgtaggatgaaccgttacgggcttcttgatgagagccagaacaagctcgattacgtcttggctttgactgatgagaactttcttgagcgtcgtcttcagactattgtgttcaagtctggtatggctaagtctatccatcactctcgtgtcctcatcaggcagaggcatatcaaggttggaaagcaatt

SEQ ID NO: 151983 - DNA, 413 bp, Arabidopsis thaliana columbia
ggcggctttaagcatctcactagctttctctgttgattctctcaaaccaacccaatcaacgaagtttggcttctcgtcttcttcacatagatatccattactctactcgtgtaaatctcaccgctccaatctcagattcgctttccctccttcttcagtttcgacagctacagaaactggagaagaaaactctaaatcgaccgggaattacgcgtttctagaggaatcgtttcgtaccgggagggttttgagtaacgatgagttagagaagcttaaaactcttgaaggatttgcgtattttcaagagcttgaatctggatcgatgtgggttcgagttatgagacatgaagagatggattcaacggtgcatctattggctgagtcatttggtgaatcgatgttattaccttctg

SEQ ID NO: 151984 - DNA, 405 bp, Arabidopsis thaliana columbia
gaaagaaaaagcccagagagaagagagtgagacccacaacacaaacacaaagtagacgaagaagacgacgacgaaacagctctcttcttctctcctctctctcagcatcttctgctggtttggtctttcactaaagtctcggtgtgcacctaaatgtgcttgatccaaggtcgttataattctgtgtacagagccaatgccatatatagaaatgaagagcaagataagcaaggttcttggtgtctgtaagaaacataaagcaagtacaagaaattcttgctctttgtccaaaatatcaggagacttggaaagcataaccgcagctattactacttgccacgacgatgagaaacagcaccctgggttggatactttttctcgggagagtgaaactaatgagcccgc

SEQ ID NO: 151985 - DNA, 340 bp, Arabidopsis thaliana columbia
ggcagcctctgttgccggtacagctgtttttattattagatctctcatacccagatataaatccgtggtgccaaagaattatgttgggagacgaaactgaccctcttaagaaagctgatgctaaacctaccttagctgaagaagctgtagctgcagccaaagctgcttctgcggctgcttttgatgtatccagggttagtcaggaaatgatgataacaaagaatgaagagaggaaatattttgaggacttaacgcacctgttaggtgttcaagtacatcaaatgaagtccttgagcaataatattcgtaagccttgaggtgcatctaacaacatcccaaa

SEQ ID NO: 151986 - DNA, 425 bp, Arabidopsis thaliana columbia
ccgcacgcgtccggtagtagcgactgcaatatccacttggttggtggtacaaagcaggtcgtcggcttctgcttactatgtcttcggttgggatgacgattagccttgtaattgttgcagctgctttctatcttaaggaatttgtgtctcctgattcagacatgtacagttggctgagcatattgtcagtagttggagttgtggcaatggttgtctttttctcattgggaatgggaccaataccgtggctcattatgtctgagatccttcctgtgaacataaagggtttagctggaagtattgcaactctagccaattggttcttttcttggttgatcaccatgacagcaaatttgctgttagcctggagcagtggaggaactttcactctgtatggattggtttgtgcattcacagtggtgttc

SEQ ID NO: 151987 - DNA, 441 bp, Arabidopsis thaliana columbia
aaattatcgaagcccactggtttcggagctgatcggtctctatttctctcttcatacatatctcaagcagataaagttgatcggatactagaatgggaggaggatttagagttttgcatttggtgaggccattcttggcttttctgcctgaggttcagagtgctgataggaaggttccattcagagagaaggttatctacactgccatctctctcttcatctttcttgtctgcagtcagcttcctctttatggaatccattccaccaccggtgcggatccattctattggatgcgtgtcattcttgcgtccaaccgtggaactgtcatggagctcggtattactcctattgttacatctggacttgtgatgcaactcttggctggttccaagattattgaggttgacaacaatgttcgtgaggatcgtgccctcttgaatg

SEQ ID NO: 151988 - DNA, 453 bp, Arabidopsis thaliana columbia
gtgaagtttaggagaggaagagagatggaggtatttagacttggagagctgagacacctactggtgacggttttcttgtcggggctcgccgaatacttgataaggccagtgatgactgacgtcaccgtagccgcggtttgctccggcctagacgattcatgttctttggccgtctatctcaccggagtacaacaagtgacggtaggaatggggacaatggtaatgatgccagtgatcggcaatctatcggacagatatggaatcaaagcaatgctcactcttcccatgtgcctctctgttcttcctccagcaatattagggtacagaagggataccaatttcttttacgcattttatgtaatcaagaccctattcgatatggtctgccaaggcaccattgactgtctcgctaacgcttatgtggcaaaaaatggtcatggcacaaaaagaata

SEQ ID NO: 151989 - DNA, 289 bp, Arabidopsis thaliana columbia
cctctgttcggtcggccattgaattgttgttgattcattggctctaaaacgaaaatgggaattctcaacgacgacgccgttttaatcgaaccgggaaaaatctccggagatcccaccgtcgttaccgtcaattgtcctgatgaatccggtctcggttcaactctgtgtagaatcatcctcgaatttggtctctccattacccgagcagatttttcaacagatggaagatggtgttatatagtgttttgggttactccagatattagctctcctaaaattgattgggaca

SEQ ID NO: 151990 - DNA, 443 bp, Arabidopsis thaliana columbia
  unsure (1)..(443): unsure at all n locations
gcggatttggtatagcttctcgacctcagttggacaagggtttgtcggaaaacaatatagggttcacggaaagagttttctctgccgccggagctgcggttttgtccgccgttactctaaatcctcttgacgttgtcaagactcgattgcaagctcaagccgccggaatgtcgtactctcacccactcagtaactccattggacgcatggcattttttggcccaaacatgatgtttgcagacttgagatgttctccttcatgtgcacgcgctggtgttgaaggtactgtttctatttgcccaccggattgtttccagtacaaaagaacatntgatgtcttcaccaagatcatacgacaggagggtctgggacgcctttggagagggactaaagctggtcttgccctagcttggcccattggtgggatatatcttccattctat

SEQ ID NO: 151991 - DNA, 420 bp, Arabidopsis thaliana columbia
ctctgtttctttcttccatggagctcttctcactctcttctcttctcctactctccactctgttcgttttctacatcttcaagtttgttttcaaaagaagaaaccagagaaactgctacatgcttcactacgagtgctacaagggcatggaagagagaaaactcgacaccgagacttgtgctaaggtcgttcaacgaaacaagaacttgggtcttgaagagtacaggtttctccttcgtactatggctagttccgggataggagaggaaacgtacggcccaagaaatgtgcttgaaggtagagaagactctcctactctccttgacgctcactccgaaatggacgagatcatgttcgacactctcgacaagctttttcacaagacaaaaagctcaatctcttcttcagacattgatattc

SEQ ID NO: 151992 - DNA, 460 bp, Arabidopsis thaliana columbia
cttcggtttttcccaggattcggtttcaggatggaagtttttcaaacaatgtctagtcctcttggtcactgtcagattcttgtttttcttcatgctttgcttatcttctcagctgagtcccgcaaaacccaattgctgaacgataatgatgttgaatctagcgacaagagtgcaaaaggcacacgatgggctgttttagttgctggatcaaatgaatattataactacaggcatcaggctgacatatgccacgcgtatcagatactccgaaaaggcggtttaaaagatgaaaacatcattgtgtttatgtatgatgatatcgcgttttcctcggagaatcctaggcctggagttatcattaataaaccagatggagaagatgtttataaaggagttcctaaggactacactaaagaagctgttaatgttcaaaacttctacaatgtgttacttggaaatg

SEQ ID NO: 151993 - DNA, 460 bp, Arabidopsis thaliana columbia
tcggttcttacaagaatcaaattcaaaaataaaatttttttaaccatggtctatccctttggtcactgcgagattctagtttttctgcgtgctttgcttatcttctcagctgagtcccgcaaaacccaattgctgaacgataatgatgttgaatctagcgacaagagtgcaaaaggcacacgatgggctgttttagttgctggatcaaatgaatattataactacaggcatcaggctgacatatgccacgcgtatcagatactccgaaaaggcggtttaaaagatgaaaacatcattgtgtttatgtatgatgatatcgcgttttcctcggagaatcctaggcctggagttatcattaataaaccagatggagaagatgtttataaaggagttcctaaggactacactaaagaagctgttaatgttcaaaacttctacaatgtgttacttggaaatgaaa

SEQ ID NO: 151994 - DNA, 470 bp, Arabidopsis thaliana columbia
cgacgcgtccgcggcgccgtgtttaccaccgccaacactctttttttttccggtgaaatctccaaacagatcggcgcgagttatccaactctcggcggcactacgcgccagctggcaccaaaactccccgtcgctatctccgtcgttctcaccgacgacgaagtttaccaggagctcactagcgcaatcagagtcgttgggattttaagcgagatggtgaagaaagaaccgagtgggcaacgagtcagggaccgagtcaaccaggacgacacggcgatgatgctttactcgtcgggaaccacggtaccgagcaaaggagtgatctcgtctcaccggaatttaacagctcacgtggctagattcatatcggataatttgaaacgagacgatattttcatctgtaccgatccgatgttccacacctacggtttattgacctttgctatgggcaccgtagcattgggttcaac

SEQ ID NO: 151995 - DNA, 419 bp, Arabidopsis thaliana columbia
  unsure (1)..(419): unsure at all n locations
gaggttccctgtcaactcaactctnacctttgtaatcttgctgtgaatctcatcccatggcgccgcctctttactttttcatggcgggttttgctcctctcacctcaagaggttctcagcagtaccgttccctcacagtccctgagctcacccagcaattgtgggactccaagaacatgatgtgtgctgcagacccaaggcacggacgctacctcacagcctntgccatgttccgtggcaagatgagcacaaaggaagttgtcgagcagatgctgaatgtgcagaacaagaactcgttctactttgtggagtggatccccaacaacgtgaaatcaacagtctgtgacatcccacctactggtctgaagaaggcatcaacttttattggaaactcaacatctatccaagagatgttcatg

SEQ ID NO: 151996 - DNA, 272 bp, Arabidopsis thaliana columbia
gagatatcaatactcctgtgagaacaaaatgttgctttcttgtggtacaagctttgcgttctgacggctgtttcttcttgcggcacagtctgtgcatgtctatgcgggtagcttccacaaagacgttcagatacattggggtgatggccgcggaaagattcacgacagagatggaaaacttctttctttctcgctcgacaaatcctctggatccggttttcagtctaaccaggagtttttttatggcaaaaccgaggtttaaatgaaaactt

SEQ ID NO: 151997 - DNA, 416 bp, Arabidopsis thaliana columbia
gcttctttctctgcactagagacgcttgggttcatgtgatccaacagcttgaagaagaagagatcacgtgcgctctacaatcagatctcgttaagcatgtgttcaccttcaacaatctcaagggaggagataagagcagattctccaccgtattcaccgagaacgatgcggatcagtactctctcgtcttcgctaattgtctccaacaggtcaaaatcagtatggatgttagatccgctatgtataaccttgaaggtaaaaagggaggtcgtgattatctctctgctggaagaactgttcttcctaaggactatttcttattctctggtatctatttctctctcgccgccacgtggatctacgttctctataagaaacgtctcactgttttcgcaatccatttcttcatgttggga

SEQ ID NO: 151998 - DNA, 422 bp, Arabidopsis thaliana columbia
gctcttgacgaagaaactatttaaaaaaaaaatgagagagatccttcatgtggaaggcggtcaatgtggaagccagatcggagcaaagttctgggaagtgatctgcgacgaacacggcattgatcacaccggtcaatacgtcggcgattctccgttacagcttgaacgtatcgatgtttatttcaacgaagctagcggtggaaagtacgttcctcgcgctgttcttatggatctggagcctggtaccatggattctctcagatctggaccgatcggtcagattttctcgcctgataacttcgtctttggtcaatctggtgccggaaataactgggcgaaaggtcattacaccgaaggtgctgagttgattgattctgttctcgatgttgtgaggaaggaagctgataacagcgattgtctta

SEQ ID NO: 151999 - DNA, 458 bp, Arabidopsis thaliana columbia
cgaaaatagttctttgtgattttcgagtgagtgagacgacagcttccattatcccctgtctgtctccctctcgaactacaaatcaaattcgagtgttttcatattgttaatctttttcttcaaggaaagaagagattttgttttccgtttctgggggtttttcttgattctgatctctgatctgatctcatcatcattgtccgtggattctccgatgggtttctgattgtgggttctttcaaatttcttcacttttggagcttttcttctctctgtcttttgttttccctcagctatggcttggaatgagaccaaactcaagaggctctatcaagtttggagaggaagcaataaatttctatgtggcgggaggctaatatttggtcctgatgcatcatctctatatctatcaaccatcttgatccttggtcctgctgtaatgttctttgtcaaaatgt

SEQ ID NO: 152000 - DNA, 457 bp, Arabidopsis thaliana columbia
gcaaaagaaaaaaaagctattgtttgaaagattaagaagttaactatggcaaaggatgtgggggccgttcccggagaaggatttcagacaagagactatcaagatccgccaccagctccgtttattgatggagcggagctaaagaagtggtctttctacagagcagttatcgcagagttcgtagccactctcctcttcttatacatcaccgttttgacagtcatcggttacaagattcagtccgatactgatgccggtggcgtagattgcggcggagttggaatcctcggtatcgcttgggcctttggtggtatgatcttcatcctcgtctactgcaccgccggtatctctggtggtcacattaacccagcggtgacatttgggctattcttggcacgtaaagtgtcgttacctaaggccctattgtacataatcgctcagtggttgggtgcgattt

SEQ ID NO: 152001 - DNA, 401 bp, Arabidopsis thaliana columbia
cccacgcgtccggaagaacaacaacactaagcaaaaaagaaaagtttatgccgagagagacaatggcatcaacatgcacgagctcaagcagtgttcttaccccaacaacattccttggccagactaaagcctcaagctttaacccccttcgtgatgttgtctctctcggatctcccaagtacactatgggaaatgatctttggtatggacctgacagagtgaagtacttaggacccttttccgttcaaactccgtcttacctcaccggagaattccctggcgattatggttgggacaccgccggttaatccgcagaccctgaagcctttgccaaaaccagagctcttgaggtgatccatggaagatgggcaatgttggaagcttttggttgcataacccct

SEQ ID NO: 152002 - DNA, 191 bp, Arabidopsis thaliana columbia
gctcttgacgaagaaaccaataaaaaaaaaaatgagagagatccttcatatccaaggcggtcaatgtggaaaccagatcggagcaaagttctgggaagtgatctgcgacgaacacggcattgatcacaccggtcaatacgtcggcgattcttcggtacagcttggacgtattgatgtctatattaaccaaa

SEQ ID NO: 152003 - DNA, 466 bp, Arabidopsis thaliana columbia
  unsure (1)..(466): unsure at all n locations
ggctttttccttcttcaaatttttttggtcggtttaattggttttgcgatttaaatggcaagccgttggttgagacctgaggtgtatcctttgttcgctgctaccggagttgccgttgggatctgtgcgttttccttgatcagaaacatcaccggaaaccctgaagtcagatgcaccaaaggagaacagggctgctggaattttggataaccatgcagagggagagaagtataaggaaaatttcctgaggaagtttgttcgcaacaagaaacctgaaatcatgcctggactcaacaagttcttcactgatcctacatactgaaaccatctttgcacaccgctttgtcgtattgtttctggaattgaatctctttgtgatataaaaccgcatttgtcaatttcacattgttgatgtatcctncagctgaagacacttgttaaatgctggcttatgttgtcactttta

SEQ ID NO: 152004 - DNA, 374 bp, Arabidopsis thaliana columbia
attaaaacacctacccaaacaaaactgtagatctgaaaagctcagctatgaaaaggacgaaggcggggtagtaatcctggggggcggaatcggtggtctgcgtcacttacatggctctgcatacgaaacgaataacgagtgcggtgtcgtagagagcaaccatagtgtgatcggcacgagctggaacaggaactctgtacaatggttggagcgcccttgatcagagaggcgtaggggatcgcctctgactcaattcgtttgttacacgcaacgcacggtccttcttgatctgaacaggatattaactggaactacatacagatatcatatacgcacactcgtgtgtcaaatggaacgtgctatgtggaggtctt

SEQ ID NO: 152005 - DNA, 446 bp, Arabidopsis thaliana columbia
ccacgcgggcgaaacgggcaaaaaagaatttaaccaccaggtatttgtaatggcttcctctatgctctccgcgggcgctgtggttacatccccggctcaggccaccatggtcgctccattcaccggcttgaagtcatccgctgcattcccggtcacccgcaagaccaacaaggacatcacttccatcgcaagcaacgggggaagagttagctgcatgaaggtgtggccaccaattggaaagaagaagtttgagactctatcttacctccctgaccttagtgacgtcgaattggctaaggaagttgactaccttctccgcaacaagtggattccttgtgttgaattcgagttagagcacggatttgtgtaccgtgagcacggaaacactcccggatactacgatggacggtactggacaatgtggaagctttcattgttcggatgca

SEQ ID NO: 152006 - DNA, 455 bp, Arabidopsis thaliana columbia
tttgtgttttagaaatgaagattctgctcccgtgaatccggagcattttgtgcctgaggaattagttaagccagatcaagattctccatgtacagataaaacagattggaaggcaacttttcaaaaggctgcagatgcagttttgaaggccattgggactcgttggaaggtaccatggactgtcgagaccattgtgcaggtaatgcttctgtgggtagccgctttctggttcattggttcatggatgatcccattcatggctcatatatcaggtttccacaaagaatccctaacatttagaggccaagctttgttcagtctgataaccgatgtaacagaaggcctagccgggattgctatcctccaccgttgcctctccatgttccgtccacttgcaagtgattggttccgctttacccttaaaggaaactggcaactagatgttatcataggct

SEQ ID NO: 152007 - DNA, 454 bp, Arabidopsis thaliana columbia
agagaaacggccgaatcttcataaattccgtcatctgttaagctcaatcgccgcctaaacgtccggcgactctctcgaagatatttggtgattgaggtgactcggaagagagtgagagagagagatggatgatagaggaggatcgttcgtagcagtgagaaggatttcacaaggtctagaacgaggaagtgtttatcattcttcttctgctgaggttgtagctggatcggcagcgtggttaggccgtggcctttcctgtgtttgtgttcagggtagagacggtgaccctcgtccttcatttgatctaacgcctgctcaggaggaatgcctgcagaggttgcaaagccgcattgatgttgcttatgacagctcaatacctcagcatcaggaagctctaaaggatctttggaaacttgcatttcctgaagaagagctacacggaattgtatctgat

SEQ ID NO: 152008 - DNA, 460 bp, Arabidopsis thaliana columbia
cgcaactgaatcgtaccaatgagatcatcctccttattttaatctcccacctgatttgagctgtttctttctctttcgaactctccgtcacttccatttcatttctatttgaatcttctcaaagctacacagatctctgaaatcgaaaaagcttgagctgtgttaatggcggaggagaaatgggtggtgatggtgacggcgcagactccaacgaatatcgccgtgattaagtattggggaaagagagatgaggttcggattcttcccattaatgatagcattagcgtcacgcttgatcctgatcacctctgtactctcaccaccgtcgctgttagtccttcctttgatcgagatcgaatgtggctcaatggcaaggaaatctcgctttctggaagtaggtaccagaattgcttgagggaaattcgaagtcgtgctgatgatgtagaagataaagaaaagg

SEQ ID NO: 152009 - DNA, 449 bp, Arabidopsis thaliana columbia
agtgagagaagaaagatagagaaaaaaaatgttaggcaaaggtgtgatgatggtggcgatactttgcctttgggcactctctgcaacatctgaagcagtaacagaggctgagccaggtttgatgatgaacttctacaaggacacgtgtcctcaggccgaagacatcgtccgtgaacaagtcaaactcctctacaaacgccacaagaacaccgctttctcttggctccgtaacatcttccatgactgcgccgttgagtcatgtgatgcgtcgcttttgctggattcgacaagaagagagctaggagagaaagaacacgacaggagcttcggacttagaaactttaggtacatcgaggagatcaaggaagcttttgagagggagtgtcctggtgttgtcttatgttttgacattctcggcttgttcgcaagagaaggtatttaagcagtat

SEQ ID NO: 152010 - DNA, 448 bp, Arabidopsis thaliana columbia
  unsure (1)..(448): unsure at all n locations
tcggccaacccttccggttccgttcgccgggattcattttcgtttggtctaaccgccaccatcaccgggtttttcttccattgacaggatcttgtttagattctgcaatggctttcaggcaaactttatctataaggtccaggcttttcgctcgtcgtaaccaaccagtttatcatattatccctcgtgagagtgatcatgaaagggattcattctgtcaagaaacatctcagagaagttaccatagctttcttcaccaaagatccgttaacaattctgatttctccaaagtttctggaggaagcttacatttgcctcttgctcccacgtctggttttgctttctatcgntatatgtcaagtgcacctggtgttggttcaaagaagattggtgtgatgtctgacattgcagaagtcatacccgactcaacattgcaagatgtgccagc

SEQ ID NO: 152011 - DNA, 464 bp, Arabidopsis thaliana columbia
cttccggcaaggggaaccaaaaaacatcaagtttgaatagtgtttcatcaagaacactcgaggaatgaaagtgttcacgtgcaaatgggtgccagcaaagcaagagccaaaggctttagtctttatttgccatggatatgcaatggaatgtagcatcaccatgaacagtactgcgaggaggctggtgaaagcaggatttgcggtatatggaattgattacgaagggcatggaaaatctgatgggcttagtgcttatgtcccaaactttgaccatctcgttgatgatgtctctactcactacacaagcatttgcgagaaagaagagaataaagggaagatgaggttcttgttaggagaatcaatgggaggagcagtgcttttgttgttacacagaaagaagccttagttttgggatggggctgtcttggttgctccaatgtgtaagattgcttgagaaatgaaac

SEQ ID NO: 152012 - DNA, 470 bp, Arabidopsis thaliana columbia
aatcctttcctttcattgtagttaaacaaagattacgattatggccacatcagctatccaacgaaggctccttcgccggccaaacggctctcaagccctccagcgacctcatccaaaaggtgggcgtcttgggcggtggccgtgtgaccatgcgtcgtaccgtcaagtctactccccaaagcatctggtatggaccagaccgtcccaagtacttgggaccattctcggagaacacaccgtcttacttaactggagaataccccggagactacggctgggacaccgctggactctcggctgacccggagacattcgctaagaaccgtgagcttgaagtaatccacagcagatgggctatgttgggtgctctcggatgcacattccctgaaattctctccaagaacggtgttaaattcggagaagccgtgtggttcaaggcaggctctcagattttctcagaaggaggtctt

SEQ ID NO: 152013 - DNA, 287 bp, Arabidopsis thaliana columbia
aaagataactattcttgtttttttttttctgccaactactttacaggggcggtttatgccttgatggggataaaacatcgcttgaaactgtttgtgaagctgcagaagactggagaagtgatgatataaaaggttttcttggacgctgcaacttcaaagcatacatgcttgatcgaaaggtctctcttttaagtggtggggagaaagcgcgtcttgctttctgcaaattcatggtgactccatttactttacttgttttggactaaccaaccaatcacttagacatt

SEQ ID NO: 152014 - DNA, 365 bp, Arabidopsis thaliana columbia
gaagaacaatggcttcctctatgctctcttccgctactatggttgcctctccggctcaggccactatggtcgctcctttcaacggacttaagtcctccgctgccttcccagccacccgcaaggctaacaacgacattacttccatcacaagcaacggcggaagagttaactgcatgcaggtgtggcctccgattggaaagaagaagtttgagactctctcttaccttcctgaccttaccgattccgaattggctaaggaagttgactaccttatccgcaacaagtggattccttgtgttgaattcgagttggagcacggatttgtgtaccgtgagcacggtaactcacccggatactatgatgga

SEQ ID NO: 152015 - DNA, 454 bp, Arabidopsis thaliana columbia
cgcatttgattcgtaccaatgtgatcattttttttattttaatcttccacctgattagagcggggtttttctctttcgaactgtccgtcacttacatttcatttctatttgaatcttctcaaagctacacagatctctgaaatcgaaaaagcttgagctgtgttaatggcggaggagaaatgggtggtgatggtgacggcgcagactccaacgaatatcgccgtgattaagtattggggaaagagagatgaggttcggattcttcccattaatgatagcattagcgtcacgcttgatcctgatcacctctgtactctcaccaccgtcgctgttagtccttcctttgatcgagatcgaatgtggctcaatggcaaggaaatctcgctttctggaagtaggtaccagaattgcttgagggaaattcgaagtcgtgctgatgatgtagaagataaag

SEQ ID NO: 152016 - DNA, 455 bp, Arabidopsis thaliana columbia; identical to SEQ ID NO: 130828

SEQ ID NO: 152017 - DNA, 436 bp, Arabidopsis thaliana columbia
caaaaccacaacaaaacacatggctaagctcattttcttcctcgccgtccaaatcctcttgggggccgtggtttcttccgccggagacggtgaagacttcgctagaaccatggaccggaaacttcttggtctccacaaaaaggagaaacttacccatttcaaagtctattggcacgatatcttaagcggtccgaacccaacctccatcatgatacaaccaccggttacaaacagttcctattttggagccatctccatgatcgacaacgctttgacggccaaagttccgatgaactccacggtgttgggtcaggcccaaggattttacgccggagcggcccaaaaggagttgggtttcctgatggcgatgaactttgctttcaagacagggaaatataacggaagcacgatcacgattcttggcaggaacacggcg

SEQ ID NO: 152018 - DNA, 429 bp, Arabidopsis thaliana columbia
agaaaacaaaactcaactaattgtgttatcacccaaaagagaagagcaaacacaatggcttgggctttgaggttcttcacatgctttgttttgacagtgttcatcgttgcatcagtggatgcagcaataacatgtggcacagtggcaagtagcttgagtccatgtctaggctacctatcaaagggtggggtggtgccacctccgtgctgtgcaggagtcaaaaagttgaacggtatggctcaaaccacacccgaccgccaacaagcatgcagatgcttacagtccgctgcaaaaggggttaatccaagtctagcctctggccttcctggaaagtgcggtgttagcatcctctatcccatcttcacgagcaccaactgcgccaccatcaagtgaagtggggaataacgacatcatttgcctgaagagtat

SEQ ID NO: 152019 - DNA, 331 bp, Arabidopsis thaliana columbia
gtcgtttcctttcttccatggaaagtaataggaactgcagtcggtgcggtgaattactttctgagctcgtacttcctgaaatggataacctggaaatgcctaacatgtcaaaactggccaacattttggttaccgaagcaccaaggcaggagatgagggatttatccccaactgctgttggctaaggattgccagttactggggggaaggggtctgggttccggaaatgtacttaaaagatgcttaagtggtccccaataaaaatgccagacccttttgttacttggaattgggttgttcaggaacttaattttattgagcaggttaacgg

SEQ ID NO: 152020 - DNA, 371 bp, Arabidopsis thaliana columbia
agtgagagaagaaagatagagaaaaaaaatgttttttcataggtgtgatgatggtggcgatacgggggctttgggcactctctgcaacatctgaagcagtaacagaggctgagccaggtttgatgatgaacttctacaaggacacgtgtcctcaggccgaagacatcgtccgtgaacaagtcaaactcctctacaaacgccacaagaacaccgctttctcttggctccgtaacatctttcatgactgctccagtgagtcatgtgatgcgtcgcttttgctggattctacaagaagagagctaggagagaaagaacacgacaggagcttctgacttagaaactttatgtacatccgggagttcaaggaagct

SEQ ID NO: 152021 - DNA, 350 bp, Arabidopsis thaliana columbia; identical to SEQ ID NO: 128026

SEQ ID NO: 152022 - DNA, 475 bp, Arabidopsis thaliana columbia
gcgtccgaaggttttccacattttatcatctgggtcctttttttaatgatttgaagacactcaattccgagcgatcttgactagaaggcggattctgtttcatacaaaagtagatttccctgtctctttcccgtttgattttcaataagatgaatccggaggagcaaaagatggaatctgcatcggatctgggcacgctcttcattggcgggatttcatgggacacagatgaagaacgactgcaagagtattttggcaagtatggagatttggttgaagctgcgatcatgagagaccgtactaccggacgtgcccgtggctatgggtttatcgtttttgcagatccttctgttgctcgagagagtcattatggacaaatacatctattgatggtcgcacggtcgaggctaataaagctgtctccttgtatgatcagcaattgctcaaacgacacgccatttcatgcaccttattt

SEQ ID NO: 152023 - DNA, 444 bp, Arabidopsis thaliana columbia
ctgcgataatcgctatattttttacaacggttggatccagcatactgcggggagctgttaccttgagagggtgtagcttttatgtctttgtgttttacgacgctgaggaggctacactctgctcgttcttcacttctcctattcgacgacactcagttacagtttaaagaaagtgtatccaagtttgcgcaagataatatcgctcctcatgcagaaagaattgataaaactaattcatttccaaaggatgtaaacttatggaagctaatgggtgagtttaatctccatggaatcactgcgccagaagaatatggagggctaggtcttggttacttgtatcattgtattgcaatggaggaaatcagtcgggcctcgggttcagttgctttggcttatggtgctcattccaacctttgcatcaatcaattggtgaggaatggaact

SEQ ID NO: 152024 - DNA, 429 bp, Arabidopsis thaliana columbia
acttgcatgactctcggaggccgtgcagctgtttttttattgataggtaaaatctcaacgggtgggcataacgatctagagaaggtgacgaatatgacttacgcgcaagtagctgtgtatggtttcagtgacaaggttgggctactctcgtttccaccaagggatgatggctacgacttctctaaaccatacagcaacaaaaccggtgctatcatagacgaagaagttagggactgggtggccaaagcttatgagcggaccgtagagctggttgaggaacacaaagtgaaagtggctgagatcgccgagcttttactagagaaagaggtgttgcatcaggatgatcttttaaaaattttaggtgaacgttcctttaagttaactgtaggtactaattatgaccggtttaagtttgtgttttgagagact

SEQ ID NO: 152025 - DNA, 446 bp, Arabidopsis thaliana columbia
agcaaagcctctcgttgctagaggaatcaaacaatggtgtttgtgaagtccaccaagtcgaatgcttacttcaagaggtaccaagtgaagttcaggagaagaagagatggaaagactgactacagggcaaggatccgtcttatcaaccaagacaagaacaagtacaatactcctaagtatcgttttgttgtccggtttaccaacaaagacatagtggcacagattgtatctgcaagcattgctggtgacattgttaaagcttctgcttacgcacatgaactgcctcagtatggtctcactgttggtcttacaaactatgctgcagcttactgtactggccttcttttggctcgccgtgttttaaagatgttggaaatggatgacgagtatgagggaaacgttgaggccactggagaagacttttccgttgagccaactgattcaag

SEQ ID NO: 152026 - DNA, 459 bp, Arabidopsis thaliana columbia
caaacaaacaactatctctgcaaatttggctgaaacctcttaaaagttctttgctctgttgcaaattatccatattttctactaacaataatgtcagaaacatcaaagtcagagtctttagatccagaagtctctgaagggctttgttcaaagaccttgatgcagagcattgttcatgagctgaagctgcagatgagaattggtttgccattggtggttatgaatttgttgtggttcggtaagatgaccaccacatctgtgtttcttggccgtcaaggtgagcttaacctagccggaggttcattagggttttcctttgcaaacgttactggcttttctgttttgtatggtatttctgctgcaatggagcctatttgtggccaagctttcggagccaagaactttaagcttcttcataaaaccctttttatggcagtgctcttgctactcttgatttcg

SEQ ID NO: 152027 - DNA, 449 bp, Arabidopsis thaliana columbia
cggacgcgtggggggaacgataccattagtcccaataccaatccttgcaaaattcaaactgcggacaaaccgtttatctcacgcgccgccgtactcgccacgatccgtctttggagaccaatttatggagccgtcgaagggagataccgtagtgaagactgaggtcccggtgaaggatccatcgctaagcgtcgtcgattcgaaaacgaagggagtcgaggatgcgaacactgagatagccttgttcgatgaggttgaaatcgagacgaagggaagcgattcgacaccggtgaaagctccgagtcgaacatcgtctggatcgaagaaatctgtacattggagccccgaattggtgtctggatctcaggaaccggatcagaaagctgcatcgtcttcttcggctggatctaatccgtatattgctcgttcttcagctgagactctagatg

SEQ ID NO: 152028 - DNA, 454 bp, Arabidopsis thaliana columbia
ttttacacgaacacattcttccgatctttcttgtttttaacttaccggtaataacgaagatatgcagaggtttttctccgccagatcgattctcggttacgccgtcaagacgcggaggaggtctttctcttctcgttcttcgtctctcctattcgacgacactcagttacagtttaaagaaagtgtatccaagtttgcgcaagataatatcgctcctcatgcagaaagaattgataaaactaattcatttccaaaggatgtaaacttatggaagctaatgggtgagtttaatctccatggaatcactgcgccagaggaatatggagggctaggtcttggttacttgtatcattgtattgcaatggaggaaatcagtcgggcctcgggttcagttgctttgtcttatggtgctcattccaacctttgcatcaatcaattggtgaggaatggaact

SEQ ID NO: 152029 - DNA, 439 bp, Arabidopsis thaliana columbia
caagaatcatgacgagctctgttagagagaagaagatcaagaccaacgggatttggttaaacgttgctgagaaaggagacgaagaagggcctttggttctgttactccatggtttccctgagacatggtactcttggcgtcaccagatcgatttcttgtctagccatggttaccacgtggtcgctccagatctcagaggctacggtgactccgattctctaccgagccacgagtcttacactgtgagtcacctagtcgctgatgtcatcggtttactcgatcactacggcactactcaggcttttgtggctgggcatgactggggagcaatcataggttggtgtctatgcttgtttagaccagaccgagtcaaaggtttcataagtctctctgttccatatttcccaagagatccaaaactcaaaccttcagatttttc

SEQ ID NO: 152030 - DNA, 353 bp, Arabidopsis thaliana columbia
ccagaattacaccactattcgttatggcaccagaccggcctttagagagatatttgagtcattgaatgggaaatgggggagtgtggatgttggagtgatagtatgcggtccagcgactcttcagacgaccgtagccaaagaaatacggtcacatagcatctggcgatcggcgaatcatcctcttttccacttcaacagccacagtttcgatctctaacgatgctctcaaggccaaagaacattatggaaattcgaagatatattatcgatgcatataatttatataatcacagtctggatgtattatggaaacaactttaactaatttttgagattgatgcctacttcatgat

SEQ ID NO: 152031 - DNA, 436 bp, Arabidopsis thaliana columbia
ggtttcggctcgtcccataacaagatcgcatgtttttaagatgccgtcgcacaagtcgttcagcagcaatatataaattggggaagaaggtgaggcaaaacaggcctattcctcactggattcgtcttcgtaccgacaacaccatcaggtacaatgctaagcgtaggcattggcgcagaaccaagcttggattctaagaggtttacttttgcttattgtgagagctttgttcttttgaaaaagactttgttttctttatcagttttgattgttcacatttgtgtaagacgatctttaatcatttatgtttccaaagtttcctgtagtaacattgagtttttcattagtttaaagaattggaaatgtcttatttttaaattttcttaattttttttttttttattcttatctttttttttatcttatttttttttta

SEQ ID NO: 152032 - DNA, 282 bp, Arabidopsis thaliana columbia
tcaagaaaggagtaccccaataccttcattaggatcatcgaattcgacaacacccgtcaagaccagtgcatcagtttcaattgcctacaaaccaccaagcttcaccggttaatttccctttgcttttgtgtaaacctcaaaactctatcccccatctttgattgtatccctcgtttttctgcttttttcttctttcttgggttttaattttcggacttaacgtttgtattccggtttcgcgagacatattttatcggattcttaactgtctgatgaaataaa

SEQ ID NO: 152033 - DNA, 400 bp, Arabidopsis thaliana columbia
gcgtccgggcgacggaaacggaagttgtagctccggtatctgtaagcaacggcggaagcaaaggatggccgactactgtggtcctgggtacgcgactcctctcgccgctatgtctggtccatcggagaaacttatctacgtaaccgccgtctacaccggaactggaatagataaaccggattatttggcgacggtggatgtagatccaagctcgccttcgtattcaagtgttattcatagattaccaatgccttttgttggtgatgagcttcatcattctggttggaactcttgtagttcttgccatggtgatgcttctgttgatagacgttatctcgagttaccgtctcttatatctggtcgcatttatgcgattgatactaaggaaaacccgagggct

SEQ ID NO: 152034 - DNA, 371 bp, Arabidopsis thaliana columbia
gtaattaatattgacataatagaagtaagtgtttttataaagtaaccgaactcaaaagaagacgattatttatggtccaagaccggacattttgatgaatgcaacttataaaaatttgttgaatagatagatagattgaaaagatcataactatacttaacaaaaaaatactaagaaaagtccacatgcggcgaaggttttttgttgctgtcggaaaaaggagaagttcaactcctagtaaaataggtactggaagtggaatgaaagggatgatccatgaatattgatatgtatgttccataaaataaaaagacctttttattttattctcaattttaatttttcttaattcactggtttggtaatatata

SEQ ID NO: 152035 - DNA, 383 bp, Arabidopsis thaliana columbia
acattcttctcacaagaatcagattcaagatagaagtttttcaaacaatgtctagtcctctgggtcactttcagattcttggttttcttcatgctttgcttatcttctcagctgagtcccgcaaaacccaattgctgaacgataatgatgttgaatctagcgacaagagtgcaaaaggcacacgatgggctgttttagttgctggatcaaatgaatattataactacaggcatcaggctgacatatgccacgcgtatcagatactccgaaaaggcggtttaaaagatgaaaacatcattgtgtttatgtatgatgatatcgcgttttcctcggagaatcctaggcctggagttatcattaataaaccagatggagaagatgtt

SEQ ID NO: 152036 - DNA, 458 bp, Arabidopsis thaliana columbia
gaaacaaggatctaattcatagtgctgctttttcttctctctgagactctcacaaaatagggacacaagatcgttaaaaagcttttagctccagatctgtggaaccgccatagctatggagttttatagaagttctagaagattacaaattcttggatctgtgattcttctgctctctattcatgtcgctcactctttttaccttcctggtgttgctcctcaggatttcgaaaagggagatgaattgaaagtgaaagtaaacaagttgacatctataaagactcagcttccatattcgtattactctcttcctttttgtcgtcctaagaagattgtggacagtactgagaatcttggtgaagttcttcgtggtgaccgaatcgaaaatgctccttattcgttaaaatgcgtgaggcgcaaatgtgtaatgttctcggtcgtgttatgcttgatgcaaa

SEQ ID NO: 152037 - DNA, 384 bp, Arabidopsis thaliana columbia
ggaaacagaaagcgcgagatctgagtgactgtttaatttcaaagggaggttttcgagagcggggatgtctcaacccctcgtgaggaaagactatgatcacgacgatgagttggagtattctccattcatgggaattgagaaaggagcggttcttcaagaggctagagtctttaatgaccctcaggttgatcctagacgatgctcccaggtcattacgaagcttctttatttgcttaaccaaggggagtcattcaccaaggttgaagcaacggaagttttcttttcagttacaaagctttttcaatcaaaagacacgggtttgaggagaatggtctacttgatcattaaagagttatcttcatcatctgatgaggttatcatcgt

SEQ ID NO: 152038 - DNA, 345 bp, Arabidopsis thaliana columbia
cacacgtgcatgggatacaaaagaccttacatggcactcatagcatgaataaacgttggggggcatatagacatgccctctgacttttaaatgggtgtaactaactaaacccgttgactcctcatgattaaccctattgtaacgggttctggacttgagactcaccagggttcagtacactgaagcatcgcaattgaccgttatgtaagccaaatgaatggcgacaactatgtgtacggatcctccctgagcgaatatgcacaaatcgagcaacggattgatttctcttcattggagatctatgcaagtgtcatgaggtggttcggaccaagaatgggctttatg

SEQ ID NO: 152039 - DNA, 437 bp, Arabidopsis thaliana columbia
ggatggatcggtggtttactcggtaaactctgcgaagctcaaggaatcacttacacttacggctccggtcgtcttcaagatcgtcaatcgatcgtcgccgacatcgaatccgtgaaacctagccacgtgttcaacgctgctggagtcaccggtcgtcctaatgttgattggtgcgaatctcacaaagttgagacgattcgtactaatgtcgccggaaccctaactctcgctgacatttgcagagagaaaggacttgttctgatcaattacgctacgggttgtatatttgagtatgattcgggtcatcctctcgggtcgggtattggattcaaggaggaggatactcctaatttcaccggatctttctactctaaaaccaaagctatggtggaggagctgctcaagaactatgaaaatgtatgcacgctaagagtgcg

SEQ ID NO: 152040 - DNA, 220 bp, Arabidopsis thaliana columbia
aagacaaagggggggatcaaaatccataggacgaaaaaaacgaggaagaagactaagaataagattctgaggcagaaacaagcgatacattatcatcatctgccaatcctactagaactatgaaggagactactagtggtggtgctccaaagaagagttttatgttcatgttcatacagcattttaggaatttgtacaacactgttattttttcatcttc

SEQ ID NO: 152041 - DNA, 446 bp, Arabidopsis thaliana columbia
cgtccgcctaaataaacctctcttcatcgaaaatgtgttgactctctgtgtcaattttcctcttctcgcggctcttcgtttcttcgtgtgcgttgggcgattcggaggcgacgtgttccggtatagttccgttacggtaccggtacgataagatctcgataaccgactttggaggcgttggagatggtcgaacggtgaatactaaggcgtttagggcggcgatttatcggattcagcatctgaagaggagaggaggcacgcttttgtatatacctccgggagtgtatttgacggagagcttcaatctcactagccatatgactctttacttagctaaaggtgctgtgattagagctgttcaggatacctggaattggccattgattgatcctttgccgtcttatggaagagggagagagttaccaggggggacggtatatgagctt

SEQ ID NO: 152042 - DNA, 484 bp, Arabidopsis thaliana columbia
ctatcttaaaacttcttacctaaaatagaaatttgattttttgagaaatggcttcaaaaatgtgggcctctcttgtcattttgctgacattcaacattctttttttcactttaaccaccgcatgtggcggtggctgcagttccacccctaaacccaaacctaagcccaagtccaccggaagctgccctaaagacactctcaagctcggcgtttgcgccaatgttctcaaggatcttctcaaaattcagttgggaacaccaccagtgaagccttgttgttcgctcctcaatggtttagttgatcttgaggctgccgcttgtctctgcaccgccctaaaggctaaagttttaggcattaatcttaatgttcccgtctctctcagccttcttctcaatgtttgtggcaagaaggttccttccggcttcgtatgtgcttgatatatctatccactcttcgattggttataatgttttaaattttcttt

SEQ ID NO: 152043 - DNA, 431 bp, Arabidopsis thaliana columbia
caaattcaacaactgaaaccaactcagagcttaagcttgatttgacactatggcgagcatgggcaacgagcccgagcgtgagaacagagactaagaagagactggagccaacgaagatgaagacaccggtgctcacgttgctcctatcgtcaggcttgaagaagtcgccgtcaccaccggtgaagaagacgaagacaccatgctcgatctgaaatcgaagttgtattgatttgataaagatggaagttagtggaaggagagaggtgctggtactgataagattttgaaacatagagtttttgggaagattcgtctagttatgaggcaatcgaaaactttgaagatctgcgctaatcatgttgttggatcgggtatgagtgttcacgaacacgctgggaatgataagtattgtgtatggcacgctcgtgatt

SEQ ID NO: 152044 - DNA, 435 bp, Arabidopsis thaliana columbia
ctatatgtatgcaagataaaggcagcaagatacgtaatgatgatgataaagcttgagagaagggattagtctgtagaagaagaagagttaaaaccattcaccaaagaagaaattgagaactagagacagtcatggagatcaaatcttaccaaaatcaagcagagtattttgttgaacactatttattagcagatccatttcttccatatacttctgttcttgttggaatctgtctttgcaaattggtatatgatcttacggagttattcagctcaattcatgtcaaatcatactcagctctcacaaaaataaagagaattgaatggaacaacaggggaatttctacagtccatgcgatctttatctcattcatggcattatactttgcgttcttctctgatttggtttctgaccaaagaagccttgaaaccctta

SEQ ID NO: 152045 - DNA, 417 bp, Arabidopsis thaliana columbia
aacgaaacgaactagagacagtttgattcgaaaatcttgtcggaaaatggaggatatcggcgaccaagaattaagcaattactgggaacctagctccttcctccaaaacgaagacttcgaatacgacaggttctttctttcgtccttttttttttccttactttgctttccatcttgagattttgatatttgtttctttaaaaaaaaagaagctggcctttggaagaagccatttctgggtcgtatgattcgagttcgccggatggagctgcttcgtcgccggcttctaagaatattgtgtcggagagaaacagaagacagaaacttaaccagagactcttcgctcttcgatcagttgttcccaatatcactaagatggataaagcctcaataatcaaagatgctattagttacata

SEQ ID NO: 152046 - DNA, 391 bp, Arabidopsis thaliana columbia
ctaaaatctctctctgccaatctcatcttcaacctctctctaactctcgttttcgattctacaatggctgacaagaagattaggatcggaatcaacggattcggaagaattggtcgtttggttgctagagttgttctccagagggacgatgttgagctcgtcgctgtcaacgaccccttcatcactactgagtacatgacctacatgttcaagtacgacagtgttcacggtcaatggaaacacaatgaactcaagatcaaggatgagaagacccttctcttcggtgagaagccagtcactgttttcggcatcaggaaccctgaggatatcccatgggccgaggcttgagctgacttacgttgtgagtctactggtgtcttcactgacaaag

SEQ ID NO: 152047 - DNA, 390 bp, Arabidopsis thaliana columbia
attttgtgagaaaagaatcttcttttgcaaatgcttcgctcctcaattcgacttctctatagaggaagaaccagtcctctgcttcgaagtttatcatcatcatcatcatcatcatcatcaaaacgattcgattctgcgaaaccacttttcaattctcatcggattatttctcttccaatttctacaacgggagctaaactatctagatcggagcattcaatggctgcttcttccgaacccaaatctctttacgatttcaccgtcaaggatgctaagggaaacgatgttgatctaagcatctacaaagggaaggttcttttgattgtgaacgttgcttctcaatgtggcttgactaattcgaattatactgagcttgcgcagctgtatgag

SEQ ID NO: 152048 - DNA, 426 bp, Arabidopsis thaliana columbia
catatatctaaaaattaagatgtgtgatcttgctcacagaagggcagtgagtacagaggaaggagagcagtttgcaaaggagcacggtcttatattcatggaggcctctgccaagactgctcagaatgttgaggaggcattcattaagacagctgcaacaatatacaagaagattcaagatggtgtgtttgatgtgtcaaatgagtcatatggaatcaaagttggatatggaggaattccaggaccatcaggtggaagagatggatcaacctcgcaaggaggagggtgctgcggctgagatgggaaaaatatgtctatgtcattatgtaaaaatgatcacatatgatatagcaaaaatgtctctgcttctttctaatagtgtaaatcgttttggaattcgatttggtgactgtgttgtggttggtt

SEQ ID NO: 152049 - DNA, 383 bp, Arabidopsis thaliana columbia
cggacgcgtgggcaaaaactgaaacctttctctatttatctctctatacacaacaatggcgggcttcgttttatctctactcatactctcttccttctcagccattccattcacttatgcagattctggaatgatcggagttaactacggccgtatagcagacaatcttccggcaccggagaaagtagttgagctactgaaaacacaaggaatcaaccgcatcaagctttacgacaccgagacaactgtactaaccgcactcgcgaactccggaatcaaagtcgttgtctctctccccaacgaaaacctcgcttccgccgccgcagatcagagctacaccgacacttgggttcaggacaacataaagaagtacattccagcga

SEQ ID NO: 152050 - DNA, 415 bp, Arabidopsis thaliana columbia
ccagaaccctagaattcgaaatctccaaagatacccgacaaagcgccatgtcgctcactatggcggcgaatctcgttctcaacccgagatctaacaaatctctcactcaatccgtacctaaatcctccgcaagattcgtctgctccgatgacaaatcctcctcctccacacctcaatccatgaaagctttctccgccgccgtcgccctctcttccatcctcctctctgctcctatgccagctgtcgctgatatctcaggtttgactccttgcaaggactcaaaacagttcgctaaaagagagaagcaacagatcaagaagcttgaatcttctcttaagctctacgctcctgaatctgcccctgctcttgctctcaatgctcagatcgagaaaaccaaacgcaggttcgacaacta

SEQ ID NO: 152051 - DNA, 399 bp, Arabidopsis thaliana columbia
ctccacgacgagaggaaaaaaaaaactcagagtgacacatctaaatggcgatgattacgcgggcaccgtcacgcgcctacctgtgcttctacaatctcaacgcgccgtcgccgatgcctcggtctctcacctgcacacatgccttgccgctctctctccctccacatcaccgacttcctacaccagacctggtcctccttcgacctccccttctactcctggtctctctaaagcggccgaatttgtgatctccaaggtcgatgatctcatgaactgggctcgtaccggatcgatctggcctatgacctttggtctcgcttgctgcgccgtcgaaatgatgcataccggggctgctcgctacgatctcgatcgattcggtatcatcttcaggcctagtcc

SEQ ID NO: 152052 - DNA, 455 bp, Arabidopsis thaliana columbia
cggacgcgtgggggatgactccaatcaagagagctcagccctcagctcacgacatctttgggggaaactggaaacctacaaagaacgacactttgtccaagcgtggcccgacttttggcagcaccatgaacgtcctctacggagagtacacatgtggtcaaggttccattgatccaatgaacaacataatctcacactacttatacttccttgacctcatgggtattggaagagaagacgcgggaccaaacgatgagctcagctgcgcagaacagaaacctttcaacccttcaactgtaccttcctcttcctcttcgtaagtcttatgatatatcgccgttgctctcaagtctctcttgcttaatgttacgtaataagtgaaattgcttgtggtaaaaaaaagagaagtgtgtttttgtccctctagaacttataatgcaaacaacattacattt

SEQ ID NO: 152053 - DNA, 440 bp, Arabidopsis thaliana columbia
gcgaaacacaaaagctctggtctctggtgtgtcacagagagcggtaagacatcctgatgcgaggaagtcagtgttcaacgccgtggattctataagcaaagagctcgctgcgatcattcagtctaaagacgagacctcagttacagaaaaagaagagagaataaaagaactcatggagatgaaccaaggtctgctcctgtcaatgggggttagccacagctcaatcgaggctgtgattctaaccacggtcaagcacaagcttgtctccaaacttacaggagctggtggcggcggctgcgtcctcactctattaccaaccgggacggtggtggacaaagtggtggaggagctcgagtccagcggttttcagtgtttcacggcattgattggtggtaacggagctcagatttgctattgatcaggtcggaaaaatcatattt

SEQ ID NO: 152054 - DNA, 383 bp, Arabidopsis thaliana columbia
gaacaccaatgattctcactcagtgcaggtcatcataccccagaaacagttggcccgcagggcggatatgtatgtcttctgctggtcgcactcccacaacgttgctcccaagggaaaattcatcgcatttgtgtctacagatgcagagactgataaccctcaaaccgaactaaagcctggaactgatcttttgggtcctgttgatgagatattcttcgacatgtatgatagatacgagcctgtcaacgagccagagttggacaactgctttatttcaacgagctatgatgctacaacacactttgagacaactgttgccgatgtgttgaacatgtataccctaatcactcgaaagcaactggacctatgtgttgacctgagtg

SEQ ID NO: 152055 - DNA, 399 bp, Arabidopsis thaliana columbia
gtgcgttcgacacagagttaaattgagtttgtgtctagttttttatcctgtgagcgaaaattttgagacggactaatgcagagaagaagagcgcctacaataccaagctatgacagcttatcgatgagtacacccagatcttggtcgtcgcggccgataacgtcggatcaactcagcttcagaacatcagaaagggtcttcgtggagactccgccgtgcttatggggaagaacactatgatgaagcgtgccgtgaggattcactctgagatacaccggaaacactgcaatgctgaatctgcttgctcttcttcagcgaaacgtatgtttgatctttaccatatgtgacctcaaggaagtgagcgaggaggttgctaagtacaaggttgttgcccctgct

SEQ ID NO: 152056 - DNA, 373 bp, Arabidopsis thaliana columbia
tgacaacagctatcaagacaactggtttgacatctttcccagattatttggtcttggacatgcggaaatttgttatggaggaaggctgggtgccaaagaaacttgatgtatacattgatgttccggatgttattgatatcagccacatgcgtagcaaaggactccaacctggggaagaactgttgccagatggcgttccagaagaagtgatggaatcagcgcagcccgtggcaaatgaggagatagttgcacagctagtctcaatgggatttagccagcttcactgccagaaagctgccataaatactttcaatgctggggttgaagaggcaatgaactggttactttctcacatggatgatccaaacattga

SEQ ID NO: 152057 - DNA, 404 bp, Arabidopsis thaliana columbia
tctctttcttttcacctctcgccttattccggcgatcttataggaggcaaatctaggagtatcgttattctaggatcgctaacaaacaatgaatcgccaccacgatcccaatcctttcgatgaggacgaagaaatcgtcaatcctttttcgaaaggtggtggaagggttcctgctgcatctaggccagttgaatatggtcaaagccttgatgctactgttgatattccattggataatatgaatgactcttcacagaaacagagaaagcttgctgactgggaagctgagctcaggaagaaagaaatggatataaagcgaagagaggaaactattgctaaatttggtgtgcagatagatgataaaaacctgcccaccgttttcccaatcatacaccatgacattg

SEQ ID NO: 152058 - DNA, 414 bp, Arabidopsis thaliana columbia
gtttgaggcagcttgggctctatctatctttgcatctggaacatcggatcacactaaggttgttatcgatcacaatgctgttccaatctttgttcagcttcttgcttcccctagcgatgatgttcgtgaacaggctgtatgggctttgggtaacgttgctggtgattcaccacggtgccgtgatcttgttcttggatgtggggcactgcttccgctgctcaatcagcttaatgagcatgctaaattgtccatgcttcgaaatgccacttggaccttgtcaaacttctgtcgtggcaagccttatcctcactttgaccaggtcaaacctgctctttccgcccttgtacgactaattcattcagatgatgaagaagtcttgacagatgcctgttggctttttcttacctctttgat

SEQ ID NO: 152059 - DNA, 365 bp, Arabidopsis thaliana columbia
gaaaaccatcagatcttaagaagaagatcctattctaactacgacattttacgagaatatgacgactttttctgttccgattgataacggagattctatgaagatcgcagaagaagaatcacaaagaacactgtacccatatgttactggaacttcaattgttgcaatcaagtacaaagatggggttttgatggcttctgatatgggaggttcatatggatcaaccttaagatacaagaacatcgagagagtgaaggctattggtaagcattctcttcttggtgccagcggagaaatcagcgactttcaagagattctccgttatctagatgagctcaccctgaatgataacatgtgggatgatg

SEQ ID NO: 152060 - DNA, 321 bp, Arabidopsis thaliana columbia
gtaacgccttatatgctgggcatttggactattgttcttttccagttggtacgcggatggattacctatcagagttgacagtcactatgcccatattgtgtttcattgggacaaatgatcctccagaagaacccattgataaggtttattgagttcagactctagcaatccagcagtatacattagacttgtgcttatgcttgccaccacctatagaaaatatgggtttggagaagtcagattctagtgtatcacgagaggcaaatattgttgaatgcatgtcagaaccatttggacctaaacctactgacttaccttcag

SEQ ID NO: 152061 - DNA, 427 bp, Arabidopsis thaliana columbia
aaccatcttaaagcaactacacaagtcttgaaattttctcatattttctatttactatataaacttttaatcaaatcaagattaactatggctgaggagtacaagaacaacgttcccgagcacgagacaccaacggtcgcaacagaggaatcaccagcgacgacaacagaggttacggatcgtggattgtttgatttcttggggaagaaggaagaggaagtgaaacctcaagagacaacgacgctcgagtctgagttcgatcataaggctcagatctctgaaccggagttagctgcggagcacgaggaagtgaaggagaacaagattactctgctagaggagcttcaagaaaagaccgaggaagatgaggagaacaagcctagtgtcatcgaatagcttcaccgatccaacagctcttcttcctctt

SEQ ID NO: 152062 - DNA, 424 bp, Arabidopsis thaliana columbia
gttttcgccacgagttatggaaatggggtctattccttgcaaagaggatgaggagcaaagggccttacattgcgttgcatctgcggatggagaaagatgtgtgggtgagaacaggctgcctttctggtttgagctcaaagtatgatgagattgtgaacattgaaaggattaagcggcctgagctcttaacagccaaatctagtatgacatctaacgagagaaaactcgcgggtctctgtccgttaaatgccaaggaagtaacaaggctgcttagagctcttggagcaccaagagatgcgaggatctattgggcgggaggggaaccgctcggtggaaaggaagctttgaaaccggtaacaagtgaattcccacatctctacaacaagtacgatattgcgttgcctcttgaactcaaacctttcgc

SEQ ID NO: 152063 - DNA, 420 bp, Arabidopsis thaliana columbia
gatcaccaaacgtgaaacggaaaactttgcgctgctctactcaagctcaagggccgcctgaccattggttgtgtcctaccttgccttggccgaagaggccggcaagctttcccccgggctatctgaagtgctcggaagcggtcgtgtgacaatgaggaagactggggccaagccaaaggggccatcaagcagcccatggtacggatctgaccgcgtgaagtacttgggtgcattctctggcgaatcaccgagctaccttaccggagagttcccaggagactacggatgggacaccgccggactttcaggtgaccccgagacattcgcaaggaaccgtgaactagaagttatccacagcaggtgggccatgctcggagccctaagctgcgttttgctgagcttttggctagaaacggagtc

SEQ ID NO: 152064 - DNA, 417 bp, Arabidopsis thaliana columbia
cttcttcaagtgccgggttctcgggtcggatcttctaagtctagctagggataatggctactgtcactactcatgggtcggcctcgattttccgaccttgtacttcaaagccaagattcctcaccggttcttccggtaggttgaaccgcgacttgtcgtttacatcgatcggttcatcggccaaaacgtcgtcgttcaaggttgaagctaagaaaggagaatggttgcccggtttggcatcgcctgattatctcaccggcagtcttgccggtgacaatgggtttgacccgttgggtctagcagaggatccagagaacttgaaatggttcgtccaggcagagctggtcaacggacgatgggctatgctcggtgtcgctgggatgcttttgccggaagttttcaccaagatcggaatca

SEQ ID NO: 152065 - DNA, 421 bp, Arabidopsis thaliana columbia
atcggtactccggctcagccgctgctcttagccatggacacgagcagtgacgggggttggattccttgctccggctgcgttgtctgtccttctaacacggtcttttcccctgctaagtctacatccttcaagaacgttagctgcagcgctcctcagtgtaagcaggtaccaaaccccacgtgtggagcacgcgcgtgctctttcaacctcacctatggaagctcctccattgcggctaacctctctcaagacacgatacgttttagccgccgttccgatcaaagcctttacattcggatgcgttaacaaatgcgtcggtggaggaaccatcccaccacctcaaggcttgttgggcttgggacgaggcccactttcactcatgtcacaggctcagtctatttacaagtccactttctcttac

SEQ ID NO: 152066 - DNA, 418 bp, Arabidopsis thaliana columbia
ctctttgctcttctcttcccggcgatctatctctccgatttgggtattgaaatggcaactcctatggttgaagatacgtcaagcttcgaagaggatcagcttgcttccatgtccaccgaagatatcactagagctactcgtcttctcgacaacgagattcgaattctcaaggaagacgcgcaaagaacaaatctagaatgtgattcttacaaggagaagattaaggagaatcaggagaagattaaactcaacaagcagctgccttacttggttggcaacattgtcgagattttggagatgaatccagaagatgatgctgaggaagatggtgcaaatattgatcttgactcgcaacggaaaggaaaatgtgttgtgttgaaaacgtctacacggcagaccatctttctaccagttgttg

SEQ ID NO: 152067 - DNA, 420 bp, Arabidopsis thaliana columbia
gtggagttagagactttgacatggagagataccagcttgttaagcatttccgttttgcttggccagtgaatcacgcatctttgagtcctgatggtaaattactggctattgttggagacaacccggagggccttattgtagaccccaacacaggaaagacgttggaaacactatcaggacacttggacttttcctttgcctctgcgtggcatccggatggagtcactttctctacaggaaaccaagataagacttgtcgtgtatgggacatccgtaacctatctcagtctgttactgtcttgaagggtaacctgggagcaatccggtcaatccgctacacatcagatggaaaatacatggccatggctgaaccggctgactttgtccatgtctatgatgtctcaaacgggtatgaaacag

SEQ ID NO: 152068 - DNA, 420 bp, Arabidopsis thaliana columbia
ttttagtaacaaaggttccttcttctttaaccaagctggggttctttggttgtctgctcctgctcacattcacggacaaccttgtggctggaaaatctggcaaagtgaagctcaatctttactacgaatcactttgtcccggttgtcaggaattcatcgtcgatgacctaggtaaaatctttgactacgatctctacacaatcactgatctcaagctgtttccatttggtaatgccgaactctccgataatctgactgtcacttgccagcatggtgaagaggaatgcaaactaaacgcccttgaagcttgcgcattaagaacttggcccgatcagaaatcacaatactcgttcatacggtgcgtcgaaagcgatacgaaaggctgggaatcatgtgttaaaaactctggacgtgagaaag

SEQ ID NO: 152069 - DNA, 253 bp, Arabidopsis thaliana columbia
ttcaatcctttcctttcattgttttttttcaaagattacgattatggccacgtcaggtatccaacaatcctggtgtgcgccggccaaacggctctcaagccctccagcgacctcatccaaatggtgggcgtcttgggcggtggccgtgtgaccattctttgtaccgtcaagtctacttcccaaattatttgttttggaccttaccgtctctatgttctttatccattctcggtgatctctactttttacttat

SEQ ID NO: 152070 - DNA, 285 bp, Arabidopsis thaliana columbia
agaggaagaaaaatgggtcgagtctcatctattatctctttctctttgacagggtgtgatcctcttcaatggcgacactgcccaacagtggcccaacgagtgccagctcgatcaactcaatgcgctcgaaccatcccaaatcatcaagagcgagggtggtcgcatcgaggtctgtgaccaccatgcaccccagctccgttgctccggctttgcctttgagcgtttcgtcattgagccttagggtcttttcttgcccactttcttgaacgccggcttactcacgtt

SEQ ID NO: 152071 - DNA, 404 bp, Arabidopsis thaliana columbia
acaaaccctgccattgacccccttagggaaggttgggttatgtctctggaagtaaggatgggaaaacgtggaaatgtatgggaccttggacctgagaatgcctcgcaggttattctgtctaaccctgggttaaatgaaggagcgttagaggagttaatgaaggatcaatacttaaaaaccaaaggtttgtccacatatttcgattaagaaaagcgttgaaggttccttgcaaaaagctctatattatctttgggaagcagctgatgatgctgtccgaagtggctctcagcttctcgttctttcagaccgatccgatagactggaaccaaccagccttaattccaaaatgtagctgtggcgctgtcataacatttattagaacggtggttgtagctttatgtgtg

SEQ ID NO: 152072 - DNA, 365 bp, Arabidopsis thaliana columbia
gcgagaaggttcatggtgaaggaattatttttatggttcttctcagtttaagccggtgggggaaggtgattggttgaggagtaaccaaccacatccacaagatcttcagatgttacagaatcagccagatttcagatactttggtggttttccttttaaccctaatgataatcttcttcttcaacactctattgattcttcttcttcttgttctccttctcaagcttttagtcttgacccttctcagcaaaatcagttcttgtcaactaacaacaacaagggttgtcttctcaatgttccttcttctgcaaacccttttgataatgcttttgagtttggctctgaatctggttttcttaaccaaa

SEQ ID NO: 152073 - DNA, 418 bp, Arabidopsis thaliana columbia
ccttgcccgaatgggaaaccacctgttttgtcgagtacatcgccggcggtcggcagacaggatgcatgtacttgccggtggctcatggagtccacgccgtgaggctcggaaacgaagctacaatctctcagaagttagaagtgaagccaggttctctctacgcactcacgtttggtgcgtcgagaacttgtgcacaagacgaagttcttagagtctctgtaccttctcagtccggtgacttgccacttcaaacactttacaacagtttcggaggtgacgtgtacgcttgggccttcgtcgccaagacttctcaagttactgtgactttccacaatcctggagttcaagaagatcctgcttgtggtcctttgttggacgctgtcgccattaaagagcttgttcatccaaatctacacca

SEQ ID NO: 152074 - DNA, 354 bp, Arabidopsis thaliana columbia
  unsure (1)..(354): unsure at all n locations
aaaattctctaacaatcatttcatcttttataaatcagaacaactctnataaagaacactttactgactaaagcgagatacatttttccgttttttagtcttcgtctataattactctctccttctaaattattggtaaataatgtcaacttctgatgcatgatcagtgtttcaaagaacaattaattctttctttatccatgatgacactaaaagatctcccaagctaacttattgccaatcatcttcatcctcaactgcttcttcaactaatctagtgaaattatcttgttattcttcttcagttactgtttaaccactaactctatcatctcgagcaagattcattccttt

SEQ ID NO: 152075 - DNA, 419 bp, Arabidopsis thaliana columbia
ctctctctctctctcgctcggtgtgatccgtgtagagagattggatttgctgaggggcggtgcaatgtctcgctaccagtctcattcctttgatgacggagaaattaatccttttgcgaatcctacaagtgtcccagctgcaacgtcaaagctttctcctcttccccctgagccgtacgaccgtggtgccacaatggatattcctcttgactctggaaaggatctgaaagctaaggagaaggaactccgggaaaaggaggctgaattgaagaggcgggagcaggaaatcaagcggaaagaagatgctatagcacaggccggaattgtgatagaagagaaaaactggccaccgttttttcctctcatccatcatgacatttcaaatgagatacccatccatctgcagagaatccaatatg

SEQ ID NO: 152076 - DNA, 414 bp, Arabidopsis thaliana columbia
aaaaagcacagggccttaaaaatttcttttacttagacttccctaattttaatcttgtgggccggaacttctgaataatattagtagagatccaaaacctcacaaatttcgaccgagttttgttgaattccgattagatctttcttccacgaaacccccccaagtacccattccatcttctccggtgagtctcccatgttggcattacgctagggttcttcttctctgtggtttcgcataacccaataatccaattttctacttgggcatcaatgggtcgctctcgagggaacttccaaaatttcgaagaccctactcagagaacgaggaaaaagaaaaatgcggcttatgtggagaactttgagtctacttctttggtaccaggtgctgagggaggagggaagtataactgcg

SEQ ID NO: 152077 - DNA, 406 bp, Arabidopsis thaliana columbia
gaaaaaaaaaaggagacgtcgttttcttttagcttctgattaagtctgataaggggggcccctaaatctgtggtgtctccaaggattcggattcgatcgatgaaagcttctcaaattttggcggctgcagcggcgagggttggaccggcgttaaggaagcaagtattaaccttaacggacgaagctgcttctagggttcatcatctcttgcaacagcgtcaaaaaccttttctccgattaggcgttaaagctcgaggctgcaacggcttgtcgtacactctcaattacgccgatgagaaaggtaaatttgacgagttggtagaagagaaaggtgtgaggatccttgttgaaccaaaagccttaatgcatgtgattggaacaaagatggattttgtagatgataaac

SEQ ID NO: 152078 - DNA, 423 bp, Arabidopsis thaliana columbia
  unsure (1)..(423): unsure at all n locations
ttctttgctctttttttcccggcgatctatttttccgattggggtattgaaatgggaactcctatggttgaagatgcgtcaagcttcnaagaggatcagcttgcttccatgtccaccgaagatatcactagagctactcgtcttctcgacaacgagattcgaattctcaaggaagacgcgcaaagaacaaatctagaatgtgattcttacaaggagaagattaaggagaatcaggagaagattaaactcaacaagcagctgccttacttggttggcaacattgtcgagattttggagatgaatccagaagatgatgctgaggaagatggtgcaaatattgatcttgactcgcaacggaaaggaaaatgtgttgtgttgaaaacgtctacacggcagaccatctttctaccagttgttggactc

SEQ ID NO: 152079 - DNA, 410 bp, Arabidopsis thaliana columbia
ggcggcgattgaagaaaccttttttatttatctgctcagggaagagattctgaaggaacgtaagagtctagctgaggaatctggtggtaagaagttcttcaagcggtctgagatcgagcagaagaaaatccagaagcttcgagaggaagaacgacgcgagcacgagcttaaggctcagcggagagccgccgccgccgcttccggtggagatggaaaatcatccggctctgctcctggttcttctaacgcagctacgtctgcgtcttccaaatcctctgcatcggacgctgctgctatcgccgattcaaaagccctaaccgacgaaaacctaattttcccgaagcaagaagtgattcgtcgtttgagattccttaagcagccgatgactctcttcggagaagatgatcaat

SEQ ID NO: 152080 - DNA, 413 bp, Arabidopsis thaliana columbia
agctacaatgcttagtctctcattcgctacgccggggacggcggcgattttgcgtgaaggaactgcttcggcgacgtcaacttcgtcttcattccatggtgtcagaatccagcaccaggtttctgctcgcgtccccgcggcggcgacgatatcgtcgtcgtctcctaaaccgtcggtggtgatgatgtcgaaaagagaggcggaattgaaagagataagatcgaagacgacggagcagttacaagaggaggttgttgaccttaaaggtgagctctttatgcttcgtctccagaaatcggcaaggaatgagttcaaatctagcgactttcgtcgtatgaagaaacaagttgctcggatgttgacggttaaaagagagagggagatcaaagaagggatatagaaaaggttgtcga

SEQ ID NO: 152081 - DNA, 382 bp, Arabidopsis thaliana columbia
acaaaatcaaatcgtattgagagagtcgactcgtgtccgagctaggctgatagctatattagcctcaattgtctgtctcttaccttcagcttttctcaagttagcttctgctatttcaagagtttgctgagcttcttgtggatcaatgtcactattcttctctgcatcatttactaaaatagtgatttcattattgcctattctagcaaaaccgcccatcagagccatcgttaaccattggttagcaaggcgtattttcaaaatacctatatcaacagctgtggcaatcggcgcgtggtttgctaatacaccaatttgtccactattagtagataaaatgatttcttttacttctgaatcccaaacaattcgattcggagtc

SEQ ID NO: 152082 - DNA, 440 bp, Arabidopsis thaliana columbia
cttactcgtgccagccactcgcatttttccagatttaattatccttcctcgaaacagtaggttagctaagatgacggagaactacccaaccgtgagcgaagattacaagaaggctgttgagaagtgcaggaggaagctcagaggtttgatcgctgagaagaactgtgcacccatcatggtccgacttgcaaggcactttgctggaactttcgattgtcattcaaggtcttggggtccatttggtacaataaggttcgactttcttatttgttttttatcatttcattggattttagagatgaattaagttttttaaccttatgtaggtattctaattacttttgttctttatttttttatcgtgttattgtatttgtgttagtagttttttaacttctttctattagttgtaatatttttttttactagatttttatata

SEQ ID NO: 152083 - DNA, 424 bp, Arabidopsis thaliana columbia
atcacttttttcttcttcttttccaattctttagcaggtttcaggagattaaaaccttaggttaaaacattacaaactccaaattcaccggaggaaataacttaaaacttgaatctgaaaagatgagctgcaatggttgccgtgttctccggaaaggttgcagcgagaattgtatcctccggccatgtattcaatggattgaaaccgccgatgctcaaggccacgccaccgtcttcgtcgctaaattcttcggccgagctggtctcatgtcctttatctccgctgttcccggattctcaacgtcctgctttgtttcagtcgttgctctacgaagctagtggaagaactgtcaatccagttaacggagcaatcggaatgttatggactggaaactggaatatctgtcaagcggctgttgaaacag

SEQ ID NO: 152084 - DNA, 420 bp, Arabidopsis thaliana columbia
attctctcttctgacgtgtttccctttttcgttttctcatcctcacgtccgccggatttggaggaaacgaagaagaagaagaacaacatcatcaaaagccttttgagatatggacagcttctggcaattaggtgatgagctacgaggtcagacgagagcatcagaggatcacaaatggtctactgttgcaacgaagctagctgagcaaactagaatgaaaggggagaggatgaacaatcttgatctctccaaaggttacactgagtatagaccaagtgagaaattcagtttgcaggagaacaatcttaacttcaacatgttgaatttggatggtaaatttggtgaaagcattatggggaagacttcgatgcatagctatgtttttaatatgaatatctgttttacaaaagaatgacttta

SEQ ID NO: 152085 - DNA, 444 bp, Arabidopsis thaliana columbia
gaaatcccgggggggacgaacgcttccgaagaaatgaagtccttgagcaataatttccttaagctggaagggcattccaccacggtcggaaagttttattcagctgatgaagaggtttataatggttcggtcactacagcaaggaaaccctatacaaatggcagcaatgttgattatgacacacgttcagcacgatctgcatctcctcctgcggcaccagctgattcgtcggcgccccctcatccaaagtcatacatggatataatgtctatgatccagagaggagagaagccttcaaacattcgggagattaacgacatgccgcccaatccaaaccaaccactatcagatccacgcattgctcccaaatcaaagccatgggactatggtcaagcgccgcaagacgagagttccaatggtcaatggtggcaacagaaaaaccct

SEQ ID NO: 152086 - DNA, 301 bp, Arabidopsis thaliana columbia
gatcgccacaaggttgcttcagttatctatggtatcactaagaggatctctgaagggattgtggaaatgcagagttttgtcatacaacaaatcattgatggtggtcgctcgctgtctcttcaagaaagacaaaaggtgcagagggagatccgtcaaacgtatcctgacagttctgaatgcgatcttgtcggcgtggtgcagagtgttaaagaattggttggtcatcttgtggagaatgatgttcatcaagtgggttctatagctgtcatacactgttttgattaaaccactctggctagac

SEQ ID NO: 152087 - DNA, 425 bp, Arabidopsis thaliana columbia
gttttcttccgtgaaacccaccccattgttgaaggatgagctagacattgtgatagctaggattcgaaacctcgagggccttgagatgtggcgacctttctttgagcagtatcatttgatcattgttcaagatggtgatccttcgaaagtcatcaacattccagtagggtttgactacgagctctacaacaggaacgacatcaatcgaatcttgggtcccaaggcctcttgcatttccttcaaggactctgcttgtcgttgcttcggttacatggtctccaaaaagaagtacatctacaccattgatgatgattgctttgttgcaaaggatccaacagggaaagagatcaatgcgcttgagcagcatatcaagaacctcttatctccatcaactccgcatttctttatcacaacttatgatccat

SEQ ID NO: 152088 - DNA, 212 bp, Arabidopsis thaliana columbia
gcgtttcttcaccaaccctactttttcttagatagatagaaaccttctacagaaagggcttcttttatcagaggagaattctaatcttcttttcctctttttgagattctctaattatccttttggaagagtttcgtgtgagagagaagcgcaatgtactgctttttttgttgtggtattcttttattccttttcttcattttcttcttccc

SEQ ID NO: 152089 - DNA, 410 bp, Arabidopsis thaliana columbia
ctctgattcaccaacatcctatatcctttttgatcaaaacatggcttccatggacagaatcttaccaacagaggggggattaagtcaatgcagaatcaacacctcgtgggttccttctacaaccagaactcaaactcacttagattttcccaagttagtttctgttagtaactctgggataagtttgaggattcagaatagtaaacctattagccctgtctttgctcttgaagcaacttcctccaggagggttgtttgcaaagctgctgctggtgtgtcaggtgacttacctgagagtactcctaatgaacttagtcagtatgagaagattattgagcttttgacaaccctttttccactttgggttattttgtgaacacttagtggcatcttcaagccatccttggtta

SEQ ID NO: 152090 - DNA, 414 bp, Arabidopsis thaliana columbia
gacacaaattctacaccaaaagcttaaccagatttttcccaagaaaaaacccatcgatgaaaccatcatcagcttcgggattttctttaactttctcacactttctcacactctactgtcttctcacacaaacacatgtagctcaaggatctcatcaatggcaatcaccaatcaaaaccgtcgtcgttttagtgttggagaatcgatctttcgatcatctcttaggatggatgaagaactcagtaaacccgacaataaacggtgtaacgggtcaagaatgtaacccggttccgaattctacacaaactatatgtttcactagtgatgctgagtttgtggatccggatccgggtcattcgtttgaagctgttgagcaacaagtattcgggtctgggccgggtcagatcccgtcca

SEQ ID NO: 152091 - DNA, 420 bp, Arabidopsis thaliana columbia
tccggggtggaccaacccttccggtttttaggtaagagacctccaagggaagggtgttgggttttagaaccagggaccggtatgattggagaagaggttttttcagatgatgggtcacaaatgggagagaagaagaggagattgaacatggaacaagtgaagacactagagaagaactttgagcttggaaacaaacttgaaccagagaggaaaatgcagctagctcgtgccttatgtttgcaaccaagacagatcgcgatttggtttcaaaatcgaagagctcgttggaaaacaaagcagctagagaaagattatgatactcttaaacgacagtttgatacacttaaagctgaaaatgatcttcttcaaactcataatcaagaactccaagctgagataatgggttaaaaaacagagaac

SEQ ID NO: 152092 - DNA, 378 bp, Arabidopsis thaliana columbia
  unsure (1)..(378): unsure at all n locations
tcttcttcatctttcctcaaaaataaaaacattttctccaattggttcttctttaagaagggggagaaaaaaagtcttagctaagactgaacattatccggtgaagaatggcgactccggcatggagtcatgccaaggctcaatgggtagtcgccatgttggcgttactcagtggctcggctatggctaccgaaccttattactatagctctcctccaccaccgtatgagtataaatctccacctccttcggttaaatcttctccaccgccttatgaatataaatcaccaccaccttcggttaagtctcctccaccaccgtattactatcattcaccgccgncgccagtgtaatccccttccccttcttatgtttaca

SEQ ID NO: 152093 - DNA, 414 bp, Arabidopsis thaliana columbia
gtggtgatgcttggaacttcctgttagtcgactaatcctgctttcacatccatagactgggttcattttcaaaggcgaataaagtctttatgggctctagagatttcatcagcagtttgcctgatgaggttcttggcaaaaaaatcttatctttacttccgacaaaactcgttgtatccacatctgttctgtccaagaggtggaggaatctgttccattttgtagacagctttgatttggaagactcaacacctatcagaaatgctgatagcttctctgatttcatgaaagatacagtggctctgttaagcaattgtcccatcaagagactcactctcaattcccactatgaaaaatctagtgttaaccgctggattcgcagtgccctcaaacgcggctgcttggaacttaact

SEQ ID NO: 152094 - DNA, 416 bp, Arabidopsis thaliana columbia
atcgcatcaataccaaaccacccattttttggtttacaacaacaaatcttaaacgggtgagtttgtgctgcactactcaacgctcaatggccgcctcaacaatggctctctcctcccctgccttcgccggtaaggccgtcaagctttcccccgcggcatctgaagtccttggaagcggccgtgtgacaatgaggaagactgttgccaagccaaagggcccatcatgcagcccatggtacggatctgaccgtgtcaagtacttgggtccattctctggcgaatcaccgagctaccttaccggagagttccccggagactacggatgggacaccgccggactttcagctgaccccgagacattcgcaaggaaccgtgaactagaagttatccacagcatgtgggccatgctcggagcc

SEQ ID NO: 152095 - DNA, 349 bp, Arabidopsis thaliana columbia
aactctaacagagaatccggatgcttttttctgattcttctactctttcctaatgtaccgattttctcgggagtccaaaatcccgtttctctttttctcgagttaaaaaactttcgatctgaagtcaattcagattcttcttggaagctcaaagaagaagaagagagaagagagagagactagtgatttggtttagttcgttggatcagaaaggtctctgctttgatctttgtagtacacgtgtcgaaaagggtcggaatttggagttgctttgtttttgttccaagtctcagatttcttgtattaacattctcttgcctttttccaaagtcttttactttgatttctt

SEQ ID NO: 152096 - DNA, 412 bp, Arabidopsis thaliana columbia
gctcgccagaaacaactccttcagaatcatgctaaagagctagctggcttgaagagcggggataactggaatgatagcattcaatcaaaggagaaagttgaagcgaatttgctaagcaagtacgaggcaacaatgagaagggaaagggcattggcttattcatactctcatcagcaaaactggaagaacaactctaaatctggaaacccgatgttcatggatccaagcaacccgacatggggttggagctggttagagagatggatggctggtaggccactagagagtttcgagaaagaacaaagctacagcatcaatgacattgctgtctcggtcaagggctctattaaccgcaacgaagctgcaaaatctttaacccgcaatggctcaactcaaccaaacacaccatcat

SEQ ID NO: 152097 - DNA, 366 bp, Arabidopsis thaliana columbia
atcagtctcggattgtaacatactgctatcttttttcagcttctctaatgggggagactgttgaagagcctgcgattacaaaatggagcggcaccagctgagtccgaaaccgagcaaaatccgattccggaaccacaactccaaactgagcccaaactaaccggagaaattccggaaatagaagcggatttaacgccggaggaagttcaatcggaggtaacggatgcaaagccagaggaagtacaatctgaggtaaagccggaggaagtaaaaactgtggtaaccgatgcgaaaccggaggaagcacaatctgatgtgaatccggaggaagtacattctgtggtaaccgatacgaaacccgattta

SEQ ID NO: 152098 - DNA, 420 bp, Arabidopsis thaliana columbia
ggctgaagcattagcttttcggagggtggaggaattgacatcgaggagaactgggggagggtcaagaccataactggaccaacaggtgcttccctgacatttgagatatgtgcacctcttgttgcaacccttcctctagagatcaaaggggaacttgaagattttattcaagtcatttttaccctattcgaagatcttgatttcactttcttggagatgaatcctttcacattggttgatggaaagccttatcctctggatatgaggggtgagcttgatgacaccgctgctttcaaaaactttaagaagtggggcgacattgaatttcccatgccatttggaagagtgatgagttcaacagagagcttcatccacggtctagatgagaagacaagtgcctctttgaagttcactgttctg

SEQ ID NO: 152099 - DNA, 370 bp, Arabidopsis thaliana columbia
attcctcaagatcaatctcccaattctcgtctaccaaccaaaatcattctacccaggaagaaacctgagaaatggtccaccggagttgctcccggagagtacggtggtcctccgactaccaccaagctccgaaagtactggggaggtgaaaaagaagatcccattacttccacagacttaatctggaacagagattttatggatcaaatgaagaaattgtttgatgatcctaatgattcttctctcgacccatctccttcaaagtcttctgggtttctgagctttagcagagttatgagtctagacagtatggatgttgatttaagtaaagagcttgcttcgtcttcttaattcgttgtgaaatatcgtt

SEQ ID NO: 152100 - DNA, 406 bp, Arabidopsis thaliana columbia
gaaactcgtcgattttcaaaactttagctcagagactgatctcggaaaggggatcgcagccatggcggaaaaagctgtcactatcaggaccagaaacttcatgaccaacaggcttctcgccagaaagcaattcgttattgatgttcttcatcctggaagagccaatgtttcaaaggctgagcttaaggagaaattggcgaggatgtatgaggttaaggacccaaatgctatcttctgtttcaagttcagaactcactttggaggtggtaaatcttctggatatggtttgatctatgatactgtctagaacgctaagaagtttgagcctaagtacagacttatcaggaatggtcttggctcctagattgttaaatcatggttactgatcaaggagaggaagttcatt

SEQ ID NO: 152101 - DNA, 427 bp, Arabidopsis thaliana columbia
gggcttcacttgtttctctcccaaagtttcttcatcatccttgcgataaagaaaacaacaatcggctgtttcgtttcgatccaaagatgagtgaagaaactaaagataaccagaggctgcagcgaccagctcctcgtcttaacgagaggattctctcatccttgtcaagaagatccgtagctgctcatccatggcatgatcttgagattggacctggagctccacagattttcaatgtggttgttgagatcactaaaggaagcaaggtcaaatacgagcttgacaaaaagacaggactcatcaaggttgatcgtattctctactcatcagttgtgtaccctcacaactatggttttgttcctcgcacattgtgtgaagacaatgaccccattgatgtcttagtcatcatgcatgaacctgtgcttcc

SEQ ID NO: 152102 - DNA, 395 bp, Arabidopsis thaliana columbia
  unsure (1)..(395): unsure at all n locations
gtcatcatctctcaacaatgcccgttgccaatcttctccgcgtcctcttggtagctggagaagctcgtttgattccattttgtctctaatggctgccctcgcttctccctccctcatcccctcttctctctgcttcgctgccgccgccgatggtccccgttccctctcttctaatttctctgccttttccgacggcggttccaatttcaggtatcacaagagcttcttgtcgctttcatcttcgtcttcttcgtctacgccttatcgaaatcgacggngccgttccctcgtcgtatttgctacttccggagactactacgccactctcggtgtctctaaatctgccaataacaaggagatttaagctgcttatcgacggctcgctcgtcagtatc

SEQ ID NO: 152103 - DNA, 369 bp, Arabidopsis thaliana columbia
atcatcacacaccttcttcttcttcttcttctctctctatcacaagagagtcaaatccaaggcttctacttcttccctcggtctctctcaagctctcctagctcgtgcaatctctcaccatggttctgaccaacgtggatctttaccagctttctctggactcaaatccaccggttcacgcgcctcagcttcgtctcgtcgacgtatcgctcaatccatgaccaaaaaccgatctctccgtcctcttgttcgcgctgcagctgttgagactgttgagccaaccactgattcggcgattgaggacatatccgtcaactcgattaggtttttggctatcgttgccgtggagtaagccaaatcaggtcattc

SEQ ID NO: 152104 - DNA, 366 bp, Arabidopsis thaliana columbia
ctaactctcactcttagtacaaatattttcatttaatggtttctccttctttttcaggcaaggttgtcttctttgcttgctgtgttctgttcacattctcacacaaactcgtgacaggagaatccgacaaagttgagctcaatctttactacgaatcactttgtcccggttgtcagagtttcatcgtcgatgaactagtcaaagtctttgactccgatctcgatacaatcaccgatgtcaagctcgttccattcggttacgccaaagtctccaataatctgaccgtcatttgccagcatggtgattaggaatgctaactcaacgctcttgtagcttgcgtcattaacactttgtctaacccgaata

SEQ ID NO: 152105 - DNA, 423 bp, Arabidopsis thaliana columbia
ccaaatcaaagtcgtatttactttactttttttacccatgagggattccttggatgtttcaacaaaaaaaatgggagttttttcagtaaatgtaaatagcagaattgtggctagggaagtatattatcgacctagctaactttattgtagaaattttcgggataaatgattggaccatgcaaactagaaataccttttcttggataagggaagagattactcgctccatatctgtctcactcataatatatataataacttgggcatccatttcaagtgcatatccgatttttgcccagcagaattatgaaaatccacgagaggcgactgggcgtattgtatgtgccaattgccattttagctaataagcccgtggatattgaggttccacatacggtacttcctgatactgtatttgtagca

SEQ ID NO: 152106 - DNA, 366 bp, Arabidopsis thaliana columbia
aaaagagagaaaaatgctgagtttatcttttgcttctgctgttacaccggggggagggtcttctctcttaccaaactcaaagcctatcttctgtctgaaaaccctctccggttatcgttcttcttctttctgtggcggctgtattcgtaaaatcaaccataagcctcttcgaatgacgagttccaatattacaccaagagctatggccacacaacagcttgagaacgctgatcagctcattgattctgtcgaaacttttatcttcgattgtgatggtgtgatttggaagggagataaattgatagtgggtgttcctgaaactcttgatatgcttcgtgccaagggaaagagactgttttttgtgtc

SEQ ID NO: 152107 - DNA, 418 bp, Arabidopsis thaliana columbia
  unsure (1)..(418): unsure at all n locations
aaaaaaatggggagaaaccggggccattcgttggaacttcggagctaacgaggtcggggaacgatctaactcacttacgattcgtgattaccttaacaccttaatcaattgtctcgacggtggtgatgtaagacccgtcatcccactaggtcacggcgatccttctccgttcccgagctttcgtaccgatcaagccgctgttgaagccatctgtgatgctgtccgttcgaccaagtttaacaactactcttcttcttccggtgttcctgtcgctaggaaggctgttgcagagtacctctctagtgatctctcttaccagatatcaccaaatgatgttcatatcacagctggttgtgtgcaagccattgagattntgatatccgctctcgcaattcctggagctaacattctgctacct

SEQ ID NO: 152108 - DNA, 411 bp, Arabidopsis thaliana columbia
agaatccttccaaaaggaaagaggagtttgggaatcaacgaagatggtatgggctagtacagcggtctcatagatggcctgatcgcaaggaacataacgcctttcgttacactctttcactgggaccttcctcaatcattgcaagatgaatatgaaggtttcttggacagaacgatcatagacgatttcaaagattacgcggatctatgtttcgagagatttggtgatagagtaaagcactggatcaccatcaaccagcttttcacagtgcctacgagaggctatgcattgggaacagatgcacccggtcgatgttcccaatgggtggataaaagatgttacggtggagattcttccaccgaaccctatatcgttgcgcataaccagcttcttgctcatgccacggtcgtt

SEQ ID NO: 152109 - DNA, 426 bp, Arabidopsis thaliana columbia
  unsure (1)..(426): unsure at all n locations
attcctccggatcagcagaggcttatctttgccggtaagcagctcgaagatggacggacgggttgcagattacaacatgcaaaaggagtcgacacttcatcttgtgcttcgtctccgaggtggtatgcagatctttgtgaagacccttaccggaaagaccattactctggaggttgaaagctcagacaccatcgataatgtcaaggctaagattcaggacaaggaagggatcccaccagaccaacagagactcatcttcgctggaaaacagcttgaggatggtcgcacacttgcagattacaacatccagaaagagtcgactcttcacttggttcttcgtcttcgtggtggaagcttctaaagcttttgagatctgatgataagaggntggntcgtgtctcatgcacttgggaggtgatctatttc

SEQ ID NO: 152110 - DNA, 417 bp, Arabidopsis thaliana columbia
aagaaaaaggcgaaaacctcgccaatcctattacgcgaaaaatcaaaggtttttggatatggcgtcgaagcggatcttgaaggaattgaaggatctccagaaggatccacctacatcatgtagcgcaggtcctgttgctgaagacatgtttcactggcaggcaacgataatgggtccttcagagagtccttatgctggaggtgttttccttgtaaccatccatttccctccggattacccattcaagcctcctaaggtggcctttaggaccaaggtgttccatcccaacattaacagcaacggtagcatttgcctcgacatcttgaaggagcagtggagtcctgcgctcaccatttccaaggtgctgctatcgatctgttctttgttaaccgatccaaacccggatgatcctttggt

SEQ ID NO: 152111 - DNA, 416 bp, Arabidopsis thaliana columbia
ctcttgagtttattcttctctgctgtatcaatcaaatcaacggagtttgagtttggtttgggattccggcgatggggtcaggccccgatccaggcgagttaactgagttagctcagccgagtttcgaggagtttcagaaacagacgtcgttgatgactagctgtactcttctatggcaagagctctccgatcacttcacttctctagagcagaatctgatgaagaaatctgaagcgctgaagcagatgattgaaactctagataaccagactcagacctcactcgagtctctgaagcgtagagaggtaacaatcgaccatagcgttgagatcgtagctgggaaagctggtgaacgagctagagctgctcttgaatcgttagagaaagctagagatggttgcggtgatggctctaat

SEQ ID NO: 152112 - DNA, 335 bp, Arabidopsis thaliana columbia
gaaaaaaaaaactcacaaatcatcgattctttcttctgggtttttgtaaaaattcgagctgtttgtttctttctattgattgagtgtgtttcttgcttcgtgacatttcagagtttgcgtgtatttttgtttctatttttaaaagattctaatcgaatttgttcaatttcgctcttaaaaattgtaaatttgatctctcccccgtctttctcgtcgattcatttttgcttggatatatctcaggcgtcgatatagagaataaaaatcgacactttgtttcatttggaggctaaagatcaaagctttttgatagtgaagagcctccttcaccatta

SEQ ID NO: 152113 - DNA, 392 bp, Arabidopsis thaliana columbia
cagctctctcttctcaatttccccaaattaaataaattcctccgaaagtttatagagttcactctcccccgaactatacaaaattccctcaaaaggaaaaactaaaaagccgatcttggcttttttgtttctgagtgcatctcgatacttggaagcattctttggtgaggctgattcattctcatctgtgaaagtctttggcttttgaagcaatactatggaaggaattcagcatcctatacctcgcactgtcgaagaggtttttagcgactttcgtggtcgtagagctggtctcatcaaggctctctctactgatgtacagaagttttaccatcagagtgaccctgagaaggaaaaactgtgtctttatggacctccaaatgagacattgg

SEQ ID NO: 152114 - DNA, 230 bp, Arabidopsis thaliana columbia
gagagaacaccgaatatgacctttttttcataccgtcgcactctttcataggagcgagtctaactgtgatgtagacaagggaaacacctccgcttcctctaagaaatctcgtgagattgaccgtctcctccgcatactgaagcatatgaagaacaacaaatcatcccaagccgatgtatatgcattggacatttctgctacttcttaatccaaagatattacatatccct

SEQ ID NO: 152115 - DNA, 411 bp, Arabidopsis thaliana columbia
ataacaccgatccatctctttctttctttctccgtcgactctcgttcttaaagaagaaagctttctacgtagtcggggttgctcttcttctcaccttgaattataggggagaagcaagtggttctgttttcttcattgatggatccaacaatcaatatcttcgtccacgatcatccagtgaggcacttcccatgtcgcctgttgaaatatctgcagcagtgtctgccttgttgggttttgcaccttcagcaactttgacagctgatggctcatccaagttgaacaagattctaaaacctaatccatttgagaggcctcgcgctgcttttgtgctagaaatcgctggagctgatgatatgcttttggaaacctcccctagtcattctttcttgggcaatgccataaggagca

SEQ ID NO: 152116 - DNA, 398 bp, Arabidopsis thaliana columbia
  unsure (1)..(398): unsure at all n locations
gaacagttctgcatttnaaantanntttttttttttttatttanncatnnntccaagggtggataacaacaacaaaaggggagcacaaagctacattctctcaccacgtcattgtacgaatataaaaaccaaaggggtaaagaagtgcatcatcataacaaccatttgacttcttaattctaaaggtagacactcaagttttattcaaagctacaacagcagcaaagcagagagggagagagagatcattacttgacatgcttaatgagatttagttgtaaggattggaggcaggtagtctgatttggtgccgaggatacaggcctttgtgtccgggaagaattcaaatcctggaaactcaatgatgtcgccttcgctggctacaccgatcgggttgc

SEQ ID NO: 152117 - DNA, 413 bp, Arabidopsis thaliana columbia
cgaaaagcggaggaggggctctttgcctcctttttgggttggctctttgttcgggggctggttcccttagctgtgacgtggaggttgttggcgatgtcgaagtcattggctactcagaaatcagcaaaatcaagatccccaatgcattctcaggacttcgagttacgatagaatgcaaggcggccgattcaaaaggccattttgtaacgaggggaagcggagaagtggacgaaacaggaaagtttcatcttaatattcctcatgacattgtcggtgatgacggaactctaaaagaagcttgctatgctcatcttcaaagtgccttcggcaacccttgtccggcccacgatggccttgaggcctccaagatcgtgtttctatcgaaatccgggcaaaaccacgttttgggtctc

SEQ ID NO: 152118 - DNA, 409 bp, Arabidopsis thaliana columbia
aaaataaactcttgagcgatgagcaaccacctcttaccaccggagaacaagatcccgactcgtgaacttcgaccatcgagagattttctcagcccttggacgtggatctaaaggagttgtgttcttagtaaaagccgataacaaatggcttgctttaaaagtcatactaagagaatcaatcgagtcaaagaaggccaaagatgagtacaaacgcataagtttcgaacaaggagtgttgtctcgattcgaccatcctctgtttccacgtcttcatggtgttatatccaccgataaagttatcggttacgcgattgattactgtcctggaagagatctcaactctttaaggaaaaaacagtcggaagaaatgttttccgatgagatcattagattttacgcggcggagctt

SEQ ID NO: 152119 - DNA, 423 bp, Arabidopsis thaliana columbia
cgagcgccacgacgcacgcttgcagggatcagcaagaagtgagagtcagacttcttcttcatagaatcttgagacgaagaagacatgggaatacctagagagatcgcaaagcttggagtgaaacgaggaatgtggggagcagtgaagaagatggaacccggtttacgtgcttaccaaacgcatagactctcagatggaggaaccaagctttctcggtctgctttcatggctcaaatcaacaccaagatcacacaagaccatctcatctccctcagcaacggtgcatcgcctgtcactgaaactcccgttacattaaaccaaggaaaccgagctgcgaatctgaagaaactgttgattatcggtggagctgttgcggttgtctgcagtttaagcggaggtgcttttgttcctcctgcgttcttt

SEQ ID NO: 152120 - DNA, 393 bp, Arabidopsis thaliana columbia
ggaaaaagatgggagaaagaattgtggtttacaaagcttatctttaccaagaggacggaccactcaccgtctggaagggttctctcttctacaccggcgatggcttcgccgcctatgactgccgtggtgatatcatcttcagggttgattcttatggacctgacacaagagataacgatgagattgtcctcatggacgcgaccgggaagtgtctccttaccgttaaacgaaagagaccaactctacaccaaagatgggaaggttttctcggcgagagatcggaaggtcagaaaccgatattcagcgtccgtagatcgtcgataatcggacggtgtacgatggaagtagaagtttacgacggaacatgagaagagtacattttcgatggagact

SEQ ID NO: 152121 - DNA, 378 bp, Arabidopsis thaliana columbia
agaaaatcaaagcagcagttatggccgtcttagcaacaaagcaccccatggaagaagaggtgaagaagacggaggcgtgtagtttggtggggaagctagagacagacgtggagatcaaggcttcggctgataagtttcaccacatgttcgctgggaaaccacaccatgtctccaaagcaagtccaggcaacattcagggatgtgatctgcacgaaggcgactggggcacagtcggctctatcgtcttctggaattacgtacatgatggtgaggcatttgtggctaatgataggatcgaggcgttggttccagtttagaacttgatcacgtttagggtttattgaagtgttctgttgtaatagttcaatatctttttgc

SEQ ID NO: 152122 - DNA, 276 bp, Arabidopsis thaliana columbia
ggaagaagaagggagattcgatattgttgttgcggaagtgcagacttggtggagcgtgagagaggttcaagctagcaaggcgcccttacactgcccgtgacgtggtggctctacgtggccatctcaagcatggctatgcttcgaacgagatggctaataagctgtggagaacgctcaaaagccatcaagccaacggttcggcctctcgcaccttctgaagcgttgaccctgtttcaggtgaccattatggctaaacattttgacaccatctatttc

SEQ ID NO: 152123 - DNA, 370 bp, Arabidopsis thaliana columbia
tgtgtgtgtgtgtgatcgagtggtgaaacttctgtgaggggcgtcgttttgttgatttcggctgggtgaagatgtcaggtggcgaacatatcaagaacgagaccgttgatctggaaaaaattccgattgaggaagttttccagcagctaaaatgtacaagggaaggattgacaactcacgaaggggaagacaggattgtgatatttggccccaacaagctcgaagagaagaaggaaagcaaaattcttaagtttctggggtttatgtggaattctctttcatgggttatggaagctgcatctttcatggccattgctttggctaatggtgattattgaccttctgttggtcaagattttttgggttatta

SEQ ID NO: 152124 - DNA, 302 bp, Arabidopsis thaliana columbia
gctggtgaaccatggtattccattggtgcttctaaataaggtgaagaagctgagctcagagggctacaaaacagagagagaagaagcattcaagacttctaatcccgtgaagttgctcaacgaattggttcaaaagaactctggcgagaagctagaaaacgtggactgggaagatgtcttcactctcttggaccataaccaaaacgaatggccatccaacattaaagagactatgggagaatacagagaagaagtgaggaagctagcgagcaagatgatggaagtgatggatgagaatttgg

SEQ ID NO: 152125 - DNA, 282 bp, Arabidopsis thaliana columbia
gcgtttcttcaccaaccctacacgaactctgatagatagaaaccttctccttcttctgcttgttttatcatcggagaattcgaatcttcttttcctctttttgagattctctaattatccttttggaagagtttcgtgtgagagagaagcgtaatgggctgctttggttgttgtggtggtggtgaggatttccgtagagtttctgaaactggaccaaagccagtgcataacactggaggttacaatggaggtcaccatcaaagggcagatccacccaaaaac

SEQ ID NO: 152126 - DNA, 285 bp, Arabidopsis thaliana columbia
gaaataacaaaatggctcgagtctcttttcttctttctttctgcttaacacttttgagccggttccatggctacgcggctcaacagggtcagcagggtcagcagtttccgaacgagtgccagctcgaccagctcaatgcgctcgagccgtcacacgtactgaagagcgaggctggtcgcatcgaggtgtgggaccaccacgctcctcagcttcgttgctcaggtgtctcctttgcacgttacattatcgagtctaagggtctctacttgccctctttctttaaca

SEQ ID NO: 152127 - DNA, 382 bp, Arabidopsis thaliana columbia
acatctttctcctttggtggcaaacacaacgacttatagagagaaacgatggcgtcgaacgcgcttatgagctgtggcatagccgccgtgtacccttcgcttctctcttcttccaagtctaaattcgtatccgccggagttccactcccaaacgccgggaatgttggtcgtatcagaatggctgctcactggatgcctggcgagccacgaccagcttaccttgacggttctgctcctggtgactttgggtttgacccacttggacttggagaagttccagcgaaccttgagagatacaaagagtcagagctcatccactgtagatgggctatgctcgctgttcctgggattttggtaccagaagcattaggatatggaaact

SEQ ID NO: 152128 - DNA, 323 bp, Arabidopsis thaliana columbia
gtaacttagccttgttcttcttcttcatcgtgatatctccggtgtcttcttcgtctccatgagaagaagaagctctctgtatccatccatatcgaaaaaccagagatcggaggaaggagagagagataccaatctctgttgctttggttttaagggtttagaggagatgtcaaaccacccgaagatcacatcggcgcatcagaatgtggaggagaagctaagggaacttcaggagaggttctgtcatcttcaagctgctaggaaagaagggcggcatggtgaccttgcgcttttagaagcccaaatctctcaaatattcggga

SEQ ID NO: 152129 - DNA, 374 bp, Arabidopsis thaliana columbia
gaacgattgagtttctcctatcagatctcattttctgggaataattcgaagtgaaaaaatggcgcagcatctgttgcacgggactttacatgctaccatctatgaagttgatgccctccatggtggtggtgttaggcaaggcttccttggcaagattctggcaaatgtagaagagacgattggtgttggtaaaggagaaacacagttgtatgcgacgattgatctgcaaaaagctagagttgggagaaccaggaagatcaaaaatgaacctaagaacccaaagtggtatgaagtcgttcatatttactgtgctcacttggcttctgatatcatcttcactgttaaagatgataatcccattggagctaccctta

SEQ ID NO: 152130 - DNA, 258 bp, Arabidopsis thaliana columbia
ctcttccattattagtagagaaagctcactcttttcactcaaagtttctacctttctgttgtcctgaaaatgggttgcgtttgaaatctcacactttgagatttgggtgtttattttgggatccttcttaccacatttcgaaagtttaagtagggttttcgatttctctacttctcagaggagattttagaggcaaaagatggcttcaaggttggattttttagattggtgggcgaaagacacgaggaaaggaacacc

SEQ ID NO: 152131 - DNA, 409 bp, Arabidopsis thaliana columbia
ttcattctcccaccattgaggtttaacttatacatacagatctttttgaaattggattcagctaagaagcagactctgttttcatggctgtttacaataccaaactctgtttggcctctgttttcttgctcttagggcttctcttggcttttgacttgaagggtatagaagcagaaagtcttaccaaacagaaactggactcgaagatacttcaggatgagattgtgaagaaagtcaacgaaaacccaaacgctggatggaaagctgctataaatgatcgattttcaaacgccactgttgcagagtttaagcgtcttctcggtgttaaaccaacaccaaagaagcatttcttaggtgttcctattgtgagccatgatccatctttgaagctacctaaagcttttgatgc

SEQ ID NO: 152132 - DNA, 404 bp, Arabidopsis thaliana columbia
caccggaacttagccgacgagcgctgatcaaatcaaccggagaagcaaagctatagatcgactagctccttcacagttgctatcagagatgtataataatatgggaccccggcctggaatggcaatgcctcaggcaaatcctcagcctagcccatttgggaatccgttctctggacctggctctggacttatccggagtggcttgggagcttatggggagaagattttcggttctagctctgagtatgtgcagagcaacataagtcgctacttctccgatcctcaatactattttcaagtgaatgaccagtatgtgaggaacaagttgaagattgttctacttccattccttcacaggggacactggactcgaatatcagaaccagttgggggtagactttcat

SEQ ID NO: 152133 - DNA, 384 bp, Arabidopsis thaliana columbia
ctgccgacgctagccgttctcctccgccagattcaaatatttcctccgccgtcgacactggtgggcgcttcttcggctcacaaacttaatccaccaattttaccatgctttagaaccttgggcatatatcaatggagaagcgagtcaaatacaagagctttgtgaaggatccaggaactcttggatccctcgaattaagtgaagtgatgctgctctttgtcccaaatgatcctaaatcagatttgaagcttaaagttcagactcacaacatcaaaagtcagaaatataccaaagaaggatcaaataaacctccttggctcaatctgaccagcaagcagggaaggagtcatatctttgagtttgaaaattattctgacatgcatg

SEQ ID NO: 152134 - DNA, 420 bp, Arabidopsis thaliana columbia
agggtttcagtggtgctgatatcactgagatttttcagagagcttgcaagtacgccatcagagaaaacattgagaaggacattgaaaaggagaagaggaggagcgagaacccagaggcaatggaggaagatggagtggatgaagtatcagagatcaaagctgcacactttgaggagtcgatgaagtatgcgcgtaggagtgtgagtgatgcagacatcaggaagtaccaagcctttgctcagacgttgcagcagtctagagggttcggttctgagttcaagttcgagaattctgctggttcaggtgccaccactggagtcgcagatcctgttgccacgtttgcagccgctgctggggacgatgatgatctctacaattagtgataacttctttattcttttttttttttaaggtttaaaa

SEQ ID NO: 152135 - DNA, 335 bp, Arabidopsis thaliana columbia
ggaaagtgaggactgacatgacttaccctgttggtttcatggatgttgtgtctatccccaaaacaaatgagaacttccgtcttttgtatgacaccaagggacgtttccgtctccactccatcaaggatgaggaggctaagttcaagctttgcaaagtgagatcgatccaatttggtcagaagggtattccctacttgaacacatatgatggtcgcaccatccgttatcctgacccgctcatcaagcctaacgacaccatcaagctcgaccttgaggagaacaagattgtggagttcattaagtttgatgtgggcaacgtagttatggtcactgga

SEQ ID NO: 152136 - DNA, 328 bp, Arabidopsis thaliana columbia
gctcgacaagtcgtcggcggcggtgtaaaaatagtcggagctatggcgatgcaggggggagttggcttatccaggatctttctcttagccggagcaggttacactggtacgatcatgatgaaaaatggaaaattgtcggatttgttgggtgaattgcagagtttggtgaagggaatggagaaatctggagaagggtctgagggagattctgatgtttctgatgctatagctgcacaagttcgccggttggctatggagattcgacagctagctttgcagcaacacataacggtcatgaatggagtttctggtgcaaacctacaagccc

SEQ ID NO: 152137 - DNA, 387 bp, Arabidopsis thaliana columbia
gagaaacagagtaatggcgaacagagatgtggagagagtagggaagaaaaacagaggagcgaataacaattatttctacgaggagtcttctggtgaaactcattggacttcatggctgattccggcgattgtagtggcaaatctcgctgtctttatcgctgttatgttcgttaatgattgtcctaagaaaatcaccggacctaacaaagagtgtgttgctagattcctcggaagattctcgtttcaaccacttaaagagaatcctctctttggtccttcttcttcaacattggagaaaatgggagcattggaatggaggaaagtagtacatgaacatcaaggatggagacttctctcttgtatgtggcttcacgctggtatcattca

SEQ ID NO: 152138 - DNA, 336 bp, Arabidopsis thaliana columbia
gaaaaacaaaaaacaaaaaactgataatatttctctctctctctctcgttgagtgtgtccgggaaataatactctgccagagacagagagaaagactgtaacggaggatgtggtggcgaagtggccacactgacacactggtttcatgatggtgaaccacaacaatggccagcgacccactgatattgattctcgtctccgacagacagaacaagataagctcttgttccatgactttttaggctccaagaatcctactttagcatccacttccatggctgaccataggctaccaccggataataaggcggctaaagcggcgatgactcctttcac

SEQ ID NO: 152139 - DNA, 405 bp, Arabidopsis thaliana columbia
  unsure (1)..(405): unsure at all n locations
gttgcctcgagtaggagatattcatcggagtagttttcagttcgatttcggattagagaggaaagttctcgcggaggcagagaaagataatccagattggagtaaatttgggagtgagaatccaccggctaagtttcatgaaccatcaccttcttcagtgggtcaaatgcagggtgtagatcatgtagtgatgaaatatactgcttctgggctcaacagagaagctgtcaacatagctgttgcaaactatggtgataatcccacaaaggttcaagaatttgcaaatgggttcacagcgatacgggagatgggttttccgacaaacgctngtgcagatgctctcttcatgtttgagaacgacactgataaggcattggcacatttgctccatgggtctttctaaat

SEQ ID NO: 152140 - DNA, 317 bp, Arabidopsis thaliana columbia
cgcgacgaagaagaagactagagatagagagagaagtagagaaatcgaaggaatctgtaaccgattttaagatctcaatttttagggttgttgatttttcaatttctgggttaattttttttagggttttcatttggaatcatgtcggatgcgtattgtacggattgtaaaaaggagacggagttggttgtcgatcactcagccggagataccctttgctccgagtgtggtttggttttggaatctcactccattgatgagacctctgagtggcgtaccttcgctaatgaatcttccaacagcgatcccaatcgggt

SEQ ID NO: 152141 - DNA, 358 bp, Arabidopsis thaliana columbia
ctctcgtagccctcctctgttccatcttctttctccgccgatctccctctgctcttgctggttcttcttcttcttcaattctgtttttatttatttctttataaaccttctctcttaaaacccaaattcaaaaaaatcaaacgaagaaaaatctccgagttagaatcgtccataatcttgagactaagtgagaaatagtatccaaggtgatcaaacaatgggtgcaaaatcagaagagccgatgatgacaacaagagatagtatatacagagctgcaaggaatataaaacgactagacaacagtctctacaacgctcttcgatctatctaccaagactccatcttcgtccacgagatc

SEQ ID NO: 152142 - DNA, 400 bp, Arabidopsis thaliana columbia
aaaaaaaaaaccgttcttggaagatgggttttaaactcaactctcttttccttcttggtgggcttctcatactcacaatcttgtccggagccgaccaagccttggcttacgtcaagaaaccacatgtgagccaacgcaacaaaacggcgttagcagccgtcgccggaagaggaggaggaaaagagatgttgaaagggaggaagcagacgtgtggttgtaacttgtttcaagggagatgggttttcgatgcttcttaccctttctacgattcatccacgtgccctttcatcgacggtgagttcgactgtctcaaattcggccgaccagacaaacagttccttaagtactcttggcagcctgattcatgcacccgtccaagggttgatggggaagcgttttt

SEQ ID NO: 152143 - DNA, 236 bp, Arabidopsis thaliana columbia
gaccacgcgtgcggaaaaacacgcgcgaaagctatggtaggagcttttagaacaatcctatccctatctctatcatcggtccttttcaccttctccaaaatccctcacgtttttccatttcttcgccttcacaaacccagattccaccacgcctttcgtcctctttacttcggcgccgcaacaacttttttttcgacgaccgagacttatgttacagatccggatcaattgaaaca

SEQ ID NO: 152144 - DNA, 320 bp, Arabidopsis thaliana columbia
cgactataatcaccatgataaaccatgctattggagcagctggagttgttagccagcagtgcaagactgttgtggatcaatacgggcagaccattttggatttacttttgtctgagacccaaccgaagaaaatctgctcgcagattggtctgtgtacttttgatggtacccgtggtgtcagtatgggcattgagtcggtggtggacaaggaaaacgccaaattgtctaatggtgttggagatgctgcgtgttctgcatgtgagatggctgttgtgtggatccagagccagttgaggcaaaacatgactcaagagcgcata

SEQ ID NO: 152145 - DNA, 319 bp, Arabidopsis thaliana columbia
cgggcgaccacgcgccgctaattcgtcttaaaaattcgttagatagagaagaatctaaaagtctctctcggtcatgggaatatcttcttctcaggaattcgacgagactattcgaaatcggaaatcgcgctttgaatctgaaactcagaatttagaggacgcttactccaaagaatctagggtgttaactttctaagaaaaggagtttgttaaaacaatgaagtataaagatgagaagtacgagaaagctgagaagggttcaaggattttgcccaagacagttttactgattcttctttggggactttcgttctatctt

SEQ ID NO: 152146 - DNA, 378 bp, Arabidopsis thaliana columbia
caagaagaacaacaacactaagcaaaaaagttatgctcaagccgagagagacaatggcatgaacattcacgagctcaagcagtgttcttaccccaacaacattccttggccagactaaagcctcaagctttaacccccttcgtgatgttgtctctctcggatctcccaagtacactatgggaaatgatctttggtatggacctgacagagtgaagtacttaggacccttttccgttcaaactccgtcttacctcaccggagaattccctggcgattatggttgggacaccgccggtttatccgcagaccctgaagcctttgccaaaaacagagctcttgaggtgatccatgggagatgggcaatgttgggagcttttg

SEQ ID NO: 152147 - DNA, 415 bp, Arabidopsis thaliana columbia
ggaaccgtgagctagaagttatccacagcttgtgggccatgctcggagccctaggctgcgtgttccctgagcttttggccaggaacggagtcaagtttggagaggcagtttggttcaaggctggttcacagatcttcagcgatggagggctcgattacttgggaaaccctagcttggttcacgctcagagcattttggccatttgggccacacaagttattttgatgggagccgttgaaggttacagagtcgcaggaaatgggccattgggagaggccgaggacttgctttaccccggtggcagtttcgacccattgggtttggctaccgacccaaaggccttcgctgagttgaagggtaaggagctcaagaacgggagattggctatggtctctatgtttggattcttcgttca

SEQ ID NO: 152148 - DNA, 237 bp, Arabidopsis thaliana columbia
tgaaaaagtgttctgctatgtaggaactcttagttctttcggacgagttgagatctgatgttatttttaatgtttcgaaaactggaggacacttgggttcgaatcttggtgttgttgagctcaaccgggcccttcattacatcttcaatactcctcatgataagatcctttgggatgttggtcatcagtcttatcctcacaagattctaacgggaagaagaggaaagatgaagacaa

SEQ ID NO: 152149 - DNA, 371 bp, Arabidopsis thaliana columbia
caggacaaatggattggttgcttccctgttaagtggcatttcgttaaagatatccctaatggctccttgaggcatataactctggagaacaatgagaacaagccggttactaatagcagagacacacaggaagtaaagctcgagcaaggcattaaagtcatcaagattttcaaggaccacgcaagcaagacatgcatcctcgatgattttgagttctatgagaatcgtcaaaagattatccaagaaaggaaaagcaaacacctgcagatcaaaaaacagacattggtggccaatgcagacaaaggtgtaatgtcaaaaattaatcttgtgaaacctcaagagtctactacagcctcagaagatgcagcagc

SEQ ID NO: 152150 - DNA, 359 bp, Arabidopsis thaliana columbia
cgaagatattatttttcatggattgagcaatgaagaggacgataatttcgaaaatatcgcgatacaatggacaagttctcgtacaattcgtatccagattcagctgaatcgtcgccaagatctcgcgatgtcgaatttgaaaatccgtcgccatgggaggaccagcagcagcagaactacaaggtgaagctcatgtgcagctatggcggcaagatccagcctcgtccacacgataaccagcttacttatgtaaacggcgataccaaaatcatgtcggtcgatcgtggtatcagatttccggctttagtatcgaagctctccgccgtctgcagcggtggtggtgatggaggagaaatctc

SEQ ID NO: 152151 - DNA, 383 bp, Arabidopsis thaliana columbia
gcgtttttatcgaacaaagatgagaactctgcagcgagagttctgttccgtggattcccatatgatttgcctccttggtcagtcagtattttacctgattgcaaaacagaggtttacaacactgcaaaggtcaatgcaccaagcgtacacaggaatatggttcctactggtactaaattctcttggggatcattcaacgaagcgactcctacagcgaatgaagctggtacgtttgcaagaaacgggcttgtggaacaaataagcatgacttgggacaaatctgactatttttggtatataacagacattacaatcggttccggtgagacatttttgaagactggtgattcacctcttcttacagttatgtcagctggacatgc

SEQ ID NO: 152152 - DNA, 393 bp, Arabidopsis thaliana columbia
  unsure (1)..(393): unsure at all n locations
ccggnncggaaatcccggggcggcccaacccgtccggcgacatgctgcggctgaaatctttgctaatcctgatgttattgctgaagtgccatggtatggaatcgaacaagaatacactttgttgcagaaggatgtgaactggcctcttggatggcccattggtggctttcctggccctcagggaccatactactgcagtattggagctgacaaatcttttggaagagacattgttgatgctcactacaaagcctctttgtatgctggaatcaacatcagtgggatcaatggagaagtcatgccgggacaatgggagttccaagtcggcccatcggtcggtatctcagctgctgatgaaatatggatcgctcgttacattttggagaggatcac

SEQ ID NO: 152153 - DNA, 369 bp, Arabidopsis thaliana columbia
ccttgcccgaatgggaaaccaccggtttcgtcgtgtacatcgccggcggtcctcagccaggaggcatgtacttcccagtggctcatggagtccacgccgtgaggctcggaaacgaagctacaatctctcagaagttagaagtgaagccaggttctctctacgcactcacgtttggtgcgtcgagaacttgtgcacaagacgaagttcttagagtctctgtaccttctcagtccggtgacttgccacttcaaacactttacaacagtttcggaggtgacgtgtacgcttgggccttcgtcgccaagacttctcaagttactgtgactttccacaatcctggagttcaagaagatcctgcttgtggtcctt

SEQ ID NO: 152154 - DNA, 400 bp, Arabidopsis thaliana columbia
ctcaggaagaatctagttgcggttatcttcagcccaaagagtaaagacccatccatccgttgctgaatctgctgctttgatcgaaaatgacgtcgtcctctccaacacagcgtactcacgtctcaattcctcctgaaccaggaggaaagtcactaacacaagaagctaatgagccaccagttccgatatcagtttcctcgccgtgcgggaaacgaaccagagatcccgaagacgaggtctatctcgataaccttcgctctcagaaacgttatcttagcgagataatggcttgtagtttaaacggactaacagtaggagactcactttctgtcaacatgttagagtctccagcacggtctgagagctttctttattacaaggatgatttattattacaata

SEQ ID NO: 152155 - DNA, 341 bp, Arabidopsis thaliana columbia
cgaagaatctctccactcttgccctcttttttaaccctaaaccagaagcaccagatttgtggaactttttcccagagaacaatagaaaacccaacttgtgctctctagggttttctttattccttctcatctttggattttcttgggtcatcattttggaagcttacccaccagcgaaaaaattataacttccatcgattcctggtttctttctctcgctctctctgcatgtgctaaatcgccggactgatcctcactgtcacctctgttcccggcttattcgccggtgaaatctatggttggtgctcagatttatttccaattgtttgtgcatctggtgg

SEQ ID NO: 152156 - DNA, 357 bp, Arabidopsis thaliana columbia
gcgatctgtctctcgcaatcttcgctcttctctgggcgtctctctctctcaacgcggggcagatccgagtttgggagattcaagctccctgaaaaaagccctttactctcgcttaccaactttgctccagcatggcaggatctgcaccagaaggcacacagtttgatgcacgtcagtttgaccagaaactcaatgaagtacttgagggacaagatgagttcttcacatcctatgatgatgttcatgagagctttgatgccatgggtcttcaagagaaccttctcaggggtatttatgcttatggttttgagaagccttctgctattcagcaaaaaggaatccgtcccttctgtaagg

SEQ ID NO: 152157 - DNA, 175 bp, Arabidopsis thaliana columbia
atttgttgaaaaccttgatttagactatgaagtctcttaatgatcttcctgcgcccaaatgaagcactaccacgtattatgatcattctaatgatgcttggttcaaaaaccgagtcactgaatccgagacggtgaaatccttcagtatcaaatttaaagtggtgcctgcttacct

SEQ ID NO: 152158 - DNA, 330 bp, Arabidopsis thaliana columbia
  unsure (1)..(330): unsure at all n locations
aacttcgtctccgtgtctgttcaagctcctattcttgtggccttcacgcttcaggaacaaagaccagtatctctctgaaagactacttctcggaaattttcgtctccatggcacccgtgagggggattcttggcttgcaaagggcagtgtccatttggaaggaaagtaacagactgactccagctttgagatcattcagcactcaagctgcatccacttncaccactccacagnctnctncacctnctncgnctncggaaaagactcatttcggtggtctcaaggatgaagatcggatttttactaatctctatggtctgcatgacccat

SEQ ID NO: 152159 - DNA, 359 bp, Arabidopsis thaliana columbia
aaacagagcaaattttattctctcagtttatatatatacatattaatcagaatcagggagggtgaagaagcgaaagagagagagaagatcggatgggagtggattactacaaagacctccaagtcgatcgcagcgcaagcgacgatgatctcaagaaagcttatcgtaaacttgccatgaaatggcatcccgacaaaaatcccaacaacaaaaaggatgccgaagctatgttcaaacaaatatccgaagcttacgaggtactaagtgatcctcagaagaaagctgtgtatgatcaatatggtgaggaaggtttgaaagggaacgtgccaccttcggatgcaggtggagctacttacttt

SEQ ID NO: 152160 - DNA, 227 bp, Arabidopsis thaliana columbia
aaaaaagacacttcttaagcttcaacaagaaagaaatagtattcgcatagtattagaagatggattttttcaatcaagctaaagccgtaaggatgcgtaacgtccatgataagtatctaacagcggatgaggacgaggaaacggtgactcaagacaggaatggttccgacaagagagctagatggattggcgagccggttcgtggtttctttggagggatccggtta

SEQ ID NO: 152161 - DNA, 295 bp, Arabidopsis thaliana columbia
aaatcctcaaaagcctatttgggggatcatcaaccttctatcatcaccatggatccttacgaggatcgtccttcaagcgcgtacaacgccccattctacaccacaaacggtggtgctccagtctccaacaacatctctttcctcaccatcggagaaagaggtccggttcttcttgaggattatcatttgatcgagaaggttgctaatttcaccagagagaggatccctgagagagtggttcatgctagaggaatcagtgctaagggtttctttgaagtcacccatgacatttcaa

SEQ ID NO: 152162 - DNA, 405 bp, Arabidopsis thaliana columbia
aacagatcaaatacgaggagagatctctaaagagatttatcgtttcaaatttgttcacgtggagaagtttaatttagattaaacaacaaaaagatgggttactggaattccaaggttgttccaaaattcaagaagttattcgagaaaaatagtgctaagaaggctgctgctgctgaagctaccaagacctttgatgaatctaaggaaacaatcaacaaggaaattgaggagaaaaagacagaactccaaccaaaggtcgtggaaacctatgaagccacgtctgcagaagtcaaggctttggtgagagaccctaaggtggctggtttgaagaaaaactcagcggctgtgcagaagtacctcgaggagctagtcaaaattgaattccccggatcaaaagcggtgagt

SEQ ID NO: 152163 - DNA, 406 bp, Arabidopsis thaliana columbia
attggcggttccaacccacagcgttgcggctggactaggatcgatagaaggagtagtgagggagatcatcatcaccttcgctttggtctacactgtctacgccaccgccgctgatcccaagaagggttctctcggaaccatcgctcctctcgccattggtcttatcgttggtgccaacatcctcgccgacggtccattctccggtggatccatgaacccagcacgttcctttggaccagctgttgctgccggagacttctctggtcactgggtctactgggttggaccactcatcggtggtggacttgccggacttatctacggaaatgtcttcatgggttcttccgaacatgttcctctggcttctgctgatttctaacgaaacaagtgatgattcttgattcat

SEQ ID NO: 152164 - DNA, 363 bp, Arabidopsis thaliana columbia
cttcattttattttccctctacatctctcctaacgatttccaaatctcacttcactttggctcctccacctgaatccatggatattgcttcgtcatctctctcacaagctcacaaagtcgttctcacgcgtcaaccttcttcccgggtcaacacctgctcccttggctcggtctccgctatcggattctctcttccgcagattagctctccagctttaggtaaatgtcgccggaaacaaagctcttctgggttcgtgaaagcttgtgttgctgttgaacagaaaacccgaactgctatcatcagaattggcacaaggggaagtcctctagcacttgctcaagcatacgagacgcgagaaaagc

SEQ ID NO: 152165 - DNA, 305 bp, Arabidopsis thaliana columbia
gctcacaagaacaagggaaatattgacggtttcgctaaactggtgtcagttgaagacattggccgccagaatggggttgcctacggtcgtaactataccactcgtaccgactataagaatgtagacgcaggtaaagctaaggaactgatggagcatttggtcaaattgcaatcttcaattcctgaagttaacaagattgtgaaaggaattcgttcggacgtggcaagccgtcgcagtgctgatgaattcgagtacaaagatccaggtgatggatccatttcgaagcaccagggaattcgttactt

SEQ ID NO: 152166 - DNA, 326 bp, Arabidopsis thaliana columbia
aattcatttccatgctaatcacagttctagttatcttcaaaacatcgttagcgtttgaaaacttttcatctgtcgatggtaatttcccgttctcacctaaacatgttataatcatcaacactttgcacccacatggaaaattatacgtgcactgtaggaataaaggggaagatttagggcttcataagatagaatatcgagaacaaatagatttcaggtttcgtgtcaatctacgcagaacaacaacatacacttgtaaattctcgtggccaggaaatgaaaagacgttcgatatttttagagcggatagagacgatagttcaaaa

SEQ ID NO: 152167 - DNA, 372 bp, Arabidopsis thaliana columbia
gatcaatcaccgtttagctttcttcccatacgtctctccgtttacgaccagtatacagaggctggagctggggaagaaaaggattgtctatggagggagacgtcggaataggtttggtatgccagaatactatggatgggaaggcgagtaatggaaatggtttagagaagactgtaccttcttgttgccttaaggctatggcatgtgtacctgaggatgatgctaagtgtcactccactgttgtttctgggtggttttcggaacctcaccctcgctctgggaaaaaaggcggcaaagcagtctatttcaacaaccctatgtggccaggagaagcacactcactgaaagttgagaaagttctgttcaaagaca

SEQ ID NO: 152168 - DNA, 211 bp, Arabidopsis thaliana columbia
ggcggatccatcttctcaaaaccctaacctcgccactccccctcctccttcttctccttcaccaacccatcaaattcaatctggaacctcggaattatcgccaccgtctcgaccgccttgctctaccttgtcctttctcaagactgctaaccgaccaaaactccgtgtgacatctgaattcgacagcgatagtctccttttcttaaacaaa

SEQ ID NO: 152169 - DNA, 383 bp, Arabidopsis thaliana columbia
attacaatgttcacagtatacagaacgagctcgaagacccctctcagataagacctgttgttcgatcagcacttatgctctgctcatctgtttacataatgacaagtattttcgggttcctcttgtttggtgatgatactcttgatgatgtccttgcaaactttgacactgatcttggaatcccttttggttctatccttaatgatgcggttcgagttagctacgcgcttcatttgatgctcgtgttcccgattgttttctaccctcttcggattaacattgacgggctcttgttcccttccgctcgatcattatctacctcaaatgtgaggttcggttgcctcactgccggtctcatctctgtaatcttcttgggtgcaaac

SEQ ID NO: 152170 - DNA, 360 bp, Arabidopsis thaliana columbia
agttattcttcaatttcaagaaaatgctgcaaggctttctcttcctcctctcagtcgtactcctcttctcctcatctgcagccgcctgcgaccgatgtcttcacagttctaaggcagcttatttctcctctgcatctgctctctcctctggagcttgtgcatatggctctatggctaccggtttcttcgccggacacattgctgcggctctgccttccatctacaaagacggctccggctgcggagcttgcttccaggtcagatgcaagaacccgacgctttgcagcagcaaaggaaccacggtgattgtcacagacttgaacaagaccaaccaaaccgatcttgtccttagcagcagag

SEQ ID NO: 152171 - DNA, 390 bp, Arabidopsis thaliana columbia
  unsure (1)..(390): unsure at all n locations
ggcagagttggtgccactgcagccgtctacacagtttcaatcctggagtatctgacagcagaggttcttgagttggctgggaatgcgagcaaggatctcaaagtgaagaggataacgccaaggcatctgcagttggcgattagaggagatgaggagctggacacactcatcaagggaacgattgctggaggtggtgtgatccctcacatccacaagtctctcatcaacaaaaccaccaaggagtgatgtgtagctttttatggggtttggatttctgtagtcttggactcattttcctttatccttttcttagttctttgactagtgttgaccttttctggacattctcaagtgtacattagntaatttgaactctttagggttcttgac

SEQ ID NO: 152172 - DNA, 440 bp, Arabidopsis thaliana columbia
ggatgggttttacattgctcctgctttcatggactagcttgttgttcacatcaccaagaacttcttgactctgcctaacatcaaggttccacttattttgggtatatggggaggcaaaggtcaaggtaaatccttccagtgtgagcttgtcatggccaagatgggtatcaacccaatcatgatgagtgctggagagcttgagagtggaaacgcaggagaacccgcaaagcttatccgtcagaggtaccgtgaggcagctgacttgatcaagaagggaaagatgtgttgtctcttcatcaacgatcttgacgctggtgcgggtcgtatgggtggtactactcagtacactgtcaacaaccagatggttaacgcaacactcatgaacattgctgataacccaaccaacgttcagcttccaggaatgtacaacaaggaagaga

SEQ ID NO: 152173 - DNA, 283 bp, Arabidopsis thaliana columbia
agcaatctcctcgttgcaaccttcggggttcttctcgtgcttaacggctgccttgcgaggcaggcacttggggttcctcctcagctacagaacgagtgtaacctcgacaacctagatgttcttcaagccaccgaaactatcaagagtgaagccggtcagatcgagtactgggaccacaaccacccttaggttcgatgtgttggtggttcccgtgctcggtatgtaattgaacaaggcgggctttacttggccaacttcttcactttcccaaaaatttcctacg

SEQ ID NO: 152174 - DNA, 402 bp, Arabidopsis thaliana columbia
gcgatggtgagatttagatcaacagatttgtatcgatttctgaaaacatgcagtacaagaatctggggaaatcgggtttaaaagtgagcacgctctcgttcggagcgtgggttacgttcgggaaccagctcgatgtgaaagaagcgaaatcgattcttcagtgttgtcgtgatcatggagtcaatttcttcgataacgctgaggtttacgctaatggtcgcgctgaggagattatgggtcaagcgattcgtgaactgggttggcgtcgatccgatatcgtcatctctaccaagatcttctggggtggtcctggtcctaacgataagggtttatctaggaaacatatcgttgaaggcactaaagcttctctcaaacgacttgatatggattaccgtgatgtgc

SEQ ID NO: 152175 - DNA, 295 bp, Arabidopsis thaliana columbia
catgtatacacacatatagttacaaacacacatacacaaaacacagatatataaaaatgtcttgttataataaagcactattgatcggcaacaaagtcgtcgttatacttgtattcctcttatgtttggttcactcgtcagagtcacttcgaccactgtttgcatgtgatccagcaaacgggttaacccggacgctccggttctgtcgggccaatgtaccgatccatgtgagagttcaagatttgctcggaaggctcacgttgcaagagaagatccgcaacctcgtcaacaatgc

SEQ ID NO: 152176 - DNA, 111 bp, Arabidopsis thaliana columbia
tgctatcgaagattttttctggattcgaatttattcgtaacaaaatttaacatattttttttattatgagaacaaatcctactacttcaaattcagaggtttcgatacgtg

SEQ ID NO: 152177 - DNA, 361 bp, Arabidopsis thaliana columbia
gaactctgtcggagagagaagattgagaaagttcctcactttagcttttataagagcatggagaaaatacacgaggaagaaggtattgaaccggaccagttaatgggagacgttctatactacggagacaaccactctgcggtggtgcagctgcacggccgacctgacgtggaaaagctgatcgacgagaatcgcactggaggcaagctgatcgtgcttgacgttggtctaaaacattgtggtccttgcgttaaagtgtatccgaccgtgctgaaactgtcccggtcaatgttcgagacagtcgtattcgctagaatgaacggtgacgagaacgatagttgtatggagtttcttaaggaca

SEQ ID NO: 152178 - DNA, 398 bp, Arabidopsis thaliana columbia
  unsure (1)..(398): unsure at all n locations
caagattcttaagaattgttggaaatcactacctgaaaacggtaaagtggttgttatagaattagtcactcctgatgaggcagagaatggtgacatcaatgcgaacattgcctttgacatggacatgttaatgttcacccaatgttctggtggaaaagagcgatcaagagctgagtttgaagctttagctgcagcttctggcttcacccattgcaagttcgtttgccaagcttatcactgctggattattgaattctgtaaataaaatgtgtgatacaaatctaaatcgtcgnttctagtatttttcttttttgttgatatgtgattatcngtgntatttcttattttcatatttgtttgaaatggtcatgcatgtctntgtcttcaagcaatctagc

SEQ ID NO: 152179 - DNA, 120 bp, Arabidopsis thaliana columbia
atttactaaaacttttccaaaatgtccatgaccttcttcaatttattcctaatctgggctgtcctttacaacaattgcgttgcgcatcactatacattcacggttagggaagatccatat

SEQ ID NO: 152180 - DNA, 376 bp, Arabidopsis thaliana columbia
  unsure (1)..(376): unsure at all n locations
aaagcttttaacctcagccgttaaatctttctccgatcatgccgaccagaaacatcgccattggtggagtccaagaagaggtctatcaccccaacgcacttagggcggcgctcgctgagtttatctcgactttgatcttcgtcttcgccggctcaggctccggaattgctttcaacaagatcactgacaatggagcaaccactccttccggcctcgtcgccgctgccttagctcatgctttcggtctctttgtcgctgtctctgttggcgctaacatttccggtggccacgttaaccctgccgttaccttcggtgtcttactcggtggtaacatcactctcctncgggtattctctactggatgctcagcttcttg

SEQ ID NO: 152181 - DNA, 370 bp, Arabidopsis thaliana columbia
gaatcagattcaagatagaagtttttcaaacaatgtctagtcctcttggtcactttcagaggcttgtttttgttcatgctttgcggatcttctcagctgagtcccgcaaaacccaattgctgcacgataatgatgttgaatctagcgacaagagtgcaaaaggcacacgatgggctgttttagttgctggatcaaatgaatattataactacaggcatcacgctgacatatgccacgcgtatcagatactgcgaaacggcggtttaaaagatgaaaacatcattgtgtttatgtatgatgatatcgcgtgctcctcggagaatcctaggcctggagttatcattaatcaaccagatggagaagatgttta

SEQ ID NO: 152182 - DNA, 351 bp, Arabidopsis thaliana columbia
atctatttctgctctatctctctctctctctctctctctctctctctctctctctcggggatgatttctatctcccccgacgccgaaagagaaacgtcgatcggagaacctttgaaatgtcgactggattagatatgtctctcgacgacatgatcgccaagaaccgtaagtctcgtggtggagccggccccgctcgtggaaccggatccggatccggaccgggtccgactcgccgcaacaaccctaatcggaaatcaacccgatctgcttcataccaatcagacaaggcgccggagtccacctggggtcacgacatgttctcccgtagatctgaagatcaccgatcgggac

SEQ ID NO: 152183 - DNA, 367 bp, Arabidopsis thaliana columbia
aaagcctttcaagttggagctggttgtgtatgctagtctgcaagatgcacagccacgcacagtgatgcctttgtggaaagcaaacttggaagaaccaaaagcgaagcagtccgatacttcagtgatgatcgttgataactccacaatcccaagccgcaggatgaagaaacgaagggtctgcgcctcccacgggagacgtaggcctcaagtagttaggcaaacacgtcttaaattcgcaccttcgactgaaggtgacagccaacagctaaagtggttttgtgatgcatgtaaagggattccacagccgatgcatccaccggtctttcttcaagcaccaccatttgcttcaccaccaccattagaagat

SEQ ID NO: 152184 - DNA, 288 bp, Arabidopsis thaliana columbia
aaaaaaaaaacagaaagtaacatgagatctctcttattagccgtgtgcctggttcttgctttacactgcggtgaagcagccgtgtcttgcaacacggtgattgcggatctttacccttgcttatcctacgtgactcagggcggaccggtcccaaccctctgctgcaacggtctcacaacactcaagagtcaggctcaaacttctgtggaccgtcagggggtctgtcgttgcatcaaatctgctattggaggactcactctctctcctagaaccatccaaaatgctttg

SEQ ID NO: 152185 - DNA, 292 bp, Arabidopsis thaliana columbia
cagcagaggcttattttcgccggaaaacagttagtggatggccgtacgttggctgattacaatatccagaaggaatccaccctccacttggttctcaggctccgtggtggtatgcagattttcgtcaagaccttaacgggaaagacgattactcttgaggtggagagttctgacaccatcgacaacgtcaaggccaagatccaagacaaggagggtattcctccggaccagcagaggttgatcttcgctggaaagcagttggaggatggcagaactcttgctgactacaaca

SEQ ID NO: 152186 - DNA, 252 bp, Arabidopsis thaliana columbia
cgatcatcacgaagccaaagaacaatttcttcgtcactatcataaccatggcggggctttcatctgcagatcgagctagtaatgggaagaaagggaagaggtcatactttggtttggcacctatgggaaaggctggagcattttcttaaggaacttcaggctttacattttcaccttggacttcagactattattatttcaaaggtctaatggcttccgaaggaccaggtattccggaggaaggggggggat

SEQ ID NO: 152187 - DNA, 409 bp, Arabidopsis thaliana columbia
gtgaggatgaaggtgttgatgactctacttataaggttgttgacattgtcgacaccttcagacttcaggagcaaccaacttatgacaagaagggattcatcgcttacattaagaaatacattaagcttttgacacccaagctcagcgaagaagatcaagctgtcttcaagaagggtattgagggagctaccaagtttttgctccccaggctcagtgacttccaattctttgttggggagggtatgcatgatgacagcactttggtctttgcttactacaaggagggttcaactaacccaacatttttgtacttcgctcatggtttgaaggaggtcaagtgctgagagagaagctctcgttgggttactgtggtcggtcgcagcgactctctaaagttatgtttctttat

SEQ ID NO: 152188 - DNA, 362 bp, Arabidopsis thaliana columbia
gccgggacaagttttgttgtctctctagggaagacgtgatccgcttccttataggtgtccttggagcattagctcctttaccactcacatcaatctccactctgggaatcatcaatcaaaactataacttcattgaagcctctcttccagccattgaagccactcgtaggccactgtgtgaccctagtgcgatcgccgtgttggaacaaaccgaaaacgaacaacagttcaagataataggagaaatctcagcttcaaagctctggaaatgtgattatctagctgcagcttgggctctagctaatctctatgcaagacaatttgtgatgggagttgaggacaacatgtcatcaagatcattc

SEQ ID NO: 152189 - DNA, 304 bp, Arabidopsis thaliana columbia
agcttagctaagatgacgaagaactacccaaccgtgagcgaagattacaagaaggctgttgagaagtgcaggaggaagctcagaggtttgatcgctgagaagaactgtgcacccatcatggtccgactcgcatggcactctgctggaactttcgattgtcaatcaaggactggaggtccattcggaacaatgaggtttgacgctgagcaagctcatggagccaacagtggtatccacattgctcttaggttggtggaccccatcagggagcaattccctaccatctcttttgctgatttccatc

SEQ ID NO: 152190 - DNA, 372 bp, Arabidopsis thaliana columbia
  unsure (1)..(372): unsure at all n locations
atggttaagctcagcaatctcctcgttgcaaccttcggngttctcctcgtccttaacggctgccttgcgaggcagtcacttggggttccttctcagctacagaacgagtgtaacctcgacaacctagatgttctccaagccaccgaaactatcaagagtgaagccggtcagatcgagtactgggaccacaaccaccctcagcttcgatgtgttggtgtttccgttgctcgttatgtaattgaacaaggcggtctttacttgcccaccttcttcacttccccaaaaatttcctacgtcgttcaaggaacgggtatcagcggaagagtggtccctggatgtgccgagaccttcatggactcgcagccgatgcaa

SEQ ID NO: 152191 - DNA, 369 bp, Arabidopsis thaliana columbia
catcctctaaaaaaaaatctttcttgtgagtaacgaaaaaaatgtgtgcggtggagaacaaatggttaaaggtgggtcaaaaaggagctggtcctggggctagaagctcacatgccatgaccgtcgttgggaacaaagtttactgttttggtggtgagcttaagccaacgatccatattgataacgatctttacgttttcgatcttgagactcaagaatggtcgatagctcctgcgaccggagaggctcctttcccctgttttggtgtctcgatggtaacgatcggttcaacgatctatgtctacggtggccgtgacgataaacggagatacaacggtcttcattcgtatgatactgagaccaatgagt

SEQ ID NO: 152192 - DNA, 415 bp, Arabidopsis thaliana columbia
gcgctcttttcaaacatacacagagaatggtggattcgaaaacccctgcgaaaaccaaattgttagattcgtcttcgatttctaatgtcagagtcgtccttagggttcgtccttttcttccccgggagatttcggacgagagttgtgacgggagatcgtgcgtttccgtaatcggcggcgatggaggagataccagcgaagtggcggtttacctcaaagatccagatagctgtcgtaacgaaagctatcagctggatgcgttttacgggagagaggatgataatgtgaagcatatattcgatagagaagtaagccctttgattcctgggatctttcatgggttcaatgctactgtgcttgcttatggagccaccgggagcggaaagacttttacgatgcagggaatcgatgagct

SEQ ID NO: 152193 - DNA, 287 bp, Arabidopsis thaliana columbia
cattgggataaaagatgagctttactcaggttaattgttttcgaccatcctactatcctgcaaggataacacgaccaaattgcatctccagtgtacctattaggtcttcagtacgctttgatcacttcccgcgtacctcgtttactcttcgagctactgctgcagtgtctactcagttttcgcctcttcttgatcatcgccgtcgtttacctactgggaaatcgaaacaaagttctgctgtgtgcttatttggtgggaaagataaacctgatggtagtgatgagata

SEQ ID NO: 152194 - DNA, 181 bp, Arabidopsis thaliana columbia
gatctaattgatgtagggactgtgtgtctcatcgggggagaattctcaatatgactactcgaaagtagcggcaagcgagtttgtgagctccataaacacaattgtggttgagataagacaagtgacgtcaattatgtctcaattcggtgatttcagcgggagatcgccggctggagaaagc

SEQ ID NO: 152195 - DNA, 395 bp, Arabidopsis thaliana columbia
acgtttccaaactcacccccacaactttcatttttatcaaccaaacccaaatggttccaagttcgggcctcaccaccatcgtggcgactgttcttcttgtgacattgttcggttcggcctacgcaagcaacttcttcgacgagtttgacctcacttggggtgaccacagaggcaaaatcttcaacggaggaaatatgctgtctttgtcgctggaccaggtttccgggtcaggtttcaaatccaaaaaagagtatttgttcggtcggatcgatatgcagctcaaacttgtcgccggaaactcggtcggcaccgtcactgcttactacttgtcttcacaaggagcaacacatgacgagatagactttgagtttctaggtaacgagacagggaagcct

SEQ ID NO: 152196 - DNA, 429 bp, Arabidopsis thaliana columbia
gctactactcagcagcgagaatctcaatctgtctctccttcgagtattttacgaaaggctagtactgcattagaaaggttgaaggaagtgcttgacgcagtcgattctcaaaatcctgagggggcaaaagatgagtttactcttgatcttgtcgagcaatgttcgtttcagaaagagcgcgtaatgcacctcgtcatgacatcgagggatgaaaaagcagtttctaaagcaatcgaattgaatgagcaacttcagagaattctcaatagacacgaagatttgctgtctggtagaatcactgttcctagcaggtctaccacatcaaatggatatcattccaatctcgaacctgtccgtcctatctcaaatggtgaccagaaacgcgagctaaaggcttctaatgcaaacaccgaatcaagcagcttcatt

SEQ ID NO: 152197 - DNA, 275 bp, Arabidopsis thaliana columbia
attcaaagctttcttcttttgtacgttattccattaatccaatttgaaactgtcaagattttcccttttctctggctgtcgagtttttctcgattcctttctccattttattctttcccctcttcttcaacatctcaatataaaccctaattttgattctagtttctcaattggtgtgaattctcaaaaattcaaaaaaccctaatttcctttttttctcttttccggttttttttgattgattcgatttcctttgattcttcgatgaggattta

SEQ ID NO: 152198 - DNA, 454 bp, Arabidopsis thaliana columbia
  unsure (1)..(454): unsure at all n locations
ggtaccgaacggcggggcgacccacgcgtacggcagcttcattcacgagtttccgtccgtggaactgaacactcagactataagtcacgcacagtagccagactcaaccgtgacacatcccnagtcaaatctctcataacccgtttagatctagccatcaacaacatatccaaagcagatctcaaacccatcagcacaatgtacaccactgaggaacaagatatcgaagctcctttaatctccggcacgactcaaggaagtggcgagtacttcacacgcgtcggtatcggaaaaccggcgcgtgaagtttatatggttctagatactggaagtgacgtgaactggctacaatgtactccttgcgctgactgttaccaccaaaccgaaccaatcttcgagccatcggcgtcttcttcttacgagcctctctcttgtgacactccacagtgcaatg

SEQ ID NO: 152199 - DNA, 381 bp, Arabidopsis thaliana columbia
gaagaatcattctggtttggaggatatgtaagaaaaactacttgatctccaagttatgtccggtcttctgttactggagtgcgcaaattcccaagcttgacaatatttacgcaaagctcaaaacccaaaatatttgagaatcaaaacaaaatcaagggtcttgtctttttttttttttttggtgtgaatcaaaggtcttgtctttgcaagtaaattcgttcctaatgaactgtgtgagtcgtttaaagtgtttgataagcaaagcacgaagctttgcacggcttgttggtgaatccactctctctcaaccgccgtctttcgcctacgccgcgttttttttatccgccgtcatgaatggtcttgaaactcacaacacaaggc

SEQ ID NO: 152200 - DNA, 442 bp, Arabidopsis thaliana columbia
aagacagcaagacttttgtttcaactattcgatcaaaacgataccctgtgaccgccggccaggggcatccagagaaagatgcattctaatggggatcatctgaaatcccacactctgaggacgcaattcaggtgactcaacatgctgcaaattatctagtcagtgaagccagaaagtcaatgaacagaccatcttctgagaaagtgctgagcaatctcatctacaactacaagcctacgtactccggatacaaaaggagcggtgacgacgaggtttatattttcacgtaacaaagatcccttctctgtgtgttttcgccaaaacatagcaatttatattagttactaagagcaatacagtgtttctccttatccaccattgattgtaagttgtaaccaacgtgttgaactataatttaaaaaaacacagtatagatcacatg

SEQ ID NO: 152201 - DNA, 355 bp, Arabidopsis thaliana columbia
gaaacttcgaagcgaaggcccttctttagctcccctgaggatctctacgacgatgagttttacgacgaccagttgggtgaaaagaagcgtcgcctcactaccgaacaagtgcatctgctggagaaaagcttcgagacagagaacaagctagagcctgaacgcaagactcagcttgccaagaagcttggtctacagccaaggcaagtggctgtctggtttcagaatcgccgagctcgttggaaaacaaaacagcttgagagagactacgatcttctcaagttcacttacgaccaacttgttgctaactacgactccatcgtcatggacaacgataagctcagatccgaggttactt

SEQ ID NO: 152202 - DNA, 414 bp, Arabidopsis thaliana columbia
  unsure (1)..(414): unsure at all n locations
gcagatgagctgataaagacggctaagtacattgccacaccgggaaagggggtttgggcagcagacgagagcacgggaactattgggaaacgattcgccagcatcaatgttgagaacattgagtccaaccgccaagctctccgtgagctcctcttcacgtcccctggcactttcccttgcctctccggtgttatcctcttcgaggaaaccctctaccagaaaaccacggatggcaaacccttcgttgagctcctcatggaaaacggagttatccctggaatcaaagtggacaagggtgtggttgatctagcaggaaccaatggcgagaccactactcagggtctagattcacttggtgcacgttgccaggagtattacaaggcangagctctttttgcaaaatggcgtgcagtc

SEQ ID NO: 152203 - DNA, 434 bp, Arabidopsis thaliana columbia
  unsure (1)..(434): unsure at all n locations
ctctcttccctcttcatcaagtttctctaggagagtgaagaatttggtttgagattagtctttgattaccctttttgtggtgtggttttcgttatttcgaggagtgataataataccgttatgagtcatcactttacatgtgtttgatcaattactcttaattcactttctgggtttcttcctttgaatctctcctcaaagaaaagaaaagaaaaatgaaggaggaacaaacaagatctctgtttggaatctctttgtctgataaaccaacttggcaacagtttctcatttgcacttctggtttcttttttggttatctcgttaacggtgtttgcgaggaatatgtttataatcgtcttcaatttagctttgggtggtatttcacgtttatacaaggatttgnnctacttgttctaatctaccttcaagcttta

SEQ ID NO: 152204 - DNA, 444 bp, Arabidopsis thaliana columbia
gaagatgatctgttgcagaggcttgttcagaaacatggtccgaggaactggtcttggattgggaagataatccctggacggggcggcaaatcttgtcgtctccggtggtgtaaccagctatctccggaggtagagcaccgtgctttttcgcaggaagaagacgagacgattattcgagctcacgctcggtttggtaacaagtgggctacgatctctcgtcttctcaatggacgaaccgataacgctatcaagaatcattggaactcgacgctgaagcgaaaatgcagcgtcgaagggcaaaggtgtgattttggtggtaatggagggtatgatggtaatttaggagaagagcaaccgttgaaacgtacggcgagtggtggtggtggtgtctcgactgggcttgatatgagtcccggaagttcattcggatctgacgttagcgag

SEQ ID NO: 152205 - DNA, 430 bp, Arabidopsis thaliana columbia
  unsure (1)..(430): unsure at all n locations
accgttacaacacagaggagtattcagcagatgcaacaaacaagtttaacatgtatgcagaacagatccctacttggcttgtcnactggattcctgataaaggcggttacttcataggaaatctccagcctgctcacatggatttcagattcttcacacttggaaacctctgggccgttatttcgtctttgggaaaccaagaacagaatgaaggagtcatgacattgattgaagagaaatgggatgatcttgttgcaaacatgcctctcaagatctgttttccggctctggagaaagatgaatggcgaataatcaccggatctgatccaaagaatacgccttggtcatatcacaatggcggatcctggccaactctcctctggcagttcacattggcttgtattaagatgggaaagctagaactggcgaa

SEQ ID NO: 152206 - DNA, 436 bp, Arabidopsis thaliana columbia
cagagaaccgaaagaagaaaacaaaactctcgaagtcgcaacagaaaagaaacgagagagatatggtggtaggcggcggaggagaaggagatcagaagagaagcagcggagaaatgatggcgatggcgagtttattcaacgatcagcagaatccaattcaacagtttcaggttaaattcaaagaagtagaaactaatttcaagacatggttgtcgaaacagtcgattccggtggaagccgccgtcgtatccaccatgagcggtgtacaaggagctttcattggtggtctcatgggaacactctctcctgaaatgcctcaagccggcgttgaccctcaagccatagcttcgatgaaacaagctcaggctcttgtgggtggtccttgggtccaagctcggaattttgctgcaattactggtgtgaatgctggaattgc

SEQ ID NO: 152207 - DNA, 378 bp, Arabidopsis thaliana columbia
attttgggaatctgtgcaaaacttggcattgtatcacctcttgtggttgcgggtaggggacttgagttactctcagggacttttattttctgtgttttggtgacattagcattgtatgttactgggcgaagttcctcgaataagggttcttccctaaagcctcatgtctcaggaaatcttgtacatgactggtggtttggaatacagctgaatcctcagtttatgagcattgatctcaagtttttctttgtcagagccgggatgatgggatggctgcttatcaatctctctattctggcaaaaagtgtgcaggatggttccttgagtcagtcgatgattctttaccagatcttctgtgcgttatatatattggactac

SEQ ID NO: 152208 - DNA, 419 bp, Arabidopsis thaliana columbia
  unsure (1)..(419): unsure at all n locations
cggaannnccggggcgagcccgacgcgtccgaaaaacatttttcgatattctttacccaaccattaaacataaaaatttggcccactaccaagtgtgaaaagagttttgtattatatcgtaatgcgctgaaataggattacaaaggtatcaaagaaagtggggagatatgtagaaaggagaaagtagaaagattcaagaaaaagatttgatttaaccaaccttggtttcagaatttcaacccacactgatgaaagaacttataacacaactatctaagaccaaaggttgtaaactcttttttctctgctatagctattggtgaagttgatctcaacaaagtcgagccttgggacttgccttggaaggctaagctttgggaaaaagagtggtacttcttttgcgtaagagaccgaaaata

SEQ ID NO: 152209 - DNA, 382 bp, Arabidopsis thaliana columbia
gagagagcgataatggcgatgaggggcttcacgttgttttcgatccttgtgttgtcgttgggcgcttcgtctatcagaagcgaagagaccgagaccaaggagttcgtgttgaccttggatcacactaacttcaccgataccatcaacaaacacgatttcatcgtcgtcgagttctacgccccatggtgtggacactgcaagcagcttgctcctgagtatgagaaggctgcgtcagctttgagcagtaacgtcccaccagtggttcttgctaagattgatgccagtgaggaaacaaacagagaatttgcaactcaatacgaggttcagtgttttcccaacaatcaagattttcagaaacggaggaaaggctgttcaagaatac

SEQ ID NO: 152210 - DNA, 442 bp, Arabidopsis thaliana columbia
caaaggaggaagctgctaggggaggtttagatactcttcaaaaggttgaggagctggagaagatgctggaacatgcgaaggagagcaaatgacatgcatgctggagaagtatatggagagaagtcaattttggccactgaagtaaaagagcttgaaaaccggttgctcaacttatcagaagaaagaaacaaatctcttgctatccttgatgagatgcgaggaagtctcgaaataagactagcagcagcactggagttgaaaaagactgctgagaaagaaaagaaagacaaagaagattctgcacttaaggcacttgctgagcaagaagccaacatggagaaagtggtccaagaatcgaagcttctacagcaggaggcagaggaaaattccaagcttcgagattttcttatggattgtggtcagattgttgataccttacaag

SEQ ID NO: 152211 - DNA, 326 bp, Arabidopsis thaliana columbia
cgcgaaccagcgatttaagcactcccaactctcactttctcccttctcccttctcggggggggcattcactgaaatcagcagatttggggcttggaacgagaggagatggatcgtgttggcagtctaccaaacgagcttctttctcatatactgtcattccttaccacaaaagaggctgctttgacttctcttctcttcaagaggtggcgctatctcattgcttttgttcctaatcttgcttttgatgacattgtctttcttcatcccgaagaaggcaagccggaaagggatgaaattaggcagagcttcatggattttgtagata

SEQ ID NO: 152212 - DNA, 191 bp, Arabidopsis thaliana columbia
  unsure (1)..(191): unsure at all n locations
tctcatatactgtcattccttaccacaaaggaggctgctntgacttctcttctctccaagaggtggcgctatctcattgcttttgttcctaatcttgcttttgatgacattgtctttcttcatcctgaagagggcaagcctcaaagggatggaaggtggcggagctttatttattttgttatagggtgttg

SEQ ID NO: 152213 - DNA, 312 bp, Arabidopsis thaliana columbia
  unsure (1)..(312): unsure at all n locations
ttatcttctctatctcactctttgcttctgcaactcacagncaatggcggcttaaatggcgggagtgaaacccatctgcaagtgctcttccccaaagctctcaaacccgagcaaatttctcttcggccgacgtttctccaccgtgatcagaatgtgagnctttttcttaccgacttcttcaaccaccgncaccttgaagttcaagaaaggaacgaagaaagagattcaagagtcgcttcttactcccaggttctacacgacggacttcgaggaaattgaacagcttttcaacacggagatcaacaagaacct

SEQ ID NO: 152214 - DNA, 316 bp, Arabidopsis thaliana columbia
  unsure (1)..(316): unsure at all n locations
ctgatatctacaaacgacgtgagctactctaggagacaagtaatttancgggtgaggctgctccttcagctcctaggccttctcccgggattataacttaagcttcacctcgaagcagcgggtctttccctgcagtaaccaatgcaaagaagagaagaccacctttagtccctcctgtaccttctcctgataagggcagtactagtcctgatatctctaagaatcagccacaagataataaacagtcaaaaggatcaaaacatgtatggctgtatgtggttatcgcggttgcttctttcgtcggtttactgattat

SEQ ID NO: 152215 - DNA, 418 bp, Arabidopsis thaliana columbia
  unsure (1)..(418): unsure at all n locations
aatttcatagctcctaacaaagcaatatcatttccaatttataaaagttagagccagggctgcatctttctctgtcggctctatgataatggaagaagaagggagattcgaagcggaggttgcggaagtgcagacttggtggagctcagagaggttcaagctaacaaggcgcccttacactgcccgtgacgtggtggctctacgtggccatctcaagcaaggctatgcttcgaacgagatggctaagaagctgtggagaacgctcaaaagccatcaagccaacggtacggcctctcgcaccttcggagcgttggaccctgttcaggtgaccatgatggctaaacatttggacaccatctatgtctctggttggcagtgctcgttcactcacacatncactaatgagcctgggcctgat

SEQ ID NO: 152216 - DNA, 381 bp, Arabidopsis thaliana columbia
  unsure (1)..(381): unsure at all n locations
cttccattttgccgcccatctggaaacaatgttcacaaatggggtggtcttggtggagttggaggtggaaatgagctgattgacactnaaattgcgataaaattcatgaagaatgtcgagagaagtgtcatctgtccgcttgaactcgatgaagctaaggtcaagcattttaaagatgccattgaatctagctactggttcgaattttttatggatgatctacctttgtggggctttgtgggtgagctgcatcctgacaaaaatagtgaaaacggcaagcatgttctttacacacataagaacattgttgtcaaatacaacaaagaccagatcattcatgttaatctcactcaagacaacccaaggccatttgaagcaggg

SEQ ID NO: 152217 - DNA, 435 bp, Arabidopsis thaliana columbia
ctttctcgttgaagctttgagctctctacctctttatctccggagatgtatgagtaacatgggacctcaaccggggatgccaagacctccaggaaaccctgagcctggtccatttggtaatcctttcactggagctggctcgggttttatccgtggtggtttgggagcgtatggggagagaattttaggatcgagctctgagtatgttcagagcaatataagccggtacttctctgatccgcaatactatttccaagtgaatgatcaatatgtgaggaataaactgaaggttgttctgtttcctttcctacaccggggacactggaccagaatatctgaaccagttggtggtaggctctcatacaagcctccaatatatgatatcaatgctccagacttgtacattccctttatggcatttggtacctacgttgt

SEQ ID NO: 152218 - DNA, 387 bp, Arabidopsis thaliana columbia
aaatatgtttccggccggtgtaatttgtctgcaatcgacttctctgatcaaagatgttgacataaatctcaaatcgagtcaattactttagagatttcccaaattccgtctcgaagatgtcaacggagagacgtgcttcgtcgaatccaatgaccaacgaagagaacgctatgttccttgatatattgcatgaagcaccattatttggtcacaggaaatctagaagccttgttggaagttacctctatatgcttctattggcaggttatgctattttagctgctggtgctccttggatgtttcaccgagtccaacagttgaccccttcattgctctgctgctgcgatgttgcgcttttggttgtcacaggtgtctttcaacaatact

SEQ ID NO: 152219 - DNA, 436 bp, Arabidopsis thaliana columbia
cgttaaccttcttgaagtggctaaagcatctaatccacaacctgcgattgtttggggttcctctagctctgtttacggtctcaacactgagaatccattctctgaagaacaccgaacagaccaaccagcgagtctttacgcagcaaccaagaaagctggtgaagagatcgcacatacttacaaccacatctacggtctctccttaaccggactccggttctttacggtttacggtccatggggaagaccagacatggcttacttcttcttcactaaagacatcctccacggtaaatcaatcgacatttacagaactcaggacaatcaagaagtggcgcgtgacttcacctacatcgatgacatcgttaaaggttgtgtcggtgcgttagacacggctgagaaaagcaccggaagccgcggaaagaagcgaggacaa

SEQ ID NO: 152220 - DNA, 420 bp, Arabidopsis thaliana columbia
  unsure (1)..(420): unsure at all n locations
ntccgaaaaacttctaatcaaagagcaagagattaaattatgtatgcagaaactagcttagcgttcgtattcatgcaaagttcttctgctccagaaattcaccaatttgaagacctctttaaatcctacaagctctctgatgaaatgaacaatcttgttgaggcaagtgagtatgattttggagaagagagtgacctattcaaagcccctgagccgattattgaagaaccaatgttagctgttgatcccctctctcaagagcttgttgaactcggtgatctcgggtcgttgcagagtgaccaacagcttatagacaaggctttctacgactgtgagcaggacctnnctgtgaaatcagccatggagtcttcgctctccgaggtactagacatcaagacatcttttagtgcaaaaatgaca

SEQ ID NO: 152221 - DNA, 445 bp, Arabidopsis thaliana columbia
  unsure (1)..(445): unsure at all n locations
cggggcgaccgcacgcgtccggcacacacgactgtatttttttctttattctgattgtatctacatatttncagtacgttcgttttttttggggggggttgcgaactcaacggtagagtactcggcttttaagtgcgactagcatcttttacacatttgtatgaagaaaaggattcgtccagatctgcggtagagtttgtaagaccacgactgatcctgaaaggaatgaatggaaaaaatagcatgtcgtatcaagggagaattcagataacatttttttttgctttcctgatcggtacaatcttattttgatgtcgaaaaaaaaaaaagaattccaatttgggtcaagtgaataaatataaatggatggataaaaaaaccaatttttcttattccaggaaaaaaaaagaaacgagctttcatttctaatttgaaaattacccca

SEQ ID NO: 152222 - DNA, 361 bp, Arabidopsis thaliana columbia
  unsure (1)..(361): unsure at all n locations
cggtccgaancccggggaccacgcgtcgaactctaacccattcaattgattatgcgttagggtttcttcatatttctctctgggggagagaagatggtttgcgatgagtgtgagaagaagttatcgaaagtgatagttcctgataagtggaaggatggtgctcgtaatgtaactgaaggtggtggtcgtaaaatcaatgagaataagcttctctccaagaagaatagatggtcaccttacagtacctgtaccacacaatgtatgatctgcaagcagcaagtgcatcaagatggtaaatactgtcacacatgtgcctatagcaaaggagtgtgcgcaatgtgcgggaagcaagtgttggaca

SEQ ID NO: 152223 - DNA, 438 bp, Arabidopsis thaliana columbia
gggtggccttacttgcttttcagcaaattctgggagattgagatttcttctgcttgtctctctttagtctttgggagctgcgcatttctcagaaattatatgggactctcgaaagcatgatgctttttgttgtctcacttgtaatttgttcgggactttgttgctgaagaaaactaagcaatgtctgtagaaacatggttcatgattcagaagactactactagctcatgagttcactggtacttggaattaagatgattgatcagttcatcaactttgtaattcgacctcctagggctgagtatgatcctgatcagtatttgtgggagaaggagtttagcctcggtggcacaaagtgtaaaagacaagacttggaggcaacttacaaattcgaggggtcacactttgcgttgcagtcattatgttccctcatcttct

SEQ ID NO: 152224 - DNA, 255 bp, Arabidopsis thaliana columbia
gaaatcgaaaaaattttcaaaacaaaatctaaggaaaaaagagcaacaagttgtaaagtctcatttgggttttttcattgtgaaaaaaaaggacccatttttatctctctctttgtttggttttctcgaatctgaaggagtaaagttaaaagctttgaaggagagaatcaatggcgggttacagagcaaatgatgaatacgattacctattcaaggttgttctgataggtgattcaggtgtggccaaatccaatt

SEQ ID NO: 152225 - DNA, 422 bp, Arabidopsis thaliana columbia
  unsure (1)..(422): unsure at all n locations
cttaagctttatttctccgttttcgttttgtctttctttatcgtctcggttgcgtgttctgatgtcaacgacggcgatgatctcntgatccgtcaggtggttggtggagccgagcctcaggttttgacctcagaggatcacttttctctcttcaagcggaagttcgggaaggtctacgcttccaacgaggagcatgactatagattctcggttttcaaagcgaatctcaggcgagcgaggcgtcaccagaagttggatccgtcggcgactcatggtgttacgcagttctcagatctgactcggtctgagttccgtaagaagcacttgggggttagaagtggctttaagcttcctaaagatgccaacaaggctccgattctccctaccgaaaatcttcctgaggattttgattggagagatca

SEQ ID NO: 152226 - DNA, 396 bp, Arabidopsis thaliana columbia
cccacgcgtccgaaaaaagaaaacacaaaaacaaagattataatggcttcctcaacgatggcgttgtcctcccctgcgcttcgccggaaaggctgtgaagcctgccgcatcagatgtcctcggaagcggccgtgtgaccatgaggaagactgtcgccaagccaaagggtccatcaggcagcccatggtacggatctgaccgagtcaagtacttgggtccattctccggcgagcccccgagctaccttaccggtgagttccccggtgactaccgatgggacaccgctggtctatccgccgacccagagaccttcgccaggaaccgtgagctagaagttatccacagcagatgggccatgctcggagccctaggctgcgttttccctgagctattggc

SEQ ID NO: 152227 - DNA, 432 bp, Arabidopsis thaliana columbia
  unsure (1)..(432): unsure at all n locations
gtttcagccacaccgtgaggaaactcttctccaccgttggatctccttcttgggctgagagactcagagatctccccaaagacttcccctctaccaacgccaaacgtgacgcctctctgcttattgggaaaacgcctcttgtgttcctcaacaaagtcactgaaggttgtgaagcgtatgttgcagccaaacaagaacatttccagccaacttgtagcattaaagacagaccagctatagccatgattgcagatgcagagaagaaaaaactaatcatccctggaaaaacaacactgatagagcctacttcaggaaacatgggaatcagtttggctttcatggctgctatgaaagggtacaggattataatgacgatgccttcgtacactagctnggagaggagagtgacgatgagatcctttggtgctgagc

SEQ ID NO: 152228 - DNA, 427 bp, Arabidopsis thaliana columbia
caagaaagttcccattgtcgtctccgagaccggatggccttccaacggtgacccgcgggaagtcggagccacctgcgacaatgctcgcaagtacaatgggaatctgatcaagatgatgatgagcaagaagatgaggacgcctatacgacctgagtgcgatctcaccatcttcgtctttgctctctttaacgagaacatgaagcctggaccaacctccgagaggaactacggtctcttcaaccctgacggaactccggtttactcacttgggatcaagacctcttccactcatagtagtggtagtggtagcagcaactccactggtggtagtagcagtggcggtggcggtaacactggtggctcttccagcggtggtggcatctatcagccagtcacgggtaacccatcaccggattacatgttcatt

SEQ ID NO: 152229 - DNA, 432 bp, Arabidopsis thaliana columbia
gaacgaatttgagaaaaaactgttgtcgtatgtcattccacctagcgatataggtggttcctttgatgatattggagctctggaaaatgtgaaagaaacgttgaaggagttggtgatgcttcctcttcagagaccggaattgtttgacaaaggccagctcacaaagcctacgaaaggtatactgttgtttggacctcctggtactggaaagacgatgctggcaaaagcagtagcaactgaggctggcgcaaatttcatcaatatctcaatgtccagcattacttcgaagtggtttggtgagggagagaagtacgttaaagctgtcttctccttagcgagcaagattgcgccaagtgtcatttttgttgatgaggttgatagcatgttgggtagacgtgaaaatccaggggaacatgaagctatgcgtaagat

SEQ ID NO: 152230 - DNA, 340 bp, Arabidopsis thaliana columbia
gaaaaatgtatcctgagaagcaaaacctttgatgttgctagcgattatgggtccttgtggtggtgggaaaacaacattgctgaatgttttaacaagacagcttaatttatctccacgtttgcatttgtcaggtctcttggaggttaatggcaaaccgagctctagcaaagcttataagcttgcgtttgtgagacaagaggatctcttcttttctcaattaactgtcaaggaaacacttttttttgcagccgagctttaacttccggagatctcttcttcttaagagagggatgagtatgtcaacaacctcttgcttcaaacttggtctggtcagctgtgc

SEQ ID NO: 152231 - DNA, 436 bp, Arabidopsis thaliana columbia
caaatcttaaacgttttactttgtgctgcactactcaacctcaatggccgcgtcagcaatggctctctcctgccctgccttcgccggtaaggccgtcaagctttcccccgcggcatctgaagtccttggaagcggccgtgtgacaatgaggaagactgttgccaagccaaagggcccatcaggcagcccatggtacggatctgaccgtgtcaagtacttgggtccattctctggcgaatcaccgagctaccttaccggagagttccccggagactacggatgggacaccgccggactttcagctgaccccgagacattcgcaaggaaccgtgaactagaagttatccacagcaagtgggccatgctcggagccctaggctgcgtcttccctgagcttttggctagaaacggagtcaagttcggagaggcggtttgg

SEQ ID NO: 152232 - DNA, 425 bp, Arabidopsis thaliana columbia
gtcgaaacctgttcatgaaacctacgcttccttgggccttcttcttctggggcttggagcaccggcaagccaatcaagagagcttatgatggattgttgcttgatgctggaggaactcttttgcaattgtcgaaacctgttcatgaaacctacgcttccttgggccaaaaatatggtctcaagacaactccagctgagatcaaggaaggtttcaagagagttttttctgccccttggcctgagaagttacgttaccagggagatggaagaccattctggaagcttgttgtttcggaagctactggttgttctgataatgactacttcgaagacgtctaccaatattatgcgaatggcgaggcatggcatctcccagaaagagcttatgagacaatgtcactactgaaagatgctggagttaagat

SEQ ID NO: 152233 - DNA, 433 bp, Arabidopsis thaliana columbia
gctttagcttgcatctgtagtcatttgtcaaagataattgaacagaggctggctagattcgtcgtcaagggtttaggagattctgggttttggcgtgattttgaggggaaagattgaaactttccccgtgaatggtaagacagtgagagatgtctgggtacgtgggtgttgtcgtttctgatccatggctacagagccagttcactcaagtcgaacttcggactctcaattccaagtatgtgtcggtgaagaatcagaatggaaaggtcactattgaagatctccctcctctatttgcaaagctgaaggcacttagtgcaacatttaaggaagacgaaatcaagggtatgctaggggaattgggttctgatacaagcactgatgtgagttttgaagagtttctcaagatatatcttaacttactaagttaagc

SEQ ID NO: 152234 - DNA, 184 bp, Arabidopsis thaliana columbia
  unsure (1)..(184): unsure at all n locations
nnnnnnnnnngagagcaaagtggcgcgtttaaatcacagtgaaagtacatatacagctgcttaaatattgcaccgtccaaaaaaaaaaaaaaggtacgcattcgncactatttttcttttttcttgttttcttctataaatatgaaggagaccagagatgagtttagataatggggtcattttt

SEQ ID NO: 152235 - DNA, 407 bp, Arabidopsis thaliana columbia
gtgcttcactgagtccgactcagttaactcgttcctctctctgtgtgtggttttggtggacgtctacgacgataatggaggagctagatcgttcacgtgcttttgccagagacgtcaaacgtatcgtcgttaaggttgggacagcagttgttactggaaaaggtggaagattggctcttggtcgtttaggagcactgtgtgaacagcttgcggaattaaactcggatggatttgaggtgatattggtgtcatctggtgcggttggtcttggcaggcaaaggcttcgttatcgacaattagtcaatagcaactttgcggatcttcagaagcctcagactgaacttgatgggaaggcttgtgctggttgtggacaaagcaagcttatggcttactatgagactatgttt

SEQ ID NO: 152236 - DNA, 300 bp, Arabidopsis thaliana columbia
ctcagttttttttctaagccctaataccatctcaaagaagagatcaagattggagagtaagaagacaccattactgagatcaacatgcttgccgttcaccgtccttcttccgccgtatcagacggagattccgttcagattccgatgatgatcgcgtcgtttcaaaaacgttttccttctctctcacgcgactccacgggcgctcgttttcacacacacgaggttggtcctaatcagtgttgctccgccgttattcaagagatctccgctccaatctccaccgtttggtccgtcgtacgc

SEQ ID NO: 152237 - DNA, 395 bp, Arabidopsis thaliana columbia
ctcttgcgtcacttaaaaagtcggtgctttctacttaagtgttcttgagagtgagacgtgtgatttcttggttcaagggggtggaataaacacttgagtgaagtttaaagcttgagaaagacagaagaaagaaaaatgggtcaaagactgaatctagtcttctggatttttgtctccattcttgcctttttgaattttggtatggctagcaagattgggatatgttatggaagaaatgctgataatctttcaagtcctaacagagtctttgagctaatccaacatctcaacatcaaatgtgttcgaatctatgacgccaacattgatgttcttaaaagcttttgcaacactggaatcgagcttatgattggtgtccctaacgctgatctacttgc

SEQ ID NO: 152238 - DNA, 304 bp, Arabidopsis thaliana columbia
ctcttcgtacttcttccaccgtcgcttgtcttctacccgcctcttcttcttcctcagtgttgctcctcctcgtcttcccgtggcgttccaacgcttatccgtaacgagccagtttttgccgctcctgctcctatcattgccccttattggagtgaagagatgggaaccgaagcatacgacgaggctattgaagctctcaagaagcttctcatcgagaaggaagagctaaagacggttgcagcggcaaatgtggagcagatcacagcggctcttcagacaggtactttatccgacaagaaagctt

SEQ ID NO: 152239 - DNA, 393 bp, Arabidopsis thaliana columbia
  unsure (1)..(393): unsure at all n locations
gaagaagagaaacaacaagaagaagtaatggctttctctatgttctcctccaccgctgtggggacctttccggctcaagccggcatggtcncttcattcaccggcttgaagtcatccgcttctttcccggtcacccgcaaggccaacaacgacattacttccatcacaagcaacggaggaagagttagctgcatgaaggtgtggccaccaaatcgaaagaagaaagttgagactctatcttacctccctgaccttagtgacgttgaattggctaaggaaagtgactaccttctccgcaacaagtgggattcctgtgttgaattcgagttggagcacggaatttgtgtaccgtgagcacggaaacactccccgatactatgatggacgatactg

SEQ ID NO: 152240 - DNA, 317 bp, Arabidopsis thaliana columbia
aaaaaccctaatctcactccgcctcctgcgagatccatcaacacttccgcaaaaatgaaggttgttgctgcgtttttgcttgccgtcttgagcgggaaagcttccccaaccactggcgatatcaaggatattcttggatcagttggtgctgagacagaggattctcagattgagcttttgttgaaggaagtgaaagggaaagacttggctgagctaattgctgctggaagggagaagttagcttcagtaccatcaggaggtggtggtggtgttgcggttgcttctgctacatctggaggtggaggaggtggtggtgc

SEQ ID NO: 152241 - DNA, 224 bp, Arabidopsis thaliana columbia
  unsure (1)..(224): unsure at all n locations
cggacgcgtgggcgggtcggatcttttgaagttcttcaatggcgcanatactgtcggctgtttgtacggatctttggaagttccagaactcagctcttagctccagatcaggtgcgtcgccgcggttctcggcgaagaccaccggtgcttcttcatcttggtacttacctcggtacgcaggaaagaggcgaaccgattcaatcggaagattgagagttgcactg

SEQ ID NO: 152242 - DNA, 388 bp, Arabidopsis thaliana columbia
  unsure (1)..(388): unsure at all n locations
aggaagcggtggcggctgaggccaccgtttatgtggtggcggtggataccgcagcggcnggtttggaagttactccggtggaggtggtanctaccgaggtggcggcggtagacgcgagggtggaggaggatacagcggcggcggcggcggttactcctcaagaggtggtggtggcggaagctaccgtggtggaagacgtgagggaggaggaggatactgtggtggtgaaagaggaggtttctgatgaagcggttgtgagtttatgatttgttaatcctttaattattgatattaatctcccggtgtattgataatatctcttcttttgattcatctatctaatatgcttgtctttttgattcttttatttttttttccttactttctc

SEQ ID NO: 152243 - DNA, 414 bp, Arabidopsis thaliana columbia
agcatcactaaactcgaaccctaaagaaaaacaaaaatggctgccatagcttgtacgtgctctctctttcttcaaccaaacctcagagacttttcgattcttccttccatggctcagccatctccgcagctcctatctccatcggtctcaaaccacgatctttctccgttcgcgccacaaccgctggttacgacttgaacgctttcacgttcgacccgatcaaggaatcgatcgtgtcacgtgagatgacgagaaggtacatgacggatatgatcacttatgctgagactgatgtcgtcgtcgttggtgctggatctgctggtttatctgctgcttatgagatcagtaagaaccctaatgttcaagttgccattattgagcaatctgttagtcctggtggtggtgcttggctcg

SEQ ID NO: 152244 - DNA, 436 bp, Arabidopsis thaliana columbia
gaagttgcttggcaaagctggtgagatgtgcactttggaatcgccagacgatgaaggcatcaaaaccctttacgtcggtggacttaactcgagaattctcgagcaggacatacgagaccaattctacgctcatggagaaattgaatctatcagaatcttggccgataaagcctgtgcatttgtcacatacacaagccgtgaaggtgcagagaaggctgcgcaagagctctccaacaggctagtcatcaacggtcagaggctaaaactcacatggggaagacccaaacctgatcaagatggtgcaaaccaacagggcggtgtggctcatagtgggttactacctcgagccgttatatctcagcagcacaatcaacccccaccaatgcagcagtactatatgcacccaccaccagctaaccaagacaaaccttattac

SEQ ID NO: 152245 - DNA, 427 bp, Arabidopsis thaliana columbia
cttctgtggagtccattgcacaagccaacaatgttgtccgaccagactggaacggggtcaactttctccttcagtatgctgcccaagcggctgctcttgatcttggtctcattcaacagtccgccaaagccctcgagtctgcaaaattcgtctacttgatgggagcagacgatgtaaatgttgacaagattcctaaagacgcctttgtggtttaccaaggacaccatggagacaaagcggtttaccgtgcaaacgtaattctccctgcatcggccttcactgagaaagaaggaacctatgaaaatactgaaggatttacccaacagactgttccagctgttccaacagttggtgatgcaagagatgactggaagattgtgagagccttatccgaggtctcgggtgtgaagcttccatacaactcaat

SEQ ID NO: 152246 - DNA, 337 bp, Arabidopsis thaliana columbia
ctctgttgaaatcgaaaaaattttcaattcattttctaaggaaaaaagagcaacaagtgtcgaatctcatttgggtttttcattttaaaaagaaggacccatttttatctctctctttgttttgttttctcgaatctgaaggagtaaagttaaaagctttgaatgagagaatcaatggcgggttacagagcagatgatgaatacgattacctattcaaggttgttctgataggtgattcaagtgtgggcaaatccaatttgctttcacgattcacgaagaacgagtttagtctcgagtcaaaatccacgatcggggtcgagttctcgacttcgagtt

SEQ ID NO: 152247 - DNA, 385 bp, Arabidopsis thaliana columbia
aaaacgttatgaggcttcaaaactgaatctatgtataaataatacacacgcatatatgtagcggtgttttttcttttggtttgcatataacaaaccaaacactactcttttctaaccaagagaaaggttttatatatgcagaatgaagtttgagagagcaaggccattcatagccattgttttcatacaatgtttgtacgctttgatgtctatagtagcaaaattagctttgaacaagggaatgagccctcacgtcttagttgcttaccgaatggcagttgcttccgctctcattacgcctttcgctctcatcctcgagaggaacacaagaccaaagttgaccttcaagattttgttacaaatagccatccttagtttatttgag

SEQ ID NO: 152248 - DNA, 427 bp, Arabidopsis thaliana columbia
gaaataacaaaatggctcgagtctcttctcttctttctttctgcttaacacttttgagcctgttccatggctacgcggctcaacagggtcagcagggtcagcagtttccgaacgagtgccagctcgaccagctcaatgcgctcgagccgtcacacgtactgaagagcgaggctggtcgcatcgaggtgtgggaccaccacgctcctcagctccgttgctcaggtgtctcctttgcacgttacatcatcgagtctaagggtctctacttgccctctttctttaacaccgcgaagctctctttcgtggctaagggacgaggtcttatgggaaaagtgatccctggatgcgccgaaacattccaagactcatcagagttccaaccacgcttcgaaggtcaaggtcaaagccagaggttccgtgacatgca

SEQ ID NO: 152249 - DNA, 422 bp, Arabidopsis thaliana columbia
gttcttctctcttcttcttcttcttcttcttcttcttcttcgccgcttcttgtctgtcgaattcaccccatctcaagtgtacgttagcctcctccctctaatggcgactcgtcttcagtttgagaacaactgcgaagttggtgtcttttccaaactcactaatgcctattgcttagtcgctataggaggctctgagaacttttacagtgcttttgagtcggagttagcagatgttatccctattgttaagacctctattggaggaacacgaattattgggcgtctttgtgctggaaacaagaatgggcttcttgtacctcatacaacaactgaccaagagcttcaacacttaaggaacagtctacctgatcaagttgtggtccagcgaattgatgaacgtctgtctgctcttggaaattgca

SEQ ID NO: 152250 - DNA, 430 bp, Arabidopsis thaliana columbia
cttcgctcgctgttcagattttgctttgaggctttaggctccccagatctgtgatggccgcagctttaagaaatggagactttcctattcacatctgagtctgtgaacgaaggacaccctgacaagctttgcgaccagatctctgatgcagtccttgatgcctgccttgagcaagaccctgatagcaaagttgcttgtgagacatgcaccaagaccaacatggtcatggttttcggtgagatcaccaccaaggctacgattgactacgagaagattgtccgtgacacttgccgttccattggattcatctctgacgatgttggtcttgatgctgacaaatgcaaagtccttgttaacattgaacaacagagcccagacattgctcaaggttgtcacggtcacttcaccaaacgttcagaagacattggag

SEQ ID NO: 152251 - DNA, 377 bp, Arabidopsis thaliana columbia
ctttcttctctatcttctgaatatcacataacccaattagccggagatgggcgcaacatccgccgctgctgcagctggttcttccatcatgggtactcgggtggctcccggtatccatcccggttcaagtcggttcacagccgtgttcggtttcggaaagaagaaagcagctcccaaaaagagtgccaaaaagacggtgactacggaccggcctctttggtacccaagcgccatttcttctgactggcttgatggttccttggttggagattacgggtttgatcccttcggtttaagcaaaccggccgagtatcttcaattcgatatcgattcactagaccagaatctggctaagaacttggccggagacgtgatcg

SEQ ID NO: 152252 - DNA, 375 bp, Arabidopsis thaliana columbia
catctctcgagccggagccgcgttgcgaaagcatttcaatcgtagtctaagagaatgtcgacagtgggagagctcgcttgcagctacgctgttatgatcctcgaggatgagggtattgctatcacggctgacaaaatcgccactttggtgaaagctgctggtgttaccattgagtcatactggccaatgctattcgccaagatggctgagaaacgtaatgtcactgatctcatcatgaacgttggtgctggtggtggaggtggtgcgcctgttgcagctgctgctcctgctgctggcggtggtgctgccgctgctgctcctgctgccgaggagaaagagaaggacgaaaccaacaaaagagagtgatggagattt

SEQ ID NO: 152253 - DNA, 433 bp, Arabidopsis thaliana columbia
aaaaaagaaaacacaaaaacaaagattataatggcttcctcaaccatggctttgtcggcccctgccttcgccggaaaggctgtgaagcctgccgcatcagatgtcctcggaagcggccgtgtgaccatgaggaagactgtcgccaagccaaagggtccatcaggcagcccatggtacggatctgaccgagtcaagtacttgggtccattctccggcgagcccccgagctaccttaccggtgagttccccggtgactacggatgggacaccgctggtctatccgccgacccagagaccttcgccaggaaccgtgagctagaagttatccacagcagatgggccatgctcggagccctaggctgcgttttccctgagctattggctaggaacggagtgaagttcggagaagcggtttggttcaaggccggttcac

SEQ ID NO: 152254 - DNA, 301 bp, Arabidopsis thaliana columbia
  unsure (1)..(301): unsure at all n locations
ccatttnggacacagaagngaatggccccattgattagcaagggagactggcggacagcttctcaaaagagcatctagttcgcacattccacttactgggcacccagctccattatctatggaatacctttctgacattgcaccgggataattacacaaaaatcttggaatatcttcgcgatatctggactaaagatcgaagagcggaatggtcaatatggatggtgtactccaaggttgaaatgccacatcattttataagtggaatggaggacatttcaaaccataagtcacacaaaag

SEQ ID NO: 152255 - DNA, 382 bp, Arabidopsis thaliana columbia
ctccgatctttccgcttctatcagattttcagatttgatgaactcagattaagaagagtgcgtattttagaataattaaagggaatggattctgcaagaagttggtttcacaagtttcaaccacgagataagcctcggaaaaaggatatgttctccggaagcacttacggcggtggcgtgacagaaaccaccgtccccgacggaggaaatgatacagaaacggcaacgaaacttccaccactaggcggtgacggagaagcactctcaaattcaacaaaacagaaagttgctgcagccaaacagtacattgagaatcattataaggaacagatgaagaacctcaacgagaggaaagagagacgaacaacgtttgagaagaagc

SEQ ID NO: 152256 - DNA, 390 bp, Arabidopsis thaliana columbia
agaaggagctgagtcttacctctcctgaagtcgttaccaagtacaagagcgccgctgagatcgttaacaaggcgttgcgaggttgttttagctgaatgcaaaccaaaagctaagattgttgatatctgtgagaaaggagactcttttattaaagagcaaacagcaagcatgtacaagaattctaagaagaagattgagagaggtgttgcgttccctacatgcatttctgtgaacaacactgttggtcatttttcaccgcttgctagtgatgagtctgtgttggaagatggtgacatggttaaaatcgatatgggatgtcatattgatgggttcattgcccttgttggtcacacacatgttcttcaagaagggcctcttagtgggcgtaag

SEQ ID NO: 152257 - DNA, 400 bp, Arabidopsis thaliana columbia
aaaacacacagataaaaatctctccttttttcatcgaagcatataacacaacaccgacaaggagattcctttaactatggcgaagaaagcaagaattgttataatcggagctggaatggctggtctcacggcggcgaacaagctctacacaagctccaacaacaccttcgagctctcagtcgtcgaaagcggttctagaatcggcggtaggatcaatacctctgagttctcatcagagaagattgagatgggtgccacgtggatccacggaatcggtggaagccctgtttatagaatcgctaaagagactggttctttagtctctgatgagccatgggagtgtatggattccaccattgataaagctaagacctttgctgaaggtgggttcgagattgag

SEQ ID NO: 152258 - DNA, 234 bp, Arabidopsis thaliana columbia
ctcgttattaattcgtttctcttaaaaacttaattctttttttttccaaacaggttctctggaacttaaaaacttttacagagaatccgggtgcttttctctgattcttctactctttcctaatttaccgattttctcgggaattcaaaaatccgtttctctttttctcgagtttaaaaactttcgatcttgagtcaattcagattcttcttggaagctctaagaagaagaaga

SEQ ID NO: 152259 - DNA, 371 bp, Arabidopsis thaliana columbia
  unsure (1)..(371): unsure at all n locations
cggacgcgtgggttcgatctcgagaaacacttcgccttctacggtgcttaccatagcaatccgatcaacattctaatgcacatcatcttcgtttggccaatcttcttctcagttttacttctcctccactcgtcgaccccaattttcgacccctctcaattagggttttctcaatcgttgaccctcgacggcgttttgcgatttaacgttgggtttatattcgccttgatttatgctctgttctatatcggnttggataagaaatctggatttggagctgctcttatgtgtttctcttgctgggttggttccaagtttcttgctggtcgactaggatcttttcttgcttaaaggttgggttagcatctcag

SEQ ID NO: 152260 - DNA, 322 bp, Arabidopsis thaliana columbia
ggaagctaaggagaggcgaattcgaatcgagaagatggtgtctgggtcagggatatgttcaaagcgtgtcgttgttgacgcacgtcaccatatgtgtggtcgtcttgcttcgatcatagctaaagagttgctcaatggacagagtgttgttgttgtccgatgtgaggagatttgtttgtctggtggtttggttcgtcagaagatgaagtacatgaggtttcttaggaaacgcatgaacactaaaccttctcatggtcctattcatttccgtgctccgtctaagatcttcttgcgtaccgttcgtgggatgatttcacacaag

SEQ ID NO: 152261 - DNA, 277 bp, Arabidopsis thaliana columbia
cttttgatttcacattttacttaaataccattttcactgaacttgagatggtttaggctttgagagggcagacaagttgcatcatagtgtaatttcagtgagcgtgaaacttggagctgccacgagagaataggctcggggcttgttacccgtcaacgatggagaatggcgtgggggttgtacatttatcggtgctaggcctttggttctttcgaaagtgaaactgagagcacagagtacttggggagaacgagtttcaattgatgacgaccaccat

SEQ ID NO: 152262 - DNA, 387 bp, Arabidopsis thaliana columbia
ctgacagcaaatagttttggcgtctttctaactcaacccatcatctctgttgcaggttatcgagagaatatttgaggtggatattgcctcgacccttttctccagaactttcttggctgctagtcaccgactgattactccttctcttccgcaaaagatctttaatccagccacctttctcagtaggtcactccactctcagttaggctccgcttctacagcctataaatcaactacttgggctcgtcgagctatggcttctactggagttgagacaaaagccggttactccacatcatccgtatcaaccagtgaacctgttgtttctgttgattggcttcatgctaatcttagagagcctgatttgaagattttggatgcttcatg

SEQ ID NO: 152263 - DNA, 456 bp, Arabidopsis thaliana columbia
cgccaggcgtccggtccacatgtttctcctttggtggcaaacacaacgacagatagagagaaacgatggcgtcggactcgcttatgagctgtggcatagccgccgtgtacccttcgcttctctcttcttccaagtctaaattcgtatccgccggagttccactcccaaacgccgggaatgttggtcgtatcagaatggctgctcactggatgcctggcgagccacgaccagcttaccttgacggttctgctcctggtgactttgggtttgacccacttggacttggagaagttccagcgaaccttgagagatacaaagagtcagagctcatccactgtagatgggctatgctcgctgttcctgggattttggtaccagaagcattaggatatggaaactgggttaaggcttatgaatgggcagcactaccagggggtcaagccacttacttgggaa

SEQ ID NO: 152264 - DNA, 268 bp, Arabidopsis thaliana columbia
ctcttttctctctcttctctctctcttgtggaagaaaggcaacaactattgaagctatgcttgtggactgtgtaaacaacagtcttcgtcattttgtctacaaaaatgctattttcatgtgcgagcgtctctgcgctgagtttccttctgaggttaatttgcagctattagccaccagctacctgcagaataatcaagcttacagtgcatatcatctgctaaagggaacacaaatggctcagtcccgatacttgttcgcattatcatg

SEQ ID NO: 152265 - DNA, 429 bp, Arabidopsis thaliana columbia
agagtccaagacatttcatcttcttctctactaacagaagcaatcccgttggagttcatcagatcagagaaagaacaaccagcgatcacaacattccgaggtccaacgccggcgattcccgtcgtcgatctaagcgatcccgacgaagaaagcgtgaggcgcgcggtggtgaaagcgagtgaagaatgggggctattccaagtggttaaccacgggattccgacggagctgatacgacgtttacaagacgtcggaagaaaattcttcgagcttccttcgtcggagaaagaatccgtcgctaaaccggaagattcgaaagacattgaaggatacggaacaaagcttcagaaagatccagaaagtaaaaaagcttgggtcgatcatctcttccatcgaatctggccaccgtcatgcgtcaattacagattc

SEQ ID NO: 152266 - DNA, 455 bp, Arabidopsis thaliana columbia
  unsure (1)..(455): unsure at all n locations
caacgcgnntccgcaaaanntcttaaaaaccctttctcttcatattcttctctaccnnngtgatcaagatgcnagagtcgtttgtgtaagaccctctcacgcggaaaggaccaatcnnaccctcgaaggtnnggaaagggctccgacccaccatcganncaacgttaaaggccaaagatcccaggataaaggaggnnngcattctctccggatcacgcaagagggcttaattttctgccggcaaggcagcttagaggatgtgccgtaccgtttggctgattaccaatatccagaaaggaatcnncaccctccacttgtgtcctcagagcttccgtggtggtatgccagattttncgttaaaaaccccctaacgggaaagacgattacctcttgagggtggagagttctgacanccatcgacaacgtcaaggccaagatccaagacaaagagggta

SEQ ID NO: 152267 - DNA, 402 bp, Arabidopsis thaliana columbia
aaaataaaacacacaatctcaagattttctacttcttattacaaagattcaatcttcttgtttcttcttgcaaccatgagtcttcttgcagatcttgttaaccttgacatctcagacaacagtgaaaagatcatcgctgaatacatatgggttggtggttctggtatggacatgagaagcaaagccaggactctccctggacctgtgaccgatccatcaaaactttcaaagtggaactatgatggttcaagcactggtcaagctcctggtcaagacagtgaagtgatcttataccctcaagcaattttcaaagatccattccgtagaggcaacaacatccttgttatgtgtgatgcttacacttcagcgggagagccaattcctactaacaagcgacatgct

SEQ ID NO: 152268 - DNA, 421 bp, Arabidopsis thaliana columbia
  unsure (1)..(421): unsure at all n locations
gctgccgctgttgtttctcctccatttctctatctttctctctcgctgcttgtcgaatcttctgtatcatcttcttcttcttcaagtgaaaaatggccgatggtgaggatattcagccacttgtctgtgacaatggaactggaatggtgaaggctggttttgctggtgatgatgccccgagagcagtgttcccaagtattgttggtcgtcctaggcacactggtgtcatggttggtatgggtcagaaagatgcttacgttggtgatgaagctcagtccaagagaggtatcctcactctgaagtatccaatcgaacatggtattgtaagtaactgggatgacatggaaaagatatggcatcacactttctacaacgagcttcgtgtngcccctgaggagcacccagttctactcacagaggc

SEQ ID NO: 152269 - DNA, 206 bp, Arabidopsis thaliana columbia
gttctctcacagacaaagattcttttttcttcgttttgtaatataacttctcgttggtaacatgtctcaagtttccactgggcactgtagagcatttacctgtaaaatatcttccactaagtttacacggagattttatttgctgtgaaaaaaaaaaaaaaaaaaaaaaaaaaaaaaaaaaaaaaaaaaaaaaaaaaaaaaaggaa

SEQ ID NO: 152270 - DNA, 404 bp, Arabidopsis thaliana columbia
gtctccggctagttcgactcggtaaaatcacgattactttctccttccatttatcacgatcgtggatccagaaactgtgaaagatggcgtctgagctgacaaaccggcgacacgagatagagcaaccagaagcggaatcttattatccaaagccgataaagccatggttcgtagcgattcgtccgatccgttacatgctcagagaacagagactcgtcttcgtcctcgtcggcattgccatcgccacattaggattcacaatcttctccaaatcatccaaccaccaaccaattccttacgacgtggatccgctttccggatacggaatgcgatcggagtcatcgtatctgccagcgacgattcataagaagccaagcatcgagtacatgagccggatcggatcg

SEQ ID NO: 152271 - DNA, 410 bp, Arabidopsis thaliana columbia
  unsure (1)..(410): unsure at all n locations
caattgtccgcccttgtccatggacgctcaaaatataatacaagtatgcgtctttttccttctcttcgcacttaataaaagattcttcaatctttggtgccaaaatagatgtagttgtcagatcaatgatggcaacattatctctcattccagctcgttcagataaaacctcaatagaattcacttcaccagatgatgattgctttgactttgaggagccacgctttagctttttacggaaatccgaagacagcgctatggtggctgagaaaacaaaagtttgtcttttcttcttcgggacgtttaaaactgtgtcattacttcttacaagttgcgttttcccttcatttggtttatctgtcactgngagcaagtcgagtttagactgcagctccctgaaatgacctttt

SEQ ID NO: 152272 - DNA, 321 bp, Arabidopsis thaliana columbia
caattgtccgcccttgtccatggacgctcaaattataatacaagtatgcgttttttgcctggtgttcgcacttaataaaagggtcttcaatctttggtgccaaaatagatgtagttgtcagatcaatgatggcaacattatctctcattccagctcgttcagataaaacctcaatagaattcacttcaccagatgatgattgctttgactttgaggagccacgctttagctttttacggaaatccgaagacagcgctatggtggctgagaaaacaaaagtttgtcttttctttttcgggacgtttaaaactgtgtcattac

SEQ ID NO: 152273 - DNA, 420 bp, Arabidopsis thaliana columbia
aaaacataagctaagaaaacgaaactcaactaattttgttatcacccaaaaagaagtgcaaacacaatggctttcgctttgaggttcttcacatgccttgttttaacggtgtgcatagttgcatcagtcgatgctgcaatctcatgtggcacagtggcaggtagcttggctccatgtgcaacctatctatcaaaaggtgggttggtgccaccttcatgttgtgcaggagtcaaaactttgaacagtatggctaaaaccacaccagaccgccaacaagcttgcagatgcattcagtccactgcgaagagcatttctggtctcaacccaagtctagcctctggccttcctggaaagtgcggtgttagcattccatattcaatcttcatgagcactaactgcaacaacatcaagtgaaatgga

SEQ ID NO: 152274 - DNA, 439 bp, Arabidopsis thaliana columbia
  unsure (1)..(439): unsure at all n locations
attattggtgccggaggaatgagaaaccttttgtcgcttgcataaatggtttaacgaagcttgtgggtaggctctcgcaagaggaattaatggatcaattgtcgtcttttttgcctgcggtttttgaagcatttgggagccaaagcgcggatgtccgcaagacagtggtgttctgtctagtagacatatatataatgcttgggaaagcatttttgccgtatttggaaggtctaaacagcacgcaggttcgtctagtgaccatctatgcaaaccggatctcgcaggctagaaacggtgcccctatcgacgcagacacctgacgagccgcttgtacttatggttcagtgggtttatcttgtgtcttggggtcatattcattattngttattttgtatatgggtgtgttttccgcgtttcaattttttgggtgtaattttgc

SEQ ID NO: 152275 - DNA, 137 bp, Arabidopsis thaliana columbia
caaaccaacgacacgcgatggcgcaaccagaacctgattcttattgtgcaaaggcgacaaagccatggttaggagcgattctttcgagccgagccatgctcagagaacatagactcgtcttcgttctcggcggcatt

SEQ ID NO: 152276 - DNA, 399 bp, Arabidopsis thaliana columbia
ctcgtcttcaacgctgttggtggagggtctggatctggtcttggatctctgctccgtgagagactttctgttgactgcgggaaaaagtccaagttgggtttcacagtttacccatctccacaggtctctacctccgttgttgagccttacaacagtgtcctctccactcactctctcttggaacacactgatgtctccatcctcctcgacaatgaagctatctatgacatctgcagacgctccctaagcattgagagaccaacctacaccaacctcaaccgcctcgtctctcaggttatttcttccttgactgcttctctgaggtttgatggtgccttaaatgttgatgtcactgagttctaaaccaacttggtcccatacccaagaatccacttcatg

SEQ ID NO: 152277 - DNA, 444 bp, Arabidopsis thaliana columbia
accaaacactcatttctccacatcttgagagaaaaaaacagagcaagtatattagagatctcatggcgatggcggtctccggagctgtcctcagtgggcttggttcttcgttcctcaccggaggcaagagaggtgccaccgcattggcaagcggcgtaggcactggagctcagagagttggcaggaaaactcttattgtcgctgctgcggctgctcagcctaagaaatcttggatccctgccgttaaaggtggtggcaacttccttgaccctgaatggctcgatggctcgctaccaggagatttcgggttcgacccattgggtttggggaaagacccggcttttctgaaatggtacagagaggctgagctgatccatggccgatgggcgatggcagcggttcttgggatcttcgtcggccaggcctggagcggtgtggcatggt

SEQ ID NO: 152278 - DNA, 407 bp, Arabidopsis thaliana columbia
ctctgtttctgattaccaaacgtcgtcaatacatttcttcaaattacgtttcttttattcttgcgttactctcaacaaattttgatatctgattggtgttgattccaagtaagaaagatcaaaactttaggtaaagtatggatatgggtttccatgaaaatgagcaaaatcaagaatttgcgaatctaatggagattggatctgggcattacgggtgttcacattatagaagacgatgcaagattagagcaccatgttgtgatgagatttttgattgcagacattgccacaacgaagctaaggattctcttcatattgaacagcatcatagacatgagctttctcgacatgaagtttcaaaggtcatatgctcgctttgtgagacagaacaagacgttcagcaaaac

SEQ ID NO: 152279 - DNA, 435 bp, Arabidopsis thaliana columbia
ctactctctctctctctctcctctgttctaattctctaggaacagagtaaaagactgtggctcagcttctgcctctgcaatggcggttcttccgacatggcttttagcaatgatgtgtttactcttcttcgtcggagctatggagaacactacacacgacaacatctcttctctccctagatccgacgaaaccgaatggaaccaacacgcagtgacgaatccagatgaagtagcggacgaagttctcgccttgacagaaatgagtgtgagaaaccataccgagaggaggaaactaggttactttacttgcggaacaggaaaccctatcgacgattgttggcgatgtgaccccaattggcacaagaaccgtaaacgcctagcggattgcggtatcggatttggagaaacgcgatcgtggtcgtgatggacgattct

SEQ ID NO: 152280 - DNA, 416 bp, Arabidopsis thaliana columbia
gaaagatcaagatgaggacgtggaagtcgtgggaggaagagacaaagacaatagaggatcagtattccaacgatcctgagaggttcaggtttgcgagggacacatcttttgggagaagacatctcaatttctggagcaagacgagagtcacactatggattgtttgtttttttagacagttctttggatctgtcaccaaagttgattacttagcactaagacatggtttcatcatggcgcattttgctcccggtaacgaatcaagattcgatttccgcaagtatattcagagatcattagagaaagacttcaaaaccgttgttgaaatcagtcccgttatctggtttgtcgctgtgctattcctcttgaccaattcatatggattacgttcttacctctggttaccattcattcca

SEQ ID NO: 152281 - DNA, 437 bp, Arabidopsis thaliana columbia
cgacaatttcgcttttgctttcaaaatctcattctatcactttgtgccttttttagccatcgcgaaaaacctctgaatcgcatcccttgattttctgggtttgtgactttgtgtagtggaaattaggcttgttgtttgatttcgctacgagaaaatggacaagtacgagcttgttaaagacatcggtgctgggaattttggagtggcgaggctcatgagagtcaaaaactccaaggaactcgttgctatgaagtacatcgagcgtggacctaagattgatgagaacgtggcgagagagattattaaccacagatcacttcgtcatcccaatattattccgtttaaggaggtggttttgacaccaacgcacatcgtcattgctatggaatatgctgttgccgggagctattttagcgtttttttgcgctggagaatca

SEQ ID NO: 152282 - DNA, 383 bp, Arabidopsis thaliana columbia
ccctctttaggttttcaaatctatcaataaaattttttttggcctttcccttaaaatcccggggaaagccaagggaaaacgcctgaaaaaattaacataataatgttaattgttgcttaaaccttccagctcaagtttggtagtaagtaagcagacatttaaaccccccaagagcaattgaagaagacttttaattcttttgaatttcttttccaaaaaccctttttagaaaaattggttgcatcataaagattggttcatttattcccaccggagaagatcatcaaattcgtcttctcacctatatcgccgacgacattcttcacgttggaaaaaaacaaagcaaaaccctagaaatagtggctgatgaggtcgcgaggcga

SEQ ID NO: 152283 - DNA, 367 bp, Arabidopsis thaliana columbia
gccggaaataatggctttcccgcgatttctttctctcctcgccgtcgtcactctctctcttgtcctcaccaccactgatgcttcctctcgctctctatccactccacctaaaacgaacgtactcgacgtcgtttcatctctccagcaaacacaaactatcctctcactcgacccgactcgttcctcactcaccaccaccaaacccgaatccctatccgacccggttttcttcaattcatcttcaccactatctctagagcttcactctcgagacactttcgtcgcgtcacagcacaaagactacaaaagcttaacactcagtcgactcgagcgcgactcatcccgagtcgccggaatcgtcgcgaag

SEQ ID NO: 152284 - DNA, 364 bp, Arabidopsis thaliana columbia
gctcaaccttcattactaatctccttttaaggtttctttcgtgaatcagatcggaaaaatggaatcttttttgttcacatctgaatccgtcaacgagggacatcccgacaagctttgtgatcagatctccgacgctatcctcgatgcttgccttgaacaagaccctgagagcaaagttgcttgtgagacttgtaccaagactaacatggtcatggtttttggagaaatcaccaccaaggctaacgttgattacgagcagattgttcgtaaaacatgccgtgagattggattcgtctctgctgacgttggtctagatgctgacaattgcaaggttctggttaacattgagcaacagagtcctgac

SEQ ID NO: 152285 - DNA, 425 bp, Arabidopsis thaliana columbia
tttccgtttatccgattcgttctcacgagatgatggctcgttaccacaggagatcgatgatcttgtgcttagttctgctctgattaagcatatcgccgagccaaggcttcctagggacagaggaaaagatcaaatccgctgtcttttactcaccaaaacttgtgatgaatccaggatcagttgcaaatccttacttattcgacatcgatttcccaagaggtcatatcggcctcaaagctttcgatgctgaagtggttgacgaagcgggcaaacccgttcctctacacgagacctatctccaccattggattgtcgagccatactatgtacgtaaaggttccaagcttccacagagagaaatgttcaggaatcatggattttccagggaagatccttgaagcaatcttgatcccagtcagatatta

SEQ ID NO: 152286 - DNA, 440 bp, Arabidopsis thaliana columbia
  unsure (1)..(440): unsure at all n locations
aagaaatcatcgtcttcttcttcatctattcaggatcgatccggcttgagatttattacaaattcgtccttctatttgctccaaaagttcgacaatttcgtaggggcaaagatggacgctgattccaagagatttctagctacgcttcgatcccgatctgaaatgttaatgggctttgaagaaatagatggagatgatgatttccaggaggagtttgcttgcccgttctgtgcagaatcgtatgatatcatcgggttgtgctgtcacatagatgatgaacatactttagagtcgaagaacgcggtatgccctgtttgttctcttaaagtgggagttgatatcgtagcacacataacgcttcaccatgggagtntatttaagttgcagcgaaagagaaagtcacgaaaaagcggtaccaattcgacactttcacttcttcg

SEQ ID NO: 152287 - DNA, 432 bp, Arabidopsis thaliana columbia
gtttgtatcgatcagaaaatggcgacttttatgatacagaggatgttcaagcaagggacgaagatcgtctgcgtcggccgtaactaccccgctcacgccaaagaactaggcaacgccgtccccaaggaaccagttatattcttgaagccaacatcatcatacttagaaaatggaggaacaattgagatcccacatcctttggattcacttcaccatgaagtagaactcgctttagtgattggacagaaagctagagatgtacctgaatcaatagccatggattacattggaggatatgcgggtgctcttgatatgactgctagggaactcccagcttctgctaaggcatctggtctcccatggacggttgcgaaaggacaagataccttcacttcttataacttttgtctgtcaaaggcgatggtgcgtgat

SEQ ID NO: 152288 - DNA, 437 bp, Arabidopsis thaliana columbia
  unsure (1)..(437): unsure at all n locations
tcgatctccaccatggctcagcttcagatacgcattcatcagaacttccggcgttggctctcccaccttatcctcagatgataatggaagcgattgagtccttgaacgataagaacggctgcaacaaaacgacgattgctaagcacatcgagtcgactcaacaaactctaccgccgtcacacatgacgctgctcagctaccatctcaaccagatgaagaaaaccggtcagctaatcatggtgaagaacaattatatgaaaccagatccagatgctcctcctaagcgtggtcgtggccgtcctccgaagcagaagactcaggccgaatctgacgccgctgctgctgctgttgttgctgccaccgtcgtctctacagatccgcctagatctcgtggccgtccaccgaagccgaaagatccatcggagcctncccaggag

SEQ ID NO: 152289 - DNA, 446 bp, Arabidopsis thaliana columbia
  unsure (1)..(446): unsure at all n locations
gcaaccttctcaagattcaagctcttatggtatctatttgttacaacanccaggatgtttgtgggaattataacaaagcaagagaagcaatgggactatcatattcatcaaacccaacaccgttagataacgaccagaagaaaccttctcctgcaacggctgtgacaaggccacagcctccggagctagctctcaggtgtccacgttgcgactcaacaaacacaaagttttgttactacaacaactacagtctcactcagcctcgctacttctgcaaatcatgccggagatattggactaaaggtggaactctaaggaacatccccgtgggtggaggctgccggaaaaacaaacgatccacatcttcggctgcaagaagcctcagaaccactccagaacnncgcgtccacgacgggaaagtcttctcggcggcaggttttaatggg

SEQ ID NO: 152290 - DNA, 300 bp, Arabidopsis thaliana columbia
tctttcactactaatatgcaactcttattgtttatagaaaacaacacctggatggggaggggaattataacaatgcacgggaagctattggactatcatattcatcaaacccaacaactactgataaccaccctactaaacctaatcctacatctgctgttacaaggccacagcctccataactagttctaatgtgtccacattacgactaaacaaacacaaatttttgttactacaacatctacagtctcactcatcctcgctactttatcaaatcattccttatatcttgaactaaag

SEQ ID NO: 152291 - DNA, 429 bp, Arabidopsis thaliana columbia
cttccgtgtcacaagaaaccatgaaactttctcttcatcaaccacttctcttctggggcttagccagcgtcctcccattaatcctgaccgtccattctcaatcagacgactcagatttcatccgtactagctgcaacaccacattataccctgacctatgcttctcttctctgtcctccttctctagctctgttcacaacgatccagccctcttggctcgagccgccatcttccgtcactctcaccaagactctcgacttagcctcataccttgccaatatcaccactctccagccagagagcaacgaagatggtgctcaccacccaaccgcagccggttgtttttacgactgcttcgacaattttaaagacgcgggcgaagaaatgaaaggctcgatgaaacagttgagggagctggtctcgactggc

SEQ ID NO: 152292 - DNA, 322 bp, Arabidopsis thaliana columbia
  unsure (1)..(322): unsure at all n locations
acatgggaaacaagtgaagttggccacaatgctcttgggagctggtcgatttacgctcaagtgctaagcttgttgatctcgcccttgcttcagggaaaatctatgaagatgaaggtttcaaatacatctctcaatctttgagaaagcactgtgcaccttattggtcttctaagcgatggtggagttcactctcgtttggatcaagttcagntgctgcttaagggttttgcagaacgtggtgctaagagaatccgcgttcatattcttactgatggtcgtgatgttttggatggttctagtgtcggattttgtgaaactcttg

SEQ ID NO: 152293 - DNA, 444 bp, Arabidopsis thaliana columbia
gacatcaccagaggcaagggtatggttgactctgtcttccaagctcctatgggaaccggaactcaccacgctgtccttagctcatacgaatacgttagccaaggccttaggcagtacaacttggacaacatgatggatgggttttacattgctcctgctttcatggacaagcttgttgttcacatcaccaagaacttcttgactctgcctaacatcaaggttccacttattttgggtatatggggaggcaaaggtcaaggtaaatccttccagtgtgagcttgtcatggccaagatgggtatcaacccaatcatgatgagtgctggagagcttgagagtggaaacgcaggagaacccgcaaagcttatccgtcagaggtaccgtgaggcagctgacttgatcaagaagggaaagatgtgttgtctcttcatcaacgatcttgac

SEQ ID NO: 152294 - DNA, 386 bp, Arabidopsis thaliana columbia
gcggaggatgtactctgctaagacttgcatcgaaagtggacgctattaaagagacggtagcggacgatgaagaaaaggttggagctgacattgttaagaaagcattgagctacccactgaagttaatcgccaagaacgctggtgtcaatggcagcgttgtcagtgagaaggttctttctagtgacaaccctaaacatggttacaatgctgcaactggcaaatacgaagatctcatggctgcaggaatcattgatccaaccaaagttgtgagatgttgcctagagcatgcttcatctgtggcaaagacattcttgatgtctgattgtgttgttgtggagatcaaggagcctgaatcagcagctcctgctggtaaccctatggacaat

SEQ ID NO: 152295 - DNA, 437 bp, Arabidopsis thaliana columbia
caacaaccaaacactcatttctccacatcttgagagaaaaaaacagagcaagtatattagagatctcatggcgatggcggtctccggagctgtcctcagtgggcttggttcttcgttcctcaccggaggcaagagaggtgccaccgcattggcaagcggcgtaggcactggagctcagagagttggcaggaaaactcttattgtcgctgctgcggctgctcagcctaagaaatcttggatccctgccgttaaaggtggtggcaacttccttgaccctgaatggctcgatggctcgctaccaggagatttcgggttcgacccattgggtttggggaaagacccggcttttctgaaatggtacagagaggctgagctgatccatggccgatgggcgatggcagcggttcttgggatcttcgtcgggccagcctggagcg

SEQ ID NO: 152296 - DNA, 435 bp, Arabidopsis thaliana columbia
gtctctgagataataaggacttgtgtatttttccatcgttaaaaggcatgtcaaagagacaatatgtcaggtgatgaggctgcccctgttgttgttcctccccccgttgctgagccagcggccatcccagaggacatggacttaatgactgcattggagttgactcttaggaaagctcgtgcttatggtggtgttgttcgtggtctccatgagtgtgctaagcttattgagaagcgtgtggctcaactcgttgtcttggctgaagactgcaaccagcctgattatgtcaagcttgtgaaggctctttgtgctgatcacgaattcaggttgctaacagttccaagttgccagactcttggcgaatgggcttgtctctgcaagattgattctgagggttatgccaggaatgttgttggatgctcattttttgttgtc

SEQ ID NO: 152297 - DNA, 377 bp, Arabidopsis thaliana columbia
gtgtgatcagatacggacgtaaactgattggagccactgatcctcagaaatctgagcctggaacaatccgaggagatcttgcagttactgttggcaggaacataatccatggaagtgatggaccagagactgcaaaggatgagatcagtctgtggtttaagcctcaagaacttgtttcttacactagtaactctgagaagtggctctatggtgacaactaaatccctcttcctcttgtcttttgaaatcaaatcacattggtttttcttttcttttcttacccatacaataaaaacaagaaacagttgttacggatacaaacacattccgggttttgatttttccccggtgaactcagtaaacagagcataagcaat

SEQ ID NO: 152298 - DNA, 446 bp, Arabidopsis thaliana columbia
aagagaggacaaaaactccgttcgtggttctacctaaagcccatcatcgccgacggagacaccggctttggcggcaccaccgccaccgtcaaactctgcaagcttttcgttgaaagaggcgccgctggggtccacatcgaggaccagtcctccgtcaccaagaagtgtggccacatggccggaaaggtcctcgtggcagtcagcgaacacatcaaccgccttgtcgcggctcggctccagttcgacgtgatgggtacagagaccgtccttgttgctagaacagatgcggtcgcagctactctgatccagtcgaacattgacgcgagggaccaccagttcatcctcggtgccactaacccgagccttagaggcaagagtttgtcctcgcttttggctgagggaatgactgtaggcaagaatggtccggcgttgcaatccattgaaga

SEQ ID NO: 152299 - DNA, 386 bp, Arabidopsis thaliana columbia
ccaaaacacaaaacaaaaaaaaatggcttccactgctctctcaagcgccatcgccgggacttgattcatccgtcgttgcccagctccaatcagactccgttcccttccatcagccaacacacaatccctcttcggtctcaaatcaggcaccgctcgtggtggacgtgtcacagccatggctacatacaaggtcaagttcatcacaccagaaggtgtgctagaggttgagtgtgacgacgacgtctacgttcttgatgctgctgaggaagctggaatcgatttgccttactcttgccgtgctggttcttgctcgagctgtgcttggtaagttgtgttctggatctgttgatcagcctgaccaagagtttctttgtgattaacagatt

SEQ ID NO: 152300 - DNA, 433 bp, Arabidopsis thaliana columbia
cggacgcgtgggttctcctacgaatgaaattgaaattaatttgagcgatcggaacaggatcgggtcggatcttttgaagttcttcaatggcgcagatactttcccctgtttgtacggatcttttgaagttccagaactcagctcttagctccagatcaggtgcgtcgccgcggttctcggcgaagaccaccggtgcttcttcatcttggtacttacctcggtacgcaggaaagaggcgaaccgattcaatcggaagattgagagttgcaactgaggatgcttcttctctttccaccggtgatgtcgccgatgattactatgccgttctcggactcctttcagatgctacgcaggaggagattaagaaagcttactataactgtatgaaatcgtgccatccagacttgagtggcaatgaccccgaaaccacaaa

SEQ ID NO: 152301 - DNA, 407 bp, Arabidopsis thaliana columbia
cttctccataactctctctctctctccctaaacacaaccaaatacttttatctctcaggaaccccaaaaacaaatggctataatgaagaaaacttcaaaactcactcaaacagcaatgctgaagcagattctgaagagatgctcgagcttagggaagaagaatggaggagggtacgatgaagattgccttccgcttgacgtaccaaagggacacttccctgtctatgtcggagagaacagaagcagatacattgtcccaatctccttcttgacacatcctgagttccaatctctcttacaacgagccgaggaagaatttggattcgatcacgacatgggtctcaccattccttgtgatgaactcgtttttcaaaccctaacatccatgatccgatgatattttatca

SEQ ID NO: 152302 - DNA, 423 bp, Arabidopsis thaliana columbia
atcgcttgaggcatcctgctaataaaatggtaagtagtttgtcaagaaaagatgtgtgcttcgttgtgtttgtggacgagattaccatgcaaacactttctgccgaaggccaagtacccgacggagctggattcgttggtctgtggaagttggttgtggtgaggaatcttccttacacagatatgcggagggtagggaaaataccaaaactgttaccacacagacttttcacttcggcaaggtactcaatctggttggacagcaagttacgtctccagttggaccccctagtcattttggaatactttctgtggcgtgaagggcacgagtatgctatctccaatcactatgaccgccattgcctatgggaaggaagtgcacaaaacaaagagcttgacaagtacaatcacactgtcattgatc

SEQ ID NO: 152303 - DNA, 225 bp, Arabidopsis thaliana columbia
cgggtgtttccactcgtccttcaaaacacaaaacaaaaaaaaatggctttcactgttttttcaagctccatcttcgggactgtgttcattcttctgggcccagctccaatcatattctcttcccttccatcatccaacacacaattcctctttcgtctcaaatcatgcaccgctctaggtggacttgttacaaccattgctacatacaaattcaagttcatcaca

SEQ ID NO: 152304 - DNA, 241 bp, Arabidopsis thaliana columbia
cccgtccggttttttttggctctctctgccttcttgactttcaaaagactctttctttctttgggattgattttggattctagggctctctttcttttagtgggtttttgttgttgttgttgcggtctctctgatgattactgaacttgagatggggaaaggtgagagtgagcttgagcttggtctacggctgagtcttggcggtggaaccgcggccaagattggtaaatcaagtggtggt

SEQ ID NO: 152305 - DNA, 401 bp, Arabidopsis thaliana columbia
gaaacttagagagacagagagagagaaagctcaaattcaatcatcaatgttaacggacgagagagaagtagtctgtgtcaccggcgccagtggctgcatcggctcgtggctggtccatcagctcctcctccgcggctactccgtccacgccaccgtgaaaaacctccaggatgagaaagagacgaaacatctagaaggtctcgaaggtgcagccacacgcctccatctattcgagatggatctcctacaatacgacaccgtttccgccgccatcaatggttgctccggcgtattccacctcgcatcaccttgtatcgtcgatgaagtccaagatccccagaagcaactacttgacccggcggttaaaggaaccataaatgttctgacggcggcaaaagaag

SEQ ID NO: 152306 - DNA, 438 bp, Arabidopsis thaliana columbia
  unsure (1)..(438): unsure at all n locations
ctttgatccaggttcagagattaaacattttgaaaaatcggagactctgggattggatggttcgttgttactgatagattacttaagctatggtttggtttagaatcggttcttctgtggcaaagcttgccataagaaggacactgtctcagtctcgttgtggttcatatgccactagaacaagggttttgccttgtcaaaccagatgttttcactctacaatactcaaatcaaaggcagagtctgctgcacctgttccacgtcctgtcccactttctaagctaactgatagcttcttagatggaacaagcagtgtgtatctagaggagttacaaagagcttgggaggctgatcccaacagtgttgatgagtcgtgggataacttttntaggaattttgtgggtcaggcttctacatcgcctggtatctcggggcaaa

SEQ ID NO: 152307 - DNA, 388 bp, Arabidopsis thaliana columbia
cggacgcgtggggaagaagaatataacattactgggttttttatatctggaattctgaagagattcttcacggatttgatctgtttaaactataaaagtcttgatttttataaatcagctaaaaataagacacggtttagggtttatggtttgactagaaacaacaatactgaaatgggttgtgaggtttcaaagttatgtgcattttgttgtgtttctgatcctgaaggatctaatcatggtgtcacagggttagatgaagataggagaggtgaaaggaatgatttgcctcagtttcgtgaattctcaattgagacgttgaggaacgcaacatcaggatttgctacagagaatatagtatcagagcatggtgaaaaagcttcaaatg

SEQ ID NO: 152308 - DNA, 447 bp, Arabidopsis thaliana columbia
  unsure (1)..(447): unsure at all n locations
attattcaaagcagataaaaaaaaaatggctcaagcagtgacttcgatggctggcttacgtggagcatctcaggctgtccttgaaggaagtttacagatcaacggctcaaaccgtttgaacatctcaagagtctcggttgggtctcagagaaccggacttgtgatcagggctcagcagaacgtgtcagtaccagaaagtagtcgccggtcagtgattggactcgtggcggctggtttagccggtggttcattcgttaaagctgttttcgccgaagctattccgatcaaagttggtggtcctccacttccttccggtggcctacctggaacagataactcagaccaagcaagagacttttcattggcattgaaagataagatttacatacaaccatngtcaccaacagaagctgcagctagagccaaagattctgctaaagagatcat

SEQ ID NO: 152309 - DNA, 229 bp, Arabidopsis thaliana columbia
gcattggctttattaaacgctctaactttatatccctgcttatcccagcgggacgtgtcgctcttcaaacctgctcagatcatctgtaaagctcaacagcttcatgaagacgataactccggcatatcccgccagtttgctctgactctactggccagtgccgctgctgtccattccaaagtatctcctgctgatgccccctacactgaaactgcagacctgtttggga

SEQ ID NO: 152310 - DNA, 384 bp, Arabidopsis thaliana columbia
aaaagagagaagaaaaatggtgttgacaatctatgctcctttattcgcttcttcagagagagctgttgtgacattggtggagaagggagtatcattcgaaactgtcaatgtcgatctcatgaaaggagaacagagacagcctgagtatctcgcgattcagcctttcggtaaaatcccagtcctcgtcgacggagactacaaaatcttcgagtcgcgtgcgatcatgaggtatatagcagagaagtatagatcacaaggacctgatcttttggggaagactattgaagagagaggacaagttgagcaatggttagacgttgaggctacaagttaccatccaccactattggctttaacgctcaacattggctttgcaccacttat

SEQ ID NO: 152311 - DNA, 375 bp, Arabidopsis thaliana columbia
atcagatgaaactttggaatccgagcctctgcacaagattgtaaatcctgacgatgcaaacgagaacagagtagtcaatggggcagatactgaaattggtgtttccaacttgagccatgtaaacgcagccatgagtcatgttattcctgaagagcaagctttgctgcagggagatattcttattgatatcaatgaccgggtttctcgtgactttctttctgaaatattcttacaggcaatctcagaggatacattcactgtccggtcatatcctcacgatggagctgctgttagcatgaatgtgcaaaatcacgatcgttaaaactggtcatatttttagcagctggctgaagatcagtttattcaaagagatgt

SEQ ID NO: 152312 - DNA, 439 bp, Arabidopsis thaliana columbia
  unsure (1)..(439): unsure at all n locations
ctttctcctttggtggcaaacacaacgacagatagagagaaacgatggcgtcgaactcgcttatgagctgtggcatagccgccgtgtacccttcgcttctctcttcttccaagtctaaattcgtatccgccggagttccactcccaaacgccgggaatgttggtcgtatcagaatggctgctcactggatgcctggcgagccacgaccagcttaccttgacggttctgctcctggtgactntgggtttgacccacttggacttggagaagttccagcgaaccttgagagatacaaagagtcagagctcatccactgtagatgggctatgctcgctgttcctgggattttggtaccagaagcattaggatatggaaactgggttaaggctcangaatgggcagcactaccagggggtcaagccacttacttgggaaccca

SEQ ID NO: 152313 - DNA, 393 bp, Arabidopsis thaliana columbia
atttggggattcttcggtcgcattctctccggttctctctccgaatactttctcaagaaagctggaacaccaagaccactatggaatgcaacctcttaaatccttatggccgtaggatatatactaatggctttagccgtgcctaattcactctacatcggttcaatggtggttggagtatgttacggtgtccgtctagccataactgtaccaacagcttccgaactctttggtctcaaatactacggtctcatctacaacatcttagtacttaacttgccacttggctcgtttcttttttcgggtctcctcgctggctttctctacgatgcaaaggcaacaccaactcctggtgggggcaacacgtgcgtaggagctcattgctaccgtctt

SEQ ID NO: 152314 - DNA, 337 bp, Arabidopsis thaliana columbia
  unsure (1)..(337): unsure at all n locations
cgacccacgctttcgctcaaaatcttatttactttctctcaattctctctaccgngatcaagacgcagatgtgtggcaagactctcaccggaaagacaatcaccctcgaggtggaaagctccgacaccatcaacaacgctaaggccaagatccaggataaggagggctttcctccggatcagcagaggctaattttcgccgccaggcacttagaggatggccgtccgttgcttgtttccaatttccagagggaatccaccttccactgggtcctaaggtctccgggggtgatgcagattttggttaaacccttaccggaaagacgattactcttgag

SEQ ID NO: 152315 - DNA, 401 bp, Arabidopsis thaliana columbia
actaacagagagaaaaagcaaaagcaataatggctcgatctttcgctattgctgtgatctgtgatcgcctcatcgccggcgttactggtcaagctccgacttcaccaccaaccgctacaccagctccaccaactccaacaactcctccaccagcagcaactcctcctcctgtctcagcaccaccaccagtcacaacatctcctcctccagtcaccactgctcctcctccagcaaatccaccaccaccagtctcttcttctcctcctgcttttcctccaccagctacttcttcttcagtcgcttctcctccttctcccgttgcttcttcttcaccagcaacttcttctcccgtcgctactccttccccagctcctctagctttcccttctgctcaagttcca

SEQ ID NO: 152316 - DNA, 355 bp, Arabidopsis thaliana columbia
ctattctgatattcacctctcttatattttttttttgaagatccacacaaaaaagcgttccggcatttttttttctgagctgggattattaagctatctacttgatttttccgctttcactggaagaataaagataagaaaaaatgtcacgtgatgtcgttgaaatatcaaatccacctctaaaacaagacgatctttatcctcatccagtgaaagatcaactatacagtatcaattactgcctcacaagtccttcttcttggctcgatacaatactatcatgtgttttcaacacttacttagtgatgcttataaacaactgtatcttaattctaaccaatgtttatcttttcaa

SEQ ID NO: 152317 - DNA, 397 bp, Arabidopsis thaliana columbia
acgcggacgcgtgagctggctgaatcaccggagctactctaaccggagagttaccccggagactacgggtgggacaccgacggactttcagctgaccccgagacattcgcaaggaaccgtgaactagaagttatccacagcaggtgggccatgctcggagccctaggctgcgtcttccctgagcttttggctagaaacggagtcaagttcggagaggcggtttggttcaaggccggttcacagatcttcagcgatggagggctcgattacttgggaaaccctagcttggttcacgctcagagcattttggccatttgggccacacaagttattttgatgggagccgtttgaggctacagagtcgcaggaaatgggccattgggagaggccgaggact

SEQ ID NO: 152318 - DNA, 444 bp, Arabidopsis thaliana columbia
gaagatctagaatggagggaaatgaaaggcccatttgttacgatatggcttcacaatgttccctggggttctgagaacactttgactgctcctgctgcaaagttttctgatggctacctggacttgattgtcttgaaaaactgccctaagcttgtcctgctctcacttatgagacagacgagtagtggaacacatgttgagtcaccatatatagtgtatataaaggtgaaggcatttgtgctggagccgggtgcacttgtagacgaaccagacaaggaaggaatcatagattcagatggagaggttttggcaagaggaaaaagaacatataaatgtgatcaaaaggccttgatgtcttacgacaagcttcaagtaacagttgatcaaggtttagccacactcttctctcctgaatattgataatgttaacaatactcgtgagat

SEQ ID NO: 152319 - DNA, 227 bp, Arabidopsis thaliana columbia
  unsure (1)..(227): unsure at all n locations
gaaaaacaaaaaaggcngncaaagccnctacggtcgancaaaatccaaccacaccagagagactcatcgattctttcttacatggctcagccatctacgcagctcctatctacatcagtcgcaaaccaccaactttctacgttcgcgccacaaccgcaggttacgactagagcgctttcacgctcgacccgatcaaagaatagagcgtgtcacgtgagatgacgaga

SEQ ID NO: 152320 - DNA, 443 bp, Arabidopsis thaliana columbia
  unsure (1)..(443): unsure at all n locations
ttcccttattattcggagagcctataaacgctctcaccaaacaaaccaaaaccaaagccaatccaagaaaaaaaagaaacctcaaagaagaagaagaagaagattctctctgtcgaggtaaatatgaagcaaatgtcgcatcttgatgatattccttcgacgcctggcaagttcaagccctacttccaccgtacgcggtggcaatcctccgtcgccaagctcgccttttggtctctcgtcttcgttggtttgatcttcatcttcttctaccgatctcccgtttcctccaatcccgccgatccttctcgccgttctcttcgtacctactcctggggtggacccgcttgggagaaacgggtcagatcctccgcccgtctccgtacccgccgcggtttctctggtctcgtcaccggagccgncggtttcgtcggtacccatgtctc

SEQ ID NO: 152321 - DNA, 436 bp, Arabidopsis thaliana columbia
cgagtctctctctggaccactttttcgttcttgtaaaaaaaaactcattgggtacggttttcttagaaagctgtccgaaaagcttaaacactaaaacacatctgtaataataacccaaagatcataacttttaaacctcgtacatcatcagattcattcaaactgagctttttctatgtgggcagagcaactagggttttgatcatggatccaaacttctctgaatctctaaacggctttgagtattttgatggtaaccctaatttgcttactgatccaatggaagatcagtatccaccaccatctgatactctgttgaaatacgtgagtgagattcttatggaagagagtaatggagattataagcaatctatgttctatgattcattggctttacgaaaaactgaagaaatgttgcaacaagtcattactgatt

SEQ ID NO: 152322 - DNA, 384 bp, Arabidopsis thaliana columbia
gcttttctctagcgtcggggcctcgatctcttgatttgagcttttcttaggtctggctctctctgtacactctctccgccgtcgtatctcgccgtcgatttcaatttttccgacgatatgaagctcaccgttaaaactctcaagggcagtcattttgaaattagggttttaccctccgatacgataatggcggtgaagaagaatatagaagattcacaaggaaaagacaattatccatgtgggcagcaattgttgattcacaatggaaaagttttgaaagatgaaactagcctggtggagaacaaagttacggaggaaggatttctcgtcgttatgcttagcaagagcaaatctggaggttcagctggtcaggcttcggttcag

SEQ ID NO: 152323 - DNA, 417 bp, Arabidopsis thaliana columbia
  unsure (1)..(417): unsure at all n locations
gttccgtagcagagttttagttttagcagagttggtgaaatcaatgggccaccaaagcgccgccgtttcagagaatcaaaaccatgatgacggcgctgcgtcgtcgccgggattcaagctcgtcggattttccaagttcgtaagaaagaatccaaagtctgataaattcaaggttaagcgcttccatcacatcgagttctggtgcggcgacgcaaccaacgtcgctcgtcgcttctcctggggtctggggatgagattctccgccaaatccgatctttccaccggaaacatggttcacgcctcttacctactcacctncggtgacctccgattccttttcactgctccttactctccgtctctctccgncggagagattaaaccgacaaccacagcttctatcccaagtttcgatca

SEQ ID NO: 152324 - DNA, 445 bp, Arabidopsis thaliana columbia
gaaaaaaaaaactcagagagacaaatctaaatggcgatgattacgcgcaacaccgccacgcgcctccctctcctcctccaatctcaacgcgccgtcgccgctgcctcggtctctcacctccacacatcccttcccgctctctctccctccacatcaccgacttcctacaccagacctggtcctccttcgacctcccctcctcctcctggtctctctaaagcggccgaatttgtgatctccaaggtcgatgatctcatgaactgggctcgtaccggatcgatctggcctatgacctttggtctcgcttgctgcgccgtcgaaatgatgcataccggtgctgctcgctacgatctcgatcgattcggtatcatcttcaggcctagtcctcgccagtctgattgtatgattgtcgccggtactcttaccaataagatggctccggctc

SEQ ID NO: 152325 - DNA, 442 bp, Arabidopsis thaliana columbia
cgctctcacagtagaagaaaaaattagaaaggttgtgagaatggcggctacagcaggttcaagcttacaaattgctacacgaaggccgagcatgtcttcgcctagcaaaattcttaaagcaggaacctacattgttggtgccaatcctggaaacgcttcatgggataaactttcatgcactcgccaattatcaaaccttggatgtttgagaaaccacagtgctgttccaacttgtaagagacccttttctttttccacaagggcaatgtctgaatccagtgaaaacaaggctccttcagggcttccaattgatttgagagggaaaagagctttcattgctggtatagctgatgataatggctatggttgggccatagcaaaatctcttgctgctgctggagctgaaatattggttgggacttgggttcctgcacttaatata

SEQ ID NO: 152326 - DNA, 445 bp, Arabidopsis thaliana columbia
tttatcttcttcatctcttcacatcaaaaaacttttctcctccatcaaaatcctccgacgatgacaaccatagctgcagctggcctcaacgtcgcgactccacgagtggtcgttcgacctgtggctcgtgtattaggtccggtccggttgaattacccgtggaaattcggttcgatgaagcggatggttgtggttaaggctacatcggaaggagagatatcggagaaggtggagaagagtatacaagaagctaaggagacatgcgctgatgatccggtgagcggggagtgtgtagcggcttgggacgaggtggaggagctgagtgcggcggcgagtcatgctagggacaagaagaaagctggtggctccgatcctttggaagagtattgcaatgataatcctgagactgatgagtgtcgtacttatgataattaaaaaatatgtt

SEQ ID NO: 152327 - DNA, 443 bp, Arabidopsis thaliana columbia
gggagaatctgaagacgccattttccataaggcaggccggtccggttatatgtccggttcgattgatccagcagtttgtgacttaaccgcactcacttccctcgttctcgccgactggaaaggaatcaccggagagattcctccgtgcattacttccctagcttcgctccgtatcctcgatctcgccggcaacaagatcaccggggagattcccgcggaaatcggcaaactctcgaaactcgctgttttaaacctcgccgagaatcaaatgtccggcgagattccggcgtcactgacgtcactcatcgagttgaagcatcttgaattgacggaaaatggaatcaccggcgtgatcccggccgatttcggatcgttgaagatgttgagcagagttttactgggccgtaacgaactaaaccggtcaattccagagtcgatctcgg

SEQ ID NO: 152328 - DNA, 443 bp, Arabidopsis thaliana columbia
gaaacccacagcaacaaacagagaaaatgtgtggcggtgctattatttccgattatgcccctctcgtcaccaaggccaagggccgtaaactcacggctgaggaactctggtcagagctcgatgcttccgccgccgacgacttctggggtttctattccacctccaaactccatcccaccaaccaaggtatgtactctcctattaatcataaacaaaaatacaaaatcattcaaaaacacaaacatatagttttttctaacctttttagcaaaaaggtaaaataatatttctggaacttacggaagatgataaaaaaaaaatatttgtggttttggtaatgtaatttatcaggattatttaattatctgtgtggggttaaaattgtaaattttgaactttggggaatccggtgaaaatttgaagttaacgtgaaagaggaggca

SEQ ID NO: 152329 - DNA, 377 bp, Arabidopsis thaliana columbia
  unsure (1)..(377): unsure at all n locations
atcttattcaacgaatcatttatcaccaaaaggttctctcttttttgtttgtttctgtcttgtgtgaatgactcgtcggtgttcgcattgtagcaacaatgggcacaattcacgcacgtgtccaacgcgtggtggtggcacgtgcggtggaagtggcggaggaggaggaggtggtggtggattatttttttttttttttttttttttttttttttttttttttttttttttttttttttttttttttttttttnttnttttttttttttttttttttttttttttttntttttttttttttttttttttttttttttttttttttttttttttttttttttttttttttttttttttttttttttttttttttttat

SEQ ID NO: 152330 - DNA, 438 bp, Arabidopsis thaliana columbia
ctctactcacaacgcagagcttcaatttctccctcgcagggattcggatcagttcagtttcaagtttctgaaccactcatggatcaggcggagctgagtatagagcaggtattgaaaagggacattccatgggagacttacatgaacactaagctggtttcagctaaaggtctccagctcttaaggcgctatgataaaaaacctgaaagtgctagggcacagttgctcgatgaagatggtccagcttatgttcatctctttgttagcatcttacgtgatatattcaaggaagaaactgtcgaatatgttttggctttgatttatgaaatgctctcagcaaacccaacacgagctcgattattccatgatgaatctttggcaaatgaggatacttatgagcctttcttgaggttgctttggaagggaaatggttcattc

SEQ ID NO: 152331 - DNA, 396 bp, Arabidopsis thaliana columbia
ctgaggcagggaagcatttaggggttgctggacttggtgggcttggtcatgttgctgttaagattggtaaagcttttggtttgaaagttactgtcattagttcttcttctacgaaagcagaggaagccattaatcatcttggtgctgattcgtttcttgtcacaactgatcctcagaaaatgaaggctgcaattggaacaatggactacattatcgatacgatatcagcagtacatgctctgtatccgttgctcggtttactcaaagtcaacggaaagctcattgctttaggcttacctgagaagcctctcgagctaccaatgttccctcttgttctcggaaggaaaatggttggaggaagtgacgtgggagggatgaaggagacacaagagatgc

SEQ ID NO: 152332 - DNA, 446 bp, Arabidopsis thaliana columbia
  unsure (1)..(446): unsure at all n locations
attagagcagaccccgaactcttccactctccagtcacagccacagagagatttgagcagctgggtgtgttttccatggcgtgggaagcgagggaatcaccagcaaacaatcctggcttgtcaacgaatcgagatgaggctacaaaaggatacatcatgcaacagactatgtttcggatcaaggaccctaaggctagtcttgacttttactcacgtgtgctggggatgtcattgctgaagaggctggatttctctgagatgaaatttagtttgtacttcctgggctacgaggatactacaacagctccaaccgatccaacagagagaacggtttggacatttggtcaaccggcaacaaattgaattgactcacaactggngtacagagagtgatcctgagtttaaaggttatcacaatgggaactctgagcctcgtggatttgggc

SEQ ID NO: 152333 - DNA, 435 bp, Arabidopsis thaliana columbia
ctttcctttcattgtagttaacgaaaagattacgataatggcaacatcagctatccagcaatcctccttcgccggccaaacggctctcaagccctccaacgaactcctccgcaaggttggtgtatccggtggtggccgtgtgaccatgcgtcgtaccgtcaagtctactcctcaaagcatctggtacggaccagaccgtcccaagtacttaggaccattctcggagaatacaccgtcctacctaaccggagaataccccggagactacggctgggacaccgctggactctcggctgacccggagacattcgctaagaaccgtgagcttgaagtaatccacagcagatgggctatgttgggtgctctcggatgcacattccctgagattctctccaagaacggtgttaaattcggagaagccgtgtggttcaaggc

SEQ ID NO: 152334 - DNA, 431 bp, Arabidopsis thaliana columbia
  unsure (1)..(431): unsure at all n locations
cagaaaacaagtagaaactttaaaacgagagagagagaaagaaatggcgacatcgggaacgtacgtgacggaggttccgttgaaaggatcggcggagaaacactacaagagctggaagagcgagaaccatgtcttcgctgacgccattggccaccacatccaaaatgtcgttgttcacgaaggcgaacatgactctcacgggtctatcaggagttgggactacacatatggtatacatttagtcatttacttatactttctctctatatatttatcacttttacggcctatgtgcgtccgaaactatggttttggtggtctactgccaaatatgaaatactacatatgatcattaattaaggaatttgttctataagaccaaaaacatatataataatcatattttgcatntatgtttacatatgaaaacg

SEQ ID NO: 152335 - DNA, 444 bp, Arabidopsis thaliana columbia
ctgatattgagagagagagagagattaataaacttcttctggttccttttatcaacattttttctctctcttaaaacttcgaagcgatttttgatttacagactatggaaatggaatcattcatggacgaccttttgaacttctctgtaccggaagaggaagaagacgacgacgaacatacgcaaccaccgaggaatattactcgccggaaaactggattacggccaacagactccttcggtctctttaataccgacgaccttggagtggttgaagaagaggatttggaatggatttcaaacaaaaatgcttttccggtgattgaaacattcgtcggtgtattaccgtcggagcattttcctataacgtctcttctggaaagagaagcgactgaggtaaaacagctgagtcccgtttcagtacttgagacgagtagccatagct

SEQ ID NO: 152336 - DNA, 434 bp, Arabidopsis thaliana columbia
attctaatggaccaatttcaccatgtttctgcagcttttttggaacttgaaaaagggtatcaagaggctatcgaggaaattactagaagaatgggtgcagggatggccaagtttatctgccaagaggtagaaactgttgatgactacgatgaatactgccactatgttgctgggcttgttggtttaggtttgtcgaaactcttcctcgctgcaggatcagaggttttgacaccagattgggaggcgatttccaattcaatgggtttatttctgcagaaaacaaacattatcagagattatcttgaggacattaatgagataccaaaatcccgcatgttttggcctcgcgagatttggggcaaatatgctgacaagcttgaggatttaaaatacgaggagaacacaaacaaatccgtacagtgcttaaatgaaat

SEQ ID NO: 152337 - DNA, 441 bp, Arabidopsis thaliana columbia
gtaatttcaaaagtacaatcatggaccatactcttacacacaccggatcgaagaaggcttgtgtcattggtggcacgggaaacttagcctctattctcatcaagcatttgcttcaaagtggctacaaagttaacactacagttagagatccagaaaacgagaagaaaatagctcaccttaggaaacttcaagagcttggcgacctgaagatcttcaaggcagatttgactgatgaagacagtttcgaatcctcattctccggctgtgaatacatcttccatgtcgcaactccgatcaactttaaatccgaagatcccgagaaagacatgatcaagccggcgatacaaggagtgatcaatgtgttgaaatcttgcttaaaatcgaaatcagtcaagcgtgtgatctacacatcttcagctgctgctgtttccatcaacaatc

SEQ ID NO: 152338 - DNA, 356 bp, Arabidopsis thaliana columbia
tctcttctgtatccaagctgatgagctctacgtcttggtcccaaattgttcagctcgtagctgacaagcatgtacgttacattctgatggcagaaaagaagaaagagagttttgagtctgtggtgatggatcatctaagaatgaatggtgcatactggggactcaccactctcgacttacttgacaagctcggctgtgtttctgaagaggaagtcatttcatggctcatgacttgccagcatgaatctagtggcttttgccggtgacactggacacgacccacatatcctatatacactcagtgctgtacaaattttggccctatttgacaaaatcaacattcttgacattgggaa

SEQ ID NO: 152339 - DNA, 443 bp, Arabidopsis thaliana columbia
ggcggcgattgaagaaacctttccgatggatctgctcagggaagagattctgaagaaacgtaagagtctagctgaggaatctggtggtaagaagttcttcaagcggtctgagatcgagcagaagaaaatccagaagcttcgagaggaagaacgacgcgagcacgagcttaaggctcagcggagagccgccgccgccgcttccggtggagatggaaaatcatccggctctgctcctggttcttctaacgcagctacgtctgcgtcttccaaatcctctgcatcggacgctgctgctatcgccgattcaaaagccctaaccgacgaaaacctaattctcccgaggcaggaagtgattcgtcgtttgagattccttaagcagccgatgactctcttcggagaagatgatcaatcgcggctcgatcgactcaagtacgttttgaagg

SEQ ID NO: 152340 - DNA, 442 bp, Arabidopsis thaliana columbia
gtgaaaatatttttttttaaatggttgtggtgaacaaaacgaatctcttattgctggttctctctctatggctcaccctcgacctctcctccgcacaactccgccgtaacttctacgccggaagttgtcctaacgtcgaacaaatcgttagaaacgccgtacagaaaaaagtccaacaaactttcaccaccattcccgccactctacgcctctatttccatgattgtttcgtcaatgggtgtgatgcatcagtgatgatagcgtcaacaaataataataaggcggagaaggatcatgaggaaaatttatcgttggccggagatggattcgacaccgtcattaaagctaaagaagctctcgatgccgtcccaaattgtcgtaacaaagtttcatgcgctgatattctcacgatggccactcgtgacgtcgttaatcttgcggg

SEQ ID NO: 152341 - DNA, 440 bp, Arabidopsis thaliana columbia
  unsure (1)..(440): unsure at all n locations
gaaaatgacgctcacattaactctggcatagacacagaatcgggctttgactcaatgtggctccaccctctgtagacaagcactcgccagcttctaagcttaccaagctgctaccaaccaggtgctcttcctcacatcaatcaccgttactctaacaaggagatcttccttcgtgaactcatcagtaactcttctgatgcgtcttgctagaagcctccttcataaccctcatgtacatattgagccatatctgcatcagttgatgccgtctattatcacttgccttattgccaagcgcttaagaagaaggtcatctgataatcactgggacttgagaaacttcactgccagcacagttgcttcaacgtgcaaaaggtttggacacgtttatcacaatnttgtttcctgttgctcaagatcactgcttcatacctttttgg

SEQ ID NO: 152342 - DNA, 352 bp, Arabidopsis thaliana columbia
  unsure (1)..(352): unsure at all n locations
tctctgtgcttcctgcaaatagctctttgctgtttatctanctcctccatcaacaaacatgggtaagacacgtggtatgggagctgggcgtaagctgaagagactccgaattaaccagaggtgggctgacaagcagtacaagaagtctcacttgggaaatgagtggaagaagccttttgctggttcttctcacgctaaaggaattgttcttgagaaaattggtattgaggctaagcagcctaactctgctatccgtaagtgtgctagagttcagcttattaagaatggaaagaagattgctgctttgtccccaatgatggttgtttgaactacatcgaggaaaacgattagg

SEQ ID NO: 152343 - DNA, 434 bp, Arabidopsis thaliana columbia
gaaattcttaacaaacaattttcttcataatattaattctcaagatcttaaagattatattgatacgaagagaaaattcaaatgggtcttgatgattcatgcaacacaggtcttgttcttggtttaggcctctcaccaacgcctaataattacaatcatgccatcaagaaatcttcctccactgtggaccatcgtttcatcaggctcgatccgtcgttgactctaagcctatccggtgagagctacaagatcaagactggtgccggcgccggcgaccaaatttgccggcagacctcgtcccacagcggcatctcatctttctcgagcggaagggtaaagagagaaagagaaatctccggcggcgatggagaagaagaggcggatgagactaccgagagagtggtgtgttcgagagtgagtgatgatcatgacga

SEQ ID NO: 152344 - DNA, 417 bp, Arabidopsis thaliana columbia
gggcacgcgcacgcggctttctaaggaccttcagatttactttgacaaagtcacggagtgggctttgacggaatggggctccaccctctgtagacaagcactcgccagcttggaaattgatcctggactccacccattagttccctttttcacttctttcatcgctgaagagattgtcaaaaacatggataattatccaatcttgttggctttgatgcgtcttgctagaagcctccttcataaccctcatgtacatattgagccatatctgcatcagttgatgccgtctattatcacttgccttattgccaagcgcttaggaagaaggtcatctgataatcactgggacttgagaaacttcactgccagcacagttgcttcaacgtgcaaaagggttggacacgtttatcacaattt

SEQ ID NO: 152345 - DNA, 442 bp, Arabidopsis thaliana columbia
  unsure (1)..(442): unsure at all n locations
actaagtatgatgttttcctaagtttcatagggcatgacactcgccacaacttcatcagttttctctacaaagaactggttcgaaggagcattcgaaccttcaaagacgacaaagagctggagaatggccagaggttttcgccggagctcaaaagccccatcgaggtgtcaagattcgccgtcgttgttgtctcagagaactatgctgcgtcttcttggtgtctcgatgagctcgtaacgatcatggataaaaaaaaaagggttccatcaccgtgatgcccatcttctacggcgtggaaccgaatcatgtgaggtggcagaccggagtactcgctgaacagtttaagaaacatgcgagtagagaagatcctgagaaagttcttaaatggaggcaagcattgaccaaatttgcgcaactcttccgcgattggtcangtgatga

SEQ ID NO: 152346 - DNA, 425 bp, Arabidopsis thaliana columbia
ctcgtctggaagaatcaggagaaaattgtcatgtgttggtatcttctttgatcaagcacttggatcataagaatgtaataaagcaacaaggtcttcaaattaacatggtcaatgtagccacatgccttgcactacatgcaaagcagcaggcttcaggcgcgatgactgctgtaatagctgacttgattaagcacttgcgaaaatgcctgcaaaatgcagctgaatcagatgtgtctgttgataaaacaaagcagaactcggacctccagcatgcattagaaaattgcatagcagagctctcaaataaggttggggatgcagggcccattcttgatatgttcgcagtggttcttgagacaatttccactaatgtagtcctttctaggaccacagcatcagccattctccgagctgcacatatagta

SEQ ID NO: 152347 - DNA, 441 bp, Arabidopsis thaliana columbia
ccaaatcaatccttctttaatttacttattcttagtataacgttcacaccttttctgacacatttacaactatatatggagtcgtcacggagcctcgagcacgtgctctccatgcaaggtggcgaggatgacgcgagctacgtcaaaaactgttacggtccagcggcagctttagccttgagcaaaccaatgctgacgacagccatcaactccataaagctcaccgaaggttgctcctctcacctgaaaatagccgatttaggttgcgcaatcggagacaacacgttttccacggtggaaacggtggttgaggtgttagggaagaagctagccgtgattgacggtggaaccgagccggagatggagttcgaggtcttcttctctgacttgtcttccaacgatttcaacgcgttgtttcggtcgttggatgagaaagtgaac

SEQ ID NO: 152348 - DNA, 421 bp, Arabidopsis thaliana columbia
gcggtccatggagctcaccgttctcggacccctcgccggtcggagtttcgcaatcgccggaagacctaaacttctgcttcttcgaccaacaaacctccctcttctccgtctctcactcccgctttctcttcccaatttctcttcgtcctctcgttttaattcgcccatagtattcgctgcacaggagagtaacttgagtgtatccaacgaaaacgaaaccagtgagtggctgatgcaagatttttatacattgagaaaagatgtagaaatatcatcagctcgtgttgaagagattagagcttctgctaatttacaacaactagaacaagagattacaaatctggaatcaaaagctactgatacatcgttttgggatgatcgtactaaagctcaagaaactttatcgtctttaaatgatctt

SEQ ID NO: 152349 - DNA, 417 bp, Arabidopsis thaliana columbia
aattcttcttctcttttcttttcttaaaagagctcaaaacacacgaccatggttgcgctgtcttcttagctggttatctaccgtaatcatgccaacatcagcaacagcggtggctccatcaactggatctgtccagaaaaaagatcaagactggcgtgcgattttgtctcccgagcaatttagagttctcagggaaaagggcacagagaaccgaggtaaaggagagtataccaaactgttcgacgacggaatctatagttgtgctggttgtgcaactcctctttataagtccaccactaagttcgactctggttgtggctggccttccttcttcgatgctatccctggtgccattaaacaaacgcccgaggcaggagggagaagaatggagatcacgtgcgcggcatgtgacggaca

SEQ ID NO: 152350 - DNA, 415 bp, Arabidopsis thaliana columbia
ctcaacaaccaggtcgcacacactaaaatggcgttccgcgttttgctcctgtgctgctcaccgcacttctcgtctgctccgccgtttctccttctttcgccgcttcttcctccgacgacgttgacgatgaggatctcagcttcctcgaagatctcaaagaagacgacgttccctgcgctgactcactctcttcctcaactggatttgacgaattcgaaggaggagaagaagaagatcccgatatgtacaacgacgatgacgatgaagaaggagatttttccgatctaggtaatccggattccgatccgttaccgacgccggagattgatgagaaagacgttgtggttatcaaggagcgtaacttcactgatgtgattgagaataatcaatacgttttggttgagttttatgctcc

SEQ ID NO: 152351 - DNA, 414 bp, Arabidopsis thaliana columbia
gcagccctaccaaactctcaaaggttagaatttgctatcggatcatctgctaagcgtgggggactcttcctagaacatcggtgtgtatcgaggtttactattggatcaaagatgtctgcagaggagaagaaccttatagagatcttggaggaaggtcacaaagtcgatgttgttaagtacattgattatgtcagtgcccctcaagctggtgctattgcgacattctcaggcactacaagagacatgttcgagggcaagacagtgttggagttaaggtatgaagcatatgtgccaatggccacacgatgcctcagctcgatctgtacaactgctagatcaacttgggatatccacaagattgctgttgctcaccgtcttggaccagttcctgttggagaaactagcgtgctcatt

SEQ ID NO: 152352 - DNA, 380 bp, Arabidopsis thaliana columbia
gagttagtaagaagttggggtttgattaacgttttgcatcggagatgggtttggtgatgaggtttgatctttacggtatgtttgtgatgttgatgggtttagggtttacgatatcaaatggatacaagttctatgttggtgggaaagatggttgggtcccgactccttccgaagattattctcattggtctcaccgaaaccggtttcaagtcaacgacactcttcattttaagtacgccaagggaaaagattcagtgttggaggtgactgaacaagagtacaacacatgcaacacgacacaccccctgacttccctctcagacggagactctctcttcctacttagccactcaggttcctactttttcattagtggcaac

SEQ ID NO: 152353 - DNA, 416 bp, Arabidopsis thaliana columbia
  unsure (1)..(416): unsure at all n locations
cgaaaagaagatgaaggtgatagataagatccagtcattagccgacgaaggcaaagcagggttttccttcgaattcgtccgaccaaagacagaanatggagtcgacaatctctttgagagaatggatcgaatggttgcttatggtccaacgttttgcgatatcacttggggagctggtggatctaccgcagatctaacgcttgatatagcttcgaggatgcaaaacgttgtttgtgttgagagtatgatgcatcttacgtgtactaacatgcctgttgagaagattgatcatgctcttgagactattagatctaatgggattcagaatgtgcttgctcttagaggtgatcctcctcatggtcaagataagtttgttcaggttgaaagtggttttgattgggctttggatcttgtta

SEQ ID NO: 152354 - DNA, 417 bp, Arabidopsis thaliana columbia
  unsure (1)..(417): unsure at all n locations
tggacgagtatacagagctgagtttgatgatggaaaggttcttgctgtgaagaaagttgagtcgtctgctctcccacatggcatgaccnatgatttcattgaaatggtatcgaaaatagccaatttggatcatccaaatgtgaccaagcttgttggttactgtgctgagcacggacaacatctcgtggtctatgaattccacaaaaatggatcattacatgacttcttacacttatcagaagaggaaagtaaagcattggtgtggaattcacgagtcaagatcgctcttgggactgcacgcgcattggagtatctgcatgaagtttgctcaccgtctatagtggacaagaatatcaaatcagctaatattttactcgattcagagctgaatcctcacttatcagattctggtctcgc

SEQ ID NO: 152355 - DNA, 412 bp, Arabidopsis thaliana columbia
agggaatatgggattttgaccgcttaagcaagccctatatccagaagaagtttctggaggagaaatttggagattggtggccttttattgcatcaaactttcttaatgaaactcagaaggacatgtatgagttcaaggaggactgcaacacagagaagaagattgtagcaaagctgaagtcattggctgagaagtctttgttgctagaaaatgaggacaaagttcgacgtgatgtctttgacattttacggaatgttgttctgatcaaagatccagaggatgcaagaaaattctatcctcgctttaatattgaggatacttcaagcttccaggatttggatgatcacagcaaaaatgttctgaagaggctatactatgactactatttccaacgccaagaggatctatggag

SEQ ID NO: 152356 - DNA, 341 bp, Arabidopsis thaliana columbia
agacagcactagatacactacagagacatagagagatcttgacaagattcgtaagggaagaggagtgaacaatggcgggaatgaaagttctctcggttctctttttggttccggccagccttcttccgctgctgctgccacaattgggactactactactacaaccaccacaactaccaccgatgggaccggaggccgaccgattaccaccactactaccacagtcactgataacaataagacatctgcaggtgttagaggaagtcctaataattacttcagatcagaaggccaaaactgcggaaactttctcacggacaggccatctactaaggttcatg

SEQ ID NO: 152357 - DNA, 340 bp, Arabidopsis thaliana columbia
caaaaactttacattcttaacaatttcaaccctatgggcttacttgatcaggtgtgagatgatactgacggtggggcacaaccaaagaacggccttggcaagcttcgtaaacaccataccttcagtttccgacctagctccggcaatgatcaatctgaagctggaagtgcgagatcgtacggtgaggattcgctaccggaagaagcagtgaaagttacacgtagtatcatgataattaaaccaccgggttaccaaggcagttcatctccagcttcacctgccggatcaactccaacgctatcacctttctcttcgccgctgtctacgatctatgagcaaa

SEQ ID NO: 152358 - DNA, 402 bp, Arabidopsis thaliana columbia
cttttaacacttgttcttttaatgcaaaaaggctcgagccacagagatcggagttggtcttcttcgagagcggagcgccgaatctcataatctcccatcgaagcagaatggagacttttctattcacatctgagtctgtaaacgagggacacccagacaagctctgtgaccagatctctgatgcagtcctcgatgcctgccttgaacaagaccctgacagcaaagttgcttgtgagacatgcaccaagaccaacatggtcatggtctttggtgagatcactaccaaggctactgttgactacgagaagattgtccgtgacacctgtcgcgccattggatttgtctctgatgatgttcgtcttgatgctgacaaatgcaaagtcctagtcaacattgagcaac

SEQ ID NO: 152359 - DNA, 436 bp, Arabidopsis thaliana columbia
gggggacgcacgcgtccgctcaaaatcactaaaatcaaactcaattttcatcaaatatctctaatggcgccgagggcgggggagaagaaaccgggggagaagaaaccagccgggaaagctccggcggagaaactcccaaaggcggagaagaaaatcagcaaagacgccggaggaagcgagaagaagaagaagaaatcgaagaagagcgtcgagacttacaagatctacatcttcaaggttctgaaacaagttcatccagatgttggaatctctgggaaagctatggggattatgaacagtttcatcaatgacatcttcgagaaacttgctcaggaatcgtcaaagctcgctaggtacaataagaagccgacgattacatcgagggagattcaaaccgctgtgagacttgtgttgcctggagaactcgctaaacatg

SEQ ID NO: 152360 - DNA, 414 bp, Arabidopsis thaliana columbia
gtcgaaaaatggatcaaacagtatcggaaaatctcattcaggtgaagaaagggtcgtgcgggatcgccgtcgtcagaatcaaccgtccgaaatctctcaattcactcacgagagcgatgatggttgatctcgccaaggcattcaaggatatggactccgacgaatcggtccaggtcgtgattttcaccggatcaggtcgatctttctgctctggcgttgatttgactgcggcggagtctgttttcaaaggagacgtgaaggatccggaaaccgacccggttgtgcagatggagcggttacgtaaaccgatcatcggagctattaacggttttgccatcaccgccgggtttgaactcgccttggcctgtgatattttggtcgcttctagaggagctaagttcatggatactcacg

SEQ ID NO: 152361 - DNA, 421 bp, Arabidopsis thaliana columbia
cttgttccatctttcatgtgagagagagagttgaattttgcagatgagtgggaggagaagcaaagcggaagggaagaggagcttacgagaactgagtgaggaagaggaagaagaagaagaaactgaagatgaagatacttttgaagaagaagaggctttggagaagaagcagaaaggtaaagctacaagtagtagtggagtttgtcaggtcgagagttgtaccgcggatatgagcaaagccaaacagtaccacaaacgacacaaagtctgccagtttcatgccaaagctcctcatgttcggatctctggtcttcaccaacgtttctgccaacaatgcagcaggtttcacgcgctcagtgagtttgatgaagccaagcggagttgcaggagacgcttagctggacacaacgagagaaggcgg

SEQ ID NO: 152362 - DNA, 419 bp, Arabidopsis thaliana columbia; identical to SEQ ID NO: 130607

SEQ ID NO: 152363 - DNA, 432 bp, Arabidopsis thaliana columbia
  unsure (1)..(432): unsure at all n locations
cggaanncccggggggacgcgcacgcgtccgaaaaaaaagaaaacacaaaaacaaagattataatggcttcctcaaccatggctttggcctgccctgccttcgccgggaagggtgtnaaacctgccgcatcagatgtcctcggaagcggccgtgtgaccatgaggaagactgtcgccaagccaaagggtccatcaggcagcccatggtacggatctgaccgagtcaagtacttgggtccattctccggcgagcccccgagctaccttaccggtgagttccccggtgactacggatgggacaccgctggtctatccgccgacccagagaccttcgccaggaaccgtgagctagaagttatccacagcagatgggccatgctcggagccctaggctgcgttttccctgagctattggctaggaacggagtgaag

SEQ ID NO: 152364 - DNA, 417 bp, Arabidopsis thaliana columbia
atcagatcttagctaaattgagacaagctcaaaatgagtaagcttcaaagtgagggcgtgcgtgaagccatcactgctagtgacagggaaatccgaggcaaagaaacgtaactttgtcgagactattgagctccagatcggtctgaagaactatgaccctcaaaaggacaagcgtttcagtggatctgtcaagttaccacatatcccccgtcctaaaatgaagatctgcatgctcggagatgcccagcatgttgaagaggctgagaagatggggttggaaaacatggatgttgagtctctaaaaaagcttaacaagaacaagaaactcgtcaagaagcttgcaaagaaataccatgctttcttggcctctgagtctgtcattaagcaaattcctcgtcttcttggcctggtcttaac

SEQ ID NO: 152365 - DNA, 420 bp, Arabidopsis thaliana columbia
  unsure (1)..(420): unsure at all n locations
aaaaaaaaaaaaaacagaaagtaacattagatctctcttattagccgtgtgcctnggtctggctttacactgcggtgaaggagccntntcttgcaacacggtgattgcggatctttacccttgcttatcctacgtgactcagggcggaccggtcccaaccctctgctgcaacggtctcacaacactcaagagtcaggctcaaacttctgtggaccgtcagggggtctgtcgttgcatcaaatctgctattggaggactcactctctctcctagaaccatccaaaatgctttggaattgccttctaaatgtggtgtcgatctcccttacaagttcagcccttccactgactgcgacagtatccagtgagacaagcagaaaatcttaaaggaagctactacaagaactataataacctaata

SEQ ID NO: 152366 - DNA, 410 bp, Arabidopsis thaliana columbia
cggacgcctggggagatatcgatcttacgaataagcaaatatggcggtcccattggttagcaagaaggttgtgaagaagaggtcttctaagttcatcagaccccagagtgaccgtagaatcaccgtcaaggaaagctggaggaggccaaagggtattgattcaagggtgagaagaaagttcaaaggtgtgactttgatgcccaatgttggttacggatctgacaagaagactcgtcactatcttcccaatggattcaagaaattcgttgttcacaacacaagtgagctcgagttgttgatgatgcacaacaggacttactgtgctgagattgctcacaacgtcttcactaagaagagaaaggcaattgttgagagagcttctcagctagacgttgttgttaccaacaggc

SEQ ID NO: 152367 - DNA, 423 bp, Arabidopsis thaliana columbia
cttccgtgtcacaagaaaccatgaaactttctcttcatcaaccacttctcttcttgttcgtagccagcgtcctccgattgatcctgaccgtccattctcaatcagacgactcagatttcatccgtactagctgcaacaccacattataccctgacctatgcttctcttctctttcctccttctctagctctgttcacaacgatccagccctcttggctcgagccgccatctccgtcactctcaccaagactctcgacttagcctcatacctcgccaatatcaccactctccagccagagagcaacgaagatggtgctcaccacccaaccgcagccgctgtttttcacgactgcttcgacaatcttaaagacgcggtcgaagaaatgaaaggctcgatgaaacagatgagggagctggtctcgg

SEQ ID NO: 152368 - DNA, 379 bp, Arabidopsis thaliana columbia
ctctcaacaacaacaatggcatttctttaacaaactctattctctcttcaagccagactcccaccatcctgggtggaaatcaccaaatctctcccactccaaaaaaccttcccaatcctaatcaacaacggtggaaacgccccctgagcaagaatgtcatccaccgcagcatcaagctacgcgatggcattagcatacttctcgaaaagaaaccacacaatggaattaacagccacagacatcgagaagctcgaacaagtcttctcagatccacaagtcctaaacttcttcgcgaatccaacaatcaccttcgagaagaaacgtcaagtcatctacaacatagcgaaatcgtcgtctcttcaatctcacacatctaact

SEQ ID NO: 152369 - DNA, 419 bp, Arabidopsis thaliana columbia
  unsure (1)..(419): unsure at all n locations
gcgattttctccacatcacatcttctcttcatctccttcatcatanccacatgtagaatgtctgtctccggtacagcctggaccttaacaaaccattgcggctccacaatctggcctggaatcctcaccgcaaacggcgcacaactcggcgacggcggatttgccttagcttcaggatcttccgtaaccttcaccgtttctccaggttggtccggtcgattttgggctcgaacgtattgtaacttcgacgcctcaggctcaggtaaatgcggtaccggggactgcggcagcaagttaaaatgcgccggcgcaggaagagctccaccagccacactcgccgaattcacaatcggctcctccggaaagaaaaacgccgtgcaagatttttacgacgtgagcctcgtagatggttataacgt

SEQ ID NO: 152370 - DNA, 346 bp, Arabidopsis thaliana columbia
atactgaccaaacacaacctcaactgcttcaacattattccaatctgtcaggtctggttgtcttcacatgtttttaataacttcttctcttccttcttcattcctttaatccatttttctcgatcttggctaatccatcatgactgtcaagaaagttgagatcaaggtggatataaactgtggaaaatgcaacagcgcaatcatggaagcagtcacagagatagaaggtgtgaatcatatttcattagatgaaggaaatagtatacttaccgtggtggggacaatggatccggtctgcgtagcaacaaggctgaaaaagataaacagaaacctgtgatcattagcg

SEQ ID NO: 152371 - DNA, 387 bp, Arabidopsis thaliana columbia
ctctctctctcttttatctctgagattgcttcttcgctattgctcaattctctcgctcacctaaccctaaggtatgcattattcctgagattcatcggcgatgagttcggaggaagccaaggtcgttgttccgaggaactttagattgttggaagagcttgaaagaggtgagaaaggtattggagatggtactgttagctatggaatggatgatgctgatgatatttatatgcaatcttggactggcaccattcttggtcctcctaatactgcatatgaagggaaaatctttcagctgaagctcttctgtggtaaggagtaccctgaaagtccaccgactgtgaggtttcagacccggataaacatggcttgtgttaacccagaaac

SEQ ID NO: 152372 - DNA, 370 bp, Arabidopsis thaliana columbia
gtctgaatctcacaagaagaagtgaaagatggtgaagatatgttgtattggagctgggtatgttggtggaccaacaatggcagtgattgcattgaaatgtccagacgttgaagtagcggttgttgatatctctgtaccacgtatcaacgcttggaacagtgacacgcttccgatttacgagcctggtcttgatgatgttgtgaagcaatgccgtggcaagaaccttttctttagtactgatgttgagaaacatgttagggaagctgatattgtgtttgtttctgtcaacacaccgactaagactagaggtcttggtgctggtaaagctggggatcttacgtactgggagagcgctgcgcgtatgatcgct

SEQ ID NO: 152373 - DNA, 413 bp, Arabidopsis thaliana columbia
gaaagatcaagatgaggacgtggaagtcgtgggaggaagagacaaagacaatagggtatgagtattccaacgatcgtgagaggttcaggtttgcgagggacacatcttttgggagaagacatctcaatttctggagcaagacgagagtcacactatggattgtttgtttttttagacagttctttggatctgtcaccaaagttgattacttagcactaagacatggtttcatcatggcgcattttgctcccggtaacgaatcaagattcgatttccgcaagtatattcagagatcattagagaaagacttcaaaaccgttgttgaaatcagtccggttatctggtttgtcgctgtgctattcctcttgaccaattcatatggatttacgtcttacctctggttaccattcatt

SEQ ID NO: 152374 - DNA, 397 bp, Arabidopsis thaliana columbia
gaagctctctgttcaaatcaaaaagagagatcgtacgcaaaagtttccgatatgggtcgggcgtttggagcaaacaggactgttgtgcttgcgatcatcttcttcggatgtttatttgcgttttccactgcaaaagaagaggctacgaagttaggatcagttattgggatagatcttggtaccacttactcttgtgttggtgtttacaagaatggtcatgttgaaattattgccaatgaccaaggaaaccgtattacaccttcatgggttggttttactgactctgaaaggctcattggtgaggctgctaagaatcaggcggctgttaatcctgagaggactgtcttcgacgttaagagattgatcgggcgaaaatttgaggacaaggaggttcaaa

SEQ ID NO: 152375 - DNA, 312 bp, Arabidopsis thaliana columbia
  unsure (1)..(312): unsure at all n locations
gcgtccgccgnttcaagtcaacgttcccttcgtttccttccaccttcttcttcacaaaaatcgtaggtttcatataaatttggccatatttttagatctccatttgatctgagtttgtattatcacaaagttttatcttcttttttttcactcttcagtcttgatctctcgattattgcccaccaagtgatcgatcttttgtctcactgaactcggttacgcttgagatttgatctaacagctgaaagtttctgactttttgggtttttgatttcgattttcatggcgtatcatccggcttattactgagac

SEQ ID NO: 152376 - DNA, 408 bp, Arabidopsis thaliana columbia
attgtgattcaatggatatctttgtgagttttgttgtgtttatcctttcagggtggtctgttgaatctacgatgcgtatgaaatccatcaagttgggtaaaaatgttatttacgactgcatggatatttataagcaaccatctcttagtcatccattgctcaaacatcataatattcggatgaaaccaacaggatgggattctcaatcagagaataaatttgcagaaagaagacacaacaataaaatagaatgtccaaatggaaccgttcctattttaagagccaaggaaaaacatgtcatacaatatcaagaataccccatcaataattttaccgttcttacagctaaatatccgggtacccatattgcgggaatgaaagttgtagaaaaacataattacagaggcg

SEQ ID NO: 152377 - DNA, 382 bp, Arabidopsis thaliana columbia
  unsure (1)..(382): unsure at all n locations
cgataattatgaacaaaggcgttggatccggtggcggatcctgtggaggaggctgttcaactttctccggcgccggcgctgctttacagaatcaaaaggcgttgttacagagagtggagactgacatcacatctgtcgtcgataacttcacgcatatcgtcaatgtttcaagggtgagtgatccgccggttaataactttcatgagacatacatgatgtagatgcgagcttctataatggttcaagctgctgattctcttttgaaactcttttcaaaacttaagcaaacagctatatttttaggattttcatcacttaactatcatgtataacaaagaatttatgagttttatcaaanagctctataatacaaatctattgt

SEQ ID NO: 152378 - DNA, 416 bp, Arabidopsis thaliana columbia
cagaggttaactctggaaaattcccagcagtgcggagaaggaagtttattgttgtgatgggtcttgattttgatggggaagaagacacgctagaggctacaaaaagaattcttgatgcggttgaaaaggaaagagcagaaggatctgttgggttcatactgtcgacatctctaacgatctctgaggtacaatctttcttggtgtcaggaggcttaaacccgaatgatttcgacgctttcatatgtaacagcggaagtgatctccactacacatccctcaacaacgaagacggtccttttgtcgtagacttttactaccactcccacatagaatataggtggggcggtgaagggctgaggaagactttgatcccgtgggcatcttcgcttaacgagaaaaaggctgacaatgacgag

SEQ ID NO: 152379 - DNA, 417 bp, Arabidopsis thaliana columbia
  unsure (1)..(417): unsure at all n locations
gcgcttctttctacaaatgggtttccaaagatctatctcttcttcttctgcattgaaggggcttggatttgtaacagcggtttgggttcaatccatctccggcaacaactacactttttcaaactactccggtgctcttaagtctctcatgaatctcaaccagctcgagctcaacaacctctctgtcgctaaagacgtcggaaaagcctttgggatcctggctggccttgcctctgaccgtcttcccactccggtcatcctccttattggttgctttgaaggtcttcttggttatggtgtacaatggctcgttgttagccgcaccatccaaccaatcccttattggcagatgtgtatattcctctgtatgggagggaacagcacaacgtggatgaacacggcngttctagtgacttg

SEQ ID NO: 152380 - DNA, 416 bp, Arabidopsis thaliana columbia
gaaagattttattgatgggtatatagaaactataggttataaataccatagtggggaataaatctataacggtggaattcacatgaagctcaccaatttcacctatatacttagctctcaagatagactactaaaaaagaccccaaatttagcaaaaaatggaagccttgtggaagttggaggagaaactgaagctaactacgaaagaagccgttgtgatcttggtcggaacagcggctgcggtaacgctactctgcatagccgcagcgtttctcaaccgcaattctcgagggaagcaagtagcagacgcagagtgggcgtctgaaacagcgtttgggtcaaggactatggaggaaaagaggaaatgtaagtggagcaaagtgaaaagaacgttgatgggttctttttgttggagc

SEQ ID NO: 152381 - DNA, 415 bp, Arabidopsis thaliana columbia
gattttctacttcttattacaaagattcaatcttcttgtttcttcttgcaaccatgagtgttcttgcagatcttggtaaccttgacatctcagacaacagtgaaaagatcatcgctgaatacatatgggttggtggttctggtatggacatgagaagcaaagccaggactctccctggacctgtgaccgatccatcaaaacttccaaagtggaactatgatggttcaagcactggtcaagctcctggtcaagacagtgaagtgatcttataccctcaagcaattttcaaagatccattccgtagaggcaacaacatccttgttatgtgtgatgcttacactccagcgggagagccaatccctactaacaagcgacatgctgcggctgagatctttgctaaccctgatgttattgc

SEQ ID NO: 152382 - DNA, 440 bp, Arabidopsis thaliana columbia
  unsure (1)..(440): unsure at all n locations
gaannnccgggggggcgcacgcgtncgcgccgataatcctctctctctagaaaacatgactgccgaacagaaagtggagctgggcggcaaattggaagagcagaagatcgatcttgataaacctgaggttgaagatgatgatgacaatgatgaggatgattccgaggacgatgacgaggcggagggacatgatggggaggccggtggccggtcaaagcaaagcagaagtgagaaaaagagtcgtaaagctatgttgaagcttgggatgaaaccaatcactggtgttagccgtgtcaccgtcaaaaagagcaagaatatcttgtttgtgatatcaaaacctgatgtgttcaagagtccagcttcagatacatatgtgatctttggtgaggccaagatagaggatttgagctcgcaactgcagagtcaagccgcagagcagt

SEQ ID NO: 152383 - DNA, 347 bp, Arabidopsis thaliana columbia
aacaaaagccctaatttacgaaatacgccgaatcgttgacgagaatggagtttgcgaatgcgagtacctggagaagacggttgaggaaggagctgggtcgaataagaaaaaggaagagagtgggaacgagaggagcgagaggagttacagaaagagagaaggaggagagaggcagggggaagaaggaggtgaagaagagcgggttagcagtcggagtaagaagtctcgcggagacagcgaatagaacggtcgttgttagagggatccagagagagagaggcataggagcagcagagacaaggatagggagagggataaggttagagaaggattctagagataaagag

SEQ ID NO: 152384 - DNA, 416 bp, Arabidopsis thaliana columbia
  unsure (1)..(416): unsure at all n locations
ggcaaaaacaaaattctcgatccccaaatttcgaaaacttgttcttagggcgattgttcgctttggtcatttggcgagatttgatttatatccatcggtgatcggatttttttcagtcttctccgtctcgtcgttaccggcgtttgatcggatcatcgttttgtttcaggcgaaatatggtggtgatctccctgaagattttgaattcaaaatttcttcggttgcttcctcttgactttatcgcgatttcgattacgtgtagactttcttcttggctttgtcttcgaatcaattaggattgtgaataatcgtgtctgtgtatataagactggtgattgattattagggcatcggttggcaggagaatagattgtttttttntttggtgtgtgttggatctttagatctttgactga

SEQ ID NO: 152385 - DNA, 408 bp, Arabidopsis thaliana columbia
gtcacataccaaagcaaaaacatggatcgttgcacgtcgtcgtttttgctggtcagattggtctctaccttgtccgttctccaaatctcctttgctcaacttgttccagcaatcatgacattcggtgactctgtagttgatgtcggcaacaacaactatcttccgacccttttcagagctgattatcctccttatggccgtgatttcgctaaccacaaagccaccggtcgtttctgcaacggcaaattagccactgatataactgctgagactttaggcttcactaagtacccaccagcttatctaagtcctgaagcttctggtaagaatcttctcattggtgctaatttcgcttctgcagcttcaggttatgatgacaaagctgctcttctcaatcacgcgatcccg

SEQ ID NO: 152386 - DNA, 396 bp, Arabidopsis thaliana columbia
gggaatttaaagatgtgtatgaaacatggcagtcacctcagaaggtgagtggctggagggattgctcgcctagaaaaggaagatatgatgaaagtacgactgagaaacaaatggctcttgttcgtcaaaagttctcagaagcaaaacgccttgtaacagatgatagtcttcaccaatccaaagagttccaagatgcacttgaagtgttaagctcgaacaaggatttgtttgttcaatttctccaggaatcaaattctttctctcagcagaatctttctgactttcaccatgttcctcctcattcagaggcgaagcggatcacagtattgagaccttcaaaggctggtgaaactgaaaaatatgtggttcaagggaggaggaacaagcaggttaaga

SEQ ID NO: 152387 - DNA, 417 bp, Arabidopsis thaliana columbia
tggtgctttagctttggtaaaatgaagatatactctagaacggttgctgtttcacgtgagtggtgtcattcctcctgtgtggctctgcctttgctgagcgcaatgacgggaccttcagagttggactgaaaaaactcaagttggattcgaaaaatcggcttgcagcacgcgtcgaatccaagcaagaaaagcccctgagagcttacagacttggagattctggagatgctgatgttgttgtgcttaagaattatctagatgctcagtactatggtgagatcgccattggtactccacctcagaagttcactgtggtttttgacactgggagctctaacctctgggtgccatcatcaaaatgctatttttcacttgcatgttttttgcattccaaatacaagttgtctcgttcaagca

SEQ ID NO: 152388 - DNA, 417 bp, Arabidopsis thaliana columbia
gcgacttaacggcttccctccagcgactctacgagtggttatgtctgatgctgcggggggattatcgtttgggaagtttctggagctcagtttctcaaatcacgcagctgctagtagagtagcttgttgtggccattctctgcatagagattgtcttcgcttctatggatttgggaacatggttgcttgcttccggtacgctactatagatgttcattcggtctaccttccaccatcaattcttagtttcaactacgagaatcaggattggatacagagagagacagacgaggtgatagagagagcagagcttctgttttctgaagtattaaatgctattagtcaaattgcagagaaaggtttcaggcgacgaattggtgaactcgaagaagtgctgcaaaaagagaaaggcggatt

SEQ ID NO: 152389 - DNA, 417 bp, Arabidopsis thaliana columbia
  unsure (1)..(417): unsure at all n locations
taaacggattgctttgaagagaaacgttcaagagaaaccagtcgttgcttgtgtggataagaaagtaacaaagaggcagcaagaagaggagaagatcgagaggcttgtgcgggactattcagcttctaatgatatagtgagcttggactggaaaaaaatgaagatacctcctgttctttcttctactgaacatgcttggttgttcaagttgatgcaacctatgaaggctcttcttgaagtgaaagatgtattgcaaaagagcttgggaagagagcctagggaagctgaaatagccggggagatcaatatgactgcgggtgaagtaaaaaagaaaatcgaaataggtagagctgcaagaaacaaacttattaagcacaatcntccgcttgtcttgttgttatgaacaaatactttcat

SEQ ID NO: 152390 - DNA, 413 bp, Arabidopsis thaliana columbia
attccgagaaagacaaccaaattttccttttcctctgcaaaaatgtttattgagagcttgaaagttgagagcccgaacgtgaagtacacagagaatgagattcactctgtgtacgattacgagacgacggaggttgttcatgagaagaccgtcaatggcacttaccaatggattgtgaagccaaagactgtcaaatacgatttcaaaaccgatattcgtgtccccaaattaggggttatgcttgtgggtttgggaggaaacaatggatcaactctcaccgctggtgtgattgcgaacaaagaaggaatctcgtgggcaacgaaggacaaagtgcaacaagcgaattacttcgggtcactaactcaagcttcatcgattcgtgtcggatcttttaacggtgaagagatctatgc

SEQ ID NO: 152391 - DNA, 408 bp, Arabidopsis thaliana columbia
caaaagttccattctttttcacaaagccattgtgctgttttctccatttggatcagaatggttgctgagaacaatgaaaacaaggacgtaacactctctgcatcaatggacaacaacaacaacaacatcaaaggaactaacattcatcttgaggttcatcaaaaggaaccagctttggtcaaacctgaatccgagacacgaaagggcctttacttcttgtcgaatcttgaccagaacatcgccgtgattgttcgtacaatctactgtttcaaatccgaggagagagggaacgaggaagcagtccaagtgatcaagaaagctctgagtcaagttcttgttcattactatcctctcgctggacgcctcaccatcagtcctgaaggtaaactcacagttgactgtaccgaa

SEQ ID NO: 152392 - DNA, 421 bp, Arabidopsis thaliana columbia
  unsure (1)..(421): unsure at all n locations
cagaaagttaaatgctactgacatttatggtgccaatacaattgaaacatcactcgattggcggtttgaaaacttgctggctctcanatgttctgttcaggaacaccatatatttgaaaatgttggggagaaacgaagaaaaatcagcaaaatcatgttgctaaaggatgaaaaagagcctcctctccccggaacaattgagaaagatctaacagagctggaagcaaaagagcgattgattagggaagagtttgaagataaattatatctgtggctcatccataaggtgactgaagagggcaagggtccaaatatattagatgaagatggacagggtgttctacacctagccgcagcgcttgggtatgattgggcgataaagccaatcttagcagcaggagttagcatcaactttcgcgat

SEQ ID NO: 152393 - DNA, 419 bp, Arabidopsis thaliana columbia
gggaaccttctggaaagattcctcagtcatctctccacagtggaaaaagtgggaaagagagagaacggagagattgtggacgacaatcatctttatttttggtttcccttactatcaggtttatcagagcttagtttcgatccaagaccagaaatcaggaaaagcgcactacagattatgtttgataccttacgcaaccatggccatttattttctctgccgttatgggaaaaagtattcgagtctgtattatttcctatattcgactacgtacgccattctattgatccttctggcgaagacgaatctgctgatcaaggaagttctggtggtgaagtggatgagctagatcatgacgcctggctctacgagacctgtacattagcactacagcttgtagtggatctctttgtcaaatt

SEQ ID NO: 152394 - DNA, 419 bp, Arabidopsis thaliana columbia
gttactttagaaaaccaattataaaaatctcctctttcttcatcaaattccacagagcatcagtttcttctccttctccaagctctcgcatcactttcatcgatttttcctctctgcgtcgatccttcagacatcggcgtcggagtttccgacaggaatctaaaaatgtcacgtggaagaggagttcctatgatggacctgaaacgaagttatgatgttgaagacagggtggtgtccgtgtctataccatcaataatcgaagctgatgaggctgatctgtggccactacctgagattgataccaagaagtcgaaatttccttgctgtatagtttggactcctcttcctggtgtctcttggttggctcctttcattggtcatattggactttgcagagaagatggagtcattttggactt

SEQ ID NO: 152395 - DNA, 415 bp, Arabidopsis thaliana columbia
gaagaagggcgtgatgagtttcggaagtaccatgcttctgctattcatgttcctggccctgaagtagcaagattggctgacgtggctaggaaaaaccatgtgtacttggtaatgggagccatagagaaggaagggtataccctctattgcacagttcttttctttagtccacagggtcagttcttgggcaagcaccgtaaactcatgcccacaagtttggaacgttgcatttggggccaaggggacggatcaaccatccccgtttacgacactcccattggaaaactcggtgctgctatttgctgggagaataggatgcccctctacagaactgcattgtacgccaaaggcattgagctttattgtgcacctactgctgatggttcgaaagaatggcaatcgtcgatgcttcaca

SEQ ID NO: 152396 - DNA, 379 bp, Arabidopsis thaliana columbia
gtgttaaaccagagtaaagcttgaaactttggactaaaagaatggcgtctgtgggggtgtcggaaatgctgggtagtccccttaacttcagggcagtttcaagatcgtctgctccgttggcatcaagcccatccacgttcaagactgttgctctcttctctaagaaaaagccagctcctgctaagtccaaggctgtctctgagactagcgatgagctcgccaagtggtatggtcctgacaggagaattttcttgcctgatggtcttttggatagatcagagatcccagagtacttaaacggtgaagtttgctggagattatggttatgacccatttggtcttggaaagaagcctgagaactttgctaaatccaagcttt

SEQ ID NO: 152397 - DNA, 409 bp, Arabidopsis thaliana columbia
gcacaagcaacatttagcttctgcaaactccagttcatctctcaacgctgatatcgccgtgttttcgggctctagtaccgcgagctcggacgaaccaggaagcaatccgttaatctagaagcggtgttgagaagatgacgattacatcaaatatctctgtacagaacgataacctcgttgttcaagggaagactatccttaccaaaatccctgacaacattatcctaactccggttaccggtaatggattcgtttccggttcatttataggcgcgacgtttgaacaaagcaagagtcttcatgtgttccccatcggtgtattggagggtcttcggttcatgtgctgtttccggtttaagctatggtggatgactcagagaatgggaagctgtggaaaagacattccttt

SEQ ID NO: 152398 - DNA, 425 bp, Arabidopsis thaliana columbia
gcgaaaaaagcatcggagatatgtcgtttaaggacaagaaactatcgaagccaacgggtggtcgtactggtggtatgcgtgcactttccgatctgaaccgaagatcagaacctgattccgatagtgactccgatggacctcaagaatacttcaccggtggcgaaaaaagtggtatgcttgttcaagatcctacaaaagaaccaaaacacgatgatgttgatgagatatttaatcaagcaagacagctaggagctgtggaaggacctcttgagcatccttcgagttctagaagctttacaggaacaggaagattgctttctggagaaagtgtgccaacggctcttcaacagcctgagcctgtgattcacaatattattttctggtctaatggattcactgtagatgatggacctttgaggaagttg

SEQ ID NO: 152399 - DNA, 321 bp, Arabidopsis thaliana columbia
tatccattggcggattagcctcagagtgctctgatcaaggttttggaggttgcatttgagtgaggagatgttttcggctcagcataagattcataaggagaagggtgtggaactttctgaattggatgagcaagttgctcaggctttctttgatttggagaacaccaatcaagaattgaaaagtgagctgaaggatttatacgtcaactcggctgttcaagttgatatctctggaggacgcaaggcaattgttgtcaatgttccttacagactgataaaagcttaccggaaaatccatgttaggcttgttcgtgaacttgt

SEQ ID NO: 152400 - DNA, 290 bp, Arabidopsis thaliana columbia
  unsure (1)..(290): unsure at all n locations
gtttctcgccatcgacgactaccacaacaaaatcacatatcttctctatcnatctgcaagcatcatcttcttcctaactgcaggtgtatttatgttctttgcanatatgtctccagcaacaaagtcaaagtctaaggataaaaaaactggtaaagaagctcaaaaggcatcaccaaagccttcactttcggttaatgggaatagcatcttggcagctagtggttataatccttttttaggaacatttcaagctcttgattcattgtctatagcttttatctcaccattac

SEQ ID NO: 152401 - DNA, 226 bp, Arabidopsis thaliana columbia
  unsure (1)..(226): unsure at all n locations
gtttcttcttctttaaccaagcttgtgttctttggttgtctcctcctgctgacatgcacngacaaccttgtggctggaaaatctggcaaagtgaaactcaatctttactaccaatcactttgtcccggttgtcaagaatttattggccattacctaagtaaaatctttgactacgatctttacacaatcactgatctcaagctgtttccatttggtaatgcccaac

SEQ ID NO: 152402 - DNA, 413 bp, Arabidopsis thaliana columbia
atccaacaaatcttcttcttcttcttcttcttcgatcatcatggccagtaggaagggtcacggagttcccatgtccaccgccacaatgcgcgtcctcgctactctttacgagaaagatctccagttcgagctcatccccgtcgatatgagagccggtgcccacaagcaagaggcccaccttgccctcaaccccttcggtcaaattcctgctctcgaggacggtgatttgacgcttttcgagtcaagagccatcacacagtacctagcagaggaatacagtgagaaaggtgaaaagcttatctcccaagactgcaagaaagtcaaggcaaccactaacgtatggcttcaagttgaaggtcaacagtttgaccctaacgcctttaagcttgccttcgagcgtgtctttaaaggca

SEQ ID NO: 152403 - DNA, 359 bp, Arabidopsis thaliana columbia
gttcatgaggtagtaacagccagagatgggaatatcataatgttacattcattagaagaaaataagtaccgggacataaacacaagataaaacttgatctctacgttcttacatgattcatcaaacgaaaaacattagagcaattatcctaagaaattaaaacttgataacacagcaatcagaaatcgaaaccacccatgtcacccatgtcacccatgtcacccatatcagcgatgtcagaaaccgcttcaccaaccaacaacccacccaataaaccagctccaagcccaagtcctagtcccattccagctccagccttaccatgcttcttcggtttctgcggtttaccatgagcttgc

SEQ ID NO: 152404 - DNA, 415 bp, Arabidopsis thaliana columbia
tttctctctaagagattttgtaggtgacaatcaaaagtttgacaaaatggtgaagtttacagctgatgagcttcgagggattatggactacaaacacaacatccgtaatatgtctgttattgctcatgtcgaccacgggaaatccactcttactgattctttggttgctgctgctggtatcattgcccaagaggttgctggtgatgttcgtatgactgataccagagctgatgaggctgaacgtggtatcactatcaagtccactggtatttctctctactacgagatgactgatgaatccttgaagagtttcactggagccagagacggaaacgagtacctcatcaatcttattgattcacctgggcacgttgacttttcttctgaggttactgctgctttccgtattactgat

SEQ ID NO: 152405 - DNA, 414 bp, Arabidopsis thaliana columbia
gcaatggtatcctctttgagcctggggaacacccggaccatgttgttgtcgtgaggtatgtaccgtatgtggcgggtagtaagcgagccatggacgagtacacatcagagatattcatgggagggaagaacacaattgtgatgcacaatacctgcgaggactctctcttagctgctccaatcatcttggatcttgttctcctcgcggagctcagcaccaggatccagttcaaatccgagggagagggaaagtttcactctttccatcctgtggccaccatactcagctacctcaccaaggcaccacttgtaccgccgggaactccggtgattaacgcactgtcgaagcagcgggctatgctggagaatattatgagggcgtgcgttggactggctccggagaacaacatgatca

SEQ ID NO: 152406 - DNA, 417 bp, Arabidopsis thaliana columbia
agagattgagagagcgaagagaagccatcatcagccatggcgatgaagaatctacgttccctagctcgccggtctgggaggcgtttattcctcactcaagccacacgatcttcctcttcgttttcagctatcgattcggtgccggcttccgcatctccgacggctctatctccaccgccgccgcatcttatgccatacgaccacgcggctgagattataaaaaataagatcaagaagctcgagaatcctgataagaggttccttaaatacgcatctccacatccgatcctcgcttcccacaatcacatcttgtcagctccggagactcgtgtcactaccttgcccaatggtctacgagtcgctactgagtcaaatctctcggctaagaccgccaccgttggagtctggatcgacgct

SEQ ID NO: 152407 - DNA, 399 bp, Arabidopsis thaliana columbia
  unsure (1)..(399): unsure at all n locations
cccttctcccaatctcatcttctccgaaaacctttcttctcgcaaatgtctgtgaaaacatgtctggcgacnagcaccactttgaggccagcgaatccggagcttccaagacctatcctcaatcagccggtaacatccgtaaaggtggtcacatcgtcatcaaaaaccgtccctgcaaggttgttgaggtttcgacttccaaaactggcaagcacggtcacgccaaatgtcactttgttgctattgatatcttcactgctaagaagcttgaagatattgttccatcttcccacaattgtgatgttccacatgtgaaccgtgttgattaccagttgattgatatcactgaggatggcttcgtgagccttctcactgacagtggtggcaccaaggatgatc

SEQ ID NO: 152408 - DNA, 403 bp, Arabidopsis thaliana columbia
  unsure (1)..(403): unsure at all n locations
cggacgcgtgggcggacgcgtgggcggacgcgtgggcggacgcgtgggttcaatgtgcgagggttggggaccaccagatgcttccnacacttcctccaccagcgtcgcggcggcgaatctcctcccaaacgtccccttcgctttcttctcacgatccgaaaaactcggacgcgttgctgattggactcgagctctctcaaatccatcagctcgtccttacaccggatccaaatcagatccatcagcgatcttcgatttctcagcttttgcagtagattaaggatttggtctaacaaactcaagtggaaacgcctactaagactccgctttccgatttgtcgactgaaaaccaccgccgcgtcctaaaattcgacctaaatggagattcaatcaattccattac

SEQ ID NO: 152409 - DNA, 405 bp, Arabidopsis thaliana columbia
  unsure (1)..(405): unsure at all n locations
ctgagatttgttgacagtctctaaccatgggtaaagagaagtttcacatcaacatggtggtcattggccacgtcggttctggaaagtcnaccaccactgggcacttgatctacaagttgggtggtattgacaagcgtgtcattgagaggttcgagaaggaggctgctgagatgaacaagaggtccttcaagtacgcatgggttttggacaaacttaaggctgagcgtgagcgtggtatcaccattgacattgctctctggaagttcgagaccaccaagtactactgcactgtcattgatgctcctggccatcgtgatttcatcaagaacatgatcactggtacctcccaggctgattgtgctgtccttatcattgactccaccactggtggttttgaggctggta

SEQ ID NO: 152410 - DNA, 406 bp, Arabidopsis thaliana columbia
  unsure (1)..(406): unsure at all n locations
caaaaaaaaaaaaaacagaaagtaacatgagatctctcttattagccgtgtgcctggttcgggctttacactgcggggaagcanccntgtcttgcaacacggtgattgcggatctttacccttgcttatcctacgtgactcagggcggaccggtcccaaccctctgctgcaacggtctcacaacactcaagagtcaggctcaaacttctgtggaccgtcagggggtctgtcgttgcatcaaatctgctattggaggactcactctctctcctagaaccatccaaaatgctttggaattgccttctaaatgtggtgtcgatctcccttacaagttcagccctttcactgactgcgacagtatccagtgagacaagcaaaaaatcttaaaggaagctactacaagaac

SEQ ID NO: 152411 - DNA, 414 bp, Arabidopsis thaliana columbia
  unsure (1)..(414): unsure at all n locations
ctcgatttcttcatcgaattccccaaatctctctcatctctcgaccaaaatccnagggtgtccgtcatcatcctcgccggcgccagaaaacacttctgctccggtatcgatctcaattccctctcttcaatctcgacacaatcctcctccggtaacgacagaggacgatctagcgagcagctacgccgtaagatcaagtcgatgcaagcggcgattacagcgattgaacaatgccggaaacctgtaatcgccgctattcacggcgcgtgtatcggtggcggtgttgatctgattaccgcttgtgatattaggtattgctctgaggatgcgtttntctcgattaaagaggttgatctagcgattgttgcggatcttggtacacttcagcgattaccgagtatcgttgggtatgct

SEQ ID NO: 152412 - DNA, 412 bp, Arabidopsis thaliana columbia
ggaaaatgtactcagcgattcgctcgcttccactcgatggtggacacgttggtggtgactaccatggacctgttgacggaaccaatcttcccggtgacgcttgtttggttttaacgactgaccctaaacctcgtctccggtggacaactgagcttcatgagagattcgttgacgccgttactcagctcggtggtcctgacaaagcgactcccaaaactattatgagaacaatgggagtgaagggtctcactctctaccacctcaaatcacatcttcagaaattccgcctagggaggcaagctggcaaagaatcaactgagaactctaaagatgcttcttgtgtaggggagagtcaggacacaggttcatcttcgacatcatcaatgagaatggcgcagcaggagcagaacga

SEQ ID NO: 152413 - DNA, 277 bp, Arabidopsis thaliana columbia
  unsure (1)..(277): unsure at all n locations
gattaactttaagtaccaaaaatggcggctacaacctgaactatcaaggggggctttgaaagacgatgtgggtattgtgatcccaaccatanagcctgcttttagagcaatgggaccatttgcaccattaccacctgatcattgtccaagatggagacccttccataagaccggttccggggtatactacagctctacaaccgaatgattaacaggacctgtccagactatgatctcacaagatgggtgcgtgttgctcatggtctaaagaagatat

SEQ ID NO: 152414 - DNA, 379 bp, Arabidopsis thaliana columbia
aaaaaaatcaaccatggtttcgaaaccgctattctccctattgcttctcacggttgcattggttgtgtttcgaaccggaacccttgtcaacgctgaagattccgagccttcgagttcaacgagaaagcctctggtgaagattgtgaaaggtaaaaaattatgcgacaaaggatgggaatgcaaaggatggtccgagtattgttgcaaccatacaatctccgatttttttgagacatatcaattcgagaatctattctctaagcgtaacagtccagtggctcacgccgtcggcttttgggattaccgatcattcattactgcggctgccgagtaccagcctcttggtttcggtactgctggtgagaaacttcaagggatg

SEQ ID NO: 152415 - DNA, 409 bp, Arabidopsis thaliana columbia
cgaacccagtcaactcactcaacgtggcagtgatcggagccggagccgggggacgcgtagctgcaagagagctcggccgcgagaatcacaccgtcgtcgttttcgaacgtgactcaaaagtcggaggtctctgggtatacacacctaacagcgaaccagacccgcttagcctcgatccaaaccgaaccatcgtccattcaagcgtctatgattctctccgaaccaatctcccacgagagtgcatgggttacagagacttccccttcgtgcctcgacctgaagatgacgaatcaagagactcgagaaggtaccctagtcacagagaagttcttgcttaccttgaagacttcgctagagaattcaaacttgtggagatggttcgatttaagaccgaagtagttcttgtcga

SEQ ID NO: 152416 - DNA, 270 bp, Arabidopsis thaliana columbia
  unsure (1)..(270): unsure at all n locations
caaaacccaacaactctctatctagcacaaaagcctgacttttacaaagacaagcgttttcaacacactactgatggtgagaatcctctcttcaaagccatggcgttagaactatggcaaactctcaaagaagcaatccatgcttacacaggtctttctcctggtgtcttcttcactgctctagctctcgncttcgccatttaccaagtcatcttaagcttgttttgcctcgcccgttcgatgatgttaaccgacatcagagagctagat

SEQ ID NO: 152417 - DNA, 397 bp, Arabidopsis thaliana columbia
cggacgcgtgggtttcctctctcactctgcacacgaaggcgagagagagagagagagaaggagcgaagaatacgcggagagccatccaatttagggttagggctgcccctaatctggaaacctttgcctcgtttctgatctgttttccggatccgacttgaaggaaagaagacgacgacgcactaccaaaaacatgggcgcgaattcgcttccaacggatgcaaccctcgatctagatgagcagatctcgcagctcatgcagtgcaagcctctctccgagcaacaggtcagagcattatgtgagaaagctaaagagatcttaatggatgaaagcaacgttcagcctgttaaaagccctgtgacaatctgcggtgatattcatggacagttccatgat

SEQ ID NO: 152418 - DNA, 418 bp, Arabidopsis thaliana columbia
ctttctcttaaaagctttttctatatacaaacagaagcgtttgatactgtaaaaaagatgtagaaatggagactctgagtcgtttattggttttcatgtctctgttttccggtttagtttctggatttgctctgcaaaatcttccaatcacatcttttgaagaaagttacactcaactttttggtgacaagaacttatttgttcatcaagatggcaaatctgtccggttaacgctcgatgaaagaaccggttccggttttgtttcaaatgattattacttgcatggattcttcagtgcttcaattaaattaccttctgattatacagctggagttgttgttgccttttatatgtctaatggagatatgtatgagaagaatcatgatgagatagattttgagtttcttgtaacattaga

SEQ ID NO: 152419 - DNA, 415 bp, Arabidopsis thaliana columbia
cgataccgcaatggcgacggaggcgtccgctttttctttccttatatcgagaaaagcctcttcctcatatagagataactaaagagaaggtagcaagaactatacggccgtaacaatggctgtcacaaaacttattctctttgcttctgcattacttctaacagctctatttatcggcgttaatgcatccaggtccaatgaaacatggcatgaacatgcagttgagaacccagatgaagtcgctgccatggtggacatgagcattcgaaacagcacagagcggagaagattaggttacttctcctgcgccaccggcaacccaatcgacgattgctggcgttgcgaccgcaaatggcagctccgtcgcaaacgtttagccgattgctcaatcggatttggccgcaacgcaatcgga

SEQ ID NO: 152420 - DNA, 416 bp, Arabidopsis thaliana columbia
  unsure (1)..(416): unsure at all n locations
ctctctctttctcgtgagcttcaattctaatcggccgttcttcttcttcttgctggaatctctttactccaatgggggaggaccatgagttcggagatctatattccgacgttctccagccgtttcaacctcccgttgttctccctcctccgcctcctcttcctcaccgttcaatcgacctcaacctccgatcccaagatcaagatgtctcagaacctaattcagctccaatctctagggtttcggacaacgatgccgtaaaattatctactcaggacgcgactcgtcaagcaattgtcgatggtggcggcgacgataaggatatgagctntgatatcgaagaacccgatgccgattctacacctacgattcctggtcttttcgttactggagcgttacctggtttggctacagat

SEQ ID NO: 152421 - DNA, 412 bp, Arabidopsis thaliana columbia
ctttgtcacaagctttgaggaagacggaagaagcttatttggagaatgcaggtatgatgctcgacgaaaatgctggactagctttaatgggttcttgtgttttggtaatgttgatgaaaggtgaagatgtttatttgatgaatgttggtgatagtagagctgttcttgggcaaaaagctgagagtgattattggattgggaagattaaacaagatttggaacgtatcaatgaagaaactatgaatgattttgatggttgtggtgatggtgaaggagctagtttggttccgactttatcagcttttcagcttactgttgatcatagcactaatgtagaagaggaagttaatagaattcgaaaggagcattctgatgatgcgagcgcggtttctaatgaacgggttaaaggttc

SEQ ID NO: 152422 - DNA, 302 bp, Arabidopsis thaliana columbia
gaagaacgaatcaggccctcgagattcccacgtgctgctcgaagaatggatacattgaatgatcttctagcagcaagtgatgtcatttcgctacattgtgcattaacaaatgacacggttcagatactcaatgcagagtgtttgcagcatataaaacctggggcttttcttgtaaatactggaagctgccagctgttggatgattgtgctgtgaaacaacttctaattgatggcactatagctggctgcgcccttgacggtgctgaaagtccacaatggatggaagcatgggtgaaggaaat

SEQ ID NO: 152423 - DNA, 385 bp, Arabidopsis thaliana columbia
tgagaatatttcgtccgtcgttgaaacttgagaatagaggcgaatctggttcgagtgggggttccaattgaaaagtgggaagctccttttgactctctctctcttctagatctcgacaactctaacctcttcgatttggtggatcttgagaaattgattttagttcaaagcttctgatggctaaaaaggagagacctagacctgagaagttgtctgtgtatctttatatacctaatattgttgggtatatgagagttctcttgaactgtgttgcttttgctgtgtgttgctccaacaagccacttttctctgtcctttatttcttcagcttttgttgtgatgctgtggatggctgggtggctcgtagattcaaccaagtttcaac

SEQ ID NO: 152424 - DNA, 425 bp, Arabidopsis thaliana columbia
  unsure (1)..(425): unsure at all n locations
atcagaggcaaatcaatcaagattaagaagacgacaatggaagagccatttcttccgagagacgagcagttagtctcttgtaaatccacatggcaaagtggtcaggtcaccgtcgagctgaagaaagtgagccgcttggccgctcctatggccaccgtaaccatagctcagtacttattgcctgtcatctcagtcatggtcgccggccacatcggcgagttggagctcgccggtgtcgcgcttgccacgtctttcacaaacgtttccggcttcagcataatgtttgggttagttggtgcattggaaactctttgtggccaagcctatggagcagaacaatacgaaaaaatcggaacctatacatactcttgcatggcttncaacataccaaatttgttcatcatatcaattctatggattacatc

SEQ ID NO: 152425 - DNA, 419 bp, Arabidopsis thaliana columbia
gtcgaaagaagacgaacataaactcgtctccggtaaccaaaaatggtttccatgactacttcatcttcttcgtacggaacattctctacagtcgtcaacagttctagacctaattcctcagcaacctttctcgtcccttccttgaaattctccaccggaatatcgaatttcgcgaatctgagtaatgggttttctctaaaatctccaattaatcctgggtttctcttcaagtctcgtcctttcactgtccaagctagagctgctgcagaaaaaaccgttcacgatttcaccgttaaggacattgatgggaaggatgttgctttgaacaaattcaaggggaaagttatgttgattgtcaatgttgcttcaagatgtggtttgacatcatcaaattactcagagctttcacatctgtacga

SEQ ID NO: 152426 - DNA, 457 bp, Arabidopsis thaliana columbia
  unsure (1)..(457): unsure at all n locations
ccggaacgcaagggcgggccaaccgaccggagccagagccaccaggaagaagaagaatcagtttcatctcgccggagaagaagaaggatgtcgtggcaatcatacgtcgatgaccatctcatgtgcgaggtcgaaggcaaccacctcacacacgccgtcatcttcggccaagacggcagtgtctgggctcagagctcagctttccctcagttgaagcctgcagagatagcaggaatcaacaaagactttgaagaagccggacatcttgccccaaccgggctattccttggcggtgagaagtacatggttgtccaaggtgaggctggagccgtcatccgagggaaaaagggacctggtggagtcactatcaagaagactactcaagctctagtctttggtatctatgatgaaccgatgaccggagggcaatgcaactnggtcgtggagaggctcggcg

SEQ ID NO: 152427 - DNA, 424 bp, Arabidopsis thaliana columbia
cccgacgaaccctgtttcgcgtctcttttccaatcccaatccaatttcgattccttgattggaggattcgtatagccgtaaatccgttattgggttcttccgattatccaccgatagatctcgatcgaacgtttttctccgattggatttttgggtgatttcgccggaattcataatcagacgggaggagtcgcttctcttctcttgagtaatttagtccctttttgtgttatggaatcaattggttgatgaacaaatacaagtgtaaaacgatgccgggtttaacaacacacatgaatgagcattactcttcttctgggttttggtctgaggacgacgatggacttacctacgatcagttggaccagttctggagtgagctgtcgtcgaaagctaggcatgagcttcttaggattgacaagca

SEQ ID NO: 152428 - DNA, 439 bp, Arabidopsis thaliana columbia
gggggacccacgcgtccgaaatcagaattacaaacaaaaatggttttgcaaaagcttcctctcattggggtgctggtgctcctgaccatcgtcggctctccagcaaatgcagatggacctgtttgcccgccgtcgaacaaactaagccgggcaagtttccctgaaggttttttatttggcacggctactgcggcataccaggtcgaaggtgcgattaatgaaacttgtcgtggaccagccttatgggacatctactgtagaagatatccagagaggtgcaataacgataacggcgatgtggccggtgatttcttccatcgttataaggaagatatccaactaatgaagaatctaaacacagacgcctttagaatgtctatcgcatggccaagaatatttcctcatgggaagaaggagaaaggagtgagtcaagcttgtg

SEQ ID NO: 152429 - DNA, 416 bp, Arabidopsis thaliana columbia
ccggaaatcaaaaacagtaataaatgatcaactgcaagaaaatggctcttccggtcgagctcgaaagcctcactgaagccatctcagctgggatgggaatgggagttgatgagaatgcattgataagcacactggggaaatcgcaaaaggaacatagaaaattgtttaggaaagcaagcaaaagtttctttgttgaagatgaggaaagagcttttgagaaatgtcatgatcacttcgtcagacacctcaagcttgagttctcccgcttcaatactgcggtggtgatgtgggcaatgcatccatgggagagagatgcaaggttggtgaagaaagctttgaagaaaggagaagaagcttacaacctcatcggtgaggtcttatgcacacgctctgctgaggatcttctcggtgcacgt

SEQ ID NO: 152430 - DNA, 388 bp, Arabidopsis thaliana columbia
attcagagctcaataattaactgattcgaaatggcgaagatgtaccggaagttggcactctgcggtggtgagggaggacaagaatgggacgacgatgtatatgagggtgtaagaaaagtgtatgtagggcaagatctcaaccgtatcacttacatcaagtttgagtacgtgcaggaagacggcgaagtagtaacaactgaatatgggacaacaaatcagcaccctaaagagtttgtaattcaatacccggacgaacacatcatagcagtggagggaagttaccaccaagtggctctcattgccacagaagtgattacgtccctcgtcttcaagacctcaaagggtagaaagtcttcattgtttggtccaaacttacttggaattacca

SEQ ID NO: 152431 - DNA, 417 bp, Arabidopsis thaliana columbia
gtgaagtattgaatgagaagaggcaattaaaaatctcccgtgactctcgtctccccatctggctctctccctctgcccaaatttctggggcaaatttgttcatcagatctactacaatctctctttttcttcgggtatggagggccaacgaggcagtaattcttcgttgagctctggcaatggcaccgaagtcgccaccgacgtttcttcttgcttctatgttcccaatccctctggaaccgatttcgatgccgagtcgtcttctcttcctcctctctccccagctcctcaagtggcattgtcaattcctgcggagcttgccgccgccattcccctcatcgatcgcttccaggttgaagcttttctgcggctaatgcagaaacatatccagtctgctgggaagcgtggcttcttcta

SEQ ID NO: 152432 - DNA, 424 bp, Arabidopsis thaliana columbia; identical to SEQ ID NO: 130873

SEQ ID NO: 152433 - DNA, 421 bp, Arabidopsis thaliana columbia
tgaatctcttctttctctggatttgatttttcgataaaaatctactgatacatcgagttctggaagcgatctcgatctctctagaattgtttcgacgacgaagatgaagaagattcaaattggtgcggtggcgctattggtgtttctatctgtggcctctctctttgaaatcggattggcttctccgaacacagttcctgctttcctctggtctccgcatctccagtctgctaatggtgaattggatgaggctgtaaattatcaggtcatgtctgcaaaggatctagttggttctgttttcactcaaggaggttggtcaaactttctgtgctcagagaagaagcttgagcaacctgttgatgttgcacttgtgttcataggcagagagttactgtcttctgatgtttcttaaaaaggaact

SEQ ID NO: 152434 - DNA, 422 bp, Arabidopsis thaliana columbia
caaaaacccagaagaacaaactttcgaagaagacgactaatcaattcatctgattatggagagactacagagaatcttcggagctggtggcggtttaggtcacgcatcgcctgattctccgactctcgatacatcggagcaggtttacatctcttctctcgctctcctcaagatgcttaagcacggaagagctggtgttcctatggaagtcatgggattgatgcttggagagtttgtggatgaatacactgttagggttgtggatgtttttgcgatgccttagagtggtactggtgttagtgttgaagctgttgatcatgttttccagactaatatgctcgacatgcttaaacagaccggaagaccttggatggtgggtggttggtatcattcacaatcctggtttcggttgtgtctttttg

SEQ ID NO: 152435 - DNA, 421 bp, Arabidopsis thaliana columbia
ctttgacattggatccttcaaagttctgtagcagagagttaattcaacacgagcttgatcaggtggtggaggaacttgagaagattgctgttgtaaatctgcttcgacacagatcaattatctctctcatcggaaatgttcagagatcatcattcatattagagaagggcttccgagtacttcgaaccaatgggattaatgtccagatgatctcccaaggtgcatctaaggtaaacatctcactgatagtgaatgatgatgaggcggagcattgtgtgaaggctctccactcggccttctttgagacagacacttgtgaagcagtctcagaatgcccgaccggctacatcgctgcctctttgtgaaacctctaggtgcaacctgcaaggtctgaaagtactagctagtttgatgttatgat

SEQ ID NO: 152436 - DNA, 426 bp, Arabidopsis thaliana columbia
ctctcatgtactcctttgcccagagagatgacattgaagtgcttgatgagccattatacgctgcgttcctcaagtctacgggtgttgataggccttacaaagatgagcttctctctaagatggagtgtgatggagaaaaggtggtgaaggatcatttatggtccaggaaagaagaaatataggttttgtaagcatatatcgaaacagcgacttcttggtttgccaagtgaactaatgagtgaagggaagcactttatattgatacgcaatcccctcaacatattgccttcttttgagaagatacacccttcatcgtttcacgaattgggactgggagagttagtatcgatatacagtgatctctgtcagatgggaacaccaccagcaatcatcgatgcagatgagcttcagcgagatcccgaggct

SEQ ID NO: 152437 - DNA, 409 bp, Arabidopsis thaliana columbia
aattttctcaaactctaaaatcaatctttcaaatctctcaaccgtgatcaagatgcagatgttcgttaagactctcaccggaaagactatcaccctcgaggtggaaagctctgacaccatcgacaacgttaaggccaagatccaggataaggaaggtattcctccggatcagcagaggcttatcttcgccggaaagcagttggaggatggccgcacgttggcggattacaatatccagaaggaatccaccctccacttggttctcaggctccgtggtggtatgcaaaatttcgtgaaaccctaaccggaaagacgattactcttgaggtggtgaggtttgacaccaatgacaacgttaaggctcagaatcaagaataggagggtattcctcccgaccagcaaaggttga

SEQ ID NO: 152438 - DNA, 427 bp, Arabidopsis thaliana columbia
aaaaaaaaatggctcaagcagtgacttcgatttttggcttacgtggagcatctcaggctggccttgaaggaagtttacagatcaacggctcaaaccgtttgaacatctcaagagtctcggttgggtctcagagaaccggacttgtgatcagggctcagcagaacgtgtcagtaccagaaagtagtcgccggtcagtgattggactcgtggcggctggtttagccggtggttcattcgttaaagctgttttcgccgaagctattccgatcaaagttggtggtcctccacttccttccggtggcctacctggaacagataactcagaccaagcaagagacttttcattggcattgaaagatagaatttacatacaaccattgtcaccaacagaagctgcaactagagccaaagattctgctaaagagat

SEQ ID NO: 152439 - DNA, 394 bp, Arabidopsis thaliana columbia
aacttcttctggttccttttatcaacattttttctctctcttaaaacttcgaagcgatttttgatttacagactatggaaatggaatcattcatggacgaccttttgaacttctctgtaccggaagaggaagaagacgacgacgaacatacgcaaccaccgaggaatattactcgccggaaaactggattacggccaacagactccttcggtctctttaataccgacgaccttggagtggttgaagaagaggatttggaatggatttcaaacaaaaatgcttttccggtgattgaaacattcgtcggtgtattaccgtcggagcattttcctattacgtctcttctggaaagagaagcgactgaagtaaaacagctgagtccggtttcagtact

SEQ ID NO: 152440 - DNA, 380 bp, Arabidopsis thaliana columbia
cggacgcgtgggtgcttgcccagaaagtctccgagaaagttaaaagttgaacggcggataaaaaaaaaactaagaggaagaggagagatggagtcgcagaagaagatagcttatgagatcggaggtatgaagaacgatgctcttcgctttggtcttcacggcgttaagagcgatatccttagatctcatcctctcgaaacggcttacgaatctgggaagcaatcacatgaagaaatgaagaggatgagtgatcacgcatacttatggagctgatctttctttgaagatggatcttgatagacaaatcctttctaggtttcagagacctgctggaccaattacttcatcaatgcttggccttgaagtctacacaggagctc

SEQ ID NO: 152441 - DNA, 421 bp, Arabidopsis thaliana columbia
cttaaacgttttactttgtgctgcactactcaacctcaatggccgcctcaacggtggctctctcctcccctggcttcgccggtaaggccgtcaagctttcccccgcggcatctgaagtccttggaagcggccgtgtgacaatgaggaagactgttgccaagccaaagggcccatcaggcagcccatggtacggatctgaccgtgtcaagtacttgggtccattctctggcgaatcaccgagctaccttaccggagagttccccggagactacggatgggacaccgccggactttcagctgaccccgagacattcgcaaggaaccgtgaactagaagttatccacagcaggtgggccatgctcggagccctaggctgcgtcttccctgagcttttggctagaaacggagtcaaagtcggaga

SEQ ID NO: 152442 - DNA, 454 bp, Arabidopsis thaliana columbia
gtcgggaatccggggggacgcacgcgtccgcttttggtatcagaagacgacgtcatccccttaaaaagctcttcctgttagattcagggaaatcttctccggccaaagctatttctccgacgacgtcagagcttgacaatgtttctaaatctagctacctactaacagaaatcagtgagagtggatctgatgctgtagctgaattgagaagaagcttttcattgaggttgttatgcctgatttgaggccaggtgtttttagcaaatcgaaagagacaagtactgaatctatgaaaaagctcattgctcgagaaatgtcgaaagatgttgttgaagatagacagagttctaacaatgtagttgctaaactaatgggtctagagacttctgcaccaaggagcagatccaaaagctcttcacgttgttcgttgacttgtgttggtagtaaggaagct

SEQ ID NO: 152443 - DNA, 390 bp, Arabidopsis thaliana columbia
  unsure (1)..(390): unsure at all n locations
cacaagtctgcgagatttggattagatctgattcaggttggattgatcatcgttcggggctccgggaaacatggcggggacnagacaattacgaactctccaatctcagcctgaaaacaaggtatgtgtcgattgcgctcagaagaatcctcaatgggcgtcggtttcgtacggaatcttcatgtgtttggaatgctccgggaaacaccgaggcttaggcgttcacatatccttcgtcagatccgtaaccatggattcatggtctgcgatccagattaagaaaatggaagctggtggtaacgaacggctcaacaaattcttcgcgcaatacggaatcgctaaggagacagatattatctccaagtacaattcgaacgctgcttttgtgta

SEQ ID NO: 152444 - DNA, 413 bp, Arabidopsis thaliana columbia
  unsure (1)..(413): unsure at all n locations
cttaaacgttttactttgtgctgcactactcaacctcaatggccgcctcaacagtggctctctcctcccctgccttggccggtaaggccgtcaagctttcccccgcggcatctgaagtccttggaagcggccgtgtgacaatgaggaagactgttgccaagccaaagggcccatcaggcagcccatggtacggatctgaccgtgtcaagtacttgggtccattctctggcgaatcaccgagctaccttaccggagagttccccggagactacggatgggacaccgccggactttcagctgaccccgagacattcgcaaggaaccgtgaactagaagttatccacagcaggtgggccatgctcggagccctaagctgcgtcttccctgagcttntggctagaaacggagtcaag

SEQ ID NO: 152445 - DNA, 419 bp, Arabidopsis thaliana columbia
aaagtacagaaataaatataatacgcattaaaatgaagaaataataaaacgagagagagggtttaaggaaagggaaagggttagtgtactgttgacaacgccactcttgactctctttctcttcttcttctcgagatcctgaaaatgtgactgacagattcttcaacttcactctcttcttcttccattcactgaactcaaaccaccccctgtgagctatgacccaccaaacccatcagcgtcgtcgccgtcgtcactccgccgtctgtcaccgtcatccttcttccaaacccaccactggtttctgtgccacctgtctccgtgaacgtctctctaccatcgaagctctatcttcctctgtctcagcttccactgagctccgccgtgttcgctcctactctgttcgtgacgcatccgct

SEQ ID NO: 152446 - DNA, 465 bp, Arabidopsis thaliana columbia
gggtcggaaattccgggggggagccacgcgtccggggtcaaggaccttccggcggattgaatcgttaaggagatcggaaaccaaatgggggggagaagaaggagaagaagtgcgaaccatccgcaccacctgctcgtgtagggaggaagcaacggaagcagaaaggacctgaagcggcggcgagattgccgacggtgactccttctactaaatgtaagcttcgattgctgaaattggagcgaatcaaggactatttgcttatggaggaagagttcgtagcgaatcaggagagattgaaacctcaggaagagaaagctgaggaagatagatctaaagttgatgatcttcgtggtacacctatgagtgttggcaatcttgaagagcttattgatgagaatcacgccattgtttcttcttcggttggtcctgagtactacgttggcattttgtctttcgttgataagg

SEQ ID NO: 152447 - DNA, 426 bp, Arabidopsis thaliana columbia
cttcggcgaaaaatccacgagtcagcttttactgatttgtacaaaaaatggatggggcagggcatccatcagtctttgagaagctacatggacaatcttacttgatcaatagactttctccgagtgtgcaagctcgtggttactgtgtctctggtgcttatgtcaatggaggtttgcagagtctattgcagccaactagccatggcgttggctcgtctcttatacctcatggttcatttcctgtattagctcacgctcctagtgagaaaactggtactggtttcttgatcgatttccttatgggaggagtctcagctgctgtttcgaagacggcagccgcgcctatagagcgtgtgaagctcttgattcagaatcaagatgaaatgatcaaagcttggcgtctctctgagccatataaaggaatca

SEQ ID NO: 152448 - DNA, 342 bp, Arabidopsis thaliana columbia
ctcggagccgcgaaaggactcttaggcttaatgattctctcccaaaaatgcttatcggtgcctcagcagatttcgacggcgatcacttctttaggtgttcgaaggcattagaaaggatgcgagaccctggcaaagatgaaactatggctgtggcatttcaacgcgaccgtgctatggctgtgacaaacctaaagacccaggattctcagacgtacaccttacgtgtcgatagatgcgtgtcaacaacgagccatagtggttttgatgtattctgacgtggcatgaactgtgtgcatgaactgccactagcacctcgtacgactggctaactgcgagtgcatg

SEQ ID NO: 152449 - DNA, 431 bp, Arabidopsis thaliana columbia
  unsure (1)..(431): unsure at all n locations
gtccgatttccatgaagctacacatttgcttgaaatattggctttcaagagcacgttaaacagaggtcattttcgtcttgtgagggaaattgangctattggaggcaacacatccgcttctgcgtctcgagagcaaatgagttacactattgatgctcttaagacctatgtccctgaaatggttgaagttcttattgacagtgttagaaaccctgctttcttggactgggaagtgaatgaagagctacggaagatgaacgtagagatagcggaacttgcaaagaaccctatgggtttcctcttggaggccattcattctgctggttactctggtccattggcaagtcctctgtacgcaccggagtctgctttagatagattgaatgttgagctcttggaagagtccatgactgagaatttcactgctgcac

SEQ ID NO: 152450 - DNA, 426 bp, Arabidopsis thaliana columbia
  unsure (1)..(426): unsure at all n locations
cgtccgaagttttatttctccgttttcgttttgtttttctttatcgcctcggtttcgtcgtgtgggggtaacgacggcgatgatcgcgtgatccntcaggtggttggtggagccgagcctcaggttttgacctcagaggatcacttttctctcttcaagcggaagttcgggaaggtctacgcttccaacgaggagcatgactatagattctcggttttcaaagcgaatctcaggcgagcgaggcgtcaccagaagttggatccgtcggcgactcatggtgttacgcagttctcagatctgactgggtctgagttccgtaagaagcacttgggggttagaagtggctttaagcttcctaaagatgccaacaaggcttcgattctccctaccgaaaatctccctgaggattttgattggagagatcat

SEQ ID NO: 152451 - DNA, 401 bp, Arabidopsis thaliana columbia
aactttatctcccaaaacacaaaacaataaaaaatggcttccactgctctctggagggccatcgtcggaacttgagttgatccgtcgttccccagctccaatcagtctccgttcccttccatcagccaacacacaatccctcttcggtctcaaatcaggcaccgctcgtggtggacgtgtcacagccatggctacatacaaggtcaagttcatcacaccagaaggtgagctagaggttgagtgtgacgacgacgtctacgttcttgatgctgctgaggaagctggaatcgatttgccttactcttgccgtgctggttcttgttcgagctgtgctggtaaagttgtgtctggatctgttgatcagtctgaccagagtttccttgatgatgaacagattggtg

SEQ ID NO: 152452 - DNA, 432 bp, Arabidopsis thaliana columbia
gaaagatatggcaggactcatcaacaatatcggagacgcactccacattggaggaggcaacaaggaaggtgaggagcgggaaggaagaggaacacaagaaacacgttgacgagcacaagagtggtgagcacaaagaaggtattgttgacaagatcaaagacaagatccacggtggtgaaggtaaaagccacgacggagaaggcaaaagccacgacggtgagaagaaaaagaagaaggacaagaaggagaagaaacatcatgatgatggtcaccacagcagcagcagtgacagcgacagcgattaaggtgaggaagtgaggaggatcgcttgaataaaacagatctggttctggctattattaattaatgttgctgtatgttcttatcattttagagagaggttaaagacaggagaaccgtgcatctatcttt

SEQ ID NO: 152453 - DNA, 416 bp, Arabidopsis thaliana columbia
gaaaaaagcatatcaatctctgtgcctctctcaattctcaaattctgaattctgagggtatcttcttctctttgaggttatcatttgaatatcttcttcatcttcttctccaagcccctctctctctgtatcgatcaatcatcaataggaggagctagcgaggggattcaataaagagatcttcttcttcttcttcgattcactttcctttcttttccattttccctttcgtcgtcgtcgtcaatggtgatggaggacaacgagagttgcgctagtagagttattttcgacgccttacctacctcccaggccactatggaccgccgtgagcgcatcaaaatggaggtcttcgatgaggttcttcgccgtctccgtcaatcggacattgaagacgcccatctccctggtttcgaaga

SEQ ID NO: 152454 - DNA, 420 bp, Arabidopsis thaliana columbia
cttcgagttaccaacaaaaaaaaaactctcctttatttcagtcttcttttacaaatggtggtcttctctttgattccgtcttgtgaaccaccggcataagaaaatatgacaattgctttaacgatcggaggaaacgggttttcgggtctaccaggatcgtcgttttcttcatcatcttcgtcgtttcgattaaaaaacagcagaagaaagaacacgaagatgctcaacagatcaaaagtcgtttgttcttcttcatcttctgtaatggatccgtataagactcttaagatccgacccgattcatctgaatacgaggtcaagaaagctttcagacaactcgctaaaaagtatcatcctgatgtttgtagaggaagcaattgtggggtacagtttcagacaattaacgaagcttacgatatt

SEQ ID NO: 152455 - DNA, 394 bp, Arabidopsis thaliana columbia
cttccttttgattctctctgccactcttatgtgacacaattataccattttttgtgtgatattttgtacaaaaaacagtaacattattttctctctattttcattaactcatttctgtatttttcattaactataagaaagtacagaaataaatataatacgcattaaaatgaagaaataataaaacgagagaaaaggtttaaggaaagggaaagggttagtgtagtgttgacaacgccactcttgactctctttctcttcttcttctcgagatcctgaaaatgtgactgacagaggcttcaacttcactctcttcttcttccattcactgaactcaaaccaccccctgtgagctatgacccaccaaacccatcagcgtcgtcgccgtcgtcac

SEQ ID NO: 152456 - DNA, 423 bp, Arabidopsis thaliana columbia
  unsure (1)..(423): unsure at all n locations
tttctctctcgctgcttctcgaatcttctgtatcatcttcttcttcttcaagtgaggaatggccgatggtgaggatattcagccacttgtctgtgacaatggaactggaatggtgaaggctggttttgctggtgatgatgccccgagagcagtgttcccaagtattgttggtcgtcctaggcacactggtgtcatggttggtatgggtcagaaagatgcttacgttggtgatgaagctcagtccaagagaggtatcctcactctgaagtatccaatcnaacatggtattgtaagtaactgggatgacatggaaaagatatggcatcacactttctacaacgagcttcgtgttgcccctgaggagcacccgtttctactcacagaggcacctcttaaccctaaagctaacagggagaagatgac

SEQ ID NO: 152457 - DNA, 424 bp, Arabidopsis thaliana columbia
aaacgggtgccttcgatacaacaaatgatggcatgaaaaagaatcaggacaatcaagtttgtctgcttggaggattctcagtatctggacatggtacttcaaataatagttcatctaatgtgagcaatttcgaccagcctgtgactcagcaaagagtctttcattctgagcgaactgtacgagatccaacagaaactaaccgtttgtctaaatctgatgattcccttgcttctcaatttgtaatggctcaaacaacatcagatgctttcctgcctatcagcgaatcatctgaaacttctcatgaagcaaatatggagtcccagaatgttcatcctactgcgccagtaataccagctcctgatagcatctggacagccgagggtagtatgtcacagtctgaaaaaaaaaacgtggaaactaacac

SEQ ID NO: 152458 - DNA, 415 bp, Arabidopsis thaliana columbia
agaatattcacagagaagagagagcgttatttttggcgtttaagggtttcgcgtgtggtgcgattcttttgttgtggggtctattcgtttcctctatacgaagcgaggagacgaaggaatttgtcttgactctcgatcactctaacttcaccgaaaccatctccaagcacgatttcatcgtcgtcgagttctacgccccttggtgtggtcactgccagaagcttgctcctgagtacgagaaggctgcatcagagttgagtagtcataaccctcctcttgctctcgccaagatcgatgctagtgaagaagcaaacaaagaatttgctaatgagtacaagattcagggtttccccactcttaagattttgagaaatggagggaagtcggttcaagattacaacggaccttgtgaagc

SEQ ID NO: 152459 - DNA, 426 bp, Arabidopsis thaliana columbia
tcgaaagtgcgttttattcatttgttttactgtttttgataacctcaaaatttgccgaaattttattctctataaaggcttatatgttttacttacattcctaaagttttcaactttcttgagcttcaaaaagtacctccaatggcttcttctgcatttgcttttccttcttacataataaccaaaggaggactttcaactgattcttgtaaatcaacttctttgtcttcttctagatctttggttacagatcttccatcaccatgtctgaaacccaacaacaattcccattcaaacagaagagcaaagtgtgtgcttcacttgcagagaagggtgaatattattcaaacagaccaccaactccattacttgacactattaactacccaatccacatgaaaaatctttctgtcaaggaactgaaac

SEQ ID NO: 152460 - DNA, 457 bp, Arabidopsis thaliana columbia
ggtactgcctgggtggagcgaggcgtccgtgacagttgatgaggctctaaagaataagatattgttcgtgttggattatcatgatgtgcgtctaccatatgtgaacaaagggagagagttaaacaataccacattatatgcttctagaacactattcttcctcagcgatgatagcacattgaggcctgttgccattgagttgacttgtccaccaaatatcaacaagccccaatggaaacaagtcttcacgccaggctatgatgctacgtcatgctggctatggaatcttgctaagactcatgctatctctcatgacgccggttatgatgagcttatttcccattggttgaggactcatgcctgtacggagccatacataatagcggcaaatagacaactaagtgccatgcatcccaattataggcttttgcatcctcatttccgctacaccatggaa

SEQ ID NO: 152461 - DNA, 425 bp, Arabidopsis thaliana columbia
acccagagcgagtcaccttatcgtctctctatctcctccttcctatatccccttgggctgtgggtttttgctcagtgtgcgacgtgagagatagagagatggaaggtctgattcaaaccagaggaattctctctttacccgcgaagcccatcggagtgagaaggcttctccaaccctcacatggcttaaagcaaagacttttcaccacaaacttacctgccttgtccttatcctctaatggtcacaagaaatttcaagcctttcagcaaatcccacttgggatttcggtttcccacagggagagaagcagaggattcatctgcaaggcggaagctgcggcggccggaggcggaaatgtgttcgacgaaagagacacagcggcgattgcggtgtcgcctaagatttcggtgtggaggttacgactc

SEQ ID NO: 152462 - DNA, 342 bp, Arabidopsis thaliana columbia
ttttcttctctctaaccaaacaagaagaggactccattttcgcaagaatggggagggtggagcaatgttggtcaagtctggtagtattggcagtgttggtgatcggaactggagccgttcccatcacttatctccaaagcgccgtcgctaaaggagccgtgtgtttggatgggagtgcaccagcttaccattttgacaaagggtttggttcgggtgttaacaattggatcgtccacatggagggaggaggatggtgtacaatgaagggttcttccaaattcatgaacaaagactgggggtgtttccgtatcttgggtggcaagcaaagcactaacccatatt

SEQ ID NO: 152463 - DNA, 513 bp, Arabidopsis thaliana columbia
  unsure (1)..(513): unsure at all n locations
cggaattncccgggtgcgagcccaacgcgtctcgctagaaacctagaatacgctttgtcaatgtttgtttatagctatatttctttgacccagtcatgtgggggtggttctagtactaactgcacgagagcacaatacctagagnncagttgttggagaagggtctttatgtnncattgtagatgctttnncagaagctgnnaggaattcaaagtgaagtaaccttcataaggctccttaaactttcacttctcttactgattcactccggtctaagctnctttgtggtttttgtagaagccagcttggggtcccctgcttgtttggaaagttctccaacacanttgacntttcgttgttaaggaaggttgacccaagcacagtgtgaagcaagaagatgatggagtagaagatgagtaccagctagaggatcttgaggttgtagctggagattacatggtgaaagtgggtgtcttcaatttcaggaatgcgtgggaaagcatggatgaagaa

SEQ ID NO: 152464 - DNA, 260 bp, Arabidopsis thaliana columbia
cttggaatttggattcttgtgataacataatggatgttggtcttagctctcggtgtatgagaccgagacgtgtggtcaatgtggtcccgagtaaagtagctaagaagtgtttgaaacgaggggatagtatgtggggagcttggtttttctttagcttctacttcagaccggcgttgaatgagaaatccaagtctaaggtcattagggaaagtggtggtggtggaggaggaggaggtggctgatttactggactttattaa

SEQ ID NO: 152465 - DNA, 431 bp, Arabidopsis thaliana columbia
  unsure (1)..(431): unsure at all n locations
ntcagagtttagacgagaaatgcaaaggaattcggttgcagtgcgcaatctattccggtacaaggggcatccagatcctttaaaaggagatgcacttaataaggctgtacgggaaactgctcatgaaacaatttctgctatattctcagaagagaatggtactaaaccagctgctcctgaaagcatcaacagacgcattgaaggattcgggaatactaactttcaggtgccctctaatgataataaatcgttccttagccggggnnncgtattggaagtgcatctataaagcaaggaatcagtaattttgctcaaggccatttgccaaagaagaatgagaatggcagcagcagctacagaggtccaaatctccacagatcattaactatggaaaatgagaacttcagtagatatgatccagttaagctggg

SEQ ID NO: 152466 - DNA, 423 bp, Arabidopsis thaliana columbia
gtgaaaagtggtcctaatgataatatcttcatctattatgctgaccatggagctcgtggcttaatagcgatgcccactggtgatgaagttatggcaaaagatttcaatgaagtcttggagaagatgcataagagaaaaaaatacaacaagatggtgatctatgttgaagcatgtgaatcaggaagtatgtttgaagggattttaaagaaaaatctcaacatatacgcagtgactgctgctaattctaaagagagcagctggggagtttactgtcctgagtcatatcctcctcctccttctgagattggaacttgtctcggcgatacatttagcatctcttggcttgaggacagtgaccttcatgacatgagcaaagagactttggagcaacaataccacgttgtaaagagaagagtaggatct

SEQ ID NO: 152467 - DNA, 422 bp, Arabidopsis thaliana columbia
aatcatcaacttaatcgtttctctcaaatttagggttttctcttttctcgaaagtgttgcggttttctgaatcatctctatctggtttgagggtttcgtttgatatctggagaaaggggtttctggaaacaaggagttcataattcgcgatcttgatctatcgatcttcatttatatataaaagcgtgaatgagattatgatggagtcgaaaggtggtaaaaagaagtccagcagtagtagttccttattttacgaagctcccctcggttacagcattgaagacgttcgtccaaacggtggaatcaagaaattcaaatcttctgtctactcaaactgctccaagaggccatcctgagtaccagcgtgcaccgatcttcataatatagttatagctttctttactttccagtttataattttc

SEQ ID NO: 152468 - DNA, 403 bp, Arabidopsis thaliana columbia
ctcatttcttcttcttcttctttttccacattttctgattagcagatcaaatgatgctggttcgatctgtatttcgatctcagttgcgaccctctgtctcgggtggtctgcaatctgcttcttgctattcttcattatctgctgcttcagctgaagctgagaggactatcagagaaggtcccagaaacgattggagtagagatgaaatcaagtctgtttatgattctcctcttcttgacctcctcttccatggagctcaggttcatagacatgttcataacttcagggaggtacaacaatgtaccctcctctccataaagactggtggctgtagtgaagactgttcatattgtcctcagtcttcgagatatagcactggagttaaggcacaaagactcatgtc

SEQ ID NO: 152469 - DNA, 426 bp, Arabidopsis thaliana columbia
gaaaaatttaaccagtttcgtaattgttatcttactacaaagcttattgtttcatgtgtatggtcgtcatcaaagttcttcgaagaacattttagtagattcatctccatttccttctgatttcctctttggtacagcttcttccgcttaccagtatgaaggtgcgttcttgactgatggaaaaagtttgaacaattgggatgtctttacgcataaaaatcctgggaaaatacttgacaagaacaatgcagatagagctgtggaccaatataatcgatttttggaggacatccaattaatgtcttttcttggagtgaacagttataggttttcaatttcttggtgtagaatcttacctagaggaagatttggagagattaattatttggggataaagtattacaacatatttatcgatgctctcat

SEQ ID NO: 152470 - DNA, 428 bp, Arabidopsis thaliana columbia
  unsure (1)..(428): unsure at all n locations
accgggaccatcccagacaaggatatccttgtgttgatcaaggaagcatttgacttcaggccgggaatgatggccattaaccttgaccttaagaggggaggtaacttcaggttccagaaaaccgctgcgtatggccatttcgggcgtgatgaccctgacttcacttgggaggttgtcaagccgctcaagccaaaggcctagacagaaacaaagctggcaattgcaagaactgagttgagtcactccccaactactgggaacttatcattataccattattattgcaaatgactgaataaagaaagcttctgcattgtcaccattcacatttgttttcgcgaacacaggccagcggttcatatatctggtaatcgaagattgcaaatgaaagatttgagttttatgttttgaatttntgcctctttttt

SEQ ID NO: 152471 - DNA, 425 bp, Arabidopsis thaliana columbia
aatctctgcaacctagactcatatcttcctttctcggcaacaattctattagatcaacgcggccacttattcatctctttcgcttcgatttaggaagaagacatgtttcgatgcaattatcaagaaccttttctggattaaccgatctcctgtttaatagaagaaatgaagatgaagttattgatggcaagagaaaacgtctgagaccgggaaatgtatctcctcgtcgtcctgttccgggtcatataacaaaacctccttatgttgattctcttcaagctcccggaatctcaagtggacttgaagttcatgataagaaaggtatagaatgcatgagagcttctggaatacttgcagctagggttcgagattacgctggcactttggttaagccaggcgttacccctgatgaaattgattaagca

SEQ ID NO: 152472 - DNA, 428 bp, Arabidopsis thaliana columbia
cagattctctgggaagacgatattagcaatcatggagcgtctaacatctcctcctcgtgggatgattgtctctgatcttgagcatactatggttgatcatcatgatcctgagaatctatctctgctgagattcaattcgttgtgggaacacgcttatcgccatgactctcttcttgtgttttctacgggaagatcaccgacattgtataaagaactcagaaaggagaaacctttgttgacccctgatattaccattatgtctgtaggaactgagattacttatggtaactctatggttcctgatcatggttgggttgaggctctgaacaataaatggggattgggtattgtcaaacaagaagctagcaacttccctgagttaaagcttcaggccgaaactgagcagaggccacacaagggtagctttt

SEQ ID NO: 152473 - DNA, 424 bp, Arabidopsis thaliana columbia
ttcttcttctcagagctacgatgtttttcccaacttcagaggggaagatgtccgcggctcattagtcagccaccttcgtaaggaacttgatcgcaaattcatcaatacattcaacgacaacaggatcgaaagaagccgcaaaataaccccagagctgttattggctatagaaaactcaaggatctcacttgtcgtcttctctaaaaactatgcttcttccacgtggtgcttagatgaattggtgaagatccaagagtgctatgagaaattggatcaaatggtgattcctattttgtacaaagtagatccttctcatgtttgaaaacagaccggagagtttggcatggtctttggggagacctgcaagggcagaacagagaatgagaagcgaaaatggatgctagctctagcagaggtagcacat

SEQ ID NO: 152474 - DNA, 414 bp, Arabidopsis thaliana columbia
gaaaaaaacaaaaaacattttccatctctctctctctctctctcgcctgcttcaaggagatggatcggcaaagttccgatgacatcatgaaatttctcgacggcatggctagctccgacgatgttctttttggcttcctcgacgaaggaaaccactcaccggaggattataacttcgccgccggcgacgaatccgaagttgacaacgataccaccgattgtaattcagaagagaacagaaaattttggcaagaacacgaacaacttctccaggcgacactgtataggacaagttcaattgagacaaagataagacaagcaactaaggaagcgttgaaagtagttagatcaaagggtttggtatgtgtctgccggagaccggttacccgcggttgtcgtagctgtttacgccgcg

SEQ ID NO: 152475 - DNA, 425 bp, Arabidopsis thaliana columbia
gccggtggagttgactgcggcggcgtttgaatccttggcatcgcgtgggcttttggtggcatgatcttcatccttgtgtactgcaccgccggtatctcaggtggtcacataaaccctgcggtgacgtttggtttgttcttagcccggaaggtatcgctgattagggcggtgctttacatggtggctcagtgtttgggtgctatttgtggagttggtttcgtcaaagcctttcaaagctcttactatgatcgttacggtggaggagccaactctctagcatacggctacaacacaggcaccggactagccgcagagatcattggaacattcgatcttgtctacacagtcttttccgctactgatcccaaacgtaacgctagagactcccacgttccggctttggcgccactatcgattgggtttgc

SEQ ID NO: 152476 - DNA, 382 bp, Arabidopsis thaliana columbia
gaagaaacttcacatcagcatcagaatctctctttctctctctctccttcttgacaggcaaaaaaacaccaaaccatgtttctttcttcattgtgccgacacttctttcccctctctctctctctctccaccgccatggattcctcctatggcgccacaaagttccttctcctcctcttcctcaccacctccattgcgaccgcattacccgataacaaaccagtaccgggtcaaataaactcaaactcagtcctcgtagctctcctggactctcactacacagagctagcagaactagtctaaaaagctctccttcttcagaccctcgaagaagcagttgggaaacacaacatcacaatctttggaccacgcaacgatgcct

SEQ ID NO: 152477 - DNA, 364 bp, Arabidopsis thaliana columbia
gattactggaactcgttgagggattgagaaaaaaataatcagaagagaaagagccagtggctgataattgtatcagacttcttcactcagcctctgttttcttctgtttagggcttctaatttcatccttcaacttgttgcagggtattgcagctgaaaatctttccaagcagaaactgacctcatggattcttcagaatgagattgtaaaggaagtcaatgagaatccaaacgctggatggaaagcttctttcaatgatcggtttgcaaacgccactgttgcagagtttaagcgccttcttggtgttaaaccaacaccaaagacggaatttttgggtgtgcctattgtaagccatgatatatc

SEQ ID NO: 152478 - DNA, 381 bp, Arabidopsis thaliana columbia
gcaaacttttattatgatcaagcctgacggcgtccagagaggactcatcggtgaagtcatctgcaggtttgagaagaagggtttcactttgaaaggtctgaagttgatcagtgtagagagatcttttgctgagaagcactacgaagacttatcttcaaagtctttcttcagtggactcgttgactacattgtatccggccctgttgttgctatgatctgggaaggaaagaatgttgtcttgaccggaagaaagatcattggagctaccaacccagcagcttctgagcctggaactatccttggggactttgctattgacattggcaggaacgtgatccatggtagtgactctttcgagagtgcaagaaaggagattgcttt

SEQ ID NO: 152479 - DNA, 383 bp, Arabidopsis thaliana columbia
gtcgcctctccagcaaatgcagatggacctgtttgcccgccgtcgaacaaactaagccgggcaagtttccctgaaggttttttatttggcacggctactgcggcataccaggtcgaaggtgcgattaatgaaacttgtcgtggaccagccttatgggacatctactgtagaagatatccagagaggtgcaataacgataacggcgatgtggccgttgatttcttccatcgttataaggaagatatccaactaatgaagaatctaaacacagacgcctttagaatgtctatcgcatggccaagaatattttctcatgggagaaaggagaaaggagtgagtcaagctggtgtgcaattctaccacgacctcatcgacgagctcat

SEQ ID NO: 152480 - DNA, 418 bp, Arabidopsis thaliana columbia
gtcgcctctccagcaaatgcagatggacctgtttgcccgccgtcgaacaaactaagccgggcaagtttccctgaaggtttggtatttggcacggctactgcggcataccaggtcgaaggtgcgattaatgaaacttgtcgtggaccagccttatgggacatctactgtagaagatatccagagaggtgcaataacgataacggcgatgtggccgctgatttcttccatcgttataaggaagatatccaactaatgaagaatctaaacacagacgcctttagaatgtctatcgcatggccaagaatattttctcatgggagaaaggagaaaggagtgagtcaagctggtgtgcaattctaccacgaccttatcgacgagctcataaaaaatgggataactccattcgttactgtttttc

SEQ ID NO: 152481 - DNA, 405 bp, Arabidopsis thaliana columbia
ctataaccctagaagttgagagcagcgacaccatcgacaatgttaaagccaaaatgcaggacaaagagggcataccacctgatcaacagaggctgatttttgctggtaagcaattggaagatggccggaccttagctgattacaacatccagaaagagtctactcttcatcttgtcctcaggctcagaggtggaaccatgatcaaggtgaagacactcactggaaaagaaatcgagattgatatcgaaccaaccgacactattgatcggatcaaagaacgtgttgaagagaaagaaggcattccttctgttcaacaaaggctcatatatgctcggaaacagcttgctgatgacaaaactgccaaagattatgcgatagagggaggctctggtcttcaattggttc

SEQ ID NO: 152482 - DNA, 396 bp, Arabidopsis thaliana columbia
attttcgtcatcatttcttgagatgtatatggcctcactgtctccgagactccacaaagggtacaaagctagatgtgttagcttaccggttcggtctcatccgagtgttaggaggattcaagaagtggtctccaaggttagagctttggggtcttcttcgttagactcgaggacaatagtccgtgacagtctctctggtctcaccgagctttacagatgtttaagtgaagatctcttcaagtcttcttctgaaactcaacaagcccttcttaatggtgatggtttgatggaagagcttcttgaagtatcactgaaatacttagaggtttgtggaggagctaaggacgcagcttcgaggatcaagaagattgttgtcgagcttcagtctgctttgag

SEQ ID NO: 152483 - DNA, 383 bp, Arabidopsis thaliana columbia
aaagcagataaaaaaaaaatggctcaagcagtgacttcgatggctggcttacgtggagcatctcaggctgtccttgaaggaagtttacagatcaacggctcaaaccgtttgaacatctcaagagtctcggttgggtctcagagaaccggacttgtgatcagggctcagcagaacgtgtcagtaccagaaagtagtcgcctgtcagagattggactcgtggcggctggtttagccggtggttcattcgttaaagctgttttcgccgaagctattccgatcaaagttggtggtcctccactttcttccggtggcctacctggaacagataactcagaccaagccagagacttttcattggcattgaaagatagattttacattac

SEQ ID NO: 152484 - DNA, 425 bp, Arabidopsis thaliana columbia
aaactccaagttcttacctttttcccatttacaatcgttcgaattttttatagaggagaaaccatgaatgctttagctgcaacaaacagaaacttccgtcatgcatctcgaatcctgggtttggattcgaagatcgagagaagtcttatgatcccatttagagaaatcaaggttgagtgtacgattcctaaagacgatggcactctggtttcatacatcggatttagggttcaacatgacaatgctcgtggacccatgaaaggtggaatcagatatcatcctgaggttgatccagatgaagttaacgcactagctcagctgatgacttggaagactgctgtagcagatattccatatggtggtgctaaaggtggaattggatgtagtccttcgtgaacttgagtttgagcgagctttagaggttg

SEQ ID NO: 152485 - DNA, 420 bp, Arabidopsis thaliana columbia
gattactggaactcgttgagggattgagaaaaaaataatcagaagagaaagatccatggctgataattgtatcagacttcttcactcagcctctgttttcttctgtttagggcttctaatttcatccttcaacttgttgcagggtattgcagctgaaaatctttccaagcagaaactgacctcatggattcttcagaatgagattgtaaaggaagtcaatgagaatccaaacgctggatggaaagcttctttcaatgatcggtttgcaaacgccactgttgcagagtttaagcgccttcttggtgttaaaccaacaccaaagacggaatttttgggtgtgcctattgtaagccatgatatatctttgaagcttccaaaagaatttgatgctagaaccgcttgtcacagtgcaccagtatt

SEQ ID NO: 152486 - DNA, 428 bp, Arabidopsis thaliana columbia
atatacgcatgtgtgttctgtcttagaacagctcttgttacaacctttgtatctacgtgatatggtgacttctgcaatgtggttcaacttaagtatgctgtggagagctgtacggggctctatctggggatccgttcttctttttacgttcccgattcgctttttcgcctctataccaagggaaagactgcttgagcagagtatttatgatttgaggtatgacctagagagtcttgaatggaatagaaaagagatagagaagaatctccgggaagcaataaaagaatatcgaatcatggaacaggacttagatgaactagaagatgaacatgatgaagccatttccaaaatagaaaagctagaggccgagctacaagaactaaaggaggaaaatcttcaactgatggaagttaatggaaaagactata

SEQ ID NO: 152487 - DNA, 419 bp, Arabidopsis thaliana columbia
gcaatatcatttccaatttataaaagttaaagccatggctgcatctttctctgtgcgctctatgataatggaagaagaagggagattcgaagcggaggttgcggaagtgcagacttggtggagctcagagaggttcaagctaacaaggcgcccttacactgcccgtgacgtggtggctctacgtggccatctcaagcaaggctatgcttcgaacgagatggctaagaagctgtggagaacgctcaaaagccatcaagccaacggtacggcctctcgcaccttcggagcgttggaccctgttcaggtgaccatgatggctaaacatttggacaccatctatgtctctggttggcagtgctcgtccactcacacatccactaatgagcctggtcctgatcttgctgattatccgtacgaca

SEQ ID NO: 152488 - DNA, 427 bp, Arabidopsis thaliana columbia
gatggctcgacgtggattattgatttcgttcttcgctatcttctccgtcctgcttgaatcttccacttctctgatgagttcttctagcgtcttcgtcaatccttccaaagtcaagcaggtttcatcgaaacccagggcgtttgtgtatgaagggtttctcacggaattggaatgtgatcatatggtctcccttgcaaaagcgagcctgaagagatctgctgttgctgataatgatagtggagagagcaaattcagcgaggttcgaaccagctctggcacctttatctccaaaggaaaggatcccattgtttctggtatagaagataagatctccacttggacatttcttccaaaagaaaacggggaagacattcaagtattgagatacgagcacggccaaaaatacgatgctcactttgattacttt

SEQ ID NO: 152489 - DNA, 450 bp, Arabidopsis thaliana columbia
ggaaattccgggggggaccaacgcgtccgaacaagaacaaaaaaatggcggatacagtttgaggaacccatcacgatatcatcggcggagaccagtacccgatgatgggccgagaccgagaccagtaccagatgttcggacgaggatctgactactccaagtctaggcagattgctaaagctgcaactgctgtcacagctggtggttccctccttgttctctccagccttacccttgttggaactgtcatagctttgactgttgcaacacctctgctcgttatcttcagcccaatccttgtcccggctctcatcacagttgcactcctcatcaccggttttctttactctggagggtttggcattgccgctataaccgttttctcttggatttacaagtacgcaacgggagagcacccacagggatcagacaagttggacagtgcaagga

SEQ ID NO: 152490 - DNA, 410 bp, Arabidopsis thaliana columbia
gccgctcaggtttcgtgaaaagaatctatcttgagcaatgtctccagctaaagttgatgtggccaagaaagccgaccctagggctaaggctttgaaagctgcgaaagcagtgaaatctggccaaatcgttaaaaagcctgcgaagaagatcaggacacaggttactttccacaggccaaagacattgaccgttcctagaaagcctaagtacccaaagatcagtgctactccaaggaacaaattggatcattaccagatcctcaagtaccctctcactactgaatctgccatgaaaaagattgaagacaacaacaccttagtcttcattgttgacatccgtgctgacaagaaaaagatcaaagatgctgtcaagaagatgtatgacattcagaccaagaaagtcaacaccc

SEQ ID NO: 152491 - DNA, 187 bp, Arabidopsis thaliana columbia
gcgaataacgaagattcaaactccaatggactagactcgtttgatgctgttaaacgacggttcaaagatcgatcaaagagagttgttcagacgagagagttgttgtctaaacaagcggtacaaacgcgtgagatcttatcgaaacaagccgttaagatcgctaaacaggccgaagaacatgagagat

SEQ ID NO: 152492 - DNA, 355 bp, Arabidopsis thaliana columbia
caattcgcgtgaagagacagagagagagaaaggggaagctagaagagaatcgagattaccaatcttttgttccagatcgtgagagaggaggagttggaagaatgaagatgactattgggtctttgttccaaccctaattttgcagattaatttcgtttttgttgatttctgttttgggtttgcgttgctgattccggtggattaaagggttctttttggagagcacaaatttgttgggttttttttggggaaagagaattaaaagtgtgtgctttagagtcttcgtttggtttgagagagattattatagtttttagggtttcggaattctaaaaatcgcgtgtcttttttaaag

SEQ ID NO: 152493 - DNA, 430 bp, Arabidopsis thaliana columbia
cggacgcgtgggcggagagtgagagaagagataaacatttcgagacaaatggccggcggcggtgctcgtcctctcgtgacgagtccaaaccttggatggtgacatgtccaccgatcaatcctccaccgtcgtacttcccgacgtcatgacggcgccagttcgaccagacatcgttaacttcgttcacgcccaaatctccaacaacagccgtcagccatacgccgtatcgaagaaggccggtcaccagacctccgccgagtcctggggaaccggacgtgccgtgtctcgtatccctcgtgttcccggtggtggtactcaccgtgctggtcaagctgcgttcggtaacatgtgtcgtggtggacgtatgttcgctccaaccaagatctggcgccgttggcaccgtcgtgtcaatgtcaacatgaagcgttac

SEQ ID NO: 152494 - DNA, 421 bp, Arabidopsis thaliana columbia
taaaatcagaattacaaacaaaaatggttttgcaaaagcttcctctattgggggggtttgctcctgaccatcgtcgcctctccagcaaatgcagatggacctgtttgcccgccgtcgaacaaactaagccgggcaagtttccctgaaggttttttatttggcacggctactgcggcataccaggtcgaaggtgcgattaatgaaacttgtcgtggaccagccttatgggacatctactgtagaagatatccagagaggtgcaataacgataacggcgatgtggccgttgatttcttccatcgttataaggaagatatccaactaatgaagaatctaaacacagactcctttagaatgtctatcgcatggccaagaatatttcctcatgggagaaaggagaaaggagtgagtcaagctggtg

SEQ ID NO: 152495 - DNA, 328 bp, Arabidopsis thaliana columbia
tgcggatgagcagatctcgagttttatgcttaaactcccaactcctgagctggaaagagctctggggattaaagaagctttggagacaaaagggtatttgaaaactcttcttttgcttttagtcctaatgggaacttccatgattattggcgatggaattctaacaccagctatgtcagtgatgtctgcaatgagtggtctacaaggtgaagttaaaggatttggaacaaatgcattggttatgtcttcgattgtgattctcgtggctttgttcagcatacaacggtttgggacgggtaaagttggttttctattttgcttcagttct

SEQ ID NO: 152496 - DNA, 410 bp, Arabidopsis thaliana columbia
cggaaataatggctttcccgcgatttctttctctcctcgccgtcgtcactctctctggtggggctcaccaccactgatgctgcctctcgctctctatccactccacctaaaacgaacgtactcgacgtcgtttcatctctccagcaaacacaaactatcctctcactcgacccgactcgttcctcactcaccaccaccaaacccgaatccctatccgacccggttttcttcaattcatcttcaccactatctctagagcttcactctcgagacactttcgtcgcgtcacagcacaaagactacaaaagcttaacactcagtcgactcgagcgcgactcatcccgagtcgccggaatcgtcgcgaagatccgtttcgccgtcgaaaggagtcgatagatccgatctcaaac

SEQ ID NO: 152497 - DNA, 404 bp, Arabidopsis thaliana columbia
cggaaatagcggcgactttgtgccacatccgaggatccatcgatcgtcgtcctctgatgtctcttagattgcttcttacactatttcccatttgaccagagactttaagcgagatgtgtcaagtcggtgatcgggtcttattcggtttaagcctaaaacgacgtcgtatgtgatgtgttattttcttcactacagcaactaaaaagattcttccttttgcttcagctgcgagctttggttggatctctcacttgcaaaaccaaatcccttatcgacttccaccgaaagatcacttcttaacctacacaaggtgtttgttatgaagatcagataaataaaaggtcatttgaggataatggttgatgttcaaagattcttacttgcttatttgtgatggacaatgt

SEQ ID NO: 152498 - DNA, 458 bp, Arabidopsis thaliana columbia
aacgccattcccgacccagacccacgcgtccaagcgagggcgacgaaggagtcagaagagtattctcaagtgatcatcgttgatgagattggcacagaagctgaagcacttgcttgtcgttccattgctgaaagaggagtgatgctaattggcactgctcatggagagcagctacagaacatcataaagaatcctactctttcagacttgattggtggtattgagactgtaacgcttggagatgaagaagcgagggcgagaaggagtcagaagagtattctcgagagaaaagctccaccgactttttattttttgatcgagatgagagaaagagattattggattgcacatcaaactgaaaagagtgttgatatgttgcttcgcggaagaaatcccatggttgaggtgaggagaagggatgaagagtacaaggtggtgatagaaagaaggaaggcata

SEQ ID NO: 152499 - DNA, 418 bp, Arabidopsis thaliana columbia
gtaacaacgtcgagaataatggcatcatctctttgtgcttcttctgccatcgctgccatgtcttctccaagtttcttgggtggtaagaaactgaggctgaagaagaagttgactgttccagctgtgtccaggccagatgcgtcggtgcgcgccgtcgcagctgatccagatagaccaatctggttcccgggaagcactcctccagagtggctagacggtagcctccctggtgacttcggatttgatcctcttggtctttcatcggacccggacagtctaaaatggaacgtacaagccgagatagtccactgccgatgggctatgctaggagccgccgggatattcattccagagttcctaacgaagatcggaatccttaacactccgtcatggtacacggcgggagagcaagagtatt

SEQ ID NO: 152500 - DNA, 277 bp, Arabidopsis thaliana columbia
ctttcttattcgtaacaaagttattgtaaacttatagaatggttgtgaaactatatggacaggtaacagcagcttgtccacaaagagtcttgctttgttttctcgagaaaggaattgaatttgagattattcatatcgatcttgatacatttgagcaaaaaaaaccagaacatcttcttcgtcagccatttggtcaagttccagccatagaagatggagatttcaagctttttgaatcacgagccatcgcgagatactacgctaccaaagttcgcgg

SEQ ID NO: 152501 - DNA, 444 bp, Arabidopsis thaliana columbia
acccacgcgacccatcacaatataatggtctaataaagaatatttctgattagttgataattttgtgaaagattcctgtgaaaaaggttaattaaatctattcctaatttatgtcgagtagaccttgttgttttgttttattgcaagaattctaaattcatgacttgtagggagggacttatgtcaccacaaacagagactaaagcaagtgttgggttcaaagctggtgttaaagagtataaattgacttactatactcctgaatatgaaaccaaggatactgatatcttggcagcattccgagtaactcctcaacctggagttccacctgaagaagcaggggctgcggtagctgctgaatcttctactggtacatggacaactgtgtggaccgatgggcttaccagccttgatcgttacaaaggacgatgctaccacatcgag

SEQ ID NO: 152502 - DNA, 402 bp, Arabidopsis thaliana columbia
cggacgcgtggggggatcgccttttctcactctctgcggattctcaattttgggcaagaaggcaagaacagtttttatcgcaattgagtcttgaagaccacaaggatttgatcacattggtgcttctgcctgtttatctgagtttgaggacaagaacttctggggcgtttataatttgccatggctagtaatgagaatctaccacccaatgttatcaagcagcttgccaaggagctgaagagtcttgacgaatcccctccagatggcatcaaggttgtggtaaatgacgaggatttcttacaaatatgtgctgatattgaaagaccaggtggtacttcttatgagaacggactttttcgtttgaaagtgggcttgtcacatgatttttcacattttccttcc

SEQ ID NO: 152503 - DNA, 336 bp, Arabidopsis thaliana columbia
caaagagtaaccaaattgatatttatctcttctcaaccatggcgatgagacaagccggtaaggcaacgatcagggcctgttcttcctcttcttcttcgggttacttcgctcgacgtcagtttaatgcatcttctggtgatagcaaaaagattgtaggagttttctacaaggccaacgaatacgctaccaagaaccctaacttccttggctgcgtcgagaatgccttaagaatccgtgactggcttgaatcccaaggacatcagttcatcttcactgatgacaaggaaggccctgattgcgaacttgataaacatattccggatcttcacgttctta

SEQ ID NO: 152504 - DNA, 358 bp, Arabidopsis thaliana columbia
aaactccaagttcttacctttttcccatttacaatcgttcgaattttttatagagaagaaaccatgaatgctttagctgcaacaaacagaaacttccgtcatgcatctcgaatcctgggtttggattcgaagatcgagagaagtcttatgatcccatttagagaaatcaaggttgagtgtacgattcctaaagacgatggcactctggtttcatacatcggatttagggttcaacatgacaatgctcgtggacccatgaaaggtggaatcagatatcatcctgaggttgatccagatgaagttaacgcactagctcagctgatgacttggaagactgctgtagcagatattccatatg

SEQ ID NO: 152505 - DNA, 246 bp, Arabidopsis thaliana columbia
gttaaaaaaaaaaccaaaaataattgacaaaggcttattcaacacgtgtccgcacgtttctgatattgatctcgctaatggcggtgacactgaacctttttcccacggtagaggcaaagaagcggagtagagatgctcctatagtgaaaggtctctcatggaacttttaccagaaagcatgtccgaaagtcgaaaacatcatcagaaaagagctcaagaaagtcttcaagcgagatattggtttag

SEQ ID NO: 152506 - DNA, 340 bp, Arabidopsis thaliana columbia
ttctccttctccttcttcttctacttatttcatcgtttcatttcttaggttgctgatttcatcacaacctctggatttgatttttgattcggaggtatataaaaaaatgtttagtggggtttgcgattcgatgaactagggtttgtaatttcactatcttcttcttctcttcgatcgtttactcatcgggtgagaaggaagcgtctttcatgtgttcttccgtgtaatcgactgttttattgggcttagtagctctagtttggtcaaagaattcgtaacaagtgaatcttagattgggaagatgctagaaggagcaaaagtcaacgtgcttgctgttggg

SEQ ID NO: 152507 - DNA, 143 bp, Arabidopsis thaliana columbia
gtgaaaaacgcgaaaggcatgagaagcgaagcgctcgtgattcagatgatagaaagaagcacaagaaagagaaagaaggagaaaaaaaagaaggcatgactctgattctgattgaagcgaattgtcccaggatggaacatttt

SEQ ID NO: 152508 - DNA, 372 bp, Arabidopsis thaliana columbia
gaaaaaaagcaaagaacacttgaacgttttctagatagagatggaagggaaagaagaggatgttcgagtgggagctaacaagttcccggagaggcaaccgataggtacatcggctcagacggacaaagactacaaggagccaccaccagctccatttttcgagccaggcgagctgagttcgtggtccttctacagagccggaatcgccgagttcatagccaccttcctgtttctatacataacagtattgacagtgatgggagtgaagagagcaccaaacatgtgtgcctctgttggaatccaaggcattgcttgggctttcggtggcatgatctttgcccttgtctactgtactgctggaatctctggtgg

SEQ ID NO: 152509 - DNA, 389 bp, Arabidopsis thaliana columbia
  unsure (1)..(389): unsure at all n locations
gaaccgcngcggcgacccacgcgtgcgatccgatcgattaattctgtcaatcacacaaaaaccgaaatccaaaaaaaaaccatggcgtttgagaagatcaaggtggcaaatcccatcgtcgagatggatggtgatgaaatgaccagggttatttggaagtctatcaaggataagcttattactccttttgtggagttggatatcaagtacttcgaccttggtcttcctcaccgtgatgctacggatgacaaagttactattgaaagtgctgaagctactaagaagtacaatgtggcgatcaagtgtgccaccatcactccagatgaaggccgtgtcacggaatttggcttgaagcagatgtggagaagtccaaatgggaccatcaggaa

SEQ ID NO: 152510 - DNA, 326 bp, Arabidopsis thaliana columbia
ttcgaccatggcgtttggtttccaagcatccatgaattttttgtttccacgctcttcttggtgttctcggaatcctcctctggcttcgagttcatccgggagaagaaacttgaagacttttcgttacgcctttcgcgccaaagcctctgccaaaatccctatgcctccgataaatccaaaggatcctttcctctccacgctcgcttctattgccgcgaattctccggaaaagcttctcaatcggccggttaacgctgatgtgccgccatatcttgacatctttgactcccctcagctcatgtcttctcctgcacaggttgaaagat

SEQ ID NO: 152511 - DNA, 378 bp, Arabidopsis thaliana columbia
  unsure (1)..(378): unsure at all n locations
gacgatcaatttattctagaaaaaaaaaattaagagagatgagagaaatgtcnagagcttggtcagtcgtttgtgtcttgctggccatatccttcgtctgtgcacgtgctcgtcaggtgccgggagagtctgatgagggaaagacgacgggacatgacgatacaacaacaatgcccatgcatgcaaaagcagctgatcagttaccaccaaagagcgtcggcgacaaaaaatgcatcggaggagttgctggagtcggtggattcgccggagttggtggtgttgccggcgtgggaggtctagggatgccactcatcggtggtcttggcgggatcggtaagtatggtggcataggcggtgcagctggaatcggtggattta

SEQ ID NO: 152512 - DNA, 386 bp, Arabidopsis thaliana columbia
ctgacatgaagaagcccattgattccaccattgtcagtcatataagtcatgaccgggtctgagatatcgcaactgttcttcagcctggtgacactttgaaggttatgatattgagtcacgaccgtgacagaggaagagtaagtctctccacaaagaagctggagccaacacctggtgatatgattcgtaacccaaaacttgtgttcgagaaggctgaggagatggctcagacattcagacagagaattgcgcaagcagaagccatggctcgtgcagacatgcttcgcttccaacctgagagtggactgacgctgagttctgacgggatactaggaccactcggatctgagttaccagatgatggcgtagatctaacggtcgacgac

SEQ ID NO: 152513 - DNA, 259 bp, Arabidopsis thaliana columbia
tcctgacaaaatggctcgagtctcttctcttctttctttctgcttaacacttttgatccttttggatggctacgcggctcaacagggtcagcagggtcagcagtttccgaacgagtgccagctcgaccagctcaatgcgctcgagccgtcacacgtactgaagagcgaggctggtcgcatcgaggtgtgggaccaccacgctcctcagctccgttgctcaggtgtctcctttgcacgttacatcatcgagtctaagggt

SEQ ID NO: 152514 - DNA, 231 bp, Arabidopsis thaliana columbia
ttcaaaaccaaaaaaaataagaaaagaatgtgtttcacaaaaatcttagtgaccttctttggtgtaggtttattggttattgggtcgtccccacaaaacgctatagcatcagagatcaaagcaaagatcaatggcctagaatgctttaatacatgtacatcttattatgatgatcataaatgcaatgtggactgcctatcatcggggtacccggcaggagaatgttatact

SEQ ID NO: 152515 - DNA, 346 bp, Arabidopsis thaliana columbia
  unsure (1)..(346): unsure at all n locations
ccgtccgtcctcaaaagnncatacaatnnacaattgtctactctttgttttaaattcctccaacttttttccaatcctagccattagcacttgggttgagacgcanncccaaattgtgacctgaccannagactcaagaccaaggctttctaccctaaagaatcttccacatagaccagcccttgctcccccttcaaatcatcatccccactctcatgggaagcgcgtgtgctccagacgctggctcaagaccaggcccgtctccagtacctgagcagcctcgtcgccgggagatctgtagtccccattgcctcagggcgtcaaatgttgcaaagcactacataca

SEQ ID NO: 152516 - DNA, 235 bp, Arabidopsis thaliana columbia
aaagatagagagagagagagatatggctagtggagtcgctcgtggtcgtttagctggagagaggaaatcgtggaggaagaatcatcctcatggttttgtggcaaagccggagacggggcaggatggaactgtgaatctaatggtgtggcattgcactatacctggtaaagctgggactgattgggaaggtggattctttccattaacgatgcacttcagtgaggattattcgagc

SEQ ID NO: 152517 - DNA, 358 bp, Arabidopsis thaliana columbia
cttttagtaacaatggtttcttcttctttaaccaagcttgtgttctttgggtggctcctgctgctcacattcgcggacaacgttgtggctggaaaatctggcaaagtgaagctcaatctttactacgaatcactttgtcccggttgtcaggaattcatcgtcgatgacctaggtaaaatctttgactacgatctctacacaatcactgatctcaagctgtttccatttggtaatgccgaactctccgataatctgactgtcacttgccagcatggtgaagaggaatgcaaactaaacgcccttgaagcttgcgcattaagaacttggcccgatcagaaatcacaatactcgttcatac

SEQ ID NO: 152518 - DNA, 391 bp, Arabidopsis thaliana columbia
ggaatgagagaattcatcctcgattttgaagacatcgcctaaggattttgttggtactttgttcttctctttgactttctctgtgactccatcatctcaatttctctcttcttctttgctctaatcacagacttctcttctttcctcttctgtctcaatttgatttcttaaaaaaacaaaaaaaaagatgggtttaatcaagaacacagttcattactgttgtgtctcaagagacaatcagattctttactcttacaacggtggagaccaaaccaacgagagtcttgctgctctgtgtttagaaaagtctcctccttttcatacttggtactttgaaactattggtaaaagaagatttgggtttttaattggagatgggtttggttatttc

SEQ ID NO: 152519 - DNA, 331 bp, Arabidopsis thaliana columbia
accaaatcgggaatggttcgattttttgggaaagaagaaggacgaaacaaaaccagaggggactccgatcgcttaagagttggagcagaaggttcaaatttcagagccggagccagaggttaaacacgaaagtcttcttgaaaagcttcaccgaagcgacagttcttctagctcctcaagtgaggaagaaggttcagatggtgagaagaggaagaagaagaaggagaagaagaagccaactactgaagttgaggtaaaggaggaagagaagaaagggtttatggagaagttgaaagaagaagctttctggacacaagaaacctgaagacgg

SEQ ID NO: 152520 - DNA, 176 bp, Arabidopsis thaliana columbia
gcgctctccttttccccaaaaattcaaacttttttctctttgtaaaattctgaggcaaaaatgcggcgtaagtgctgccatgtttgatttgctgtaaccctcaagatccttaattttgtccaagctttcaatggtgtttcgatcattatctactccatatggatgctccatgaata

SEQ ID NO: 152521 - DNA, 308 bp, Arabidopsis thaliana columbia
  unsure (1)..(308): unsure at all n locations
tccactttttcgacgaacctgaaaaatctttaattttagaattagtcaataccggaaaatgcctgggttgtctcttgcttctggattttgtcaggtctctatcacaaaggaggaacaagagttttgcaccaagaagagagaggaaggattctggtttacgggagctagtgaaaatcttctgtgaanatggctttcctctctcattctctgtgaaatttgaaagtattgatttcgaagatatgggtgctttctgttgttgctttcaaagtgatctctttgagaggtatgtgaatccaaacactttcata

SEQ ID NO: 152522 - DNA, 130 bp, Arabidopsis thaliana columbia
  unsure (1)..(130): unsure at all n locations
gttaaaaccctcaatttgtccgacggtgttacgcgacggctatattcggcggcggaagcgtgtttccatctcactctctntcgactaatctttccgccgtctgaagaatgtcttcttcgaagcggaagcg

SEQ ID NO: 152523 - DNA, 300 bp, Arabidopsis thaliana columbia
atcgctctggttgccaactcgatcatcattttcttctacccactttctctgggtgctctccgtatctaggagggccctcagatctgtgcttaattctccggtaacattaccggcatcactgggattgctgatctggaaccgctgtgaaattttaggttttctctgagaagacaggcaagtttaacgatggcggcgaagacggccagatcaaaagctacgccgacgaaggaaaatggtgtcagagtcgaggaaggattgagtctgttcaagtctgataagttcgatgcttatgcttatgtg

SEQ ID NO: 152524 - DNA, 308 bp, Arabidopsis thaliana columbia
tgggtttgaaggaggaatttgaggaccacggtgaaaaagtgaataccctcggggagttgccatccaacgaggatttgctcattctctacggactctacaagcaagccaagtttgggcctgtggacaccagtcgttctggaatgttcagcatgaaggagagagccaagtgggatgcttggaaggctgttgaagggaaatcatcggaagaagccatgaatgactatatcactaaggtcaagcaactcttggaagttgctgcttccaaggcttcaacctgatgaatcaaatcctcatctgcagtaacttta

SEQ ID NO: 152525 - DNA, 426 bp, Arabidopsis thaliana columbia
cataagctaagaaaacgaaactcaactaattttgttatcacccaaaaagaaggtcaaacacaatggctttcgctttgaggtggttcacatgccttgttttaacggtgtgcatagttgcatcagtcgatgctgcaatctcatgtggcacagtggcaggtagcttggctccatgtgcaacctatctatcaaaaggtgggttggtgccaccttcatgttgtgcaggagtcaaaactttgaacagtatggctaaaaccacaccagaccgccaacaagcttgcagatgcatccagtccactgcgaagagcatttctggtctcaacccaagtctagcctctggccttcctggaaagtgcggtgttagcattccatatccaatctccatgagcactaacttgcacaacatcaagtgaaatggaagcttacgtc

SEQ ID NO: 152526 - DNA, 311 bp, Arabidopsis thaliana columbia
aaactaaagattctttaagaatatggcaccttctaagcgactagatgactgttgcttcttgttagttttgttggtcgctcaagccaattctcaagggttgaaagtaggtctctacagaaaaacatgcccacaactcgtgcggtatagataaaaaggtcgtgttcgatgccatgaacaaagcaccaacactcggtgctcctttagcttagaacgttgttccacgactgcttcgatcggagatgtgacggatcagatttgttagactaaccaaacaatcaaggtgagaagagtgcactttctaacctaagtct

SEQ ID NO: 152527 - DNA, 432 bp, Arabidopsis thaliana columbia
  unsure (1)..(432): unsure at all n locations
caaaaatggcgggctacaactcttaagctatcgaagcggcacctttgaaagaggatctgggtattgtgatccgggccatcaggagcctcnactttctagagcaatggagaccatttttgcaccattaccacctgatcattgtccaagatggagacccttccatcaagatccgagttcccgagggttatgactacgagctctacaaccgtaatgatatcaacaggatccttggtccaagagctaattgtatctcctacaaagatggtggttgtcgctgctttggcttcatggtttctaaaaagaagtatatctacaccattgatgatgattgctttgatccaagtgggaaagacatcaatgtgatagctcagcacataaagaaccttggaacaccttcaacaccacactatcttaacactttttatgaccctt

SEQ ID NO: 152528 - DNA, 296 bp, Arabidopsis thaliana columbia
ccgggaggacccacgcggtccggttcttcctattttaaccaacctggggtttttgggtggtctcctccggctaacattaacggccaaccgggtggttggaaaagttgccaaggtaaacctcaatccttactacgaatcactttgtcccggttgtcaggaattcatcgccgatgccctaggtaaaatctttgactacgatctctacacaatcactgatctcaagctgtttccatttggtaatgccgaactctccgataatctgactgtcacttgccagcatggtgaagaggaatgca

SEQ ID NO: 152529 - DNA, 369 bp, Arabidopsis thaliana columbia
gcgaaaagagagatttaatacaaaagaaagagataaaagaatgatatggcaggactcatcaacgggatcggagacgcactccacatgtggaggaggcaacaaggaaggtgagcacaagaaggaagaggaacacaagaaacacgttgacgagcacaagagtggtgagcacaaagaaggtattgttgacaagatcaaagacaagatccacggtggtgaaggtaaaagccacgacggagaaggcaaaagccacgacggtgagaagaaaaagaagaaggacaagaaggagaagaaacatcatgatgatggtcaccacagcagcagcagtgacagcgacagcgattaaggtgaggaagtgaggaggatcgcttg

SEQ ID NO: 152530 - DNA, 319 bp, Arabidopsis thaliana columbia
  unsure (1)..(319): unsure at all n locations
gtaaaggatcgtctgttggccttaggcaactttaaatccaagatgctgccacctccgttggggtctgcatttgccagcccagcacggnccgacccangaggtggaggagaaacttgtgcagaaactggaatcaatattttcttcacaaagattaataaattggctgctgtaagaatcaatggaatggtggaaagactacaactttcacagcaaataagggagagtgtgtattgtttcttccaacatgtacttgctcagcggacttctcttttattcagtcgacacattgaccagatcattctctgttgcttctacggag

SEQ ID NO: 152531 - DNA, 353 bp, Arabidopsis thaliana columbia
  unsure (1)..(353): unsure at all n locations
gcaccggaaattttaatggcggcaaggcaaccggccgttttataattggtatcccaaatcgaaattctgggaaggaagagaaggcaatgggggacaaattggaaggtctactagctcattttcctgtttcgttcggtaagaaatcgaaggtttcggcgtcaactgaagccattcacagcgcaactcgccgcaccgatgtagccaacgacgccggagtttcgttcgatatcaccacgaagaaacctgattccgataaatctggattcccgtctctatcttcctcatctcaaaccttgctccgaagtgttcgcggtccgaatcgtaacccctacagcttcngtgatgtagcaatg

SEQ ID NO: 152532 - DNA, 363 bp, Arabidopsis thaliana columbia
attcttaaaccctagttcttctatttttttcgatctacgacaatggcggacgctgaaacgtttgctttccaaggtgagatcaaccagttgctttccctcatcatcaataccttttactctaacaaggagatcttcctccgtgaactcatcagtaactcttctgatgctttggacaagattagattcgagtccttgacggacaagagcaagctcgatggtcagcctgagctcttcattcacatcattcccgacaagactaacaacaccttgaccattattgatagtggtattggcatgaccaaggctgatttggtcaacaacctttggaacaattgcaagatctggacccaaggaattcatgga

SEQ ID NO: 152533 - DNA, 321 bp, Arabidopsis thaliana columbia
agagaagagagaaagagagaaagagagacagtgataatggcgtacagtgcgtgtttcctgcgccagagcgcatgggcttcagcagccgcacgatcatcatcttactcctcattccagcgtcacgtgtcgctctccaaacctgttcagatcatctgtaaagctcaacagtctcatgaagacgataactccgccgtctcccgccgtcttgctctcactctgctcgtcggcgccgctgctgttggttccaaagtatctgctgctgatgccgcctacggtgaagctgcaaacgtgtttgggaagccaaagacgaacacagacttt

SEQ ID NO: 152534 - DNA, 377 bp, Arabidopsis thaliana columbia
aaaatcttaaaaactttctctcaattctctctaccgtgatcaagatgcagatgtttgttgagactctcaccggaaagacaagcaccctcgaggtggaaagctccgacaccatcgacaacgttaaggccaagatccaggataaggagggcattcctccggatcagcagaggcttattttcgccggcaagcagctagaggatggccgtacgttggctgattacaatatccagaaggaatccaccctccacttggtcctcaggctccgtggtggtatgcagattttcgttaaaaccctaacgggaaagacgattactcttgaggtggagagttctgacaccatcgacaacgtcaaggccatgatccaagacaaagagggt

SEQ ID NO: 152535 - DNA, 396 bp, Arabidopsis thaliana columbia
tttgaaccttcaaagatcaaattcaagaaactcaaaaaaaaacaaaaaaaatgtgggatctgaacgacgcaccacaccaaacacaaagagaagaagaatctgaagagttttgttattcttcaccaagtaaacgggttggatctttctctaattcaagctcttcagctgttgttatcgaagatggatccgatgacgatgaacttaaccgggtcagacccaataacccacttgtcacccatcagttcttccctgagatggattctaacggcggtggtgttgcttctggctttcctcgggctcactggtttggtgttaagttttgtcagtcggatctagccaccggatcgtccgcgggtaaagctaccaacgttgccgctgccgtagtggagccggcac

SEQ ID NO: 152536 - DNA, 381 bp, Arabidopsis thaliana columbia
gatggccgcaacatccgccgctgctgcagttgcttcttccatcatgggtactcgggtggctcccggtatccatcccggttcaggtcggttcacagccgtgttcggtttcggaaagaagaaggcagctcccaaaaagagtgccaaaaagacggtgactacggaccggcctctttggtacccaggcgccatttctcctgactggcttgatggttccttggttggagattacggttttgatcccttcggtttaggcaaaccggccgagtatcttcaattcgatatcgattcactagaccagaatctggctaagaacttggccggagacgtgatcggaacccgtacggaagctgccgacgccaaatcgacgccgtttcagccgta

SEQ ID NO: 152537 - DNA, 393 bp, Arabidopsis thaliana columbia
aacaaactcaatcccagccttctcctcctttgtcttctcccttattccctgtgcgtttaggcccccaattttttcaattaatccctccttttctcctcttaatctgaatccgaagcaacgcataatccataacaaagtctggaaaatttcttccgggataataaagagatccattaggagtaaattatctgacaagagaatacaaagggcaatttcattttagttgaattagggatttgggctcgtcatggctcctggaggcagtgctttgaaagaagtcatggaatctaattcaacgggaatggattacgaggttaaaacggcaaaagtggaagttaataataacaaacctacaaagccagggagtgcaaggattggaaaatatgggatcca

SEQ ID NO: 152538 - DNA, 191 bp, Arabidopsis thaliana columbia
cggacgcgtgggttcttcttctaccaatttaattcctttcttcagcttcttgtgttgtgacgcatactggtcgcagtcttgagatatggccgccgcagtttccaccgtcggtgccataaacagagttccgttgagcttgaccgggtcaggatcaggagctgtttaagccccagtttaaacctttttgggaa

SEQ ID NO: 152539 - DNA, 348 bp, Arabidopsis thaliana columbia
gttggatgtgtatttttttggccacaaaaaattgttctttgcttggggaaaaaaatattagataactggcttttttgtaaggggttttccccttttaattacttttaagatatagaagattactcatttaaaaaaaaaaaactgagattgattaagagaaaaatcttagtaacattaatcttgttgatataaagccacgccagtggtaatcccctagtcagagaaagaggaccaaactttgagaaacgacaatggcgatgtccgatcttccaaatgatttggtggaggagatcatctctagggttccggtaaaatctataggagcagtaagctctacttgcaaaaact

SEQ ID NO: 152540 - DNA, 364 bp, Arabidopsis thaliana columbia
accaacgcgtccgtggtgggggaggaaggttggggaaaaaaattgggaggcattggtgtgatgatggtggcgatgctttgcctttgggcactctttgcaacatctgaagcagtaccagaggctgagccaggtttgatgatgaacttctacaaggacacgtgtcctcaggccgaagacatcgtccgtgaacaagtcaaactcctctacaaacgccacaagaacaccgctttctcttggctccgtaacatcttccatgacttgcgccgtgagtcatgtgatgcgtcgcttttgctggattcgacaagaagagagctaggagagaaagaacacgacaggagcttcggacttagaaactttaggtaca

SEQ ID NO: 152541 - DNA, 394 bp, Arabidopsis thaliana columbia
  unsure (1)..(394): unsure at all n locations
caaaccctagttcctcctctctctcatttttcggagatattcaccagagcagtaaccatggacgctaaagaaacctctgccaccgatttgaaaagaccgagagaagaggatgataacggcggcgccgctaccatggagacggagaacggagatcagaaaaaggaacctgcttgtttctccactgttattcctgggtggttctctgaaatgagtcctatgtggccaggagaggcacactcattgaaggttgagaaagttttgtttcaagggaaatcagattatcaggatgttattgttttccagtctgcaacatatggaaaagttttggttttggatggagtaatccaacttacggagagagatgaatgtgcttatcaggaaaatgancactcat

SEQ ID NO: 152542 - DNA, 341 bp, Arabidopsis thaliana columbia
aaaagagagagagagagagagagacagagttagagagagattctgcggaggagcttcttgttcgtagggtgttcatcgttattaacgttatcgcccctacgtcagctccatctccagaaacatgggtgcaggtggaagaatgccggttcctacttcttccaagaaatcggaaaccgacaccacaaagcgtgtgccgtgcgagaaaccgcctttctcggtgggagatctgaagaaagcaatcccgccgcattgtttcaaacgctcaatccctcgctctttctcctaccttatcagtgacatcattatagcctcatgcttctactacgtcgccaccaattact

SEQ ID NO: 152543 - DNA, 378 bp, Arabidopsis thaliana columbia
agaaagcttcctgctaatgatcaagaagctgttggaaacaatgaacctgcagagaggcgcggatggaactctaatagtattgaagttcctgaagcacagatcactaatagtgctacacccactacaacaccaaggtcgactggtctgaagcgcgacttctcaaggtctgactcttcggttagtgaagatggacccaaggaacgtgtggttcctccatctccaaaggagcctacaaattccctcaggattgaccgtttccttaggccgttcacactgaaagctgttcaggagctcctgggtaaaaccggaaatgtcactagtttctggatggaccacattaagacccactgctatgtatcgaatccctcggttgaagaa

SEQ ID NO: 152544 - DNA, 302 bp, Arabidopsis thaliana columbia
aaaaaaaattcacccaaaaaataaaaacctttttgccttcttcttcgccgaggcgggcctgggtctttcttcaagtcgccgggaaaatcttctctttctcttcccccgccggtccttcaccaatcctctgatctctctacacacgaacctttgattttgaccaacgtcgatgcatgttcatgactagtctcttcctcaatccttcaattgcatcaattcacgtcgatttcgtatccgattcgttgttctagctttttgtgtggtgttagggttttacgattttggaattgcggtctggtgtt

SEQ ID NO: 152545 - DNA, 385 bp, Arabidopsis thaliana columbia
  unsure (1)..(385): unsure at all n locations
tcaatatctagtnttttcccttgtttctgatcagtgtgatcacgtagagtgccttgaaggagaagaaagaaacaaaaacaaaggaaaatgggatacctttttcaagaaaccttaagctctaaccctaaaactccaattgttgttgatgatgataacgagttgggtttgatggccgtgagacttgccaacgccgccgcctttcctatggttctcaaagccgccctcgagcttggtgtctttgacactctctacgccgcagcctctcgcaccgactcattcctctcaccctatgaaatagcaagtaagctaccaactacaccttgtaaccctgaagcgccggttttgttggaccgatgcttcgtctactcgctagctactccatggt

SEQ ID NO: 152546 - DNA, 407 bp, Arabidopsis thaliana columbia
accacgcggcgagacttagagagacagagaaggaagaagatgaagaagattaagaaaaaactatggagaatgagaggggagaagcaggtttacttggctaagctctccgagcaaaccgaaagatacgatgaaatggtggaggcgatgaagaaagttgctcagcttgatgtggagctaactgtggaagagaggaatcttgtatctgtagggtacaagaatgtgattggtgcaaggagagcatcatggagaatactatcttccattgagcagaaggaagagtccaagggaaatgatgaaaatgtcaagaggcttaagaattatcgtaagagagttgaagatgagcttgctaaagtttgtaatgacatcttgtctgtcattgataagcatcttattccatcggctaacgc

SEQ ID NO: 152547 - DNA, 397 bp, Arabidopsis thaliana columbia
  unsure (1)..(397): unsure at all n locations
gcgaatttggggtagaaaaattcgaaagaaatgaaagagatgggagtgatagtgcttcttctcgttcactcggtcttctacgttgccttttggttcaatgatggactactaccaaacggtgacttcgaactcggtccacgacattcggacatgaaaggaacacaagttatcaacataacagcaatcccaaactgggaactctcaggctttgtcgagtacattccctcaggacacaaacaaggcgacatgatccttgtcgtgcctaaaggcgcattcgcagtacgtctaggcaacgaagcctcaatcaaacaaaaaatcagcgttaagaaagggtcgtactattcgataacgttcagtgctgctcgaacatgcgcacaagacgagcggntaaacgttt

SEQ ID NO: 152548 - DNA, 372 bp, Arabidopsis thaliana columbia
aaaaaaaaccagagggggaggaaccaaaaccattatttttagcaaaaccaaatttctactcgtcgaattggaaatcaaaatatagaaacggggtcttgctccgtcgccgtatgtaattctccggtgttttcaccgtcgtcttctctattctgcaacaaatcttcgattctctcgtcaccgcaagaatctctttctctaacgctttctcatcgcagacctcagacctcttctccttcctctccatccaccaccgtttcttctcctaaatctccatttcgtctccgtttccagaaacctccgtccggattcgctcctggtccattatcttttggatctgaatctgtttctgcatcctctcctccggaggtgttt

SEQ ID NO: 152549 - DNA, 338 bp, Arabidopsis thaliana columbia
gtttgtgtctcgtaacttatcctgtgagctaaaatggtgaaagcaactaaggcagagaagaagatcgcctacgagaccaagctatgtcagcttatcgatgagtacacccagatcttggtcgttgcggccgataacgtcggatcaactcagcttcagaacatcagaaagggtcttcgtggagactccgtcgtgcttatggggaagaacactatgatgaagcgttccgttaggattcactctgagaacaccggaaacactgcaatcctgaatctgcttcctctccttcagggaaacgttggtttgatctttaccaaaggtgacctcaaggaagtgagcga

SEQ ID NO: 152550 - DNA, 406 bp, Arabidopsis thaliana columbia
ggaaatggcgtcgggatggggaataacggtaaacaaagggagatgctacgatgtctggatggatttcagtgaatgttgtctgactgcagagagcccaaagattgtacccttcttcgtgaagattacctcgagtgtctccaccattccaaagagtttcaaagaaggaacaggatatacaaggaggagcagcgtaaactaagagcagcttcgaggaaaggtgaagaagccggagatgggactcacaaccatcactagtctcaacaatcctccttcaagcttcatccgattccagagaagaataataaaaggttcatggaagattttgtatcttggaatctctaaacgctttgattgtttttcagttttcaattttatccaatcatggtctgctttctttttatgttaa

SEQ ID NO: 152551 - DNA, 352 bp, Arabidopsis thaliana columbia
cgataacgtttccgtctgtatctctctcttccgtcttctactcttcttcttggtcttcttcttccactcacaagctatcgagctaaaacactgaagcagacattagcgttgagaaaaaaaaaaaagtaagaacgagagagagaaagccatgtctgcgaaaacaatcctatcatcagtagttttggtggttctcgtcgccgcatcagcagcggctaatatcggattcgatgagtcaaacccgatccgaatggtctccgatggtctccgggaggtagaagaatctgttttccagatcttaggtcaatctcgtcacgttctctctttcgctcgcttcactcaccgatatgggaaa

SEQ ID NO: 152552 - DNA, 375 bp, Arabidopsis thaliana columbia
cggacgcgtggggaaaaaaatcgtcttttctatctcctttgaagatggcgagcaatattatcatgttcgaggatatcttcgtggtcgataagctagaccctgatggcaaaaagttcgataaagttacgcgtgttgaagcaaggagccacaacttggaaatgtttatgcatttagatgttaacactgaggtttatccattggctgttggtgataagttcacgctggctatggctcccacgcttaatctcgatggaactcctgataccggatactttactcccggagcaaagaaaacacttgcagattagtatgaatacatcatgcacgggaagctttacaagatctctgagcgtgacggcaaaaactcaaaagcag

SEQ ID NO: 152553 - DNA, 380 bp, Arabidopsis thaliana columbia
gttatctttttattttctctatctatctggatattattttttcacttggggagttggagaaacctctcctctgtctatctatagccatggctgctttcacttgtacctctcgtcctccgatttctctccgctccgagaccagaatcgtatcctcatcaccatcggcttcttctctctcttctcggcggatgttcgccgtcttaccggaatcatcaggtttgagaatccgtctttctctctctccggcttcgttgacctcgattcatcaacctagggtttctcgattacgaagagccgtcgtctgtgaagctcaggaaactactaccgatattcaagtggtcaatgactcgacatgggactctctagttcttaaagcaact

SEQ ID NO: 152554 - DNA, 366 bp, Arabidopsis thaliana columbia
  unsure (1)..(366): unsure at all n locations
gtttttgagccataaacataaattaaatttgacgcatgcaaagaaagcaaaatggaaaatggaagcgggaaggtgttgaagccgatggactcaaagcaattgaaagagtacggacatttgatggttgatttcattgctgattactacaaaaccatcgaggatttccctgttcttaccaagntcagcctggtattttcataagcttttgctgatttgacctgacacctgaactctgacaagtctgtgtgtcagcaagatatgctgagaccattgaagcgagttttgtatatcttacgatgtgtggtctggaagtaggtgctgatgtgttagtgtcttcgtgcacaatgatgcgttgtgtgtaattac

SEQ ID NO: 152555 - DNA, 445 bp, Arabidopsis thaliana columbia
gccgcaattcaaaattcctctttcaaaatctttctttcgattttttagcttaatcctgagtagcgttaacaatggctggtaaaggagaaggtccagcgattggtatcgatctcggtaccacttactcttgcgttggagtttggcaacacgaccgtgttgagatcattgctaatgatcaaggtaacagaaccacaccgtcttacgtcgccttcactgatagcgaacggttgattggtgacgccgcaaagaatcaggtcgccatgaacccgattaacactgttttcgatgcgaagaggttgattggtcgaagatttactgatagctctgttcaaagtgacatcaaattgtggcccttcacgctcaaatctggacctgctgaaaaaccaatgatcgtcgttaactacaagggagaagattaagaagtttttgctgaagaaattttttt

SEQ ID NO: 152556 - DNA, 382 bp, Arabidopsis thaliana columbia
  unsure (1)..(382): unsure at all n locations
nctaatccttccttttcctccgccagattcttttcttgcgaagatgagcaacgacaaggacagcatgaacatgtccgatctctccaccggtcttaacgaggaggatcgtgccgggcttgttaatgctcttaagaacaagttgcagaatttggctggacaacactctgatgtccttgaaaacttgactccaccagtcaggaagcgtgtcgagtttctaagagagattcagaaccaatatgatgagatggaagcaaaattctttgaggagagagcagctcttgaagctaagtatcaaaagttatatcagcctttatataccaagcgatatgagattgtgaatggtgtggtcgaagtgaggtgcagctgaagaagtaaatcgaca

SEQ ID NO: 152557 - DNA, 363 bp, Arabidopsis thaliana columbia
ataaactcatttgtcccatgtcttcttctttttcaatggactaactcatgtgtctgcttggtctaatctctccggttgttcgggccaagtcttcttccaccgtccctgctatctttaccttcggtgactctatttttgacgccggaaacaaccattacaacaaaaactgtaccgctcaggctgattttcctccttatggttcttcctttttccaccgtcctactgggaggttcaccaacggaagaaccgtcgctgacttcatctcggaatttgtaggcctttcattacagaaaccattcttggaattgcagattcaaatcttgaatggaacttcaaacttttcaaatggcattaactttgcta

SEQ ID NO: 152558 - DNA, 377 bp, Arabidopsis thaliana columbia
gagggattcgacccctcggtccgattaacttttccaatggattaccaatccaacgctttagtccactcagccatctttcctaatcgaaaggggatatttaattaggttccataaaaaaaaaaaaaggcttgaaaaagaaccttctccactttattcttaaaaagctttctttttttgttatagatattctttatctttatattatatatatatatattttttttcattttctatatttttttctatattttattatattattatatatatatatattctttttgattatttgattatataaatatatatatcctatatttaaatatataatatatatataatatatatcctatatataaattatataaatcctctat

SEQ ID NO: 152559 - DNA, 368 bp, Arabidopsis thaliana columbia
atcaatcgaaattccaaccgactcaacaatgtcttcatccaacgcctgcgcctctccgtcaccgttccccgccgtcacgaagcttcatgtagactccgtcacgtttgtaccgtccgtcaagtcaccggcctcctccaatccattattcctcggcggcgccggtgtccgaggccttgatatccaaggtaaattcgtgatcttcaccgtcattggagtatacctagagggtaacgccgttccttctctatctgtcaagtggaagggaaaaactacggaggagctaacagaatctatcccgttcttccgtgaaatagtcaccggtgcgtttgagaagtttatcaaggtgacaatgaaactgccgttaacgg

SEQ ID NO: 152560 - DNA, 364 bp, Arabidopsis thaliana columbia
  unsure (1)..(364): unsure at all n locations
gaagaaactacaatagttaattaatcaaagtagaagtaagagaaatggcagaggctaactgtggatgtggctcgggctgcaaatgtggtgactcttgcagttgcgagaagaactacaacaaggagtgcgacaactgtagctgtggatcaaactgcagctgtgggtcaaactgtaactgttgatgaaattattatggtctaaaatcatatatatggcagaaaaattggggaaaatatgtgttttatgctaagagatgtgtgtgtgttgttggaataaagacgtgaccgttgtgttgcgtatcaactctcttaagctttgactnttcccagctttgtattttcctatgtatggaaatggtgtgatt

SEQ ID NO: 152561 - DNA, 300 bp, Arabidopsis thaliana columbia
  unsure (1)..(300): unsure at all n locations
attgcgagatccgacaacaccgcttcttttgatttcgatcttactttcctggatctcataggtaatctggtttgagtctagaaatgtcnagtgatgcaactcgtacgccattgttacccactgagaagatagataccatggctcaagatttcaacctgaactcaagaacttcttcttcaagaaaacgaagattgcgtcgctctagaagtgctcctcgtggtgattgtatgtacaatgatgatgtcaaaatcgacgaaccaccttctcattcgaggtaaatcccaatgttcagtgatctaa

SEQ ID NO: 152562 - DNA, 289 bp, Arabidopsis thaliana columbia
aagagctagaactgtaggagtgacaagcacgtgcgagtcacagagagttgttcaagaagatggtgatatcattaatgttgtggatactcctggtttgtttgatttgtctactgcagctgattttattggtaaagagattgtgaggtgtataagtttggcagaagatgggattcatgcgatcttgttggtattctctgtgaggcggcttgctgaagaggagcaaactgtgcttagtttcttgcaagcgctattcggcagtaagatcgctgactatatgatcgttgtttta

SEQ ID NO: 152563 - DNA, 285 bp, Arabidopsis thaliana columbia
tttaataataaaaaaaatttaagcttggcttttttaattcctccttttccggctccttcggagtcttaatggggccacttggcttcttcttcttcttccgatatgtctgcttctgattcctcttcctctcttcccgttactcttgacaccatcaaccccaaggttatcaaatgtgagtatgctgtccgtggagaaattgtcaacattgctcagaaattgcaagaagatttgaagactaacaaggacgcttatccctttgatgagattatctactgtaatatcggg

SEQ ID NO: 152564 - DNA, 387 bp, Arabidopsis thaliana columbia
aaagctctcttttctctccagatttcgatttccgaggctcgagagaaaaccgtaaatctggtctccgttcactcaatcaaccaaagatgcgtgagattcttcacatccagggtggtcaatgcggtaaccagatcggagccaagttctgggaagtggtttgcgccgagcacggcatcgatccaaccggaaggtacaccggagactcagatctgcaacttgagcgcatcaacgtttactacaatgaagcgagttgcggtagattcgttcctcgtgcagtgctcatggatttggagcctgggactatggatagtctcagatctggaccgtacggtcagacctttcgacctgataacttcgtctttggtcaatccggtgcgggttacaact

SEQ ID NO: 152565 - DNA, 391 bp, Arabidopsis thaliana columbia
acggtcagacccatctgcgttctctcccggttcgtctcgcgccggggtaaaccggatccggttcttgcttgagagtgtcaaggatctcgattctagcctgaagaaacttggttcacggttgcttgtttttaaaggtgaacctggcgaagtactagttcgttgcttgcaagagtggaaggtgaagaggctttgctttgaatatgatacagatccgtattatcaagctttagatgttaaggttaaggattatgcttcttcaactggagttgaggttttctctccagtgagccatactctgttcaatcccgcacacattatagagaaaaacggtgggaagccacctttgagttatcaatcatttcttgaaggttgctggggagcccctcatgtg

SEQ ID NO: 152566 - DNA, 400 bp, Arabidopsis thaliana columbia
atattttacaagcctttctccactaagcccttctctcttctactcttggccgctcacttggatctcccacagagcgatcaatcacaaattccttcttctctctctctcttttcgtccctaagaatcaattatgaaaggagctaaatcaaagactgaaaccaggagctccaagctctctgtgaccaagaagccggctaaaggagcagggcgtggcaaagctgctgctaaggaccccaacaaaccaaagaggccagccagtgctttcttcgttttcatggaagatttccgtgagactttcaagaaggaaaaccccaagaacaagtctgtagctactgttggaaaagctgctggagacaagtggaagtccttgtctgattctgagaaagctccttatgttgct

SEQ ID NO: 152567 - DNA, 247 bp, Arabidopsis thaliana columbia
cggacgcgtgggcaatttctcaaaatcttataaactttctctcaattctctcgtaccgtgagcaagatgcagatggttgttaagactctcaccggaaagacaatcaccctcgaggtggaaagctccgacaccatcgacaacgttaaggccaagatccaggataaggagggcattcctccggatcagcagaggcttattttcgccggcaagcagctagaggatggccgtacgttggctgattacaata

SEQ ID NO: 152568 - DNA, 277 bp, Arabidopsis thaliana columbia
  unsure (1)..(277): unsure at all n locations
ntctcactgtaatcccttagatcttctttttaaatttcaatggcgtccggtgatgttgaggatcggtgcttcggtggaggtgtagcatgggccactgatgacagagctcttgagactgccttcgctcaatacggcgacgttattgattccaagatcattaacgatcgtgagactggaagatcaaggggattcggattcgtcaccttaaggatgagaaagccatgaaggatgcgattgagggaatgaacggacaagatctcgatggccgtagcatcac

SEQ ID NO: 152569 - DNA, 263 bp, Arabidopsis thaliana columbia
gggagacccacgcgtgcggagaattctaaaaataaaagataagaccttttacgttttgaaccttaaagcttgaaacttggttcatccatggcggctcgtagagtgtcttctcttttatctcgatctttttcagcttcctctcccttactgtttcgttctcaagggagaaattgttacaatggagggatcttaaggagatttggaacctcttctgctgctgctgaggaaatcataaacccatctgttcaagtttctcacacaca

SEQ ID NO: 152570 - DNA, 283 bp, Arabidopsis thaliana columbia
gccgggaagacccaggcggacgcacgtaggaggtatcttgttacaaaggctgtacgtaagtttgcaccaaccactggaggagggaagaagccgcatcgttaccgtccaggaactgttgcactacgtgaaattcgtaagtaccagaagagtaccgagttgctgatcaggaagctccctttccagaggctagttcgtgagattgcccaggatttcaagactgacttgcgtttccagagccatgctgtgcttgcactccaggaggctgctgaagcataccttgtgg

SEQ ID NO: 152571 - DNA, 411 bp, Arabidopsis thaliana columbia
acggaagaatcatttcaagccatgttttcggcttaagttgatactaccaagaagggtgatcctaaggccaaggcctgggaggcggcaaatgctgtgaagtctggtcaagccttcaagaagaaggacaaaaagattaggaccaaggtcacctttcacaggccaaagactcttaccaagcctagaactggtaagtacccaaaaatcagcgctactccaaggaacaagttggatcactaccaaatccttaagtacccactcaccactgaatctgcgatgaagaagattgaagacaacaacactcttgttttcattgttgacattcgtgctgacaagaagatgattaaggatgctgttaagaagatgtttgacatccagaccaagaaagtgaacacactcattaggcctgatgga

SEQ ID NO: 152572 - DNA, 386 bp, Arabidopsis thaliana columbia
ctctctttcgtcgtcgactcattttccgatttagggttacccaatcttcgcgatgtatcgcacggcagcttcacgagccagggctcttaagggagttcttactcgtagtttgagaccagcgcgttatgctagttctagtgctgttgcggagacgagttcgtcaacgccggcttacttgagctggttgagtggtgggtctcgtgctgcgcttacttcattggatatgcctctacaaggtgtttctcttcctccgccgcttgctgataaagtcgagccgagcaaacttcagatcactactctttcaaatggtcttaagatagcctcagagacgactccgaatccggcagcttcgattgtttatatgttgattgcggttctattatgag

SEQ ID NO: 152573 - DNA, 288 bp, Arabidopsis thaliana columbia
  unsure (1)..(288): unsure at all n locations
ggaaaagcatgtttaaactctgtctcgttctcgtcttggttattgcagtagaggcaaatcgggctaagtccgggtcttgtgggtgctccnggaatatatcagcgagcgatgtcgatcgagttcatttcgcgatgaacttggagttcaccgaggccgagttcttcttaaaaggggctaccggaaaaggacttgatgcctataacgcgacacttgctaaaggcggaccaccgccgataggggccaagaaagccaaccttgatcctataactaatcgaatcatcgaggagt

SEQ ID NO: 152574 - DNA, 373 bp, Arabidopsis thaliana columbia
  unsure (1)..(373): unsure at all n locations
ctcgaagatatcgnctttaattccttcttctttttctgatttcttcaaagattcaggtcttagagatctcagcttgtgtaagagtaggctagctaccaaaaaaaaagaaatagaaaaaaacattgatgcttaatcagcagttcttggtgtttgagacacatgtctccaataatactcagtgagatctttctctctgggtttatgttaaattccacaatcaggcgcaggacccatcttgttcaatctttctctgttgtcttcctttactggctttactatgtcttatgatctctgaacttatctccagttttatatctatacgcataattacaacaaaaccctagtttcttttcaaatttctcttcttcggttt

SEQ ID NO: 152575 - DNA, 423 bp, Arabidopsis thaliana columbia
attttatttgatagcccggcgattaaaaagattcctatcatcatcactcgccggctaatggccacaacgatgacacgtgtctccgtcggcgtcgtcctctttgttctcttagtctcgctggttgccgtctccgccgcgagaagcggtcctgatgatgttatcaaactcccttcgcaggcttctcgcttcttccgtcctgctgaaaacgacgacgattctaactccggtactaggtgggctgttctagtcgccggatctagcggatattggaattacaggcatcaggctgatatatgccatgcctatcaacttctgaggaaaggtggattgaaagaggagaatattgtggtattcatgtatgatgatattgctaacaattacgagaatccaaggcctggaaccattatcaacagccctcatgga

SEQ ID NO: 152576 - DNA, 415 bp, Arabidopsis thaliana columbia
gactcggaaaaaaatcagtcgccggcgttcgaaaacgacaactcgccgaacgtctttctctcttcttcaagcaaacactttcacatctctctctctctctcatatttatgatgatcgtctgctactagagatcactataaccagatcatcttctttattcgtcggttaacgtctcaatctctctctgttcggaagttttgaatagagatcgttaaaaatggtggatcctggaccaattactccgggccaggtatcttttcttcttggagtaatcccaatatttgttggttggatatactcggagttacttgagtacagaaaatcttgggttcccttgaaacctgttgcattcttgttatgcagtcactcggataataatctagttgaattgggagacgtagcagagaaggacgac

SEQ ID NO: 152577 - DNA, 298 bp, Arabidopsis thaliana columbia
agaaaaactacggaagaagttgcacaataccattcttgaactgaaaggtaacatacgtgtgttctgtagagttagacctctattgccgggtgagaacaatggagatgacggaaaaactatttcttacccgacatccctagaagcacttggccgtggtattggcttggttccaaatgggccaaaagcttgttttaaaattggttagggttttggggccacctgattaacaggaggatgtttcaattgaaattcttaaattggttaaaggggttttggttggtaccagggggtcgatttt

SEQ ID NO: 152578 - DNA, 452 bp, Arabidopsis thaliana columbia
taccggaaccggcagggcccgagcccagagcccacccgtgacaaaaagcttatcgcggcgattagttcccttcgaagaagaagaagagagataagaaaatggcgactaatggatcggctagctcagcgcagctctctcagaaggaagctgatgtcaggatgatgtgtgccgctgaggttcatcttggaaccaagaattgcaattaccagatggagcgttacgtcttcaagagacgcaacgatggtatttacatcttcaaccttggcaaaacatgggaaaagctccagatggctgctagagttattgttgccattgagaacccacaggacatcatcgtccagtcagctaggccctatggacagagagctgtgttgaagtttgctcagtacactggagccaatgccattgctggaagacacactccttgtaccttcaccaatcagatgcagaca

SEQ ID NO: 152579 - DNA, 154 bp, Arabidopsis thaliana columbia
cggcgacttgacagagaagaacaagggagtagtcttagagaggaagttagagataatcccggggattcattctccggtttggatcttcctcaatctcaacttctttccctctttcttttccagctcataaaaaaaaggctggggctggtgatat

SEQ ID NO: 152580 - DNA, 427 bp, Arabidopsis thaliana columbia
gagagagagaacacagacgataccaactttcttcaatctcgttgccgcagtataatgatctcattcctcggatatatgtctccttctgcggcggcgacaagaagctacaagaataaaaagtctgttttctctcttttcaagaaaccacttacttcgaaaatggctcgttctatctctaacgttaagatcgtatctgctttcgtctctcgtgaactctccaatgctatcttccgacgtggttatgcggccacggcggcgcaagggagcgtttcgagcggtggaagaagtggagctgttgcttcggctgtgatgaagaagaagggagtggaagaatcaacccagaagatttcttgggttccagatcccaaaaccggttattacagacccgaaaccggttccaacgagattgacgcggctgagctacgag

SEQ ID NO: 152581 - DNA, 419 bp, Arabidopsis thaliana columbia
agagactaaaaggttctgtttcagattttcaaattttttttttaattgaaaaagatctttgaatctcccacacccattcgaatttcctcttatgatttaggagattctgacaccacaagcttatttcataagaaacttcaaattagaatcagaaacaagagcatccttcttcatttacacaggtaaattaggtgtaaaaatggtgatgagaagtgtggatctacgatcagataccgttactagaccgacagatgcgatgcgagaagcaatgtgtaacgcaaaggtggatgatgacgtcctcggatatgacccaacggctagacgtctttgaaaggagatggctaagatgatggggaaagaggctgctctgttcgtgccatccgggacaatggggaatctgatcagcgtgatggttcact

SEQ ID NO: 152582 - DNA, 418 bp, Arabidopsis thaliana columbia
gacgatcaatataatctagaaaaaaaatttagaagagagaagagagaaatgtcgagagctttgtcagtcgtttgtgtcttgctcgccatatccttcgtctgtgcacgtgctcgtcaggtgccgggagagtctgatgagggaaagacgacgggacatgacgatacaacaacaatgcccatgcatgcaaaagcagctgatcagttaccaccaaagagcgtcggcgacaaaaaatgcatcggaggagttgctggagtcggtggattcgccggagttggtggtgttgccggcgtgggaggtctagggatgccactcatcggtggtcttggcgggatcggtaagtatggtggcataagcggtgcagctggaatcggtggatttcatagtataggcggtgttggcggtctaggcggtgtccgag

SEQ ID NO: 152583 - DNA, 426 bp, Arabidopsis thaliana columbia
agtactcagatgaaggagcaagaaggttcgactttagaaaatcaacatcaacatgatttgaaacgcgcaaatgaacctcatttacaacacaaccagcctcaagaccttcatcgagctggtcaactctgggagaatccctcgcaggtcccccaatcaactgggttaccgattagtgaaaagaatcctactggtaatgaatcagatagatcccataatcaagagagtgaatctcagtatatgaaactgcaaaagatgagtagtcaacaggctcggggagtggaaccgcctgttaaccctatgaatgttaaccctataaaccgcaaccctaagcaagtaccatttgctgctttgcttcctactttaatgaaccaactcgataaagatagagcactgcagcttcgtaccctatatgctagacttaagaaa

SEQ ID NO: 152584 - DNA, 418 bp, Arabidopsis thaliana columbia
  unsure (1)..(418): unsure at all n locations
catgcaccaagaccaacatggtcatggttttcggtgagatcaccaccaaggctacgattgactacgagaagattgtccgtgacacttgccgttccattggattcatctctgacgatgttggtcttgatgctgacaaatgcaaagtccttgttaacattgaacaacagagcccagacattgctcaaggtgttcacggtcacttcaccaaacgtccagaagacattggagctggtgaccaaggacacatgtttggttatgccactgatgaaacccctgagctcatgcctttgagtcatgtccttgcaaccaagattggtgctcgtctcactgaagtcaggaagaatggaacttgccgttggttaagaccagatggcaagacccaagtcacttgtgagtactacaatgacantggcgctat

SEQ ID NO: 152585 - DNA, 417 bp, Arabidopsis thaliana columbia
ggctcctaaaggatatgtgacacctttttcttggcctaagagtcgagactatgtgccttatgctaatgcgccgtataaagcattgactgttgagaaggctattcagaattggattcagtatgagggagacgtttttagattccctggtggtggaactcagttccctcaaggtgctgataagtatatcgatcagcttgcttccgtgatacctatggagaacggaactgttaggactggtttggacactggttgtggggttgcaagttggggagcgtacttatggagcagaaatgtgcgtgcaatgtcttttgcaccaagagattcacacgaggctcaggtccagtttgctctcgagagaggtgttcccgctgttattggtgttcttggtaccataaagttccatacccaacacgtgct

SEQ ID NO: 152586 - DNA, 420 bp, Arabidopsis thaliana columbia
tactcatattgcttatattttcctacaacactctctcaacaaaaaaacaaaaaaaaaagacgttctttctttgtttgtatttagaagaaaaatggctaccaattacaacgagaagcttcttcttaattatgttcccgtttacgttatgcttccgttgggagttgtgaatgtggaaaatgtatttgcggacccagaaacgcttgaaacgcagcttaaacgtctcaaagaagaagctggcgttgatggcgttatggtcgatgtttggtggggaatcatagaatccaaaggtcccaaacaatatgattggacggcctacaaaacgctgttccagctgatcgcacgtttgggactcaaaatccaagcaatcatgtcttttcaccaatgtggtggaaacgttggcgacatcgttactatcccgat

SEQ ID NO: 152587 - DNA, 413 bp, Arabidopsis thaliana columbia
caaaatctgccaacagtttttgtctcattcccgatcagatctcaacgacgacgagccatggcttcaactttcagcggcgatgaaactgctcctttcttcggattccttggcgctgccgccgctctcgttttctcctgtatgggagcagcgtacgggacagcgaagagcggggttggtgtagcgtcgatgggtgtgatgagaccagagcttgtgatgaaatcgattgttcctgttgttatggctggagttttaggtatttatggtttgatcattgctgttatcatcagtaccggaatcaaccctaaggccaagtcttactatctattcgatggctatgctcatctctcttccggtcttgcttgtggtctcgctggtctctccgccggtatggctattggaattgtcggcgatgc

SEQ ID NO: 152588 - DNA, 254 bp, Arabidopsis thaliana columbia
ctttctcctttgttccacattttagtttacatatctccatttctgtcggggctccaagctttttttcaagatccaaggtctcatcatcttctccagattcgaattctgcaacaacaatgacaattagcaacggggatgtcaaatctggaacctgcaacaatgggtcttttgggaagaaaccattcagggtctttggtggttaccatccacgagaagagcttggctaccaaaggtgtgatcattcaatcacaaaa

SEQ ID NO: 152589 - DNA, 421 bp, Arabidopsis thaliana columbia
aatctctcaacataaaatcccacaacatttcacaacccgaaaaaagacagagacaatggcacagcccatgcgcttcatgctcaatcatatagaaacagaatcctacggcgctttcacccctcaaaaccttagtccgctgatcaatcgtgcgattccacacactcgagctcaaatctccggatcacctgtcgtagccgtcggccgaggatcatcaggtcggaccttctttggcgtcaatgtggaattaccaggtctgcctcttgaccactccatccacgccgaacagttccttctcgccaacctcgccctccacttcgagcaaaaactcgaatgcatagccatctgcactaacggctactacttccaggagccatgcggccactgctgccaattacttcataaaatcagagatatgtctgat

SEQ ID NO: 152590 - DNA, 410 bp, Arabidopsis thaliana columbia
ctccatttcagcgaatctcttcttcagatttttctcttccactaatcttttgcctgtttaatcggagcttagatatcatcagaaggtttttgttctatcaattctccttcattcgatccatttttacccctttctttggaatctccgattcgaccaagcttcttcgccgtctcatcggagacaaacacatattcacgcttaatcaactaaattaagcttagattgatatatagatatataggttaaaactcaactacgactactcggagatgttgggtgctggatttcagttgacgagaggcagacaccgcgacgatcctttctacacttccgcaaaaactcgcagggcccatcagcgcatcgatcagcttcgtagagcttagagcgacgtctctaacgttccattatta

SEQ ID NO: 152591 - DNA, 422 bp, Arabidopsis thaliana columbia
gttatctttttattttctctatctatcttgatattattttttcacttggggatttggagaaacctctcctctctctatctatagccatggctgctttcacttgtacctctcgtcctccgatttctctccgctccgagaccagaatcgtatcctcatcaccatcggcttcttctctctcttctcggcggatgttcgccgtcttaccggaatcatcaggtttgagaatccgtctttctctctctccggcttcgttgacctcgattcatcaacctagggtttctcgattacgaagagccgtcgtctgtgaagctcaggaaactactaccgatattcaagtggtcaatgactcgacatgggactctctagttcttaaagcaactgggcctgtagttgtcgacttttgggcaccatggtgtggacct

SEQ ID NO: 152592 - DNA, 395 bp, Arabidopsis thaliana columbia
  unsure (1)..(395): unsure at all n locations
gttcgatcatcttgtatttcatttcaatcactcattgtttttagtttgttttacgaagaatcaactatggcgacgaagagaagcgttggaactttgaaggaagcggatctgaagggaaagagtgtgttcgtgagggttgatctcaactttcctttggatgataactctaacatcaccgatgacaccaggattcgtgccgctgttcccaccatcaagtacttgatgggtaatggatctagggttgttctctgcagtcacttgggccgcccaaaaggtgttactcctaagtacagcttaaagcctcttgtgcccagattgtctgaacttcttggtgttgagggtgtaatggcaaatgactctattggtgaggaagtncagaagttggttgaggacta

SEQ ID NO: 152593 - DNA, 427 bp, Arabidopsis thaliana columbia
tggcagatgattctgactattcaagaaattccggcgataagtctagtaaacaaaaagtagttccaaggtcagaacaagtgagtgatgaagaagatgactccatatgggaatcattgcctgcatcattgtcagtgttgctcataccgtccctaaaagaagctcttggtgacgattctaaagaatctactgtgcgtacagtgtcgagatcccttgtgatgatggaacgtgaaaagcctggttcttgtgaagcttttgttgccaagctgattgaacttttgggaagttcaaaagaagcttcggtgaaagaattgcacgatatggcggtctgtgtttttgccaagaccacacccgacaatgcagagaacaaaatgaaacaagctaacaaggagtttagttccaacacaaatgttagcccactcggcagatt

SEQ ID NO: 152594 - DNA, 401 bp, Arabidopsis thaliana columbia
gatacatggcaacctttgatttgcttaatgagttgaataaggattcctttaaaagcgacctggacttggcggtgagattgtcgagtatcatattgcaacagctcgatgatgtggctggtgatgattctggattggctgttaaatgtcttgctccattggtgaagaaggtcggagaagaacgaattgttgaaatgaccaacaagttatgtgataaactgctgcatgggaaagaccagcatcgtgataccgtaagcatagctctcaggactgctgtcgctcaaattgctcctacgcttgctccatctattcttgttactctaacaccacaaatgataggaggaataagtggccaggcgatgagctcagggatcaagtgtgatgtcttgagatcatgtgtgatg

SEQ ID NO: 152595 - DNA, 377 bp, Arabidopsis thaliana columbia
caaaatcttaaaaactttctctcaattctctttatcgtgatcaagatgcagatcttggttaagactctcaccggaagagacaatcaccctcgaggtggaaagctccgacaccatcgacaacgttaaggccaagatccaggataaggagggcattcctccggatcagcagaggcttattttcgccggcaagcagctagaggatggccgtacgttggctgattacaatatccagaaggaatccaccctccacttggtcctcaggctccgtggtggtatgcagattttcgttaaaaccctaacgggaaagacgattactcttgaggtggagagttctgacaccatcgacaacgtcaaggccaagatccaagacaaagagg

SEQ ID NO: 152596 - DNA, 422 bp, Arabidopsis thaliana columbia
caaaaaacagagcaatctctaaaaaatctcaagaaacctcactaaaatgggttcaacggcagagacacaattaactccggtgcaagtcaccgacgacgaagctgccctcttcgccatgcaactagccagtgcttccgttcttccgatggctttaaaatccgccttagagcttgaccttcttgagattatggccaagaatggttctcccatgtctcctaccgagatcgcttctaaacttccgaccaaaaatcctgaagctccggtcatgctcgaccgtatcctccgtcttcttacgtcttactccgtcttaacctgctccaaccgtaaactttccggtgatggcgttgaacggatttacgggcttggtccggtttgcaagtatttgaccaagaacgaagatggtgtttccattgctgctcttt

SEQ ID NO: 152597 - DNA, 416 bp, Arabidopsis thaliana columbia
aaaaaaaacagagcacaatgactagatttgcggtattgccactctctgttcttcttctcgttctcttgttcctctgcactgagtcgttggctaagtcggaggagtctgaagaatacgacgtcgctgtgccttcatgttgcgggttttcgtctcctcttctgattaagaaagatcaatggaaaccaatcttcgagacgaagtttggacagatctcaaccgttcaaatcggcaatggatgcggtggaatgggaccttacaagatacattccataacgttggagccaaacacaattttgctccctcttcttcttcattccgacatggtcttcttcgttgactctggaagtgggattctgaattgtgttgacgaggaagcgaagagtaccgagatcagactaggagacgtttacaggcta

SEQ ID NO: 152598 - DNA, 423 bp, Arabidopsis thaliana columbia
cttcttctttaaccaagcttgtgttctttggttgtctcctcctgctcacattcacggacaaccttgtggctggaaaatctggcaaagtgaagctcaatctttactacgaatcactttgtcccggttgtcaggaattcatcgtcgatgacctaggtaaaatctttgactacgatctctacacaatcactgatctcaagctgtttccatttggtaatgccgaactctccgataatctgactgtcacttgccagcatggtgaagaggaatgcaaactaaacgcccttgaagcttgcgcattaagaacttggcccgatcagaaatcacaatactcgttcatacggtgcgtcgaaagcgatacgaaaggctgggaatcatgtgttaaaaactctggacgtgagaaagcaatcaatgattgttacaatg

SEQ ID NO: 152599 - DNA, 413 bp, Arabidopsis thaliana columbia
gtttctctcaaatttagggttttctcttttctcgaaagtcttgcggttttctgaatgatctctatctggtttgagggtttcgtttgatatctggagaaaggggtttctggaaacaaggagttcataattcgcgatcttgatctatcgatcttcatttatatataaaagcgtgaatgagattatgatggagtcgaaaggtggtaaaaagaagtccagcagtagtagttccttattttacgaagctcccctcggttacagcattgaagacgttcgtccaaacggtggaatcaagaaattcaaatcttctgtctactcaaactgctccaagaggccatcctgagtaccagcgtgcaccgatcttcataatatagttatagctttctttactttccagtttataattttcttctttc

SEQ ID NO: 152600 - DNA, 395 bp, Arabidopsis thaliana columbia
ctttcattgtagttaaacaaagattactattatggccacatcagctatccaacaatgcgtgcttcgtcggccaaacggctctcaagccctccagcgacctcatccaaaaggtgggcgtcttgggcggtggccgtgtgaccatgcgtcgtaccgtcaagtctactccccaaagcatctggtatggaccagaccgtcccaagtacttgggaccattctcggagaacacaccgtcttacttaactggagaataccccggagactacggctgggacaccgctggactctcggctgacccggagacattcgctaagaaccgtgagcttgaagtaatccacagcagatgggctatgttgggtgctctcggatgcacattccctgaaattctctccaagaac

SEQ ID NO: 152601 - DNA, 428 bp, Arabidopsis thaliana columbia
atcatttcttctctgaaacgaaaaaccaaagaaacgagaagaagaagctatggcggatcagctaactgatgaacagatctctgagtttaaggaagcttttagcctcttcgacaaagatggagatggttgcatcaccacaaaggagctgggaacagtgatgcggtcactagggcagaacccaacagaagctgagctacaagacatgatcaacgaggttgacgctgatggaaacggaaccattgacttccctgagttcttaaacctaatggctaaaaagatgaaggacacagactcggaggaagagctgaaagaagctttcagggtgttcgacaaagaccagaacggtttcatatccgctgcagagcttcgccatgtgatgacgaatctaggtgagaaactgactgatgaagaggtcgaggagatgattc

SEQ ID NO: 152602 - DNA, 315 bp, Arabidopsis thaliana columbia
gctgtttcatgatcgattaactttaaattttcagctgattccaattaactgaaatctttcaggaaccctaaattcttttttttcctttcaaatgtgatccgtcagctcgatcttgggctgaagctattgctcaaagtaattgggaagctgacaagatgcttgatgtttacatatatgattatttggtgaagaagaaacttcataatactgctaagtcgtttatgactgaagggaaagtttcttctgatccagttgcaattgatgcacctggagggtttctttttgagtgggggtctgtgttttgggacattttca

SEQ ID NO: 152603 - DNA, 412 bp, Arabidopsis thaliana columbia
aatcgctacgattgctacacaccacattccttaagaaaaccctaatcatctcgctctcgcattctataggaatcgcttcccgaagcttccaacattctcttgtttctcctttgtctctcaatttcagtttcctatattatacgcttgtattaatcaccagtatacattttgtcgtttctgggtctggaaccctagtagttattatagcatccatcgctttcttcaatcgccgtccatcagagtttcaagggatttgctttaaagatcaatcctttcctaagaaaatagcgacaattcatcagcttttcctttcccatccttcattaccttaacttactcgagattcatcttccagctgaaattgtgaaacttcgtttctgggtttttatcagaaaacactctgtgacttatt

SEQ ID NO: 152604 - DNA, 424 bp, Arabidopsis thaliana columbia
ctctgattcggtccatcgatctcaaaggctcaaagcttaatcgtttcctttcttcttattctagccatggctcagaccgttgtcctcaaagttggtatgtcatgccaaggctgcgttggtgccgtcaatagagttttaggcaaaatggaaggggttgagtcatttgacattgatatcaaggagcaaaaggtgacagtgaaaggtaatgttgagcctgaagcagttttccaaacagtttcaaagaccggaaagaagacttcttactggccagtggaggctgaagctgagccaaaagccgaggctgatcctaaggtcgaaaccgtgactgagactaaaaccgaggctgagactaagactgaggctaaggttgatgcaaaagctgatgttgaaccaaaagccgcagaagccgagactaagccatcac

SEQ ID NO: 152605 - DNA, 365 bp, Arabidopsis thaliana columbia
gttttctcctttcactatctttccatattcttcttcttagtaaaactttgcattaatggcttacccaaatttgtaagctctttgtttcctcccttcttcttattctcttcttcattctccaaatttgtttctaggtttcttcagtttgagcaatgaagaagtctaaactcgataattcttcttcacagattcgattcgggcttgttcagttcttattagttgttctgcttttttacttcctctgcatgagcttcgagatcccattcatcttcagaaccgggtctgggtccgggtctgatgatgtttcatcttcttcttttgctgacgcattaccgagaccaatggttgttggtggtggtagtagg

SEQ ID NO: 152606 - DNA, 415 bp, Arabidopsis thaliana columbia
aaaaaaaaaaacagaaagtaacatgagatctttcttattagccgtgtgcctggttgtggctttacactgcggtgaagcagccgtgtcttgcaacacggtgattgcggatctttacccttgcttatcctacgtgactcagggcggaccggtcccaaccctctgctgcaacggtctcacaacactcaagagtcaggctcaaacttctgtggaccgtcagggggtctgtcgttgcatcaaatctgctattggaggactcactctctctcctagaaccatccaaaatgctttggaattgccttctaaatgtggtgtcgatctcccttacaagttcagcccttccactgactgcgacagtatccagtgagacaagcagaaaatcttaaggaagctactacaagaactataataacctaat

SEQ ID NO: 152607 - DNA, 423 bp, Arabidopsis thaliana columbia
tccctctctctctctctccaaaccagtcttacttctctctctagaaacctagggaagaagaagaagacggtgaagcgagcgatgtcttcggacgacgaaggaagagaggagtatctcttcaagattgttgttatcggcgactctgccgtcggtaaatctaatcttctatctcgttacgcacgtaacgagttcagcgctaactccaaggcgacgatcggagtcgagtttcagacgcagagcatggagattgaaggtaaagaggtcaaggctcagatttgggacactgctggtcaggagcgtttccgtgccgtcacttccgcttattaccgtggcgctgtcggtgccctcgtcgtttacgacattacccgccgcaccacttttcgaagcgttggacgttggctcgatgagcttaagatccattcg

SEQ ID NO: 152608 - DNA, 408 bp, Arabidopsis thaliana columbia
gaagaatcatttcaagccatgtctccgtctaaagttgatactaccaagaaggctgatcctaaggccaaggccttgaaggcggcaaaggctgtgaagtctggtcaagccttcaagaagaaggacaaaaagattaggaccaaggtcaccttccacaggccaaagactcttaccaagcctagaactggtaagtacccaaaaatcagcgctactccaaggaacaagttggatcactaccaaatccttaagtacccactcaccactgaatctgcgatgaagaagattgaagacaacaacactcttgttttcattgttgacattcgtgctgacaagaagatgattaaggatgctgttaagaagatgtatgacatccagaccaagaaagtgaacacactcatcaggcctgatgga

SEQ ID NO: 152609 - DNA, 424 bp, Arabidopsis thaliana columbia
gacaccttctctaaactcaaatttatgatacatggtgttgatggagtcgcttggtctgtacggacccgtgattaaaatttcccgagaggcaacacaagatatgaaggtaggacacttggagatcccaaagggcacaagcattatcataccgttactgaagatgcacagagacaaggccatatggggcgaagacgccgaacaattcaatcccttgagattcgaaaacggcatttctcaagccaccattcacccaaacgctctcctcccgttctcaatcggaccaagagcttgcattgccaaaaactttgccatggtcgaagccaagaccgttctcactatgatccttcaacagttccagcttagcctctcccccgagtataagcacacgccagttgatcacttcgatctcttcccgcaatacggc

SEQ ID NO: 152610 - DNA, 412 bp, Arabidopsis thaliana columbia
taaaaaacttaaagcttaaaatggggtggcagttttatacgacgacggttctctacgtaggcaccctactcttcatttgccggacaatctcagccgtccgtttccctccggaacaaccaacaaccgatgatctagatttcatccgtacgagctgcaacacaacgctgtatccagacgtatgttacacgtctctagctggatacgcctccgccgtccaagataatccggcaaggctagctaaactcgcaatcggcgtttctctctcccgcgcaaaatacacggcggcttacctgtgcaaactctcacgtcgcgctgcctcagctgctgtccacgactgcgtttcgaacgtgggagatgccgtggatcagatgcgtggctccctaaggcagctccgagagatgaaccaccgtcg

SEQ ID NO: 152611 - DNA, 393 bp, Arabidopsis thaliana columbia
ccaacccaaacatcgaaagagagacacttttctctctctctttctctatctccttgcaatctctctagggttttcgttacaacggcgaaaagatgttcggtagaggaccctcgaagaagagcgacaacactaagttctacgagatcttaggtgttcctaagagcgcttcaccagaagatctcaagaaagcttacaaaaaagccgctatcaagaatcatcctgataagggtggagatcccgagaagtttaaggagttagcacaagcttatgaagtgcttagtgacccggagaagcgtgagatttatgaccagtatggagaggatgcactcaaagaaggaatgggtggtggaggaggtggacatgatccaattgatattttctcaaccttctttg

SEQ ID NO: 152612 - DNA, 368 bp, Arabidopsis thaliana columbia
cttcttttttcactcatcaaaaaaaatctcattcctagaatgcgtatcgctttcttagacctgaatgagcaatcaaactactcttaaatctatggctcttgattcttgcggaaaacaacctgtgcagctgcaacaacaacaaccacgagcctcctctggaaacggcgaggcaagattgaagcttctgagaacccctaatgaagaacatgagcctgtgaactatgaagatctacctctggactatagtacttctctgctcacctatgttgagcgttacttacctgagcagctagtcaatttcacacgaatcgataaagctaggttcatgagagaccatcttctacgatattaccctgatactgagcgag

SEQ ID NO: 152613 - DNA, 118 bp, Arabidopsis thaliana columbia
cttctcgattctccaattccaaaccctacattttgattagtccttctgggtttgcacagccttgagagattcggaaccaatgatgatgcgtgctgttataaggagagctgccagtaat

SEQ ID NO: 152614 - DNA, 333 bp, Arabidopsis thaliana columbia
  unsure (1)..(333): unsure at all n locations
cttgggaatcggagaagctcactgagaacaatggatatgagacgtgcttcgatgtgtatgatgttaatttgcgtctccttggttctcctttcgggttttggccagtttgtgatctgcagtgaagaaaaaggaacgtacaacgacaacgtcgtaaagatgaagcttggtggatttagcgattccaagaacgattggaacggtggaaaagagatcgatgatattgcactcttcgctgttcaagagcacaacagacgagagaatgctgttcttgagcttgctagagtattgaaggcaacagagcangtggttgctggcaagctataccgtcttact

SEQ ID NO: 152615 - DNA, 381 bp, Arabidopsis thaliana columbia
gagagagcatagagcgagacgtgtagcttagattagtttgatgaagatgaggaacgctgcggttgaggcattgccggagaatttgaagaaggcggctttagtgcgtgatttgactccgtttccggtgagtcgaggtacggctacgcttactccacctattgaagggtatttggagaggattatgaatgctgcggctaggaagagctctggtaaagagaagttgagatgatcttgttaaggttagaggaatttgtctttgcgtcattggttttctcttgttttattagttgtgttgattggatttcgatcaatggatataactttgagacatttgtctttatttttgtgatctacttgaaataaaatggtcactggcagttg

SEQ ID NO: 152616 - DNA, 421 bp, Arabidopsis thaliana columbia
  unsure (1)..(421): unsure at all n locations
caaactgccgtactgaaaagtggatggtgaatggtgaaatttgcgttggaatattcgccagccaagaccttaagaagggtcaagagttgacatttgactacaactatgtgagggtttttggtgctgccgccaaaaagtgctattgtggatcatcacattgcagagggtatattgggggagatcctctgaatggtgatgtaattattcaaagtgattcagatgaagagtatcctgaacttgtgatccttgatgatgatgaaagtggagaaggaatcttaggtgcaacatctaggaccttcactgatgacgctgacgagcaaatgccacagagctttgaaaaggttaatggttacaaggaccttgctcctgataatacccaaacacagagctcagtatctgtaaaacttncagagagagaaat

SEQ ID NO: 152617 - DNA, 416 bp, Arabidopsis thaliana columbia
ggacgggttcggtttatggggtctggttcttctcctttgtcacctgatgtcatggatttcttgagaatatgctttggatgttcggtgcgtgaagggtatggtatgaccgagacttcttgtgtcataagtgctatggatgatggtgacaatttatctggccatgtcggttcccctaatccagcttgcgaggtaaaacttgtggatgttcccgaaatgaattacacatcagacgatcaaccatacccacgtggtgaaatctgtgtaagaggaccaatcatcttcaaaggctactacaaagatgaagaacaaacgagagaaattcttgatggagatggctggctacacacaggagatatcgggttgtggttacctggtggtcggctcaagatcatagacaggaagaagacatatttaag

SEQ ID NO: 152618 - DNA, 418 bp, Arabidopsis thaliana columbia
attttgttctgattctccccacttgttttaccccgtgaggataaactgttgccgacgcttctcgccgataacaccggttttgttgtgacggaaaggaaaaatgggtttgatttctgggattctgttcgggattatcttcggcgtagctctaatggctggctggagtcgtatgatgactcaccgatcgtccaagcgagtcgccaaggcagttgatatgaaactactaggctctcttagcagagacgatttgaagaaaatttgtggtgataatttccctcaatggatatcgtttccagcatttgaacaggtcaaatggctgaataaactactgagcaagatgtggccatatattgcagaggcagcaacaatggtaataagagattctgttgaacctctgcttgaagattacagaccacca

SEQ ID NO: 152619 - DNA, 413 bp, Arabidopsis thaliana columbia
agaaaacatacacaaatagcaaaacatggctaacaagctcttcctcgtctgcgcaggtctcgccctctgcttcctcctcaccaacgcttccatctaccgcaccgttgtcgaattcgaagaagatgacgccagcaaccccgtaggtccaagacagagatgccagaaggagtttcagcaatcacaacacctaagagcttgccagagatggatgagcaagcaaatgaggcaaggacgtggtggtggtccttccctcgacgatgagttcgatttcgagggcccccagcagggataccagctactccagcagtgctgcaacgagcttcgccaggaagagccagtttgcgtttgccccaccttgaaacatgctgccagggcagttagccttcagggacagcacggaccattccaatcca

SEQ ID NO: 152620 - DNA, 429 bp, Arabidopsis thaliana columbia
gtgaaacggcggacaaagctgtcgtgtttagtactaattcgccgtcgtttttctcagtgaaggagtggtgagagatgtcgagtctcgaagatatcaagaacgagactgttgatctggaaaaaattccgattgaggaagttttccagcagctaaaatgttcaagggaaggattgacaacgcaggaaggggaggacaggattcagatctttggccccaacaagctcgaagagaaaaaggaaagcaaacttctgaagtttttggggtttatgtggaatccactttcatgggtcatggaaatggctgcaatcatggccattgctttggccaacggtgatggtaggccttcggattggcaggattttgttggtataatctgtctggtggttatcaactctaccatcagttttatcgaagaaaacaatgctggta

SEQ ID NO: 152621 - DNA, 401 bp, Arabidopsis thaliana columbia
  unsure (1)..(401): unsure at all n locations
tatgaagatcatgcctgttcagaaacatatccttagctggtcaaaggactagattcaaggcctttgttgttgttggtgatggaaatggtcatgttggtttgggtgtcaagtgttctaaggaagttgctactgccattagaggagctattattcttgctaagctatcagtggttccggtgaggagaggttattgggggaataagattgggaagccacacactgtgccttgtaaggttactggtaaatgtggttctgttactgtgagaatggttcctgctccnaaaggttctggtattgttgcttctaaggttcctaagaaggttcttcagttcgctggtattgatgatgtctttacttttttcaagaggatctaccaaaaccccttgaaactttgtcaaggc

SEQ ID NO: 152622 - DNA, 427 bp, Arabidopsis thaliana columbia
aaacaaaactcttaaaagcttaagaacttattataaaaatggccggtgaaggagaagtgattgcttgccataccctcgaagtttggaacgagaaggtcaaagacgccaatgaatccaagaaactgattgtgatagacttcacagcatcatggtgtccaccttgccgtttcattgcaccagtgtttgcagagatggctaagaagttcactaatgttgtcttcttcaagatcgatgttgatgaattgcaagctgttgctcaggaattcaaagttgaggcaatgcctacttttgttttcatgaaagaaggcaacatcattgatcgtgttgtcggtgctgcgaaagatgagatcaatgagaagctgatgaagcatggtggtcttgtagcttctgcttgattgatttcagtttctaactctttgcatcataa

SEQ ID NO: 152623 - DNA, 319 bp, Arabidopsis thaliana columbia
ctccaatggacctaaaatgaacattctttgatctccgacgtcatcatcatcttcgtcgtttcctccatacccaaagcccgtttcattaacccctccggtatctttcactctcatccacaaccccataaacctctgctctataaacccaccattcaccaacgctggtcgaccaattttccaacggtccgcctccggcactgctaatagctccgccgaagacctctcgtctttcttgggctctccctcagaggcgtattcaacacacaacgaccaagagcttttgtttctcctgcgcaatagaaaaaccgatgaagcttgg

SEQ ID NO: 152624 - DNA, 409 bp, Arabidopsis thaliana columbia
tagatgatgacagtcttaaatcactcatacatgattgcaagtcattgaagaagcttgatgcatccagctgccagaatttaactcatagaggtttaacctcacttttaagcggggcaggatatcttcagcgacttgatctatcacactgttcttctgtgatatcattggattttgcgagtagcttaaagaaggtttcagcattacagtcgatcaggttggatggttgttctgttacgcctgatggtttgaaggcgataggcacattgtgcaattccctgaaagaggttagcctaagcaaatgcgtgagcgtaactgatgaaggtctttcttctctagtaatgaaactgaaagacctcagaaaacttgacatcacatgttgcccgaaactaagtagagtttcaatcaccca

SEQ ID NO: 152625 - DNA, 382 bp, Arabidopsis thaliana columbia
agcccttgcaaaccataaccaaaccattatcatcatcatctcttggtgacagaagaaaagagttgaggaacagagaaaatggcagcacaagcacttgtgtcttcttcacttacctcctctgttcagacagctagacagatatttggctcaaaaccagttgcgtctgcctcacagaagaagagttcctttgttgttaaagctgctgcaactccacctgtcaagcaaggagccaacagaccattgtggtttgcttcatcgcagagtctctcttacttggatggcagcttacctggtgactatggattcgaccctcttggtctttcagacccagaaggtactggaggattcattgagccaagatggctagcatacggagagatca

SEQ ID NO: 152626 - DNA, 331 bp, Arabidopsis thaliana columbia
ctctctctttcaagatgcaaatcttcgtgaatacactcactggcaagactatcactgtcgaggttgagagctctgacaccatcgacaatgttaaggcaaagattcaggacaaggaaggcattcctccggatcagcaaagattaatattcgccggtaaacagctagaagatggccgtaccttggccgattacaacattcagaaagaatcaacccttcatttggttctcccgttaagaggtggtatgcaaatctttgtcaagactctgactggcaagaccattactttggagggtgagagctctgacactattgacaacgtcaaagcaaagat

SEQ ID NO: 152627 - DNA, 411 bp, Arabidopsis thaliana columbia
agatcgaagaacatttacacacatcaattgcgtctctgcaactctgcgacggttatcttctcttcaagccctctgtttctcctcgattcctctctcaacgcatttctcatcgcctaatccctaaagcctcatcttctcctcctccatctccatcaccatcatcgtcctcttcatccttatctttcagtcggcgggagcttctgtaccaatcggcagctgtatcactctcgctttcttccattgttggaccagcgagagctgatgaacagttatccgaatgggaaagagtgtttctcccaatcgatcccggtgttgttcttctcgacattgctttcgtccccgacgaacctagccgagggtttttacttggaacgagacagactttgttagagactaaagatggtggaagca

SEQ ID NO: 152628 - DNA, 421 bp, Arabidopsis thaliana columbia
acctctctctctctctctctgcatctaatcacttgttcgatctcgaagctgaagctaaagctttcgctaatttgcttaaggagctatgggagatagtcagtactcgttttctctcaccactttcagcccatctggtaagctggtgcagatagaacatgcccttacagctgttggatctggccaaacatctttagggattaaagcttctaatggagttgtcattgcaactgaaaagaagttgccttctattctggttgatgaagcatctgttcaaaaaattcagcatttgactcctaatattggagttgtttacagtggcatgggtcctgattttcgagttcttgttaggaagagtaggaaacaggctgagcaatatcttcgtctgtacaaagaacccatccctgttacccaacttgtaagg

SEQ ID NO: 152629 - DNA, 427 bp, Arabidopsis thaliana columbia
ctcacacaaactcgtgacaggagaattttacttagttgagctcaatctttactacgaatcactttgtcccggttgtcagagtttcatcgtcgatgaactagtcaaagtctttgactccgatctcgatacaatcaccgatgtcaagctcgttccattcggttacgccaaagtctccaataatctgaccgtcatttgccagcatggtgaagaggaatgcaaactcaacgctcttgaagcttgcgtcattaacactttgcctaacccgaaatcgcagtacaagttcatacgatgcgttgaaaacaatacggataactgggaatcatcatgtttaaagggctatggaaatgagaaagccatcaatgatggttacaatagtgatctctctaagaagctcatacttggatatgcaaaacaaacctcgagtctt

SEQ ID NO: 152630 - DNA, 411 bp, Arabidopsis thaliana columbia
gaacaagtccgtcacttgcacaccactttttttcctgagtttcttggtcttaggtgcaccgacaaagcgggtctactcgaagagtctgatttcgggtcggatctagttatcggagttatcgatactggtgtttggcccgaaagacctagctttgatgaccgtggtcttggtcctgttcccattaaatggaaaggccaatgtatcgcttcccaagattttccggagtctgcttgtaaccgtaaactcgtcggagctagattcttctgcggtgggtatgaagcaaccaacgggaaaatgaatgaaacgactgagtttcgctctccgcgtgacttcgatggacatgggactcacacagctttaatctccgccggccgttacgtttttccggcgtcaactcttcgctacgctcac

SEQ ID NO: 152631 - DNA, 401 bp, Arabidopsis thaliana columbia
  unsure (1)..(401): unsure at all n locations
gttgttccgttcactgcgatgatcgctatattgtgtacaacggttggatccagcatactgtataaagctgctaccttgagaggatttagcttttatgtctttgtgttttacgcttatgttggtgctacacttgtccttcttctactttcacttatctttggaaggtcgagaagtttgcctacagccaagtcttctcttttcttcaagattttcttacttgcgcttctcgggctcacgtcgcgggtagctggttgtaaaggtatagaatatagttccccaactctttcctctgctatcagcaatcttacaccagctttcaccttcatccttgccatcttcttcaggatggaacaagtaatgttaagaagctctgcaactcangctaaaatcattggcacaat

SEQ ID NO: 152632 - DNA, 421 bp, Arabidopsis thaliana columbia
  unsure (1)..(421): unsure at all n locations
cctaaatcccgcatcagtacttctctttgctctcaagataattttgttctctcaatgtcattcttaaaccctagttcttcgattttttccgatctacgacaatggcggacgctgaaacctttgctttccaagctgagatcaaccagttgctttccctcatcatcaataccttttactctaacaaggagatcttcctccgtgaactcatcagtaactcttctgatgctttggacaagaaaaagaagaagattaaggaggtttctcatgagtgggatttggtgaacaagcagaagcctatctggatgaggaagccagaggagatcaacaaggaggagtacgctgctttctacaagagtctcagcaatgattgggaggagcatttggctgtgaagcatttctctngtgaggacagcttgagttc

SEQ ID NO: 152633 - DNA, 425 bp, Arabidopsis thaliana columbia
attttcttcaaagaacaaatctcccatttctaaaatctttctcttctctcttcgtttccataaccatgtctgcgaagaagattgtgttgaagagttccgatggtgaatctttcgaggttgaggaggcggtggctctcgagtcacaaaccatagcgcatatggttgaagacgactgcgtcgacaacggagtccctcttcctaacgtcacgagcaagatcctcgccaaggtgatcgagtattgcaagaggcacgtcgaggctgctgcctctaaggccgaggccgtcgagggtgctgctacctccgatgacgatcttaaggcctgggacgctgattttatgaagatcgatcaagctactctctttgaactcattctggctgctaattacctgaatatcaagaacttgcttgatctaacatgtcagaca

SEQ ID NO: 152634 - DNA, 234 bp, Arabidopsis thaliana columbia
gaagaaggaccacaaaggaaaaatggattgagcgtgaggtcatctcatattctcatgcatgcgaattcctcaaacctatatataaataatatcctaaaaactacaaactcaaaatctctatcttgttcataaataaaaccagagattgtcacctctatatattattgtgaaatgctactcattctcatgtaatggcttttttaaaaataaaataaatgcaataaatcttatact

SEQ ID NO: 152635 - DNA, 365 bp, Arabidopsis thaliana columbia
tttcaatttctcaaaatcttaaaaactttctttcaattctctctaccgtgatcaagatgcagatctttgttaagactctcaccggaaagacaatcaccctcgaggtggaaagctccgacaccatcgacaacgttaaggccaagatccaggataaggagggcattcctccggatcagcagaggcttattttcgccggcaagcagctagaggatggccgtacgttggctgattacaatatccagaaggaatccacccttcacttggtcctcaagctccgtggtggtatgcagattttcgttaaaaccctaacgggaaagacgattactcttgaggtggagagttctgacaccatcgacaacgtcaag

SEQ ID NO: 152636 - DNA, 417 bp, Arabidopsis thaliana columbia
aaacaacgccaaaagtcaaaaggtttttttttctagatcatgtccacatttctcctaacatggattattatgaccgtcgcgttaagcgtaacgctttttcttatgccgcaacaaacaaatgcggctagagcgttcttcgtgtttggcgactcactcgtggacagtggtaataacaattacttagtcaccactgctcgtgccgattctccaccgtatggaatcgattatccgactggtcgaccaaccggtcgtttctccaacggcttgaacctccctgacatcatcagtgaacaaattggatctgagcctacattaccaattcttagccctgaactcactggagagaagctattgatcggagctaactttgcctctgccggcattggaattctcaacgatactggcgttcaaattttg

SEQ ID NO: 152637 - DNA, 416 bp, Arabidopsis thaliana columbia
taaagttggtggtgatagagtgtgtagtttaacatggaaggcaaagaagaagacgtgaatgttggagccaacaagttcccagagagacagccgatcggtacggcggctcagacggagagcaaggactataaggaaccaccaccggcgccgtttttcgaacccggcgagctcaaatcttggtctttctacagagcagggatagctgagttcatagccactttccttttcctctacgtcaccgttttgacagtcatgggtgttaagagagctcccaatatgtgtgcctctgttggaatccaaggcatcgcttgggcttatggtggcatgatctttgctcttgtttactgtactgctggaatctcaggaggacatattaatccggcggtgacttttggttcgtcttggcgaggaagcta

SEQ ID NO: 152638 - DNA, 421 bp, Arabidopsis thaliana columbia
gaggcaagcaacttacacgacagcccgtcttgtatcattcaagttgctgactgcaaaggcaattgagtctaatgatggaaagcctctaccgctgtatcagaaggcactatgtggtctgacagctggtgctattggtgcttgcgtcggtagtccagccgatctagcacttatcagaatgcaggccgataatactttgccgctagctcagcgcaggaattataccaatgctttccatgcgcttacccgtattagcgctgatgagggagttttagcactttggaaagggtgtgggcccactgtggtcagagctatggctttgaacatgggaatgcttgcatcttatgatcaaagtgctgaatacatgagagataatcttggtttcggggagatgtctacggtcgtaggagcaagtgctgtttct

SEQ ID NO: 152639 - DNA, 423 bp, Arabidopsis thaliana columbia
  unsure (1)..(423): unsure at all n locations
gtgagaaggagaagaaagaagcaatggttattatagagcacacgacgatatctaccaatggtattaacatgcatgtggcttcgattggttcaggtccagtgatcctattcgtccatggctttcccgatctctggtactcatggcgtcaccagcttgtctctttcgctgccttaggttaccgcgcaatcgctccagatcttcgaggatacggcgattccgatgcgccgccgtctcgtgaatcttacaccatccttcatatcgtcggagacctcgtcggattactggattcgctcggtgttgatcgggttttcctcgtcggtcacgattggggagcaattgttgcgtggtggctttgtatgatcaggcctgatcgagtcaacgncgtggtcaacactagcgttgtgtttaatccgaggaatcctt

SEQ ID NO: 152640 - DNA, 414 bp, Arabidopsis thaliana columbia
  unsure (1)..(414): unsure at all n locations
cttaatcgtttctctcaaatttagggttttctcttttctcgaaagtcttgcggttttctgaatcatctctatctggtttgagggtttcgtttgatatctggagaaaggggtttctggaaacaaggagttcataattcgcgatcttgatctatcgatcttcatttatatataaaagcgtgaatgagattatgatggagtcgaaaggtggtaaaaagaagtccagcagtagtagttccttattttacgaagctcccctcggttacagcattgaagacgttcgtccaaacggtggaatcaagaaattcaaatcttctgtctactcaaactgctccaagaggccatcctgagtaccagcgtgcaccgatcttcataatatagntatagctttctttactttccagtttataattttct

SEQ ID NO: 152641 - DNA, 422 bp, Arabidopsis thaliana columbia
ctcatagccgtcgtcgtcgtctctgtcgttcttatttcaaaaaaaaaaaaaaaaaaaggagacaaagaaaaagtaaagagaagtgcgctctctcttactctcatcgattttacaaaatatcagccatctccaaattacagagttctttctcaaacccaggttatcattttccaaagtttgaaggtgtgttcctgtccctgcagagatggcttggtacttatgaatgtgtttatactaatcactaaactcggggattttggctgtataatcaagaatttcatttattaacattgtttggccttgaaagcggtgaggataaaccagagctcaaaacgggtgcactctgttgtattgtggcctcaaggccactggttacaacataatcttcaccccacagcggaagggatattcctcaatcaagt

SEQ ID NO: 152642 - DNA, 413 bp, Arabidopsis thaliana columbia
cgtcaactatcttcttctcactctgttttcgtttagagagattttgcagagatgtcgagacgagcaatggtgataaagatgccaatacttatgatactgatttcatcaatggtgatgacgatggtcgagtcttcgagatcagttaataatggtcatgacgattctgagatcttacgaagacacttgctcactaatggcctcggagtcactcctcccatggggtggaatagctggaaccattttagctgcaacatagatgaaaaaatgatcaaagaaactgctgatgctttggttaccactggcctctctaagcttggctacaactatgttaacatcgatgattgctgggctgaaatttctcgtgacagcaagggaagtctggtgccaaagaagtcaactttcccttctggaat

SEQ ID NO: 152643 - DNA, 423 bp, Arabidopsis thaliana columbia
cctttcgcaacttgtcaaagcaccacgttcttctctctacggagttgagatcaatccccccaaatctcggtgtggttcctctagggtttttgatcggaatcggaatcgataatctaaccggcatgaggccaatcctattgccggatccacccagtctatctaccggcgtccctgatattttcgaacaaggcggttcccataacgtcgtcagacgcgccgtcgtcatcggaaacggtttccctggctccgagaatcagtgtatcggtctcgttcgtgcgctcggcttatctgataatcaccttctctaccgagtgacaaggcctaaaggaggactaaatgagtggctgcactggctcccagttggttttcacaagaagttggactttatcctcaggcatatttacctctactccagattgatgc

SEQ ID NO: 152644 - DNA, 393 bp, Arabidopsis thaliana columbia
aaaacttcttacctaaaatagaaatttgtattttttgagaaatggcttcaaaagggttcagcctctcttggcattggcctcacattcaacattctttttttcactttaaccaccgcatgtggcgggggctgcaggtccacccctaaacccaaacctaagcccaaggccaccggaagctggcctaaaggcactttcaagcttcggcgttggcgccatggttttaaaggatcttttcaaaattcagttgggaacaccaccagtgaagccttggtgttcgctcctcaatggtttagttgatcttgaggctgccgcttgtttttgcaccgcccctaaaggctaagttttaggcattaatcttaatgttcccgtctctctcagccttcttctcaatgt

SEQ ID NO: 152645 - DNA, 298 bp, Arabidopsis thaliana columbia
aaaacataggaatacaacaatcactacttttctctgtatctctctacatttgttagatttttgtttcatttttggtttgaattttgtttttcttgttttttccatccttcttttaaatgtaaaatctggttgttttatatacgtttactattcactcttcttcacaagaatatcttatgtgtaaaagccaaatcaatgtttggattaaagcagtaactttcccaaaaaaaaaaaaaaaaaaaaaaataaaaaaaaaaataaaaaaaaaaaaaaaaaaaaaaagagaggggggcggccg

SEQ ID NO: 152646 - DNA, 447 bp, Arabidopsis thaliana columbia
  unsure (1)..(447): unsure at all n locations
agcgcttgctnnttcgaagaccgaatctagtcttatttatccatgtgacaannnaccgtacggatagcgcgaggcgtganngcatgagcggcatgagatcnngttccgccggaaagggatannttgatcttgagaaatgggagtcggaagaagcgacgctttaatcctgggcttaagttaccggcgaggaatcagctccgatgggngatttaattcgtaagggtctatgnggattnctctcagnctcaaagcttcttcttaccgacnngcttatctccgcnncgtcgttggttcttaaaatcctcctgttaaaccgatnnntcttgaccgnngatctcctgnnggattcttctctttcctttctgcnaatcgttccctttcaatctnntaatctggcccctctgcacaatttaannncaccagaaagcatnnnctgttaacctggat

SEQ ID NO: 152647 - DNA, 415 bp, Arabidopsis thaliana columbia
ccaccctgccaaagactcctgctaaggactttttttcataaaccacacaagataacagaaattcttttcttgaaattgttctctttcttgctttgattttttcaattttcttatactgagtttttgtatttctgtaaaatttgcttataggagactttctgggtatcttggcttcaatttgcagaaaaccaaaaaaaaaaaaaaactttttttctgggtttttttccttagcagagaaaaggttcttaatagttttaagactctggttttgtatattccaattatagctgaatattaaacacaatttataaaacttaaatttctttccaaaaaatctcttctttttaagtctataaaaattgcaactttcttctgaaattattcatttttgaaaaacacaaaagaaacaaagaga

SEQ ID NO: 152648 - DNA, 428 bp, Arabidopsis thaliana columbia
gtaagcttcagagtgaggccgttcgtgaagccatcactactatcacagggaaatccgaggcaaagaaacgtaactttgtcgagactattgagctccagatcggtctgaagaactatgaccctcaaaaggacaagcgtttcagtggatctgtcaagttaccacatatcccccgtcctaaaatgaagatctgcatgctcggagatgcccagcatgttgaagaggctgagaagatggggttggaaaacatggatgttgagtctctaaaaaagcttaacaagaacaagaaactcgtcaagaagcttgcaaagaaataccatgctttcttggcctctgagtctgtcattaagcagattcctcgtcttcttggtcctggtcttaacaaggcaggaaaattcccaactcttgtgagccaccaggaatccttggag

SEQ ID NO: 152649 - DNA, 420 bp, Arabidopsis thaliana columbia
tccgtctgtatctctctcttccgtcttttacttttcttcttcttcttcttcttccactcacaatctatcgagctaaagcactgaagcagacattagcgttgagaaaaaaaaaaaagtaagaacgagagagagaaagccatgtctgcgaaaacaatcctatcatcagtagttttggtggttctcgtcgccgcatcagcagcggctaatatcggattcgatgagtcaaacccgatccgaatggtctccgatggtctccgggaggtagaagaatctgtttcccagatcttaggtcaatctcgtcacgttctctctttcgctcgcttcactcaccgatatggtaaaaagtatcagaacgtggaggagatgaagcttcgattctcgattttcaaggagaatcttgatttgatcagatccaccaac

SEQ ID NO: 152650 - DNA, 412 bp, Arabidopsis thaliana columbia
  unsure (1)..(412): unsure at all n locations
gaagtcttgtctagctacttttgctctttcagtgttagtaacacacggaagcatttggaggttgtgtttggcctcctgtgcttctacaaactctgttcctaattggtttcatcattggccgccgtttaaatggggaccaaaatttccatattcttcacctaaaccgtcgccaatcgagaaatatcctccaccggtgcagtatccaccaccgatcaagaagtattcaccgccaccatacgagcatccaccggtgaagtattcaccaccgatcaagacttaccctcatccgccggtgaagtattctccaccagaacagtatccaccgccgattaagaagtatcctccaccagaacagtatccaccgccgattaagaagtatcctccaccagaacagtattcaccgnctttcaag

SEQ ID NO: 152651 - DNA, 421 bp, Arabidopsis thaliana columbia
caaaaccctagatcgaaatcttatctctttaatctgttgttacagttcgtagagtcatggcgttagcatcaacgcacgttgccgacgaagtccggattatctctttggtgtccgtcttctccgtctctcgctcgccgatttcccgctcgtttttctccgatcggttctagaatcgcttccagaagcctcgtcactgcttcgttcgctaacgagaatcgcgagtttgtgattgttggtggaggaaatgctgctggttatgctgctagaacttttgtggaaaatggaatggctgatggtcggctatgcattgtgaccaaagaggcttacgcaccttatgagagaccggctttgacaaaagcttacttgttcccaccagagaagaagccagctcgtttaccaggatttcatacttgcgttggag

SEQ ID NO: 152652 - DNA, 409 bp, Arabidopsis thaliana columbia
cttttatctacaatcagctcgttcttactccatctgtgctcgttgaagaaatcatggtttgtaatccgtccaattcgcctaagtcgcgggctcgtattaatagaaagatttttcttccttccctagagatcccattttcgtacttgtgtgattcgtgcatcaacagttggcgcgccaggtagggggatagctcgaagatatctctcaaaactacgacctgatatagcgttctagaaggtcaagctcacacatgtgaagtcagggatgttaagcaaagcacgtgtgttgtgagctggcgagctggcaatgtgaagtcagggatgttaagcaaagcacgtgttgtgagctggcgagctggaaatgtgaagtcagggatgttaagcaaagcacgtgttgtcaaatgcttaca

SEQ ID NO: 152653 - DNA, 413 bp, Arabidopsis thaliana columbia
agaaaaatcagatctagattcagtttttttcatcaaaaaagagcgtcttcataaacgcccttcgtcttcttccctggaaatctagtttctttcttccacgaaaatgagagagtgcatttcgatccacattggtcaggctggtatccaggtcggaaatgcttgctgggagctgtactgtcttgaacatggcattcagcctgatggccagatgccgagtgacaagactgttggtggaggtgacgatgctttcaacaccttcttcagtgaaaccggtgcaggtaagcacgtcccacgtgctgtctttgttgatcttgagccaactgtgatcgacgaggtcaggactggtacttaccgtcagcttttccaccctgaacaactcatcagcggtaaagaagatgcagctaacaatttcg

SEQ ID NO: 152654 - DNA, 406 bp, Arabidopsis thaliana columbia
gtacagttgatatagttgaggcacaatcaaaatatggtttttggggatggaatttgtggcgtcaacctataggttttatcatttttctaatttcttccctagcagaatgcgagaggttaccgtttgatttaccagaagcggaagaagaattaatagcaggttatcaaactgaatattcaggtataaaatttggtttattttacgttgcttcttatctaaatctattaatttcctcattatttgtaacagttctatacttaggcggttggaatatttctattccgcatatatctattctggagctatttcaaagggatcaaatttttggaacaacaattggtatctttattacattagctaaaacttatttgtttttgttcgcttctatcgcaacaagatggacttt

SEQ ID NO: 152655 - DNA, 408 bp, Arabidopsis thaliana columbia
ctctctctctctctgcctcctttcggattcaaatctcagatctagctcaaccatggcgttgctcgtcgagaagacctcaagtggccgtgaatacaaggtcaaagacatgtctcaagccgatttcggtcgtctcgaactcgagctcgccgaagttgagatgcctggactcatggcttgtcgtaccgaattcggaccttctcagccattcaaaggcgctagaatcaccggatctcttcacatgaccatccaaaccgccgtactcatcgaaaccctaactgctctcggtgctgaagtcagatggtgttcctgcaacatcttttccactcaagaccacgccgccgcagccatcgctcgtgactccgccgctgttttcgcctggaaaggtgagactcttcaggagtactggtg

SEQ ID NO: 152656 - DNA, 410 bp, Arabidopsis thaliana columbia
ggctgcttcaagtgctgtcaccgcaaactacgtcctcaagccacctccattcgcactggatgctttggagccgcatatgagcaaacaaactctggagtttcactggggaaaacatcacagagcttacgtggacaacctcaagaaacaggttcttggaaccgagcttgaaggcaagcccttagagcacattatccacagcacttacaacaatggtgatctcctccctgctttcaacaacgctgctcaggcgtggaaccacgagttcttctgggagtcaatgaaaccaggtggtggaggaaaaccatcaggagagcttcttgctttgcttgaaagagatttcacttcttatgagaagttctatgaagagttcaatgctgctgcagccactcagtttggagctggctgggcct

SEQ ID NO: 152657 - DNA, 411 bp, Arabidopsis thaliana columbia
acggattactatacggatgtcatcatcaaaggaatcatacttaccctgataattgcagggacagatacgtcatcagtaacactagaatgggcaatgtcaaatctgttgaaccatccagaaatacttaagaaagcgagaatggaaatcgatgaaaaagtcggtttagaccgattagtagacgaatcggacattgtaaatctctcttatctccaaagcattgtattggaaacactacgtatgtacccggcagtcccactactactacctcatttgtcatcagaagattgtaaagttggaggctacgatataccaagtggaacaatggtattgaccaacgcatgggccatgcatagagatccagaggtatgggaagatcctgagatattcaaaccagaaagatttgaaaaagaa

SEQ ID NO: 152658 - DNA, 439 bp, Arabidopsis thaliana columbia
aggtaccgaaccgcaagttcgacccacgacctcacgcgtagatatgtgcttttggagtgtgcattacgaagacgttttaagcgcttaagcgttgcagcaaaacgccggcatggttgcgggatcttaccggagatatgagtttgttcggaacagagacgattccgatgatgggctaaaacccttgaaagatctgaatggtcagatatgtcagatctgtggtgacgatgttggactcacaaaaactggcaatgtctttgtcgcttgtaatgaatgtggttttcctttgtgtcagtcttgttatgagtatgagaggaaagatggatctcaagtgttgcccgcaatgcaaggctagattcagacggcacaatgggagtcctcgagttgaagtagatgaaaaagaggatgatgtcaatgatatcgagaatgagtttgattatac

SEQ ID NO: 152659 - DNA, 410 bp, Arabidopsis thaliana columbia
cagctgagtcccgcaaaacccaattgctgaacgataatgatgttgaatctagcgacaagagtgcaaaaggcacacgatgggctgttttagttgctggatcaaatgaatattataactacaggcatcaggctgacatatgccacgcgtatcagatactccgaaaaggcggtttaaaagatgaaaacatcattgtgtttatgtatgatgatatcgcgttttcctcggagaatcctaggcctggagttatcattaataaaccagatggagaagatgtttataaaggagttcctaaggactacactaaagaagctgttaatgttcaaaacttctacaatgtgttacttggaaatgaaagtggcgtcacaggaggaaatggcaaagttgtgaaaagtggtcctaatgataatatc

SEQ ID NO: 152660 - DNA, 413 bp, Arabidopsis thaliana columbia
ggaagatacactgaagcaaaagagcaagtcatggcggcgacatcttcctctgcttttctccttaatccgttgacttctcgccaccgtcctttcaaatactcgccagagctctcttctctctccttatcctctcgaaaggctgctgctttcgatgtttcctcagctgctttcacgctcaagagacagagccggagtgatgttgtgtgcaaggctgtatctatcaagccagaagctggtgttgaagggctcaatatcgccgataacgccgctcagcttattgggaaaactccgatggtgtacttgaacaatgtagtcaagggctgtgttgcaagtgttgctgctaagcttgagatcatggaaccatgttgcagtgtcaaggataggattgggtacagtatgattactgatgctga

SEQ ID NO: 152661 - DNA, 415 bp, Arabidopsis thaliana columbia
gatgaagccaagttgactcttcatgggcttgtccagcactatatcaaactgagcgagatggagaaaaaccggaagttgaatgaccttcttgatgcgttggacttcaatcaagttgtcatttttgtgaagagcgtgagcagggctgctgagctgaacaagttactggtggaatgcaatttcccctcaatatgcatccactctggaatgtctcaagaagagaggttgactcgatacaaaagtttcaaggaagggcacaaaaggatccttgtggcgactgacttggtaggaagagggattgacattgagcgtgtcaacattgtcatcaactatgacatgccagattctgctgatacctatcttcacagggttggcagagctggtagatttggaaccaagggtcttgcaatcacatttg

SEQ ID NO: 152662 - DNA, 400 bp, Arabidopsis thaliana columbia
caaggcttagctcaggaccccactactcgtcgtatttggtttggtattgctaccgcacatgacttcgagagtcatgatgatattactgaagaacgtctttatcagaatatttttgcttctcatttcgggcaattagcaataatttttctgtggacttccggaaatttgtttcatgtagcttggcaaggaaattttgagacatgggtacaagaccctttacatgtaagaccgattgctcatgctatttgggatcctcattttggtcaaccggctgtggaagcgtttactcgaggaggtgctcttggcccggtgaatatagcttattctggtgtttatcagtggtggtatacaatcggtttacgtactaatgaagatctttatactggagctctttttctat

SEQ ID NO: 152663 - DNA, 399 bp, Arabidopsis thaliana columbia
aaaaacattcttctcacaagaatcagattcaagatagaagtttttcaaacaatgtctagtcctcttggtcactttcagattcttgtttttcttcatgctttgcttatcttctcagctgagtcccgcaaaacccaattgctgaacgataatgatgttgaatctagcgacaagagtgcaaaaggcacacgatgggctgttttagttgctggatcaaatgaatattataactacaggcatcaggctgacatatgccacgcgtatcagatactccgaaaaggcggtttaaaagatgaaaacatcattgtgtttatgtatgatgatatcgcgttttcctcggagaatcctaggcctggagttatcattaataaaccagatggagaagatgtttataaaggagtt

SEQ ID NO: 152664 - DNA, 406 bp, Arabidopsis thaliana columbia
aaacactaaaagtagaagaaaaatggcgactcttaaggtttctgattctgttcctgctccttctgatgatgctgagcaattgagaaccgcttttgaaggatggggtacgaacgaggacttgatcatatcaatcttggctcacagaagtgctgaacagaggaaagtcatcaggcaagcataccacgaaacctacggcgaagaccttctcaagactcttgacaaggagctctctaacgatttcgagagagctatcttgttgtggactcttgaacccggtgagcgtgatgctttattggctaatgaagctacaaaaagatggacttcaagcaaccaagttcttatggaagttgcttgcacaaggacatcaacgcagctgcttcacgctaggcaagcttaccatgctcgc

SEQ ID NO: 152665 - DNA, 407 bp, Arabidopsis thaliana columbia
ggaggaaggagaaatgataggtttattaactgagagtagcagcagtcatatggcagtcatatgtctccggttaatgcggaggttgaggagatgagatcagagtcgccggtggttaatgataaggcgttagatatttctgatgatgatcatgatgatgagaatgaaccgcttattgtttctggtgaatgtcgtatttgttctgatgagtctcctgttgagaatcttgagagcccttgtgcttgcagtggcagcctaaagtatgctcatagaaaatgtgttcagcgttggtgcaatgaaaagggaaacattatatgcgagatttgtcaccagccttatcaacctggatataccgctccaccacctccacttcagcctgaagaaacaactattgacattggtggaggatg

SEQ ID NO: 152666 - DNA, 357 bp, Arabidopsis thaliana columbia
ttctatcttacacgtatgtatatatatccacacatttcatatatgtatcctgtcttacacgtatgtatatatataagaatatatatatatgaaatgtgtggatatgtattagtctcgaagtaacgaaagatttttttcttaaaaaaaaaaaaaaaaaaaaaaaaaaaaaaaaaaaaaaaaaaaaataaataaaaaaaaaaaaaaaaaggggggggccgtttaaggggaccaaagttaccgtccgcggcattgcaaggtaaaagtttttttttggggccactaaattcaattcaatgggccggggtttaaaaacgtggggatgggaaaaaccttgcggtacccaaattaaaaggcttt

SEQ ID NO: 152667 - DNA, 411 bp, Arabidopsis thaliana columbia
attctcaccgaatcaaatccaaaagagcaaatttacaatcttgcgaactcctaaaatggctcgtaccaagcaaacagctcgtaaatccaccggaggaaaggcaccaaggaagcaactcgcgaccaaagctgcgaggaaatcagctccagccaccggaggagtgaagaagccacacagattccgtccaggaacggtggcgttgagagaaatcaggaagtatcagaagagtactgagcttttgatccgtaagcttccgttccagagattggttcgtgagattgctcaagatttcaagacggatctgaggttccagagcagtgccgtcgcagctcttcaggaagcagctgaggcttatcttgttgggctctttgaagatactaatctctgtgcgattcatgctaagagggttac

SEQ ID NO: 152668 - DNA, 408 bp, Arabidopsis thaliana columbia
taaatccgatcgaaacaactgttgggttagtttctaatttccaagaatggcgcaagatcacgacgagacggagaataaaacctttgccgacgttgtcggtggcgatgatgtcggcgaaattgtcaacggaggaacaaagaatggctatcgtaaaccggactctgtggagaaggaagatgatgaggatttgaagagtctctattccttgatttgtctcacgatcggttcgattctgtttccagattcgaaaaccggtgatgcgtcttcgtttcttgaacgtgtaagaaactccgtcgctgaaaatgggcctaagcttcgagaagcttctgaaagaacaggacgcgagattcttctctggactcgtagaggcagctcgcttcgtgctctgcttgtcatcactatgggaac

SEQ ID NO: 152669 - DNA, 409 bp, Arabidopsis thaliana columbia
cttcagcttaagctgatgggtcagagccaccctactggcttaacaaacaatctcttgaagctttttgagccacgtccgccattggagtacaaaccaccaccagagaagagaaagtgcccgccttatacaggtatggctcagtttgtaagtaactttgctgagcctggggatccagaatacgctccacctaagccagaagttgaattaccttcgcagaaaagggaaagaattcataaattgcgactggagaaaggtgttgaaaaggctgctgaggacttaaagaaatatgaccccaataatgatccaaatgctactggagatccatacaagacattgttcgtttcaagacttaactacgaatcctcagagagtaagattaaaagggagtttgaatcttatggaccaatta

SEQ ID NO: 152670 - DNA, 414 bp, Arabidopsis thaliana columbia
ccggcctcgtcgccctcctagggtcacacagcgtgggaagaactcactgtgtcaagctggtccatcgtttgtaccctgaggtggacccgtccttaaacccggaccacgtccctcacatgctacacaagtgtcctgactcgatccctgacccaaaggcggtccagtacgtgcgtaacgaccgtggcacccccatggtgctagacaacaattactaccgtaacatcctagacaacaagggtttgctccttgtggaccatcagctcgcacacgacaaacgaaccagaccaatcgttaagaagatggctaaggaccaggcctacttcttcaaggagttcactagggcaatccagatcttatccgagaacaaccccttgactggctctaagggtgagatcaggaagcaatgtaatctcg

SEQ ID NO: 152671 - DNA, 415 bp, Arabidopsis thaliana columbia
gtgggaaagggggatcaggatcaagcccatggtccatctgatacacatcctgaaaaacgaagtcccaccgagaaaccctctctgaagaagaggggaagaaaatccaatgcaagctcctctttaaaagatctatctggaaaaacacaaaagaagacttcagagaagaaattgaaactagattcccatatgatctcaagcaaagctacacaaccgcatggaaatggtattctaactgctgggttgaatcaagggggtgataaacaagattcaagaaacaataggaaatccactgtgggtaaagacgatcataccatgcaagttatagagaaatgctcaacgataaacaagtcttcatctggaggcagtgcacatttgcgacgatgtaatggatctttaacgaagaaattcacatgtg

SEQ ID NO: 152672 - DNA, 434 bp, Arabidopsis thaliana columbia
  unsure (1)..(434): unsure at all n locations
cgtccgctttctctttcgtttctagggatctccgacgtattcgtgaatatcaaatnctcgatcgattgaattgctgtcaattcacaccaaaaagccgaaaacctaaaaaaaaacctatggtgtttggagaagggatcaaggtggcanaatcccatctgtcgagatggatggntgatgaaatgacccagggttattntggaagtctatcaaggataagcttattactccttttgtggagttggatatcaagtacttcgaccttggtcttcctcaccgtgatgctacggatgacaaagttactattgaaagtgctgaagctactaagaagtacaatgtggcgatcaagtgtgccaccatcactccagatgaaggccgtgtcacggaatttggcttgaagcagatgtggagaagtccaaatgggaccatcaggaata

SEQ ID NO: 152673 - DNA, 404 bp, Arabidopsis thaliana columbia
cctagcctgaacaactcgccgtcttctcgagaaacatctttcttacttcgcttcattacaagatctgatgaaaccagatcggatcttgctctagatccagatgctccttaacttatttactcgaattcatcatcatcgttatcatcaccatgtcactgtttctaaaagacgattcgattcaaatccgtgaagtatggaacgacaatctcgaatcagagatggctctgattcgagaagtcgtagacgatttcccattcgtagcgatggacacagagttcccaggaatcgtgtgtagaccagtgggaacattcaaaaccaacacagagtaccactacgaaactctcaaaacaaacgtcaacatactcaagatgattcagcttggactcactttctctgatgagaaa

SEQ ID NO: 152674 - DNA, 400 bp, Arabidopsis thaliana columbia
ggatcattattttcttcttactgaaagtcctcttactcctcctgaaagtcgagaatatactggagaaattttgtttgagacttttaatgttcctgggctttacattgctgttaattcagttcttgcacttgctgctggctacacaacatcaaagtgtgagatgacaggggttgtagtagatgttggagatggggcaactcatgttgtacctgttgcagaaggttatgtcatcgggagctgtatcaaatcgattccaattgctggcaaagatgtcaccctctttatccagcaactcatgcgggaaagaggtgagaatataccaccagaagattcattcgatgtagcccgtaaagtgaaggaaatgtactgctacacttgttctgacatcgtaaaggagttt

SEQ ID NO: 152675 - DNA, 406 bp, Arabidopsis thaliana columbia
aaaagcaccaatttcaatcctatttttttcttttgttttccggcaagatttggtaaaattttgtgttctgatttgttgttttgaatatcaactatggaacaacggaagaaaggttgtaagatcaggaagagaggtggttcttcctcttcttcttcttcacttgctcgtcgaaaccgcttcaaacgtgcaattttcgccgggaaaagagccgctcaagacgacggtggctcaggaactcctgttaagtccatcaccgccgctaaaactccagttctgttatcgttttcgccggaaaatcttcctatagatcatcatcaattgcagaaaagctgcgtgtcggcgagaaagctagctgcgacgctgtgggaaatcaacgacgacgcagaccctccggtaaattctgata

SEQ ID NO: 152676 - DNA, 406 bp, Arabidopsis thaliana columbia
aatttgtgcgcttgggagtccctgattattaaataaaccaaggattttaccatgactgcaattttagagagacgcgaaagcgaaagcctatggggtcgcttctgtaactggataactagcactgaaaaccgtctttacattggatggtttggtgttttgatgatccctaccttattgaccgcaacttctgtttttattatcgcattcattgctgctcctccagtagatattgatggtattcgtgaacctgtttctggatctcttctttacggaaacaatattatttccggtgccattattcctacttctgcagctattggattgcatttttacccaatctgggaagctgcatccgttgatgaatggctatacaacggcggtccttatgaactaattgttctacact

SEQ ID NO: 152677 - DNA, 409 bp, Arabidopsis thaliana columbia
cttgatgcgactgctcaaacagagtcaccggcgattacgatggccggaaacaactcggaatcgagtctctaccaggttttggtggagtggtgtcagaggatggagacgagtcaagcgagactaagggaggatgttgatgacttattgcttcaggaggagagtcgaaccggtaaggaatcggcgacgggattggagacggacacggagaaagaggctgaggtagaggtggaagcggaggcggcggattcctgggataatccgacggcgacttgggagagagctgtttcaggattctatttcgctgatagtgcgtatcggactttgatggattcaatgggacacgcgattcatgtaacatcagctgcgtctggagaaattacattctggagtcgttctgctgagaatctgt

SEQ ID NO: 152678 - DNA, 406 bp, Arabidopsis thaliana columbia
cagtctctcactttctctcttctctctctctctttcttttttgagtccgtgaaggctaagtctgaaagaatgacgaaggatgagttgacggaggaagagtcgctctccggcaaggactacttagacccaccgcctgtgaagacgttcgaggtgagagagctcaagaagtggtccttctacagagctgtcatcgctgagttcatagctactttgctctttctatacgtgactgttttgacagtcatcggctttaagagccagactgatatcaacgccggcggcggagcttgtgccagtgtcggcctcctaggcatctcttgggcctttggtggcatgatattcatcctcgtctactgcactgccggcatctctggtggacacatcaatcccgcggtgacgtttgggc

SEQ ID NO: 152679 - DNA, 408 bp, Arabidopsis thaliana columbia
cagcaacaaatttcccagagtctttggataaggccctggttagacctgggaggtttgatcgtcatattgttgtacctaacccagacgtggaaggtcgacgccagattttggagtctcacatgtcaaaggtacttaaggctgaagatgtcgatttaatgatcatcgctagaggaacgcctggattttctggcgctgatttggctaatctggtcaatgttgctgctttaaaagctgcaatggacggttctaaagatgtgacaatgtctgatcttgagtttgccaaagacagaatcatgatgggaagtgagaggaaatctgcagttatatctgacgagtcaagaaagctaactgctttccatgaaggtggtcatgcccttgttgccattcacaccgaaggtgctcttccag

SEQ ID NO: 152680 - DNA, 409 bp, Arabidopsis thaliana columbia
gaaggtcaacaacgtcgagaataatggcatcatctctttgtgcttcttctgccatcgctggcatttcttctccaagtttcttgggtggtaagaaactgaggctgaagaagaagttgactgttccagctgtgtccaggccagatgcgtcggtgcgcgccgtcgcagctgatccagatagaccaatctggttcccgggaagcactcctccagagtggctagacggtagcctccctggtgacttcggatttgatcctcttggtctttcatcggacccggacagtctaaaatggaacgtacaagccgagatagtccactgccgatgggctatgctaggagccgccgggatattcatcccagagttcctaacgaagatcggaatcctcaacactccgtcatggtacacggcggg

SEQ ID NO: 152681 - DNA, 413 bp, Arabidopsis thaliana columbia
ggatcctgagtgatatttcgagaccgatgatgtggaagaacattgctgggttgtcgaaggcagcggcagcggcaagaacacacggatctcggcggtgcttttccacagcgattcctggtccttgcatcgtccacaagcgtggtgctgatattcttcacgatccatggttcaataaggacacaggttttcctttgactgagagagatagattagggatacgaggcttgcttcctcctcgtgttatgacctgtgtacagcaatgtgatcgtttcattgagtcgtttcgttcgctagagaacaacacaaaaggagagcctgaaaacgttgttgcattagctaaatggaggatgttgaatagattgcatgaccgtaatgagactttgtactaccgagttcttattgataacatcaaa

SEQ ID NO: 152682 - DNA, 401 bp, Arabidopsis thaliana columbia
cccttttctctctctctcgaagatatcgcctttaattccttcttcttcttctgatttcttcaaagattcatttcttagagatctcagcttctgtaagagtaggctagctaccaaaaaaaaagaaatagaaaaaaacattgatgcttaatcagcagttcttggtgtttgagacacatgtctccaataatactcagtgagatctttctctctgggtttatgttaaattccacaatcaggcgcaggacccatcttgttcaatctttctctgttgtcttcctttactggctttactatgtctcatgatctctgaacttatctccagttttatatctatacgcataattacaacaaaaccctagtttcttttcaaatttctcttcttcgtttttcgtcatctgggt

SEQ ID NO: 152683 - DNA, 406 bp, Arabidopsis thaliana columbia
attatattcaagagaaaaaggaaaaaatgaatttcatctccgatcaggtaaagaagctctcaagctcaacaccagaggagccagaccacaacaagccagtcgaaggaaccgaaacagctacaagaccagctaccaacgccgagctcatggcaagtgccaaggttgtagctgaagctgctcaagccgcagctcgtaacgaatcagacaaactcgacaagggtaaagtcgccggagcctctgctgatatcttagacgctgccgagaaatacggtaagttcgatgaaaagagtagcactggtcagtacctcgacaaggctgagaagtatctcaacgactacgagtcgtcacactccaccggtgctggtggtcctcctcctccgacgagtcaggctgagccagcaagtca

SEQ ID NO: 152684 - DNA, 406 bp, Arabidopsis thaliana columbia
cccaaagcctaaagcgatctctgcaaatctctcgcgactctctctttcaagatgcaaatcttcgtgaaaacactcactggcaagactatcactctcgaggttgagagctctgacaccatcgacaatgttaaggcaaagattcaggacaaggaaggcattcctccggatcagcaaagattaatattcgccggtaaacagctagaagatggccgtaccttggccgattacaacattcagaaagaatcaacccttcatttggttctccgtttaagaggtggtatgcaaatctttgtcaagactctgactggcaagaccattactttggaggttgagagctctgacactattgacaacgtcaaagcaaagatccaggacaaggaaggaatccctccggatcagcagagac

SEQ ID NO: 152685 - DNA, 407 bp, Arabidopsis thaliana columbia
gaagaacaatggcttcctctatgctctcttccgctactatggttgcctctccggctgaggccactatggtcgctcggttcaacggacttaagtcctccgctgccttcccagccacccgcaaggctaacaacgacattacttccatcacaagcaacggcggaagagttaactgcatgcaggtgtggcctccgattggaaagaagaagtttgagactctctcttaccttcctgaccttaccgattccgaattggctaaggaagttgactaccttatccgcaacaagtggattccttgtgttgaattcgagttggagcacggatttgtgtaccgtgagcacggtaactcacccggatactatgatggacggtactggacaatgtggaagcttcccttgttcggttgcacc

SEQ ID NO: 152686 - DNA, 411 bp, Arabidopsis thaliana columbia
ggatggagttaagtaaagtgcgggagatatgcaaatgtatactgactggtctagagtatttgcaccgtgaactcggtatgattcactccgacttaaaacccgaaaacattcttctttgttccaccattgaccctgccaaggatcctatcagatccggactaacaccgatactagaaaagcccgaggggaaccaaaacggtacatcaacaatgaatctgattgagaagaagttgaagaggagagcaaaaaaagcggctgctaaaatatcaggaagaagagtttcgatagtaggtttaagtgaaacaccgaaaaagaacaagagaaacttggatgggattgatatgagatgcaaagttgtcgacttcgggaacgggtgttgggctgataacaaatttgcagaagaaatacaaa

SEQ ID NO: 152687 - DNA, 409 bp, Arabidopsis thaliana columbia
ctacaacgctctttctccgtaggaaaggggaagcaaataaattatcgaagcccactggtttcggagctgatcggtctctatttctctcttcatacatatatcaagcagataaagttgatcggatactagaatgggaggaggatttagagttctgcatttggtgaggccattcttggcttttctgcctgaggttcagagtgctgataggaaggttccattcagagagaaggatatctacactgccatctgtctcttcatctttcttgtctgcagtcagcttgctctctatggaatccattccaccaccggtgcggatccattctattggatgcgcgtcattcttgcgtgcaaccgcggaactgtcatggagctcggcattactcctatcggtacatctggacttgtgatg

SEQ ID NO: 152688 - DNA, 407 bp, Arabidopsis thaliana columbia
cacagagaatataatgagtttgaaaataaagtttctgcttctgcttgtcttgtatcatcatgttgattctgcctctatcgtcaagtttcttcctggttttgaaggccctcttcctttcgaacttgaaaccgggtacattggtattggtgaggacgagaatgtgcaatttttctactatttcatcaaatctgaaaacaatccaaaagaagatcctcttcttatatggttaaatggaggacctggatgttcttgtcttggtggtattatttttgagaacggaccggtgggtttgaagtttgaggtgttcaacggaagtgctccttctttgttctctactacatattcatggacaaagatggcaaacattatattcttggatcagccagtaggatctggcttctcctact

SEQ ID NO: 152689 - DNA, 395 bp, Arabidopsis thaliana columbia
aactcagccagagagacttgttggacatcaataccacgagctaagaggtcagtggtgatgagaacacgggaggaaccagacctgaactctctcatgatgatgtccctggtgttctggtccatgtctccgtgagttgcagagactgtgtggtcacggcttctcattttgtctgtgagccaatcaaccttacgcctggtgttcacgaagatgacactctgagtgatggcaagagtctcgtagagatcacagagtgtctcgagcttccactcttctttctcaacgttgacgtagaactgcttgataccttcaagggtaagctcatcagggcatactccaagcttgcgtacatgttgttgatggaactccagggcgtgtatttgacatgttcaagatgt

SEQ ID NO: 152690 - DNA, 412 bp, Arabidopsis thaliana columbia
aatggctaacgaagaactcactgagtcacagcaacaagaagacccaagtcaacaattacccaatgcagatgaagaaaagggctcagactccgactcaaactcagactcagacgcatcatcccaatcctccggcgacgatttctacatctccgagtcagaaaatgaagcagaaggagacaacacaatcttcaactacgtaagaccaagtgacatacctcctgacccaaacgcaaacccagaaaccaacattcgccgattcaatcgagtcctcgatggcaaacgagtgaagcgtatgcaagaagaagaagaagataaatacactttctatgaagatcttttcgatttccctagagacccagaacgttggaaggagcaagatttaagagagatttgggctgatggtccattggag

SEQ ID NO: 152691 - DNA, 410 bp, Arabidopsis thaliana columbia
caatggtttcttcttctttaaccaagcttgtgttctttggttgtctcctcctgctgacatgcacggacaaccttgtggctggaaaatctggcaaagtgaagctcaatctttactacgaatcactttgtcccggttgtcaggaattcatcgtcgatgacctaggtaaaatctttgactacgatctctacacaatcactgatctcaagctgtttccatttggtaatgccgaactctccgataatctgactgtcacttgccagcatggtgaagaggaatgcaaactaaacgcccttgaagcttgcgcattaagaacttggcccgatcagaaatcacaatactcgttcatacggtgcgtcgaaagcgatacgaaaggctgggaatcatgtgttaaaaactctggacgtgagaaa

SEQ ID NO: 152692 - DNA, 414 bp, Arabidopsis thaliana columbia
aaaccaacagaacacaacaatacaacatctcagaaaaaaaaaaaccactcctcgatgtctgatcaacagcttgaaacagagatcaacttctggggagagacttcagaagaagattactttaatctcaaaggcatcatcggctccaaatctttcttcacttcccctcgaggtctcaacctcttcactcgttcatggcttccctcttcctcttctccgccacgtggtctcatcttcatggtccatggctacggcaatgacgtcagctggactttccagtccactcccatttttcttgctcagatgggtttcgcttgctttgctctcgacatcgaaggtcatggccgatctgacggtgtccgcgcctatgttccctccgtagatctagtcgtcgatgacatcatctctttctttaat

SEQ ID NO: 152693 - DNA, 452 bp, Arabidopsis thaliana columbia
  unsure (1)..(452): unsure at all n locations
cacgcccgtctcgatttnnctttagctnncaaccttcattaccctaatctctcttttaaggggtttcnttttcgtgaatcgagatggcggaaaannatggaatctttttgtggttcactatctgaatccgtcaaccgagggaccatcccgacaagcttttgtgatcagatctnccgacgcttatcctcgatgctnntgccttgaacaagactcctgagagcaaagttgcttgtgagacttgtaccaagactaacatggtcatggtttttggagaaatcaccaccaaggctaacgttgattacgagcagattgttcgtaaaacatgccgtgagattggattcgtctctgctgacgttggtctagatgctgacaattgcaaggttctggttaacattgagcaacagagtcctgacattgcacaaggtgttcatggtcatctcaccaagaagcca

SEQ ID NO: 152694 - DNA, 404 bp, Arabidopsis thaliana columbia
gttgattggttggcatattttcaatacattgccatatgcggggaagagtgcagtttatatagatgatgttgctgcggttttgcctcaaaaactagagtggtctgggtttgtgttgaactcgagattgctttgggaggaagctgagaataagccagagtgggttaaggactttgggtcgttgaatgagaatgaaggtgtggagagtcctttgtctctgttgaaggatccttcaatggtggagcctcttggaagctgtggaagacaagttctgctatggtggcttcgagtagaagcacgcgctgatagcaaattccctcccggatggataattgatcctccgttagagatcacagttgcggctaaacgcactccatggccagaagttcctcctgagccaccaacta

SEQ ID NO: 152695 - DNA, 406 bp, Arabidopsis thaliana columbia
ggagaatgcagatgagtgtatggttcttgacaatgaagctctctatgacatttgcgtcagaactcttaagctcaccactccaagctttggagacttgaatcacctcatctctgcaaccatgagtggtgtcacttgctgccttcgtttcccgggtcagctaaactctgacctgcgcaagcttgcagtgaatttaatcccattccctcgtctccacttcttcatggttgggtttgcaccactcacatctcgtggatcacagcaatacagagccttaaccgtccctgagctcactcaacagatgtgggatgccaagaatatgatgtgtgcagctgatccacgccacggcaggtacttgacagcctcagccatgttcagaggcaaaatgagcacgaaagaagttgacgaa

SEQ ID NO: 152696 - DNA, 411 bp, Arabidopsis thaliana columbia
gttcctgacgaaattggacgtcttgaagttctgaggatccatacaaagaacatgaagctggctgaagatgtggatgtcgaaaggatctcaaaggacacacacggttacgtcggtgctgatcttgcagctttgtgcacagaggccgccctgcaatgcatcagggagaagatggatgtgattgatctggaagatgactccatagacgctgaaatcctcaattccatggcagtcactaatgaacatttccacactgctctcgggaacagcaacccatctgcacttcgtgaaactgttgtggaggttcccaacgtctcttggaatgatattggaggtcttgagaatgtcaagagagagctccaggagactgttcaatacccagtcgagcacccagagaagtttgagaaattcggg

SEQ ID NO: 152697 - DNA, 410 bp, Arabidopsis thaliana columbia
aaacctcgaagttatcgaagcggcacctttgaaagacgatctggatattgtgatcccaaccatcagaagcctcgactttctagagcaatggagaccatttttgcaccattaccacctgatcattgtccaagatggagacccttccatcaagatccgagttcccgagggttatgactacgagctctacaaccgtaatgatatcaacaggatccttggtccaagagctaattgtatctcctacaaagatggtggttgtcgctgctttggcttcatggtttctaaaaagaagtatatctacaccattgatgatgattgctttgtggcaaaggatccaagtgggaaagacatcaatgtgatagctcagcacataaagaaccttgaaacaccttcaacaccacactacttcaaca

SEQ ID NO: 152698 - DNA, 408 bp, Arabidopsis thaliana columbia
gttgatttagcccattcgtagacttcctccgcgccgccgttagacgccgcctcggaagtatcagcaaccgccgtggtgttcgtcgccttcaaagagatctgaatttgagatgtttaaaaaaatgagtgctactacaagcaagacggatcagaaagcggcattagacattgcatcatggctattcaatgtggttacttccgttggaatcatcctcgttaacaaagctttaatggctacttatggctttagtttcgctactacattaaccggtttgcatttcggaacaacgacattgttgacaactttcttgacatggcttggttatatccaaccttctcagcttccttggcctgatcttttgaaattcgttttgttcgctaacttctctatcgttgggatgaacgtcag

SEQ ID NO: 152699 - DNA, 414 bp, Arabidopsis thaliana columbia
cggacgcgtgggcgagaaagtggtagtaaaagtacaaagacccggactaaagaaacttttcgatattgatctacgaaatctgaagctgattgccgagtatttccagaaaagtgaatcatttggtacaaacgattgggttggtatctatgaagaatgtgccttaattttgtatcaagagattgactacataaacgaagctaagaacgctgacagattccggagagacttccggaatataaactgggtccgcgtacctttggtttattgggattactctgccatgaaggtcttgactttggagtatgtaccaggtgttaagatcaacaacttggacgccttagctgcacggggttttaaccgttctagaatcgcatcacgggccattgaagcttatcttatacagatactcaaaac

SEQ ID NO: 152700 - DNA, 410 bp, Arabidopsis thaliana columbia
caataattgaggtcaaggctttgcatcatttcgattggttatcgaaaggtaaagtacccgttttggaagctatggagaaagatcagagagtgaggtctcaattcagaggtggatcatcggttattgtggctaataacaaagagaacccggttgttgttgctgctaagttacaagctctcagccctaaatacaactccttgatgaatcacatccgtattcatctaccagagttgtttccaagcttaaacaaggttgtgtttctagacgatgacattgtgatccaaactgatctttcacctctttgggacattgacatgaatggaaaagtaaatggagcagtggaaacatgtagaggagaagacaagtttgtgatgtcaaagaagttcaagagttacctcaacttctcgaat

SEQ ID NO: 152701 - DNA, 405 bp, Arabidopsis thaliana columbia
gtgctttctaaggaccttcagatttactttgacaaagtcacggagtgggctttggctcaatctggctccaccctctttagacaagcactcgccagcttggaaattgatcctggactccacccattagttccctttttcacttctttcatcgctgaagagattgtcaaaaacatggataattatccaatcttgttggctttgatgcgtcttgctagaagcctccttcataaccctcatgtacatattgagccatatctgcatcagttgatgccgtctattatcacttgccttattgccaagcgcttaggaagaaggtcatctgataatcactgggacttgagaaacttcactgccagcacagttgcttcaacgtgcaaaaggtttggacacgtttatcacaatttg

SEQ ID NO: 152702 - DNA, 407 bp, Arabidopsis thaliana columbia
gagcttcaaatctagttacttgttcttctacagtacatcatcaaaagtcaaaaccatggactcgagatgttttggcttcttctttactttgttatctctaaatgtgattgttcttgcttacgatcctgacacacttcaagatctctgcgttgcggatcgcacttcagggataaaagtgaatggtttcacatgtaaacccgaatcaaacatcaccgcttcagattttttcttcgccggaatcggaaaacccgccgtcgttaacaacacagtcgggtcagccgtcacgggagcaaacgtagagaagatcgcagggcttaacacgctcggagtctcactcgcgcgtatcgactacgctcccggaggtttaaacccgtcggacacgcattcacgcgccaccgaagtgatct

SEQ ID NO: 152703 - DNA, 403 bp, Arabidopsis thaliana columbia
cagagagagatagagagatagagttatggctttggcgatgatgatccgaaacgcagcttcgaagcgaggaatgactccgatctccggtcatttcggtggtttgagatctatgtcttcatggtggaagagcgttgagcctgctcctaaagatccgatcctcggagttaccgaagcttttctcgctgatcctagtcctgaaaaagttaatgttggtgtgggagcatatcgtgatgataatgggaagcctgttgtcttggaatgtgtcagagaagctgagaaaaggcttgctgggagcactttcatggagtaccttcctatgggaggaagtgccaaaatggtggacctaacattgaagcttgcctatggggacaatagtgaatttatcaaagataaaagaattgct

SEQ ID NO: 152704 - DNA, 408 bp, Arabidopsis thaliana columbia
cggacgcgtggggctgtgttgtaggctttttagcattcatttctgtttgctagtgggtgaattagcttatatctgggtacattatatattagtagctatctgaagtagtaccgatctgtctttgtttgtactttgtagtgaactctatgcaacccaaactactttttttttcctgcagcatttagtttttgctagattgctcctgttcaagttgaaagatttgttgtttgagataacttcaactgaaacttttgaagtaaggagtatttcatggtggcttgtcagagttttactgattcatcaaagagttctacaagagcgatcttcatctttgtttgaaatgttgcaagtttacatggccgaagctatagaccattttggagaattggaaaaagtaaaaagctactg

SEQ ID NO: 152705 - DNA, 433 bp, Arabidopsis thaliana columbia
  unsure (1)..(433): unsure at all n locations
tgcggacgcctgtgggcgaatttgcagtaaggaagacgaaaatattnggtgcacgtttgctagcgtaccgcnnaactatggaaagacggttcaaggngactctacgtcgtctttactgagaaggagctgtcttgattcntgaattgaagnctggttggtgaggtatggtctgcgtaacaagggcgtgagctctggagagtgcagtactctcttagccgtatccgtaatgctgctagagatcttttgactcttgatgagaagagtccaagaaggatctttgaaggtgaggctttgctccgtaggatgaaccgttacgggcttcttgatgagagccagaacaagctcgattacgtcttggctttgactgttgagaactttcttgagcgtcgtcttcagactattgtgttcaagtctggtatggctaagtctatcc

SEQ ID NO: 152706 - DNA, 414 bp, Arabidopsis thaliana columbia
cttattttctcagttcttttaactcttttctctacatatattcaaatggccaccatcgaggttgaacaagtgactccagtagcagctgagaacatcgaggtgccaccaccaaaggctgtggagtcggaggaagtcaccaccgtctccgagtctcttccagctccggtaacagaatctcaagcgcctgtcgaagtaacaactaaagatttggtcgtggaagagacagagaaaccaatcgaagaaacagaggaagctcaagttgaaactccggaggttgtggagatcaagaaagatgaagaagctccggttgaaactccggtggttgtggaggatgagagcaaaacagaggaagttgtagaggcgaagaaagaggaagaagtagaagaaaagaagacagaggaagctccagtggtt

SEQ ID NO: 152707 - DNA, 411 bp, Arabidopsis thaliana columbia
ggagaagaagaagaagaagaactgaagaagcatattcgacggtcaccaccaaacctgttgcgtcggattttcactctccggttatcgaacatctgagatctctctccacttccgtcaccgaagatgcattccagtcatcttcttctcgaggagccgatcaggatggcttcaatcctcgagccttccaaatctagtttcttcccggcattgactaagatcgtcggaactctaggtcctaaatcccgatccgtcgaggctctctccggctgtctcaaagccggcatgtctgtggctcgatttgatttctcgtggggagatgctgattatcaccaggagacacttgataatttgaaagttgctgtgaggagcactaagaagctttgtgctgttatgcttgatactgttggacct

SEQ ID NO: 152708 - DNA, 407 bp, Arabidopsis thaliana columbia
atctacattaccaaaaatgttcacaaaatctatccttttggcttctcttcttatcatcatcctcgtctctgcaactgaatcagctcgtcaaaagagcgggaacgatggtttaggattcggtggtgtacccggatccggatttatacccgggtttggaaacgggtttccggggactggagttggtggtggatacggtggagggtttggtggtcctagcggagggtttgggaaaggaggtgtggtgagaccaacggttacttgcaaagagaaaggaccttgttacggcaagaagcttaggtgtcctgctaagtgtttcaaatcttttagccgctccgggaaaggataccgcggtggagggggcggtggaggatgtactatggattggtagaagaagtgtatcgcttatt

SEQ ID NO: 152709 - DNA, 343 bp, Arabidopsis thaliana columbia
aaatcttagcttaacaccatcgcgaccggatttcaaattccggcccatcgtctcaccggggaagaccccgcctattgccgccgatttcggttccggtctgctcagatctaatcgagtggctttcttctttcttcagatctcttcactttgaatcgggtactcgatctcgattcgcggggggcttttgctagtcgcgatggaggcgatcgatgagttgtctcagctctcagattcgatgaagcaggcggcgtttcttctcgccgacgaagattctcgcgaaaccttttctttcaagcgccctggcacttttcttaacgtcgttgcctttggaaatgtgggagct

SEQ ID NO: 152710 - DNA, 415 bp, Arabidopsis thaliana columbia
ctctctctctccaccattgactctctctctctctctcgctctggaatcatcctttatttctgtgactgtgtgcactttcagagaggagagagaggcccaaaaccaaaagaaaagaaaaggttgtggcttgcagctgaatcaataccatctccatatatacaatacaccttcactattcccccttttgtatttttattatatttttcccatcaaagtctgtttttttagactccggtttgccgctttgtgtgtgtgtgagagagagaaagagagctatctatcctctgatttatgggctctggatctctgacaatcgagttgagttaattacaacacattcctctctttctcaatcgatctgtgaaatccaagattgttagctgtgtctgttttcagacaaatatgaacaccggtg

SEQ ID NO: 152711 - DNA, 398 bp, Arabidopsis thaliana columbia
cggacgcgtgggcagccgtcctttcgcagaaaccatttggagttggagctttggacgacgacaatggccccgaagaaaggagtgaaggtagctgctaagaagaagaccgcggagaaagtttcaaaccctctattcgagaggaggcctaagcaattcggtattggtggagctttacctcctaagaaggatctctctcgctacatcaaatggcccaaatccatccgtcttcaaaggcaaaagaggatcctgaagcagaggttgaaggtccctccagctcttaaccaattcaccaagactcttgacaagaatcttgctaccagccttttcaaggtccttctgaagtacaggccagaagacaaagctgccaagaaggagcgtcttgtaaagaaggcccaagc

SEQ ID NO: 152712 - DNA, 378 bp, Arabidopsis thaliana columbia
caacttctgtgtgtgtgggtgtgagtttcttaagagaagtcagaaacaatgattgggttgtttaaagtaaaggaaaagcaaagagaacaagctcaaaatgctactagaggaggagcttctgttaagaagcaatctgctggcgaacttcgtcttcacaaagatatatcagagttgaaccttcctagctcttgttcaatatcttttccaaatggcaaagatgatttgatgaactttgaagtatccattaaacttgatgatggatattaccacaatggtacgtttgttttcacattccaagtctctcctgtgtatccacatgaagctccaaaagttaaatgcataaccaatgtttatcatcccaatatcgatatggaagga

SEQ ID NO: 152713 - DNA, 406 bp, Arabidopsis thaliana columbia
caccggccttaaagcctcaaccatcaaatcatccgccaccgtcagaatccaggctggtgctgttgcatcaccgaagcttacagtgaagtcatctctaaagaacttcggagtcgcggccgtagcggctgcagcttcaattgctttggccggaaacgccatggcaatagaagttctcttgggaggaggggatgggtcgttagcttttattcccaacgacttctctatagctaaaggagagaagattgtgttcaagaacaacgctggatacccacacaatgttgtcttcgatgaagacgagatcccaagtggcgtcgacgtggccaagatctcgatggacgagcaagatctactcaacggtgcgggagagacgtacgaggttgctttgaccgagccagggacttacagc

SEQ ID NO: 152714 - DNA, 423 bp, Arabidopsis thaliana columbia
gacccacgcgtccgcggacgcgtgggcgaatttgcagtaaggagacgaaaatatggtgcacgtttgctggtacggcaactatggaaagaccttcaagggaccacgtcgtccttacgagaaggagcgtcttgattctgaattgaagctggttggtgagtatggtctgcgtaacaagcgtgagctctggagagtgcagtactctcttagccgtatccgtaatgctgctagagatcttttgactcttgatgagaagagtccaagaaggatctttgaaggtgaggctttgctccgtaggatgaaccgttacgggcttcttgatgagagccagaacaagctcgattacgtcttggctttgactgttgagaactttcttgagcgtcgtcttcagactattgtgttcaagtctggtatggctaagtctat

SEQ ID NO: 152715 - DNA, 412 bp, Arabidopsis thaliana columbia
ggtttcttcttatagaaatgaatttctcttattcttccttgtcaacttggacaacgctaatgacattgggttgtctgctgcttcattcatccatttccagtgctcagctaaccccaactttctatgacaatacatgtccaagcgtctttaccatcggacgggataccatagtaaacgagctaagatcggatcctcgtatcgctgcaagcatccttcgtcttcacttccacgactgtttcgtcaatggctgtgatgcatcgatcctgttagacaacacaacatcctttcgaacagagaaagatgcggctccaaacgcaaactcggctcgaggatttccagtgatcgatagaatgaaagcagcagtagagacagcatgtccaaggactgtttcatgcgcagatatacttaccat

SEQ ID NO: 152716 - DNA, 292 bp, Arabidopsis thaliana columbia
aataagtgttgtaagtttccggttccttcgaataaccttcaatggagctggcgttgctctcgtatgctagctccgcgtcgttttcacggacaggcttatgctcttcttcttcttcctcctcaactagaatctataagtttccggagagaaaccggagtttaaaattgagattcaatggtggagaaaggtcacgaagcgttatagcttccgctgaacggagcagtgaagggattgagaagacaacacacaccgtctttgtcggaggaggaggaggagcaggcagatttgctga

SEQ ID NO: 152717 - DNA, 403 bp, Arabidopsis thaliana columbia
gccatctattggggccaaaacggaaacgaaggtaacctctctgccacgtgtgccacgcgggcggtatgcttacgtcaacgtcgcctttcttgtgaaattcggaaatggccaaacaccggagctcaaccttgccggccactgcaaccctgcgtcgaacacttgcacccattttggctctcaggtcaaagattgtcagtctcgtggcatcaaggttatgttgtctctcggcggcgggattggaaactactcgattgggtcgagggaggacgcaaaagttatcgctgattatctgtggaacaacttcttgggaggaaaatcatcatcacgtcccttaggtgatgctgttctagatggtatcgatttcaatatcgagcttggcttttcttaacacttggatgatctc

SEQ ID NO: 152718 - DNA, 413 bp, Arabidopsis thaliana columbia
gttcatcccagatcctcttctgaagttttagtgaccatgcaagctcaaaaggaaggggctggtgatctgcagtgtaaagataagttcttgcttcaatgtgtagtcgctagtcccggagccacccccaaggatgttacacatgagatgtttagcaaagaggcagggcatcgagttgaagagactaaattgagagttgtctatgttgctccaccacgaccaccatcaccggttcgagaaggatctgaagagggctcttcaccgagggcttctgtctctgataatgggaatgcttctgattttactgctgctccaagatttagcgcagacagggttgatgctcaggataattcatctgaggcaagagctctggtcacaaaactcaccgaggaaaagaactctgcggttcaactgaa

SEQ ID NO: 152719 - DNA, 414 bp, Arabidopsis thaliana columbia
gtgactgcttgcaaggattccaagtgtgtcactcattaggaggaggaactggatctggaaggggaacgttgttgatttcaaagattagggaagagtatccagataggatgatgctgacgttttctgtattcccatcaccgaaagtgtcagacactgttgttgagccttataatgcaactctctctgttcatcagcttgtggagaatgcagatgagtgtatggttcttgacaatgaagctctctatgacatttgcttcagaactcttaagctcaccactccaagctttggagacttgaatcacctcatctctgcaaccatgagtggtgtcacttgctgccttcgtttcccgggtcagctaaactctgacctgcgcaagcttgcagtgaatttaatcccattccctcgtctccact

SEQ ID NO: 152720 - DNA, 411 bp, Arabidopsis thaliana columbia
aaccggagttgtggcggtgtacggcgaaggagccatgacggagacgaaacagaaatctccggtctccgtgaaagttggtctggctcagatgcttcgtggcggtgtaatcatggatgtcgtcaacgcagagcaagctcgaatcgctgaagaagctggcgcatgcgccgtgatggctcttgaacgtgttcccgccgatattcgagctcaaggcggtgttgctcgaatgagcgatccagagatgatcaaagaaatcaaaaacgccgtgacgattccggtgatggcgaaagctagaattggtcatttcgttgaagctcagatcctggaagcaatcggagttgattacgtcgacgagagtgaagttctcactctcgccgacgaagataatcacatcaacaaacataatttcaaaat

SEQ ID NO: 152721 - DNA, 415 bp, Arabidopsis thaliana columbia
gaaaagtcagaataagaagaagaagaagaagaagaagagaaagagagtcagagacggcgacggacgaaacgacgctagtcttgcgctttcttcgatcgtcgatttgattttttcccttccttcttatttttctcggttgaagtagaagataaagcatcgatacatgatggctgattgataagagttttctccggagaggttcggagttttttttttagaaaggaaacattaaaaaagatggcagtctcttttcctcgtcttccgaggtggttgtgtggtggtagtaacactaaagatagagagaagaaagagtcaattcctaaaggatcttcttcacttagtccttcactgaagaagactactactagtaagactggttcttcctcttcatcagtgaagaagaccaagagaggat

SEQ ID NO: 152722 - DNA, 403 bp, Arabidopsis thaliana columbia
acgttaccgagtatgatgcaatcgcaaaggcgaagttgcctaagatggtatgtgacgactatgcatctggtgcagaagatcaatggactcttcaagagaacagaaacgcttttgcaagaatcctcttccggcctcggattttgattgatgtgaacaaaattgatatggcgactaccgtcttggggttcaagatctcgatgccgatcatggttgctcctactgcctttcaaaagatggctcaccctgatggggaatatgctacggctagagctgcgtctgctgctggaaccatcatgacactatcttcatgggctacttcaagtgttgaagaagttgcttccacagggccaggaatccgattcttccagctctatgtatacaagaacaggaaggtggttgagca

SEQ ID NO: 152723 - DNA, 395 bp, Arabidopsis thaliana columbia
ctctcccgcaaccttcgattttcgtttattcgcatccatcggagagagaaggcagtcaataagcgaccatgttggtgtaccaagatcttctcaccggtgatgagcttctgtctgactctttcccttacaaggagattgagaatggaatcctctgggaagtagaaggaaagtgggttactgtgggagctgtagatgttaacattggtgccaatccatctgctgaagaaggtggtgaggatgaaggtgttgatgactctactcaaaaggttgttgacattgtcgacaccttcagacttcaggtgcaaccaacttatgacaagaagggattcatcgcttacattaagaaatacagtaagcttttgacacccaagctcagctacgaagatcaagctgtc

SEQ ID NO: 152724 - DNA, 405 bp, Arabidopsis thaliana columbia
ctcttgttctgtttttctgtctctctgcttcagtgttcttcgcggcctttaccacgttttcagttctttgacgagggtctttcattggtcctgaactcaggtttttgtatctatcttttgtttcttcgttgaaaactagaacttctttttgctgtgtttcaatggttgtagattggatctggagaatagacaatttagtggttgtggttaatgtcatttcttttagtaaagtttgaacctttttcgattttcatagcattgggtttgttttcactcaagtatttatggtttgctctctaattgaatacacttttcaattgggtacttgattttgttgattttgcttgtgttttgagtcgttgagtacaaagaaccaatccaataatcattagcttgtattcacat

SEQ ID NO: 152725 - DNA, 431 bp, Arabidopsis thaliana columbia
ggtacggaatcgcaatgtgcggcctagacccacgcgtccggttgaatagccatgaggtttttgcagatctgaggttttttctcgagaagtgagagagatctggaatttggcgacgatgagttactgatgggcgatataccaacgcacggtggtgatagcttcactaagtctcttacgatgggcaggtttatggtttcttaatcggagattatacaaagagtatgaagagaaacgcgctttggttcaaatcattttcagtgtcgacttccgctttctcttgtaatctattgcagctcgttttgttcgagatcatacctgctctatctagagaggcaaggatgataaactggaaagtggatcttttttgacttgatacttcttctgggtttcatgttgccgtattaccattgctataagatgcttcgtaatag

SEQ ID NO: 152726 - DNA, 430 bp, Arabidopsis thaliana columbia
cacgacccacgcgtacggaaatataagacataacagaacgggtcgagtctcttctcttctttctttctgcttaacacttttgatccttttccatggctacgcggctcaacagggtcagcagggtcagcagtttccgaacgagtgccagctcgaccagctcaatgcgctcgagccgtcacacgtactgaagagcgaggctggtcgcatcgaggtgtgggaccaccacgctcctcagctccgttgctcaggtgtctcctttgcacgttacatcatcgagtctaagggtctctacttgccctctttctttaacaccgcgaagctctctttcgtggctaagggacgaggtcttatgggaaaagtgatccctggatgcgccgaaacattccaagactcatcagagttccaaccacgcttcgaaggtcaaggtcaa

SEQ ID NO: 152727 - DNA, 416 bp, Arabidopsis thaliana columbia
acgcgtccgcggacgcgtggggctgtgttgtaggcttcttatcattcatttctgtttgctagtatgtgagttagcttatatctgtgtacgttatatattagtagctatctgaagtagtaccgatctgtctttgtttgtactttgtagtgaactctatgcaacccaaactactttttttttcctgcagcatttagtttttgctagattgctcctgttcaagttgaaagatttgttgtttgagataacttcaactgaaacttttgaagtaaggagtatttcatggtggcttgtcagagttttactgattcatcaaagagttctacaagagcgatcttcatctttgtttgaaatgttgcaagtttacatggccgaagctatagaccattttggagaattggaaaaagtaaaaagctact

SEQ ID NO: 152728 - DNA, 410 bp, Arabidopsis thaliana columbia
gaaaatggttaagctcagcaatctcctcgttgcaaccttcggggttctcctcgtccttaggggctgccttgcgaggcagggacttggggttcctcctcagctacagaacgagtgtaacctcgacaacctagatgttctccaagccaccgaaactatcaagagtgaagccggtcagatcgagtactgggaccacaaccaccctcagctccgatgtgttggtgtttccgttgctcgttatgtaattgaacaaggcggtctttacttgcccaccttcttcacttccccaaaaatttcctacgtcgttcaaggaacgggtatcagcggaagagtggtccctggatgtgccgagaccttcatggactcgcagccgatgcaaggacaacaacaaggccaaccatggcaaggacgac

SEQ ID NO: 152729 - DNA, 447 bp, Arabidopsis thaliana columbia
ggaatcgcagggtcggcccacgacccacgcttccgcgtaaataatggctttcccgctatttctttctctcctcgccgtcgtcacgctctctgttttcctcaccagcgctggtgcttcctctcgctctctatccactccacctaaaacgaacgtactcgacgtcgtttcatctctccagcaaacacaaactatcctctcactcgacccgactcgttcctcactcaccaccaccaaacccgaatccctatccgacccggttttcttcaattcatcttcaccactatctctagagcttcactctcgagacactttcgtcgcgtcacagcacaaagactacaaaagcttaacactcagtcgactcgagcgcgactcatcccgagtcgccggaatcgtcgcgaagatccgtttcgccgtcgaaggagtcgatagatccgatctcaaacccgt

SEQ ID NO: 152730 - DNA, 414 bp, Arabidopsis thaliana columbia
cgcatccgtaggagaaaagtgtgagaatctgccaccatgggtcgtatgcacagtcgaggaaagggtatttcagcctctgcgttgccttacaagagatcgtctccgagctggctcaagaccacctctcaggatgttgatgaatcaatctgcaaatttgccaaaaagggattgaccccttcccagattggtgtgattctccgtgactctcacggtatccctcaggtcaagagtgttactggaagcaagatcttgaggatactcaaagctcatggccttgctcctgagatccctgaggatctgtaccatctaattaagaaggctgttgccatccgtaaacatctcgagaggaacaggaaggacaaggattccaagttcaggctcatcttggttgagagcaggattcaccgcctcgct

SEQ ID NO: 152731 - DNA, 422 bp, Arabidopsis thaliana columbia
cacgcgtacgcaaatatataacttgacatgacgggtttgtgggattcactggttgtacaacgcaccacagtcacgctgcggagttgactgttggatattacaaccttttcaagagagatggttaccgtccgatcgcccggatgctctcaaaacactacggcattctcaacttcacttgccttgagatgaaagataccgacaatacagctgaagccctaagtgctcctcaagaacttgttcaagaggtactgagcaaggcatggaaagaaggtatagaagttgcgggtgagaacgcattagagacctatggagccaaaggttacaatcagattcttcttaacgcgaggcctaacggggttaacccaaacggtaagccgaagcttagaatgtacggatttacttaccttcggttatccgatact

SEQ ID NO: 152732 - DNA, 367 bp, Arabidopsis thaliana columbia
  unsure (1)..(367): unsure at all n locations
ggtacttgcagttgaggtattgcatggttttgcaacagaaggagcacattgctcaaaagtgcgtgagatacttgacgcgtcagaagtgtggagtgcatataaagaccaaaagcatgacttgttcctgccatcaaacacacaatcagcggcaggggtggctggctttattgagaactcatccaacagtctcacttacgctcttaccgctcctcctccgccttcgcatccttgaccatttcttccttgtatatccttttgtaaagtccaatcattaccgtgcttttttttttctttctatagagaaatactgtcgtttgtaaatgtttgatgagaaagtagaaaatatttgtggtttccttggnccnaa

SEQ ID NO: 152733 - DNA, 407 bp, Arabidopsis thaliana columbia
agaagaatcaagctttttcctgctgctttcacgatgttgtcaaaactcaaattccggaaattccacagttctcattgttctcagtggtgtgataatgaccatatatttcagtgctccaaagtccctgatcactttccagatgagcttgtttaccttcactggcaggggtatccctatgattgcctgccatcagatttcgatccaaaggaacttgtcgatcttagtctgcgttatagccacatcaaacaactgtgggaagatgagaagaatacagaaagtttaagatgggtcgatctcggtcagtcaaaagacttgctaaatttatcaggtttatccagggccaaaaatcttgaaagattggatcttgaaggctgtacgagtttggatctcttgggctcagtaaaaca

SEQ ID NO: 152734 - DNA, 390 bp, Arabidopsis thaliana columbia
gaagaaaggagagagagacggtaatggcgatcaagaacattctcgcccttgtggttcttcttagcgtggttggagtttctgtcgccattccacagttgcttgacctcgactactaccggtctaagtgtcccaaggcagaggaaattgttcgtggtgtcacagtacaatatgtttctcgccagaaaacccttgccgctaaacttctaaggatgcatttccatgattgtttcgtcagaggatgtgatggttccgttcttctgaaatctgcaaagaatgatgcggaaagagacgctgtccccaacctgaccctgaaaggttatgaagtggtggatgcggccaagacagcgctggagaggaagtgtcctaatctcatttcttgcgctgatgttc

SEQ ID NO: 152735 - DNA, 418 bp, Arabidopsis thaliana columbia
  unsure (1)..(418): unsure at all n locations
cagagttgaatcagttctacaatgatctctgtctctcgattcttgtcgcctcaattctacgcaattccaaggagcttcgtaaaaatgtctgcttcagcgactcaaacggccggagaagtttcaatggggatcaagcctccttcacaccctacttacgatttgaaagctgttatcaaactagccctagctgaagatgctggtcatacaggagatgtaacgtgtatggctacgataccgtttgatatggaagtggaagcttatttcttggccaaggaagatggtattgttgctggagttgctcttgctgacatgatttttgaacatgttgatccctccttgaaggttgaatggatgcgaaaggatggagattatgttcataaaggattgaagtttgggaaagtatcanggaatgcacata

SEQ ID NO: 152736 - DNA, 293 bp, Arabidopsis thaliana columbia
ctcaaaaactctctcttctaaatgagacaaaagggtcacagacacggaagaacagtatcgccttgtgccggctgtaaacttctccggcgaaaatgtgtgaaagattcatgcgtctttgctccgtattttccggccaaagagccttacaagtttgccattgtccacaagatttttggtgctagtaatgtcaataagatgttgcaggagctgtcggagaaccaccggagcgacgccgtggattcgatggtgtacgaggccaacgcgaggatacaagatcctgtgtatggatgtgt

SEQ ID NO: 152737 - DNA, 235 bp, Arabidopsis thaliana columbia
cttcccttcgtgcattttctctctctcactatcctctctctttctagtgtttgtttgatcctctgcgtactctgttcttcttctctcttcagataaaacaagtcctgcatattgaagatctgatgtcttatcgattgctaagtgtggataaggatgaactggttacgtcaccttgtttgaaagaacgtaactacttgggtctctctgattgttcctctggtgatagctccactat

SEQ ID NO: 152738 - DNA, 449 bp, Arabidopsis thaliana columbia
agttcccgaattgacggatgcgtccagcttcccttcgggcatttactctctctcactatcctctctctttctagtgtttgtttgatcctctgcgtactctgttcttcttctctctgcagataaaacaagtcctgcatattgaagatctgatgtcttatcgattgctaagtgtggataaggatgaactggttacgtcaccttgtttgaaagaacgtaactacttgggtctctctgattgttcctctgttgatagctcaactattcccaatgttgttgggaagagcaatctcaatttcaaagctactgaactgaggctaggtcttcctgagtctcaatctcctgagagagagactgatttcggtttgctgagtccgagaacacccgatgagaagcttctcttcccgttgctaccttctaaagacaatggttctgctactacagggcataag

SEQ ID NO: 152739 - DNA, 433 bp, Arabidopsis thaliana columbia
cgacgccaggcgtccagacaagatatagcgttatctccggcgtctaaggggactttagggacattcttgtggtggagaaatgggagacgaccagctagatttcgagctcccaaaaaaggttttgtcggtgattccgatggacccttttgagcagctggatctcgcgaggaagattacatcaatggcgatagcttcaagggtgtcgaatctggactctgaggtggttgaattgagacagaagcttctgggtaaggaaagtgttgtccgtgagcttgaggagaaagcgtctcgcctggagagagactgccgcgaggctgattcgagattgaaggtcgttctcgaagataatatgaacctgacaaaggagaaggattcactggcaatgactgtaacgaaactcacccgtgatttggctaagctggagacattcaag

SEQ ID NO: 152740 - DNA, 419 bp, Arabidopsis thaliana columbia
ccgataaccaaacaggtctctcacgtgtaatttagtgtttttaagactttagggaataagattagaacggttcttccccaaacacaacgaagaagtcttttgtttccgatatagatcgaggaacttcgatttatcagacattaacaccaatttttaagatatcgtgaaggagagatttgattgatggcttggaggcgcatcatcaccaaggtttcgagtcatgaaagggaattgagcagtttaagaagcttacttgttagagcttactcctcttttcctagagtgggagttactggagctgtgggtggtggtggagcttctttaccgcgaacgaggtttcaatcgagttatgttggtagctttgctcgcagagtccgtgatagagaagaagttaatgaggttgcacatctgagagaact

SEQ ID NO: 152741 - DNA, 369 bp, Arabidopsis thaliana columbia
gttggcttatgtggagaggatacaaatagaatagaggacccatggggttgacactggggctcaccagaaatggtccggtgctaattactatgatcgttatcttaagaccgtacaaggtggaatctcctccactgcagccatgggaaaaggtggtcactgaaaaacatttcaaggagagttggacaaggccggtagctgatggattgggtgaagggactagccttgtggtcgccaagtcaagaatgtaagacatatgttcattacagcggtgcggccaaagcggttcggcttcttattaggaaagcttggaaaccacactatcttcaatatatatctttggacacccgcgtcaaagataaaaaatgacag

SEQ ID NO: 152742 - DNA, 318 bp, Arabidopsis thaliana columbia
ctcgttttgataaaaatctctgaatctctccaagctctcttctcatcaaaccatggatcctgacaagtatcgtccagctagggcttacaactctcccttcttcaccaccaactctggtgctcctgtatggaacaacaactcctccatgaccgttggacccagaggtcctatccttcttgaggattaccatctcgttgagaagcttgccaatttcgacagggaacggattccaaagcgtgtggttcatgccagaggagccagtgctaaaagtttctttgaagtcactcatgatatctctaacctcacttgtgctgactt

SEQ ID NO: 152743 - DNA, 386 bp, Arabidopsis thaliana columbia
  unsure (1)..(386): unsure at all n locations
ccgctcttaacgaggaagatcgggccgggcttgttaatgctgggaagaacgggttncagaatttggctggacaacactctgatgtccttgaaaacttgactccaccagtcaggaagcgtgtcgagtttctaagagagattcagaaccaatatgatgagatggaagcaaaattctttgaggagagagcagctcttgaagctaagtatcaaaagttatatcagcctttatataccaagcgatatgagattgtgaatggtgtggtcgaagttgaaggtgcagctgaagaagtaaaatccgaacaaggagaagataaatcagctgaagagaaaggagtaccagatttctggcttattgcattgaagaacaatgaaattactgcggaagag

SEQ ID NO: 152744 - DNA, 421 bp, Arabidopsis thaliana columbia
ctcaattggaaggtgtctttctttactgcagtttttggatgtatcatattgtagaaagctctcagataaaggattatcagctgttgcagaaggctgccatgatctaagggcattgcatttagcgggttgtcgtttcatcaccgatgaatcgttgaaatcactctctgagagatgccgtgatctcgaagctctggggctacaaggctgcaccaatatcactgattcaggtcttgctgatcttgtgaagggatgcagaaagataaaatctttagacattaataaatgtagcaatgttggagatgctggagtttcgagcgtggcgaaagcttgtgcatcttccctcaagacactcaaattgctggactgttacaaagtcgggaacgaatctatatcgtcgctggcgcagttttgcaagaatctg

SEQ ID NO: 152745 - DNA, 413 bp, Arabidopsis thaliana columbia
tccttattttattttttgaaagtttaaaattttatacaacatatcaatttggggtagaaaaattcgaaagaaatgaaagagatgggagtgatagtgcttcttctccttcactcgttcttctacgttgccttttgcttcaatgatggactactaccaaacggtgacttcgaactcggtccacgacattcggacatgaaaggaacacaagttatcaacataacagcaatcccaaactgggaactctcaggctttgtcgagtacattccctcaggacacaaacaaggcgacatgatccttgtcgtgcctaaaggcgcattcgcagtacgtctaggcaacgaagcctcaatcaaacaaaaaatcagcgttaagaaagggtcgtactattcgataacgttcagtgctgctcgaacatg

SEQ ID NO: 152746 - DNA, 347 bp, Arabidopsis thaliana columbia
  unsure (1)..(347): unsure at all n locations
cgcagacgcagcttttagtattgttttcaacaatcgctttttttttctcgatctccgagaagctctcgaatctctggttttgagttttggagaatggtgtttttccgcagcgtatcggcctttactaggctgaggtctcgcgtcggccaacaatcttcactcagcaattctgtcagatggattcagatgcagagctctaccgacctggacctgaagtcgcagctgcaagagttaattccggaacagcaagaccgtctgaagaaactgaagtcagaacatggggagggccaactgggaaacatcactgntgatatggttattggtggaatgagagggatgactggatt

SEQ ID NO: 152747 - DNA, 424 bp, Arabidopsis thaliana columbia
  unsure (1)..(424): unsure at all n locations
cggatctaaaaaaatctgggttgatcattgttcaatgagtcattgcaccgacgggctaattgatgctgtgatgggttctacagctataactatatctaacaattacttcacccaccacgacgaggttatgttgttgggtcatgatgataactatgctcctgatacggggatgcaagtgacgatagcgtttaatcatttcggacaagggcttgttcagaggatgcctangtgtcggagaagttacattcatgtagtgaataatgatttcactgagtggaaaatgtatgctattggtggtagtggtaatcccaccattaacagtcaaggaaatcgntactctgctccttctgatcctagcgccaaagaggtgacgaagcgagtggactcgaaagacgatggtgaatggtcgaattggaatggagaa

SEQ ID NO: 152748 - DNA, 398 bp, Arabidopsis thaliana columbia
accaccacttcctctacctatctaattccgaatctggatttggatttggatctcatttcgattcaacgatgaaggtggttgataagatcaaatccgtgacggagcaaggccaaacagctttctccttcgagtttttcccaccgaagacagaagatggcgtcgagaatctctttgaacgaatggatcgattggtctcttatggacctaccttctgcgatatcacttggggtgctggtggatccacagctgatctcactctcgagattgcttctaggatgcagaatgttatctgcgtcgagactatgatgcatctcacttgtaccaacatgccgattgagaagattgatcacgcgcttgagacgattagatctaatggaattcagaatgtgcttgctctt

SEQ ID NO: 152749 - DNA, 414 bp, Arabidopsis thaliana columbia
cagattcttacttgcagctatgggtaaagagaagtttcacattaacattgtggtcattggtcatgttgattctggaaaatcgaccacaactggtcacttgatctataagcttggtggtattgacaagcgtgtcatcgagaggttcgagaaggaggctgctgagatgaacaagaggtccttcaagtacgcatgggtgttggacaaacttaaggccgagcgtgagcgtggtattaccatcgatattgctctatggaagttcgagaccaccaagtactactgcacagtcattgatgccccaggacatcgtgatttcatcaagaacatgattactggtacctcccaggctgattgtgctgttcttatcattgactccaccactggaggttttgaggctggtatctctaaggatggtca

SEQ ID NO: 152750 - DNA, 288 bp, Arabidopsis thaliana columbia
gcgtcgagagcattttatatcttcaatcatcttacgcaggctgttgtagcagcagtgtctatcggagacgatgaagttcaacgtcgccaatccgaccaccgggtgtcaaaagaaactcgagatcgatgacgatcaaaaactccgcgcctttttcgacaagaggctctctcaggaagttagcggagatgctctatgcgaggaattcaagggatacgtattcaagatcatgggaggatgtgacaagcaaggtttcccaatgaaacaaggagttctcactccagggcgtgt

SEQ ID NO: 152751 - DNA, 377 bp, Arabidopsis thaliana columbia
  unsure (1)..(377): unsure at all n locations
cgttctagttttataaannaaaattttatactttatatcaaattggcgtaaaaaagatccgaatattgattcgggggcatcggccacaacaactcacttcatctataagcttagacctattgacaatcttttcattttgaaattctaccaaacggtgccttatatgaacaataggtccataacatacacatgtattttcaacaaacttaaagcccatcgttagcgtactattaccatcaatatcactctattgaacgtctagaccaccaagtactactgcatcatcattgatgccccaaaactatcttatttcataaagaactaacaactcgtaccttccatgctgattctgctgttcttatcattgacttcaccac

SEQ ID NO: 152752 - DNA, 419 bp, Arabidopsis thaliana columbia
gaaaaagatcacagatataattaaagaagaggaagcaagcttttgcaagaccttggcaaagggaattgagaaatttcggaaagctggacaggcggttcaggggaatacactgagtggagatgatgcttttatcttatgggatacatatggtttcccgttagatttaactcagttgatggctgaagaaagagggttactggttgatgttgatggtttcaacaaagccatggaagaggcgagggaaagatcgagaagtgcccagaataagcaagctggtggtgccattgttatggatgctgatgctacatcaacattgcacaaggctggtgtttcagcaacagatgattcttttaaatacatttggttccaggaccacgagagtgaactaaaggcaatctatactggctctactttcctag

SEQ ID NO: 152753 - DNA, 424 bp, Arabidopsis thaliana columbia
cttgcatcagattctcaagcagctgtgaagacttatgaagtctccatgtggcgtacactttggaacgatctcttttctcatgtttttcgtgctgtcaggagcatattgaacggttttgtagcattttttgctgcctgtaacagacatcggcttagtacatataatcacatacaagagtttatggagagagtacatggacgaaccacgagaccagaatctatagactcaagacatggcaagtctgttaagaacaatcaacgtacaggagacgaaacgagaaggaaattgcaccttgcatagaagtcaaaacttaaattcttttgattactttttcttgccagagaatatgataggttagtgtatagatagataggttttacaccacgaaacattgtcccaactcccaactcagccaaatgatgta

SEQ ID NO: 152754 - DNA, 418 bp, Arabidopsis thaliana columbia
gcgggatctttccaacgaaaaaatggctggtaaacttttttggccttctagggttgcttctcatctaaggatctccgttgctcaacgagggttttcttccgtggttttgaaggatttgaaatatgctgattcacatgaatgggtgaagattgacgggaataaagcaacctttggtataacggatcacgcgcaggaccatttaggagatgtggtctatgtggagttacctgatgtaggacattcggtgtcacaagggaagagttttggagcagttgaaagtgtgaaagcaactagcgatatcaattctccagtctcgggtaaggtggttgaagtcaatgaggagctgaccgagtcccctggattggtgaactctagcccgtatgaacaaggatggatcataaaagttgagctgagtgat

SEQ ID NO: 152755 - DNA, 180 bp, Arabidopsis thaliana columbia
gtgctaaataggtgacaaaacgggtggacttttatgtttaaggtccatggtcaaattgggagtggagaacacaagggcattggacggagaatctaccttcttttgttgcctttgatctaggaataagctcaatgtactctgaagcttctagtgttgaccctcaagcaccttctctagtac

SEQ ID NO: 152756 - DNA, 418 bp, Arabidopsis thaliana columbia
ctcttttaaaacctaatcctctgtgaaacttttccagttaaaatcttttgcaatgtctaaagcagttctattggtcgctctctgctttttaccggctctagccatcgcggctagaccgaacaagaaccctttcgtcgtgcgaggccgtgtctattgcgacacttgcctcgctggtttcgaaactccagcctctacttacatctccggtgcagtggttagattggaatgtaaagacaggagaacaatggagttaacgtatagccacgaggcgagaactgactcgacaggatcatacaagatcttggttaacgaggatcatgatgagcagttctgtgatgcaatgttggttcgtagctctcagttacggtgttccaatgtgtcccctggtcatgaccgtgcccgtgtgactctcactcgc

SEQ ID NO: 152757 - DNA, 419 bp, Arabidopsis thaliana columbia
gcttaattaaacagaagccgttctccttcactttcgttcctctcacttccatacgacatttgaaacctcagctatgcctaaatcaaagcgagatagaccagtgactttgtctaagacgaagaagaaaggaagagagcataaggagtgtattgtgaatggaattagggaggctgttgaaaaatattcctctgtctatgttttctcttttgaaaacatgagaaatatcaaattcaaggagtttaggcagcagtttaggcacaatggaaagttcttcctaggttcgaacaaagtgatgcaggttgctcttggtcgttctgcagaagatgaactccgttctggtatctacaaagtctccaagctgcttcgtggtgatactggacttcttgttactgatatgccaaaggaagaagtcgaaagct

SEQ ID NO: 152758 - DNA, 410 bp, Arabidopsis thaliana columbia
gcatcttacctggttccagcggctgtcgttttagctatggggtactgctacatgtggtgggggggctggtcgtggggagatgcaatgtttgtgacaaagaaaaatatggctgatgcggttgcctctgtttcgaaacaactagacgatttgtcagacacattatcgtcaacaaggaaacatctttctcagaagctagcgaccttggattggaaggtggaagagcagaatgagacatctaaaatgatcttaagtgatgttactgagatgagatcaagcatttcgcaaattgggtttgattttaagcaacttaatgaaatgatttctggaatagaagggaagattgaaagtcttgaaagcaaacaagatgtgaccctctctggactatggcatctatgtcaagttgcacgcgt

SEQ ID NO: 152759 - DNA, 421 bp, Arabidopsis thaliana columbia
cacttgcaaaattcgaatcagatcttctcttcaatcgaaaaaaaagaaaggatttgctctagattgttgaatcgaagatgtcgacaagggaagagaatgtttacatggcgaaattagccgaacaagctgaacgttacgaagaaatggttgaattcatggagaaagttgcgaaaactgttgatgttgaggaactttcagttgaagagaggaatcttctctctgttgcttacaagaacgtgattggagcgagaagagcttcgtggagaatcatttcttcgattgagcagaaagaagagagcaaagggaacgaagatcatgttgctattatcaaggattacagaggaaagattgaatccgagcttagcaaaatctgtgatgggattttgaatgttcttgaagctcatcttattccttctgcttc

SEQ ID NO: 152760 - DNA, 403 bp, Arabidopsis thaliana columbia
cggacgcgtgggaagaatggctcaaaccatgctgcttacttcaggcgtcaccgccggccatttttttgaggaacaagagccctttggctcagcccaaagttcaccatctcttcctctctggaaactctccggttgcactaccatctaggagacaatcattcgttcctctcgctctcttcaaacccaaaaccaaagctgctcctaaaaaggttgagaagccgaagagcaaggttgaggatggcatctttggaacgtctggtgggattggtttcacaaaggcgaatgagctattcgttggtcgtgttgctatgatcggtttcgctgcatcgttgcttggtgaggcgttgacgggaaaagggatattagctcagctgaatctggagacagggataccgatttacga

SEQ ID NO: 152761 - DNA, 442 bp, Arabidopsis thaliana columbia
  unsure (1)..(442): unsure at all n locations
aaaaccgggccgggcgacgcgtccgnggacgcctgggaagaatttctcaaaccatttttcttacttcaggcgtcaccgccnnccagtttttgatgaacgagagcccgggggctcaacccaaaattcaccatctcttcctctctggaaactctccggttgcactaccatctaggagacaatcattcgttcctctcgctctcttcaaacccaaaaccaaagctgctcctaaaaaggttgagaagccgaagagcaaggttgaggatggcatctttggaacgtctggtgggattggtttcacaaaggcgaatgagctattcgttggtcgtgttgctatgatcggtttcgctgcatcgttgcttggtgaggcgttgaccggaaaagggatattagctcagctgaatctggagacagggataccgatttacgaagcagagccattgct

SEQ ID NO: 152762 - DNA, 416 bp, Arabidopsis thaliana columbia
atcacatattctaattcttctttctctttttcttctgatttccctcgtccgaccacaagttcctccaatggagcaattccggttccttaacaacggcgactttggagaatccacggtggagtacggtgcaagttacagagatttaggtgtaatacgtaaccaatttcgtctatgtttcttcaacaccacgccaaacgcattcacactcgctatcgggatggggacaggaagttctgattcaatcattcgttgggtttggcaagctaacccacaaaaaccagttcaagaagaggcttctctttcgtttggaccggagggaaaccttgtcctcgcccagccagatggcagagtcgtatggcagaccatgacagaaaataaaggtgttataggctcgaccatgaacgaaaatggaaatc

SEQ ID NO: 152763 - DNA, 414 bp, Arabidopsis thaliana columbia
  unsure (1)..(414): unsure at all n locations
atgctatcgaaaataaggataggatctgcatatttgcttagtcttgtagctcattttaatggagtatattaacatgtatcggtcatttttgattacatgttgtcaatatgtaatggatctgtctacactggtttcatattgcaattcgttcttcattttggggtctaagttggttattatatgtattgcgagttctcttccccgtatgtatggttatgtgattcaggaacacgttatggtgcgagtatcangaagcagattaagaagatggaggtcagccagcacagcaagtacttctgtgagttctgtggcaaggtatgaaagagattaacattcagctactgttttcatttctaaatctcttttggttttggattattggggtaactgtggcttgatcaaaatgattgcagt

SEQ ID NO: 152764 - DNA, 425 bp, Arabidopsis thaliana columbia
gaaagttgttgacctccaagaggaactggatttcgttgttcttgtccacggagagccagagagaaacgacatggttgagtactttggtgagcagttgtctggttttgccttcactgcaaacggatgggtccaatcttatggatctcgctgtgtgaagccaccagttatctatggtgatgtgagccgtcccaaggcaatgaccgtcttctggtccgcaatggctcagagcatgacctctcgcccaatgaagggtatgcttactggtcccgtcaccattctcaactggtcctttgtcaggaacgaccagcccaggcacgaaacctgttaccagatcgctttggccatcaaggacgaagtcgaggatcttgagataggtggaatcggtgtcattcagattgatgaggctgcacttagagaaggactac

SEQ ID NO: 152765 - DNA, 413 bp, Arabidopsis thaliana columbia
attttcacaacatcgtacttatcgccttcctctctctctcaatacctctctcaatttctggatccaccatgcaagctcttcaatcttcatctctccgtgcttctcctccaaacccacttcgcttaccatcaaatcgtcaatcacatcagctaattaccaatgcgagacctttgcgaagacaacaacgttccttcatctccgcatcagcatccactgtctccgctcctaaacgcgaaacagatccgaagaaacgagttgtcattactggtatgggtctcgtctctgtgtttggtaacgatgttgatgcttactacgagaaattgttgtctggtgagagtggaatcagtttgattgatcgtttcgatgcttccaagttccctactcgattcggtggtcagatccgtgggtttagc

SEQ ID NO: 152766 - DNA, 419 bp, Arabidopsis thaliana columbia
agagactcaaaatcaccaccaccaccaaatcgccgccatgtttaaacaagcttctcgtctcctctcccgatctgtcgccgccgcatcttccaaatcggtgacgactcgtgccttttcaacggaacttccatcgacgctcgattccactttcgtcgaggcatggaagaaagtcgcaccgaatatggacccaccgcagactccttctgctttcatgaaacctcgtccttccactccttcttctatcccgacgaagctcaccgtcaattttgtcctcccttacacatctgagcttaccgggaaagaggtcgacatggtcatcattcccgcatcaacaggacaaatgggtgtcttgcccggacacgttccaacaattgctgagctaaaacctggcatcatgtccgtccatgaaggcactgacg

SEQ ID NO: 152767 - DNA, 415 bp, Arabidopsis thaliana columbia
cggattctacagtcaaaattgccaaaacgtcgaaaacatcgtatctaaagttgttggagaggcattcatcaaggattcatcgattgcacccgcaatgatccgcctttattttcacgattgttttagcaacgggtgtgatgcatcgcttcttctagatggttcgaacagtgagaaaaaggcgtcaccaaatctaagtgtacgcggatacgaagtgatagatgacattaagtctgcggtcgaaaaagaatgtgacagggtcgtttcttgtgctgatatcatagctctcgcgactagagatcttgttactcttgcaagcggagggaaaacacgatatgagataccaacaggacgattggacggtaaaatctcttcggctttgcttgtcgatttgccgtctccaaagatgaccgtcgcg

SEQ ID NO: 152768 - DNA, 393 bp, Arabidopsis thaliana columbia
gatcactgttgactttgaaaactgcttcatcttcctcctcttatgtcttttctcacgcctctcttacgatcttttcttcaggaaaacaaaagactcacgagctggctgtgctcttcctccgagccctccttcattaccaatcattggtcatcttcaccttatactctttgtcccaatccaccagtctttcaagaacatctcatctaaatatggacctctcctccacctccgcttctttaacttccccatagtcctcgtctcctcggcctcaacggcctacgagatcttcaaggcccaagacgtgaatgtctcctctcgccctccccctcctatcgaggagtctctcattttaggatcttccagcttcatcaacactccctatggagattactc

SEQ ID NO: 152769 - DNA, 421 bp, Arabidopsis thaliana columbia
ggacgatgggctatgctcggtgtcgctgggatgcttttgccggaagttttcaccaagatcggaatcataaatgttcctgagtggttcgatgctgggaaagagcagtattttgcatcgtcgtctacattgttcgtgatcgacttcatattgtttcattacgttgagatcagacggtggcaagacatcaataacccaggaagtgtgaaccaagaccctatctttaagcaatacagcttacctaagggtgaagttggttaccctggtggaatctttaacccgcttaactttgcttctacgcaagaggccaaggagaaagagctagcaaacgggaggttggcgatgttggcattcttagggtttgtggttcaacacaatgtgactggaaaaggaccatatgagaatctgttgcagcacttgtctg

SEQ ID NO: 152770 - DNA, 419 bp, Arabidopsis thaliana columbia
caagcttgttgacccgaagactggtgatgagaaacccattacagtttctgttgatgatggtatccgaccaaccacaactcttgcttctcttgggaagctgaagccagtgtttaagaaggatggcaccactactgctggaaattccagccaagtaagtgatggtgcaggagcggttctcctaatgaagagaagtgttgcaatgcaaaaaggacttcccgttcttggtgtattcaggacatttgctgcagttggtgttgaccctgcaatcatgggtatcggtccagcagttgccattcctgctgcagttaaggcggctggtttagaacttgatgacatcgacttgtttgagatcaatgaggcatttgcatctcagtttgtttattgccgtaacaaattgggacttgacccagagaaaatca

SEQ ID NO: 152771 - DNA, 355 bp, Arabidopsis thaliana columbia
gcaccatcccgctccttctccggcgaacgttaccactcgtcaccgccaccttcgcaatgtacatacgccgctccgcttctcttcactgcaattccttcgtcaccacattagattgtggaggaaggattgaattggatgttacacggaaagatattcaatggttcaaattagaggcaaataagatgaaattgattggatgaatctaaattgatattcgctatggactagagcatacgtctgttcagggatccaggcacataatgaaactgaaaggaacttaggaacacttaagtgatggatgttggattgaagtccgtgagctaggattctttatcgccactcatcaaagatgatg

SEQ ID NO: 152772 - DNA, 372 bp, Arabidopsis thaliana columbia
  unsure (1)..(372): unsure at all n locations
gatgaatatggcggctttttaagcgaaaggtttgtgaaggatttccgagagtatgcagattttgttttccaagaatacggtggaaaagtgaaacattggatcactttcaatgagccatgggttttctcgcacgctggctatgacgtangcaaaaaggcacctggtcgttgctcttcttacgtcaatgctaaatgccaagacggacgatcaggatacgaggcttaccttgtcactcacaatctccttatctctcacgcagaagcagttgaagcttaccggaaatgcgaaaagtgtaaaggtgggaagatcggaattgcacatagtcctgcttggttcgaagcacatgaccttgctgattcacaagacggtgcg

SEQ ID NO: 152773 - DNA, 425 bp, Arabidopsis thaliana columbia
ggaggaacctctggtaacaagttcaggatgtcactgggtcttccagtggcagccactgtgaactgtgctgacaacaccggagctaagaacctttacatcatttcggttaaaggaatcaagggtcgtcttaaccgtttgccatcagcgtgtgttggtgatatggttatggctactgttaagaaaggtaagcctgatctccgtaagaaggtgcttcctgctgtcattgttaggcagaggaagccttggcgccgaaaggacggtgtcttcatgtatttcgaagataatgctggtgtcattgtcaatcccaagggtgaaatgaaaggatctgctatcactggaccaatcggaaaggagtgtgctgatctgtggccaagaatcgcaagtgctgcgaacgccatcgtttaagcaagcttgagatctctatg

SEQ ID NO: 152774 - DNA, 422 bp, Arabidopsis thaliana columbia
tcttagccttggaggtgttttctcatctggtccagttgcattgctctctggtttaaaccctcgtcctctgagtttagttctccacttctttgctgtggcgatctacgctgtttgtcgtttaatgctaccatttccttcgattgagagcttttggcttggagctaggataatctcgagtgcttcaagcatcatctttccaataattaaagcagagggagttagacaaatgttcttccctcgtacaatccctgccatataccgtgctcctccttaatgatgcatcaagagttacatacattaaatgatctatgcaggcaaatgttgtaacttttaatctaatatcttagttgcttgatgctaatcatgtgggtgtttaggctagatagcttaggaaccagtgtaaacatagctccttaagtata

SEQ ID NO: 152775 - DNA, 375 bp, Arabidopsis thaliana columbia
acagaccataactaaaatcgagaaaaatggcaaacagtggtgaaggtaaagtggtgtgtgtaacaggagcctccggttacatcgcctcatggctcgtcaagttcctacttaaccgtggctacactgttaaggcctccgtccgtgatcccagtgatccgaaaaagacacaacacttagtttcactagaaggtgcaaaggaaagacttcacttgttcaaagcagaccttttggaacaaggttctttcgactctgctattgatggttgccatggagttttccacactgcttctccattttttaatgatgccaaagacccacaggctgaacctattgatcctgcggtcaaggggacgcttaacgttttgaattcgtgcg

SEQ ID NO: 152776 - DNA, 387 bp, Arabidopsis thaliana columbia
  unsure (1)..(387): unsure at all n locations
ccgaaagtttatagatttcactctcccccgaactatacaaaattccctcaaaaggaaaaactaaaaagccgatcttggcttttttgtttctgagtgcatctcgatacttggaagcattctttggtgaggctgattcattctcatctgtgaaagtctttggcttttgaagcaatactatggaaggaattcagcatcctatacctcgcactgtcgaagaggtttttagcgactttcgtggtcgtagagctggtctcatcaaggctctctctactgatgtacagaagttttaccatcagtgtgaccctgagaaggaaaacttgtgtctttatggacttncaaatgagacatgggaggttaatcttcccgttgaggaggttccttctgagc

SEQ ID NO: 152777 - DNA, 296 bp, Arabidopsis thaliana columbia
ctagttgtagatactccgccatcactcattgtttatccaggcacacccatcattggaggaagcccaccaactcctatcattgacccaaacactcctggaactacttccattcctgctcctttaccaccaatcattggaacatgctattactgcagaaaccaccctacattgatatggggcttgcttggatggaggggaactgatgaaggagcttatggtacagtcagtattcccagtaccattccacggtttgatccttacatagaacctttttcaggcaatttgcaacacccgct

SEQ ID NO: 152778 - DNA, 413 bp, Arabidopsis thaliana columbia
gcgagaaagtacgatgatttactctgaagatatgacgatgctgcattgcaaactcagaagagtcttgcgtatttagattttggacagagttttatatttagtacagctgtgtcaacatcaatggtgttgtgttctcaagggattatgaatggtgagatgacaggtggtgatttggtgatggtgaatggtcttctctttcaattgtatcttactctttactttctcggtggtgattaccgtgaaaccgttcaggtcttgttgatatgaaatcattgctccagatgctagaggagagatcctatattggagataaatatacagaaactaagctacctcctcttgttctgagaagtggaagcatcagtattgagaatggacattttacatatctgccagagagaaagattttggat

SEQ ID NO: 152779 - DNA, 419 bp, Arabidopsis thaliana columbia
gactaatgggcctaggacgcgggcctatgtcattggtctctcaaactacgtcgctttactcaggagtgttctcatactgcctccctagcttcaggtccttctacttctccgggtcgttgaaactgggtctcttgggtcaacccaaatccatcagatacactccactcctccgtaaccctcgccgtccatcactttactatgtgaatctcaccggagtgagtgtcggttccgtccaggtacccgttgacccagtgtatttgacgtttgacgcaaattccggcgccggtacgatcatcgattccggtactgttatcacccgttttgctcaacccgtgtacgaagccattagagacgagtttaggaagcaggtgaatgtgtcgtcattctcaacattgggagcgtttgacacgtgtttctca

SEQ ID NO: 152780 - DNA, 417 bp, Arabidopsis thaliana columbia
  unsure (1)..(417): unsure at all n locations
atccttctctgagaaaaaacaacagatccgtattttatctttaatcagccggaaaaaatggagaaagcgatcgagagacaacgcgttcttcttgagcatctccgaccttcttcttcttcttcgcacaattacgaggcttctctatctgcttctgcttgcttggctggggacagtgctgcatatcagaggacctctctctatggagatgatgttgtcattgtcgcggcacataggactccactatgcaagtccaaacgtggcaatttcaaggatacatatcccgatgatttgctcgcacctgttttgagggcattgatagagaagacgaatctaaacccaagtgaagtaggtgacattgttgtgggtactggtttggcacctggatctcanagagccagtgaatgcangatggctgcg

SEQ ID NO: 152781 - DNA, 356 bp, Arabidopsis thaliana columbia
aggacatcgtgatttcatcaagaacatgattactggtacctcccaggctgattgtgctgttcttatcattgactccaccactggaggttttgaggctggtatctctaaggatggtcagacccgtgagcacgctcttcttgctttcacccttggtgtcaagcagatgatttgctgttgtaacaagatggatgccaccacccccaaatactccaaggctaggtacgatgaaatcatcaaggaggtgtcttcatacctgaagaaggtcggatacaaccctgacaaaatcccatttgtgccaatctctggattcgagggagacaacatgattgagaggtcaaccaaccttgactggtaca

SEQ ID NO: 152782 - DNA, 317 bp, Arabidopsis thaliana columbia
aagaagtcatgggaagatctccttgctgcgagaaagaccacatgaccaaaggggcttggactaaggaaaaaaatgagagactagtctctaacatcaagtctaacgggaaaggttgtggcgatctctttctagagccgctggtctccttcgctggggaaaactgccgtcttggggataactatctcgactgactaaaagagaaactttccatgagaataactatatcagctatagctctagcacaagggcttgatgcggagatacctgagacaatacggacagactctggaccacattaagagagctttgacaaggat

SEQ ID NO: 152783 - DNA, 342 bp, Arabidopsis thaliana columbia
ttatttttattttttttgggttggtttttattttatgggggttgggttttttttttttgaacaaccaaaaaaaaatttcaactgaaacttaataaaaagttgtgggtgggtgtatccccacttttttttttttggaaggggctcctttcattttttaagattacctcccaccaagaaaaaaggggcaggaaacattaggaagagagtttttaaaaagagagagaacacttttctgaatttaggaacacaatttttaaaaaaaacaaaaattttaaaattttaaattgggaaaaaattgatcttttttatttttctttataacacggtggttttttttttttt

SEQ ID NO: 152784 - DNA, 360 bp, Arabidopsis thaliana columbia
cgaaaaatgaagtcattagcttcgccgccgtgtctccgcctgataccgacggcacaccgtcggctcaattcgcgtcaatcttcctccgcctgttatatacacggtggctcttctgtgaacaaatccaataatctctcattctcctcatccacatccggatttgcgtcaccactagctgtagagaaggaattacgctcttcattcgtacagacggctgctgttcgccatgttacggggtctcttatcagaggcgaaggtcttagattcgccatcgtggtagctcggttcaatgaggttgtgactaagttgcttttggaaggagcgattgagactttcaagaagtattcagtcagagaagaa

SEQ ID NO: 152785 - DNA, 421 bp, Arabidopsis thaliana columbia
ttgccctttatcatgcctaaaattctcaggatctaaataaaagtatagaacaatgggtggatgtgtgtcaacccattcaaaagcgattaggcctaggaggaaaggccgtcgtagatcttccaaacacttttctaaagtgtctgatattgttcctcatgctaatattagaaggcctagtgacgttgggagccgagtttcttttgctatctcgcaagatgatgcatggtttgactctgtcagtgttcttgattcggatgaggatgaggactttatcagcttacctgaagaaaacgtaccatcaacgccatcagcgggtggtgcgactggtaacaatataccaaatggtcaagtagttcagtttgaatcttcttcgtgcttcgtggatggtaaaggaaagtacgaagaataccatgagacttac

SEQ ID NO: 152786 - DNA, 420 bp, Arabidopsis thaliana columbia
ttgcctttattatgcctaaaaatcttaaggtcctaataaaagtatagaacaatgggtggatgtgtgtcaacccattcaaaagcgattaggcctaagaggaaaggccgtcgtagatcttccaaacacttttctaaagtgtctgatattgttcctcatgctaatattagaaagcctagtgacgttgggagccgagtttcttttgctatctcgcaagatgatgcatggtttgactctgtcagtgttcttgattcggatgaggatgaggactttatcagcttacctgaagaaaacgtaccatcaacgccatcagcgggtggtgcgactggtaacaatataccaaatggtcaagtagttcagtttgaatcttcttcgtgcttcgtggatgggtaaggaaagtacgaagaataccatgagacttac

SEQ ID NO: 152787 - DNA, 291 bp, Arabidopsis thaliana columbia
  unsure (1)..(291): unsure at all n locations
gttttataacaannnnattggggtgtgttattttgtttaggggctaggggtttttttttgagagcccccaaaagagattttcaactgaaactgaataaaaagttgtgggtggggattttcccattttttttattttggaggtgtgccctctcatttttttagatttctttccacaagaaaaaaagggtcactatactattggtagagagtttgttaagagagagagagtttttttcttaatttgaggacacaaatttataaaaaaactaaaatgatgaagtctatattagg

SEQ ID NO: 152788 - DNA, 416 bp, Arabidopsis thaliana columbia
tgatctttgcccttgtctactgtactgctggaatctctggtgggcacataaacccagcggtgacatttggtctgttcttggctcgtaagctgtcattgacgagagctgtcttttacatcgtgatgcaatgtctcggagccatctgcggcgccggagttgtcaaaggcttccagccaaatccttaccaaactctcggcggaggagccaacacagtcgctcacggctacactaagggctctggtttgggtgctgagataatcggaaccttcgtccttgtctacacggtcttctccgccactgacgccaagagaagcgctcgtgactcccacgttccgattttggcaccactcccaatcggattcgctgtgttcttggttcacttggcgacgattccaatcaccggaacaggaattaac

SEQ ID NO: 152789 - DNA, 421 bp, Arabidopsis thaliana columbia
cttaagctttatttctccgttttcgttttgtctttctttatcgtctcggtttcgtcgtctgatgtcaacgacggcgatgatctcgtgatccgtcaggtggttggtggagccgagcctcaggttttgacctcagaggatcacttttctctcttcaagcggaagttcgggaaggtctacgcttccaacgaggagcatgactatagattctcggttttcaaagcgaatctcaggcgagcgaggcgtcaccagaagttggatccgtcggcgactcatggtgttacgcagttctcagatctgactcggtctgagttccgtaagaagcacttgggggttagaagtggctttaagcttcctaaagatgccaacaaggctccgattctccctaccgaaaatctccctgaggattttgattggagagatc

SEQ ID NO: 152790 - DNA, 431 bp, Arabidopsis thaliana columbia
  unsure (1)..(431): unsure at all n locations
cgtnnccgaagagagacnnacttttctctctcttcttttctcttatctcnncttccaatctctctaggggttttcggtacaaccggcgaaaagatgttgcggtagaggacctctcgaagaagagcgacaacactaagttctacgagatcttaggtgttcctaagagcgcttcaccagaagatctcaagaaagcttacaaaaaagccgctatcaagaatcatcctgataagggtggagatcccgagaagtttaaggagttagcacaagcttatgaagtgcttagtgacccggagaagcgtgagatttatgaccagtatggagaggatgcactcaaggaaggaatgggtggtggaggaggtggacatgatccatttgatattttctcatccttctttggtggaggcccctttggaggtaataccagccggcaa

SEQ ID NO: 152791 - DNA, 372 bp, Arabidopsis thaliana columbia
ctccctcacaccctaaaactcagcaacaatggccgttaccttttcagatctacacacagaggagggtgtcaaatccgtggaggagcacctcgccggaaaaacctacatctccggagatcaattgtctgtggatgatgtcaaggtttacgctgccgttccagtgaaacccagcgatgccttccccaatgctagcaagtggtacgagtccgtggcttcccaacttgctaaaagtttccctggaaaggccgttggagtacaattcggtggctctgctgctgctgctccagctgttgaagctgaggcacctgcagctgcagctgatgatgatgatgacatggatctctttggtgacgagaccgaagaagaaaagaa

SEQ ID NO: 152792 - DNA, 414 bp, Arabidopsis thaliana columbia
ccggctttggcggcaccaccgccaccgtcaatctctgcaagcttttcgttgaaagaggcgccgctggggtccacatcgaggaccagtcctccgtcaccaagaagtgtggccacatggccggaaaggtcctcgtggcagtcagcgaacacatcaaccgccttgtcgcggctcggctccagttcgacgtgatgggtacagagaccgtccttgttgctagaacagatgcggtcgcagctactctgatccagtcgaacattgacgcgagggaccaccagttcatcctcggtgccactaacccgagccttagaggcaagagtttgtcctcgcttctggctgagggaatgactgtaggcaagaatggtccggcgttgcaatccattgaagatcagtggcttggctcggccgtcttatgac

SEQ ID NO: 152793 - DNA, 403 bp, Arabidopsis thaliana columbia
ggtggctcgtaaacttgcagacaaaagaaacaagcaagtctcactaaacatcgagcacgaggtagttgaccaaaccggtctgagcaagagattaagtttagagatgaacaagtcatcatcatcttgtgcctcgtgtgcaacggtggctttgaagtatcaaaggagagtttcaggttcacaacgtttgttcccaactcctatcattcactcaatgcttgcggttgcaacggtctgcgtttgcgtctgcgttttcatgcatgctttcccaatcgtcagacaagggtctcacttcagttggggaggtttggattatggctcaatctatagaactatactatataaaaggattataatttattcttttgggttctcggagaccaaaaaaaattagaaaaagagaaga

SEQ ID NO: 152794 - DNA, 354 bp, Arabidopsis thaliana columbia
  unsure (1)..(354): unsure at all n locations
caaaccttaacttggattctttctggtcaccatggcttcggttactttctctgtccccaagggtttcactgaattctcaggattgcgaagctcctctgcttctcttcccttcggcaagaaactttcttccgatgagttcgtttccatcgtctccttccagacttctgcaatgggaagcagtggtggatacaggaaaggtgtgactgaggccaagcttaaggtggccattaatggattcggtaggatcgggaggaacttcctgagatgttggcatggtcgcaaggactctcctcttgatatcattgccattaatgacactggtggcgtcaagcangcttcgcatttacttaaata

SEQ ID NO: 152795 - DNA, 261 bp, Arabidopsis thaliana columbia
acagcgaaaggggaatgatccaacaatcgctttgtgagaactcacggacatccaggccgacattggcattcaggcaggagaagcgctgcatcacaaggcaaacctaagcgggtacctcgcataccacactggtcaaagcctgcagaagataaaccagcacacagaccgtgatttcttcatgagtgccaaagaagcaaaagagtatggacttatcgacggcgttatcatgaaaccctctaaagctctgcagccacttgcagc

SEQ ID NO: 152796 - DNA, 280 bp, Arabidopsis thaliana columbia
ttccttctccttcacccgcgcgtaacgccgctccatgtagctacctcctcggccgcgtcgccgagtacgcgacctcttcacctgcaagctcagctgcgccatcttctgctcctgctaaggatgaggggaagaagacctatgattacggtggcaaaggtgcgatcgggcgtgtttgccaggtcattggtgccattgtcgatgtgagatttgaggatcaggaaggattgccaccaatcatgacatctctcgaggtgcaggatcaccccacaaggctagtgct

SEQ ID NO: 152797 - DNA, 397 bp, Arabidopsis thaliana columbia
  unsure (1)..(397): unsure at all n locations
cacatatacacanttctctattatatatagaagagaaccaaaaagtaggagaagaagaagctaaaacatataagaatggtttcgagagaacacaagagaggttcctctctgcgtgagaagtttcatttgcttcgttcaatcactgattttaatgctgagagcgaaacatctatcataggggatgcatcaaaatatatcaaaaagcttaagcagaaggtagaaaaaatcaacaatgcgaccacgtctgagcaatctttccgtgaatcttccgatccaaatcctatggttacagtggaaaccctagagaaggggttcatgataaaggtaatgtcaaggaagaatgaggcacgcatgttggtttgtgttcttgaaacctttagagatcttggacttgatg

SEQ ID NO: 152798 - DNA, 212 bp, Arabidopsis thaliana columbia
gagaaagaggaagaagaagaagaagtctctgagaaattttcgaacatgagggagatcattagcattcatatcggacaagctggggttcacgtcggaaattcttgttgggagctttattgtgtcgaacatgggatacaacccgatggcaccatgcccagtgataagactgttggtgcatgtcatgatgcattcaacacattctttagcgagac

SEQ ID NO: 152799 - DNA, 421 bp, Arabidopsis thaliana columbia
ctcagatccagaaatccccgccgctagtgctcttggtctcgggaaacgaaaacgtggtcctggtgtttccggtggtaaacaaacgaaacgccgatctcgagtttctaataagaaatctcaaaccacgtttataacggcggacgctgctaatttccggcagatggttcaacaagtcaccggagctaagttcctcggttcttccaacagcattttcgcaccgattgtgaagccggagccacaccgtctcgctagtagattaccaccgtcgtgcggaaacttggaccgatcttcagctgttccaacgctagatacgtcgtcgtttttgtctaaccatcaccaagagaacattatcacagatttgggagctccgaccggttcgtttcatcatcaatccagtgcaagtacaacgacggcgaacgtt

SEQ ID NO: 152800 - DNA, 213 bp, Arabidopsis thaliana columbia
gacggcaagtggagaaccgatgaagaagtgaggtccatctacttacaatggtccgcagaacacgggaaaactaacaacaacaacaacggtatcatcaacgaccaagacaaaagattcaatattttcaaagacaacttaaaattcatcgatctacacaacgaaaacaacaagaacgctacttacaagcttggtctcaccaaatttaccgatctc

SEQ ID NO: 152801 - DNA, 392 bp, Arabidopsis thaliana columbia
tgcttcatcattaccaaatcatcaacttaatcgtttctctcaaatttagggttttctcttttctcgaaagtcttgcggttttctgaatcatctctatctggtttgagggtttcgtttgatatctggagaaaggggtttctggaaacaaggagttcataattcgcgatcttgatctatcgatcttcatttatatataaaagcgtgaatgagattatgatggagtcgaaaggtggtaaaaagaagtccagcagtagtagttccttattttacgaagctcccctcggttacagcattgaagacgttcgtccaaacggtggaatcaagaaattcaaatcttctgtctactcaaactgctccaagaggccatcctgagtaccagcgtgcaccgatct

SEQ ID NO: 152802 - DNA, 321 bp, Arabidopsis thaliana columbia
attaataaaaagcattttcttctttcgattgcttcagattcgtcagctcactctttcctctccagaagaaaccctagacatctcatcgccaaaatgttcagatctatgctcgtccgatcttctgcctccgcgaagcaggcggttatccgccgtagcttctcctccggctccgtccccgagcgtaaagtcgccatccttggtgccgccggtggaattggtcagcctcttgctctcctcatgaagcttaatcctctggtctcttccctctccctctacgatatcgctaacactcctggagttgctgctgatgttggtcacatc

SEQ ID NO: 152803 - DNA, 233 bp, Arabidopsis thaliana columbia
aataataagataatgatacttcaaagaaaatgtatcctcaatatcaaaatcctcgaacacaattaaaatgtgaacacaaaagctgagtgttttagtctgaaaacagaaaatttgaggcattaagctcaaaagataaaaaactacaagaggcatgagataaagaaggcttgactgatttactcttcatcggcctcatcatcatcatcaccacctgctccattcaatgccttgac

SEQ ID NO: 152804 - DNA, 387 bp, Arabidopsis thaliana columbia
cggacgcgtgggaaattttgactcgcaaaatctcaacgaagctcgaaaatggattcacgaaccaaggggaagacggtgatggaagttggtggcaatggcgttgccgtcataacactcatcaatcctcccgtcaattctctatccttcgacgtgctatacaatctcaaaagtaattacgaggaggccttgagcaggaatgatgttaaagctattgttattactggtgcaaaggggaggttctttggtggctttgatatatctggttttggtgaaatgcagaaggggaatgtcaaagagccaaaggctggttacatttcgattgacatcataaccgtcttgcttgaaactgctaggaaaccggttgtcgttgccattgatggacttgcc

SEQ ID NO: 152805 - DNA, 392 bp, Arabidopsis thaliana columbia
  unsure (1)..(392): unsure at all n locations
aatttaagggattcacttgtggaggcaaagtctgacattgttgtcaagattggtctcagaaaagggtctcgctcatttgaggaggcacgtgctgctggcttcactgaagaaagtggtactttgggtgatatatgggaaactatcgctggcagtgatcttgtattgcttttgatctctgatgctgctcaagctgataactatgagaaaatattctctcacatgaagccaaacagcattcttggtttatcacacgggtttctactagggcatttacagtcctcgggactcgatttcccaaagaacatcagtgtggtcgcttgatgccctaagggaatgggtccttctgtgaggaggctttacgtccaaggaaaagaaantaacggggctggaat

SEQ ID NO: 152806 - DNA, 387 bp, Arabidopsis thaliana columbia
  unsure (1)..(387): unsure at all n locations
cccacgcgtccgccgatgacgaagaggagcaaaggagctaacgaagataagctgatagaaaccaaaagcaaaaacgtttctggaaaatctcagaaacagaagaaaccagtagaagcagaaagcttaaaagaggaagaccttctacaagcatccggaactgattctgattacgacggagatagtttgcctggttctttgaattccgacgatttcgactccgatttttccgattcagaggatgatggaacacatgaaggaacagaagatggagatgtagaattttccgatgacgacgacgtgcttgagcatgatgggtcaattgataacgaggatgatgatggaagtgaacatgtangtagtgacaataatgaggaacatgggagtgat

SEQ ID NO: 152807 - DNA, 200 bp, Arabidopsis thaliana columbia
gctggaccttgaggagaacaagattgttgagttcatcaagtttgacgtgggtaacgttgtgatggtgactggaggcagaaacagagggcgtgtgggtgtgattaaaaaccgtgaaaagcataagggaagctttgagacaatccacattcaagactcaacagggcatgagtttgccacaaggttggggaatgtgtacacaa

SEQ ID NO: 152808 - DNA, 347 bp, Arabidopsis thaliana columbia
gcaagctaccacagatttagagtttatccaccttatttttcgccgagatccaacaatggctgatgtggaaccagaggttgcagcagcaggagttccaaagaagagaacgttcaagaaattcgccttcaaaggagtcgatctcgatgctcttctcgacatgtctaccgatgatcttgtcaagctcttctcttcccgtattcgcagaaggttctctagaggattgacgagaaagcctatggctttgattaagaaactccgcaaggcgaaaagagaggcaccagctggtgagaagccagaccagtgagaaccacttgaggaacatgatcattgtgccctgaatgattgga

SEQ ID NO: 152809 - DNA, 288 bp, Arabidopsis thaliana columbia
  unsure (1)..(288): unsure at all n locations
cacagcaaaaaaaactcactccctagaaaagtttgaaaatggcgaaggcagataagaaaccagcggagaagaaaccggcagagaaaactccggcagccgaaccagcagcagcggcagagaagaaaccaaaagccggaaagaaactcccgaaggaaccagccggcgccggagacaagaagaagaagagatcaaagaagaacgttgagacatacaagatctacatcttcaaggtgttgaagcaagttcatccagatatcggaatctncagcaaagccatgggaatcatga

SEQ ID NO: 152810 - DNA, 286 bp, Arabidopsis thaliana columbia
  unsure (1)..(286): unsure at all n locations
ctcaggtaatacttttaagatttatcaacacaagcaaaaaagatggcccaaaagctagaagcaaagggtggtgagatgggagatgtatgggatgatggtgtttacgaaaatgttagaaaggtatatgtagggcaagcacaatacggtatagccttcgtcaagtttgagtatgtcaatggttctcaagtggttgttggagatgaacatggaaagaagacagagctaggagttgaagagtttgagattgatgcngatgactacatcgtatacgtggaaggttaccgtg

SEQ ID NO: 152811 - DNA, 287 bp, Arabidopsis thaliana columbia; identical to SEQ ID NO: 126831

SEQ ID NO: 152812 - DNA, 271 bp, Arabidopsis thaliana columbia
ctcctcatctttttatcttctttgattgatccacatggcggctgctgccgcaagttccgccttttcacttcttaagtccaccggcgctgttgcttcttctgacggatctcgcgcacttacttctgatcatccaatcctctatatctttgtttatgaacgttcaataggcttcgaaggttaccgaaatttaaccggcagctatgcggatgagttcgctattactcaaggaagccacggtaagactaaagcccgcaattttcttgttcctggt

SEQ ID NO: 152813 - DNA, 287 bp, Arabidopsis thaliana columbia
aagaaagtcgtcatctttggtcttcctggggcttacacgggagtttgttcacagcagcatgtgcctagctacaagagccacattgataagtttaaagccaaaggcattgattctgtcatctgtgtctctgttaatgatccctttgctatcaatggttgggcagagaagcttggtgccaaagatgcaattgagttttatggagattttgatgggaaatttcacaaaagcttggggctagacaaggatctctctgctgcattgctcgggccacggtctgagagatggtc

SEQ ID NO: 152814 - DNA, 289 bp, Arabidopsis thaliana columbia
ctctaaaatctctctctgccaatctcatcttcaacctctctctaactctcgttttcgattctacaatggctgacaagaagattaggatcggaatcaacggattcggaagaattggtcgtttggttgctagagttgttctccagagggacgatgttgagctcgtcgctgtcaacgaccccttcattactactgagtacatgacctacatgttcaagtacgacagtgttcacggtcaatggaaacacaatgaactcaagatcaaggatgagaagacccttctcttcggtga

SEQ ID NO: 152815 - DNA, 289 bp, Arabidopsis thaliana columbia
ctataattcaactgtgtatttcaccgacgaaacaaaaaagagagagagagagagagaaacgatgagttctcagatttcggagattgaacaagagcagctgatcgagaagcttgagatcttcaagatccatggcagagacaaacgtggccgtaagatccttcgtattatcggaaaattcttcccagctcgatttctgtcactggatgtgttgaagaagtatctagaggagaagatatttcctcgattaggtagaaaaccattcgccgtactctacgtccacaccggcgta

SEQ ID NO: 152816 - DNA, 158 bp, Arabidopsis thaliana columbia
cttcaatcgaaaaagagactttccctaagattgcagcagcgcaagggctctatgctatggtgctaccaaggttttggatggacattgggcaaccccgtgactacataacgggtttgagactctacttaaactcccttaagaagaaatcttctggcaaa

SEQ ID NO: 152817 - DNA, 281 bp, Arabidopsis thaliana columbia
  unsure (1)..(281): unsure at all n locations
caccttcatcaaacttcttcataacaaatcacattgctctctcttctctgcttgaatccattacagagggattgtggagtggtttggtttgatttgatttcgatctgtgacaatggtggagactagtatcgacatggaggaaggaactctcgagatcggaatggagtatagaactgtctccggagttgctggacctttggtcatccttgacaaagtgaagggtccaaagtaccaggagattgttaatattcgcttangagatggatcaacgagacgtggtc

SEQ ID NO: 152818 - DNA, 221 bp, Arabidopsis thaliana columbia
ccaaatctcctaaatgatgtccaaccctaaatttctgtgggacatgagtcgcagcggtactcccatcggacggatcgagatggagcttttcgatgatacaaccccaaacacggtggaaaatttccgtgctctctgtaccggcgagaaaggaatgggaaagctaggtaagccacttcacttcaaaggatcgatcttccaccagggtgattcccggattcatg

SEQ ID NO: 152819 - DNA, 287 bp, Arabidopsis thaliana columbia
gcgatcttaagtccccaaaccttctagttgacaaaaactgggtcgtgaaggtgtgtgattttggattgtctaggatgaaacacagtacatacctctcttcaaagtcaacagcagggacggctgaatggatggctccagaagtgctaagaaacgaacctgctgatgagaagtgcgatgtttacagctacggtgtgatcttatgggaactctttacgttacaacaaccgtggggaaagatgaacccgatgcaagtagttggggcagttgggtttcagcatcgacgtctt

SEQ ID NO: 152820 - DNA, 288 bp, Arabidopsis thaliana columbia
cgaaagcaaaagaattctcaaactcctgagaaaaattcgagctccgtgtgattaattagtttgtgttggtaaacttcaatcagatgagtttgatgatgaaagtttagaagagtgtttttgcttccaaagcaaaataaaaacaaatgaagcgttttgtgtacattaacgatgatgaagcttcaaaagagctttgttgtgataaccgtatatctaacagaaagtatacgttatggaattttcttccgaagaacttgtgggagcaattcagccggtttatgaaccagtact

SEQ ID NO: 152821 - DNA, 288 bp, Arabidopsis thaliana columbia
  unsure (1)..(288): unsure at all n locations
caaaaaaatggcatggcttgctagatccattgcgaatggtctgaagatcgatgaggaagaatatgatcaaaaggaaacgattaagaccaattcgattgaaaattccggctcagatcaaccgtcttcgccatcggtgttgcaaacacagtctccacgaggcgtgaaggaagacatctctgaactcaccaagaccttaagaagtcagctatggggcgttgcttctttcctcgcgccacctncttccttcttcgatacggcggatcatgtggatgaggagactcggaagtc

SEQ ID NO: 152822 - DNA, 293 bp, Arabidopsis thaliana columbia
  unsure (1)..(293): unsure at all n locations
cacacatttnctattgctaacgaacataaaacactacctgagagatcaatatggctggagtgatgaagttggcatgcttgctatatcacctgcaaatattctgacctatcactaaaaaataaacgctgtgcttagatgcggcttcaattaacagcacctaggcagagtgcattggctacatgctccaaggaggtgttattcccccagcgtgttgctccggcgttaaaaacctcaacagcatagccaagacgaccccagaccgtcagcaagcttgcaattgcattcaaggtgcc

SEQ ID NO: 152823 - DNA, 289 bp, Arabidopsis thaliana columbia
atgggctggtgtgatctggctatacagtattgtcacatgctgcccattggacgttttcaagtttgccattcgatacatcttgagcggaaaggcgtggctcaacttgtttgagaacaagacggctttcacgatgaagaaagattacggaaaagaagagagagaggctcaatgggcacttgctcaaaggacacttcacggtttacagccaaaagaagctgttaacatcttccctgagaaaggaagttacagagaattgtctgagatcgctgagcaagctaagagaagagct

SEQ ID NO: 152824 - DNA, 287 bp, Arabidopsis thaliana columbia
ctctttctcacttcaatttagcgatggctgcaactgcaatctcttctctttccttcccagctttgggtcaatcggacaagatctccaatttcgcatcttctcgtcctctcgcctccgcaattcgcatctgcacaaagttttctcgcctttctttgaattcgcgttccacttcgaaatctcttattcactgcatgtccaatgttaccgccgatgtgcctcctgtatcagagacaaagtcgaaattcctaaaagcttacaagcgacccatcccgagtatctacaacacg

SEQ ID NO: 152825 - DNA, 275 bp, Arabidopsis thaliana columbia
gggcgacccgcgcgtccggcgaaattctctgttttctcttcattttattttccctccggatctttcccaacgatgtccaaatctcacttcactttggctcctccacctgaatccatggatattgcttcgtcatctctctcacaagctcacaaagtcgttctcacgcgtcaaccttcttcccgggtcaacacctgctcccttggctcggtctccgctatcggattctctcttccgcagattagctctcccagcttagggaaaatgtcgcccggaaa

SEQ ID NO: 152826 - DNA, 285 bp, Arabidopsis thaliana columbia
cacacatctcctattgcaaacgaacataaaacactacctgggagatcaatatggctggagtgatgaagttggcatgcttgctcttggcctgcatgattgtggccggtccaatcacatcgaacgctgcgctaagctgtggctcagttaacagcaacttggcagcgtgcattggctacgtgctccaaggtggtgtcattcccccagcgtgttgctccggcgttaaaaacctcaacagcatagccaagacgaccccagaccgtcagcaagcttgcaattgcattcaag

SEQ ID NO: 152827 - DNA, 283 bp, Arabidopsis thaliana columbia
gttgtttgatgtttgtactttttctgtaagaattcgcattggaagaaattgtacccagttttatgattacgtaaagaaatatcagtagtgaatattctgacctattctagaaaatagcgctgtagtatttagtctctcgtatgggttttacgatttggatttatcacggctgcattcattagcaagagctatggctagagtagctagctcctggagaagtaatacgagtatcgaaggtctctgatttttgatatgatggcgtttggactcgattcgagcctgc

SEQ ID NO: 152828 - DNA, 201 bp, Arabidopsis thaliana columbia
gaaagaaatggcgacatttggaacgtacgtgacggaggttccgttgaaaggatcggcggagaaacactacaagagctcgaagagcgagaaccatgtcttcgctgacgccattggccaccacatccaaaatgtcgttgttcactaaggcaaacattactctcacgggtctattatgagttgggactacacatatgttggata

SEQ ID NO: 152829 - DNA, 288 bp, Arabidopsis thaliana columbia
  unsure (1)..(288): unsure at all n locations
atcaaaaaaaaccttcgtgtgcgtctctcgtcctctaaattgtcgaaaatgctggctaggctcgctgcgaagcgtcttctcgagatccgtcaagttttccgtcaaccaacctctcaggtgactcgtagcttatcgacggccttaaactaccatctggattctcctgataacaaacccgatcttccatgggagttttcagaggctaaccaatctaaggttaaggagattctctcttactatnccatccattacaagcagtccgcagttattcctctcctagatcttgca

SEQ ID NO: 152830 - DNA, 287 bp, Arabidopsis thaliana columbia
tgctgattggttattcgttaatggctttgaagggttagaagaaacacaagattgtgaaaatggtgagtctgatgcaatgaaggcgacgttgatcggaccgatgattccatcggcttatcttgatgatcggatggaagatgataaagactatggtgcgagtctgttgaaaccgatatcgaaggagtgtatggagtggcttgagactaagcaggctcagtcagtagcatttgtttcgtttggttcgtttgggattctctttgagaagcaacttgcagaggtagctattg

SEQ ID NO: 152831 - DNA, 287 bp, Arabidopsis thaliana columbia
cttatctcctttcctttcattgtagttaacgaaaagattacgataatggcaacatcagctatccagcaatcctccttcgccggccaaacggctctcaagccctccaacgaactcctccgcaaggttggtgtatccggtggtggccgtgtgaccatgcgtcgtaccgtcaagtctactcctcaaagcatctggtacggaccagaccgtcccaagtacttaggaccattctcggagaatacaccgtcctacctaaccggagaataccccggagactacggctgggacac

SEQ ID NO: 152832 - DNA, 210 bp, Arabidopsis thaliana columbia
cgcgagcggcactccttttgattgaatctcaaaaaggaacgagatattgagaggtgaaatcggccaatcttattttgcttcgtgagactaaacttattaacaaagagaatatagactcatcggcgacaataacaactactcattggctgaccagatgatgagccgtgccgggtgcctttgtctgtggctcagctatcagatataaatcac

SEQ ID NO: 152833 - DNA, 287 bp, Arabidopsis thaliana columbia
ctcatctcgttctctcttccgtcaatatggaaggcgtcaccggcgtgtctttcttccttcttttcatcgccaccgccatggccgccaagtccaccgtctccttccgtgacggcatgttaccaaacggagacttcgagctaggaccaaaaccatcagacatgaaaggaacagaaatactaaacaaactagcaataccaaactgggaagtcacaggattcgtcgaatacattaaatcaggacataaacaaggagacatgcttctcgttgttcccgccggtaaattcgct

SEQ ID NO: 152834 - DNA, 289 bp, Arabidopsis thaliana columbia
  unsure (1)..(289): unsure at all n locations
agaacaatggcttcctctatgctctcttccgctactatggttgcctctccggctcaggccactatggtcgctcctttcaacggacttaagtcctccgctgccttcccagccacccgcaaggctaacaacgacattacttccatcacaagcaacggcggaagagttaactgcatgcaggtgtggcctccgattggaaagaagaagtttgagactctctcttaccttcctgaccttaccgattccgaattggctaangaagttgactaccttatccgcaacaagtggattc

SEQ ID NO: 152835 - DNA, 291 bp, Arabidopsis thaliana columbia
cttcgtctcaacatttagggtttcagagatcggctgatgttcacatccacaagtatggcgactcaaatcagcaagaagagaaagtttgtagcggatggtgtattctacgctgaattgaatgaggttctcacaagagagctagcagaggatggttactctggtgttgaggttagggttactccaatgaggactgagattatcatcagagctactcgtactcagaatgttcttggtgagaaggggaggagaattagggaattgacatctcttgtccagaagagattcaagttt

SEQ ID NO: 152836 - DNA, 291 bp, Arabidopsis thaliana columbia
cagtctccggctagttcgactcggtaaaatcacgattacgtgctccttccatttatcacgatcgtggatccagaaactctgaaagatggcgtctgagctgacaaaccggcgacacgagatagagcaaccagaagcggaatcttattatccaaagccgataaagccatggttcgtagcgattcgtccgatccgttacatgctcagagaacagagactcgtcttcgtcctcgtcggcattgccatcgccacattaggattcacaatcttctccaaatcatccaaccaccaacc

SEQ ID NO: 152837 - DNA, 280 bp, Arabidopsis thaliana columbia
ctcttttttcttttcttcctgggtttgatttcttggagtggttgattgcgcaagtctggattttgattttggtacaagacatttgcttgtacaaggaggaagggatttgttggtatacagtattgttattgcaaaggtttttcgaatgtcaaaacaagtttttggattattgattttggaaatctgagtggatggagaacgatgacatgtatcctgatgagcctgtaggttctgacttggaacctcaagagagtgatgttgtttttgcaagagagtcacc

SEQ ID NO: 152838 - DNA, 287 bp, Arabidopsis thaliana columbia
gtggtatcaagaatgcgtggacttgaacaggatgctgggaggcagcaagttactggagttaagctgcgggaaatgcaagatgaagccaaaagttttgctattgggaacaaagccttggctgcgttatttgttcacactccggctggtgaactgcagcgacagattcggctatggcttgcagaaaattttgagtttctttccgtgacctcagatgatgtatcgggaggaaacggtggccaactagagcttctttccacagcaattatggatggttggatggctggact

SEQ ID NO: 152839 - DNA, 282 bp, Arabidopsis thaliana columbia
agaatcatttggcaccatttcttccttctcaccccgtgataccgactggtggtatcccacaacccgagaagacagcacctttgggtgcaatatccgctgcaccatggggatctgcgcttatcttgcctatatcttatacttacattgccatgatgggatctggtgggctcactgatgcctctaagattgcaattttgaatgccaattacatggcaaagcgcctagagaaacactacccagttcttttccgtggtgttaacggaacagtagcacacgaattca

SEQ ID NO: 152840 - DNA, 287 bp, Arabidopsis thaliana columbia
cctttttgcctcagagctccgtggagagcagcaatcagtggccatggctgagcagactgagaaagcttttcttaagcaacccaaggtcttccttagctcgaagatatctgggaaaggaaagagacctggtaaaggtggaaaccgtttctggaagaacattggtttgggtttcaagactcctcgtgaagccattgatggagcttacattgacagtaaatgtccattcactggaaccgtttctatcagaggacgtatcttagctggtacttgccacagtgccaagatgc

SEQ ID NO: 152841 - DNA, 286 bp, Arabidopsis thaliana columbia
caaccaccgttctccgtcacggtggcgctttattctctcatcggagcgcctcaccggtggcagacggtgtcgttgttcctctcctaaaacctccatcaatcaccatctctttacacagagctctaaccaaaatcttcgagagatggggcagagtatgagctgtggaagtcgaccggagcacggaatattcgcctctgtacagtgcggcgatatcatcactatccgtcgtgtgatggcgacggagcctagtctgttgaatcaaactactccttatgatcgtcactct

SEQ ID NO: 152842 - DNA, 286 bp, Arabidopsis thaliana columbia
gttctggattgaaaagaatgactttgagttcaccatctgatttgaaatcacttgtaggaatttgtcagagtacgcagcagctgactggtttgagttgtggtagtgttgttggtactgaagtgcagaggaatccagttactaataagaagagatctgtttctccgttgcctcatatggctctttctgatgcttttatcgaagcaaagtctgatattaagaggttttctactccacatcctagaagagtggaaccagagaagggaatgaaggccaagtcgtcgtcccg

SEQ ID NO: 152843 - DNA, 290 bp, Arabidopsis thaliana columbia
tgaagatccttacagagagaggttacatgttcaccacaacaggagagcgggaaattgtaagagacatcaaggagaagctctcctttgttgctgttgactacgagcaggagatggaaacctcaaagaccagctcttccatcgagaagaactatgaattacccgatgggcaagtcatcacgattggtgctgagagattcagatgcccagaagtcttgttccagccctcgtttgtgggaatggaagctgctggaatccacgagacaacctataactcaatcatgaagtgtgat

SEQ ID NO: 152844 - DNA, 291 bp, Arabidopsis thaliana columbia
ctaccgacccagaggcattcgctgagttgaaggtgccaccggggtaaagcaagatcttgggctacttcaatgggacattttctgtgactgtggaggcctacacggatgagatggaaatatcttgggcgggctatttcgtcgagaagcactaagaattacccggtgggcaagttatcactgattggtgctgacagattcagatgcccagaagtcttgttccatccctcgcttgtgggaatggaagctgctggaatccaacgaacaccctataactcaatcatgaagtgtgat

SEQ ID NO: 152845 - DNA, 290 bp, Arabidopsis thaliana columbia
tgaagatcagacttagcataaccatcatacttttatcatacacagtggctacggtggccggacaacaatgcggtcgtcaaggcggtggtcgaacttgtcccggtaacatctgctgcagtcagtacggttactgtggtaccaccgcggactactgttctccgaccaacaactgtcagagcaattgttggggaagtgggcctagcggaccaggggagagcgcgtcgaacgtacgcgccacctaccatttctataatccggcgcagaataattgggatttgagagccgtgagt

SEQ ID NO: 152846 - DNA, 287 bp, Arabidopsis thaliana columbia
agctacttcagatactttaacagctccgtacaatgatcttgaagctgttgagaagctctttgctgcgcataaaggggagatttctgcggtaattctcgaacctgttgttggtaactccggattcatccctcctactccggaattcatcaacggtttacgccagcttactaaagacaatggtgttcttctcatcttcgatgaagtcatgactggatttcgtctagcctatggtggagcccaagaatactttggaatcacgcctgatctaactactcttggtaaaatta

SEQ ID NO: 152847 - DNA, 287 bp, Arabidopsis thaliana columbia
gattgcttctctctatctcttctctcgctacacaacaatggctgcttacacgtgtacttcccgtccgccgatttctatccggtcagagatgagaatcgcttcctcgccgacgggttccttctctactcgacagatgttctctgtgttgccggaatcgagcggattgaggactcgcgtttctctatcttcactctcgaagaattctagggtttcccgattacgacgaggcgttatctgtgaagctcaggacactgctacaggaattccagtggtcaacgattcaacat

SEQ ID NO: 152848 - DNA, 287 bp, Arabidopsis thaliana columbia
gtccgatatatcgttaccagagaaagagagctcagagatgtagttagcttaatttttcttttcgttttgaaattaaggaagtgattgttatcaccggaggagagagagaaaatgttgggaattttcagtggagctatagtatcgccgccggaagagttagtggctgccggaagcagaactccgtcgccgaaaacaaccggatcaactttagtaaaccggttcgtcgagaaaaatccatccgctgtttctgtacaagtcggcgactatgttcagcttgcttacagcca

SEQ ID NO: 152849 - DNA, 250 bp, Arabidopsis thaliana columbia
acttttgtgttcctctgtaatttctagatatatgggccaaaacagcagtgaaaaatggctatggcgagtttatatcggcgatctcttccttctctccggccattgacttttcttcgcgaaggcaagctaatcttcaatgaagcgctcaaaggaactatggaggattttcagttgatttcgattttcagacacaatccgaacctctattggggttgctagctctcaggggtgaatgctctttatcatctga

SEQ ID NO: 152850 - DNA, 287 bp, Arabidopsis thaliana columbia
cttacttatcaatttgaagggtgggaaagggcggctatgtcaagtcattcaagaaaatccagaagagatgaaaaaatggattatggggttaagagtccagccattaccagctactggatacaaggtaaacacaaagtcgaaaacaatgaagactcagttcttgttagacctcggatacaaagaaaactctgaggaaatggagagagcactcaagaatttccgtggcaaaggatctgaactccgagagagatttaatgtcctcgtgagtttcggtcttactgagaaag

SEQ ID NO: 152851 - DNA, 288 bp, Arabidopsis thaliana columbia
gcgggaagctcagcgaagctgtagatctcttcaatgagatgaagaaccaaggaagtggtcccgatgtttatgcctacaacgccctcatgtcaggaatggtaaaggctggtatgatcaacgaagctaattccttgcttagaaagatggaagaaaacggttgcagggccgatataaactcgcataatatcatcctcaatggatttgctagaacaggtgtgccgagacgggctatagaaatgtttgaaactataaagcattctggtattaagcctgatggtgtcacttata

SEQ ID NO: 152852 - DNA, 289 bp, Arabidopsis thaliana columbia
ctggcttcttcgttctccagaagctcaactctacctcggacgatcctctcgatgattccttcaccgacgctgaacacgccgacgacgattcagtctctggattctccaaggtgggaatggcaatgaagtctggattttggacatgcgttgacatggcaagtggtcgctatctctggaacaatctctgttcaaatgccaaacgctcttcttgagttttgttactctctatctgtctctctattgtctgtaactgtttaattgaactgcaatcgacggcaccaaatttaca

SEQ ID NO: 152853 - DNA, 290 bp, Arabidopsis thaliana columbia
gaaacccaaaccctcattccaaaaaatggggtctcgctgtcaaaacctctcctttctcgtcctcctcctccttggcttcgttgccgtctcctatgcttgcgactgtacccctcctaaaccatcaccagcacctcacaaaccaccaaaacatccagtcaaaccgcctaaacctcctgccgtcaaaccacctaaaccaccggcagtaaaaccacctactccaaaacctcccaccgtgaaaccccatcctaaaccaccaaccgtcaaaccccatcctaaaccaccaaccgtca

SEQ ID NO: 152854 - DNA, 290 bp, Arabidopsis thaliana columbia
gaaaaagaagaaggtcatgaaggagaagaaacatcatggggagggtcaccacagcagcagcagtgacagcgacagcgattaaggtgaggaagtgaggaggatcgcttgaataaaacagatctggttctggctattattaattaatgttgctgtatgttcttatcatcttagagagaggttaaagacaggagaaccgtgcatctatctttgtttgttatgtttctgttttcttgtcatgaaaattatgctcatgtatcttatctaaatcaaaaataataatttgatgaaaa

SEQ ID NO: 152855 - DNA, 290 bp, Arabidopsis thaliana columbia
ctctaatcaaaacaagaaagacacaaagatggagatctcggaaacccttttgctagtgatttctctggtggctgcaacttgtttcttgcaagccaaggcagctggagtttattgtagtaacccttacactcgatgttaccgcaagtacattaggtgtccagaggaatgtccaagcaaaaccgctatgaactccaagaacaaagtgtgctacgccgattgcgatagacccacttgcaaatcccaatgccgcatgaggaaaccaaactgcaacagacctggatcagcttgtt

SEQ ID NO: 152856 - DNA, 284 bp, Arabidopsis thaliana columbia
aaacgggcaaattaagaggagaccccccgaggtgtgggggggttctttattctcgcctccgccgctgtggttacatccccggctcaggccaccatggtcgctccattcaccggcttgaagtcatccgctgcattcccggtcacccgcaagaccaacaaggacatcacttccatcgcaagcaacgggggaagagttagctgcatgaaggtgtggccaccaattggaaagaagaagtttgagactctatcttacctccctgaccttagtgacgtcgaattggctaa

SEQ ID NO: 152857 - DNA, 290 bp, Arabidopsis thaliana columbia
agcgaatctcagtcgttctagaacacgtctccgtcgacgatcttttgatcccgtctttcacctacgacggcgaacggttactagatctcgatagtgtcagaagaatcatctctgctttcgtggaaaaagagaaaaacgttggtgttttcaacggtggagacttcaacagaggagtctgctctgtttcactacaaagagtagctaaaacagttgattcttacttagcggagatcgctacttacggagacctaacaatctccaaattcaacgcgattgcgaatcttgtcccg

SEQ ID NO: 152858 - DNA, 288 bp, Arabidopsis thaliana columbia
tagaaacgttcacatcttgaacgtgaagctcgataatgtaaagaaagcgattaggttcaccggtaagtacggtgaacatcctgatgagaaatacgatcccaaagcactcccagctatagagaaaatcacctttgagaatgtaaatggcgatggaataggtgttgcgggtcttcttgaaggtatagaaggagatgtgtttaagaatatatgtttccttaatgttactcttagagtgaagaagaattcgaagaaatcaccatgggaatgctcgaatgtgagaggttattc

SEQ ID NO: 152859 - DNA, 286 bp, Arabidopsis thaliana columbia
ctaaatacaaagaaacagagatgggtttggttacagaggaggtgagagctaaggcagagatgtacaccggagatgagatatgtagagagaagacaaagtgtttcctcaaggaaatatctatgcccaatggtttattaccattgaaggatatagaagaggttgggtatgacagagagtcaggtgttgtatggctgaagcagaagaagagcatcactcacaagttcacagagatagataagcttgtctcctatggaaccgaagtcacagccattgttgagaccgggaa

SEQ ID NO: 152860 - DNA, 289 bp, Arabidopsis thaliana columbia
gacatctgcaatatttatagaggatgtgagaagagaagtgaaaatactgcgggcgttatctggacatcaaaatttggtacaattctatgatgcgttcgaggacaatgccaacgtttacatcgttatggagttatgtggaggtggtgaacttcttgacaggatactagcaaggggaggaaaatactctgaagatgatgcaaaagcagtgcttatacagatccttaacgtcgtagctttctgtcatctccaaggagttgttcatcgagatctaaaaccagagaacttcttg

SEQ ID NO: 152861 - DNA, 287 bp, Arabidopsis thaliana columbia
ctgggatgggtcatccagtagagaaacgtgatctttacgatgctgatcatggaaagaaagtactaagcatggcaccaggactcgaacgactcaacatccttcctttcagggttgctgcatatgacaagacgcaaggcaagatggctttcttcgatccctcgaggcctcaagatttcttgttcatctccggcactaagatgcgcacattggcaaagaacaacgaaaacccgccagacggttttatgtgcccaggtggatggaaagttctggtggattactatgagagc

SEQ ID NO: 152862 - DNA, 288 bp, Arabidopsis thaliana columbia
gttggaccctgtttaggtgaccatgatggctaaacatttggacaccatctatgtctctggttggcagtgctcgtccactcacacatccactaatgagcctggtcctgatcttgctgattatccgtacgacaccgttcctaacaaggttgaacacctcttcttcgctcagcagtaccatgacagaaagcagagggaggcaagaatgagcatgagcagagaagagaggacaaaaactccgttcgtggactacctaaagcccatcatcgccgacggagacaccggctttgg

SEQ ID NO: 152863 - DNA, 285 bp, Arabidopsis thaliana columbia
tgctctgaagactttgtttgtgtagcaaaaaaaaaacgcgattttttttctgggtttcttccgatgttagatttgcagccgtcagatcggcgtcatggagctccgagtagtagcggcggtgttagtggtggtgatgagctgatcagaacttataaaggctggaaaggcaataacgtgttcttccttggaggaaggctcgtgtttggacctgatgctcgatctattctcatcaccgtcttcttaattacagctcctgtcattgtattctgtatttttgttggcaga

SEQ ID NO: 152864 - DNA, 291 bp, Arabidopsis thaliana columbia
attatcactaccaatccaaaagagcttttattaatacacgttactcgtgaccggattcgcagagttcacgagcttccgagtcaaaaacactctaaaacaaaaccatgactttgttccatagactcgatctcatcgatccgtacacgtgtacaccactcatcgtccgtgaaacctccattgttgaaccttcatcattgttcctagggtttccttccttcatcgacgaagacattgaagatctcttcgagttttcatcacctaatcctctcgatctattcgaaaccgtgacgg

SEQ ID NO: 152865 - DNA, 289 bp, Arabidopsis thaliana columbia
  unsure (1)..(289): unsure at all n locations
gggggatcagttccgtcgccgcttcttcgatttttgacgccgccgcttcttcttcttcctcgcagcaggtaagtcacacaggtaactgaaagatggggcgtgttagaaccaagactgtgaagaaatcttctcgtcaagtcatcgagaagtactactctcgcatgactcttgacttccacactaacaagaaaatccttgaagaggttgccatcatcccttcaaagagactccgcaacaagattgctggattctncacccacttgatgaaacgtatccagaagggaccagt

SEQ ID NO: 152866 - DNA, 290 bp, Arabidopsis thaliana columbia
tcggaaagtgaggaagatacactgaagcaaaagagcaagtcatggcggcgacatcttcctctgcttttctccttaatccgttgacttctcgccaccgtcctttcaaatactcgccagagctctcttctctctccttatcctctcgaaaggctgctgctttcgatgtttcctcagctgctttcacgctcaagagacagagccggagtgatgttgtgtgcaaggctgtatctatcaagccagaagctggtgttgaagggctcaatatcgccgataacgccgctcagcttatt

SEQ ID NO: 152867 - DNA, 152 bp, Arabidopsis thaliana columbia
gaagaactcattgtcttactagttcatgtattgtataaaatcgttcagaaacatgattcagtaggatgtgtaattttatttaaaccttttaaaaaatttgattgtaaacttgtaaaagttaaactaattccaagaaatgtattattatcttt

SEQ ID NO: 152868 - DNA, 286 bp, Arabidopsis thaliana columbia
gcaaaacaaagatcggagaagatgaagacgattctttcttccgaaacgatggacatccccgacagtgttaccatcaaggttcacgctaaagtgatcgaagtcgaaggacctcgcgggaagcttgttcgcgatttcaagcatctcaacctcgatttccagctgatcaaggatccagagactggaaagaagaagcttaagatcgattcgtggtttggaacacgcaaaaccagcgcctccatcagaaccgctcttagccacgtcgataacttgatctccggtgttacca

SEQ ID NO: 152869 - DNA, 286 bp, Arabidopsis thaliana columbia
gggagatgaattgaaagtgaaagtaaacaagttgacatcgataaagactcagcttccatattcgtattactctcttcctttttgtcgtcctaagaagattgtggacagtactgagaatcttggtgaagttcttcgtggtgaccgaatcgaaaatgctccttattcgtttaaaatgcgtgaggcgcaaatgtgtaatgttctcggtcgtgttatgcttgatgcaaagtctgccaaagcgtttaaagagaagattgatgatgagtatcgagttaacatgatccttgat

SEQ ID NO: 152870 - DNA, 289 bp, Arabidopsis thaliana columbia
gttctgcaacaatgaactttactctgttgaagaatcacgcaacatttttgaccattttacccctcaacacattctctcttcatcacctccaagtgatcttctcggaaccctaagtctctctcagcatattcccaccggattatatccaaatttctcagatttccaaatctccgacgccgtcaaaacagagaagttcttcgacggtcataatcaggcggcaacaatggcacgaagctacagtaccatagagaattcagggagatatatgcagagaagctttagcagcaat

SEQ ID NO: 152871 - DNA, 287 bp, Arabidopsis thaliana columbia
ggactcctccaaactctcatctctctctctttgcctctgcctcatttgcattatctatctcccccaacattctctcgcatgcggctcttgcaacccacggaagggcggaaagcactcccctaaagcccctaagctaccagttcctccggtgaccgtccctaagctaccagttcctccggtgaccgtccctaagctaccagtccctacggtgaccgtccctaagctacccgttcctcctgtgaccatccctaagctacccgttccaccagtgactgtacctaagctac

SEQ ID NO: 152872 - DNA, 286 bp, Arabidopsis thaliana columbia
ctttctttatccaactttcttcaccaaatcgattcttctgcaaccatgtcttccttcacctccaaattcgccgatgagctgattgctaacgctgcttacatcggaacacctggaaaaggtatccttgcggcagatgaatcaactggtactattgggaaacgtctcgctagcatcaacgttgagaacgttgaatccaacagacgtgctcttcgtgagcttctcttcactactcctggagctcttccttgcctcagtggtgttatcctctttgaagaaactctttacc

SEQ ID NO: 152873 - DNA, 291 bp, Arabidopsis thaliana columbia
ctatgaactacgtgatcactcagtcggtttaaactgtggaagatgggattatatgttcagctatgtcaaaaccttccaagctcaccctgaccggctcttaccagaccgtgtcctagttggcatgggccagcatttcatgagaagttactctgatcttctcatccgtacttgtcataagcgcggtgtccacgccatgggtggcatggcggctcagattccgataagagatgacccaaaagcgaatgagatggcattggatctagtgaggaaagacaagctgagagaggtaag

SEQ ID NO: 152874 - DNA, 285 bp, Arabidopsis thaliana columbia
gcgattaatgaaacttgtcgtggaccagccttatgggacatctactgtagaagatatccagagaggtgcaataacgataacggcgatgtggccgttgatttcttccatcgttataaggaagatatccaactaatgaagaatctaaacacagacgcctttagaatgtctatcgcatggccaagaatatttcctcatgggagaaaggagaaaggagtgagtcaagctggtgtgcaattctaccacgacctcatcgacgagctcataaaaaatggtataactccattc

SEQ ID NO: 152875 - DNA, 289 bp, Arabidopsis thaliana columbia
attgttagagagaaagagagagcgataatggcgatgaggggcttcacgttgttttcgatccttgtgttgtctttgtgcgcttcgtctatcagaagcgaagagacggagacgaaggagttcgtgttgaccttggatcacactaacttcaccgataccatcaacaaacacgatttcatcgtcgtcgagttctacgccccatggtgtggacactgcaagcagcttgctcctgagtatgagaaggctgcgtcagctttgagcagtaacgtcccaccagtggttcttgctaaga

SEQ ID NO: 152876 - DNA, 290 bp, Arabidopsis thaliana columbia
cccacgcgtccgccgatgacgaagaggagcaaaggagctaacgaagataagctgatagaaaccaaaagcaaaaacgtttctggaaaatctcagaaacagaagaaaccagtagaagcagaaagcttaaaagaggaagaccttctacaagcatccggaactgattctgattacgacggagatagtttgcctggttctttgaattccgacgatttcgactccgatttttccgattcagaggatgatggaacacatgaaggaacagaagatggagatgtagaattttccgatga

SEQ ID NO: 152877 - DNA, 289 bp, Arabidopsis thaliana columbia
cattttgaaaccctaatttctcttcttttccccaaaaaaaaatgtctgaagttgagtaccggtgctttgtcggcggccttgcctgggccaccaatgatgaagatcttcaaaggacgttctcacagttcggcgacgttatcgattctaagatcattaacgaccgcgagagtggaagatcaaggggattcggattcgtcaccttcaaggacgagaaagccatgagggatgcgattgaagagatgaacggtaaagagctcgatggacgtgtcatcaccgtgaacgaggctca

SEQ ID NO: 152878 - DNA, 205 bp, Arabidopsis thaliana columbia
gggagagagaatcccattcccatattcagagcacaaacaaaaaagcttcaatttttggggacaaagtttttatcttttcgttgtttggaatttgggggaggaagaaggaaaggtgtaaggatagggtcgtgcgtgtcaacgagaggtgctgctggacgtgaagccttatcctaagcataggggagttggcattcgtcgcattacc

SEQ ID NO: 152879 - DNA, 288 bp, Arabidopsis thaliana columbia
  unsure (1)..(288): unsure at all n locations
aagagagaaatgggtaactctttgatctctcttctctcaatcttccacttgctggtgttatggggatcctcagtgaatgcctattggccaccatcacctggttattggccaagctccaaggttggttccctcaacttctacaaaggttttaggaatctttggggtcctcagcatcagagaatggaccaaaatgccctcaccatctggcttgatagaacctcaggaagtggattcaagtcagtgaagccattcagatcangctactttggagcaaacatcaaactccaa

SEQ ID NO: 152880 - DNA, 288 bp, Arabidopsis thaliana columbia
cctcaacctctctttcgtcgtcgactcagtttccgatgtagggttacccaatcttcgccatgtatcgcacggcagcttcacgagccagggctcttaagggagttcttactcgtagtttgagaccagcgcgttatgctagttctagtgctgttgcggagacgagttcgtcaacgccggcttacttgagctggttgagtggtgggtctcgtgctgcgcttacttcattggatatgcctctacaaggtgtttctcttcctccgccgcttgctgataaagtcgagccgagca

SEQ ID NO: 152881 - DNA, 290 bp, Arabidopsis thaliana columbia
caaaggttgcttactattctcccccaccaccatacgtctagaactttttgaccccaccatactactctccttcacctaaggttgattacaagtctcccccaccaccatacgtctacagctcccctcccccaccttactactctccttcaccaaaggttgagtacaagtctccaccaccaccatacgtctacagtttccctcccccaccataccactctccttcgcctaaggtaaactacaaatctacaccaccaccatacgtctacagctcccatccaccaccatactac

SEQ ID NO: 152882 - DNA, 290 bp, Arabidopsis thaliana columbia
gaattttatgtactcaaagaagatatatccccttgcgtcgttggttcaattgagaagcagaggtggtcatatgcttgtgcaaagcaacttattgagagacttgtttacgctgagggtgctgagaatggactcgagttcaccattgtaagaccattcaactggattggacctaggatggatttcatccctggcattgatggtcctagcgagggtgtcccacgggttctagcgtgctttagtaacaatcttctgcgacgggagcctctcaagcttgtggatggtggagaatc

SEQ ID NO: 152883 - DNA, 287 bp, Arabidopsis thaliana columbia
aaactctaataaacccaagttggtgtatactataatggtgatggctggtgcttcttctttggatgagatcagacaggctcagagagctgatggacctgcaggcatcttggctattggcactgctaaccctgagaaccatgtgcttcaggcggagtatcctgactactacttccgcatcaccaacagtgaacacatgaccgacctcaaggagaagttcaagcgcatgtgcgacaagtcgacaattcggaaacgtcacatgcatctgacggaggaattcctcaaggaaa

SEQ ID NO: 152884 - DNA, 331 bp, Arabidopsis thaliana columbia
taccggcccggacggaattggccgcggacccacccatccgggcgtaagataagtgggagctgaagcgcaagatacaaacctgcaaccgcatcttggtgcagagagtcatccagcccgctaaaaccgaaagcggcattctcctacctgagaaatcctccaagctgaactcaggcaaggtgatagctgttggacctggatcaagggataaggacgggaaattgattccggtctctgtgaaggaaggcgacactgttcttcttccagagtacggtggtacacaggtcaagctcggcgagaacgagtaccatctcttccgggacgaggatgtttt

SEQ ID NO: 152885 - DNA, 290 bp, Arabidopsis thaliana columbia
atattctctcttctcttttctttttgactcccacaagaagaaagcaaatttctttttctcaggattgcttgaaaactgtagaaatctttaaggtttttttacaccaataagagtcagagagagagagagagagagaaagagagatctattcataaaaaagacaggtaatctcaactccgaggagataactgatataacaatttgagagaataagaagaagaagaagaagaagaccaagctaaagaatggttgcttttttatcagcttggccttgggaaaactttggcaat

SEQ ID NO: 152886 - DNA, 294 bp, Arabidopsis thaliana columbia
cgtcgtaccaaatctggcgtacttcactacgtgaagttccattggaaaccaacttgtggagtcaagtctcttttggaagaagatgcaattcgtgttggaggaaccaaccacagtcatgcgactcaagacttgtatgactctatagctgctggaaactaccctgaatggaagctctttatccaaatcattgatcctgctgatgaagacaagttcgactttgacccgctcgatgtgaccaagacctggcctgaggatatcttgcctcttcaacctgttggacgtatggtgttgaac

SEQ ID NO: 152887 - DNA, 330 bp, Arabidopsis thaliana columbia
  unsure (1)..(330): unsure at all n locations
aggttccggnacggaacggccgggacgacccagtcctacggtctttctactattttcttcttgactcccagaagagagggcctactttcttcgtgtcaggactgcttgaaaactgtagaagtctttaacgtttttttacaccaataagagtcctagagagagagagagagagaaagagagatctattcataaaaaagacaggtaatctcaactccgacgagataactgatataacaatttgagagaataagaagaagaagaagaagaagaccaagcttaagaatggttgcttttttatcagcttggccttgggaaaactttggcaatctc

SEQ ID NO: 152888 - DNA, 262 bp, Arabidopsis thaliana columbia
aatcacaagccaatcttatgggaattattagcacacagtaagttacttgaacttacaaccacgtattaaaagtaacatagtaaagagaacacacacacacacacactccaatcttattggaagtttcatgtagtatatatgactaactggttttcactcgggggtggtgatgggcacgatagtgactccgatgctgtgaacaacatcactagcttgtccatggaatccaacgatcttgtggccttcctcccaagcgagaact

SEQ ID NO: 152889 - DNA, 239 bp, Arabidopsis thaliana columbia
ggggtttacacgaaatgatcatcataattatataaggatagaaaagtaaatcataacacaaaacgatagatagaaaacgaaacagagtagcaacagttacatggtgacccaataccacttaaaggtcttattatgaaccagtacgaagactctgtagtaataatacagagattcaaacaaacacaacaccaacgtcggaagatatttatgtagaaaggtatgtgacttacctctttatt

SEQ ID NO: 152890 - DNA, 132 bp, Arabidopsis thaliana columbia
cgcaagaaccttgtgaagaagtgtcttgagctcttctttgagattgctgagaacaaggaggactacaacaagttctatgaggctttctctaagaacctgaagctcggtatccatgaggactcccaaaacaga

SEQ ID NO: 152891 - DNA, 374 bp, Arabidopsis thaliana columbia
gagagagataccgtatcttggaatgctattatctctgctcattctaaaaattctaatggtttaaagtattttgagcagatgcaccgtgctaatgctaaaccagatggtatcacgtttgtctcggttttatctctctgtgctaatacaggaatggtcgaagatggagagaggttgttctctttgatgtcaaaggaatacgggatagacccgaagatggaacactatgcgtgtatggtgaatctctacggaagagcaaggatgatggaagaggcttactcaatgattgttcaagagatggggcttgaggctggtccaactgtttggggagctctgttatacgcttgttaccttcatggaaatacagatataggaga

SEQ ID NO: 152892 - DNA, 346 bp, Arabidopsis thaliana columbia
atttgtctgaaaaaatctttgtgcgaagcatgaaaaatgtcgtcgacccatcaggtagtttcttcgatgatctcttgttcctcatccactttcttagccccttcaaattttaatctcagaactcgaaatgcttgcttacccatggcaaaacgggtcaatacttgcaaatgtgttgctacgccgcaagagaagatcgagtataagaccaaagtgtcacggaattcaaacatgtccaaactttaggctggatacctattcccggagattgcaagaagaaggtctgcacacttgttggaatatccagatgcacaaggtataagtcttggaataggcgacacaactgagc

SEQ ID NO: 152893 - DNA, 242 bp, Arabidopsis thaliana columbia
ctctctctctctctgcctcctttcggattcaaatctcagatctagctcaaccatggcgttgctcgtcgagaagacctcaagtggccgtgaatacaaggtcaaagacatgtctcaagccgatttcggtcgtctcgaactcgagctcgccgaagttgagatgcctggactcatggcttgtcgtaccgaattcggaccttctcagccattcaaaggcgctagaatcaccggatctcttcacatga

SEQ ID NO: 152894 - DNA, 250 bp, Arabidopsis thaliana columbia
  unsure (1)..(250): unsure at all n locations
ggctgatgaagagtgctattggtgaaagaatgactcgcaaagaccattctgatgtgtccaaccagctatacgcaaattatgcaatcggaaaagatgttcaagccatgaaagctgttgttggagaagaagctctgtcttccgaggatctgctgtatttagagtttctggataaatntgaaaggaagtttgtgatgcagggcgcatacgatacaaggaacatctttcagtcgcttgacttggcatggacact

SEQ ID NO: 152895 - DNA, 369 bp, Arabidopsis thaliana columbia
ctttgactcctgcaacacaatcccaaaagctagaaggagctggtagtgaggcaggaactttatgggatgatggtgctttcgacggtgtaaggaaagtgtctgtaggacaagcccaagatggtattggagcggtctcgtttgtgtacgacaaagcaggtcaggttgtagaaggaaaagaacatggaaaacccacattgcttggatttgaagagtttgagcttgactatccaagtgaatacatcacggcagttgatggcacctacgatgcaatctttgggaatgaaccaatcgtaaatatgcttaggttcacgactaataagcgagtatctatttcttttggaataggagctggcacaaccttcgaattca

SEQ ID NO: 152896 - DNA, 330 bp, Arabidopsis thaliana columbia
tggaacggtgccagtgggacgtgttgagactggtatgatcaagcctggtatggttgtgacctttgctcccacaggattgaccactgaggtcaagtctgttgagatgcaccacgagtctcttcttgaggcacttccaggtgacaacgttgggttcaatgttaagaatgttgctgtcaaggatcttaagagagggtacgtcgcattcaactccaaggatgaccctgccaagggtgctgctaacttcacctcccaggtcatcatcatgaaccaccctggtcagattggtaacggttacgccccagtcctggattgccacacctcttacattgc

SEQ ID NO: 152897 - DNA, 262 bp, Arabidopsis thaliana columbia
ggtccctccacttagagagaagcagacagaacataactaaaatcgagaaaaatggcaaacagtggtgaaggtaaagtggtgtgtgtaacaggagcctccggttacatcgcctcatggctcgtcaagttcctacttagccgtggctacactgttaaggccttcgtccgtgatccaagtgatccgaaaaagacacaacacttaagtttactaggaggggcaaaggaaagacttcacttggtcaaagcagaccttttggaacaag

SEQ ID NO: 152898 - DNA, 228 bp, Arabidopsis thaliana columbia
  unsure (1)..(228): unsure at all n locations
ctgagttctttgtttcttccatcgaaatcgaaaaaagctaagatctttgcgttttgaaacgatggcggtagaacataagcatgatgaatctgtgatcgctcctgagccagctgttgaggttgcggagagagaatcagtgatggataagatatcggagaagatccatcacggcggtgattcttactcgncttattcatcttctgatgatgaacacttgacgaagaagac

SEQ ID NO: 152899 - DNA, 214 bp, Arabidopsis thaliana columbia
aaaatggcttcgatgggtggattacacggtgcatctccggcggttcttgaaggaagcttaaagatcaatggctccagccgtctgaatggctctggaagagtggcggtggctcaaaggtctagacttgtcgtcagagctcagcagagtgaggagacttctcgccggtccgtgattgggctttgtgctgctggtttagctggtggctcgtttgttc

SEQ ID NO: 152900 - DNA, 272 bp, Arabidopsis thaliana columbia
atcaagtccaagacaccggaggtcatgctcgcctacaatctctcgccgtccttcaactgagacgcttacggtatgacagatcagcagatggttgagttcattccgcggattgctaggctcggatattgttggcagttcataacgcttgcgggtatgcatgcggatgctcttgtggatgatacatttgcaaaggattacgctaggcgcgggatgttggcttatgtcgagaggatacaaagcgaagagagggcccatggcgttgacactttggc

SEQ ID NO: 152901 - DNA, 190 bp, Arabidopsis thaliana columbia
gtttaatcatataaccaaagccaataacaccaaattccaaatatccatacaaagaagcaaaccccataaaatattgccccaaaccttttaacccaattattacgttgaagaagagaaatacaataacaaagatacatttattatctggttctggctttttttttcttttactcgggtgtccaaagatata

SEQ ID NO: 152902 - DNA, 259 bp, Arabidopsis thaliana columbia
gcgcaataaaaaaatggcgaatacccaactcaaatccgatgcaatcatggacatgatgaaggaacatctttccaccgacgccgggaaagaggtcacagagaagatcggtcttgtttatcagatcaacattgctccaaagaaattagggtttgaagaggttacttacatcgttgatctgaagaaaggcgaagtcaccaaagggaaatatgaaggagggaaagtggatgctacgttctccttcaaggatgatgattttggc

SEQ ID NO: 152903 - DNA, 234 bp, Arabidopsis thaliana columbia
ctgtgttctttgtttcttccatcgaaatcgaaaaaagctaagatctttgcgttttgaaacgatggcggaagaacataagcatgatgaatctgtgatcgctcctgagccagctgttgaggttgtggagagagaatcgttgatggataagatatcggagaagatccatcacggtggtgattcttcttcgtcttcttcatcttctgatgatgaagacgagaaggaagaagacttaag

SEQ ID NO: 152904 - DNA, 337 bp, Arabidopsis thaliana columbia
cgacagtctcaacaatcaaaagcttcaaatttttcattgtcaagaattctcaaaatggctagaacaaagcaaacagctagaaaatccaccggaggaaaagctcctagaaagcaactggcgacgaaagcagcaaggaaatcagctccagccaccggaggagtgaagaagccacacagattccgtccaggaacagtagcgttacgtgaaatcagaaagtatcaaaaaagcacagagcttttgatcctgaagctttcttttcagagattggttcgtgagatagctcaagatttcaagacggatcttaagttttagagtatagcaattgtagctttttaaa

SEQ ID NO: 152905 - DNA, 339 bp, Arabidopsis thaliana columbia
cggacgcgtgggtaggtttttaagtcgcacctctctctctcactgccgcatcttttcttagggttcttgtttcgctatctcttaaacacaaacagctctgtccgaataatctctcttcaagtacctcttttttctgattctgtatatcgccatgaattactgatttccctctctataaacccatcaaagtaaaccaatttctcctgtgacttgtacctaactcgatcttaccagactggtgatggcgtctttgaaccctttcgatcttctaggagatgatgctgaggatccaagccagctcgcttgggctttgtctcagaaagtcgagaaagctgctgc

SEQ ID NO: 152906 - DNA, 282 bp, Arabidopsis thaliana columbia
gtgccagaaatgcctcacacgctaacttgatcgtcccaagggccacaatgatgactcaatgcatggacttgcggcttagaattcctactaatgttttgtcacctgacgcgattggaaacttacaaggggtattctttctcaaaagaggcccagggagcgagatagaaatcagtgaagtcgtggctgagtttaagaaggagaaagaagagttcaatgagatgatcaaagaaaatgttaatggcggccatactaacactacacttggtcagaaaatcatgagtg

SEQ ID NO: 152907 - DNA, 195 bp, Arabidopsis thaliana columbia
tagaaaccctacaaaaaatcatcatggtcatcatcatcttcatgctctcttgatcccatatccatttcaagggcatgtaaacccatttgtacacttagccatcaagctcgcgtcacaggggatcaccgtcactttcgtcaacactcattacattcaccaccagatcacaaacggctccgatggagatattttcgc

SEQ ID NO: 152908 - DNA, 176 bp, Arabidopsis thaliana columbia
taaaaattaaacaaaaaaataaatattttgcttgtgaccttatttaatcgaccaaacgtgggcgattatgattctgggggatggtgtgaaggttcgatggacggtactaccaaatctttaccaagattttgacgagagaagctcttatctttgtggctgatttacatagagagttt

SEQ ID NO: 152909 - DNA, 194 bp, Arabidopsis thaliana columbia
gcttgggaaacttccccggagattcatacgtcgtcgtcgtctttagtatctgtatcgtcaatggcgttgctgaagtctttcatcgatgttggctcagactcgcacttccctatccagaatctaccttatggtgtcttcaaaccggaatcgaactcaacttctcgtactgccgtcgctatcggcgatttggttct

SEQ ID NO: 152910 - DNA, 199 bp, Arabidopsis thaliana columbia
ctcggttcgagagacaacatcaaatcatctgtgtcttcgggattcacgaaacggagaagaaaacaacaatggcggatcaattgactcgcgatcagatctctgagtgtaaaggagctgttagcttattctacaaggctggtgctggttgcattaccaccaccgagctgggttctgagatgcgttaacctggacacaaccc

SEQ ID NO: 152911 - DNA, 401 bp, Arabidopsis thaliana columbia
cgcagatcctattgaaagacaagagaggatcctaggaaaggaaacaacccgatataaaatcccaggtgcagtggaggcattctccagaagacacccgactacaacttcttcgcctcgagatcgttctagatcaagaaactcagacgacggacctttctctaagcagacacatggagactccgaaagagcaaacagttcctcaagatatagagcatcttcttctaggaaagccgttgctgcttcaagctcccggccaagttctgcaggtggaccaagcgaaagccgaacttcaagtcgtctggtttcctcaagcggtggtggtggcagcggcagtggaaatggccgtccctcaactagccagagagtgcaagctggtttgaattcaagactttttttttttt

SEQ ID NO: 152912 - DNA, 182 bp, Arabidopsis thaliana columbia
ctcaaagatatcaagtggagtaggtttgattaaccaaaagggttcaagcttgagggtttctttgatcagaatcctgtgcttcaagaacactgtcttgaccaagacatatcacatgattgatgaagatgagcctatccttgagaaggccctcggtacggagattgagtggtattctggtaagt

SEQ ID NO: 152913 - DNA, 439 bp, Arabidopsis thaliana columbia
aaggagttgaagctgagagcatcgaggagatgtacaagaaggttcacgcagctatccgagcagaacccaaccataagaaaaccgagaaatctgctcccaaggaacacaagaggtacaacttgaagaaactgacttacgaagagaggaagaacaagttgatcgagagagtgaaggcattaaacggagcaggtggtgatgatgatgatgaggatgatgaaaagtaaaataccaaacaaggcttctttggctcatgcctttaggagctttttacttaattattttcagactaaaacactcaagttttggttttacattttagttgggtttgaaggttttggattcgaggatatggtttggttgtagaatttatttttattttttatttcaccaatttgtatttttaggtaattatttatgttttattttatttattattata

SEQ ID NO: 152914 - DNA, 194 bp, Arabidopsis thaliana columbia
caagagacaaaaaaaaaaggaaggcgcgtcagtgatggagaagattattgacgtagcttatggcgcatcagtgaaggtgggtttgacgttgttggagatgaatctgttgccggatattgtcattaggcggctcacacgtctgcttctggccggtcgtctccgttccggttacaaacccacggcggagatgcaac

SEQ ID NO: 152915 - DNA, 406 bp, Arabidopsis thaliana columbia
cattgctctctagattaaaagcttctctctctctctctctctctctctctctctctctctctctctctctcttttggactttctcaatccatatccctctctctgttttttctaatttgagcctctaaagtctcctcgttttgttcatgttgttgttcaagtgaagaagctcaattatgtttacaacattgttgtaatttcaaaacttcataagaatttctctgataataaagaaaaagctggagtagaactattttaaagtgtcatcatgaagagactaagcagctcagattcaatgtgtggtctaatctccacttctacagatgaacagagtccaagagggtacggaagtaattaccaatctatgcttgaggttacgatgaagatgctacactaatcgaggaat

SEQ ID NO: 152916 - DNA, 370 bp, Arabidopsis thaliana columbia
gaaaatgttctccattaaaaagagaagaagcagaataaaaaatttatatataacttttcagaaagcaaaaaaaaaacaaagaaaggaaaaactcgaaaacaatggttgatggtacaatacaacatactattgcatttggttatttattatatagatatatatatatccatcggagaacttgtttatgcaactgtcgaccgccgtcttcagctgctttctatgctttctttccttgccgtttctcttcttcgatcttggccttaatgatagagtacattgcaactccagcaatggctattcctgttcctatacctgtctgtgtcgatatcttgtttccgaagataacgatggagaaaccgatcacgaacac

SEQ ID NO: 152917 - DNA, 256 bp, Arabidopsis thaliana columbia
cttagaaagaaaagaacttaaatcaaaatacttaatagcatggcgatacatttatacaaaacttctaccccgagcacacgcaatggagccgtagacagtcaagtgaaatccaatccacgaaataatttgatctgtgggcagcatcattgtggtaaaggtcgtaatgccagaggaataattaccgcaaggcatagagggggaggtcataagcgtctataccgtaaaatagattttcgacgaaatgcaaaagacatat

SEQ ID NO: 152918 - DNA, 315 bp, Arabidopsis thaliana columbia
cgaacattgggatgatggatagtgcttactttgttggaaggaatgagattctgagttggatcaatgaccgccttcatctcaatctctctcgtatcgaagaggctgcatcaggtgctgtgcaatgtcaaatgttggacatgacttttccaggagttgtgccaatgcacaaggttaactttgaagcaaagaacgagtacgaaatgatacaaaactacaaggtcatgcaagaagtcttcaccaaattgaaaattacaaagccattggaagtcaacaggcttgtcaaaggccgaccactagacaatttggagtttcttc

SEQ ID NO: 152919 - DNA, 292 bp, Arabidopsis thaliana columbia
ctgacacatggactgtgagataaaggctgactctctctccagttattatgctcatacatcgattcttagagttcaaaatggtgtgatcaagtgcagcaccccactattgcgcataaagctgcctgacagattatgcgttcaagtgtatccaaggacgtttaagtgggttaccagaggacttctatgtatcaaagacatgcgccctacggaaactactccaatgctgcattacaatttcctgcgacatccacgatgtcggcaacaactgcttatcccgtgtgtgttcaaaccc

SEQ ID NO: 152920 - DNA, 385 bp, Arabidopsis thaliana columbia
cgcttttgagatatcgatcttacgaagaagcaaatatggcggtcccattgcttaccaagaaggttgtgaagaagaggtctgctaagttcatcagaccccagagtgaccgtagaatcaccgtcaaggaaagctggaggaggccaaagggtattgattcaagggtgagaagaaagttcaaaggtgtgactttgatgcccaatgttggttacggatctgacaagaagactcgtcactatctttccaatggattcaagaaattcgttgttcacaacacaagtgagctcgagtttgtgatgatgcacaacaagacttactgtgctgagattgctcacaacgtcttcactaagaagagaaaggcaatttgtgagagagcttctcagctaga

SEQ ID NO: 152921 - DNA, 357 bp, Arabidopsis thaliana columbia
aaaaaccaaaagaagaagagaaacaacaagaagaagtaatggcttcctctatgttctcctccaccgctgtggttacctccccggctcaagccaccatggtcgctccattcaccggcttgaagtcatccgcttctttcccggtcacccgcaaggccaacaacgacattacttccatcacaagcaacggaggaagagttagctgcatgaaagtgtggccaccaatcggaaagaagaagtttgggactctatcttacctccctgaccttagtgacgttgaattggctaaagaagttgactaccttctccgcaacaagtggattccttgtgttgaattcgagttggagcacggatttgtgt

SEQ ID NO: 152922 - DNA, 358 bp, Arabidopsis thaliana columbia
aacgcaagctaccacagatttagagtttatccaccttatctttcgccgagatccaacaatggctgatgtggaaccagaggttgcagcatcaggagttccaaagaagagaacgttcaagaaattcgccttcaaaggagtcgatctcgatgctcttctcgacatgtctaccgatgatcttgtcaagctctttttttcccgtattcgcagaaggttctctagaggattgacgagaaagcctatggctttgattaagaaactccgcaaggcgaaaagagaggcaccagctggtgagaagccagaaccagtgagaacccacttgaggaacatgatcattgtgcctgaaatgattggaagcatt

SEQ ID NO: 152923 - DNA, 213 bp, Arabidopsis thaliana columbia
aaaacaaaaagaacaaaatttgttatctctctttcctctcattttgaccctcttcacttctttttgatccctaaatggaacacgagagcaagaacaaggtggatgggatggagatggagaaaggaaaaaaagagagtgggtcgagaaaaggacttgagttaacgatgagagttttggctttggtcctaacaatggtagctgcgacagtacttg

SEQ ID NO: 152924 - DNA, 381 bp, Arabidopsis thaliana columbia
atcagatctagatctaaaagaagagcgtcttcataaacgcccttcttcttcttcgtcttgttccctgcaaatctagtttctagatcttttctttcttccgcgaaacgaaaatgagagagtgcatttcgatccacattggtcaggccggtatccaggtcggaaatgcttgctgggagctttactgtcttgaacatggcattcagcctgatggccagatgccgagtgacaagactgttggcggaggtgacgatgctttcaacaccttcttcagtgagaccggtgcagggaagcacgtcccacgtgctgtctttgttgatcttgagccaactgtgatcgatgaggtcaggacttgtacttaccgtcagcttttccaccctgagc

SEQ ID NO: 152925 - DNA, 473 bp, Arabidopsis thaliana columbia
attcaaagagtattacaatggagatactttgtcttcttatgattaccctctcttccctaattacatggctaatactcagtcttctaaagccaaggctcggtctcaaagtgcgccgaagcagagacctcctgagatctatgagaagcagatgagtgggaggagaagatcttcgatggaagcaccgaggaataacggtgtcccgagagctgtaaggatgcagagatcttcatctcaactagggtcaaacacagccaaggaaagtcaacaacatcatcatcatcagtactatccgtggatggcgataaagctcgatagatctaatatttcgcttatggagagcgaatgcggatctacaagtaccgttatgactaataccaactacggtagacatgttgatgttcagggaaacaacaacatgtactgaacactgtgctttagaatttgagagattgctggaaaaataggcaagccta

SEQ ID NO: 152926 - DNA, 347 bp, Arabidopsis thaliana columbia
gtggttgatctcgttgtgcaggtctcaaagaagacatttgctgaggaagtcaacgctgctttcagagattctgcagagaaagagcttaaaggtatactcgatgtctgcgatgagccactagtgtccgttgatttcagatgctcagatttttcaacgaccattgattcatcactcactatggttatgggagatgatatggttaaagtgattgcttggtatgataatgaatggggttactcacagagagttgttgacttggctgacattggtggcaacaactggaagtgatttcatcaaactttggttcatgtttttccaattttttctctttctcttttttacattat

SEQ ID NO: 152927 - DNA, 349 bp, Arabidopsis thaliana columbia
ccaaatggggaatgatcttctctgatatcataaagaaagtcagcgggaactgcgaggtctctcagagatccacaatggcaatcaagggtcgtaatgtatttatcaaagatctctccttggacggtgctcttattgtagattccattgatgatgcagaggtaaaacttggaggtttgataaagaacaatggttggaccatggagagtgtagattacaaggacacatcggttccagaagaaataagaatcagaggttttagattcaacaaagtggagcaactcgaaaagaagttaactcaacctggcaaattttctgttgaagattgaagttatctttgcacatttatgtg

SEQ ID NO: 152928 - DNA, 432 bp, Arabidopsis thaliana columbia
ctttcttcaccaaatcgattcttcttcaaccatgtcttccttcacctccaaattcgccgatgagctgattgctaacgctgcttacatcggaacacctggaaaaggtatccttgcggcagatgaatcaactggtactattgggaaacgtctcgctagcatcaacgttgagaacgttgaatccaacagacgtgctcttcgtgagcttctcttcactactcctggagctcttccttgcctcagtggtgttatcctctttgaagaaactctttaccagaagagctctgatggtacgccttttgttgatatgttgaagagtgcaggagttttgcctggtattaaggttgataagggtaccgttgagcttgctggaaccaatggtgagactactactcaaggtcttgatggtcttggtgaccgttgcaggaaatacta

SEQ ID NO: 152929 - DNA, 317 bp, Arabidopsis thaliana columbia
gagagagatagagatattatggggaagcaaggaccttgctaccactgtggagttacaaacacacctttgtggagaaatggaccaccagagaagccggtattgtgcaatgcgtgtggatcgcgttggaggacaaagggaacacttgtgaactacacaccgcttcatgctcgtgctgatggtgatgagaatgatgatcatcacaggtttcaaagaatgaagagcatttttttaggcaataagaacaaagagataaagatgctcaagaggaaagcaattcaagaaaacatcattattaaaagaccggtctttgaattcag

SEQ ID NO: 152930 - DNA, 449 bp, Arabidopsis thaliana columbia
  unsure (1)..(449): unsure at all n locations
gttttgttcctcgctctccttctccttgcatctcctctgcttcaagttgctagatgtcaatcggatgccgaggatcattcaagtcttgttgacgatgttgtgggagaaaacactgatgatgcggttgaggaagatgaccatgatttggatatgaacttgtcctcatttccaggagttgagactgtttgtgttttccccaaaaacagtgccaaattggttccagctggagaagagactgagctccttgttggtcttaaaaatgaaaggaaaactagagtaggtgtgatgggaattagggccagcgttcatcttccttatgatcataagttgttggttcagaatctaaccatgttgagacttaacaatgcattcattccaacgtctcttcaagcaacatttccatacatctttgcagtcagccagtacttgcagnctggagcatttgatct

SEQ ID NO: 152931 - DNA, 483 bp, Arabidopsis thaliana columbia
aagcaatatcatttccaatttataaaagttaaagccatggctgcatctttctctgtcccctctatgataatggaagaagaagggagattcgaagcggaggttgcggaagtgcagacttggtggagctcagagaggttcaagctaacaaggcgcccttacactgcccgtgacgtggtggctctacgtggccatctcaagcaaggctatgcttcgaacgagatggctaagaagcttgggagaacgctcaaaagccatcaagccaacggtacggcctctcgcaccttcggagcgttggaccctgttcaggtgaccatgatggctaaacatttggacaccatctatgtctctggttggcagtgctcgtccactcacacattcactaatgagcctggtcctgatcttgctgattatccgtacgacaccgttcctaacaaggttgaacacctcttcttcgctcagcagtaccatgacagaaagcagagg

SEQ ID NO: 152932 - DNA, 208 bp, Arabidopsis thaliana columbia
aaaacctatctctctctctctctctcgccgccttcctctcaccctcttcgcatagcttcactttcgccgatggctctacctaaccagcaaaccgtggattaccctagcttcaagctcgttatcgttggcgatggaggcacaaggaagaccacatttgtaaagagacatcttactggagaagttgagaagaagtatgaacccactattg

SEQ ID NO: 152933 - DNA, 458 bp, Arabidopsis thaliana columbia
  unsure (1)..(458): unsure at all n locations
ggaacagatacgattgagatgcacgtaggtgcagtagagcctggtgagcgtgctattattattgatgacctcattgccacgggtgggactctcgctgctgcaatccgactacttgaacgagtaggagtgaagattgttgaatgtgcttgcgtaattgagttaccagagcttaagggaaaggagaaactaggagagacgtcgctatttgttcttgtaaagtcggctgcttaacaagaaactggaagagaaggttattggatcgagtgttgatgctatttttcatgtatggtgagacattttgcgtgggatttgatccttgttgtttcaacttatcataattggttcagactagaaaatggcatttgaatgtcaagattcgattgcagtttcctattgttccacttaaaatccccgattaataaggtgttatgnggtttatttatagaatcaagttgaat

SEQ ID NO: 152934 - DNA, 446 bp, Arabidopsis thaliana columbia
attgaacgtgaatttgaagctgctacaaatagtcttaagcaactaaaccttgacgatttgagtgaaggagatgacagtgcagaatctgcaaggagaaatagtatgcttgaagctatcgaacgcgagtttgaagctgctacaaaaggtcttgaagagctaaaggctaatgattcaaccggcgacaaggatgatgatgaacacgttgcaaggagaaaaattatgcttgaagctattgaacgcgagtttgaagccgcgacaaaaggccttgaagagttaaagaatgaatcagaacaagctgaaaacaagagaaacagtatgttggaagcattcgaacacgaatttgaagctgctacaaatgcaaaggctaatggagaaaactctgcaaagaatccatcaaccataagtactacagtgcagaaatcttctggcggatacaatgctggttt

SEQ ID NO: 152935 - DNA, 447 bp, Arabidopsis thaliana columbia
attgaacgtgaatttgaagctgctacaaattgtcttaagcaactaaaccttgacgatttgagtgaaggagatgacagtgcagaatctgcaaggagaaatagtatgcttgaagctatcgaacgcgagtttgaagctgctacaaaaggtcttgaagagctaaaggctaatgattcaaccggcgacaaggatgatgatgaacacgttgcaaggagaaaaattatgcttgaagctattgaacgcgagtttgaagccgcgacaaaaggccttgaagagttaaagaatgaatcagaacaagctgaaaacaagagaaacagtatgttggaagcattcgaacacgaatttgaagctgctacaaatgcaaaggctaatggagaaaactctgcaaagaatccatcaaccataagttctacagtgcagaaatcttttggcggatacaatgctggttaa

SEQ ID NO: 152936 - DNA, 94 bp, Arabidopsis thaliana columbia
ctcgtctctctcatctgagaagctcgtttctcccacacggcggcgctttaagaaccggcgtttcgtgtagctggaatctcgaaaagagatgtac

SEQ ID NO: 152937 - DNA, 164 bp, Arabidopsis thaliana columbia
gggtttcgtcactcgccgataatcctctctctctagaaaacatgactgccgaacagaaagtggagctcgccgccaaattggaagagcagaagatcgatcttgataaacctgaggttgaagatgatgatgacaatgatgaggatgattccgggacatgacaggcg

SEQ ID NO: 152938 - DNA, 451 bp, Arabidopsis thaliana columbia; identical to SEQ ID NO: 130916

SEQ ID NO: 152939 - DNA, 452 bp, Arabidopsis thaliana columbia
atcattaccaaatcatcaacttaatcgtttctctcaaatttagggttttctcttttctcgaaagtcttgcggttttctgaatcatctctatctggtttgagggtttcgtttgatatctggagaaaggggtttctggaaacaaggagttcataattcgcgatcttgatctatcgatcttcatttatatataaaagcgtgaatgagattatgatggagtcgaaaggtggtaaaaagaagtccagcagtagtagttccttattttacgaagctcccctcggttacagcattgaagacgttcgtccaaacggtggaatcaagaaattcaaatcttctgtctactcaaactgctccaagaggccatcctgagtaccagcgtgcaccgatcttcataatatagttatagctttccttactttccagtttataattttcttctttcaaagctccttttc

SEQ ID NO: 152940 - DNA, 384 bp, Arabidopsis thaliana columbia
ccgtcatctaaccatcctatgtacggttaccctaagatcggtcaacaaaccggtcccggcccacagtttttctctccgccggagagaaactcttcgtttcaacataacacttctccttcatctggaataggaatcagagtgaatttgaagcctgagtatcggattactccgccgcctcagttgttgcctcgagtaggagatattcatcggagtagttttcagttcgatttcggattagagaggaaagttcttgcggaggcagagaaagataatccagattggagtaaatttgggagtgagaatccaccggctaagtttcatgaaccatcaccttcttcagtgggtcaaatgcagggtgtagatcatgtagtgatgaaatatact

SEQ ID NO: 152941 - DNA, 187 bp, Arabidopsis thaliana columbia
ggaaactctaaggttcaattcagcaaggagactaacaacctcaccaacgttcactcttacaagcactctggtcttgcaaacaaaaagactgtgaccatccaggccgctgacaaggaccaagctgttgtgctcgccaccaccaagaccaagaagcagaacaagcctaagctctctgtcaacaagtcta

SEQ ID NO: 152942 - DNA, 254 bp, Arabidopsis thaliana columbia
cggacgcgtgggaggagatttcgacggtgcaaaggcttacaaagacagtaaagtctgcaatatgttgacaatgcaagagtttcacaggcgtttccatgaagaaactggagtcactttcgcttcgctttaccccggttgcatcgcctccacaggtttattccgagagcacattcctctcttccgtgccctcttccctccctttcagaagtacatcactaaaggatatgtctccgaaacagagtcaggcaaaagac

SEQ ID NO: 152943 - DNA, 433 bp, Arabidopsis thaliana columbia
tgcaaactggagttttgcccggatagaaggagccggttggggatgggctggagtgatctggctatacagtttcctaacgtacatccctcttgacttactcaagtttggaatccgctatgttttgagtggaaaagcttggttaaatcttcttgagaacaagactgccttcacgacgaagaaagactatgggaaagaggaaagagaagctcaatgggctgcagctcaaagaaccctccacggacttcaaccagcagagaaaaacaacatctttaacgaaaagaatagttacagtgaactctctcagattgctgaacaggctaaacgccgagctgaggttgtcaggctgagagagataaatacattaaaagggcatgtagagtcagtggtgaagcttaaaggacttgacattgacacgattcagcaacattacacc

SEQ ID NO: 152944 - DNA, 169 bp, Arabidopsis thaliana columbia
  unsure (1)..(169): unsure at all n locations
cgtaattnatttatagtgaaagaagaagtacgacttgtcattagaaagaaagagataacaggaacggaaacataggtgaacactctttttttagggtttattcaagggcccaaaacacataccaccaaagtttttcttgcaacgaaacattggactttttaagcataac

SEQ ID NO: 152945 - DNA, 272 bp, Arabidopsis thaliana columbia
tttctctttttcttaaaatccataatccaaccaaaagaagaaaaaaaaacaagaatcttgatagcaaatgaatcaagaaggtgcttcacatagcccatcctccacttccaccgaaccagtccgggcacgttggtcacctaaaccggagcaaatcttgatactcgaatccatcttcaacagtggtactgttaacccaccaaaagatgaaacggtgaggataagaaagatgcttgagaaattcggtgctgggggagacgcaaacgtcttctact

SEQ ID NO: 152946 - DNA, 271 bp, Arabidopsis thaliana columbia
cttaaacgttttactttgtgctgcactactcaacctcaatggccgcctcaacaatggctgtctcctcccctgccttcgccggtaaggccgtcaagctttcccccgcggcatctgaagtccttggaagcggccgtgtgacaatgaggaagactgttgccaagccaaatggcccatcaagcaacccatggtacggatcttaccgtgtcaaggacttgggtccattctctggcgaatcaccgagctaccttaccggagaagtccccggagacta

SEQ ID NO: 152947 - DNA, 386 bp, Arabidopsis thaliana columbia
aagccttcacttttcgtccaagccgctaaaaatgaagcacaacaacgttatcccgagctcacactttcgcaagcactggcagaattatgtcaagacttggtttaaccagcctgccaggaagacaaggagacgtgttgctagacagaagaaggctgtgaagatcttccctcgtcccacctctggtcctcttcgaacctgtgttcatggtcagacacttaagtacaacatgaaagttagagctggaaaaggaatcactcttgaagagcttaaagttgcttgtattccaaagaagttggcttcaacaattggaatttctgttgatcaccgacgcaaggaccgttctttggaggggctttaagtccaatgtccaaagggtaaagacttac

SEQ ID NO: 152948 - DNA, 356 bp, Arabidopsis thaliana columbia
tgccgttgcacatgggtgtactggaaaaggaaatgaccaggttcggtttgagctcaccttcttttcattaaaccctgaacttaaagttgtggcaccatggagagaatgggaaatccaaggccgagaagatgctattgagtatgcaaagaagcataatgttcccgtcccagtgacaaagaagtccatttacagccgggacagaaacctgtggcaccttagtcatgagggtgatctattggaagatccagcaaacgagccaaagaaagatatgtacatgatgagtgtggatcctgaagatgctcctgatcagcctgaatacatcgagatcgggatagaatctggactttcagtggcgc

SEQ ID NO: 152949 - DNA, 487 bp, Arabidopsis thaliana columbia
  unsure (1)..(487): unsure at all n locations
caaaggtattgttttgtgcccactcgtatgcctcgttgtgactataggcaactccgcggtcatactgagtcttctaccagtccacatcgtttcgactttctattcaatcgtgagtgccaaacaagtaggaccaatcttgaagatctttctatgcttatgtcttcctgctgccatcattctctggcctattgttggtattttaggaagtgttttgggaggagctttatatggtttcttctccccaattttcgccacctttgatgctgttggtgaaggcaagccttaccagtttttccattgcttttatgatggaacttggagcaccatgcaacgcagctttaccgttgttcgggattttaaagatgtttgctttcattcatacttctcacttatggatgagctgaaacanagctgtccggatcgaaaatattatgaaataaggctacttctactttcaggggctttagtagtttcagttctcgggata

SEQ ID NO: 152950 - DNA, 390 bp, Arabidopsis thaliana columbia
gagcttcggagctatcgaaaattctgaatctgaaaggtttgagtgaagatgtcttcagatcggaaggttctaagttttgaagaagtttcaaagcacaacaaaactaaggattgttggcttattatttccggcaaggtgtatgatgtgactccattcatggatgatcatcctggaggcgatgaagtcttgttgtcctcaacagggaaagatgctacaaatgattttgaagacgttggtcacagcgacactgcaagggacatgatggacaaatatttcattggtgagattgattcgtctagtgttccagcaactaggacatacgttgcaccacagcaaccagcctacaaccaagacaagacaccagaattcattatcaaaattcttcagttc

SEQ ID NO: 152951 - DNA, 302 bp, Arabidopsis thaliana columbia
cgcgtcacaagcaactggagcatttatcttaacagcaagccacaattctggtggccctactgaggattttggaatcaaatacaatatggaaaatggaggacctgctcctgaatcaatcactgataaaatttacgagaacactaagacaatcaaggagtacccaatagcacaagatctacccaatgttgatatttctgctgttggtgtaaccagttttgaaggacctgaaggaaaatttgatgttgaagtttttgatcccgcagatgactacgttaaattaatgaagtcaatcttcgattttg

SEQ ID NO: 152952 - DNA, 356 bp, Arabidopsis thaliana columbia
cttctctctcgatatcatctaaatctctctcgatctcaatttcgcaaaatggctgacaagaagatcagaatcggaatcaacggtttcggaagaatcggtcgtttggttgctagagttgttcttcagagggatgatgttgagctcgtcgctgttaacgatcctttcatcaccaccgagtacatgacatacatgtttaagtatgacagtgttcacggtcagtggaagcaccatgagcttaaagtgaaggatgacaaaactcttctcttcggtgagaagccagtcactgttttcggcatcaggaaccctgaggacattccatggggtgaggctggagctgactttgtttgtgagtctac

SEQ ID NO: 152953 - DNA, 410 bp, Arabidopsis thaliana columbia
cacgactccatcttctaaaattcagaatctttctttgaaacttttttcgtgtgaagaaaatggcaccaaaggcagagaagaagccggcagagaagaaaccagtagaggagaaatcaaaagccgagaaagctcctgcagagaagaaaccaaaagccggcaagaaactcccgaaggaagccggtgccggcggcgataagaagaagaagatgaagaagaagagtgttgagacgtacaagatctacatcttcaaggttctgaaacaagttcatccagatattggtatttcaagcaaagctatggggattatgaacagtttcatcaacgacatctttgagaaattggcatcggaatcgtcgaagctcgcgaggtataataagaagccgacgattacttcttgggagattcagact

SEQ ID NO: 152954 - DNA, 303 bp, Arabidopsis thaliana columbia
gcgaaactcgtcgattttcaaaaccggagctcatagactgatctcggaaagtaaatcgcagccatggcggaaaaagctgtcactatcaggaccagaaacttcatgaccaacaggcttctcgccagaaagcaattcgttattgatgttcttcatcctggaagagccaatgtttcaaaggctgagcttaaggagaaattggcgaggatgtatgaggttaaggacccaaatgctatcttctgtttcaagttcagaactcactttggaggtggtaaatcttctggatatggtttgatctatgatact

SEQ ID NO: 152955 - DNA, 380 bp, Arabidopsis thaliana columbia
aacaaagatttccacgacaaaaaaaaacttaatattaattatataaaaaaagcttgacctaaaacaaagttatttgagtttgattatttaggattgttaaggaatggattttcatcgtggaatttagtgattgtctttcagtacactaagtgagctttttttatttatattttttaagaaagattactataatgatatgttttttttacatatgatgtgaagaaatattataatttttttataatataagctatcagtatagattatttaaatgagtactctcatacggatttcaaacgttaaaaaaaaaagttgggtttgaaacttttgaatgtcttttttgttttggaaattatttataattaaatttggaagaaaaa

SEQ ID NO: 152956 - DNA, 361 bp, Arabidopsis thaliana columbia
gcggaggatctcgaactcttttaggtttcatcagggagagacaacgacggcaccggaatccgaatcgattcctccgccgtcgaatatggccggttcttcgtcatggtcggcgatgctccctgaattattaggcgagatcattcgtcgcgtggaggagactgaggaccgttggcctcaacgtcgtgatgtagttacttgcgcttgcgtttctaagaaatggagagaaatcactcacgatttcgctagatcctctcttaactctggcaaaattactttcccttcttgcctcaaattgccaggtcctagagacttttctaatcagtgcttgataaagaggaacaagaagacatcaacggtttac

SEQ ID NO: 152957 - DNA, 497 bp, Arabidopsis thaliana columbia
gtggctacaggtttcagaggcaaaagaatgcccggtttgtaaaggggaggtatctgtgaaaacagtgactccaatctatggacgtgggatacagaaaagagaatctgaggaggtttcaaacaccaagatcccttcgagaccccaagcacgacgcacagagagtttgaggactacacttaacaggtcaggtcatataccaacggaaatatttagacatttgcaggataggcttgaaagggaatctagtacaggagaaagacgcgccagaccatctcttaaccggtttatgacttcgaggggagttagagcagaggagaaccagtctagtgaagcactggttgaaccttcatcagatgagattaacgatattgatctgatcttaaataatgcccctgaaaatgaagaggaaaacgaaaaccttaagttcgtcacgtgctttggcaacccagagacgatgggcacagatgtatgggagggtgtcggcgtttactttgagc

SEQ ID NO: 152958 - DNA, 288 bp, Arabidopsis thaliana columbia
ggcgatatgtattgttgctcagtgcgaagctctttactctgattcgattcgatcctcaatcctttcatcaaaccgttttgggactgcggattaacatattaagttttcaaagcagtcaattaaggtttgtagactaattgggattttgagacggtagcggttatggacgctcctggaatcacgagtagtttaaattaagcttccgttactcaggatcttaagaaatgtggagataattctacaggtaacacaatgtttgatgcatctcaatatgctcttttttgggaa

SEQ ID NO: 152959 - DNA, 388 bp, Arabidopsis thaliana columbia
gctccttgaagtttactcacgtcctctacaatctttcgcctgcagagctttatgagcaagctattaagtatgagaaaggttcgtttatcacttctaatggagctttggcgacgctttctggtgctaagactggtcgtgctcccagagataagcgtgttgttagagatgctactactgaggatgagctttggtggggaaagggttcgccgaatatcgaaatggatgaacatactttcatggtgaacagagaaagagctgttgattacttgaattccttggaaaaggtctttgtcaatgaccaatacttaaactgggatccagagaacagaatcaaagtcaggattgtcttagctagagccttaccattcattgtttatgcacaacatgt

SEQ ID NO: 152960 - DNA, 311 bp, Arabidopsis thaliana columbia
cggacgcgtgggccagaagcctcgtcactgcttcgttcgctaacgagaatcgcgagtttgtgattgttggtggaggaaatgctgctggttatgctgctagaacttttgtggaaaatggaatggctgatggtcggctatgcattgtgaccaaagaggcttacgcaccttatgagagaccggctttgacaaaagcttacttgttcccaccagagaagaagccagcttgtttaccaggaattcatacttgcgttggaggtggtggagaaaggcaaacaccagattggtataaggagaaaggaattgaggtaata

SEQ ID NO: 152961 - DNA, 369 bp, Arabidopsis thaliana columbia
ctcagatctgagaatcatttcttcttcttctttctcactttgttcatcatcttcttctccgatctaaacaacaatggcgacaccaggagcttcctcagcaagagatgaattcgtatacatggcgaaactcgccgaacaagcagagcgttacgaagaaatggttgaattcatggagaaagtcgcgaaagctgttgacaaagacgaactcaccgtcgaagaacgtaatctcctctccgtcgcttacaaaaacgtcatcggagctcgtcgtgcttcgtggagaatcatttcatcgatcgaacaaaaagaggagtctcgcggtaacgatgaccacgtttcgttgatccgtgactacagaagcaaaatcgaaac

SEQ ID NO: 152962 - DNA, 330 bp, Arabidopsis thaliana columbia
agagtcttgacgaagcaagaatctttacttggagattagtgagagagaaatatgttgaagagatcaaagatctgatatctgagagagataatgggagaaatgacggcgaggtcttcggttttatcgtcggggatgttcagaagttaccaccggccggtgacgacggaggtgagatcactattacggtcgagagtgatgtgccaagtgtcatccgtaaaacccgccacgtattcatcgagactctccacagatattcctctcaacgagtctcctcaggcttttgtcgatgagtatttagaggataaatcaagagtattcgaagcaatgttt

SEQ ID NO: 152963 - DNA, 403 bp, Arabidopsis thaliana columbia
aaaaaactttgaagattgatttgaagaagaaagctctctctcagcgtcgtcttctcttcttcttcttcttcactgtcccacctgcaatttctactttgactcttcctcgtaccttaaaagatcgagactttcgagctatagttcgattatctctcgtgggtctcctttgtttgtctctagctttggatctatgaccgttaaaagattctctagcagagtcggaagcaggagcaatgacggtaacgaacaatttggagcgttggagcaagaatctttcatcaacaactcatcggagatacggaaagacttggtcaccggcggtgggattgaagccattgttaatcgtctgagcaaatgggttgtgtctgttctaattggttcaatcattcttttgcgacatgat

SEQ ID NO: 152964 - DNA, 384 bp, Arabidopsis thaliana columbia
gcatcgtgcacaatccgagttacgaggatgtctgtactggcactacgggacataacgaggttgttagagttcagtatgatcccaaagagtgtagctttgagagcttgcttgatgttttctggaatcgtcatgatccaaccaccttgaatcgtcagggtggggatgtgggaacgcagtatcgatcaggtatatactactacacagacgagcaagagcgcatagctcgtgaagctgttgagaaacagcagaagatattgaacaagaggattgtcacagagatacttcccgctacgaaattttacagagcagaaaattaccaccagcaatacctggcaaaagggggtcgcatgggtttaagacaatcagcttgagaaaggttgcaag

SEQ ID NO: 152965 - DNA, 252 bp, Arabidopsis thaliana columbia
tagcaatctcacttttctcttcccccactcctcatagatctctcaaagaatggcttccgcggctgttgcatcgatggttcttgaccctaaagcatcaccggccttgatggatctatccaccgcagacgaagaagatctctatggccgcctcaaatcgcttgaacgacatctagagttcaccgatatccaataagaatatgtgttagacgtgcatatgaatctcaatcgagagctgttacgagctcaagaaga

SEQ ID NO: 152966 - DNA, 367 bp, Arabidopsis thaliana columbia
acaaaagagacgagaaagagttttggcgatgaagaagaacgcactttggctactgtgcattctggtgttaccggcgatagcctgtggtaggaaaccggagaagaaggtaacaatttcatcctctgggaggaaggaagatgaccttgtaaccggtttgcccggccaaccaccggttaacttcaaacactacgccggttacgtgaatctggggcctgaacagaagcaaaaggcacttttctattggttcttcgaagctcaacaaaactcttttcgtcgtcctctcgtcctttggctcaatggaggaccgggttgctcatcaatagcctatggagctgcacaaggactaggcccttttctttgtcacgac

SEQ ID NO: 152967 - DNA, 407 bp, Arabidopsis thaliana columbia
  unsure (1)..(407): unsure at all n locations
tcctgacttcccagttcccatttcagcaatctacataaacgaccttactggggaaattgtaaccgctgctggaactgtccttgcggtttggagcatcaatggcgattgccttgctgtggctaacacatcgcagttaccatctgattcggtattatcagtaacaggctcaacatcttccgactggcttgagacaagctggtatgtaactggtcatcagagtggagcagttaaagtatggcggatgattcattgtactgatccggtgagtgccgagagcaaaacaagtagtagcaacagaacaggagggctgaatttgggtgatcaagtgccagaatacaagtngattctacacaaggtgttgaaatttcacaagcaaccagtcaccgcgctccatcttacaagcgacc

SEQ ID NO: 152968 - DNA, 413 bp, Arabidopsis thaliana columbia
aaaacctcaaaaccctaagctatgagaacaagcaaccatctcataggtttagtcaacttcctcactttcctcctctcaataccaatcctcggcggtggaatatggttaagcagccgagctaactccaccgactgtttaagattccttcaatggcctctcatcgtcatcggaatctcaatcatggtcgtatctttagctggattcgctggagcttgttaccgtaacaagttccttatgtggctatacctagtagtcatgcttctcatcatcgctgctcttatcggtttcatcatcttcgcttacgcggttacagataaaggatccggtcgaaccgtacttaaccggggttatcttgactattatcttgaagattactctggttggttgaaagatcgagtttctgatgatagcta

SEQ ID NO: 152969 - DNA, 412 bp, Arabidopsis thaliana columbia
ggtggaaacgccgccgcggaagcaatacttgctaactccaacgccagagacatgatcggagaaatcgaaaaccgatcggtttatctcctcgcgataaaaaccgacgtagaaacgcaaggagatttcataaggttcttgatcaaagaagtcggaaacgctgcgttttcagacattgaagacgttgttcctttcgtcaaatggctcgacgacgaactctcttacctggttgatgagagagcagtgttgaaacatttcgagtggccggagcaaaaagctgatgctttacgtgaagcagcgttttgttatttcgatctaaagaaactcatatcagaagcttctcgtttccgggaagatcctcgtcaatcttctagctctgctcttaagaaaatgcaagctttgtttgaaaagttag

SEQ ID NO: 152970 - DNA, 406 bp, Arabidopsis thaliana columbia
  unsure (1)..(406): unsure at all n locations
attggatttgctgagtaacggtgcaatgtctcgctaccagtctcattcctttgatgacggagaaattaatccttttgcgaatcctacaagtgtcccagctgcaacgtcaaagctttctcctcttccccctgagccgtacgaccgtggtgccacaatggatattcctcttgactctggaaaggatctgaaagctaaggagaaggaactccgggaaaaggaggctgaattgaagaggcgggagcaggaaatcaagcggtaagaagatgctatagcacaggccggaattgtgatagaagagaaaaactggccaccgttttttcctctcatccatcatgacatttcaaatgagatacccattcatctgcagagaatccaatatgttgctntcacatcaatgctgggtctt

SEQ ID NO: 152971 - DNA, 370 bp, Arabidopsis thaliana columbia
actctctttaaaagaaattcgtaagtactatcaagaagcagaagatggcccaaaaggtggaagcacaaggagggaaaggagccaacctatgggacgatggatcgacacatgacgccgtgaccaagattcagctcgcagcaggcatagacggaattcaatatgttcagtttgattatgtcaagaacggacaacccgaacaagctcctcttcgtggtaccaaaggccgtgttctcccagctgatccgtttgtgattaaccatccagacgaacatctagtttctgtagaaggttggtatagccctgaaagtatcattcaaggaattaagttcatcttcaacaagaagacttctgatgtcattggatccgatga

SEQ ID NO: 152972 - DNA, 385 bp, Arabidopsis thaliana columbia
aaaaaaagagagaattaaagtcattcattatttggggaatggagaagaagctcctttcctacagacgccatcattaacaacatcctcttaagcttctgcgattctctccgtttgtcggaagatttcacgacgattcttcaatccttatccgaaccggagaaatcatgtcggacgctttgatcaatggattggctggagctggtggtgggatcattgctcagcttctcacttatcctcttcaaactgtaaatacgcgccaacagacggagcgggatctgaagagggagaagaggaaacttggaactatcgaacacatgtgtcaggttgtcaaacaagaaggatgggagaggttatatggtggattggcgccgtcttttgctggaac

SEQ ID NO: 152973 - DNA, 289 bp, Arabidopsis thaliana columbia
ttttcaacatcaatgccaatattgtcaagactcttgttgaagctgttgctgagaattgccctaatgctttcattcatattattagtaacccggttaactctacggtacctattgctgctgaagtgttgaagaagaaaggtgtttatgatcctaagaagctgtttggtgtcactactttggatgttgtgagggctaacacttttgtttctcagaagaagaatcttaagcttattgatgttgatgttccggatattggtggacatgctggaatcaccatttttgcctcttc

SEQ ID NO: 152974 - DNA, 360 bp, Arabidopsis thaliana columbia
ccacgaggcaaaagttacttgcggatgttgatcggaaatgcaagttggtggattttgggaatgcttgttggacttataaacagtttacgagtgatattcagacaagacagtaccggtgtcctgaggttgttcttggctcaaaatactcaacctcagcggatatgtggtcatttgcttgcatttgttttgagcttgccaccggagatgttctattcgatcctcacagtggtgaaaactttgagcgagatgaggatcacttggcattgatgatggagcttctcgggatgatgccacgaaagattgcattaggtggacgccattcgcgggatttcttcaaccgacagggtgaactactggaca

SEQ ID NO: 152975 - DNA, 377 bp, Arabidopsis thaliana columbia
caaaggtttactacaagtctccaccaccatcatacgtctacagctctccaccaccaccatactactctccttctcctaaggtttactacaagtccccacctccaccatacgtctacagctccccacctcctccatactactctccttctcctaaagtcacttacaagtctccaccaccaccatatgtctacaagacgccttactattgattttgaattgtttccttaacaagaagcatgagtgctataattttatttatgattggttttggtgattcttctgattttgttctttgtttaactatcttgttatgctttttttaactaataaaatttggctatctttttaaataaaaaaatatttattttatttctatt

SEQ ID NO: 152976 - DNA, 372 bp, Arabidopsis thaliana columbia
gttctagatatgctcgtggcttgcaattatattctgtgcacaatctctggccaacatgaggaacttggaaaatgatttaaagcagatctccatggctatgatgtttgctataatgggattggttacaaactacttagggcctaacagacccgcgacaaagaaataatcctcatgtcttaagagtagtatgcttttttttgataaaccttgtatggctcttgtttccgcaccagagattgctagtggtttgtctttgtgttttcgactctctaatccttgagtagcaaactagaaccttgagctcttgctcatttgtggagttcaaagacttttcagtccagatgcaaaaaatgtgaaatccgactttttctc

SEQ ID NO: 152977 - DNA, 401 bp, Arabidopsis thaliana columbia
  unsure (1)..(401): unsure at all n locations
aactttctctctcttgcttctacgcttcttcttgtggcgtagattgttatagagagggaaaccaaaaaagggaatctcaaaagctcgagttcacagatttgacccgagtctttaatccaatctgctggttcgttttccacattcaaactcgactcttgaatatcaaatcagaagtctttgctatggctgctaccgctgctgcttctgttgtccgttacgcacctgaggatcatactcttcccaagccctggaaaggccttatcgatgatagaactggttacttgtacttttggaatcctgagaccaatgttactcagtacgagaaaccaaccccctctctacctnctaagttttcttccgcccgttctgttagctctttcgtcaggttcaacaaactgatg

SEQ ID NO: 152978 - DNA, 397 bp, Arabidopsis thaliana columbia
ctcagctctccctctcaaacaatccaggattcttcagattcctctcctttgatcctctctttaacaatctctctctctctgttttcttcgatccgttgtaggagaaaatggtcgttatcaacagtctccgacgcttggcgcgtaccactcaggttcatttgcacagtaagtatgccacttgcatgtctgggaactccacttccaggaggattttcactactgaggcagcacctgagaagaaaaacactgttgggtctaaagggcatgatatgcttgcaccttttactgctggatggcagagtgctgatttagatcccttggtcattgcaaagtctgagggaagttatgtgtatgatgatactgggaaaaaatatcttgactctctcgctggtttatg

SEQ ID NO: 152979 - DNA, 416 bp, Arabidopsis thaliana columbia
ttatcattgtcttctcaaaacgtatgatctggtttttcaaaagtgaaggcaagagattttatgaagaaagatggttgcggcgaaagagaacaagtttctgacagtggcaccttttgagtgtgcttggagtgatgatctgaagttccgggaagcgggaagaggttgtgttgcgtttgatgcgtttgctcacaatgatgtcacggtggtgtttagagagaatgtggggactcaacattaccattattagaaagataatagtcctcactacattgttatcattggtagcaataggaatcgtaggttgaagattcaagtagatggaaaatctgtggtcgatgaggaagcttctgatctttgtcgttgttctttggagtttcagagttactggattagtatctatgatgggttgattagca

SEQ ID NO: 152980 - DNA, 414 bp, Arabidopsis thaliana columbia
gtaataaatagagactagtttttggattcaattatatattgtaaaagctaagaccgtcttttgatgaaacaacatctcttaaactatctcttctgcaaaaaacaacaatacaaaaaaaacaaaacaaagccattgaaccaagctcaaactctttttaacgcttcttggaaacaccaacagtctttccacggcgtccggtggttttggtgtgctgtccacgtacacggagaccccagtagtgcctcagaccacgatggtttctgatcttcttgagacgctcaagatcatctctcaacttcatgtcaagagcattggaaacaacttgggagtatttcccatccttgtaatccttttgtctggtaagaaaccagtctgggatcttgaactggcgagggttagcaacgattgtcatga

SEQ ID NO: 152981 - DNA, 347 bp, Arabidopsis thaliana columbia
cgaagcaaaaacaaaaatgaaaactactcatttctcttcctcttcttcttccgatcgcaggatcggtgctctgctccgtcatctcaattccggctcagattcggacaacctgagctctctttatgcatctccgacatcgggaggcaccggtggttctgttttctctcatcttgttcaagctccagaggatcctattcttggggtgacagttgcatacaacaaagatcctagcccagttaagctgaatttaggagttggtgcttaccgaactgaggagggaaaacctttggttcttaatgttgtgaggaaagctgagcagcctcttatcaatgacagaacaagaatca

SEQ ID NO: 152982 - DNA, 415 bp, Arabidopsis thaliana columbia
agcaaacatactttcttctcttctgtttccaagaaacttttgaagttaaatccgtttaaaaatgggtctaaggatacttcgcacatagatgaagatcttggaggtgttgacattactaagccaaggagacgaagattctcaatctcttaaaagaaaacgtttgatctaagtgcttttgtgtgttgtgtataactcttttagactagtgtgcttattgttcccttcttgatgcgtgattttttttttttgggcgtgtgtgtttattggttaatgagcttggtttataaaatgtaaatcgtaaccagattgtttacttaatattttattattttttatttgggcggtcgtttgcgatctatataaagagcttttgtgagttagggtttcactgtgtcttcaaaatggtagatattct

SEQ ID NO: 152983 - DNA, 436 bp, Arabidopsis thaliana columbia
  unsure (1)..(436): unsure at all n locations
atttctgaaaactcatcattgctagggtttcttcgacttatatgtaattcttttttctctgatgactgtttttagctgtccaaattgcttgactagagaaaagccttttcattgaagataatggcggaagtaaatggagtcattccaacaatagacttggaagaggttaatgatcagattctgaatgagaaaatccgtgaagcgagtgagagatggggatgtttcacggtgataaaccatggagtttctttgtctttgatggctgagatgaagaagactgttagagatctccatgaacgtccatatgagatgaaactgcgaaacaccgatgtgttactagggaatggttacaagcctctaagtgagttcaatcctttttatgaatcatttggtcttnttgacatggcatcttcttaagcttgtcaatagtttttgt

SEQ ID NO: 152984 - DNA, 384 bp, Arabidopsis thaliana columbia
ataaaagagagaaagataatctctttaatgtccacattatctctctcttcttcttcaccttcttgagaaacctcctctccccaaaaacgacgtagtttcacatttctcgacttcttgaatggagtttgaagacaacaacaacaacaacgacgaagagcaagaagaggatatgaatcttcatgaggaagaagaagacgacgacgccgtttacgactctcctcctctctctcgtgttctccccaaagcctcgacagaaagtcatgaaaccaccggaactactttcacaggcggtggcggaggattcatggttgttcacggcggtggagggagcaggtttaggtttcgtgagtgtctcaagaaccaagcggtgaacataggaagaca

SEQ ID NO: 152985 - DNA, 445 bp, Arabidopsis thaliana columbia
ctttaaaacgagagagagagaaagaaatggcgacatcgggaacgtacgtgacggaggttccgttgaaaggatcggcggagaaacactacaagagctggaagagcgagaaccatgtcttcgctgacgccattggccaccacatccaaaatgtcgttgttcacgaaggcgaacatgactctcacgggtctatcaggagttgggactacacatatgatggaaagaaggagatgttcaaagagaagagagagatagatgatgagaataaaacattgacgaaaagaggactggatggtcacgtgatggagcatctcaaagtatttgatatcatctacgaatttattcccaaatctgaggatagctgcgtctgcaaaatcactatgatatgggagaagcgcaacgatgactttcccgaaccaagcggctacatgaaattcgtcaagcaaat

SEQ ID NO: 152986 - DNA, 460 bp, Arabidopsis thaliana columbia
caaaactcttctttcaaacatggaccgaaccatgtttctttccctgacaatagcctcactcttggtcggagtcgtctcagctggtgactggaacatcttgaaccaactcagaggactcggctcatcgtcaagccaaaatggtatcgtttctaaaggtatcaagacggacctgaaaggatactgtgaaagctggaggatcaacgtggaagttcacaacatcagaaagttcgatgtggtgcctcaagagtgtgtatcgcacattaaggattacatgacgtcatcgcagtacaaggatgacgtggcgagaaccgttgatgaggtcattcttcatttcgggagcatgtgctgtagcaagtctaagtgtgacggcatggacgcttggatctttgatatcgatgacacgcttctctctaccatcccttaccacaagaaaaatggttcttcggaggagagaaattga

SEQ ID NO: 152987 - DNA, 425 bp, Arabidopsis thaliana columbia
gaacagttttgcatcaccggccctaacgagaatgcctcgtgggaaatgctcgatgagatgatgaagaactctgaagatttttaccaagcgctaaaacttccataccaaatcgtctcgatcgtctctggagcattgaatgatgcagctgcgaaaaagtacgatttggaagcttggtttccttcgtccgagacattcagggagcttgtgtcttgttccaactgtacagactaccaggctcgcaggcttgagatcagatacggtcagaaaaagagcaatgagcagacaaagcagtatgtgcatatgctgaattcgacacttactgcaacagagaggaccatttgctgcattctcgagaactaccagcgagaggatggtgtcgacattcctgaggttctgcagcccgttatgggcggagagaccgtttt

SEQ ID NO: 152988 - DNA, 445 bp, Arabidopsis thaliana columbia
caccaatccagaacgttcctcaaaaagctccctccttttctctcaaaatggcgtctgcaaacgctctctcttccgcctccgtcctctgttcttcccgtcagagtaagttgggaggaggaaatcagcagcaaggtcagagagttagctacaacaagaggacaatcagacgttttagtgttagagctaatgtaaaggaaatagcttttgaccagcactctagagctgctctacaagctggtattgataagcttgctgattgtgttggtctcactcttggccctagagggaggaatgttgtgttggatgaatttggaagtcctaaggttgtgaatgatggagtcaccattgctagagctattgagttacctaatgccatggaaaatgctggtgcagcgcttattcgtgaggttgcgagtaagactaatgactctgctggtgatgggac

SEQ ID NO: 152989 - DNA, 365 bp, Arabidopsis thaliana columbia
atctcaaaatatggatagtcacaaatggagtctaggtttcacattacttgctttcctcttcatcacttcctcttccgctgagctcatcattaaacaggtcacacagggcagaggaatagagtacaacaactcttacagtctcacgtcgaatcttggagtgacgacaagagagttgagagacgagcgaccatcaagtaagatagtgacaatcacaagcttctctgtgattaaggacagaggagaaccctatgaatcatctatttttgaggctgccggttacaaatggagattagttttgtacgtgaagggtaatccgaaaggcggtataaataatcatatttcactttacgcgaggatagaagaga

SEQ ID NO: 152990 - DNA, 305 bp, Arabidopsis thaliana columbia
tccttaaaaggatctctctcattggaatcctcctaatggttaagattccaggtcaaactgtgatccattatctttgctactaaactaagttcttttctctgatcgaatcaaaaagttttcaactttctaaattttttagttctaggaaaaaacctctccgagaatggttttatcggtgaagcaaacactctcttcgaaaatcggactttttcgcgaaacccttcatctcactggagatctctgttctctctcgttcatcgacgacttcaaacgcaccgttagcgctaaacccttattttttttta

SEQ ID NO: 152991 - DNA, 289 bp, Arabidopsis thaliana columbia
ctcgattctaaactcttgtccaattcacctaaattccttaatcttcagcttcccacttccatcctcaaaacttcttctcaccacgttaaccccagcctttcttccaaagagaaaactgggtttgtaacggacgatgattttaggcatctatggaagttggttgaggtcaaagatggcggtccttgttggattcaaatgatggaccgatcaacctcaaccttttcatatcaagcttggaggcgagatcctgagaatgggcctccctagaaccgatactgtactgtgtttg

SEQ ID NO: 152992 - DNA, 358 bp, Arabidopsis thaliana columbia
ggcgtcttctcgaatcatcatcttctccgttcttcttctctccatcttctcactctcatcatctgcccaaccatctttccgccccaaagctctccttctcccagtaacaaaagacccatctaccctccagtacacaaccgtcatcaaccaacgcacacctctcgtccccgcttccgtcgtattcgacctcggtggtcgagaattctgggtcgactgtgaccaaggctacgtcttcaccacttaccgctcttctcgctgcaactccgctgtctgctcacgcgccggcttcatcgcctgcggcacatgcttctctccttcgagacctggctgtagtaacaacacttgcggcgctttttca

SEQ ID NO: 152993 - DNA, 421 bp, Arabidopsis thaliana columbia
cggacgcgtgggaattcaaaagccctaattcgaaaattcccatttctcaaggtttttaaaagagtattgcaaagatgtcttctgattcgtcccgggaagagaatgtgtacttggccaagttagccgagcaagctgagcgttacgaggaaatggttgagttcatggagaaagttgcaaagaccgtggagaccgaggaacttactgttgaagagaggaatctcttgtctgttgcttacaagaacgtgattggtgctaggagagcttcttggaggattatctcttccattgagcagaaggaagatagcaggggcaacagtgatcatgtttcgattatcaaggattacagaggcaagattgaaacttggctcaacaagaattgtgatggctttttgacccttctggggctcatttcatttctgct

SEQ ID NO: 152994 - DNA, 388 bp, Arabidopsis thaliana columbia
aaaagaagagcaagcagcggcgcagaagttgaacacaagtgaagctcacaatggcgaggattaaggttcacgaattgagggagaagtcgaagagcgatcttcaaaaccagctgaaggaactcaaagctgagctcgctctcctccgtgtcgctaaagtcaccggaggtgctccaaacaagctctctaaaatcaaggtcgtgcgtaaatccatagctcaggttttgacagtgtcttctcagaagcagaagtctgctctaagagaagcatacaagaacaagaagttgcttcctcttgatctccgtcccaagaagacccgtgctattcgtagacgcctcaccaaacaccaggcctcgttgaagacagagcgtgagaagaagaaggagatgta

SEQ ID NO: 152995 - DNA, 246 bp, Arabidopsis thaliana columbia
caagaataagtttagatcagcaaaaaaatacttaaccgattcaagcaagctgaacttaagaaatgttgagcgtttcatcaaggccggtgggatgtatgaaaatcaaatatttcagaagagagcacaagtacagcagaggcaatcagaaaggtttcgtcgtgacaaagctcgtgacaaagctcgtgacaatgctcgtgacaatgctcaagcaagcagacaattctctggcaagttggtgcaattaga

SEQ ID NO: 152996 - DNA, 182 bp, Arabidopsis thaliana columbia
gttgcgtcaatctagcaactgagtgaagggttgaaagtttgtttttctcttatttgtaatcggagtattaagtcgagagtttgtgatgttttcttaggcgtgactgtttgttttgtttgaaggattatgtctctttgctttggtcttaaaatctacttaaatcaataaaatagtttaacgaa

SEQ ID NO: 152997 - DNA, 453 bp, Arabidopsis thaliana columbia
cacaaaagcaaaagcatcgccggattttttaaatcgatagtggcgtctaaaagcagaaccgcgttccccaccaccgcaaacgcatttttttaacaaaacgcgaaacaaattgggaaaaagcggagagaaacgcaccttcgatactgcaccggcatgttcccagctttccaaatagcgatcttctcaaacgcttcgatcggaagcacgaaatgtttgttaggtggattacaatgaccaccaccgtcgggatcaaatccgtaattaggagcacagaaattcgtagcggtgagtataattgaagttccagggatacaccaacggagatcatcaacacatctgagctcgaaacaagcaccacagatctgaccacgctcaaacagagtctcgcttagaccaacagtagccataccgaacccagatttgacgagattctcgtatccacacgcaccgccc

SEQ ID NO: 152998 - DNA, 178 bp, Arabidopsis thaliana columbia
ctcttagcctaccctatttccttcctcctctccgattcttcctccgtcagtaaaagaaaatcaaaatggcttcacacattgttggatacccacttatgggccctaagagagagctcaagtttgcattggtatctctctgggatggatagagcactgctgaggttctttatatggtgtc

SEQ ID NO: 152999 - DNA, 442 bp, Arabidopsis thaliana columbia
gtctttgattctttcgttgtgtggcatctgaagagttaagaggaagaagaagaacgatggcatggagaggaagcatatcgaagtctatgaaagagcttaggattcttctttgtcaatcttctccagctagtgctcccaccagaacgtttgttgagaagaattacaaagatttgaagtctctaaaccctaaattaccaatcttgatccgtgaatgtagtggagtccagcctcagatgtgggcaagatatgatatgggtgtggagaggtgtgtaaacttggatggtctgacagagccacagattctaaaggcccttgaaaaccttgtgaaatccggagctacaaaggcctaagattggttgtttggttggttttctctatatgatccccaataagattaaaccccaaaacaatcatttgacatttcctgtcattctactacttt

SEQ ID NO: 153000 - DNA, 399 bp, Arabidopsis thaliana columbia
gatttttcgctcttgagagaatcacttcgacaatgtcggtaacggctgctttcattgattcggatcaaactcagcacaacattcttatggattcccaatcaactgtctccggtgtgaaaactgtcaagattagcaatgtttcactaattgtttctaagaaagatgtcaaagagttcttttctttctctggtgacattcaatacgtcgagatgcgaagtgagacacaagagagtcaggtcgcatatgttacttttaaggattcacaaggagctgaaactgcaatgctcttaacgggagctgtcattgcagatcttcgtgttagtataactcctgctgttaactatcagctaccaccagaagcccttgcacttgactcggaacattcgtttaatgggtttt

SEQ ID NO: 153001 - DNA, 406 bp, Arabidopsis thaliana columbia
  unsure (1)..(406): unsure at all n locations
cgaccacgcgtccgactatgtggtctgacagctggtgctattggtgtttgcgtcggtagtccagccgatctagcactgatcagaatgcaggccgataatactttgccgctagctcagcgcangaattataccaatgctttccatgcgcttacccgtattagcgctgatgagggagttttagcactttggaaagggtgtgggcccactgtggtcagagctatggctttgaacatgggaatgcttgcatcttatgatcaaagtgctgaatacatgagagataatcttggtttcggggagatgtctacggtcgtaggagcaagtgctgtttctgggttctgcgctgcggcttgcagtctgccatttgactttgtcaaaactcagattcagaaaatgcaaccggatgctc

SEQ ID NO: 153002 - DNA, 272 bp, Arabidopsis thaliana columbia
tctctctctctctcgccagattttcatcgactcgatttcagatgtaagatctcagatacaaaactccgacatgtctacgttcagcggcgatgaaacagctcccttcttcggcttcctcggcgctgcagccgcactcgttttctcctgtatgggagctgcttatggaaccgcaaagagtggtgttggtgtggctcctatgggagttatgagacctgagttggtgataaaatctattgtccctgctgttatggctggagtgttgggtatctatt

SEQ ID NO: 153003 - DNA, 382 bp, Arabidopsis thaliana columbia
cggacgcgtggggtcgtttatagttcaatccttttcctcttctttgtttctaaaaagagaaaagtcacttatggcggatatctcgggaaacggctatggcaacgccagagaagaagtagtaatggtgaatctcaaggatgaagtcgaacatcaacaagaaatggaagacattcataacccaagacccttgaagaaacaagactctctactctcagtctctgtccctttcttacaaaagttgatcgcggagtttcttggaacctactttttggtattcaccggttgtgcatcggtggttgtaaacatgcaaaacgacaatgtcgtgactcttccagggatcgctatcgtttggggactcaccattatggtccttatttacttc

SEQ ID NO: 153004 - DNA, 384 bp, Arabidopsis thaliana columbia
ctctggtgaggctcttggtagaggaactaagatggtcctttacctcaaggaagaccagatggagtacattgaggagcgaaggcttaaggatttggtgaagaagcactctgagttcatcagctacccaatctctctctggattgagaagaccattgagaaggagatctctgatgatgaagaggaggaagagaagaaggatgaggaaggcaaggttgaggaagttgatgaggagaaagaaaaggaggagaagaaaaagaagaagattaaggaggtttctcatgagtgggatttggtgaacaagcagaaaccgatttggatgaggaagccagaggagatcaacaaggaggagttcgctgctttctacaagaggtttgagcaatgact

SEQ ID NO: 153005 - DNA, 413 bp, Arabidopsis thaliana columbia
  unsure (1)..(413): unsure at all n locations
ttctggaaaatcgaccacaactggtcacttgatctataagcttggtggtattgacaagcgtgtcatcgagaggttcgagaaggaggctgctgagatgaacaagaggtccttcaagtacgcatgggtgttggacaaacttaaggccgagcgtgagcgtggtattaccatcgatattgctctatggaagttcgagaccaccaagtactactgcacagtcattgatgccccaggacatcgtgatttcatcaagaacatgattactggtacctcccaagctgattgtgctgntcttatcattgactccaccactggagggtttgaggctggtatctctaaagatggtcagacccgtgagcacgcttttcttgctttcaccctttggtgtcaagcagatgattttgctggtggtaaca

SEQ ID NO: 153006 - DNA, 412 bp, Arabidopsis thaliana columbia
ggaaattgatgatcgataaaccaaatcagataatggaagaagaagggagattcgaagcggaggttgcggaagtgcagacttggtggagctcatagaggttcaagctaacaaggcgcccttacactgcccgtgacgtggtggctctacgtggccatctcaagcaaggctatgctttgaacgagatggctaagaagctgtggagaacgctcaaaagccatcaagccaacggtacggcctctcgcaccttcggagcgttggaccctgttcaggtgaccatgatggctaaacatttggacaccatctatgtctctggttggcagtgcttcgtcactcacacattcactaatgagcctggtcctgatcttgctgattatccgtacgacaccgtttctaactaggttgaacacctttt

SEQ ID NO: 153007 - DNA, 377 bp, Arabidopsis thaliana columbia
gaactttagaagaatcgaagatctctattgtcttcttgttgcttcttctcttctcaatcttcatcagttccagtcaccaggcaaatgaggtattaccagctgaaggagataatgagatgatgatggtgccattgggggaggagaagtttatggtaatgaatgaaacaagaaggaaacttggaagttttcagatatgttcagtttgtacttgttgtggtggtgctaaaggtctttgcttgccttctccttgttgctatgctattaactgcaatatccctaatagaccctttggttactgttctttcactcccaaaacttgcaattgctttggttgccatatctgagatcttctactttattgtaatttgggagagaaa

SEQ ID NO: 153008 - DNA, 415 bp, Arabidopsis thaliana columbia
aaacaagcatcatcatcacatccacttccttcttcttcctttctctgtctgtctcttaacccaaatgtggactctttgagccgttattagatctctgccgcttcaataatggggagcttatcttctgaggaagacgacgaagtctcttccgagagatgcggaagttacagtcccagcgccgacattagcgagtccgagagttccagcagcttctcctgccaccgcttcgacggcgagggtgcctctagctccatcccttcttcccctcgagttgtcgctggtagaggattttactttccggccccagtcatgctttcggggatcggcggcaaagatgtggtctgggatgacaaacaaccagacaacgatttatccggaattgagatgatgaaggagagagttgcttagcttcttt

SEQ ID NO: 153009 - DNA, 345 bp, Arabidopsis thaliana columbia
aaggcagagctctttgcttctgaatattattattttcttaaattcttccgtttttttttttaatccaaccacaaggatcgataacgaaatcatcagatcgccagaaaaaaaaaaaaaattgcgaaatggagaatctgagctgcagatctgcgtcaatctccatctagatgttgttgctacttcttcctctatagaaccataatttcatcagatctcgctgattaatcatccccatttggatctgatcgaaactcttagggaagaacatggcaggagctgcctccgcgctgtttttgcttgatatcaagggacgcgttctcgtttggcgtgattatcgtggcgatg

SEQ ID NO: 153010 - DNA, 302 bp, Arabidopsis thaliana columbia
cggattcgtccgtcttctttcttcttagccgagtacttctgtagattagttggaacgattgatgattttgagttaattgaacgttcggcgtatgagtggtgatcggatagccagtgttcgtaggcttcatgctcgcgcatcgaactacctaccacctattcttcttaggtaattcacgggcgatgttacgctcgatgatgagtttcggtgcctgtgtttcgtacctaatttgaaggaattgttgagtttggtttacacctttgcccgcggcttctcccttgtggggaaggcgtgggcacaaa

SEQ ID NO: 153011 - DNA, 323 bp, Arabidopsis thaliana columbia
cggacgcgtgggcgtaaacttttttcacctggctagggttcttggtcgtcgttaactggcatctagtatggctttctgcactaaacttggcggtcactggaaacaaggggtaaatgttccagtgtcatcaatgctcggttctcttcgctacatgtccacaaaactttatattggtggcctgtcccctggaactgacgagcactccttgaaggacgctttctctagcttcaatggagtgacagaggcaagagtcatgacaaacaaagtgaccgggaggtctagaggttatggatttggttaacttcataagcgagggtttctgc

SEQ ID NO: 153012 - DNA, 384 bp, Arabidopsis thaliana columbia
gttattcagatcgccgtaattgcagtaaggagacgaaaatatggtgcacgtttgctactaccgcaactatggaaagaccttcaagggaccacgtcgtccttacgagaaggagcgtcttgattctgaattgaagctggttggtgagtatggtctgcgtaacaagcgtgagctctggagagtgcagtactctcttagccgtatccgtaatgctgctagagatcttttgactcttgatgagaagagtccaagaaggatctttgaaggtgaggctttgctccgtaggatgaaccgttacgggcttcttgatgagagccagaacaagctcgattacgtcttggctttgactgttgagaactatttttgagcgtcgtctttaagactatt

SEQ ID NO: 153013 - DNA, 340 bp, Arabidopsis thaliana columbia
ccgctcctcttcacacagttccatcttcttcaacttcagaggtgaaaaatgagtcgtggtaacgcagcagcagccaagggaaagaagaagggagtttccttcactatcgattgttctaaacctgtggatgataagattatggagattgcttctttagagaagtttcttcaggagaggattaaggttggtggtaaagctggtgctcttggtgattctgtttctatcactcgtgagaagagcaagatcactgtcactgctgatggtcaattcttcaagaggtatcttaagtacttgacaaagaaatacttgaagaagcacaacgtgggggattggcttagag

SEQ ID NO: 153014 - DNA, 416 bp, Arabidopsis thaliana columbia
agctaatgaatgaactgcagaaaagttctggccatccgtcacaaaattttgcaccatacattgagcaacttgccgctggaaattttggtcaattgccacatgaaggccatcagagggaactacttgaacagctactttcaacaaaaatgcaatctcaatatggaccaatgcaatcttcatacggacaactgcaatctgaaccaactcggtctttggagtaccaactgctgcagcaagagcagctgatgcaattggcaaacggagtgaggcacaatacactattggaggaacagagacatattgaccctctgtggccatctgaccataatgatcagcttctaagaagtcatcctgggatccaacgttcgcgatcctctacaggatttagacaactagacttttattaacagcagcag

SEQ ID NO: 153015 - DNA, 345 bp, Arabidopsis thaliana columbia
tttttctgactcttcaatctctcccaaagcctaaagcgatctctgcaaatctctcgcgactctctctttcaagatgcaaatcttcgtgaaaacactcactggcaagactatcactctcgaggttgagagctctgacaccatcgacaatgttaaggcaaagattcaggacaaggaaggcattcctccggatcagcaaagattaatattcgccggtaaacagctagaagatggccgtaccttggccgattacaacattcagaaagaatcaacccttcatttggttctccgtttaagaggtggtatgcaaatctttgtcaagactctgactggcaagaccattacttt

SEQ ID NO: 153016 - DNA, 366 bp, Arabidopsis thaliana columbia
gcaccgtgtggtgactcaacaagaaggaaacaggatgtcggttgcatcgttttacaacccgggaagcgatgcggagatctcaccagctacttcgcttgtcgagaaagattccgagtacccgagtttcgtctttgatgactacatgaagctttatgcaggggtcaagtttcagcccaaggagccacggttcgcagcaatgaagaatgcttctgcagttacagaactgaatcctacagcagccgtagagactttctaaaaatggatttgggattcaggtgaagcatagaaagaaggatgagtttgtgttgtgtgttatggcaataaagttaaaactggtattagggttgataaattgtgggtcaattg

SEQ ID NO: 153017 - DNA, 314 bp, Arabidopsis thaliana columbia
ctgccctcctgttcgtgtcaacgctaatggtggccttcctggtggaaaggtgaagcttgctggatctattagtagtcagtacttgaccgctctgctcatggcagctcccttagctcttggagacgtcgaaattgaaattgtcgataaattgatttctgttccgtatgttgaaatgacattgaagttgatggaacgttttggggtaagtgctgagcatagtgaaagctgggatcgtttctttgttaagggtgggcaaaaatacaagtcgccgggtaatgcttacgtagaaggtggtgcttctagtgctagttatt

SEQ ID NO: 153018 - DNA, 410 bp, Arabidopsis thaliana columbia
ggcgaggacgcgtccgcttctcccataagaaaaaaaaaataatcaaattcttcttctctgcttcaccaccaaaaagcatatgcttgtctcgtcttctccggggggtcaaaatctctccgtgtgaatcgtttgtgaatggtggaaactaatccgatcggtggtaagtttacgctctccctttccatcaaaagggcgagcttttctcttcctctctcgacatcctctgttttcgctttcggatcttgcaaagaaggctggtactttcgctgccttggcctcgacccgtgaacgaatttcccctaaaattcacaaccccggaccctattttcctaaaaaagagggtcgtttttacttggttctctcccttgtgagatttgctctgttttttgtttccctcctcttcgaagaat

SEQ ID NO: 153019 - DNA, 351 bp, Arabidopsis thaliana columbia
cttgtctctggcttgagaacaaagaaaacccctttcttcgatctcagcttaaatcactcgacggagaagaaatcagaaaagagtcagagaaaaaaaaaatcaaggaagatgagtagcattggaactgggtacgatctctccgtcaccactttctctcccgatggccgtgttttccagatcgagtacgccgctaaagctgtcgacaacagtgggactgttgttggaatcaagtgcaaagatgggattgttatgggagttgagaaacttattgcatcaaagatgatgctaccaggttccaacaggagaatccattctgttcatcgtcatgctggcatggctgttgctgggctt

SEQ ID NO: 153020 - DNA, 387 bp, Arabidopsis thaliana columbia
ccgcaaacaacggatagatctgtcgatgtttgtttttggaactccgcgttgaatcagcgtcgatgtttctccaatggaagataaaccattagggattctcagggttcatgtcaaaagagggattaatcttgctattcgtgatgccaccaccagtgatccttatgttgttatcacattggctaatcagaaactgaagacgcgtgtgattaataataactgtaatccagtgtggaacgaacaactgaccctttccatcaaagatgtgaatgatcctatccgtctgacggtgtttgataaagatagattctcgggagatgacaaaatgggtgatgcaaaaatagactttaggccgttcctagaagcgcattaaatggagttagattttca

SEQ ID NO: 153021 - DNA, 269 bp, Arabidopsis thaliana columbia
cggacgcgtgggcgaagaaggaaaagcgcaaggtctaaaagaaaaaactgtcattccgcagatgagtggattatatagatgtgtctggtgtcttgtagtaaggaaaagaatggattctaaccagaggagatgatttgcttgaggagtctttgatcatgacaatgcttttttaacctctgatgtaacttcttggggagccttctcggcctggatgtttgtgagaacggccttctttgcgtaataatcaatcaccggttgagtttgactgt

SEQ ID NO: 153022 - DNA, 406 bp, Arabidopsis thaliana columbia
gaagacccaagagtcccaagaccaagggctgattaattaatgctgttttaaccatatgcatatcatggacacactttgttctccgagtcgactcgttctggtcaccttcttcctcctctgcttctttgccggagattcatcggcgacgaggcctggtttcatctacaccagacacagaggacgatgcacgccgcagtattggagcagccagagggaagcatggccgaggatggtacctgagagatcaaccgtggagaaaatattcggagtgatggtagcaaaagaacggtggagatctgatctaacgctagtggaatcaacgggctggaatgacgaataaaggaacgcgtacggtgcattgctgaaacaagggatcgcagctctgatcaactcttacgcgagaaaa

SEQ ID NO: 153023 - DNA, 331 bp, Arabidopsis thaliana columbia
attcatcagagtccctcatccatcttctcatcctccaactcgagatcagacttcgacagagagtgcgatgagttcatcaacaagaaagcttgaggttgtttcaccagttcccgccgatatcgacatagctaattccgtcgagcctttacacatctctgagattgccaaagatcttaatatcaaccctcttcactacgatctctatggcaagtataaagctaaggttttgttgtctgcgtttgatgagcttcaaggacaagaagatggatactatgtttgtgttggagggattactcctactcctcttggagaaggcaagagtactaccact

SEQ ID NO: 153024 - DNA, 365 bp, Arabidopsis thaliana columbia
  unsure (1)..(365): unsure at all n locations
gcgacccacgcgtcgaacagataccaaaaaacagagcaatctctataaaaatctaagaaacctactaaaatgggttcaacggggagcacaataactccgggcaagtaccgacgacgaagctgcctcttcgccatgcaactagccagtgcttccgttcttcgaggcttaaaatccgcttagagcttgacctttgagattatggccagaatggntctccatgtttctacggatcgctttaaactttcgaccaaaaattctgaagctccggtcatgctcgaccgtattcttcgtcttcttacgtcttactccgtcttaacctgcttcaaccgtaaactttccggtgatggcgttgaacggatttacgg

SEQ ID NO: 153025 - DNA, 390 bp, Arabidopsis thaliana columbia
ccgggacgcgccaggcttacgaacacgttgggaatgaaaagtcatgtgtgtggcacgctcgtgactttgctgatggtgaactcagggatgagcttttctgtgtccgagttgcttctattgagaattgcaaaacatttatgcaaaagttcaaggaagttgctgagtctgaagaagagaaagaagagagcaaagatgccgctgacactgctggccttcttgagaaattgactgtggaagagacaaaaacggaggagaaaaccgaagcgaaagctgtggagacggcaaagactgaagtgaaagcagaagaaaagaaagagagcgaggcagagaaatctggtgaagcaaagaaaacagaaaacagtggtccctcaacatacgaagcgtcatcat

SEQ ID NO: 153026 - DNA, 373 bp, Arabidopsis thaliana columbia
ctcatatccatgcgttttaagacagtaacaaccttgtcttcacaaatgttgattagcttacatgtctatatagaccaaacaaaatcacaataagtttttatgtctaggcaaaacaaaatctgtttaagcagcaacttcttgatccttggatgaaagttggttctgaatatgttgaggaacaacgtcgaacttagccagttgcattgtgtaagaagctcgaccttttgtcatccctctcaatgtactcacgtactgaaacatctttgccaatggaaccagagagtcgaccaccttgagaccaccgggtttgtcttcgaagctgttaatttgaccttttcgtgagttaagatcaccaatgacatcaccaagatgt

SEQ ID NO: 153027 - DNA, 229 bp, Arabidopsis thaliana columbia
gccttggacattgacaagtggagatccttgagttacacaccgtgaacatctatcgcagggagcggaatcctaatgggtctgggcatggttggaagagcagcgatcgtctttctcgtatcgtttctatctaacttagccaagaagaatcaaagcgagaaaatcaactttaacatgcatgttgtgtttttgtggactggtctcatgagaggttctgtttctatagctcttg

SEQ ID NO: 153028 - DNA, 276 bp, Arabidopsis thaliana columbia
cacgacttcgctcaactctgcttagaagatcggaaacgaccattgaacttgtatcgctccttgtacgacggagcattggcggtctcgagactacggattggtattgtttagaagatggtgattgtggattctttgagcttcctttgaagctattgagatgcaaattctgcagatttggatcttcttctccaagcaagtcttgtaacctactgcagaagagtccatattggtgaaagtggcatgctacgcattgatccgtccagtattcccacaccg

SEQ ID NO: 153029 - DNA, 378 bp, Arabidopsis thaliana columbia
  unsure (1)..(378): unsure at all n locations
ggccgagcgcacgcgtccggcgactctctgctcgagcttgatcttttaccgatacaatgattatctcaaaggctaacccgaggaaatctgcaggtgcctggtcaaagaaggagtttgctttgcgaagaaggatttcaatcttgctaagcatccgttgatcgatgtccccaacctacaagtgattaagcttatgcagagtttcaaatccaaggatatgttagggagacatttgcctggatgcattatattggtttttgaccaatgaagggatcgagttcttgagaacttatcttaatctttcatctgatgttgntcctgctactttgaagaagtcagctaagcctggtgggtcgccatttggtggtccaccttttgatc

SEQ ID NO: 153030 - DNA, 364 bp, Arabidopsis thaliana columbia
catgggttgagaaataccggccgaagcaggttaaggacgtggctcaccaggaagaggtggttcgtgtcctcaccaacactctccagactgctgactgcccgcacatgctcttctatggaccaccaggcactggaaaaaccactactgctcttgccatcgctcaccagctctttggacctgaactatacaagtctaggtgttggagcttaatgcaagtgatgacagagtattaatgttgttcggactaagatcaaggattttgctgctgttgctgttgggtctaatcatcgtcaaagtggttatccttgcccatcgtttaagatcatcatcctagatgaggctgattccatgacagaagatgctc

SEQ ID NO: 153031 - DNA, 264 bp, Arabidopsis thaliana columbia
gtgaaacgttcgaaggccattttctttggacgaccatcggcgttaaggagagagcttagatctcgtgccgtcgtgcgacgttgttttccggcttgatcaaaatggggttgtcattcggaaagttgttcagcaggctctttgcgaagaaagagatgcgtattctgatggttggtctcgatgctgctggtaagacgactatccttacaagctcaaacttggagagatcgtcaccactttccaaccattgggttcaacgttgagact

SEQ ID NO: 153032 - DNA, 367 bp, Arabidopsis thaliana columbia
  unsure (1)..(367): unsure at all n locations
caaaaaatcctctcccggcttaaaaacgagtgataaagaggtgtaacaaaacatggcgtatgaaccgatgaagcccacgaaagctggtttggaggctcctctggagcagattcataagatcaggatcactctctcttcaaaaaatgtgaagaacttggaaaaagtgtgcactgatttggtccgtggagctaaggataagagacttagagttaagggaccagtgagaatgcccctaaggttcttaagatcactaccagaaaggcaccttgtggtgaaggtaccaatacttngggacaggtttgagctcagggttcacaagcgtgtcatcgatctcttcagctcccctgacgttgttaagcaaatcacg

SEQ ID NO: 153033 - DNA, 381 bp, Arabidopsis thaliana columbia
ggaacaccaccacaagctcaacaaatggttcttgacactggaagccaactttcttggatccaatgtgatcgtaaaaagcttcctccaaaaccaaaaacatcatttgatccatctctttcttcttctttctcaactttgccttgctcacatcctctttgtaaaccgagaattcccgattttacccttcctacttcttgtgctccaacaggttatgtcactactcttacttctcgctgatggaaccttcgctgagggtaatctcgttaaagaaaaaatcactttctcaaataccgaaattacccctcctttgattcttggttgtgctactgagtcttctgatgataggggcattttgggaatgaacccgtgtcgtctctcttt

SEQ ID NO: 153034 - DNA, 425 bp, Arabidopsis thaliana columbia
gaaattcgtaagtactatcaagaagcagaatatggcccaaaaggtggaagcacaaggagggaaaggagccaacctatgggacgatggatcgacacatgacgccgtgaccaagattcagctcgcagcaggcatagacggaattcaatatgttcagtttgattatgtcaagaacggacaacccgaacaagctcctcttctggtaccaaaggccgtgttctcccagctgatccgttgtgattaaccatccagacgaacatctagtttctgtagaaggttggtatagccctgaaggtatcattcaaggaattaagttcatcttcaacaagaagacttctgatgtcattggatccgatgagggtactcacttcactctacaagttaaagacaagaagatcattggctttcatgggtctgccgggggcaat

SEQ ID NO: 153035 - DNA, 296 bp, Arabidopsis thaliana columbia
gaagtgtgctgccgtgactgagcgtgtccttgcagcttgctacaaggctcttagcgaccaccacgtcttgctcgagggtacactcttgaagcctaacatggttactcccggatctgacagccccaaggtttcacctgaagtcatcgctgagcacaccgtccgtgcccttcagagaaccgtcccagcagctgttccagcattgtcttcttatctggaggacagagcgaggagaagctaccaggaacttgaacgccatgaaccagttgaagaccaagaagccatggtcattggctttc

SEQ ID NO: 153036 - DNA, 429 bp, Arabidopsis thaliana columbia
acgtagagcagccagggctttgaacccaaatacattacccacaatcgaggtaaacatgttagtaaccgaaccttcttcaaaaaggtctaagggataagctacatacgcaataaattgagtttcttctcctggaacgggctcgatgtggtagcatcgtcctttgtaacgatcaaggctggtaagcccatcggtccacacagtgtccatgtaccagtagaagattcagcagctacgcagcccctgcttcttcaggtggaactccaggttgaggagttactcggaatgctgccaagatatcagtatccttggtttcatattcaggagtatagtaagtcaatttatactctttaacaccagctttgaacccaacacttgctttagtctctgtttgtggtgacataagtcccttcctacaagtcatgaatttag

SEQ ID NO: 153037 - DNA, 374 bp, Arabidopsis thaliana columbia
  unsure (1)..(374): unsure at all n locations
aacttttatcatctctttttgtgacaggcccacactatcaattcgaaaagtctaaacaaaagtcgccgtcatgaaagtagaacttgtgttcataccatcgccgggcgttggccatatccgagcaacaacggcgttagcaaagcttctcgttgccagcgacaaccgcctctccgtcactctcatcgtcattccttcagagtctccgacgacgcttcttcctccgtctaccgaactccgaagaccgtcttcgctacatcctnctncccgcccgagatcaaactactgatctcgtatcttacatcgacagccagaaaccacaagtaagagccgtcgtgtccaaggtcgctggagatgtttcaacacgttcagactca

SEQ ID NO: 153038 - DNA, 425 bp, Arabidopsis thaliana columbia
cggacgcgtgggtttgagaactcgagcatcgtcatggcctcgtcttctacttcgccggaaccctagatcttcattttctcgtcagatatctactctcgattcctcaacatcaacatttcccagaagaatctccggttactactcctcctccttctttcccgtaaatcaaacgccatggatctcatctcagaggtacgtttcttctcctcaagcacaatgtcaccatcgaagctgatagagtagtgagagaacttatagcagaggttgagaaagagaagcagcgtgagagagaggagagacaaagacaaggacttgattacaaagacattgatgccgaagacgaagaagattacttagggattgaagccgttatcgagaagcttaagaagcagaatttgaaagatgatggttgaataaataggcgt

SEQ ID NO: 153039 - DNA, 365 bp, Arabidopsis thaliana columbia
cttagaagccgtcggcacaagaagaagaagaagattattgtctcacaggaagtttgagcacccaagacatggttctcttgggttccttccaaggaagagagctaaccgtcacagaggaaaggtgaaggcgttccctaaggatgaccaaaccaagccttgcaagttcacagctttcatgggttacaaagctggtatgactcaattgtcagagaagtggagaaacctggatccaagttcacaagaaggagacatgtgaggctgttaccatcattgagacacctgctatggtggttgttggagttgttgcctatgtgaagactcctagaggtttgaggtctttgaacactgtctgggcacagcatttt

SEQ ID NO: 153040 - DNA, 359 bp, Arabidopsis thaliana columbia
ctcacattttcgtagccgcaagactcctttcagattcttacttgcagctatgggtaaagagaagtttcacattaacattgtggtcattggtcatgttgattctggaaaatcgaccacaactggtcacttgatctataagcttggtggtattgacaagcgtgtcatcgagaggttcgagaaggaggctgctgagatgaaaagaggtccttcaagtacgcatgggtgttggaaaacttaaggccgagcgtgagcgtggtattaccatcgatattgctctatggaagttcgagaccaccaagtactactgcacagtcattgatgccccaggacatcgtgatttcatcaaagacatgattact

SEQ ID NO: 153041 - DNA, 394 bp, Arabidopsis thaliana columbia
gtgttagcagcaaaacttggtgtgacagatcttttctgggactgggacttgccgagaaccagagaaggattctaccggttccaaggctcggtcgcagcggccgtggtccgtggctgggcctttgcacagatcgcagacatcatctggatggaaacggcaagccctgatctcaatgaatgcacccaattcgccgaaggtataagtccaagacaccggaggtcatgctcgcctcaatctctcgccgtccttcaactgggacgcttccggtatgacggatcagcagatggttgagttcattccgcggattgctagggctcggatattggtggcagttcataacgcttgcgggtttccatgcggatgctcttgtggttgatacatttgcaaaggatta

SEQ ID NO: 153042 - DNA, 410 bp, Arabidopsis thaliana columbia
accaattactgtctccggcgagatctcaatttgatccttcacggtggcgtcgacgtccgggcaacaacaagctctctcgagaagaaagccattatcatcatcatcatcatcttcatcatctcctcctccgtcttcctcacctgttcgagctcctgcggcgaagaaaccgagtccggaatacccattttggcagcagaactggtttatcggtctgctattcgtgatggctttagattcttctgtctcgctatcttcctttacctaagtctcgatcctgattccggttacacgtctgcctccgccgctgcttctggtaaagaaggtgtcgagattacttatggaagtgcgatccaggtggtgcaccgaagaaactaaatttcgattacattctcacgatgtgccgtatggat

SEQ ID NO: 153043 - DNA, 340 bp, Arabidopsis thaliana columbia
aattaatctcagatttagatcgagagagaccaaattgagagcaagatctttgcattgttcatctcttgctttgtaatgccgttgttcttcatcgtaaccgactcggtggacgcgatcaattgactcgttctcttttggatccttgttgactcggcgagcttggcttaggagacatgggaggtgtgccttcaacgccgcgaaaaccggtggtgatgatgtttcggtggccgagacctcattgccacttttgttggggagaaatcgtttcctttagcgtctgatttctggaacaagctacttgagcttccgttgagttctcgctggcctagtgatcgggttc

SEQ ID NO: 153044 - DNA, 412 bp, Arabidopsis thaliana columbia
aatccatctccgcgatacgaacagagtagattaagacttagaaaaatggctgttcaacctacaagaataggtctagctggacttgctgtgatgggtcagaacctagctctcaacattgcagagaaaggcttcccaatctctgtttacaacagaactacttccaaagttgatgagaccgtcgaacgagccaaaaaggaggcaatcttcctctttacggcttccatgaccccagtcttttgtcaagtccattcagaagccacgcgttattatcatgcttgttaaggctggttctcccgttgaccagaccatcaagaccctctctgcttatttggagaaaggtgactgtattgtcgatggtggtaatgaatggtatgggaacactgagaggagagaaaaagccgtggcggagaac

SEQ ID NO: 153045 - DNA, 411 bp, Arabidopsis thaliana columbia
aatgaatccagagaaattggaaatggagttgccgattcatggttaatgccgcttacacgacaagcggaaatagcgtgtgagaaggtgaagcaaatgaaagagttgagtcaaggatacaacattgttggaagatctcaggggaacctagtggctcgaggcttgatcgagttctgtgacggtggccctccggtttacactatatatccttggccggtcctcatgctggcattcctctgttcctatgtgtggttctggtttattctgtaagttagcagatgagctaatcaagggagatatctatagcgacttcattcaagatcatcttgctcctagtggttatctcaaaattcctactgatatgacaaagtacttgggaagctctaagtatttacctaagcttacaatgagata

SEQ ID NO: 153046 - DNA, 295 bp, Arabidopsis thaliana columbia
gttctttggacgaccatcggcgacagtgttaagtctagagtcttcttcttcttcggcgtagttttttccccggcttgaaaaatgggtctatccttcggaaagttgttcagcaagctctttgcaaagaaagagatgcgtatcctcatggtgggtctcgatgcagctggtaagactacgatcttgtacaagctcaagcttgggagatcgtgactacgattccaaccattggtttaatgtggagactgtggaatacaagaacattagctttaccgtgtgggatgtcgggggtcaagac

SEQ ID NO: 153047 - DNA, 352 bp, Arabidopsis thaliana columbia
gggcacagagaaaacacccaccacatcaccttcttcttcaacaaaatttaccaccagagagcgcagatatttcgtcattctagctctctcttttagatccgattcgatgccgtcccgtagacgtaccctcctcaaggtcatcatcctcggtgatagcggggtgggaaaaacctctttgatgaatcagtatgttaataaaagttcagcaaccagtacaaggcaaccattggagcgacttcttgaccaaggaagtacagtttgaagatcgacttttcactttacagatctgggatacagctggacaggaaaggtttcagagcccttggtgtagcccttttaccgtgggtgctga

SEQ ID NO: 153048 - DNA, 331 bp, Arabidopsis thaliana columbia
ttttcaaggaacaagatctgtagttctgttggattcgaaactcaatgaaaacaaaagcttcagtgagaaatcaaagtaaaatgcaacatatccaatggaaaaaactgtttatctatgataatttcaagatagggtcggtaataatatgatgttcttctggtagatcataaggcgaattgattccatggactttgaggtacttcaggcaaagattgaagtgctctctcgaagttatcttcagctgatgctgctcgcttcacaaggacgtgttctggatgtgaaagtttcagctggtttaggtagcgagaagatgatttcccgacgtgaagac

SEQ ID NO: 153049 - DNA, 418 bp, Arabidopsis thaliana columbia
ataaaatcagaattacaaacaaaaatggttttgcaaaagcttcctctcattgggctgcttttgctcctgaccatcgtcgcctctccagcaaatgcagatggacctgtttgcccgccgtcgaacaaactaagccgggcaagtttccctgaaggttttttatttggcacggctactgcggcataccaggtcgaaggtgcgataatgaaacttgtcgtggaccagccttatgggaatctactgtagaagatatccagagaggtgcaataacgataacggcgatgtggccgttgatttcttccatcgttataaggaagatatccaactaatgaagaatctaaacacagacgcctttagaatgtctatcgcatggccaagaatatttcctcatgggagaaagagaaaggagtgagtcaagctt

SEQ ID NO: 153050 - DNA, 387 bp, Arabidopsis thaliana columbia
atctggagcttgcggtatcaaaggttggtgatttttcggatgataaccgatccgggattgacagatctttgcatcgtataagcgctatacgtaatcgcaaactgcaagtaattggtctaacatgtcgagtgggtcgagtagtctctggaagtgcagaaattataagagacttgattgaaggaggaggatccatcttggtattggatctcctggagttggcaaaacaactttatcagagaaattgcacggatgttagctgatgaacacaggaaacgtgtagtgattgttgacacgtcaaatgagattggaggtgatggtgatgttcctcattctggaattggtcgtgccaggcggatgcaagttccaaatgtgaatttacagcacgat

SEQ ID NO: 153051 - DNA, 269 bp, Arabidopsis thaliana columbia
  unsure (1)..(269): unsure at all n locations
ttggctgttgacaagaggtttaaaattttgcctgcttcggagactcttccgaggagtgaagttcttggtggttacatctttgtttgcaacaatgatactatgcaggaggatatgaaacgtcacctctttggtttacctccaagatacagagactctgttcgagctataacacctggattgcctctgttantttacactacaccactcaccagcttcatggnatcttttaatgtcagcgctgtggggtacaaatactgatgctactgctt

SEQ ID NO: 153052 - DNA, 314 bp, Arabidopsis thaliana columbia
caacaaatcttaaacgttttactttgttctgcactactcaacctcaatggccgcgtgagacaatggctctgtcctcccgggccttcaccggtaaggccgtcaagctttcccccgcggcatctgaagtccttggaagcggccgtgtgacaatgaggaagactgttgccaagccaaagggcccatcaggcagcccatggacggatctgaccgtgtcaagtacttgggtccatctctggcgaatcaccgagctaccttaccggagagttccccggagactacggatgggacaccgccggactttcagctgaccccga

SEQ ID NO: 153053 - DNA, 300 bp, Arabidopsis thaliana columbia
cacaaacaaaaagttagagaagagttttttttaatcattgagaaacgaaacaacagtggccgtctcatcgttccagtggcctaccatcttctcctcctcctcaatctccggctttcaatgccgttctgatccagatctcgtcggttctcccgtcggtggatcatctctccgtcgtgtccatgcctccgccgggattcttcctcattcaccggggacgctggattatcctcatgatcttaagatttcctcctaatttcgtccgtcagctgagcattaaagcccgtagaaactgtagcaaca

SEQ ID NO: 153054 - DNA, 340 bp, Arabidopsis thaliana columbia
aaaatggcaacggtcacgattctctcacccaaatcgattccaaaggtcactgattccaaattcggagctagggtttctgatcagatcgtcaatgtcgtaaaatgcggcaaatccggccggagattgaagttagcgaagctggtctcagcggctggattgtcacagatcgaaccagacatcaacgaagacccgattggtcattcgagactaatagcattgaaatggaagatttaagtatggatattacgatggagctcatacttactatgaaggagaagttcaaaagggaacattttggggagcaattgctgatgacattgctgcttgggatcaaactaat

SEQ ID NO: 153055 - DNA, 384 bp, Arabidopsis thaliana columbia
gggagatagagaagtgagagagggggaaaccctagattcgatctccattcgatttgattcgtttctcgaatcgaagcgatggttttctacttcaaggcccgtcctgatgctggcgactacaccatcttcatggggcttgataagttcgagaacgaggagctcatcaagtacggcttccctgaagatgtctggtttacgtggataaaatgtcgtcagctcatgtttactgaggcttcatagaggccaaagttttgatgacattagtgaaggtgtgctggaggactgtgctcagcttgtgaaagctaactccattcaaggcaacaaggtgaacaacgttgatgttgtgtacacttcgtgggccaacttgaagaaaactggcttcat

SEQ ID NO: 153056 - DNA, 432 bp, Arabidopsis thaliana columbia
cgcctgccgatctttctcaatctcctatcaaccatgagcaaaggtccaggactctggaccgatatcggcaagaaagccaaagatctgttgacgagagactacaattccgatcagaagttcagtatctccacttacagtgcctccggcgtggcccttacgtctactgctctgaagaaaggaggagttcatgctgctgagttgccacccaatacaagtacaagaatgctttgttgatgttaaaatcgacactgattctagtgttttgacaacagtcacacttaccgagatcctcccatcaacaaaagccattgcctccttcaaagtcccttgttataattccgccaagctcgaggtgcaatacttccacgaccacgcaacagttaccgctgctgcagctttgtaacaaaacccactaattgacataacagctac

SEQ ID NO: 153057 - DNA, 373 bp, Arabidopsis thaliana columbia
atttacactcggagcttagaccttccaatctaccggcggcgaaaatgggtttcaagaggtacgttgagatcgggagagtagcacttgtgaactacggagaagatcatggaaagctcgtcgttatcgtcgacgttgttgaccagaacagagctttggtggatgcccctgatatggagaggatccagatgaacttcaagaggtgtctcttaccgatattgtcattgacatcaacgtgtgccaaagaagaaggctttgatcgaggcaatggaaaaggctgatgtgaagaacaagtgggagaaaagctcatggggtaggaagcttatcgtgcagaaacgtagggctaaaccttaacgactttgataggttcaagatc

SEQ ID NO: 153058 - DNA, 361 bp, Arabidopsis thaliana columbia
tgcatttctaatctctactttgtcaattcctatactttcactctcttccaattatataatctctggtccatagaaaacatcggtctcttgtcaccgttgattttatttggtcaaaatcattcttcttcttgctgaataatcgttgatttcacttcttcttctggtcttaaaaaaattcaagatctatacgagaaaacaaaaacaagtaaaactttttcaaccgtttttcctgtcggtaaagtttggattcttcttagtaaattttggtcttattgtcgaccaaaagaagaagatggtcgttcagaatgttcaagatttggatgttcttccgaaacatagctcggattcattcgatgatgat

SEQ ID NO: 153059 - DNA, 450 bp, Arabidopsis thaliana columbia
ctttgtttacgcatggaattactttccacacttgtatttgctttctgtatggttttactcgtcagttttccacatggaaccattgatccaagcatggcaggtcttgctgtgacatatggacttaacttgaatggacgtctatcacgatggatacttagcttttgtaagcttgaaaacaaaataatctcaatcgaaaggattatcagtacagtcagattgtaggagaggcccagcaattatagaagatttccgcccgccttcctcgtggcctgcaacgggaacaattgagctagttgatgttaaggttcgttatgctgagaatcttccaacagtactccatggggtgagctgtgtgtttccgggtggaaaaaagattgggattgttgggcgaacgggaagcggaaagtcgactttgattcaagctttgtttcgattgattgagccaactgg

SEQ ID NO: 153060 - DNA, 364 bp, Arabidopsis thaliana columbia
cggacgcgtgggcggacgcgtgggtgtgtgttcgcctttctctcgtacaagtcaaaatggcgtccgttgttcttcgaaaccctagctcgaagcgccttgttccattctcttcccagatctactctcgctgtggtgcttccgttacttcctcttactcgatctctcattctatcggtggagatgatctctcttcctctacctcggaacctcctccttctggagatccatggcccttttactcgaaataaacctcatgtaaatgttggaactattgggcatgttgatcatggcaagaccactttaactgctgcaatcacaaaggttcttgctgaggagggcaaagctaaagctattgcctttgatg

SEQ ID NO: 153061 - DNA, 378 bp, Arabidopsis thaliana columbia
actgtgaccaagtcagtgaagagctcgataaagaatgagaagactcctgaagccgcgcagtcaaaggctaagccagtactgagaagttccaccattgagcgccttgctgttgctcggaccgctccaaaggagccacagcaaaaaccagtaatcaaaagaacatcaaaaccttcaggatacaagacagagaaagctcagaaaagaaatcgagtaaaataggtcaatcagatcgaaaagtgtggaactttctcgtgacccgagtctcgaaatcaaggaaacggtggtggaagattcacattcttacttgtcagagaagcaagttgatgcactttctgctgttgcttctgttgatgatttcaaagacattaaagaattgca

SEQ ID NO: 153062 - DNA, 292 bp, Arabidopsis thaliana columbia
tcggtcactcccatctttcatattccttttctatctctctctctctcgatcttgtgaacgactacacacactaacacagggggagagatccttcacattcaaggtggtcaatgcggttaccagattggttccaagttctgggaagtcatctgcgactagcacggcattgatttcaccggacgttacagtggatacactttttatcttcagctttgaacgtatcaatgcctattccatatgaatcctttattgtggaagatacgttcctcgtgctgttcttatggatcttgag

SEQ ID NO: 153063 - DNA, 405 bp, Arabidopsis thaliana columbia
ctcagacatgtccctaatgaagatggtaacaaaaatattgaccaggttaaccagattcgggactccttggctataatgggtgacaacagcacagcctttagcttaccgcagcctcatctcatgcgtacgaagctgtgtgatctgaaggatgaggacctggattctacatatgttgcaaggcgtgaccaattgaaaaagctcgttgctagtattatccgcccaaagatagtgcggggaaaacactaaacgggaaggaatttatttctttcctggaacagatattggatgcgttaaataaaggagagatcccatcaacaggatcactagttgaggttttcaataaagatattgttgagagatgtgtgaagctgtacaatgagaaagatgtaagagtgcgactaccta

SEQ ID NO: 153064 - DNA, 345 bp, Arabidopsis thaliana columbia
attcagcaatggcttcttctatagttacctttagcttgaagcctttagccatggccgatggttcctcttgtaccattggctgccatccttccatctcctctaccatctcttcctccagaattcgcagctccagtgtttccctccttaccggacgcattaacctgcccctctctttctctcgcgtctctctatctctaaaaccaaaacccaccttaaaaaatcccccttttctccttcgttgcccagacttcggattgggctgaagaaggtggagaaggaagcgtcgctgttgaggagaccgagaacagtttagagtcacaagatgtgagcgaaggagatgagagc

SEQ ID NO: 153065 - DNA, 220 bp, Arabidopsis thaliana columbia
cccgggccgacccacacgaccgcacaaacaaaaaaatatggctgcgtttttctattatatgcaacgaaattgacatcgggtcggggtcttaccaagactgcgccggctcatccaatctttctcctccttcttatatcatctttctcactactactactaccacacgtttctgcggttcctattttcttccatcaaccaacccgaacttcgctcatttgat

SEQ ID NO: 153066 - DNA, 333 bp, Arabidopsis thaliana columbia
  unsure (1)..(333): unsure at all n locations
gcaaaagaaaaaaaaagctattgtttgaaatatgaagaagttaactatggcaaaggatgtggaagccgttcccggagaaggatgtcagacaagagactatcaagatccgccaccagctccgtttattgatggagcggagctaaagaagtggtctttctacagagcagttatcgcagagttcgtagccactctcctcttctatacatcaccgttttgacagtcatcggttaaagattcagtccgatactgatngccgtggcgtagattgcggcggagttggaaatcctcgtatcgcttgggcctttggtggtatgatcttcatnctcgtctact

SEQ ID NO: 153067 - DNA, 451 bp, Arabidopsis thaliana columbia
  unsure (1)..(451): unsure at all n locations
cgcgtccggcaaagaccctanaatattttatagcttcgttcatttccaagctcgagactttgagaaagaggccttctaaagccaaagctgaagatgcaagtcccgtagagaggcctattcttggccgtttctcttctcacctcaagatcggaattgttgggttaccaaatgttggaaaatctactcttttcaacactcttacaaactttcaattccagctgagaatttccccttttgtccattgagcctaatgaggcacgtgtgaatatccccgatgagaggttcgattggctttgccaaacttacaagcctaagagtgagattccagctttcttggaaattcatgacattgctgggcttgttagaagagctcatgaaggacagggtctttggaacaacttcttgtccatattcgtgcagttgatgaaatttccatgtttacgtcctttta

SEQ ID NO: 153068 - DNA, 258 bp, Arabidopsis thaliana columbia
ttttccaaagaactttattttgcccgctgtatgccctaagggaaggggtccttctgtgaggaggcgttacgtccaaggaaaagaaattaacggtgctggaatcaacgccagttttgcagtccaccaggatgttgacggtagagccgtcgatgttgcattgggatggtcaagagcactttggtctccgtttactttttgctactactcttgaacaggagtccaggagtgacatcttttggagaaaagaggaattttgct

SEQ ID NO: 153069 - DNA, 388 bp, Arabidopsis thaliana columbia
caaaagaagaagagaaacaacaagaagtagtaatggcttcctctatgctctcctccgccgctgtggttacatccccggctcaggccaccatggtcgctccattcaccggcttgaagtcatccgctgcattcccggtcacccgcaagaccaacaaggacatcacttccatcgcaagcaacgggggaagagttagctgcatgaagtgtggccaccaattggaaagaagaagtttgaactctatcttacctccctgaccttagtgacgtcgaattggctaaggaagttgactaccttctccgcaacaagtggattccttgtgttgaattcgagttagagcacggatttgtgtaccgtgagcacggaaacactcccggttactacgatggac

SEQ ID NO: 153070 - DNA, 376 bp, Arabidopsis thaliana columbia
  unsure (1)..(376): unsure at all n locations
gtcttgtcgaaatgttgcatnaaatggcagtgtctgtttaactccctgtggatattacctgtgtgatgggcaatcatgaaagagcttggaacactcacgttatgcggtttcttgagaggcatggcatcccttatcattatgtatctacaactaaagagaataaaagagaagatgatattttggaattggttaaggacactgattcctagttcttgctagatatatgcagattttatcgggcttactttttgaaaggttatggaaaggatgtaatcaacatccaccatggtctcttaccatcatttaagggtggatattccgcaaaacatgcattcgacgctggtgtgaaactaattggagccactagtcactttgt

SEQ ID NO: 153071 - DNA, 281 bp, Arabidopsis thaliana columbia
  unsure (1)..(281): unsure at all n locations
tttctgaggatcttttaaagaaactgtatttttcctcgacagaaactganagatatggggggtcaaaagcggggtctgcgggccagatcaaanagcatctcaaagggtgatgatgtgaaaatgactgatgctgatggatcatcaaaccaaagtggcgaatcatcaacttgtgaccaacaggaaggtgcttcgcctccatgaccggaatttatgacctgcatcggttacagatttagtccgattctgatgccgctggcgtaattttggggcatgggtcaagc

SEQ ID NO: 153072 - DNA, 178 bp, Arabidopsis thaliana columbia
aaccaaaaaaaaatatttattactaacgaggactttatcatatcaatctttgctcacagaattgctgaacagaggaaagttattattcatgcataccacgaaaccaactgcgataccttctcaagactcttgacaaggagctctcaactatttctaagagagctatcttgttgattac

SEQ ID NO: 153073 - DNA, 399 bp, Arabidopsis thaliana columbia
tccgatcattagtttctttaatcttttttattctcttcttgttcgtgatctctctgggcgtgcggaaaaagatgtcggcggggaacggaaatgctactaacggtgacggagggtttagtttccctaaaggaccggtgatgccgaagataacgaccggagcagcaaagagaggtagcggagtctgccacgacgatagggtccgacggtgaatgccacaaccatcgatgagttcattcgttacagaagaaacgttctgctcctaccacaccgatcaaccaaaacgccgccgctgcttttgccgccgtctccgaggaggagcgtcagaagattcagcttcaatctatcagtgcatcgttagcatcgttaacgagagagtcaggaccaaaggtggtgagagga

SEQ ID NO: 153074 - DNA, 359 bp, Arabidopsis thaliana columbia
ctctgagaaaaaacaacagatccgaattttatctttaatcagccggaaaaaatggagaaagcgatcgagagacaacgcgttcttcttgagcatctccgaccttcttcttcttcttcgcacaattacgaggcttctctatctgcttctgcttgcttggctggggacagtgctgcatatcagaggacctctctctatggaatgatgttgtcattgtcgcggcacataggactcactatgcaagtccaaacgtggcaatttcaaggatacatatcccgatgatttgctcgcacctgttttgagggcattgatagagaagacgaatctaaacccaagtgaagtaggtgacattgttgtgggta

SEQ ID NO: 153075 - DNA, 418 bp, Arabidopsis thaliana columbia
ctaaacctcaagccgtcgtctccaaagttccccctcagagacgaaaaaatgaagaccattttgtcctcggagactatggacatccccgacggcgtcgccattaaggtaaacgccaaggtgattgaggtcgaaggtccacgaggtaaactcactcgtgacttcaagcatctgaatctcgatttccagttgattaaagacaagtcactggaaaacgtcagcttaagattgattttggtttggttctcgtaagacaagtgcttcgattagaactgctttaagccatgttgataatctcattgctggtgttactcaaggttttctttatagaatgagatttgtgtatgctcattttcctatcaatgcttctattgatggtaacaataagagtattgagattcgtaactttcttggtgagaaa

SEQ ID NO: 153076 - DNA, 307 bp, Arabidopsis thaliana columbia
gggggacatgatcacagaagaagcacttttttcctatcaaactatgttgaacactggggatggagttagggatgaaacaggtgctagtcctacttcatgggctatttggaccagagcttggactgcagaagaaaaccgacatggcgatcttctgaataaatacctttacttgtctggtcgtgttgacatgaggcagacgaaatgaccattcagtacttgattggatctgtatggatccgcggacagagaataacccctaccttggcttcatttatacgtcattccaagaaagagcgacattcatctc

SEQ ID NO: 153077 - DNA, 374 bp, Arabidopsis thaliana columbia
cagaagacaaaccagaaagaaaagaaaaacagatcacaccgaaggctttctcatggaggaaacaaaaccaaagaccgttgaagatgttgagaccgttgatgtttatacagctaaaggctttcttagtactggtcaccgatatctcgacgtaaggacaaatgaagaatttgccaagagtcatgttgaggaggctttgaacttccttatatgttcaaaacagatgaaggtagggtataaatcctgatttcctttctcaagtggcatcggtttgcaagaaagatgaacatttgatcgcttgtaacgctggaggaagaggaagtcgtgcttgcgttgatcttttaacgaggggtacgaccatgtggctaacatggggg

SEQ ID NO: 153078 - DNA, 417 bp, Arabidopsis thaliana columbia
atttcttctcaggtaatactcgtaagatttatcaacacaagcaaaaaagatggcccaaaagctagaggcaaagggtggtgagatgggagatgtatgggatgatggtgtttacgaaaatgttagaaaggtatatgtagggcaagcacaatacggtatagccttcgtcaagtttgagtatgtcaatggttctcaagtggttttggagatgaacatggaaagaagacagagctagagttgaagagtttgagattgatgcggatgactacatcgtatacgtggaaggttaccgtgggaaagttaacgattttacgtcagaaatgaacacttttctattttattaagactttttaaaggcaaaaacctttaattctattcgaaaaaagaccctggtgtttaagttttgttctacattgttgg

SEQ ID NO: 153079 - DNA, 385 bp, Arabidopsis thaliana columbia
tgctgagatcacaaacagtgcttttgagccatcatccatgatggcgaagtgtgaccctcgtcacggaaagtacatggcttgctgtttgatgtaccgtggtgatgtcgtccccaaggatgtgaacgcagctgttggcaccatcaagaccaagcgtactattcagtttgtggactggtgtcctactggattcaagtgtggaataactaccagccaccaactgttgttccaggagggatcttgctaaagtccagagagctgtgtgtatgatctcaaactccaccagtgttgctgaggtgttctcccgtattgatcacaagtttgatcttatgtacgcaaaacgtgctttcgttcactggtatgtgggtgagggtatggaagaaggaga

SEQ ID NO: 153080 - DNA, 414 bp, Arabidopsis thaliana columbia
ccaaaatgcaactccaaacccaatccttcgctctcaatcttctgccatctccaaatttcgccaaacccatcgagagacgtgaattcatctctctaaaacgagacccatctcgtccaatttcactccgatgttccgtttccacgactttggatactccggcgaccgcttcgacccacaagccctttccggcggaggtttcaaggagtatcatgtgagctttcatctgttggaactcttccactttgacccacgacggttggcctctcggcgtaggagttcgcttcgccgttgacaaagatggcactcctgttctttgcctcaatcgctctgtctctcctgacaagaggtctgctcttcatgttcagttagaacaatgtggattgaggactcctcagtgtacgatacaaggtagca

SEQ ID NO: 153081 - DNA, 374 bp, Arabidopsis thaliana columbia
caaacctctctcagattcttcttcttcctcgcagatcgatttttttttgaagctaaatctcaaaaatggagaacgacgcaggtcaggtcacagagctctacattccaaggaaatgctcggcaacaaacagaatgatcacatcaaaggatcatgcttcagttcagcttaacattggtcatcttgatgctaatggttctacactggccaattcaccacttttgctctctcggatttgtccgtgctcagggagacgcagacagtggcgtggacaggctctggcagaagaagaaggtcgaagctaaacaacagtgagagacaatctgacaatgtcataagctcttgtttggtttttgagggttcgatttattagctat

SEQ ID NO: 153082 - DNA, 388 bp, Arabidopsis thaliana columbia
tgcaaacatggcaagaggattgaagaagcatctaaagaggctcaatgctcctaagcattggatgcttgacaaacttggtggtgccttcgctcccaaaccatcttctggacctcacaagtcgagggagtgtcttcctcttgtcctgatcatcaggaacaggttgaagtatgctttgacttaccgtgaagttatcttatcttgatgcaaaggcatatccaagttgatggaaagtcaggactgacaagacttaccctgctggtttcatggatgttgtatccatccccaagaccaatgagaacttccgtcttctctacgacaccaagggacgtttccgtctccactccatcaaggatgaggaagcaaagttcaagctttgcaggttagatct

SEQ ID NO: 153083 - DNA, 404 bp, Arabidopsis thaliana columbia
cggacgcgtgggcaaaactcgcttcctgattatcaaatcaaaagcttctctatcaagctgagcgaaaagtcacatcttttgggagaaacaatggctcgtaccaagcaaaccgctaggaaatccaccggaggtaaagctcccaggaagcagcttgccaccaaggcggcgaggaaatcagcaccaaccaccggaggatcaagaagcctcaccgttaccgtccaggaaccgcgctcttcgtgagattcgtaagtaccagaagagtactgaattgttgatccgcaagcttcccttccagcgtctcgttcgggaaatagctcaagacttcaagacggatctgaggtttcagagtcacgcggtgttagcttttcaagaggcggctgaggcatacctagttggacttttcg

SEQ ID NO: 153084 - DNA, 369 bp, Arabidopsis thaliana columbia
atcccaaagaagaacgaatcgcgagaacatggggaaccacggctcgtgggcttccttatgcggaagaagcaatcaccaaagctggaaactggttgattggaggtgatttacaagttttggagccgatcaagtacaatgatggtttagaccggtttcgtttatctccgtcgcagctgcgggaggagtttataaggcgcgtgcggacgcggttttcgcgttccagcttaggacccggtgcataatggtcatgcgcttcttatgacggatactcgtagaagacttcttgagatgggttacaaaaaccctgtcttgttgttgaatccacttggtgggtttactaaggctgatgatgtacctctcagctggcgt

SEQ ID NO: 153085 - DNA, 449 bp, Arabidopsis thaliana columbia
cagattgtaaatttagggaagagactttctcaagcaatctagaagcaaatcgatcgccaagtctccggattatttgcaagaatcgttcccagataatcttccccagattctccacttctccaggtattaatttcgtattgagtggattagattagatttcaagatatgagagcctcactggcgttctaatgtcactgttcgtatttttatcaatcagcttgaagaagacgagaagatatggctacttcgaagaaaatgatcacacgtgaagaatgggagaagaaactaaatgctgtgaagcttaggaaagaagatatgaatactttggtgatgaattttcttgtgactgaaggatatgttgaagctgctgagaaattccaaagggagtctggaaccaaaccagagatagatcttgcgaccattactgatcgaatggctgttaaaaaggc

SEQ ID NO: 153086 - DNA, 440 bp, Arabidopsis thaliana columbia
gaaactcactcctgacctctcgcatggcgtttctagactctctagtcatctttctgttgtggactctttttgtgactatcgggagctcggaaacgccgtgcccgaatttcaagtcgatcatcagtttcggcgattcgattgcggacacgggaaacttggttggtctctctgatcgtaaccagcttcctgtgactgcgttccaccgtacggagaaaccttctttcaccaccaaccggtcgttcctgcgatggccgcatcatcatggactttatcgctgaatttgtggggcttccttatgtgcctccgtactttggatctaaaaatagaaactttgataagggtgttaatttcgcggtagccggagcaacggcactgaaaagttcctttcttaagaagagaggaattcaaccacacaccaacgttagtttaggagttcagct

SEQ ID NO: 153087 - DNA, 379 bp, Arabidopsis thaliana columbia
  unsure (1)..(379): unsure at all n locations
gaaaagaagagaaaaagtttaatagtaaaataatcgatcctcttctcttctcttctctgaggctcgttggaaatctgaattctccgatcgaatcgaaccaatcgcagaggctaagaagaggacctttgagagaatctccgagtcaggatcagaaaaaacggtgatacggaagctagttctagggctaatgggcgccgcgggctccaaactcgagaaagctctncgcgaccagttccccgaaggtgaacgctactttggattcgagaatttcggcaacacttgctactgtaacagcgttttgcaggctcnttatttctgtgttcctttccgtgaacaactgctcgaatactataccagtnataaaagcgtggccgatgct

SEQ ID NO: 153088 - DNA, 336 bp, Arabidopsis thaliana columbia
  unsure (1)..(336): unsure at all n locations
cttccaagccttttaaccctcnngtttccctcgcttacaaactttccagaactcgnnagaagccagaatctcagcagttcccggggaggaatcgaaacgaggtattcgatacgagacttatagttcttctcacagnncagctggaccacttcagctttcgcccgatctttcccaaaattctctcaacgctttacctcatcaattccgatcacttggcttnggtgctttctgcgctttgggacctatcttccttttactgggcggcaacgaaaggtgataattgaatgggtttgctacaaaaactctggattcaatttgggatattcgcctcccaag

SEQ ID NO: 153089 - DNA, 402 bp, Arabidopsis thaliana columbia
  unsure (1)..(402): unsure at all n locations
ccagcgcgtccgcaacaacaaatctnaaacttttttcttngtttctttctacccaacctcaatggcctcctgagcaagtgctctctactgcgcgtgcctgcgccaataaggccgtcaagctttcccccgcggcatctgaagtccttggaagcggccgtgtgacaatgaggaagactgttgccaatccaaagggcccatcaggcagcccatggtacgatctgaccgtgtcaagtacttgggtccattcttggcgaatcacctagctaccttaccggagagttccccggagactactgatgggacaccgcctgactttcagctgaccccgagacattcgcaaggaaccgtgaactagaagttatccacagcaggtgggccatgctcggaaccctaagctgcgtc

SEQ ID NO: 153090 - DNA, 407 bp, Arabidopsis thaliana columbia
caggggagttggaaaatattcgttgtctcttatgttctcacaagagaggtttgtgggctatgaagggcaagaacggtggcgttttccctcgtcacgatgctcagccaaaggtcgacgctccggttgagaagcctgccaagttttatccggcggaagacgtcaagaagccgcttgttaacagacgcaagcctaagcctaccaagctaaagccagcatcactccaggaactgtgttgatattcttgctggtagattcaagggtaagagagttgtcttcctcaagcaactttcttctggtttgcttcttgtaacaggaccattcaagattaatggtgttccattgagacgtgttaaccaagcctatgtgattggaaccttcacaaagattgacatttctggagtcaacac

SEQ ID NO: 153091 - DNA, 381 bp, Arabidopsis thaliana columbia
gagaaagagagaaagagagacagagtttatttcgtacagtgcgtgtttcctacaccggagcgcattggctgcatcagccgcacgatcatcatcttcctcctcatcccagcgtcacgtgtcgctctccaaacctgttcagatcatctgtaaagctcaacagtctcatgaagacgataactccgccgtctcccgccgcttgctctcactctcctcgtcggcgccgctgctgttggttccaaagtatctcctgctgatgccgcctacggtgaagctgcaaacgtgtttgggaagccaaagacgaacacagacttcttgccatacaatggagatgggttcaaagtgcatgttccagcaaaatggaacccaagcaaagagattgag

SEQ ID NO: 153092 - DNA, 340 bp, Arabidopsis thaliana columbia
caactcgaagatcttcaattccatcaaactcaaggagtttcgtttctctgatttcttcgattgagataaggagtaaatggcgacagatgatttttttagcttgcagagagaatattggcgacaagtggcggaatccgatggtttcgatattgagagtgttcaaataccaccatctatgtatggaaggatcaatggactgattccccacaactgtgaaatcaatacgccgctccttaccgtgtcttgggcaagcactatgctaagcttgggcttcatcgttacaatatgttgaaggggactaaattcgagttcggtcgcctaatgaaattcaacatgttac

SEQ ID NO: 153093 - DNA, 405 bp, Arabidopsis thaliana columbia
  unsure (1)..(405): unsure at all n locations
tgcttggctggggacagtgctgcatatcagaggacctctctctatggagatgatgttgtcattgtcgcggcacataggactccactatgcaagtccaaacgtggcaatttcaaggatacatatcccgatgatttgctcgcacctgttttgagggcattgatagagaagacgaatctaaacccaagtgaagtaggtgacatgttgtgggtactgttttggcacctggatctcaagagccagtgaatgcaggatggctgcgttctatgctggtttccctgaaaccgtggctgtcagaactgtgaatagacagtgctcatctgggcttcaggcttgtgctgatgtagccgctgccattaaagcgggattttatgacattggtatcggngcttgtttggagtccatgac

SEQ ID NO: 153094 - DNA, 446 bp, Arabidopsis thaliana columbia
ttctaaacctctccatatgtgagatctaacattatgagccattgtttcagctggagcgattcctggtatagttcaagggcttaagaaaggaagcatggaggccagagagaatgcggcggctacacttttcagtctatcagtgatcgatgaaaataaagtgactatcggtgccttaggagcaattccgccactcgttgtattattaatgaaggtacacaaagaggcaagaaagatgtgctactgcactctttaacctttgtatataccaaggaaacaaaggaaaagctatacgtgcaggagtgattcccacgttgactagactcttgacagagcccggaagcggaatggtcgatgaggcactcgcgattttggcgattctctctagccaccccgaaggaaaagcaatcataggaccctctgatgcagtcccagtttggttgagttat

SEQ ID NO: 153095 - DNA, 277 bp, Arabidopsis thaliana columbia
gcgtacagaatagtgtaaatattcattatgtgaaccgtttccatctttctcggatagggaaccccgcggggtacaagcttgtacctggtggtaatgctacaagtttgctctatcatgatgatccaccgcaaatgcgaggcgctttcacaaacaatcagatatgggtgactcgttataaccggccagagcaatgggctggaagggctttgatgtaccatagctcgtggtgaagacacactacaagtttggccgacagagatcggtccattgagaacaa

SEQ ID NO: 153096 - DNA, 361 bp, Arabidopsis thaliana columbia
ggtctttgaacactgtctgggcacagcatttgagtgaggaggtcaggagaaggttctacaagaactgggctaagtctaagaagaaggctttcactgggtacgctaagcagtatgacagtgaggatggcaagaagggtattcaggctcagcttgagaagatgaagaagtacgctactgtcatccgtgttttgggctcacactcagatcaggaagatgaagggattgaagcagaaaaaggctcacatgatggagatccagatcaatggtggtaccattgcccagaaggttgactttgcctacagtttctttgagaagcagatcccaattgaagctgtctttcagaaggatgaaaatgatgata

SEQ ID NO: 153097 - DNA, 480 bp, Arabidopsis thaliana columbia
  unsure (1)..(480): unsure at all n locations
gggncgacccaggcgtacgcgtcacgagcttcgtgtgagacaacaaaaaccttgtatattttctaaccgaaatggcgcggttcagtcgtggttgtgagtcgtgacctcttagtcgttgccatcntctatgnttccctgacaccaaccactgctnncaactcaaaaccaatttctaccggaaactcatgtnccgaatggttgaaccaaatcgtgaaaaaagtncgtccaagaaaanaatcaaacagaccttcgtcanccatcccagctactctccgcctcttttccacgattgcttcgtcaatggatgtgatgcgtcggtcatgattcaatcaacgcctaccaacaaagccgagaaggatcatccagacaatatttctttggccggagatggatttgacgttgtgatcaaagccaagaaagctcttgacgctatcccaagttgcaaaaacaaagtctcttgtgctgatattcttgctttag

SEQ ID NO: 153098 - DNA, 391 bp, Arabidopsis thaliana columbia
accggaaccgccgggccgacccaggcgtacgcggacgcgtgggtttcatctgttgttccctgtgactatggctactccactctcaatctcatcaaagcctctcacctcccgccattgttaccgtctccacttatcttctacttcattcaagggaaatgtaagtgttttgggggcaaacccaagtcagattctatctctgaaactcaaccaaacccttaaaacgagaaaccaacagaatttgcgagaccccttgttgtggttagccaacggcggctacgtcgtcggcagttgtagctccggagagattccgtttggataatcttggaccacagccaggttcgaggaagacgcacaagagaaaaggtagaggtttctctgcaggacatggagc

SEQ ID NO: 153099 - DNA, 412 bp, Arabidopsis thaliana columbia
gcttatgttaaatattcttcatgttacatgctacaacttgttcttgttatgtatatccttgagtttctttagtctaccggaggatttttcgctgcatctagactagcaggagcaacagcgcctccagcacatgtcgtctctcgtagtatcggtctacaggttttatttccagacactaagaaagttttttttaatcttttcgtttctgttctctctgctaatgttccgaataagtctaaagctgttatattttcctttaagggtattggtgtgctccttgaaggaatatttggttccattactggcaataccgcgtccgtgtaagttctaaatatctcttgctatatgtgctactatcctttcagaatttatacaaagaaactaggtatataattcatcttgatgatatata

SEQ ID NO: 153100 - DNA, 366 bp, Arabidopsis thaliana columbia
caaaacttcaaaccaaaaaaaataaatgggagaggaagagaagaaaccagaagcagcagaggaaaagaaaatggaagagaagaaaccagaagagaaaaaagaaggagaagacaagaaagtggatgctgagaaaaaaggagaagattctgacaagaagcctcaagaaggagaatctaacaaagattccaaagaagatttgctccggcggcgcctgaggctccagcaccgccttctccgccgcaagaggttgttcttaaggtttacatgcactgtgaaggatgtgctagaaaagtccgccgttgtctcaaaggcttcgaaggagtggaagatgtgatgactgattgtaaaacggggaaagtggtggtg

SEQ ID NO: 153101 - DNA, 383 bp, Arabidopsis thaliana columbia
  unsure (1)..(383): unsure at all n locations
gcaatatcatttccaatttataaaagttaaatccatggctgcatctttctctgtcccctcgatgataatggaagaagaagggagattcgaagcggaggttgcggaagtgcagacttggtggagctcagagaggttcaagctaacaaggcgcccttacactgcccgtgacgtggtggctctacgtggccatctcagcaaggctatgcttcgaacgagatggctaagaactgtggagaacgctcaaaagccatcaagccaacggtacggcctctcgcaccttcggagcgttggaccctgttcaggtgaccatgatggctaaacatttggacaccatctatgtctctggttggcagtgctcgtccactcacacatncactaatgag

SEQ ID NO: 153102 - DNA, 420 bp, Arabidopsis thaliana columbia
cgcagacatttttgtttatatgcatacataataataatacactcttgtcaggatttttgattctctctttggttttctcggaaaaatgtctgcgatactccaaggagctggagctgcaacggctctctcgccgtttaattctatcgattccaacaaactcgttgctccttctcgctcttctctttcagtgaggagcaagagatacattgttgccggatctgatagtaaagctttggttctagcctcgtagctcgtcgctctgagccgttgataccaaatgctgttacgacgaaggcggacactgctgcgagctctacttcatcaaagcctggacatgagctattacttttcgaggctcttcaagaaggtctagaagaagagatggacagagatccacatgtatgtgtcatgggtgaagat

SEQ ID NO: 153103 - DNA, 469 bp, Arabidopsis thaliana columbia
ctctcaatcccggcggcgaagatgaagtacaacccaagagtgacctcttctcgcagaaagaacaggaaggctcatttcacagcttcctccagcgagaggcgtgtgataatgagctctcctctctccaccgatcttcgtcagaagtacaatgtcagatccatgccgatccgtaaagacgacgaggttcagatcgttcgtggtacttacaagggacgtgaaggcaaagttgttcaggtttaccgccgcaaatgggtgattcacatcgagagaatcacgagggagaaggtgaatggaacaaccgtgaacgttgggattcagccgtcgaaagttgtgataacgaagcttcgtcttgataaagataggaaatcgcttttggagaggaaggctaagggacgtgctgctgcttgataggagaaaggtactaagcttacgtctgaggatgttatgcagaacggtggttaaagttaga

SEQ ID NO: 153104 - DNA, 482 bp, Arabidopsis thaliana columbia
gttgccacaactggtacggtattagctgcgactcgctcactcaccgagtcgccgacataaatctccgcggcgagtcagaagatccaatcttcgaacgagctcaccgaaccggttacatgaccggacacatctccgcctcgatatgtgagctcactcgtctctccgccattacaatcgccgattggaaaggtatctccggcgaaatccctaaatgtatcactcgtcttccttttctccgtacactcgacttaatcggaaaccaaatctccggtgggattccatacgacatcggaagattaaaccggttagctgttttaaacgtagccgataaccgaatctccggttcaattccaaaatcattaaccaatctctctagcttaatgcatttagatctccgtaacaacttaatctccggtgtaatcccgtcggacgtcggaagattaaaaatgctcagccgtgcgttattatccggtaaccgaata

SEQ ID NO: 153105 - DNA, 429 bp, Arabidopsis thaliana columbia
aaggggagaagcaaaaatggtttctctgaagctccagaagcggctcgccgcatcagtgatgaagtgcgggaagggcaaagtttggctcgatcccaacgaaagctccgacatctccatggccaattcccgccaaaacatcaggaagcttgtgaaggatggtttcatcatcaggaagccaaccaagattcactctcgttccagagctcgcaaaatgaagattgccaagatgaagggtcgtcactctggatacggtaagaggaagggtacccgtgaagctaggttgccaacaaaggtactgtggatgcgtaggatgcgtgttcttaggcgtctgttgaagaaatacagagagacgaagaagattgacaagcacatgtaccatgacatgtacatgcgtgttaagggtaatgtgttcaagaacaagcgtgtctt

SEQ ID NO: 153106 - DNA, 354 bp, Arabidopsis thaliana columbia
cacgcattactacaactgtgcgctctagctatctctgctttgtagtgaaaacagctttggctatggcttcttcgacagctttgactctgtcatggagctcctctccttgttggtcacacagctacaatggcggggcaaaagaaaccctaaaagtatctgagcgaaggttcaatttcgaagttgtttcccagaagaaagctaagaaacttcgcatggtactctagcaagaggacgtcacggatttgggtaagcaagggcagatacttgatgcgaaagctggatttttcagaaacttactcttgcctactggaaaggctcagcttatgactccacttatgctcaacgaattgatga

SEQ ID NO: 153107 - DNA, 429 bp, Arabidopsis thaliana columbia
aaggataggaaagcaaccgatcgctgtaccttccaatgtaaccattgcattggaaggtcaagacttgaaagtgaagggtccattaggagagctggctttaacttacccacgcgaagttgagcttacaaaggaagaatccggtttcttaagggtcaaaaaaaccgtcgaaactagaagagccaaccaaatgcacggccttttcaggacgcttaccgataacatggttgtgggagtatcaaagggatttgagaaaaagcttatacttgtgggtgttggttatcgtgcaacagtagacggaaaggagctggtgctaaatctcgggttttcacacccggtgaagatgcagataccggatagtctgaaagtgaaagtggaagagaacacaagaatcactgtgagtgggtacgacaagagcgaaattggcagttt

SEQ ID NO: 153108 - DNA, 476 bp, Arabidopsis thaliana columbia
ctctacgcttgacatggccttcgatctccaccatggctcagcttcagatacgcattcataagaacttccgtcgttttctctcccaccttatcctcagatgataatggaagcgattgagtccttgaacgataagaacggctgcaacaaaacgacgattgctaagcacatcgagtcgactcaacaaactctaccgccgtcacacatgacgctgctcagctaccatctcaaccagatgaagaaaaccggtcagctaatcatggtgaagaacaattatatgaaaccagatccagatgctcctcctaagcgtggtcgtggccgtcctccgaagcagaagactcaggccgaatctgacgccgctgctgctgctgttgttgctgccaccgtcgtctctacagatccgcctagatctcgtggccgtccaccgaagccgaaagatccatcggagcctccccaggagaaggtcattaccggatctg

SEQ ID NO: 153109 - DNA, 308 bp, Arabidopsis thaliana columbia
ctcattgttgcagaggtttaggaagaaaggaattgttttatcgtgactttcaattgggatattgcgtgtaaaatgtgggtgcctacattgagctcaagctcatgtgcaagtgatgagagggatgagagcagtggacaagccgcgcttacgcccgattgtttcaatgattatgatctatcgcctgtcaacacttacctttatcgggatgggattggcataccacattatgcggttgaggcaaacaatttaggaatattgtgtatgagagctcacgagtttacaacaggtgcagattctgatgctgagcc

SEQ ID NO: 153110 - DNA, 262 bp, Arabidopsis thaliana columbia
ggctacgacccacgcgtccaaaaaggctgaggattggttaaaccctgatgttgtactggaagctttcgaagctagggctctcagaatggctgttacgtgtgccaaaaatctcagcaagtttgagaatcaggaacatggattccaagagctcttggctgatttgattgaggccgatatcgctcattgccaatagattggtgtttataggttcatagccatactgggagcaagacatacagtgttgttccagtgaacccacagc

SEQ ID NO: 153111 - DNA, 435 bp, Arabidopsis thaliana columbia
cagaattacaaacaaaaatggttttgcaaaagcttcctctcattgggctgcttttgctcctgaccatcgtcgcctctccagcaaatgcagatggacctgtttgcccgccgtcgaacaaactaagccgggcaagtttccctgaaggttttttatttggcacggctactgcggcataccaggtcgaaggtgcgattaatgaaacttgtcgtggaccagccttatgggacatctactgtagaagatatccagagaggtgcaataacgataacggcgatgtggccgttgatttcttccatcgttataaggaagatctccaactattgaagaatctaaacacagactcctttagaatgtctatcgtatggccaagaatatttcctcatgggagaaaggtgaaaggagtgtgtcaagctgttgtgcaattttaccacgacc

SEQ ID NO: 153112 - DNA, 457 bp, Arabidopsis thaliana columbia
gcgtacgcaacaaacaaaaaaaacaccgccacgagacgagccaaactaaagattaggatttgggaggttgatgatcaattccggacaacggaggaaaccatactgatagattcaacgacggtgattgcggcggaggagtagaaacccgttggaaacatggcgatgagagaccttgttaacggcggtgccacttgtgccgttcctggatcgaattcttcttctaatcctcttggagctctcaccaacgctttacttggttcgtgtggcaaaacccaggaaaggctcaaggagatacctaatgcaaaccggtcaggtcctcggccacaattttactctgaagaccaacagataaggtcacttgctggttctgagttagatcagccacttttgcaaccgggtgctcaggggtcagagttcttccgtggttttcgctcttgtgatcagaatggtttgggtg

SEQ ID NO: 153113 - DNA, 460 bp, Arabidopsis thaliana columbia
ctgctctgaatgcaattaaaaacagtttcaagaacgcaccagctgactggagtggggatccttgtttacctaaaaattactcgtggtctggaatttcctgctctgaaggcccccgaattcgtgtagtcgctttgtacttaactaatatgggagtttcaggttcgctagcacctgcagttgctaaattaacagcattgtcctccatttggctgggaaacaattctctctcgggtagtttacctgacttcagttcactcaaacggctggaatcattgcactttgaagacaatcttttcagtggaagtattccttcatctttaggtggagtgccgcacttgcgagaactgttcttgcaaaacaataacctaactggccaagttccgagcaatcttcttcagaagcctggactgaacctaaggacttctggtaacccctttttgactcaaccgtcacgttgatt

SEQ ID NO: 153114 - DNA, 409 bp, Arabidopsis thaliana columbia
acgcgctaagaccgccaccgttggagtctggatcgacgcttgtatctcggattgagtccgatgagaccaacggaacggctcattttttggagcatatgatattcaaaggcacggataggcgtacagtgagagcgttggaggaagagatcgaagatattggtggtcacctgaacgcgtatacatcgagggaacagaccacttattatgctaaggatttggattacaatgtgaaccacgctttggatgtcttggctgattttctacacaattctaagttcgaggaacagagaattaaccgtcaacgagatgtcattcttagggaaatgcaagaggtggagggacaaaccaatgaagtggttctctgccatttacatgccactgcattccaatacacaccccttggaagaac

SEQ ID NO: 153115 - DNA, 489 bp, Arabidopsis thaliana columbia
caaggagagaagagagaaagagagaaagagagacagagataatggcgtacagtgcgtgtttcctacaccagagcgcattggcttcatcagccgcacgatcatcatcttcctcctcatcccagcgtcacgtgtcgctctccaaacctgttcagatcatctgtaaagctcaacagtctcatgaagacgataactccgccgtctcccgccgtcttgctctcactctcctcgtcggcgccgctgctgttggttccaaagtatctcctgctgatgccgcctacggtgaagctgcaaacgtgtttgggaagccaaagacgaacacagacttcttgccatacaatggagatgggttcaaagtgcaggttccagcaaaatggaacccaagcaaagagattgagtatccaggacaagtccttaggttcgaagacaacttcgatgctactagcaatctcaatgtcatggtcactcctaccgacaagaagtccatcactg

SEQ ID NO: 153116 - DNA, 451 bp, Arabidopsis thaliana columbia
caagtctctccttcttctccgtccttcccaattcttccgttcaaacaaatttctccaaacccaaaccctaatttcctccgtctgtgaaatcaagggttttctctgatctgggttttgatcagaaatcagatctaggtttaattttcgaaatcaaattatgaggaagagagaaagagagaacccttgttcgatttgtgggcattaccataagtacgaggaaggagaagtatgtggagtctgtggtcactgtatgcctgtttcttccgatacggtggcgccgcaacaagtccacgtcagtgcttttccgtcggagattctccctgagtttctttacctcggtagttacgacaacgctttttgctttgagcttcttaagactcaaggaatctttcgtgttcttaatacggttcctatgtgccagaatctctacaggaattcattcacttatcat

SEQ ID NO: 153117 - DNA, 415 bp, Arabidopsis thaliana columbia
tgcgaagttgaatgcttcttcatcatctttcaaggactcgagtctttttggtgcctccattaccgaccaaatcaaatccgaacatggatcttcctcgttaagattcaagagagaacagagcttaaggaatctagcaattcgagcccaaaccgctgcgacttcaagccctacagttacaaaatccgtggacggcaagaaaacgttgaggaaaggaaatgtggtggtcactggagcctcgtctgggttaggtctagccacggctaaagctctagctgagacagggaaatggaacgtgataatggcgtgcagagactttcttaaagccgagagagctgctaaatccgtagggatgcctaaagacagttacacagtgttgcatttagacttagcctcgttggacagcgttagacagttt

SEQ ID NO: 153118 - DNA, 471 bp, Arabidopsis thaliana columbia
tctatgctctcttccgctactatggttgcctctccggctcaggccactatggtcgctcctttcaacggacttaagtcctccgctgccttcccagccacccgcaaggctaacaacgacattacttccatcacaagcaacggcggaagagttaactgcatgcaggtgtggcctccgattggaaagaagaagtttgagactctctcttaccttcctgaccttaccgattccgaattggctaaggaagttgactaccttatccgcaacaagtggattccttgtgttgaattcgagttggagcacggatttgtgtaccgtgagcacggtaactcacccggatactatgatggacggtactggacaatgtggaagcttcccttgttcggttgcaccgactccgttcaagtgttgaaggaagtggaagagtgcaagaaggagtaccccaatgccttcaataggatcattggattcgac

SEQ ID NO: 153119 - DNA, 483 bp, Arabidopsis thaliana columbia
  unsure (1)..(483): unsure at all n locations
gtcgaccacgcgtccgggcgatattcttcttcttcggctcacattgcattgtctctcactcgatccttcgttctttcagggacaatcatttcggaaacatgccaggtcagaagattgaaacgggtcatgaggacattgtccatgatgtgcagatggattactatggaaagcgaattgcaactgcatcatctgactgcaccatcaagataaccggtgtcagcaacaacggtggatcgcagcaactagccacattaaccggccaccgtggtcctgtctgggaagtcgcgtgggcacacccaaagtatggatcaatccttgcttcatgctcctatgatggtcaagtcatactctggaaagaaggcaaccagaaccaatggacccaagatcatgttttcacagaccacanatcttcagtcaactccattgcatgggctcctcatgatatcggactatccttggcctgcgggtcatctgatggcaaca

SEQ ID NO: 153120 - DNA, 470 bp, Arabidopsis thaliana columbia
atcgcttcatcttcttcttcttcaacaaatcgagtcctttttctgataactcatttcgaggtcagaaactcgccaagaactggatactctggcggaatcagagattaagaaccgagacgtggttctgaaactgtatgaagccctgagatctcgcgacgtcaaatctgtgcaccagatcttaaccccagatctggagtattggttccacggtcctccgccgcaccagtttttgatgcgcgtactcaccggaggtgtctctccgtcttcttcctccttcgaattcgtacctctctccgtcgtttccttcggatctaccgtaatcgcggaaggctgcgacgccgcgacatcgatttcttggatccacgcttggactgtagcgaatgggataatcacacaggtgagggagtactctaacacttctctcaccgtcacggatcggtaacgttgttgctggacgacgctccgctgag

SEQ ID NO: 153121 - DNA, 471 bp, Arabidopsis thaliana columbia
cacgcctaacctgcttcaatggaaaagtcatacatttacctaaccagaccttcttcgcatgttcgggttcttccttcgtgatctctcaaattctctcccttttaaagtcctaaatcaaaaccctaaacccataaatccaatccctccattcgaattcttcattctctctctctctctctctcacaattactgatcggttctgaaatttgtagctatgcaggcaacggctttatcatctgggttcaatcctctaacgaaacgtaaagatcacagatttcccaggtcatgctctcagagaaattctctgtctttgattcaatgcgatataaaagagagatctttcggagagtctatgacgatcacgaatcgtggattgagttttaagacgaatgtgtttgagcaagctcgttctgtgactggagactgttcttatgatgaaacttcagctaaagcacgttctcatgttgttgc

SEQ ID NO: 153122 - DNA, 474 bp, Arabidopsis thaliana columbia
ctcatcttcaacctctctctaactctcgttttctattctacaatggctgacaagaagattaggagcggggtcaacggattcggaaggattggtcgtttggttgctagagttgttctccagagggacgatgttgagctcgtcgctgtcaacgaccccttcatcactactgagtacatgacctacatgttcaagtacgacagtgttcacggtcaatggaaacacaatgaactcaagatcaaggatgagaagacccttctcttcggtgagaagccagtcactgttttcggcatcaggaaccctgaggatatcccatgggccgaggctggagctgactacgttgttgagtctactggtgtcttcactgacaaagacaaggctgcagctcacttgaagggtggtgccaagaaggttgttatctctgcccccagcaaagacgctccaatgtttgttgttggtgtcaacgagcacgaatac

SEQ ID NO: 153123 - DNA, 474 bp, Arabidopsis thaliana columbia
cgccaattgccaaattgagacaagtggctgatgctatgactgttgagatgcatgctggtcttgcggctgagaggtggcagcaagctggagatgcttattagctacgttgataatcttccttctggggatgagactggttttttctatgcgttggatctaggcggaacaaacttccgtgttatgcgtgtgcttcttggtgggaagcacgaccgtgttgttaaacgagaattcaaagaagaatctattcctcctcatttgatgaccgggaagtcacatgaattattcgattttatcgacgatgttcttgccaagtttgtcgctacagaaggcgaggactttcatcttccacctggtagacaacgggaactaggttttactttctcatttccgggtaagcagctaactttatcctctggcactctcatcaactggacgaagggcttttccattgacgatacagctgataaagatgtt

SEQ ID NO: 153124 - DNA, 470 bp, Arabidopsis thaliana columbia
  unsure (1)..(470): unsure at all n locations
cgtgcgcaaatacacaacttgtaacttcaaatagattactttcaattaagagagagagaaagaaagatggagaggggcatgaagtttccagggggagacttgtccaagctcaatggggaagagagagaccaaaccatggctctaatcaatgaagcttgtgagaattggggcttctttgagatagtgaaccatggattaccacatgacttaatggacaagatcgagaagatgacaaaggaccattacaagacatgccaagaacaaaagttcaatgacatgctcaagtccaaaggtttggataatcttgagacagaagtcgaagatgtcgattgggaaagcactttctacgttcgtcaccttcttcaatccaatctcaatgacatttcagatgtgtctgatgaatacaggacggccatgaaagactttggtnagagactggagaatcttgctgaggatttgttggatctact

SEQ ID NO: 153125 - DNA, 486 bp, Arabidopsis thaliana columbia
cggacgcgtgggttttctccggacaaaatgaaatcgttgtctctatctttgctataactgggatgttgtgggtttaactcaggtcagtacttatttcttcatattcataggcagcttctgggctcaaagttggggaatcttttgcaacagacataattagtcaggaagaacgagtttcaccgccgaaagagaaagctccatttattacatttgtactagggggacctggaagtggaaaaggtacacaatgcgaaaagattgttgagacttttggattacaacatctaagtgctggagatttgctcaggagagagatcgcaatgcacacggaaaatggggctatgattctgaacttgattaaagatgggaagattgttccttcagaagttacagtaaaattaatacagaaagagctggaatcgagtgacaatcgcaagtttctcattgatggttttccacgaactgaggagaaccgttgttgcattg

SEQ ID NO: 153126 - DNA, 465 bp, Arabidopsis thaliana columbia
cagagaggtatggttttagctaagccggtatcgattactccacataccaagtttgaagcagttagctatgtgttgaagaaagaggagggtggaaggcattctccattctttgcagggtacaggcctcagttctacatgaggacgactgatgttacgggtaaagtgacgaagatcatgaacgacaaagatgaagagtcgaagatggttatgcccggtgatcgagtgaagattgttgttgagcttattgtgccggtggcttgtgaacaagggatgaggtttgctatcagagaaggaggaaagactgttggtgctggagttattgggacgatcctcgaatgattataaggttttagagagtttcatatagtgagcatctctacttgctttcttcttgtttcactcttgattctcaaactctttgagtttttacctctttttatttatttttgtgccattttccataag

SEQ ID NO: 153127 - DNA, 480 bp, Arabidopsis thaliana columbia
gtttcttcttatctccttcctccgaccaaaacttttacttctctcttattttcaccctcagagagaaccatggatgcctggaccgggagtttggttcgatctcccatcgtaccatcgagaacttccgacaacggttctggatctatgttccttaccgccagtggccctggattcacgcgttctggttcttcaagacttcaacttcgtttaaggcaaaacgcgtctgctagatcctcaagatcattacagagcttaacaacgactgctaaaactcggagaagttttgtggttagagcttcttcagcgtctaatgatgcttcatctggttcttcccccaaaccgatcgctccgctccagctgcaatcgcctgctggtcagtttctgtctcagattttggtgagccatcctcatcttgtgcctgcagctgttgaacagcagcttgagcagcttcaaactgatcgggactctcagggacagaac

SEQ ID NO: 153128 - DNA, 491 bp, Arabidopsis thaliana columbia
  unsure (1)..(491): unsure at all n locations
gagtttataacattaaacagagagagtttcaagattcatacaaagaagagataatctaaaaatgaattctaaggcaatgcaagctttgatctttcttggtttcttggccacttcatgtctcgctcaagctcctgcaccagcaccaaccaccgttactcctccaccaacggcgcttcctccagtgacagcagaaacaccttcaccaattgcttcaccgcctgttccagttaacgagccaactccagctcctaccacttcttcaacaacatccccggttgcttctcctcctcagaccgatgctcctgctcccggtccttccgctggattaactccaacttcgtctccagctccaggaccagacggtgctgctgatgcaccaagtgccgcatgggctaacaaagctttccttgtgggaacagctgttgccggagctttatacgctgtcgttttggcttagagagcttttgagtttgngtggattggatcctctg

SEQ ID NO: 153129 - DNA, 460 bp, Arabidopsis thaliana columbia
gaaatggggagatctatggtgctaatctttgttgttgtactggcttttctagtggcggcgccggggccagaagtaacagccaggagagtatttattctgcgacaaaaagttctggaaccccaacattaactataccctatgggctcaaggcaaacatttctacgtcggagactggctttattttgtgttctatagagaccaacacaacattcttgaggtaaacatggctgattatgaaaaatgtatcttcaaccgcccaatacgtaattatacacgtggagctgggagagatattgatcctctatatgagacttgacgttattatcttcttgatggaagaggttgtagcatttaatgcatgaagcttgatgtttaatttgtgtacttttacttcttcagtctattttgactcacttctttttcagtataatatagtaattatttttatgttgtatttact

SEQ ID NO: 153130 - DNA, 479 bp, Arabidopsis thaliana columbia
gttcaagaatcttttcctggagttcttgttcctgatgttaagtctttctctgctgcttctcgtgagggattgcttccgggagatgtgatcttagccgttgatggtactgagctatctaattccggttctgattcggtttctaaagttgttgatgttgtgaagaggaatccggagcacaatgtcttgctcaggatcgaaagagggaaggagagtttcgaaatccggatcacgccggataagagtttcgatggaacggggaaaatcggtgttcagttatcaccgaatgttagattcggtaaggtgagaccgaagaacataccggaaacttttagtttcgccggtagagaattctttgggctctcttacaatgtattggatagtttgaaacagactttcttgaacttctctcaaaccgctagtaaagtcgctggtccagtggcgattattgcggttggagcagaagtagcgagatcaaacgc

SEQ ID NO: 153131 - DNA, 479 bp, Arabidopsis thaliana columbia
cgtcaatataccaaccacatacaaaaatatttggtttggttctggttcctccaatgcactaggaaaaatccataaccaatatatgtttagaccatgcattgatcttgaataattgatgagagatacctgataaatgatcgatgcagagagggagttcaaatggagcgaggatgtcaaagttgaaagtgaagtgactgagatcgttcttgttcgccatggagaaaccacttggaatgctgccggaagaatccagggacaaattgaatcagaccttaacgaggttggactaaagcaggctgttgcaatcgctgagaggttgggaaaagaggaaagacctgtagctgtgtattcatcagacctcaaacgagccaaagacactgctcttatgatcgccaaaacttgtttctgtcccgaggtgatcgaagtacctgacttaaaggagaggcacgtgggtagtcttcaaggcctgtattggaaag

SEQ ID NO: 153132 - DNA, 484 bp, Arabidopsis thaliana columbia
  unsure (1)..(484): unsure at all n locations
ctactctctttaaaagaaattcgtaagtactatcaagaagcagaagatggcccaaaaggtggaagcacaaggagggaaaggagccaacctatgggacgatggatcgacacatgacgccgtgaccaagattcagctcgcagcaggcatagacggaattcaatatgttcagtttgattatgtcaagaacggacaacccgaacaagctcctcttcgtggtaccaaaggccgtgttctcccagctgatccgtttgtgattaaccatccagacgaacatctagtttctgtagaaggttggtatagccctgaaggtatcattcaaggaattaagttcatctccaacaagaagacttctgatgtcattggatccgatgagggtactcacttcactctacaagttaaagacaagaagatcattggctttcatgggtctgccgggggcaatcttaattctcttggggcttactttgctccgntgactactaca

SEQ ID NO: 153133 - DNA, 435 bp, Arabidopsis thaliana columbia
atttttgatagctcaagcacttgattctttccaaaggggtttcctgagatcacaaaggccaagtaacaatggcgaaaggagttgcagttttgaacagcagtgagggtgttacggggactatctttttcacccaggaaggcgatggtgtgaccactgtgagtggaacagtttctggccttaagcctggtcttcatggtttccatgtccatgctcttggtgacaccactaacggttgcatgtctactggtccacatttcaaccccgatggtaaaacacacggtgcccctgaggatgctaatcgacatgctggtgatctaggaaacatcactgttggagatgatggaactgccacctttacaatcactgattgtcagattccttttactggaccaaactctattgttggtagggctgttgttgtccatgcataccctt

SEQ ID NO: 153134 - DNA, 475 bp, Arabidopsis thaliana columbia
gccgctttactctcttgtgatatctctgagatttgtttgacagtctctaaccatgggtaaagagaagttgcacatcaacattgtggtcattggccacgtcgattctggaaagtcgaccaccactggacacttgatctacaagttgggtggtattgacaagcgtgtcattgagaggttcgagaaggaggctgctgagatgaacaagaggtccttcaagtacgcatgggttttggacaaacttaaggctgagcgtgagcgtggtatcaccattgacattgctctctggaagttcgagaccaccaagtactactgcactgtcattgatgctcctggccatcgtgatttcatcaagaacatgatcactggtaccttccaggctgattgtgcttgccttatcattgactccaccactggtggttttgaggctggtatctccaaggatggtcagacccgtgagcacgctctacttgctttc

SEQ ID NO: 153135 - DNA, 440 bp, Arabidopsis thaliana columbia
  unsure (1)..(440): unsure at all n locations
cgtccgnngtttcagagccccttggtnngtagccttnttactcgtgtgtgcttgnnattgctgtnngttcttgtattatgagtgtcagatnttccatgaaagtcattgtgaagagatctgaaccaactggagggaagtaatttcntgatccaggncgagtccatcnagatccnagagaattttccatttgttcttatcggaaacaaggttgacgtggatgatggaaacagcagagtggtttcagagaaaaaggctaaagcttggtgtgcttcaaaggggaacattccttactttgagacctctgccaaggtaggtactaatgtggaggaagctttccaatgcattgccaaggacgcattgaagagcgttgaataagatgaactatacttgccagacactattgatgtttggacgagcatttatcaaatgttttcagggtg

SEQ ID NO: 153136 - DNA, 479 bp, Arabidopsis thaliana columbia
aatcgaaataaataaaaaaattcaacccaaagcttttcttacatgagctcaaacaattggggagacagctaccaaagtgtaaggccacgtcataattttaccatactctgttcacggcctcttaaactcactggttcaattcgttaaacgtctagtattcaaaaacttcatactcacaattggcaccattacctacaccgtcatactcaattacatcaccatcacatttcgtcgaaccaatcttcgatggattctattttaacctcataggtattctcggttttagttgtaattcttactcattttttcttaagcttcaactgattttaaactctttttaaactatttgtgaaattttaattcactgatttaccaatctattgcttaatctacgattcgtttttttcttggtgacttgaatttttagaactatgtaactttatctgttactttttcactttttattttctgtgtttttt

SEQ ID NO: 153137 - DNA, 483 bp, Arabidopsis thaliana columbia
caaagtgtcattaatagaaagacgagaaagatagaccaaccctgaaacatggctgaagaacaacaaaactcagatcagagcaatggtggaaacgttattccaacttctgaagaagttgctaccttcctgcacaaaactgttgaagaaggtggatgggaaaaatgttgggaagaagagctaacaccatgggaccaagggagagccacacctatcattgttcatgttgtcgacacttcctcactcccacttggccgtgctctggtcctcggctgtggtggaggacacgacgtcgttgcgatggcaagtcctgaacgctacggtgttggatcggatatctccgaaagcgcactcgctaaagctaatgagacttaccgctcctcaccaaaggcatagtacttttcgttcgtgaaggaagatgttttcacgtggcgcactactgaattattcgacctcatcttcgattatgtgcacttctgtgccatt

SEQ ID NO: 153138 - DNA, 531 bp, Arabidopsis thaliana columbia
  unsure (1)..(531): unsure at all n locations
acgacgccatcgccgtcccgagagaccataaaagaggatcggcaagagtatgtgcttctactctccgccgatgtcatatgggtcacaaaccacttaacacacgagcccgttcgtctccctttccgttaaaagccattacncgtctgaaacccatctcaagggctttgtgttgcaacctggaggcacgagcacccagaggcttcaagcttaaggccgctcaagaatggacaaggcgtttgacccggtattctccgcgagctgctcttacatgcttcgatgggtgattcccggagatagggctgaagctgactggtgtctggaatctcttccttccctcaagaatttcttgctcagcattgcttctggtggcctcgtcctcactgtcatcattggtgtcgtcgtcggcgtctccaactttgaccctgtcaagagaacctaagacctatatatctttcttacatcattattgtaatctgttctccttctgtgtattcggttcaatgttgcagcaatgaacttttggnnttaaaa

SEQ ID NO: 153139 - DNA, 474 bp, Arabidopsis thaliana columbia
  unsure (1)..(474): unsure at all n locations
cttcaatctctcgtcgtcatttcttcgtctcaccgttgaatctgaaaatgatcgccggagtattgcgccgatcttcactcccgtcgaggcagactctctccgccgcgttagcctccttcaattcgtgtatttcgcacaatctcactccagccaccaccggagcttccgtcagctctcgattcactctcgcgtcgtctcctaactcgtttggcatcagagcgaggaacatccacattagatctgagccgtcgatgattgttcccgcaggaatcgcgtcacaaggttacgccactgtcacaaaggatcgcaaaaacgagattaagaaagctaagattaaaatttctccagacaatgtcagaccattgagtaggaaggagatcgctctccagaaagaggcagcagaagaaagcacatcaaagataaaaggaacaaagatttgtatagcgattcggtctnttgttaacccggaaaagc

SEQ ID NO: 153140 - DNA, 464 bp, Arabidopsis thaliana columbia
gtctgataatagttttgtagagtttggttaataaaactaatcgtgtacgctactaatacgtacaggtaactaattaatattcaaaaagatggctcaaaaagtggaagcagggggtggcgccggaggagcttcatgggatgatggtgtccacgatggcgttagaaaggtgcatgtagggcaaggccaagatggtgtgtcatctatcaacgtcgtgtatgcgaaggactctcaggatgttgaaggaggtgaacacggaaagaaaacgttacttggatttgaaacgtttgaggttgatgcagacgactacatagtagcagtgcaagtgacctacgacaacgtgtttggccaagactctgacatcatcacatctattaccttcaatacattcaagggaaaaacatctccaccctatggattggaaacgcaaaagaagtttgtactcaaggacaaaaacggtggtaaac

SEQ ID NO: 153141 - DNA, 482 bp, Arabidopsis thaliana columbia
  unsure (1)..(482): unsure at all n locations
aaaagccactcacgaacactcctcagtttccagagagagaagaagaagaacaacaagccatgtcttaactcttaactaatctcttcttctccctccatttcaccaaccaaaaaccctaaaatccttaaaatcacaagtttcttcagcaatgatgcttcaaagaagctgcattgtacttttcttctctctttttctgttggttccacaaatggttttctcgatgctcaacagaactcttcttctcataccacatcctgacccggaactagtcgcttatcaagttcagtggaaagtaaatgcatctataacaaggcgtcaagctctagacacgacggaccaggccggttcgaccccgtgtatcaccggtaacccaatcgatgacttgtggaaatgtgacccaaactggcccaataacagnacaggtctagcagattgtggtatcgggttcggacagtacgcgttgtgaggcaaaggtgtcagtt

SEQ ID NO: 153142 - DNA, 479 bp, Arabidopsis thaliana columbia
gtgatcttgctgcttctgttcgggttaaaagtcgtcgttgctggcttttgtaccatgatgcatttcaagacaagggcgtctcttacggattttttgacccagttgagaagaagaagacaaaggagatgaatctacccgagctatctaagtcttcaggtatcctttattccaaggatgggtggttactcatgaacgactctctttcactaattgccgacatgtactttttcaacccgtttacccgagagcgtatagacttgcctagaaacaggataatggaatcagtgcacacgaattttgctttctcttgtgctcctacgaagaaaagctgcttggtgtttggtataaataatatttcctcatctgtagcaatcaaaatcagcacttggcgtcctggtgcaactacatggctacatgaggactttcctaatctgtttacttcttacttcaggcgcttaggaaacatcttatactcagat

SEQ ID NO: 153143 - DNA, 481 bp, Arabidopsis thaliana columbia
cttcaccattgccactaacgacgaactctcttgtctctgaaatggaggttccaaaggagcagatcgcgactttaatagagcatgggctttacgattctgctgaaatgctcggctgctttctcgtttcttctcctactgttagtgccgaaactagtcctcagctcaaggcggagaatttgattctactgggtgatgctttatttcatcagagagaacaccggagagctattcatacgtacaagcaagcgttgcatcattacacaaggattccgaagcaaagctccggtatttcgaggagttcattatctttatctaccagatcatctgtgaatgcctccagcatttctgctattaatgagaacgaggtgagattcaagattgcttcatctcactttgctcttaatgaaacaaaagctgcgattgctgagatggaatctgtcaagaccaggagcttagagatgaatatactgatggcaaagct

SEQ ID NO: 153144 - DNA, 487 bp, Arabidopsis thaliana columbia
  unsure (1)..(487): unsure at all n locations
aaaaagaagagaaaaacaatgggagagaaagcgatagcaaatgtgttagtcttctcatttccgatacaagggcacataaaccctctcctccaattctcaaaacgcctactctctaaaaacgtcaacgtcacattcctcaccacttcctccacccacaactccatcctccgccgtgccatcaccggcggagccactgctcttcctctctcttttgtccccattgacgatggattcgaggaagatcacccatctacggacacatctcccgactacttcgcaaagttccaagaaaacgtatctcgaagcctctcagagcttatctcctcgatggacccaaaaccaaacgccgtcgtttacgactcgtgcctgccttatgtcctcgacgtttgccggaaacatcctggcgttgctgcggcgtcgtttttcactcagtcctccaccgtgaacgcgacctatattcatntcttgcgtggagaggttaaggagt

SEQ ID NO: 153145 - DNA, 484 bp, Arabidopsis thaliana columbia
caaaactctgaatttcgatttcaatggagtcacgcgtgctgttacgcgccaccgcgaatgtcgttggaattccgaaattgagacgaccaatcggagcgatccaccgtcaattcagcactgcatcgtcttcctcgttctcggttaaaccaatcggaggaatcggagagggagcgaatctgatctccggtcgtcagcttcgtccaattcttcttctcgattcgtcggcgatcaacggaggagagaaaagagaaattctcaaaccggttaaagccgccgctgctgaaggtggagataccgctggggatgctaaagttggattcctcgccaagtatccatggctagtcactggattcttcttcttcatgtggtacttcttgaatgtgattttcaacattcttaacaagtagatctataattacttcccttattcctatattgtatcggtgatacacttgttcgtgggagttgtttactgtttgaacat

SEQ ID NO: 153146 - DNA, 444 bp, Arabidopsis thaliana columbia
ctcataccaaaaaaaaaacacaaccaagagaaagaggcgtaaccttctgatttctttcttttaagatatcaataaaatctttcacattttctaatttttaattcttttcaagattttgttgtctccttcaacaatccatcagaagtagcagtttggtttccaggttaagttcttacgacctgatcagaaaacaagggactatggaactcaagtgagccaaaaagaacactccatttcgatggagaattatccagaaacacagtttattcccggagattcaatgatccagaatgctatagtttcttactctggggaatcagccggttgagaaagaagaactgaagcttacaatgtcttagcctcacaagagaggcaagcattggtcatatttgggggagattcacaaatgcagaacattggtccagatttccgttcttggggaga

SEQ ID NO: 153147 - DNA, 482 bp, Arabidopsis thaliana columbia
ggccgtggtccgtggctgggcctttgcacagatcgcagacatcatctggatggaaacggcaagccctgatctcaatgaatgcacccaattcgccgaaggtatcaagtccaagacaccggaggtcatgctcgcctacaatctctcgccgtccttcaactgggacgcttccggtatgacggatcagcagatggttgagttcattccgcggattgctaggctcggatattgttggcagttcataacgcttgcgggtttccatgcggatgctcttgtggttgatacatttgcaaaggattacgctaggcgcgggatgttggcttatgtggagaggatacaaagagaagagaggacccatggggttgacactttggctcaccagaaatggtccggtgctaattactatgatcggtatcttaagaccgtccaaggtggaatctcctccactgcagccatgggaaaaggtgtcactgtaagacagttca

SEQ ID NO: 153148 - DNA, 401 bp, Arabidopsis thaliana columbia
aaagagttgaaaacattaaatcgatatattagattctaaaccggatctgaaaaatggcgagggaccaagtgattcttcttggggctggccaagcatgttcgggatgaggacgaagatggctttggctgagaaaggagtcaagtatgagtacaaggaaacagatccatgggttaagactcctttactcatagagatgaacccgattcacaagaagattccggttctcatccacaacggtaaaccgatttgtgaatctcttattcagcttgagtacattgatgaggtttggtccgatgcatccccaatcctatcctctgatccttaccagaagtctcgtgcttgattttgggctgaattcatcgacaaaaagttttacgacccatcatggaaggtatgggtaa

SEQ ID NO: 153149 - DNA, 350 bp, Arabidopsis thaliana columbia
ttcactccctccgtcagcgtcattggtatatccagagcacatgtgccacttcaggtgaagggctttatgaaggtctggactggctctccaacaacatcgctggcaaggcatgatgagggagaaattgcgttgcatcgagatgattctgtctgctgtgttgggatctctctctgtcttgatgcaagagagattataaatattatctgaacctttttgcttttttgggtatgtgaatgtttcttattgtgcaagtagatggtcttgtacctaaaaatttactagaagaacccttttaaatagctttcgggtattgtgcctggattaatatgattgattgtttggcttaaaaa

SEQ ID NO: 153150 - DNA, 480 bp, Arabidopsis thaliana columbia
ctgttttgtccgacatgcaactgagtatatcgcgaggcttcagtattgttatgttgatcagctacattgcatatcttgttttccaactgtggactcaccgccaattgttcgatgcacaagaacaggaagatgagtatgatgacgatgtggagcaagaaaccgcggtgattagtttttggagcggttttgcatggttggttgggatgacactcgttatcgcattgctatcggagtatgttgtagccacgattgaggaagcatcggataaatggaacttatcagtgagtttcataagcatcatattgcttcctattgttggaaatgcagctgaacatgctggagccgttatttttgcctttaagaacaagcttgacatatttttgggagttgcgttaggctctgcgactcagattggcttattcgttgtccccttgaccatcatcgtggcgtggattttgggaattaatatggatctcaatt

SEQ ID NO: 153151 - DNA, 486 bp, Arabidopsis thaliana columbia
cgaaaacatgttccacttcaagcaaaagagttgagagtcacgaaagcagttctctctggatgtctgagtcagagcttgttgatggtctttgtcttcctcctaatgatccaaagaagattaataagatgattaggaaacaaatcaaagacacaactggttcaaactggtttgatatgcctgcaccaacaatgactccggagttgaaaagagatcttcagttgcttaagttgagaactgtaatggatcctgctgtacactacaagaaatctgtgtcacggtcaaagctagctgaaaaatatttccagattggtacagtaattgaaccagctgaagagttctatggaagattgactaagaagaatagaaaagcaactcttgctgatgagttggtttcagatcccaaagtttctcagtacaggaagcgtaaagttaaggagattgaggagaagagtagagctgttacaaataagaagtggaagaaaaagg

SEQ ID NO: 153152 - DNA, 445 bp, Arabidopsis thaliana columbia
atttgatttcaaactctcacacaaagagcttcagatttataagaccatgataatggctttaagacaaagattggcaagaagaaaaaactaaagagaaacgaccaaaatctcaagcaaacagtactaacttctgttgcaaaacagaagaagatgtcttgtaataatggaatgtcttttttcccttcaaatatcatgatccaaacctcttacgaagatgatcatcctcatcaatctccatctcttgctcctcttgttccctcttggtttctaacttaagaacttcaaggaattggttcggtttttgggaagagaacttccatggaaggggggtgtgatttataaacaggggacaatttgtatggaggagaggattatttagatgatgggtcacaaaagggagagaagaaaaggagattggacattgtacaagtggagacactttaga

SEQ ID NO: 153153 - DNA, 490 bp, Arabidopsis thaliana columbia
gagaaacaacaagaagtagtaatggcttcctctattctctcctccgccgctgtggttacatcccgggctcaggccaccatggtcgctccattcaccggcttgaagtcatccgctgcattcccggtcacccgcaagaccaacaaggacatcacttccatcgcaagcaacgggggaagagttagctgcatgaaggtgtggccaccaattggaaagaagaagtttgagactctatcttacctccctgaccttagtgacgtcgaattggctaaggaagttgactaccttctccgcaacaagtggattccttgtgttgaattcgagttagagcacggatttgtgtaccgtgagcacggaaacactcccggatactacgatggacggtactggacaatgtggaagcttccattgttcggatgcaccgactccgctcaagtgttgaaggaagttgaagaatgcaagaaggagtacccgggcgccttcattaggatca

SEQ ID NO: 153154 - DNA, 486 bp, Arabidopsis thaliana columbia
ctccgggagtgtatttgacggagagcttcaatctcactagccatatgactctttacttagctaaaggtgctgtgattagagctgttcaggatacctggaattggccattgattgatcctttgccgtcttatggaagagggagagagttaccagggggacggtatatgagctttattcatggtgatgggcttcgtgatgtagtcatcactggacaaaatgggacaatagacggtcaaggagaagtgtggtggaacatgtggcgtagtagaacgcttaagtacacaagaccgaacttaatcgagttcaaggactctaaggagatcataatctccaatgttattttccaaaattcacccttttggaacattcattctgtgtattgcagcaacgtttgcattcatcacgttacgatcttagctccacaagattttgccaacaccgatggaatcgatccagattccagctacaacgtctgcataggaaact

SEQ ID NO: 153155 - DNA, 272 bp, Arabidopsis thaliana columbia
gtaacgataaggatcagtctggtggagaggaagagactacaagccggaggaagcgtccgagtcgggggggtgctccgccttctgagtgcagtaataaccctagcgccgaaaggggtactgattccggtactgggactaggaagcgtaagtcgtgatgggcagatgatgagcctaggacacaaattcagttacctgacttcatgatggatttcactggaggtattgagtttgatcctgagattcaagctatgaatagtaagttacttgagaat

SEQ ID NO: 153156 - DNA, 454 bp, Arabidopsis thaliana columbia
aaacgatgtcgtctctatctcgcgttctccgtggcaccttcaacacttgcccgatccgccggttttcctccgccgccaccggagtctccgaacccaccgcagtcactgccgcaatctcgcctcctcaaaagtcactaaccagtctcgtgaatggcgaacgaaaccccaaacggatcgtggagaaattcaagaaggcatgtgagtcggagcggttccggaccaacatagccgtgtacgatagaaccgtgcgccgtctcgtagccgcaaagagattacactatgtcgaagagattttggaggagcagaagaagtaccgcgacatgtcaaaagagggattcgcggcgaggatcatttctctgtatggaaaagccggcatgtttgaaaatgcacagaaggtgttcgaagaaatgccaaacagagactgcaagagaggttctatcaacgaaggaaaaat

SEQ ID NO: 153157 - DNA, 477 bp, Arabidopsis thaliana columbia
gtctctcgcaatcttcgctcttctctttgctctctctctctcaacgcggttcagatccgagtttgggagattcaagctccctgaaaaaagccctttactctcgcttaccaactttgctccagcatggcaggatctgcaccagaaggcacacagtttgatgcacgtcagtttgaccagaaactcaatgaagtacttgagggacaagatgagttcttcacatcctatgatgatgttcatgagagctttgatgccatgggtcttcaagagaaccttctcaggggtatttatgcttatggttttgagaagccttctgctattcagcaaagaggaatcgtccccttctgtaagggtcttgatgtgattcaacaggctcagtctggtactgggaaaacagcaactttctgctctggtgtcttgcagcagctggacttctcccttatccagtgtcaggctttggttctagctccaactagagag

SEQ ID NO: 153158 - DNA, 391 bp, Arabidopsis thaliana columbia
gtttgtttcttcgattcgtagatcaattctcagctgacattgaggtttatctcagatcgaaatcgagaagaagatgtttctcactaggactgagtatgacagaggagtcaatacattttctcctgaaggtcgtctctttcaggttgagtatgccattgaagctatcaagcttggttctactgctattggtgtaaagacgaaagagggagttgttcttgcagtcgagaagcgtattacttcgcctttactggagccgagtagtgttgagaagattatggaaattgatgaccatataggttgtgctatgagtggtctgtatgctgacgcgcgaacacttgttgagcattgcactagttgagactcagaaccacaggttcttgtatggtgagcc

SEQ ID NO: 153159 - DNA, 403 bp, Arabidopsis thaliana columbia
caaacaagtactcgtttggtaaagtctccatgcaaatgaagcttgtccctggaaactccgcaggaacagtcacaacactttacttgaaatcacctggaacaacatgggacgagatagatttcgagtttttagggaattcaagtggagaaccttacacacttcacacaaatgtctacacacaaggcaaaggagacaaagaacaacaattcaaactctggtttgatccaacagctaatttccacacttacactattctctggaacccacaaagaatcattttcaccgtcgatggaactccgatcagagaattcaagaacatggagtctctaggcactctgtttcccaagaacaaaccaatgagaatgtactcgagtctttggaacgctgatgattgggcaacgag

SEQ ID NO: 153160 - DNA, 464 bp, Arabidopsis thaliana columbia
tagaaatatccatccacctacttcggctttgtttatcagattttgatgaaaccagatcgggtcttcctctagatccgttctaggttttctatttccaccgtcttatcattatcatcatcatcaattcatcatcatcatcaataatccagatgctcaccaaattcgtcattcatagacatgtctctgtttctgaaagacgattcgattcaaattcgcgaagtctggaacgataaccttcaagaagaaatggatctgatccgagatgtcgtcgacgacttcccttacgtcgccatggacactgagttccccggcatcgtcgtccgacctgtcggaactttcaaatccaacgctgattaccactacgaaaccttgaagacgaacgtcaacatcctcaagatgatccagcttggcctcactttctccaatgaacaaggcaacctccctacctgtggcactgacaagta

SEQ ID NO: 153161 - DNA, 474 bp, Arabidopsis thaliana columbia
gttcttctccagttggtacgcggatggattacctatcagagtttacagtcactatgcccatattgagtttcattgggacaaatgatcctccagaagaacccattgttaaggtttattgtgttcagactctagcaatccagcagtatacattagacttgtgcttatgcttgccaccacctatagaaaatatgggtttggagaagtcagattctagtgtatcacgagaggcaaatcttgttgaaggcatgtcagaaccatctggacttaaacctactgacttaccttcagttgattcagtgccaaaaccttcgattatagtgaatagatcagaaagtgctaataagttgagttttccatcagcggaagccacatcacaagcaattgttccacccaacggtgaacctaaaacttctggcctgccatcttaaaccagtggtgcaggttctgcgtatgctactttaccccaactttctc

SEQ ID NO: 153162 - DNA, 491 bp, Arabidopsis thaliana columbia
aaaaatggcagagcgtgtgtctctcacactcaacggaaccctcctttctcctcctcccacaacaacaacaacaacaatgtcttcttgtctccgatctaccaccgccgcttctcttctcctccgctcctcctcctcctcctccagatccactctcactctctccgcttcctcctctctctccttcggcagatctctcgtctcttctccacgtctctcttcttcttcatccctctctcagaagaaatatcgaattgcgtcggtgaatcggagtttcaactccaccaccgccgctactaaatcttcatcttcagatcctgatcagttgaagaacgctagagaagatatcaaagagcttctcagcaccaaattctgccatccgattttggttagattaggttggcatgatgctggtacgtataacaagaacattaaggaatggccacaaagaggtggagctaatggaagtttgagattcgatattgagcttaaac

SEQ ID NO: 153163 - DNA, 480 bp, Arabidopsis thaliana columbia
gcaaacttctcgattccttgattcgtgggaaaaagaaagtctagatttttgtggattttgattttgtgattccgtgattgtatgaacttgagccgttttgcttcgagattaagaatggcggaagaaatctcaaagacgaaggtgggatcttcttctactgcttcggtggctgattcatctgctgctgcgtcggctgcaacgaatgcggccaaatcaagatggaaaattttgtggcctaattcgctccggtggattcctacgtccaccgattacatcatcgccgccgagaaacgtcttctctccatcctcaagacgccttatgtacaagagcaagtcagtattggttcaggaccaccaggttctaaaatcaggtggtttaggtctacgagcaatgagtcacgttacatcaacactgttacatttgatgccaaggagggagctcctacactcgtcatggttcatggttatggtgcttctcaa

SEQ ID NO: 153164 - DNA, 371 bp, Arabidopsis thaliana columbia
cccttctcccaatctcatcttctccgaaaacctttcttctctcaaatttctgtgaaaacatgtctgacgacgagcaccactttgaggccagcgaatccggagcttccaagacctatcctcaatcagccggtaacatccgtaaaggtggtcacatcgtcatcaaaaaccgtccctgcaaggttgttgaggtttcgacttccaaaactggcaagcacggtcacgccaaatgtcactttgttgctattgatatcttcactgctaagaagcttgaagatattgttccatctttccacaattgtgatgttccacatgtgaaccgtgttgattaccagttgattgatatcactgaggatggcttcgtgagccttttt

SEQ ID NO: 153165 - DNA, 386 bp, Arabidopsis thaliana columbia
  unsure (1)..(386): unsure at all n locations
acatggactcctccaaactctcatctctctctctttgcctcttcctcatttgcattatctatctcccccaacattctctcgcatgcggctcttgcaacccacggaagggcggaaagcactcccctaaagcccctaagctaccagttccttcggggaccggccctaagctaccagatcctccggtgaccgcccctaagctaccagaccctccggtgaccgcgcctaagctacccggtccttctgtgaccatccctaagctacccgttccaccagtgactgtacctaaactacccgttcctcctgtgaccgtgcccaagctacccgttccttcagtgaccgtgcccaagctaccccgtcctncagtgacagtccctaagctacccgtt

SEQ ID NO: 153166 - DNA, 431 bp, Arabidopsis thaliana columbia
gaagaacagtcacatttctacagcaaattactctttttctactcggaatttagaatcccctttctcacaaggttacttgcagagtctgctgagaccatcctactcctccagaccactgtatcatctttctacaacaactggggatctctacctcgagacaattgcaggcgagtgaagagcctgtatcatcacctttgtcatcttcagctctgttgggtagtggaaaagaagaagagcagtagattatcccaaagcgtcagaaagttcaggctgtcctcaagtctataaagcagagtcctaagaaggtcaacctggttgcagcactagtccgtggcatgcgtgttgaagatgctttgatccaattgcagggcacagtcaaacgagctgcacaaactgagtaccgggttattcacccctgccgggcaaatgct

SEQ ID NO: 153167 - DNA, 425 bp, Arabidopsis thaliana columbia
ctgaagttgagtaccggtgctttgtcggcggccttgcctgggccaccaatgatgaagatcttcaaaggacgttctcacagttcggcgacgttatcgattctaaggtctgttacacgagagatcggtctcccggatcgagccgattccgatgattctgatcctcgacggatctgattccgatctgtttctctgttacttgattcgattactgttactatgttctctctcgttctttgttactgttacttaatttgtcccatcggtacgttcatcttcctgcttctatgagctcggagatcgatcgatttttgctttatattcatcgctttgttttatattccttccacgattgtttttgctgatgtgtatgattttgtttggttacagatcattaacgaccgcgagagtggaagatcaaggtgatt

SEQ ID NO: 153168 - DNA, 394 bp, Arabidopsis thaliana columbia
acgatttctcgaagaagctatggcggatcaacttactgacgaacagatctccgaattcaaggaagcttttagcctcttcgacaaagatggcgatggttgcatcacaacaaaagagctgggaacagttatgcgttcactaggacaaaacccaacagaggctgagctccaagacatgatcaacgaggttgatgcagatggaaacggcactatcgactttcccgagttcctgaacctgatggctaagaagatgaaagacactgactccgaggaagagctaaaagaagccttcagggttttcgacaaagaccagaacggtttcatctccgctgctgagctacgccatgtgatgaccaatcttggtgagaagctaactgatgaagaagtggaagagatg

SEQ ID NO: 153169 - DNA, 414 bp, Arabidopsis thaliana columbia
aaacccttgatgctaaaccaatgtcagaacaaacccagatgctcaatttcattttgtctcaagcaaagtaatcatgacgagaggcaaattcaacaagactctgccaaagaagaagaagaagaagaagaagagtattgggttgttacagcagtaagaagcagatacaatgagattgttatagtggatactgcttcttccagatatcttctccttgattcaactaagaatgtgcatagtgttatcaataaaggaggccaaaattggactggatcttattgggatgagtttgcgagtttgccgcctattatccctaatggtcccgttgcaatctacggcttgtgtggtggaacagctgcaagattgatgcttgagttgtggcctacaatgcagctggaaggttgggaaaatgatgaa

SEQ ID NO: 153170 - DNA, 397 bp, Arabidopsis thaliana columbia
gcagccagagagagagacaagtgagagggatctaccaaacgaagcaacaatggtgaagttcttgaagcagaacaaggccgtgatccttcttcaaggacgttacgccggaaagaaagccgtcatcatcaaatccttcgacgacggtaaccgtgatcgtccttacggacactgcctcgtcgccggactcaagaagtacccgagcaaagtcatccgcaaagactcagctaagaagacagctaagaaatctagggttaagtgtttcatcaagcttgttaattaccagcatctgatgcctactcgttacacactcgacgtggatctcaaggaagtggcgactcttgatgctcttcagagtaaggattaatatgttgctgtctctaaggaagcttatgctttt

SEQ ID NO: 153171 - DNA, 486 bp, Arabidopsis thaliana columbia
ttctcttattacatgggagtctaagaatgcgcaaaattacgccattggtagcaagcctttgaccgctgcattgaacgtttactcgagaggttttagaagtctgttgaagtacattaaggacaaatacgcaaatccggaaattatgatcatggaaaacggatatggagaagaactaggggcctcagattctgttgctgttggtaccgctgatcataacaggaaatattatcttcagaggcatcttttgagtatgcaagaagctgtttgcatcgacaaagtgaatgttacaggatactttgtatggtcattgttggataacttcgagtggcaagatggttacaaaaacagatttggactctactacgttgatttcaaaaataacctcacacgttacgagaaagaatccggcaagtattacaaggattttctcagtcaaggtgttcgtccatccgcgctcaagaagggatgagcttaagctatttctgt

SEQ ID NO: 153172 - DNA, 473 bp, Arabidopsis thaliana columbia
agcaaaaccaggttctgaaattggaaaactttttttgtcctgagggttcctggttgttgttgaagcagaggaatgggtggtgagagtaatgaaggaggagagatgggctttaagcatggagatgatgagagtggtgggatctctagagttggaattacatcaatgcccttgtatgcaaaggcagatcctttcttctcttctgcagattgggatccagttgtcaatgctgctgctgctggcttctccagctctcattaccatccttccatggcgatggataatccagggatgagttgcttctctcattaccaacccggttctgtttccggttttgcagcagacatgcctgctagtcttcttccgtttggtgattgtggtggtggtcaaattggtcattttcttggttcagacaagataggggaaagattgatcagagctggagaatcatctcatgaggatcatcattcaggttc

SEQ ID NO: 153173 - DNA, 489 bp, Arabidopsis thaliana columbia
aaaaaaagtaagaacgagagagagaaagccatgtctgcgaaaacaatcctatcatcagtagttttggtggttctcgtcgccgcatcagcagcggctaatatcggattcgatgagtcaaacccgatccgaatggtctccgatggtctccgggaggtagaagaatctgtttcccagatcttaggtcaatctcgtcacgttctctctttcgctcgcttcactcaccgatatggtaaaaagtatcagaacgtggaggagatgaagcttcgattctcgattttcaaggagaatcttgatttgatcagatccaccaacaagaaaggcttatcttacaaactcggtgttaatcaatttgctgatttgacatggcaagagtttcaaaggaccaagcttggtgctgctcagaactgctctgccactttaaagggcagccacaaggtcacagaagcagctcttccttgaacaaaagactggagagaagatggtatcgtt

SEQ ID NO: 153174 - DNA, 333 bp, Arabidopsis thaliana columbia
accgaaccgcagtgtcgacctcacgcgtccggctttgttagatttggtaatggggattcgaagaataacagtcaaattcagccgcttcatggagattctgcgttttctccttcgactcgtgaatgcatgtcaaggaagttgagagacaggccaagtccacttggtccacttgggaagcctcatagtttaactacgacgaatgaggagtcaatgtcaaaggcacaaagtgctactgaattgttgtctctaggaagtagacctcccgaggaagttgtgtctgttgaggatggagaataatttgtacatatttcaggagagatattcatttgttca

SEQ ID NO: 153175 - DNA, 343 bp, Arabidopsis thaliana columbia
ccggaggttcgacctcacgcgtccgaccaaattcttcgagccaatcagagactcccacgtggcagttctcgcgtttttccccgttggcgctcatgccggtcctctcttagccgtcactcgccgtctcgccgccgcttctccctccaccatcttttctttcttcaacaccgcaagatcaaacgcgtcgttgttctcctctgatcatcccgagaacatcaaggtccacgacgtctctgacggtgatcccgagggaaccatgctcgggaatccactggagagggtcgagcatgcttcttgaagcggctccacgtaattttcggagcgaaatcgctgcggcagtgat

SEQ ID NO: 153176 - DNA, 287 bp, Arabidopsis thaliana columbia
atcatttcttcttcttcttcctcactttgttcattatcttcttctccgatctaaacaacaatggcgacaccaggagcttcctcaggaagagatgaattcgtatacatggcgaaactcgtcgaacaagcagagcgttacgaagaaatggttgaattcatggagaaagtcgcgaaagctgttgacaaagacgaactcaccgtcgaagaacgtaatctcctttccgtcgcttacaaaaacgtcatcggagctcgtcgtgcttcgtggagaatcattttatcgatcgaaca

SEQ ID NO: 153177 - DNA, 477 bp, Arabidopsis thaliana columbia
ctaacacatgtcgggacctcagtgctgtgaaaacccgccaactcttaacccggtttccgggtcgggtcatgtcgagaagctgggtgggcttgatgcctacgtctccggctctgccgagtccaagctctgcgtcctcctcatttctgatatttttggttttgaagctccaaacttaagggcgcttgcggacaaggttgcagcttctggattctatgttgtggttcctgattactttggtggagatccttataatccctctaaccaggacagacccatccctgtctggatcaaagaccatggctgtgataagggctttgaaaacacgaaaccagtacttgaaaccataaagaacaaaggcataactgccattggagccgcagggatgtgttggggtgcaaaagtagtggtggaactgtctaagaagagctttttaagcagctgagttgctcatcctttttttgcaaagttgatgatatc

SEQ ID NO: 153178 - DNA, 410 bp, Arabidopsis thaliana columbia
aaacgatggcgtcgaactcgcttatgagctgtggcatagccgccgtgttccctgcgcttctatcttcttccaagtctaaattcgtatccgccggagttccactcccaaacgccgggaatgttggtcgtatcagaatggctgctcactggatgcctggcgagccacgaccagcttaccttgacggttctgctcctggtgactttgggtttgacccacttggacttggagaagttccagcgaaccttgagagatacaaagagtcagagctcatccactgtagatgggctatgctcgctgttcctgggattttggtaccagaagcattaggatatggaaactgggttaaggctcaggaatgggcagcactaccagggggtcaagccacttacttgggaaacccaatcccgtgg

SEQ ID NO: 153179 - DNA, 402 bp, Arabidopsis thaliana columbia
  unsure (1)..(402): unsure at all n locations
caagagcacccagacagaagacnncnnncnnccttctgggggggagaaaaatgagcgaaagagaggatggattggggctaaggatgagctagagattaggacttaaacaaaaggacccggcttcgagggaaaatccaatgcccctggcggcgtaagcatcttcatcacacaagcagcatatgcagcagagcaattataaccatcctcaaaagaggcagaacacttggattaacatgggtcagtcatcagagagaaactcggacatgagatcggttctccggggaatagacgtgaacagagctccatcgacggaggtggatgacgtggaggaagaaggcaccggagtttcggctccgaacaggaccgtctcaagggggatgagcgggaagaagagcgagcgag

SEQ ID NO: 153180 - DNA, 326 bp, Arabidopsis thaliana columbia
attgtttttagtttgttttacgaagaatcaactatggcgacgaagagaagcgttggaacttggaaggatgcggatctgaagggaaagagtgtgttcgtgagggttgatctcaacgttcctttggatgataactctaacatcaccgatgacaccaggattcgtgccgctgttcccaccatcaagtacttgatgggtaatggatctagggttgttctctgcagtcacttgggccgcccaaaaggcgttactcctaagtacagcttaaagcctcttgtgcccagattgtctgaacttcttggtgttgaggttgtcatggcaaatgactc

SEQ ID NO: 153181 - DNA, 392 bp, Arabidopsis thaliana columbia
atcattgtttttagtttgttttacgaagaatcaactatggcgacgaagagaagcgttggaactttgaatgaagcggatctgaagggaaagagtgtgttcgtgagggttgatctcaacgttcctttggatgataactctaacatcaccgatgacaccaggattcgtgccgctgttcccaccatcaagtacttgatgggtaatggatctagggttgttctctgcagtcacttgggccgcccaaaaggtgttactcctaagtacagcttaaagcctcttgtgcccagattgtctgaacttcttggtgttgaggttgtaatggcaaatgactctattggtgaggaagtccagaagttggttgcaggactacctgaaggtggtgttttgctcttgag

SEQ ID NO: 153182 - DNA, 413 bp, Arabidopsis thaliana columbia
agaaggatgcatatgttggtgatgaagcacaatccaagagaggtattcttaccttgaagtaggctattgagcatggtgttgttagcaactgggatgatatggaaaagatctggcatcacactttctacaatgagcttcgtattgctcctgaagagcaccctgttcttcttaccgaggctcctcttaacccaaaggccaacagagagaagatgactcaaatcatgtttgagacctttaactctcccgctatgtatgtcgccatccaagctgttctctccttgtacgccagtggtcgtacaaccggtattgtgctggatttctggtgatggtgtgtctcacactgtgccaatctacgagggtttctcttcttctcatgccattctccggcttgaccttgctggacttgaccttac

SEQ ID NO: 153183 - DNA, 214 bp, Arabidopsis thaliana columbia
  unsure (1)..(214): unsure at all n locations
attggagctctcggagacagaggtataaattcgtcgacgatcctcccaccgtgctcgagaaagccgtcattcctnccggcaaaaacgttcgatctgccctcggtctcaaagaacaaggtccattggnntgnnttcacgaaagcgaacgagttattcgtaggaagattggcacagttgggaatagcattttcactgataggagaggtttttaccg

SEQ ID NO: 153184 - DNA, 373 bp, Arabidopsis thaliana columbia
gaacaagggctacctctatgctctcttccgctactatggtggcctctccggctcaggccacgatggtcgctcctttcaacggacttaagtcctccgctgccttcccagccacccgcaaggctaacaacgacattacttccatcacaagcaacggcggaagagttaactgcatgcaggtgtggcctccgattggaaagaagaagtttgagactctctcttaccttcctgaccttaccgattccgaattggctaaggaagttgactaccttatccgcaacaagtggattccttgtgttgaattcgagttggagcacggatttgtgtaccgtgagcacggtaactcacccggatactatgatggacgggactggac

SEQ ID NO: 153185 - DNA, 353 bp, Arabidopsis thaliana columbia
  unsure (1)..(353): unsure at all n locations
gcgaaagacgttcacgtctctctctctcactccctctttaagaagacaagtttatggattcnatgcagccaaccataatagatgggttcggcgaacaacgagtacgagtttctgagtgagattgggctgacttctcacaacttgggatcttacgttgctggcaaatggcaagccaacggacctcttgtttcaactctcaatcctgctaacaatcagccaattgctcaagttgtggaagcttctctagaggattacgagcaagggttgaaagcttgcgaggaagcagctaaaatatggatgcaagttacggcctctaagagaggtgataatcgtcagacagaatggggatgcac

SEQ ID NO: 153186 - DNA, 382 bp, Arabidopsis thaliana columbia
tttctaatgtagaatccccggaggagcgttatccaatggaggaccaatatggctttgtaacggtgaaaccgccgatagcaaagtcttcactcgttctcttctagctaaaagtgcttcgcttcagacagtggtttgattcccgtttcttggaggagtccttgagattggcacgaccgaacatattaaagaggacatgaacgtgatacaaagtgttaagacgttgttccttgaagctcctccatatactacaatatcgacaagatcagactatcatgaaatttttgatcccttaagtgacgataaatacactccggtgtttattaccgaagcttttccaacaacttttactagcggttttgtgcatgaacctgaggatcatgat

SEQ ID NO: 153187 - DNA, 295 bp, Arabidopsis thaliana columbia
ataaaagtttatttattacaaaagaaagagatataagaaggggattgtttgactcatcaacgggagcgtttacgcactccacattggaggaggcaacaaggaaggtgagcacatgaaggaagaggaacacatgaaacacgttgtctagcacaagagtggtgagcacaaagaaggtattgttgacaagatcaaagacaagatccacggtggtgaaggtaaaagccacgactgtgaatgcaaaagccacgtctgtgagaagaaaaagaagaaggacaagaatgagaagaaacatcat

SEQ ID NO: 153188 - DNA, 357 bp, Arabidopsis thaliana columbia
ttggcattcacatggtttggcaggttacctgttagcaaggttaaaccttttggggacctgcgaaaggttctgaggaaaggaatatttctctctgctctacattttcgaattaatacgagatacaagagttcaaacccaccatttacgtctgttgaactggaccatagtgattcgggaagggaaggatgcactgttacgactcttactgtcaccgcagagccccaaaattggcaaaatgcagtcaaagttgctgtccaagaggttcgaagacttaaagaatttggggtcaccaggggtgaacttacacgttacatggatgctcttctaaaagatagtgaacatcttgcagctatgata

SEQ ID NO: 153189 - DNA, 329 bp, Arabidopsis thaliana columbia
ttaaaccaaaaatttcaatgccgggaaagggtctttaaaacgaaattacagaaggaccaaatgataaggaagaaaaatgcagagataaaagtaatatcaattaggatcatatgcttcttattatcaatgaaaagtaacagaaacatagatgctgcagaaatcttctgaggagaagcttcaacgccttagggtgtggagaatgtattcagcatagaggtccattgagtactggatagcttcataccgagactcagatggcagaaaatcattcactgcaactttccttggtctctgtttttttgtagtcttcgaagaaacgacagttttta

SEQ ID NO: 153190 - DNA, 319 bp, Arabidopsis thaliana columbia
ctttctcgtaacttgatcaaatctgcttacttttgagttatacaccttgaagagtctcgcggtaatgaagaaattctatcaaaatgctgatcatgagactgataaatccaaatcggcggagacgaagaagaggaagaacatgaggagattaggaggcggtggtctttctctccaaacttttgccaacatgaaatcggaaaataatcgctttaacccttctttgatcaaaaagcaaaaagagttctacatgaatgcaaagtatgtgtgcaagtttaggaagtcgttgtagcagcataacattcctgattagaatgtgact

SEQ ID NO: 153191 - DNA, 412 bp, Arabidopsis thaliana columbia
gcgaaagagaaagtcacgaaaaagcggtaccttttcgacactttcacttcttcggaaagaactaagagaaggagatctacaaaggttgttaggatttacttctcgtaatggttctgttgcgtcaagtgtaactcctgatcctctcctgtcgtcatttatctcacctacacgatcacagagttctcctgcgccacgccaaaccaaaaacgtatccgaggataaacagatagagcgcaagagacaagtgttcatctcaccggtctcgttaaaagatcgggaagagaggaggcacaaatcagagtttgttcagaggctcttgtcatcagccattttcgatgaagtctaatgcacatacaaagattgagaacatggaggaactaattcgaatcagacttgagagaatctggtttcg

SEQ ID NO: 153192 - DNA, 420 bp, Arabidopsis thaliana columbia
aaaaaaaaaactcaagagagactttgtggccatggcagcctctctccaatccaccgctacattcctccagtcggcgaagatcgccaccgctccttctcgcggaagttctcacctccgatcgactcaagccgtcggcaaatcttttgggctcgaaacttcctcggctcgcctcacttgctccttccagtctgactttaaggacttcaccggtaaatgctccgacgctgtcaaaatcgccggattcgctcttgccacctctgctctcgtcgtctcgggagcaagtgcggagggagctccaaagagattgacctatgatgagattcagagcaagacatacatggaagtgaaaggaactggaacggctaaccagtgccctactattgacggtggctctgagactttctcgttcaaacccggaaa

SEQ ID NO: 153193 - DNA, 391 bp, Arabidopsis thaliana columbia
ctacgctgcacatccagatcacgttcgtgttgttaaggaatctgtgttaccgatctgtgatgatatcatggctgttgattggatcgctgatcgaatccccggaaccgtagcgccgcttcctggttcggttgctaaactcacattgctcaaattgaaagaggatgtagcagatgaggcgaaatcggagattacgggagtgattaagggactaagtgagaaatttccagggattgatcagattactgttggagaaaacttttctcctgctagagctaaaggtttctctattgcttcgattgcgtatttcaaggatttgagtgaaatggaaactgtggatgctcagaaagagttggtgaattcgcaaaaggataaggttcgtgattatgtggat

SEQ ID NO: 153194 - DNA, 395 bp, Arabidopsis thaliana columbia
ctcctagaaaaagatggcgagaatgagtttgatgatcatgatgattatggttgctgtgaccatgattaacattgctaagagtgatcccattgcaccatgttacttcatatttggtgactctttggttgataatggcaacaataatcagcttcagtcattagctagagctaattactttccttacggtattgactttgctgccggtccaaccggtcggtttagcaacggcttaaccactgtcgatgttatcgctcagcttttgggtttcgaggactacattacaccttacgcttctgcaagaggacaagacattcttcgaggagttaactatgctttcgctgctgccggaatccgagacgaaaccggcagacaattgggagggtcgatagcatttg

SEQ ID NO: 153195 - DNA, 412 bp, Arabidopsis thaliana columbia
gtttttgcagaaagtctctcatctgaactcataaaatctccgagttcgtatatcttctccgtttgagcaatggcgttggtcatgcacacatacaagggaaacaaaggtgccaataaggcacttattgctgcagagtatgcgggtgtgaagatcgaggagtccgcagactttcagatgggcgtcactaacaagtcacctgagttccttaagatgaaccctattggaaaggttcctgtgcttgagactcctgaaggtcccatatttgagagcaatgccattgcccgatatgtgagccgtaagaatggtgacaactctttgaatggatcctcccttattgaatacgctcacattgagcaatggatcgatttctcctcattggagattgatgctaacaatgtgaagtggtttgctc

SEQ ID NO: 153196 - DNA, 387 bp, Arabidopsis thaliana columbia
ctaatctccttttaaggtttctttcgtgaaatatatcggagagaatggaatcttttttgttcagatctgaatccgtcaacgagggacatcccgacaagctttgtgatcagatctccgacgctatcctcgatgcttgccttgaacaagaccctgagagcaaagttgcttgtgagacttgtaccaagactaacatggtcatggtttttggagaaatcaccaccaaggctaacgttgattacgagcagattgttcgtaaaacatgccgtgagattggattcgtctctgctgacgttggtctagatgctgacaattgcaagggtctggttaacattgagcaacagagtcctgacattgcacaaggtgttcatggtcatctcaccaagaagc

SEQ ID NO: 153197 - DNA, 251 bp, Arabidopsis thaliana columbia
aactggttcggttcctcggatcggttctgatgtgggcatgtttctgagctgccttttccaagctgtgagtaattagtgttgagttgagcgaaggcttggctcatgcaggttctagagtcggagggtaatgcgtgaggctggcttcacagagcagcgactacttcccgcttacagcagtggacggatcacggtttagcgtcgctcagaaccactatggcctgctggtccgatctcatatgaaccaccatttt

SEQ ID NO: 153198 - DNA, 411 bp, Arabidopsis thaliana columbia
gctttgaggcgctcaatggtttactttcgtggacaacctgttggcactattgctgctgtggataattctgaagaaaaactcaactatgatcaggtgttcgtgagagattttgtaccaagtgctttagcattcttgatgaatggagagccagatatagttaaaaacttccttttgaagactcttcgtcttcaatcttgggagaaaaagattgatagattccagcttggtgagggtgttatgcctgctagcttcaaagttttccatgatcctgttagaaaccatgaaacgctgatagctgattttggcgagagtgctattggaagagtagcgccggttgattcagggttttggtggattatattgctcagagcctacacaaaatctacaggagactcttctcttgctgacatg

SEQ ID NO: 153199 - DNA, 412 bp, Arabidopsis thaliana columbia
gctgtacgtacttctggaagatacataattgatacaattggagaaatgctggaaaagattcaattccattatcagcagcatcatcagccatgctttctatacttatccagtgaagttataaagatttttggttctgatccatcgtgtgctgtctacttgaagaacctgattgaaaccctctttgcacatacaacatgtcttatgacaagtatcaaggaagtcactgcgagaccagatatagccgatgactgctttttgttggcgtctagatgtcttcgctactgtccacatttattcattccgtctcctatatttccagctcttgtaaactgcgcaatgattggaatcacagtgcagcacagagaagcctgccactcgatattgacctttctaaccgacatttttgacctcg

SEQ ID NO: 153200 - DNA, 421 bp, Arabidopsis thaliana columbia
caaaaaatcaatggaggagtctctcagtcgttaggggaagcaaatagagaaatggctagctttactgcctccgcttccaccgtctccgccgctcgtccggctctccttctcaagcctaccgtcgccatctctgctcctgttcttggtttgcctccaatgggtaagaagaagggaggagtgagatgttcaatggagacaaagcaaggaaacgtctcagtcatgggggctggagtttcagctgcagcaacagctgctttgacggcggtgatgagcaatcccgcgatggctttggttgatgagaggatgtcaacagaaggaacaggattaccctttggtctaagcaacaacctcttgggttggattctgtttggagtctttggtttgatctggactttcttcttcgtctacacttcatctctcg

SEQ ID NO: 153201 - DNA, 427 bp, Arabidopsis thaliana columbia
gcctcgtcgtcttcagcttcatcggccgttgcatttcccggcgataagagagagtaagaggagaaagagtgagccagatcttcatcgtcgtggttcttgtttcttcctcgatctctcgatcttctgcttttgcttttccgattaagatcgtagaccatggccgatgctgatgacattcaacctattgtctgtgacaatggtactggaatggttaaggctggattcgctggagatgatgctcccagagcggttttccccagtgttgttggtcgacctagacatcatggtgtcatggttgggatgaatcagaaagatgcgtatgttggtgatgaagcacaatccaaaagaggtatcctcacattgaaataccctattgagcatggttgtgttagcaactgggatgacatggagaagatttggcatcaca

SEQ ID NO: 153202 - DNA, 377 bp, Arabidopsis thaliana columbia
cggacgcgtgggctgaaacgaacgttaccactttgtacactaagatcggatctatcgacgcgtgtgacccgaccaaccacgatatcggcggtcctccaaacggtttagtctccaccgttcaaaacacaagtccacttcactccaccaccgtcagcccctgcgacgcgactcttggccgttacctagcaagacggttagtcgaaatcggcgtcaccgatgtcttctccgttcctggtgatttcaacctgacgcttctcgatcacctaatcgccgaaccaaacctcaagctgatcggttgctgcaacgagcttaacgccggatacgctgctgacggttacgctagatctcgcggtgttggtgcgtgcgtctttacgttc

SEQ ID NO: 153203 - DNA, 353 bp, Arabidopsis thaliana columbia
gtttgaggagatttagaggagtgtttggttctttggataacaatatcccaaactgaaaatgggtaagtcatatggagctatcttcctcttgaccctcattgtcctcttcatgcttcaaaccatggttatggcctcaagtggatctaatgtgaagtggagccagaaacgttatggaccaggaagcctgaaacgtacccaatgcccatcggaatgtgataggaggtgtaaaaagacacagtaccacaaggcttgcattacgttctgcaacaaatgctgcaggaagtgtctctgtgtgcctccgggttactatgggaacaaacaagtttgctcctgctacaacaactggtaaactt

SEQ ID NO: 153204 - DNA, 165 bp, Arabidopsis thaliana columbia
ctagtttctgttcgcgagacgctaaacgacgctcttgccggtgcggcgaggtgtgaaggacgagatttagctgaaggtaagcttaaaacgcacagtgaggttgattcattcatggcgagactcgatcgtcatgtgaaagatgctgaggttttgattaagagtggt

SEQ ID NO: 153205 - DNA, 87 bp, Arabidopsis thaliana columbia
  unsure (1)..(87): unsure at all n locations
cctaattncggggattttctctctccctcctttttggatatctgggagacttttaattatggttttcaattatgcagtttccggttt

SEQ ID NO: 153206 - DNA, 415 bp, Arabidopsis thaliana columbia
gcaaaaatggtttctctgaagctccagaagcgtctcgccgcatcagtgatgaagtgcgggaagggcaaagtttggctcgatcccaacgaaagctccgacatctccatggccaattcccgccaaaacatcaggaagcttgtgaaggatggtttcatcatcaggaagccaaccaagattcactctcgttccagagctcgcaaaatgaagattgccaagatgaagggtcgtcactctggatacggtaagaggaagggtacccgtgaagctaggttgccaacaaaggtactgtggatgcgtaggatgcgtgttcttaggcgtctgttgaagaaatacagagagacgaagaagattgacaagcacatgtaccatgacatgtacatgcgtgttaagggtaatgtgttcaagaacaagcgtg

SEQ ID NO: 153207 - DNA, 411 bp, Arabidopsis thaliana columbia
gcgataatggcgatgaggggcttcacgttgttttcgatccttgtgttgtctttgtgcgcttcgtctatcagaagcgaagagacggagacgaaggagttcgtgttgaccttggatcacactaacttcaccgataccatcaacaaacacgatttcatcgtcgtcgagttctacgccccatggtgtggacactgcaagcagcttgctcctgagtatgagaaggctgcgtcagctttgagcagtaacgtcccaccagtggttcttgctaagattgatgccagtgaggaaacaaacagagaatttgcaactcaatacgaggttcagggtttcccaacaatcaagattttcagaaacggaggaaaggctgttcaagaatacaacggacctcgtgaagctgagggtattgttacttac

SEQ ID NO: 153208 - DNA, 419 bp, Arabidopsis thaliana columbia
ccacgcgttcggggtgttcaaagaattagtcgttctcgcgttttcactttccatggcgggctttttctccgttgtccggcgcgtgtacctcactgtctacaattggatcgtctttgctggatgggctcaggttttgtacttagcgataacgacgttgaaggaaacgggttatgagaatgtctatgacgccattgagaagcctctccagcttgctcagactgccgccgttctcgagattcttcatggattagtaggtttggtcagatctcctgtttctgcaactctgccacagataggttcaaggctatttctcacttggggcatcctatacagttttccagaggtccgatctcattttcttgttacgtcgctggtcataagctggtctatcacagagattattcgctactcattcttcg

SEQ ID NO: 153209 - DNA, 401 bp, Arabidopsis thaliana columbia
cttcttcgctcagcagtaccatgacagaaagcagagggaggcaagaatgagcattagcagagaagagaggacaaaaactccgggcgtggactacctaaagcccatcatcgccgacggagacaccggctttggcggcaccaccgccaccgtcaaactctgcaagcttttcgttgaaagaggcgccgctggggtccacatcgaggaccagtcctccgtcaccaagaagtgtggccacatggccggaaaggtcctcgtggcagtcagcgaacacatcaaccgccttgtcgcggctcggctccagttcgacgtgatgggtacagagaccgtccttgttgctagaacagatgcggtcgcagctactctgatccagtcgaacattgacgcgagggaccaccagttca

SEQ ID NO: 153210 - DNA, 419 bp, Arabidopsis thaliana columbia
aaacgaacataaaacactacctaagagatcaatatggctggagtgatgaagttggcatgcttgctcttggcctgcatgattgtggccggtccaatcacatcgaacgctgcgctaagctgtggctcagttaacagcaacttggcagcgtgcattggctacgtgctccaaggtggtgtcattcccccagcgtgttgctccggcgttaaaaacctcaacagcatagccaagacgaccccagaccgtcagcaagcttgcaattgcattcaaggtgccgctagagccttaggctctggtctcaacgctggccgtgcagctggaattcctaaggcatgtggagtcaatattccttacaaaatcagcaccagcaccaactgcaaaaccgtgaggtgatgagctagcaacggtgagatgatgctact

SEQ ID NO: 153211 - DNA, 348 bp, Arabidopsis thaliana columbia
atctattttggcaccaaagattgaagaatcttttattaagtgcgaagagaaggttaaagacgcatacttgtattatattttgagcgtgcatggacaagggcggacaattgttttctgcacatcagtgactgatttgcggcatatctctgggcttttaaagattcttggacttgatgtttgcacactcttctcagaaatgaagcagcgagctcggttgaagtcaatcgaccgtttccgtgcgagcgaaaatggaatacttatagcaacagatcttgtagcaaggggtattgatattaagaatgttccgaactattattcactacatacttccacattcggcagaagtgt

SEQ ID NO: 153212 - DNA, 433 bp, Arabidopsis thaliana columbia
gtcactcccatctttcatattccttcaccatctctctctctctcgatcttgtgaaccactacacacactaacacaatgagagagatccttcacattcaaggtggtcaatgcggtaaccagattggttccaagttctgggaagtcatctgcgacgagcacggcatcgattccaccggacgttacagtggagacactgcagatctccagcttgaacgtatcaatgtctattacaatgaagcttcaggtggaagatacgttcctcgtgctgttcttatggatcttgagcctggtactatggatagtatcagatccggaccgtttggtcagatcttccgtcctgataactttgtctttggtcagtctggtgctggtaataattgggctaaaggtcattacactgaaggtgctgaacttattgatgctggtcttgatg

SEQ ID NO: 153213 - DNA, 430 bp, Arabidopsis thaliana columbia
ccggcttagacggcgaggcgccgaggcgcgcgcaaaactgtgtccgtctctctctctctggcttttgtcttagcattcatctctctaacggcgaggcaatgggttttccggtgggatattctgagctacttctcccaaaaatctttttctacttgttatctttcttagggttgatacgtaaactcatctccacaatgttcaagatcattggtctaccagatttcttagaacctgaaccggtttcaacctcatggcccgacccaccacccacgttgaccaaacctgactcagcagcaatactagccggagagatgttaccggttgttcgattctcggatataaaccgaccggcatccgagtgttgcgcagtgtgtctctacgatttcgagaacgacgacgagatccgacggctgacgaattgtcgacatat

SEQ ID NO: 153214 - DNA, 408 bp, Arabidopsis thaliana columbia
  unsure (1)..(408): unsure at all n locations
atctggatgggccgtgtctactacgtctttgtanttctttgtgtagtcttgatccttcttgtggtagtgtgtgccgaggtttgcctagtgctaacatacatgcacctgtgcgttgaagactataagtggtggtggaaatccttctttgcatctggatccgttgcaatctacatcttcatatactccataaactatctcgtcttcgacctcaaaagcttgagtggacccgtttcagcgactctttatctcggctactctctctttatggtcctggctatcatgctcgcaacaggtaccgttggtttcctctcttccttctggttcgtacactacttgttttcttcggtgaaacttgactaaggaatcagaccagaggcttattggcttaaagagattgtataacttttt

SEQ ID NO: 153215 - DNA, 410 bp, Arabidopsis thaliana columbia
aaaagaagaagagaaacaacaagaagtagttttggcttcctctatgctctcctccgccgctgtggttacatccccggctcaggccaccatggtcgctccattcaccggcttgaagtcatccgctgcattcccggtcacccgcaagaccaacaaggacatcacttccatcgcaagcaacgggggaagagttagctgcatgaaggtgtggccaccaattggaaagaagaagtttgagactctatcttacctccctgaccttagtgacgtcgaattggctaaggaagttgactaccttctccgcaacaagtggattccttgtgttgaattcgagttagagcacggatttgtgtaccgcgagcacggaaacactcccggatactacgatggacggtactggacaatgtggaagc

SEQ ID NO: 153216 - DNA, 429 bp, Arabidopsis thaliana columbia
cgcgtccgaaaaggaaaccacaaaaccaaggtttttattggcttcctcaaccatggctttgtcctcccctgccttcgccggaaaggctgtgaagcctgccgcatcagatgtcctcggaagcggccgtgtgaccatgaggaagactgtcgccaagccaaagggtccatcaggcagcccatggtacggatctgaccgagtcaagtacttgggtccattctccggcgagcccccgagctaccttaccggtgagttccccggtgactacggatgggacaccgctggtctatccgccgacccagagaccttcgccaggaaccgtgagctagaagttatccacagcagatgggccatgctcggagccctaggctgcgttttccctgagctattggctaggaacggagtgaagttcggagaagcggtttggttcaa

SEQ ID NO: 153217 - DNA, 414 bp, Arabidopsis thaliana columbia
  unsure (1)..(414): unsure at all n locations
cgaacatggttcttcaaacactatcttcttcttctcctccaattcaccgtctctatcttcaccattctcagattctcccttcttctgggtcacccagcaagatttctcttcaggcagatacatggaaggactttggccattcgatcttttcatgaaatttctgctagaggtttaccggctttgaacaaagcttccttgaagaagctaccaatcaaaggatctacctttctgctggggcagagcttgttgatggtttctgctcacccacagttggcagcagcagcagaaatcataaagcctgaaccgatttacgaagttggagagttatttgaacttagtattcagctttcttacttgctgttactactggggttgcttggagtnggtactttctattgtatccgtcaagtactt

SEQ ID NO: 153218 - DNA, 399 bp, Arabidopsis thaliana columbia
aaccacttgcaaaattcgaatcttatcttctgttcaatcgaaaaaaaagaaaggatttgctctagattgttgaatcgaagatgtcgacaagggaagagaatgtttacatggcgaaattagccgaacaagctgaacgttacgaagaaatggttgaattcatggagaaagttgcgaaaactgttgatgttgaggaactttcagttgaagagaggaatcttctctctgttgcttacaagaacgtgattggagcgagaagagcttcgtggagaatcatttcttcgattgagcagaaagaagagagcaaagggaacgaagatcatgttgctattatcaaggattacagaggaaagattgaatccgagcttagcaaaatctgtgatgggattttgaatggtcttg

SEQ ID NO: 153219 - DNA, 421 bp, Arabidopsis thaliana columbia
gtccggtcaatgccatgtctgcactttgggaatccactggtgctgatgttactcaagtttcttacgctgttggtactgattcaagaatcggttccaaattcttgaacgctagtgttggattcggaggttcttgtttccagaaggacattctgaatctcgtctacatctgtcaatgcaacggacttccagaagtggcggaatactggaaacaagtgatcaagatcaacgattaccaaaagaaccggttcgtgaacagaatcgtgtcctctatgttcaacactgtctccaacaagaaggttgcgattcttggattcgcattcaagaaagacactggtgacacaagggaaacacctgccattgatgtgtgtaaaggtctattatgagacaaagcacagatcagtatctatgatcctcaagtcac

SEQ ID NO: 153220 - DNA, 431 bp, Arabidopsis thaliana columbia
attctcttttactccttcgccgaatctcacaacgccaaattttggcgtttccacagatctatacatcccggagatctccaacaaatccgacaccgttttctactccgacgaatcctcctccgtagatctagtcaaaaaacgaacctaacgaaattcgaaatcctgatcggagatggctccgagtattcgaaaagcgattggtgcggttaaagaccaaacaagcataggaatcgctaaagtagcaagcaacatggctccagatctagaagtagccatcgtgaaagctacaagtcacgacgacgatcccgcaagcgagaaatacattcgtgagattctaaacctgacctctctctctcgcggctacatcctcgcttgtgttacttccgtttcacggcgattgagtaagacgcgtgattgggttggtgctctca

SEQ ID NO: 153221 - DNA, 371 bp, Arabidopsis thaliana columbia
cgttcgattatatttactcctaccctaagatacattttcctttttgtcgtttactcttttctatacattctgcagatctacaacggatccgtcaccgcttgttacggcgactaatcctcctccgttgatctattcaaaaaacgaacctaacgtaattcgtacatcctgatcgtagatggctcctactattcgaaaagctaatggtgctcttgtagaccaaacaagcatttgactctctaaaggatctagcaacatggcttcatattctagaagttaccattgtgtaagctacaagtgacgacttctattccttatgcttgaaatacattcttgggattttaatccttgacctctttctattgcggctttca

SEQ ID NO: 153222 - DNA, 388 bp, Arabidopsis thaliana columbia
gggagaaaaaaacccggcgaaaaagggaaattcgaattcgtcttctgttgatcattgcttcacttctgcttccagagcttttactcagaagaagctcgctgatctcaaatctctctttttttccctcgcttccaagtctcagagcaatgaccaatacgtctcgtaccctgttttccaggagtattttggtctgagtggttctttaggagaaaggatctttgatatggttactcaacacaggaaagatgataaaatgacttttgaagatcttgttattgcttaggcaacatacgagaaaggaactgttgatgagattgctgagtttttttaccagactttggttgttaatggcattggggttttgagaaggtctgtttaattgtctttc

SEQ ID NO: 153223 - DNA, 371 bp, Arabidopsis thaliana columbia
gagagaaagagagagagagatggaaggtaaagaagaagatgttagagtcggagctaacaagtttccggagaggcaaccgatcggaacttcggctcagagtgacaaggactacaaagagccaccacctgcgccgttgttcgagcccggcgagctagcttcatggtccttctggagagctgggattgctgagtttatagctacgtttttgttcctgtacatcactgttttgactgttatgggtgtgaagaggtcaccgaacatgtgtgctttcgtcggaatccaaggtatcgcttgggctttcggtggtttgatctttgctctctgtctactgtaccgttgttatctcctgtggacacattaaccctgctgtt

SEQ ID NO: 153224 - DNA, 398 bp, Arabidopsis thaliana columbia
gtaagcaacatcctcgtccgggttaatgcttttacagagcagctgtgcaagctgcaatctggagcggtgaagggaatgagaaggtccaggacttgttacttcttgatgtcactcctctgtccttgggtttggaaactgccggtggtgttatgactgttttgattccgaggaacaccacaattccgaccaagaaagagcagatattctctacctattcagacaaccagcccggtgtactgatccaggtctacgaaggagagagggcacgaacaaaggacaacaaccttttgggaaagttcgagctcagtggtataccacctgctccacgaggtgtaccgcagattactgtctgtttcgacatcgacgccaatggtatcctgaatgtgtcggctgaggac

SEQ ID NO: 153225 - DNA, 219 bp, Arabidopsis thaliana columbia
tttgacaagacacggaaaatagatgatgatttggagattctggtgaaaagattgaagtcgcaacacgagaaagatggaaaattgaaagctgataataacaacaacaacgttgatgcgctttctgatgctcgatggtctatagagttaggtccgccttctgagatctctgagaagagaatctattgggaagaatcgagtcatgattatggagtgtttgtg

SEQ ID NO: 153226 - DNA, 416 bp, Arabidopsis thaliana columbia
gaggaatcgagtcgctgcgtgcaatcccgtttatctttgcgtggactcagacgaggtttcggttacccgtgtggcttggttgtggaggagcattcaaacgcgtgatacagaaggacagtaagaatctcaacatgctcaaagagatgtacaaccaatggccattcttccgtgtcacaattgatctagtcgaaatggttttcgccaaaggagatcccggaattgcggctctgtatgaccgcctcctcgtctctgaagaacttcaaccattcggtgaacaacttctagttaactaccaagagaccagacgcctcctccttcaggttgcaggtcacaaagacattttagaaggtgacccttacttgaggcaaaggctgcagcttcgtgacccatacatcacgacattgaacgtgtgtcaa

SEQ ID NO: 153227 - DNA, 138 bp, Arabidopsis thaliana columbia
atttcttttatagtgttgattctccgcaaatttctctcgagagaatctttcccaaaagacagtagatttgttggaagaaaagggctcttcttcttcttttttatgatcaggattgcagaatttatttaaattcttcct

SEQ ID NO: 153228 - DNA, 431 bp, Arabidopsis thaliana columbia
attaaacacacgtttattaagaatgctaggaaaagtccgaaacttcttgagaggttaagagagcggccaaagtaccaagtaagggaagatgaagagactcctaggaatggggccaaagctccagttgaatcatctggtactgttaggatagctagagatgaaagaagccaaggcgcgcctggatatagttttcaggggaataccgtcaaaaatgctggatgggactttaccgttggggggtcacagagtattggaacagttcgtgctttaaaacctcctcaagcaagggagaggcgccaagaagtttctcctaatcggatttcgcaaagaacaacaagacctagtggtaatcaatggtcatctgcgactgggagtacaatttctgaagcttctgaaggaaggtttgtcagaagacacccttttcagaatga

SEQ ID NO: 153229 - DNA, 381 bp, Arabidopsis thaliana columbia
gttggtttcaagtattatcaatttcccggcttaatctccaccagagttatgggaatcaccgggagtctaacgccagatcagcgcgattttttccactctcaagggtatttggtaatcgaatcgttcgcgagtgaggatgagataagaggcttaaggaagaggatggatgagttgcttaatcagtttgattgttccgtctcctctatcttctccaccaaaaatcataagcacaccacagataattacttctttgagagcgctgagaaaatctccttcttctttgaagaaaaagcttttggtgatgatgggaaattgaagcaacccaaacaactctctataaacaaagttgggcatgcactgcattgagcttgacccattgta

SEQ ID NO: 153230 - DNA, 305 bp, Arabidopsis thaliana columbia
  unsure (1)..(305): unsure at all n locations
gatgatttcgacgtcggtgatgttttcgccgttgtgaaaccattcgttttcacttttactggaaaacccgccgtctccgcgcgggcggaaggttcagtttttgggaanaaagttactgtcttggatggggacgctgagaaatctgcaaataggaagaggaagaatcagttccgagggattaggcatcgttctaggggaaaatgggctgctgagatacgtgatccaagggaaggagctagtatttgactttgttacaatcaatacaaatgattaatgttgtttagcttacattgctttatctcatg

SEQ ID NO: 153231 - DNA, 338 bp, Arabidopsis thaliana columbia
ctgtggctaaaagaagttaatgtcatgggtgataggatcatcggcatgggagctactttgcgagaaagccgtgagaagttaggatcgcctttgtcatgggagcacgttaccaaacagattggaatgttctgctacagtgggttaacaccagaacaggttgaccgcttaacaagcgaatatcacatctatatgacccgtaacggccgtatcagtatggctggtgttacaacaggaaacgtgggataccttgcgaatgctatacatgaagtcaccaagtcatcttaaatcatttacttacatgtttcagccaaacatacaaaatttggttgaagagtcaa

SEQ ID NO: 153232 - DNA, 409 bp, Arabidopsis thaliana columbia
aaaagctcgctgacgagttctcaatagtaacctctccggcgcttatcgtgaaaaaccctatggtccagacttctcttacgctttccttgcaaaatctgcctcaattttggattgaagacaagagcttgaggctttttctccaatcttaattgaaactttggggtttttctcacggggattttgcgaattagggtttcggattggggattttgttacatcgaaaggactttggagattcagcgttgggctcggtaattgaagaatgcagaattcataaacaccgctctggaattttactttttaggataacaaaggagggtcattttatctgttaattgatgggtgaagagatatctagcactgtgaacctggatttgaatctgggtcctgatcctgagttaggtctcga

SEQ ID NO: 153233 - DNA, 405 bp, Arabidopsis thaliana columbia
gcgaaattctctgatctctcttcattttattttccctctacatctctcccaacgatttccggatctcacttcactttggctggtccacctgaatccatggatattgcttcgtcatctctctcacaagctcacaaagtcgttctcacgcgtcaaccttcttcccgggtcaacacctgctcccttggctcggtctccgctatcggattctctcttccgcagattagctctccagctttaggtaaatgtcgccggaaacaaagctcttctgggttcgtgaaagcttgtgttgctgttgaacagaaaacccgaactgctatcatcagaattggcacaaggggaagtcctctagcacttgctcaagcatacgagacgcgagaaaagctcaagaagaaacaccctgaactc

SEQ ID NO: 153234 - DNA, 453 bp, Arabidopsis thaliana columbia
  unsure (1)..(453): unsure at all n locations
cgccgcaggaccggcattaggcgtcgaancgacccacgcgnncggaccaatgaaaaggtgagaacccttatggagttagcccaactacgacaggaatatcagtcgctaagagacaaaatgagtggtagaagagaggaagaatcaacgggaaacagtggcaggatagttatctccaatgagaaagatggaagactaaagaatatgtggaagaaatcttacataaaccgttggattgacccaagttcaagaggcggaagtcacttgaacactgaagcagattatgccagtaacatcgaatattccagaatgaaagtagaatatgcagctataaaagagaacctggaaagcatggggcacttgacgacttcaatccgcaggctccgtctagcgctcttgaaggtaaaggaattaaatgatactgaaacaactgcaagaagttgcgaagtagcgatt

SEQ ID NO: 153235 - DNA, 409 bp, Arabidopsis thaliana columbia
ctttctttgcttctctaacaaaccaacttcatcgacaagataacaaaacgctttcacacgagcggataaaatggcggagaagagctttaagtacatcatcctcggcggcggcgtctctgccggatacgcagctaaggagtttgccaatcaaggggttcaaccaggagaattggctgttatctcgaaagaggcggtggctccatatgaacgccctgcacttagcaaggggtatttgtttcctgaaggggctgctagacttccaggtttccattgctgtgttggtagtggtggagaaaaactgcttcctgaatcctacaagcagaaaggaattgagttgatactaagcacagaaatagtgaaagctgatctctctgccaagaggcttgtcagtgcaactggggatgtcttc

SEQ ID NO: 153236 - DNA, 351 bp, Arabidopsis thaliana columbia
cgtgtatctccgtcacttgtagtgatttatcttgcaataaacgactaaaaaaagattcactgatccaattttaatctttcgtaccttatacatcataaccaaatcaaagtcgtatttactttactttttttacccatgagggattccttgtatatttcaacaaaaaaaatttgatttttttcagtaaatgtaaatagcagaattgtggctagggaagtatattatcgacctagctaactttattgtagaaattttcgggattaattgattggaccatgcaaactagaaataccttttcttggataatggaagtgattactcgttccttatttgcttcactcataatattta

SEQ ID NO: 153237 - DNA, 414 bp, Arabidopsis thaliana columbia
aaaagaagaaacacgagtggaagcttttaaacaaaattaaaaaagagagagagaatggtgacgtcgggaacatacgtgacgcaggtgccgttaaaaggaacggtggagaaacacttcaagaggtacaggaacgagaactatctcttccctgacactatcggccaccacatccaaagtgttactgttcacgatggcgaatgggacactcaaggaggcatcaagatttggaactacacactcggagatggaaaggaggaggtattcaaggagaggagagagatagacgatgacaataagatagtgaaggttgtaggattggaaggtcacgtgatggagcagttcaaggtgtatgagattgacttccaatttattcccaactctgtagaagattgcgtttgcaaatatactattatt

SEQ ID NO: 153238 - DNA, 437 bp, Arabidopsis thaliana columbia
  unsure (1)..(437): unsure at all n locations
acgcgtncgngaaattctctgatctctcttcattttattttccctctacatctctcccaacgatttccaaatctcacttcactttggctcctgcacctgaatccatggatattgcttcgtcatctctctcacaagctcacaaagtcgttctcacgcgtcaaccttcttcccgggtcaacacctgctcccttggctcggtctccgctatcggattctctcttccgcagattagctctccagctttaggtaaatgtcgccggaaacaaagctcttctgggttcgtgaaagcttgtgttgctgttgaacagaaaacccgaactgctatcatcagaattggcacaaggggaagtcctctagcacttgctcaagcatacgagacgcgagataagctcaagaagaaacaccctgaactcgttgaagatggggctattcatatc

SEQ ID NO: 153239 - DNA, 367 bp, Arabidopsis thaliana columbia
gaaaagagtcagagaaaaaaaaaatcaaggaagatgagtagcattggaactgggtacgatctctccgtcaccactttctctcccgatggccgtgttttccagatcgagtacgccgctaaagctgtcgacaacagtgggactgttgttggaatcaagtgcaaagatgggattgttatgggagttgagaaacttattgcatcaaagatgatgctaccaggttccaacaggagaatccattctgttcatcgtcatgctggcatggctgttgctgggcttgcagctgatgggaggcaaattggtgcgcgtgctaagtctgaagcacgaagctatgaaagtgtttatggcgatgctgtacctgtgaaggaac

SEQ ID NO: 153240 - DNA, 418 bp, Arabidopsis thaliana columbia
accgttccgagatctcctgcagtcgaccgcagcgcgcgcgaaaaaacaccagatcccaacgttacctttaaatcgtcctaaaaaatggagaaagcgatcgagagacatcgcgttcttcttgagcatctccaaccttcttcttcttcttcgcacaattacgaggcttctatatctggttctgcttgctcggctgcggacagcgctgcatatcagacgacctgtctctatggagatgatgttggcattgccgcggcacataagactccactatgcaagtccaaacgtggcaaattcaaggatacatatgccgatgatttgctcgcacctgttttgagggcattgattgagaagactaatctaaacccaagtgaaggatgttacatggttttgggtactggctttcctcctgtacctcaaa

SEQ ID NO: 153241 - DNA, 395 bp, Arabidopsis thaliana columbia
gccactgtacattccttcatacgacaaatctttgttgacctcaaaacaaatctgcagcaggaggtaggagcagaaccaatccaaaacctggacgtaggacattacttacaagaaaataaggagatctcatcacgtgattataaagtatcagcttcaaacgcagtgaaaggtttgagagatcgtcctccatcgtcttactctctcaagatggagtctttcaacacgctccttaagtcaacttacacggagaaatatgtatctcgtcccttttcagttggtggatacaactggacacttgttgtgttcccaaatggttacaagaaggatagtggttcagggtacctttctctttacgtatccatagacaactcatcttttggacagcatgagattta

SEQ ID NO: 153242 - DNA, 438 bp, Arabidopsis thaliana columbia
cgcgtccgaaaagagagatttaatacaaaagaaagagaaaaaagaaagatatggcaggactcatcaacaagagcggagacgcactccacattggaggaggcaacaaggaaggtgagcacaagaaggaagaggaacacaagaaacacgttgacgagcacaagagtggtgagcacaaagaaggtattgttgacaagatcaaagacaagatccacggtggtgaaggtaaaagccacgacggagaaggcaaaagccacgacggtgagaagaaaaagaagaaggacaagaaggagaagaaacatcatgatgatggtcaccacagcagcagcagtgacagcgacagcgattaaggtgaggaagtgaggaggatcgcttgaataaaacagatctggttctggctattattaattaatggtgctggatgttcttaacatcttagag

SEQ ID NO: 153243 - DNA, 404 bp, Arabidopsis thaliana columbia
ggtgcctgtggacgtggaggcttcagggcattaccagcaaaaggaagaagatgcatcaaattgcaaagaagtagaatcagttggtaatgatcaatctcaacaagatgagcatcaaaaggttgagttagtgaccgaaggagaggtggtccatggacagcaagaacagggctatactcaggtgggaggagcagagaatgctaaaagagactatgtgccacgtgggtcttaccagaaccaaagaggtcgtcgaggtgctcgaagaggtggtggtggctatcagaatgggcgaggaggacgaggtggtggtggtggctaccagaatgggcggttcgaatcttatgatcaatctggtggaaacggttatctaaggaactactacaacatcagatgaaggggacgttgtg

SEQ ID NO: 153244 - DNA, 355 bp, Arabidopsis thaliana columbia
gaaatattacgaaaaagagatattttttatttttacttattttgggattatcatttacccggaacgggcaaagcggtgagtcatcttaccttataaatgatcacaaacccgaggactgtgagttttcgtgtagaacaaatccttctctgagaaaaaacaacagatccgaattttatctttaatcagccggaaaaaatggagaaagcgatcgagagacaacgcgttcttcttgagcatctccgaccttcttcttcttcttcgcacaattacgaggcttctctatctgcttctgcttgcttggctggggacagtgctgcatatcagaggacctctctctatggagatgatgttgtca

SEQ ID NO: 153245 - DNA, 449 bp, Arabidopsis thaliana columbia
  unsure (1)..(449): unsure at all n locations
ccgacccacgcgnncgctcgtttcttcttttctccttcaaccttcttcttgcaccttcgttattttcataactcttgcttctccatcccttttcttttggtctcttcttcttactccgcctcgacatcgatccatgccagtgttattctagagagaattaaaacgtagtagcctaatcatcctcatccatggctattttaagtcaattctctccattgcatgtggtgttgactatggtagcacgttaggggcagattttgttacggagatattctcatccctcgccattgtcgtcaccttcttcttcgcagatccgctggagggagagaagagggtagcggctgcaagataccatgaacccctattgttaatgggctgaaaattaattattttgtgctgaaggttattttcgttttgggccctttattaatttggaaccggaatttttt

SEQ ID NO: 153246 - DNA, 355 bp, Arabidopsis thaliana columbia
ggaaactaactgggatcttaagccaaatcttccagctgaggcagagagaatattaaagtgtcgaggacgagtgtttgctcgtagagatgaacctgaagtttgggagtttggctgccaaattgtgactcacctggacttgctatggcacgtgcttttggtgacttttgccttaaagattttggcctaatctctgtgcctgatgtatctttccgtcagttaaccgaaaaagatgagttttattgtgttggctacagatgggatttgggatgttctcttaaatgaagatgtagtggcgattgttgcttcatgctcatctacgcctcttttcatcaagtagttttagtcgtagtcttgc

SEQ ID NO: 153247 - DNA, 359 bp, Arabidopsis thaliana columbia
ttatgtcgtctctgtctcctccaccgattccaatggaactccacgccggtatctggtaaaagttactagaatcaatacgccgggagttatctagttccaatcgttctctcgatggatttgttcttctacagggtggcgaggagaaaaatcgatactgtactgatcacaccgagctcttcaggcaagagagttattttgcttacttgtttggagtcagagagccagatttctatggagctattgacattggaagtgggaaatctatccttcttattccaaggttgcctgatgattatgctgtttggtcgggagagatttagccattgtcgctttttaaggaaacatttattggttgacat

SEQ ID NO: 153248 - DNA, 402 bp, Arabidopsis thaliana columbia
ctaaaaacacttatcgtttcgtctcttctctgatccattgttgaagatgtcgaagagaaaaactaaggagccaaaggttgagactgtgactcttggaccttctgttcgtgaaggagagcaagtttttggtgttgttcacatctttgcatctttcaatgacactttcattcatgtgactgatctctccggtagagaaactctcgtccgcatcaccggtggcatgaaggtgaaggctgaccgtgatgagtcctctccttatgctgctatgcttgcagctcaagatgttgctcaaagatgcaaggagcttggcatcactggcatgcacgtgaagctccgtgctactggatgaaacataaccaatacttcaggtcctggtgctcagtctgctcttagagcccttgc

SEQ ID NO: 153249 - DNA, 438 bp, Arabidopsis thaliana columbia
ctcaacatttcattctctctctctctctcaacaattagatctgtttcgataatcacgaggtttccctcacttcctttccattgctaaaccaggatttgcctcctgcatttggaaatggacgcttctatgattaccaattccaaatccattacttctccaccctctttagccttagggaagtcaggaggaggaggagttatcagaagttcactatgtaacttaatgatgccaagcaaagttaacttccctagacaaagaactcaaactctaaaggttagccagaagaaactcaagagagctactagtggtggtcttggtgttacatgcagtggtggtgataagattctcgtagcgaatcgaggtgaaattgcagttcgtgttatcagaactgctcatgaaatggggattccttgtgttgctgggtattctactatagat

SEQ ID NO: 153250 - DNA, 446 bp, Arabidopsis thaliana columbia
ccgaaaacctcaaaccatggccgagggactcgtattgaagggcattatgcgcgcccacaccgacattgtcacggccatcgctacgccgatcgacaattccgacatcatcgtcacagcgtcgcgtgacaaatccatcatcctctggaaactcacaaaggacgataagtcttacggtgttgctcagcgtaggctcacaggtcactctcacttcgtggaagatgttgttctctcatcggacggtcagtttgcactctccggaagctgggacggtgagctccgtctctgggatcttgccacgggagaaacaactcgtcgattcgttggtcatacgaaagatgtgctctctgttgcattctctactgataaccggcagatcgtgtctgcttctcgtgatcgtacgattaagctttggaacacacttggtgagtgtaagtataccatctctg

SEQ ID NO: 153251 - DNA, 434 bp, Arabidopsis thaliana columbia
cttgagtaaaatcagaattacaaacaaaaatggttgtgcaaaagcttcctctcattgggctgcttttgctcctgaccatcgtcgcctctccagcaaatgcagatggacctgtttgcccgccgtcgaacaaactaagccgggcaagtttccctgaaggttttttatttggcacggctactgcggcataccaggtcgaaggtgcgattaatgaaacttgtcgtggaccagccttatgggacatctactgtagaagatatccagagaggtgcaataacgataacggcgatgtggccgctgatttcttgcatcggtataaggaagatatccaactaatgaagaatctaaacacagacgcctttagaatgtctatcgcatgggcaagaatatttactcatgggagaaaggagaaaggagtgagtcaagctggtgtgcaa

SEQ ID NO: 153252 - DNA, 444 bp, Arabidopsis thaliana columbia
cggacgcgtgggctccgatcaaccatgagcaaaggtccaggactcttcaccgatatcggcaagaaagccaaagatctgttgacgagagactacaattccgatcagaagttcagtatctccacttacagtgcctccggcgtggcccttacgtctactgctctgaagaaaggaggagttcatgctgctgatgttgccacccaatacaagtacaagaatgctttgtttgatgttaaaatcgacactgattctagtggtttgacaacagtcacacttaccgagatcctcccatcaacaaaagccattgccttcttcaaagtccctgattataattccggcaagctcgaggtgcaatactttcacgaccacgcaacagttaccgctgctgcagctttgtaaccaaacccactaattgacataacagctactcttggttcgccagtcatc

SEQ ID NO: 153253 - DNA, 427 bp, Arabidopsis thaliana columbia
cgtgaaatgtgcagctccggaaataaataatcactaaaataaccagatccgatctactgccccggtttctcgccggaatctccattctgtaaccggcgatcctctttctgctcagttatggaagacgtgaaagggaaggagattattgatgatgctcctattgacaacaaggtttcagatgaaatggagagtgaggaaaatgcgatcaagaaaaagtatggaggattgttgcctaagaagattcctttgatatctaaggaccatgaacgtgcgttttttgactcagctgattgggctttaggcaagcaaaaaggacagaagccgaaagggcctttggaagctctgcgcccaaaactgcagccaaccccgcaacagcaaccaagagcaagacgaatggcttattcttcaggcgaaactgagacactga

SEQ ID NO: 153254 - DNA, 437 bp, Arabidopsis thaliana columbia
caagggttcagtcttcttccaaccgcaatgtgcagtatccacttcaccggcgttattaacttctatgcttgatgtcgcaaagcttagactaccctctttcgatactgattcggattcccttatatcagacaggcagtggacttatacaaggcccgatggtccttccactgaggcgaagtatttagaagctttagcctctgagacacttctcacaagcgatgaagcagtagttgtagcagcagcagctgaagcagtcgcccttgcaagagctgctgtcaaagttgccaaagatgcaacattatttaagaacagtaacaacacgaacctattaacttcgtcaacggccgacaaacgctccaagtgggaccagtttactgagaaggaacgtgctggcatattggggcatctagcggttcggacaatggaattgtgagtga

SEQ ID NO: 153255 - DNA, 333 bp, Arabidopsis thaliana columbia
attttcttcaaaacgattcgggtcaaggttattgactttctcattcagtgaagcttgaatcatggcctcgagaattgctaaagatgtgactgaattgattgggaacactccattggtgtatttgaacaatgttgctgaaggatgtgttggtcgtgttgctgctaagcttgagatgatggaaccgtgctctagcgtcaaagacaggattggttttagcaattaaacttgcacagaggccagaaaacgctgggaagctatttgtggcgatattcccgagtttcggggagaggtatctatcaacggtacttttcgatgcgacaaggaaagaagcgg

SEQ ID NO: 153256 - DNA, 379 bp, Arabidopsis thaliana columbia
taaagatgaacatgaagctcaggtgcaatttgctcttgagaggggcattcccgccatttctgcagttatgggcacgacaaggctacctttccctggcagagtttttgacatagttcattgtgctcgctgtagagtgccatggcacattgaaggtggtaaacttctcctggagcttaaccgtgtattgagacccggtgggttctttgtgtggtctgctactcctgtttatcagaagaagaccgaagatgttgaaatttggaaagctatgagtgaactcattaagaagatgtgttgggaactcgtatccattaacaaggacactatcaatggagtaggtgttgctacttacagaaagccaacttcaaatgagtgctacaaa

SEQ ID NO: 153257 - DNA, 398 bp, Arabidopsis thaliana columbia
cttcgataaggattttactctccagagatagaataaaaaaacctgctctgcttttgtgagcctttaaggaaaaagacgaagtggcgacggaatcgtacgaagccgccattaaaggactcaatgatcttctcagtacgaaagcggatctcggaaacgtcgccgccgcgaagatcaaagcgttgacggcggagctaaaggagcttgactcaagcaattcagacgcaattgaacgaatcaagaccggttttactcaattcaaaaccgagaaatatttgaagaatagtactttgttcaatcatcttgccaagactcagaccccaaagtttctggtgtttgcttgctctgattctcgagtttgtccatctcacatcttggattttcaaacctgtgaggctttt

SEQ ID NO: 153258 - DNA, 424 bp, Arabidopsis thaliana columbia
attaactaaagagccttttacttgcgccacactctcaccgcaatggccgcctcgacaatggctctctcctctcctgctttgaccggaaaggccgttaagctatccccggcggcctccgaagtatttggaaccggccgaatcaccatgcgcaaagccttcaagcccaccggtccatccggcagcccatggtacggatccgaccgagtcaagtacttgggtccattctccggtgagcctccgagctacctcactggagagttccccggtgattacgggtgggacactgccggtctatccgccgatcccgagaccttcgctaggaaccgtgagctagaagttatccacagcagatgggccatgctcggagccctaggctgcgttttccctgagctattggctaggaacggagtgaagttcggagaag

SEQ ID NO: 153259 - DNA, 391 bp, Arabidopsis thaliana columbia
ccaaaacacacccacacgtacgcacacacacatagacaatgtctcctttcaaaatattcttcttcacgactcttctcgtggcggggttttcagtgtcggctgctgatttcaacactgacgtcaacgtagcttggggaaatggccgtgggaagatactcaacaacggccagcttcttactctctccttagacaaatcctctggttccggttttcaatccaaaacagagtatttgtttggaaagattgatatgcagattaagcttgttcctggtaactctgcaggaacagtcacaactttttacctaaaatccgaaggatccacttgggatgagattgattttgagttcttggggtaatttgagtggagatcctctatctttacacactaatg

SEQ ID NO: 153260 - DNA, 382 bp, Arabidopsis thaliana columbia
ggctactagagtgttaactgcagcgactgtcttgacccaaaccacctcctgtttcctcgccgagcaagctttcactcttgcggcgaagaaatcctgcggcggatttggtggtctctgcttcagcagaagagctttggtgttgaaatctaagagacctttctcctgcagtgccatttacaatcctcaggttaaggttcaagaagaaggtccggccgaatccctagattatcgagttttcttcctcgatggttctggaaagaaggtttctccatggcatgatataccattgaccttaggcgatggagttttcaactttatagttgaaatacctaaagagtcaaaagcaaaaatggaggttgctactgatgaagatttcactcct

SEQ ID NO: 153261 - DNA, 418 bp, Arabidopsis thaliana columbia
accaactcactcacaaaatctgtagaatcatctttcaacaatggcttccactgctctctccagcgcaatcgtaagcacctctttcctccgccgtcaacagacaccaatcagcctcagatccctcccgtttgccaacacacaatctctcttcggcctcaaatcttccaccgctcgcggcggccgcgtcacggccatggctacctacaaggtcaagttcatcacacctgagggagaacaagaggtcgaatgcgaagaagatgtctacgtcctcgacgctgctgaggaagccggactcgacttgccctactcatgccgtgccggttcttgctcaagttgcgccgggaaagtcgtctctggttctattgaccagtcggaccagagcttcttagacgatgaacagatgagtgagggctatgtc

SEQ ID NO: 153262 - DNA, 448 bp, Arabidopsis thaliana columbia
gaagaagaagacgattcagatccacaacgccatgggtttaggcatcttagcttctcgaacaattcgaccagcttcacgtcttcttcaatctcaaacctccaatttcttcctccgcacaatcgtctcaaaaccagagctccaatctcctgaatccgctgctgtctctgagcctgagccgccgacacagattctccctcctagaaaccctgtaggtggagcacgcgtccacttctcgaatcctgaagatgcgatcgaggtctttgtcgatggttacgcggtcaaagtccctaaaggattcactgttcttcaggcttgtgaggtcgctggagttgatatcccgaggttttgttatcattctcgtttatctattgctggaaattgcatgatgtgtcttgttgtggttgtgaaatcttctaagcctgtagctttatgtgccatgcctgcgctt

SEQ ID NO: 153263 - DNA, 419 bp, Arabidopsis thaliana columbia
taaagatgaacatgaagctcaggtgcaatttgctcttgagaggggcattcccgccatttctgcagttatgggcacgacaaggctacctttccctggcagagtttttgacatagttcattgtgctcgctgtagagtgccatggcacattgaaggtggtaaacttctcctggagcttaaccgtgtattgagacccggtgggttctttgtgtggtctgctactcctgtttatcagaagaagaccgaagatgttgaaatttggaaagctatgagtgaactcattaagaagatgtgttgggaactcgtatccattaacaaggacactatcaatggagtaggtgttgctacttacagaaagccaacttcaaatgagtgctacaaaaacagatcagaaccggtgccttcaatttgtgcagactctg

SEQ ID NO: 153264 - DNA, 357 bp, Arabidopsis thaliana columbia
gtccgatactgatgccggtggcgtagattgcggcggagttggaatcctcggtatcgcttgggcgctttggtggtatgatcttcagcctcgtctactgcaccgccggtatctctggtggtcacattaacccagcggtgacatttgggctattcttggcacgtaaagtgtcgttacctagggccctattgtacataatcgctcagtgtttgggtgcgatttgtggagttggttttgtcaaagccttccaaagctcttactacacccgttacggaggtggagccaactctctagccgatggctacagcacagggaccggtctagccgcagagatcattggtactttcgttcttgtctaca

SEQ ID NO: 153265 - DNA, 416 bp, Arabidopsis thaliana columbia
gcctctcgttgctagaggaatcaaacaatggtgtttgtgaagtccaccaagtcgaatgcttacttgaagaggtaccaagtgaagttgaggagaagaagagatggaaagactgactacagggcaaggatccgtcttatcaaccaagacaagaacaagtacaatactcctaagtatcgttttgttgtccggtttaccaacaaagacatagtggcacagattgtatctgcaagcattgctggtgacattgttaaagcttctgcttacgcacatgaactgcctcagtatggtctcactgttggtcttacaaactatgctgcagcttactgtactggccttcttttggctcgccgtgttttaaagatgttggaaatggatgacgagtatgagggaaacgttgaggccactggagaagactt

SEQ ID NO: 153266 - DNA, 405 bp, Arabidopsis thaliana columbia
cgaagttccgtgcgactctctgctcgagcttgatctcctaccgatacaatgattatctgagaggctaaccgcaaagaaatctgcaagtacctcttcaaagaaggagtttgctttgcgaagaaggatttcaatcttgctaagcatccgttgatcgatgtccccaacctacaagtgattaagcttatgcagagtttcaaatccaaggagtatgttagggagacatttgcctggatgcattactattggtttttgaccaatgaagggatcgagttcttgagaacttatcttaatcttccatctgatgttgttcctgctactttgaagaagtcagctaagcctggtggtcgtccatttggtggcccacctggtgatcgctcaagaggtcctcgccatgaaggaggagac

SEQ ID NO: 153267 - DNA, 390 bp, Arabidopsis thaliana columbia
gttgttccctgtgaccatggctactccactctcaatctcatcaaatcctctcacctcccgccattgttaccgtctccacttatcttctacttcattcaagggaaatgtaagtgttttgggggcaaacccaagtcagattctatctctgaaactcaaccaaacccttaaaacgagaaaccaacagcaatttgcgagaccccttgttgtggttagccaaacggcggctacgtcgtcggcagttgtagctccggagagattccgtttggataatcttggaccacagccaggttcgaggaagaagcagaagagaaaaggtagaggtatctctgcaggacaaggagcaagttgtggttttggtatgagaggtcagaaatcaagatcgggtcctgg

SEQ ID NO: 153268 - DNA, 446 bp, Arabidopsis thaliana columbia
cggacgcgtgggtaagagtagagactctctcaatcccggcggcgaagatgaagtacaacccaagagtgacctcttctcgcagaaagaacaggaaggctcatttcacagcttcctccagcgagaggcgtgtgataatgagctctcctctctccaccgatcttcgtcagaagtacaatgtcagatccatgccgatccgtaaagacgacgaggttcagatcgttcgtggtacttacaagggacgtgaaggcaaagttgttcaggtttaccgtcgcatatgggtgattcacatcgagagaatcacgagggagaaggtgaatggaacaaccgtgaaccttgggattcaaccgtcgaaagttgtgttaacggaagcttcgtccttgataaaaatagggaaatcgcttttggagaggaaggctaaaggacctgcttctttctgttaaggtgaa

SEQ ID NO: 153269 - DNA, 409 bp, Arabidopsis thaliana columbia
acggaacctgtcttcttgtcttgtccaaaatcggatttttaagagtacaagtgagtttattttgggggccgaaatctgtcctggaggatacagaagcaagatgaagttaatagatcgaagaatgaggttaacggagctgctcttacggtgctccatcagtgtcttcgctctcctcgcgcttattctagttgtgacagacactgaggtcaagcttatcttcactatcaagaagacggccaagtacacggacatgaaggcggttgtgttcttggtggtggctaatgggatagctgcggtttattctttggtgcaatcagttcgttgcgtggtgggtacgatgaaaggaaaggttttggttaagaagccttttgcttgggcctttttctttggtgatcaggcgatggcgtac

SEQ ID NO: 153270 - DNA, 440 bp, Arabidopsis thaliana columbia
atcgaagaaggagagaagaacagagaaaaagagttgaatcaaatatggctgggagagctacgatccctgctcgcaactctgccctcatcgcaatgatcgccgatgaggacactgttgttggatttttgatggctggagttggtaatgttgacataaggaggaagacaaattacctcatcgtggattcaaagacaactgtgagacaaattgaggatgctttcaaggaattctcagcaagggatgatatcgctatcattcttttaagccaatatatcgccaatatgatccggttcttggtggatagctacaacaagccagttcctgcaattttggaaatcccttccaaggaccatccctatgatcctgctcatgattcaagtctctctcgtgtcaagtacctcttttctgcagaatctgtgtcacagcgttaaacatatgca

SEQ ID NO: 153271 - DNA, 427 bp, Arabidopsis thaliana columbia
tcgggaaacctgtaccttaccagtttggggaccatgtgttggtaggccatacattcaagtcaagagcagggatggtgagactaaggtttgcagtcctgaggagatcagtgccatgattctgactaagatgaaggagacagccgaagcctaccttggaaagaaaatcaaggacgctgttgtcactgttccagcttacttcaatgatgctcaaaggcaaagctaccaaggatgccggtgttattgctgggctcaatgttgctagaatcatcaacgaacctactgctgctgctattgcctacggtcttgataagaagggtggtgagaagaacatccttgtatttgaccttggtggtggtacttttgatgtcagtgtcttgaccattgataacggagtgtttgaggttctctccacaaatggtgacactca

SEQ ID NO: 153272 - DNA, 446 bp, Arabidopsis thaliana columbia
  unsure (1)..(446): unsure at all n locations
cacaaacaaaccatttacataaaacaaaaacaatttaatacttcttagtgtgtaaatgtgtgattctttcatcaataacaaaatgacatcgatattattcatgctcgtgagtctaacaattctttccatgaatctaaaagtctctcaagccacatctcgtgtcaccttccacgagccgatcgttgctgaacaccatcagcaatggatgactcggttctctcgagtttacagtgacgagctcgagaaacaaatgagattcgatgtgttcaagaaaaacttgaagttcattgagaaatttaataagaaaggggatagaacctacaagcttggtgtcaacgagtttgcggattggaccagagaggaattcattgccactcacaccggcctcaagggggttaacgggattccatcctctgaatntgtcgatgaaatgataccttcttgga

SEQ ID NO: 153273 - DNA, 210 bp, Arabidopsis thaliana columbia
cccacgcgtccggtcggtggatccacacgtattcctgctgttcaggaactcgtgaggaaggtgactgggaaagaacctaatgttacagtaaatcctgacgaggttgtagcgttaggtgctgcattccaggctggtgttcttgctggagatgcgtgtgacattgtgcttcttgatgtgacacctgtttcgattggtttggagtcccttggt

SEQ ID NO: 153274 - DNA, 436 bp, Arabidopsis thaliana columbia
ggggttgacactttggctcaccagaaatggtccgttgctaattactatgatcgttatcttaagaccgtccaaggtggaatctgctgcactgcagccatgggaaaaggtgtcactgaagaacagttcaaggagagttggacaaggccgggagctgatggaatgggtgaagggactagccttgtggtcgccaagtcaagaatgtaagacatatgttcattacggcggtgcggccaaagcggtgcggcatcttcgtaggaaagcttggaaaccacactatcttcaatatatatctttggacacccgtgttaaagaaaaaaaaagacagaaacagataataaatgtatctttgttatcgtatttctcttcttcaacgtaataattgggttaaaaggtttggggcaatattttatgggggtagcttcttcgtatggatatt

SEQ ID NO: 153275 - DNA, 201 bp, Arabidopsis thaliana columbia
ctcctctccttctctctattttgccggaatacatatgatcgagtgaaacggcggacaaagctgtcgtgttgagtactaattcgccgtcgtttttctcagtgaaggagtggtgagagatgtcgagtctcgaagatatcaagaacgagactgttgatctggaaaaaattccgattgaggaagttttccagcagctaaaatgtt

SEQ ID NO: 153276 - DNA, 431 bp, Arabidopsis thaliana columbia
aaaatctatagagagctcactcactagcaatggcgtctcttctcggaagatctccttcttcaatcttgacctgccctcgtatttcttctccttcctcaacatcttcaatgtcccatctctgcttcggaccagagaaactttctggaagaatccaattcaatccaaagaagaacagatctcgttaccatgtctctgttatgaatgtcgctacagagatcaactctgttgaacaagcaaagaagattgattcaaaggaaagtgcaagacctgtttatccgtttgctgctatagttggacaagatgagatgaagctatgccttttgttaaatgtgattgacccgaagataggtggtgtgatgataatgggagatagaggaactggtaaatcaacaactgttagatctttagttgatttgcttcctgagatcact

SEQ ID NO: 153277 - DNA, 367 bp, Arabidopsis thaliana columbia
ttgacacaaatgagaacaagctcttattacatataatattcgaactacaaatacaccccttaagcaaatctaatgaaagaaggggttattaaacaataacaaatcaaaatacacgaaactgatattaaaggtgattatctaatgacgaatcacaatcattctcttcaggttttcttgtttggcccgtatgcatacttaatcagagactccttgatagagagtagctcagggaactctatcttgagcttggtagcatccatctcgttgttgcttcttggagccacaatgactttagcttgctcctctaatgtgaagtttgcccatttgaattcaagggtgatgtaggttctgtacatctttaggaatc

SEQ ID NO: 153278 - DNA, 453 bp, Arabidopsis thaliana columbia
  unsure (1)..(453): unsure at all n locations
gatctccggcgacaatcattgagatctgaatatcttacgttaaggagagaaagatgtacggattcgaggcgcttaccttcaacatccatggcggatatttggaggcgatcgttagaggccaccgtgctgggcttctcaccaccgccgattacaataatctatgtcagtgtgagaacctagacgatatcaagatgcatctctctgccaccaaatacggctcttatctccaaaacgaaccgtcacctctgcataccaccaccattgtggagaagtgtactcttaagcttgttgatgactacaagcatatgctttgccaagctactgagccaatgtctacctttttagagtacatcagatatggccacattattgacaatgtcgtgctcatggttactggaaccctgcatgagagagatgntcaagaagtgattgagaaatgtcaccctttaggca

SEQ ID NO: 153279 - DNA, 402 bp, Arabidopsis thaliana columbia
caagaaaccaaaagagtaaaacaaacacagagaagcttcttcttaaacgatgccgtactataccagagatgacaacgacgtcgacgatttcgatgagtttgatccaacgccgtacagtggtggttacgacatcacggtgatctacggccgtccgattccaccttccgatgagacttgttatcctctctcatctggtgtcgatgatgatttcgaatacgagagacctgaatttactcagatccatgagccttctgcttacggtgatgaagctcttaacacagagtacagtagctattctcgacccaagccacgacccgcatttcgacccgattcaggtggtggtggtcatgttcaaggtgaaagaccaaatcctggttatggatctgaatccgggtatgggag

SEQ ID NO: 153280 - DNA, 375 bp, Arabidopsis thaliana columbia
gaaataaaagagtgggatgagatcctcaagatcattgggattaatgaattgcatggtttatgttgtggtcctaagggctattgcgggtacagtgacattatacccttactcatctgctcataccccagcttacgattcttccagctatgaacacaaaggcccaaagtacgcaccacatacgaaaccatattgttacagtgtcttcaccaccaccatactatactccatcaccaaaggtaaactataaatctccaccaccaccatacgtatataatttatcaacttcaccgtactactcttcttcctccaaagtgttactacatgttctcaccttcaccatacgtttacagatccccaccatcaccagactacttt

SEQ ID NO: 153281 - DNA, 450 bp, Arabidopsis thaliana columbia
aaaaaaaaaaaaacacaaaaagtttcaatggccgcctccacaatggctctctcctcccctgccttcgccggaaaggctgtgaacctttcccccgcggcatctgaagtcctcggaagcggccgtgtgacaatgaggaagactgttgccaagccaaagggtccatcaggcagcccatggtacggatccgaccgagtcaagtacttgggtccattctctggcgagtcaccgagctaccttaccggagagttccccggagactacggatgggacaccgctggactttcagctgatcccgagacattcgcaaggaaccgtgagctagaagttatccacagcaggtgggctatgctcggagccctaggctgcgtcttccctgagcttttggctaggaacggagtcaagttcggagaggcggtttggttcaagggccgttcacagatctttagcgat

SEQ ID NO: 153282 - DNA, 441 bp, Arabidopsis thaliana columbia
  unsure (1)..(441): unsure at all n locations
gtctctgcaagtctcatcagaagaggaagagaatcaatggcgagttgcttcagctacgtgtcttctcgtaacaaatgttaccaatacagcttctctcgtgctggtctccgatcatctacctccgatcttggcgacggcaccgtcttccactgttggatcccacttactcacatccacaccaagcccacgctcctcctccttcacgggatcggagctaacgctatgtggcagtgggaccgcttcatcgaccgttttatcccccgcttcaacgtctacgtaccggacctcatcttctttggcgactcctacaccactcgttccgaccgctcagagtctttccaggcgactngtgtcatgaaggcgatggatgcttacggtgttaggaccatgaccgtcgctggcctcagctacggtggttttgtggcctactccttggcggcg

SEQ ID NO: 153283 - DNA, 410 bp, Arabidopsis thaliana columbia
attcctagtaatcttggaaatctgacaaacttagtgagtttggatctttacttaaacagcttctccggtcctattccggaatcattgggaaagctttcaaagctgagatttctccggcttaacaacaacagtctcactgggtcaattcctatgtcactgaccaatattactacccttcaagtgttagatctatcaaataacagactctctggttcagttcctgacaatggctccttctcactcttcacacccatcagttttgctaataacttagacctatgtggacctgttacaagtcacccatgtcctggatctcccccgttttctccttcaccaccttttattcaacctcccccagtttccaccccgagtgggtatggtataactggagcaatagctgggggagttgc

SEQ ID NO: 153284 - DNA, 360 bp, Arabidopsis thaliana columbia
ggctttgcttgagagtataatattagggctaatcacaggatggttagcttttgttattgggttggttattggatgggcatggaaaccaagatgggtttcttcttctaataatcgacaagtcaaattacaatgttctgctccaagatcttttgatttgtctttaccatcttcttctcctagttctgttgttacttctcctttgaagggttttggatcagctccttgcttaaaggctcttgtttgtgatacatggactatggctttaagacaacagagacaaacagtttctcctgattcttcttcttcttcatatgattcttctgaacaacatttggatttggtttcaagagtgaagaaaac

SEQ ID NO: 153285 - DNA, 402 bp, Arabidopsis thaliana columbia
gtcttcttcgttctctagttttttcctcagtctctgttcttagatcccttgtagtttccaaatcttccgataaaaatgtcgggtaaaggagaaggaccagctatcggtatcgatcttggtaccacttactcttgcgtcggagtatggcaacacgaccgtgttgagatcattgctaatgatcaaggaaacagaaccacgccatcttacgttgctttcaccgactccgagaggttgatcggtgacgcagctaagaatcaggtcgccatgaaccccgttaacaccgttttcgacgctaagaggttgatcggtcgtcgtttctctgacagctctgttcagagtgacatgaaattgtggccattcaagattcaaagccgacctgccgataagccaatgatctacgtc

SEQ ID NO: 153286 - DNA, 434 bp, Arabidopsis thaliana columbia
ctttcgattctctcaaaaaatcccataactttcccaacgaaaaatgttccgatcaatgattggtcgatctgcttccccagtgaagcagggtcttctccgcagaggattcgcctctgaatctgttcccgatcgcaaagtcgtcatcctcggtgccgccggtgggatcgggcagccactttctcttctcatgaagcttaaccctctcgtctcttctctctccctctatgatatcgccaacactcccggcgttgctgctgacgtcggtcacatcaacacccgatctcaggtttctgggtacatgggtgatgatgatttggggaaagcgtctagaaggcgctgacctcgtcattattccagctggtgtcccaaggaagcctggcatgacccgtgatgatctcttcaacatcaatgctggcattgtcaagaacctaaca

SEQ ID NO: 153287 - DNA, 430 bp, Arabidopsis thaliana columbia
agagatcaaaccaaagagacacagagagagtatccaccgatggaatccgcagcaacggctgttgtacctccggcagccgccggcaccaccgccaccgccaccgatgataatctccaatcaagcgactcatcatctcccgccgacgccgttaaccgattgatccacgccttttcgcagcgacaacaacatcttctcgacaaaacggttcctcacgttctctatcgatggatcgcatgtctctgtgttgtattgatctacatcgttcgtgtttactttgtggaaggcttctacatcatcacttacgccatcggcatctaccttttgaatctcatcattgcttttctatctcctcaagaagatcccgaagcttctctcacttccggtggttctctttctactcggagatccgatgagtatcggtctttcgttc

SEQ ID NO: 153288 - DNA, 416 bp, Arabidopsis thaliana columbia
agcagacgaaaaaaatggcgactctgtcttcctatctgttatcttctcctcctctatgcaaatcccgattctcggcaacaagtctcgtctcaggaattgatttcatctctttctctcctcgaacaactctctcctcgtcatccactgtcttgccggcgattctttctctttccgttaaacataatcgccggagaaactcgcttcaagtgaaatcagtagctagcccaacggagacgatttcagaattcgatgagatggtctccggcacgaaacgaaagtattacatgctcggtgggaaaggaggagtgggcaaaactagttgtgctgcttctttagctgtgagattcgccaacaatggacacccaactctggttgcatctacagatccaacacattccttgagcgaatcttttgct

SEQ ID NO: 153289 - DNA, 399 bp, Arabidopsis thaliana columbia
cttttaagcccaacaaaaatgggttatgctaaatcagccatgctgatcttcttactagcattggtcatcgcatcttgtgccacggccatggacatgtccgttgtttcctccaacgataaccaccacgtgaccgccggtcccggccgccgtcagggtattttcgacgctgaagccaccttgatgttcgagtcatggatggtcaaacatgggaaagtgtacgactccgttgccgagaaggaacggcgtttaactatttttgaggacaaccttcgttttatcactaaccggaacgctgagaatctcaggtaccggcttggtttgaatcggtctgcggatctatctcttcatgaatacggagaaattcgccatggggctgatccaagacctcctaggaaccac

SEQ ID NO: 153290 - DNA, 456 bp, Arabidopsis thaliana columbia
agaaaacaagtagaaactttaaaacgagagagagagaaagaaatggcgacatcgggaacgtacgtgacggaggttccgttgaaaggatcggcggagaaacactacaagagctggaagagcgagaaccatgtcttcgctgacgccattggccaccacatccaaaatgtcgttgttcacgaaggcgaacatgactctcacgggtctatcaggagttgggactacacatatgatggaaagaaggagatgttcaaagagaagagagagatagatgatgagaataaaacattgacgaaaagaggactggatggtcacgtgatggagcatctcaaagtatttgatatcatctacgaatttattcccaaatctgaagatagctgcgtctgcaaaatcactatgatatgggagaagcgcaacgatgacttttccgaaccaagcgggtacatgaaattcgtcaag

SEQ ID NO: 153291 - DNA, 450 bp, Arabidopsis thaliana columbia
accggttcaggtgctcagaaattggaagcacaaggcaacagtacaggaggtacatcatgggacgatggatccgattacgatggcgtgaccaagatatacgcaagctacggtggggaaggtattcaatacgtcaagttcgactatgtgaaaggtggagtaacaaaacaaggagttctacacggtaaacaacaaagtagacaaaatccaagagagtttgtgattaaccattccggatgagtatcttgtttctgttgagggttggtatgaaaccgtcatgctaggaatccagttcaaaacgaacttgaacacttatgaggtcagcatctatcctttcgaacctagtactgatactaaaattactcttcaagttcaagacaagaagatcattggatttcacggtttcgcgggaaatccttcatcttcaaagactgagcctttagcttagtgaaa

SEQ ID NO: 153292 - DNA, 222 bp, Arabidopsis thaliana columbia
aagaaacaagaaaacgaaaggaaaaaatacagaattgggtggtttgaagtttcatgtacttatgtatccatggttcgcaacaggcgcatatgaccccgttccttgttcttgccaacaaattggctgagaaaggtcatacggccacttttttgattcccaagaaagctctgaaacagttggaaaatctcaatctgtttccccacaacattgtctttcggtctg

SEQ ID NO: 153293 - DNA, 393 bp, Arabidopsis thaliana columbia
acccttccggtggttatggtcgcaggaggaacattcgccgtcgttttctcagcggaggagaatccatttactccaaaagcatctttagttgggtactggaacaaagagattcgtggccaatctcccagatcggagtttttaatctcaaaagcttcaccactcaacgccgtagactcagcaactttctcaaaactcgccgccgcgaactcgctgccgactcgttttcccgatttctgctccgccgcgaatctcttctgttttcctgatttaggagcgagtctcgagaaacacgacgacgacgttaaattctccgtttatgaccagaagaacttcactaactacggcaatgctcgtgccggaggagcagattcgttcaaaaactactcgaaagac

SEQ ID NO: 153294 - DNA, 417 bp, Arabidopsis thaliana columbia
tgcagatcttcgtgaaaaccttgaccggcaagaccatcactctcgaggtcgagagcagcgacaccatcgacaatgtcaaggccaagatccaagacaaagaaggaatccctccggatcagcagagattgatcttcgccggaaagcagctcgaagatggccgtactttggctgactacaacatccagaaagaatctacacttcatcttgtgttgaggcttagaggaggtattattgagccttccttgatgatgcttgctcgtaagtacaatcaggataagatgatttgccgcaagtgctatgctcgtcttcacccaagagctgtcaactgcaggaagaagaagtgtggtcacagcaaccagttgaggcctaagaagaagatcaagtagagagactcttatcaagaatcccatctcttgc

SEQ ID NO: 153295 - DNA, 437 bp, Arabidopsis thaliana columbia
tgatgatgaaaaggtgaaagagctcatgaggctttacatcaccatccacagtgatcatgaaggtggaaatgttagtgctcacactggtcacctggttggtagtgcactttcagacccatatctgtcatttgcagctgcattaaatggtttagctgggccactccatggtttggctaatcaggaagttttgctttggatcaaatcagtcgtagaggaatgtggagaagatatatcaaaagaacagttgaaagaatatgtttggaaaacattaaacagtggcaaggttattccgggatatggtcacggtgttctgcgcaatactgatccaagatatgtatgccaaagagaatttgccttgaagcatctacctgacgaccctcttttccagctggtgtcaaagctttatgaagttgtgccttctgttctcactgagcttg

SEQ ID NO: 153296 - DNA, 383 bp, Arabidopsis thaliana columbia
cttcactctatctaataaaaaagctcttaacctcatccggtaaatctttctccgatcatgccgaccagaaacatggccagtggtggagtccaagaagaggtctatcaccccaacgcacttagggcggcgctcgctgagtttatctcgactttgatcttcgtcttcgccggctcaagctccggaattgcttacaacaagatcactgacaatggagcaaccactccttccggcctcgtcgccgctgccttagctcatgctttcggtctctttgtcgctgtctctgttggcgctaacatttccggtggccacgttaaccctgccggtaccttcggtgtcttactcggtggttacatcactctcctccggggattctctactggatt

SEQ ID NO: 153297 - DNA, 422 bp, Arabidopsis thaliana columbia
aaaaaaaatattcttgtttcaaacttcaatggcgttctcgagttccatcttctctgttactcagttttcttcttcgttagcttcgcgtgcttcttctgcaatcagtaggcagactcgttttcccgctcaaattgcttctccagatctatcgcctgctttgttcgatgatcgccggaagttcgtcggaggtgtaatgtctctcttgacgaagagtattaaaaaccgtgtatatgctttcgattaacagcattgattcggccgctactccatcgtatccgaaatcggaagacgatgacgacgttgttccaatgccaatggttatgatagaccaggatgctgaccctgaagctactattgtacaactcagttttggaaatcgtcttggggctcttattgacacaatgcgggcgctgaaagatttg

SEQ ID NO: 153298 - DNA, 442 bp, Arabidopsis thaliana columbia
ggggttggcttatccgcatcagcctcattttttagcttccggagacgttcttgtgtcttgtcttggagacgaagatggaaacgcagaaggcagtgggtttctcttacttgattccgagtttaacatcaaaggaaggtgggagaaggatggaaacagtcctttgtatgggtatgatttctggtaccaacctcggcataagacgatgatcagtacctcatggggagccccggccgcgtttaccaaaggatttgacctcaaagacgtctctgatggcttatatggaaagcatctacatgtctatagctggccccaaggagaattgaaacagattcttgaccttggtgataccggacttttacccttagaggtaagattcttgcatgagccggataaagctacggatttgcaaggtgtgcgttgtcaatacttaagtaagattttt

SEQ ID NO: 153299 - DNA, 442 bp, Arabidopsis thaliana columbia
gctcctaacaaagcaatatcatttccaatttataaaagttaaagccatggctgcatctttctgtgtcccctctatgataatgggggaagaagggagattcgaagcggaggttgcggaagtgcagacttggtggagctcagagaggttcaagctaacaaggcgcccttacactgcccgtgacgtggtggctctacgtggccatctcaagcaaggctatgcttcgaacgagatggctaagaagctgtggagaacgctcaaaagccatcaagccaacggtacggcctctcgcaccttcggagcgttggaccctgttcaggtgaccatgatggctaaacatttggacaccatctatgtctctggttggcagtgctcgtccactcacacatccactaatgagcctggtcctgatcttgctgattatccgtacgacaccgttcctaac

SEQ ID NO: 153300 - DNA, 146 bp, Arabidopsis thaliana columbia
ttgcgtaggatgccattattcattggttctctgacttaatgaaggacattgagtgtcttgagaacttatcttataccttccttcccgatgttgtcccatgctacctttgaagaaagtctgctaagacccggtggtcgttccctttg

SEQ ID NO: 153301 - DNA, 426 bp, Arabidopsis thaliana columbia
gccgtcggcacaagaagaagaagaagaagaatgtctcacaggaagtttgagcacccaagacatggttctcttggtttccttccaaggaagagagctaaccgtcacagaggaaaggtgaaggcgttccctaaggatgaccaaaccaagccttggaagttcacagctttcatgggttacaaagctggtatgactcacattgtcagagaagtggagaaacctggatccaagcttcacaagaaggagacatgtgaggctgttaccatcattgagacacctgctatggtggttgttggagttgttgcctatgtgaagactcctagaggtttgaggtctttgaacactgtctgggcacagcatttgagtgaggaggtcaagagaagtttctacaagaactgggctaagtctaagagaaggctttcactgggt

SEQ ID NO: 153302 - DNA, 450 bp, Arabidopsis thaliana columbia
cgcaatcttcgctcttctctttgctctctctctctcaacgcgggtcagatccgagtttgggagatgcaagctccctgaaaaaagccctttactctcgcttaccaactttgctccagcatggcaggatctgcaccagaaggcacacagtttgatgcacgtcagtttgaccagaaactcaatgaagtacttgagggacaagatgagttcttcacatcctatgatgatgttcatgagagctttgatgccatgggtcttcaagagaaccttctcaggggtatttatgcttatggttttgagaagccttctgctattcagcaaagaggaatcgtccccttctgtaagggtcttgatgtgattcaacaggctcagtctggtactgtgaaaacaagaacctttctgctctggtgtcttgcagcagctggacttctcccttatccagtgtcaggcttt

SEQ ID NO: 153303 - DNA, 412 bp, Arabidopsis thaliana columbia
tctctcttcctctgtttcttcgccattctctcttcttttctccttcttcttcgtctttgtcagggaaagagatacgatgagcatatcccacatacctctctcctcttctcatctttttagtttctcgaaagtttgcatgcgccgactttgttataggttataaactttagttttaagcctattttcgtatgtttatggttgttgtaatagttgagaattcagagtatgtcaagtgaaacttaaaaagaattctatatgtatgtgtgtatgcgttaaagagtgaatggagctgtggacagaagctagagccttaaaggcaagtctaagaggagaatctactatatctctcaaacatcaccaagtgattgtgtcggaagatttaagccgaacttcttccttgccggaagatttc

SEQ ID NO: 153304 - DNA, 348 bp, Arabidopsis thaliana columbia
gcggaaagaggaggagaaagcggcgcagagcgtggttgtgaccgtggtgacttctgtcgtggattgggcggtggacgtggaggtgggcgtggtcgtgatcgtggtccaagaggccgtggaagacgtggaggccgtgcctcggaagaaacgaaatgggttccagtgaccaaactaggtcgtctagtggctgacaataaaataacgaagctagagcagatctatcttcattctcccccagttaaggagtaccaaatcatagatcatcttgttggtcctacgttgaaagacgaggttatgaaaattatgcctgttcagaaacaaaccatagcttgtcaaaggactagattc

SEQ ID NO: 153305 - DNA, 442 bp, Arabidopsis thaliana columbia
acagttctctctttttgtcgacagtcttcttcttcttcttcttcttcgattggatctggaactgaactcaaattgggaagaattttgacatggaggaggaccggtgttcgatcaaggatgatgcaactcaattgataggtaacaccccaatggtatatctgaacaacattgtggatggttgtgtagctcgtattgcagctaagcttgaaatgatggagccttgctctagtgtcaaggagcgaattgcttatggtatgattaaagatgcagaagacaagggattgattactcctgggaagagcacactgattgaggctacctctggttacaccgggattggtttagccttcatcggtgcagctaaaggttacaaagtggtcctcacaatgccctcattaatgagccttgagagaaataatcatcttttagcattaggtgcgga

SEQ ID NO: 153306 - DNA, 395 bp, Arabidopsis thaliana columbia; identical to SEQ ID NO: 130958

SEQ ID NO: 153307 - DNA, 450 bp, Arabidopsis thaliana columbia
gtcatcttgtaaaacttgggacgatgggtgtgtatggaactccaaatattgacatcgaggaaggttatataaccataacccacggcggtagaactgacactttgccataccccaagcaagctagctccttttatcatcttagcaaagttcatgattcgcacaacattgcttttacttgcaaggcttggggtattagagccactgatctcaaccaaggagttgtttatggagtgaagactgatgagacagagatgcatgaggaactccgtaaccgactggattacgatgctgtgtttggtacagcacttaaccggttctgtgtgcaagctgctgttggtcacccacttacagtttatggtaaaggtggtcagacgagaggctacctcgatataagagacacggttcaatgtgttgagatcgctatagcatacccggcaaaagctggtgagt

SEQ ID NO: 153308 - DNA, 423 bp, Arabidopsis thaliana columbia
aagatttcgattcccgaggctcgagagaaaaccgttaatctcttctccgttcactcaatcaaccaaagatgcgtgagattcttcacatccagggtggtcaatgcggtaaccagatcggagccaagttctgggaagtggtttgcgccgagcacggcatcgatccaaccggaaggtacaccggagactcagatctgcaacttgagcgcatcaacgtttactacaatgaagcgagttgcggtagattcgttcctcgtgcagtgctcatggatttggagcctgggactatggatagtctcagatctggaccgtacggtcagacctttcgacctgataacttcgtctttggtcaatccggtgcgggtaacaactgggccaagggacactacactgaaggagctgaactaatcgattccgttctcgatg

SEQ ID NO: 153309 - DNA, 431 bp, Arabidopsis thaliana columbia
atctactctctttaaaagaaattcgtaagttctatcaagaagcagaagatggcccaaaagggggaagcacaaggagggaaaggagccaacctatgggacgatggatcgacacatgacgccgtgaccaagattcagctcgcagcaggcatagacggaattcaatatgttcagtttgattatgtcaagaacggacaacccgaacaagctcctcttcgtggtaccaaaggccgtgttctcccagctgatccgtttgtgattaaccatccagacgaacatctagtttctgtagaaggttggtatagccctgaaagtatcattcaaggaattaagttcatctccaacaagaagacttctgatgtcattggatccgatgagggtactcacttcactctacaagttaaagacaagaagatcattggctttcatgggtc

SEQ ID NO: 153310 - DNA, 410 bp, Arabidopsis thaliana columbia
ggaaacaatgctattatcaggttgattgctggtactatattcatgcatgaggaagactataaggaggctctgaagcacactgattctggaggaaccatggatctgcatgctttgaatgtccagatattcataaagatgcacagatcagattttgcggagaaacaactgagagtgatgcaacagattgatgaagaccacacactcactcagctcgcgagcgcgtggttgaatctggcagtaggtggttccaagatacaggaagcttatctaatcttccaggatttctctgagaagtacccaatgacaagcttgatcttgaacggcaaagcagtttgctgcatgcatatgggtaattttgaagaagctgagactctactacttggagcactcaacaaggttgctaaagaccc

SEQ ID NO: 153311 - DNA, 374 bp, Arabidopsis thaliana columbia
cgctcaaaacgctatactctccggttgttcagctggagcattggctgcgattctacattgcgaccagttcaagtccactctccctaaaacggctaaagtcaaatgtgtttctgacgctggttacttcatccacggtaaggatatcactggaggatcttacatccaatcctactacgccaaagtcgtagcgacccacggatctgcaaagagtctacctgcttcttgcacctcaagtatgaagcctgatttgtgtttcttccctcaatacgttgctaagaccttacaaacaccgcttttcgtcatcaatgccggcttcgattcttggcagatcaagaatgtattggcaccaacctttgttgataaaagcaaagcat

SEQ ID NO: 153312 - DNA, 442 bp, Arabidopsis thaliana columbia
aaagggatgcagttctggcccaagaagaatctagtggctgggttcatacatatttataggttggtggaggatgggaaatctcttgagcttcttcataagacgcaagtagaaggtgttcctcttgctctgtgccagttccaaggaagactgctggcagggatcggacctgtcctcagattgtatgatttggggaaaaagagactgcttaggaaatgtgaaaacaagctctttccaaacaccattatctctatccaaacttaccgtgaccgtatatacgttggtgacattcaggagtctttccattactgcaagtacaggcgcgacgagaatcagctgtacatatttgcggatgactgcgtgccgaggtggctgacagcatcgcaccatgtggatttcgataccatggcaggtgcagataagtttgggaatgtgtattttgtgc

SEQ ID NO: 153313 - DNA, 448 bp, Arabidopsis thaliana columbia
tttgggattttttttttacagagaagcgaagcagcgtcgccgttcaagacgaggtacagagaaaacgaagaagaagaagatatgacgattaaaccggcggttcgtatttccgacgggaatctaatcatcaaaaaccggacgattctaaccggtgtaccagataatgtcatcacgacgtcagcatcggaagctggaccggtagaaggagtcttcgtcggagctgtatttaacaaggaagagagtaaacacatcgtaccgatcggtacgcttcgcaattcccggtttatgtcttgtttccggtttaagctctggtggatggcccagagaatgggagaaatgggccgagatattccctacgagacgcagttcttattggtcgagagcaacgatgggtcccaccttgagtctgacggagctaacggcgtcgagtgtaaccaagaagtttaca

SEQ ID NO: 153314 - DNA, 457 bp, Arabidopsis thaliana columbia
cccaagccgtccgaaacactcttggtggaggagctaacaccgtatctgtcggttacagcaaaggaactgctctcggagctgagattattggaactttcgtccttgtttacaccgttttctctgcaactgaccctaagagaagcgctcgtgactctcacatccccgttttggctccacttccaattggatttgctgtgttcatggtgcatttggctactatccccattactggaactggtatcaacccagctagaagctttggtgctgctgttatctacaacaacgagaaggcgtgggatgaccaatggatcttttgggttggtccgttcttgggagcactagctgcagcagcttaccaccaatacatattgagagcttcagcaattaaggccttgggctcgttccgaagcaacgcaaccaattaatgaaggctttttttaaagaaatgtcaagaaac

SEQ ID NO: 153315 - DNA, 376 bp, Arabidopsis thaliana columbia
gaaaaagtacgtgtacaaatcacctcctccctttaaggtagattacaaatctccaccaccacgatgcgtctatagttcaccaccaggaccatactactcaccttcccctaaggttgactacaaatctcctccaccaccatactactaaccttcccctaaggttgactacaaatctcctccaccaccatatgtctacagttctccaccaccaccatcatactcaccttcttcaaaaactgagtactaagcttcacattcaccttcgtattactcgaaattgcaatgagattcttatataagctaccaagttttatctcatttcatctttgcttctgttcttcatgatattcatatctaataaatagtaattctgcct

SEQ ID NO: 153316 - DNA, 392 bp, Arabidopsis thaliana columbia
cttcgattttcgtttattcgcatccatcggatagagaaaacaatcaataagcgaccatgttggtgtaccaagatcttctcaccggtgatgagcttctgtctgactctttcccttacaaggagattgagaatggaatcctctgggaagtagaaggaaagtgggttactgtgggagctgtagatgttaacattggtgccaatccatctgctgaagaaggtggtgaggatgaaggtgttgatgactctactcaaaaggttgttgacattgtcgacaccttcagacttcaggagcaaccaacttatgacaagaagggattcatcgcttacattaagaaatacattaagcttttgacacccaagctcagcgaagaagatcaagctgtcttcaagaag

SEQ ID NO: 153317 - DNA, 411 bp, Arabidopsis thaliana columbia
gaacaatggcttcctctatgctctcttccgctactatggttgcctctccggctcaggccactatggtcgctcctttcaacggacttaagtcctccgctgccttcccagccacccgcaaggctaacaacgacattacttccatcacaagcaacggcggaagagttaactgcatgcaggtgtggcctccgattggaaagaagaagtttgagactctctcttaccttcctgaccttaccgattccgaattggctaaggaagttgactaccttatccgcaacaagtggattccttgtgttgaattcgagttggagcacggatttgtgtaccgtgagcacggtaactcacccggatactatgatggacggtactggacaatggggaagcttcccttggtcggttgcaccgactccg

SEQ ID NO: 153318 - DNA, 408 bp, Arabidopsis thaliana columbia
aaagcaaagaacacttgaacgttttctagatagagatggaagggaaagaagaggatgttcgagtgggagctaacaagttcccggagaggcaaccgataggtacatcggctcagacggacaaagactacaaggagccaccaccagctccatttttcgagccaggcgagctgagttcgtggtccttctacagagccggaatcgccgagttcatagccaccttcctgtttctatacataacagtattgacagtgatgggagtgaagagagcaccaaacatgtgtgcctctgttggaatccaaggcattgcttgggctttcggtggcatgatctttgcccttgtctactgtactgctggaatctctggtgggcacataaacccagcggtgacatttggtctgttcttggctc

SEQ ID NO: 153319 - DNA, 454 bp, Arabidopsis thaliana columbia
  unsure (1)..(454): unsure at all n locations
agatgatatgcgcaagaatccgaccgctaatttcgtcaccactagctttcactatctcaacaaccaaacactccagaatcaatctccgattactccctcgccgctccttctccgtcatgtcttcttcaaccccacagagtcagatcatagaacacatcgtcttattcaaaaccaaagacgacgctgactccaccaaaatcacctccatgatcaacaacctcaacgctcttgcatatctcgatcaagtgcttcacatctccacctctcctctccaccgtatctnctccgctaccgccttcactcacgtactccatagccgttacgaatctaaagaagatctagcctcctacgctgcacatccagatcacgttcgtgttgttaaggaatctgtgttaccgatctgtgatgatatcatggctggtgattggatcgctgatcgaatccccggaaccgt

SEQ ID NO: 153320 - DNA, 360 bp, Arabidopsis thaliana columbia
gtcgagaatgatccgatttgctttggtgttttctttctgctacaagtagataaaaaatggcatggctcaatgcagcacgcgtctttcgtctccgctacagctagagctccgtctctccgatctccgccgccaacgcttccccgcctccgtgcttcccaatcctctttgccccgccgccgatttgcctctttcactaatcccaggaatttgggagagctaggatgcacagagtcattcttgcctctgtacaatgttgtggctgcagcgagactcacatctcaccttaatgttaatctgcgagctttctgcgaactctctaacggtacttgaatgcacaaagtggatgcatcagttatcttg

SEQ ID NO: 153321 - DNA, 420 bp, Arabidopsis thaliana columbia
gtatatggatctacacctctcctcagtctcatactcaaatcaataatccaaaccccaaggaaaagaaaaccagagaagagagtttaaaaaatgagaggttcttgcaaagtctctatagttcttcttctggttttaatcaatggtgtgcttggagataacccttatagattcttcacctggaaaattacttatggcgacatttatccccttggtgttaaacaacagggaatattgataaatgggcagtttcctggacctcacattgacgcaatcacaaatgataatatcattatcagtgttttcaattacttgaaagagccttttctcatttcttggaacggagtgcaacaaaggaagaactcatggcaagatggagtcgtagggacaacatgttcgatttcaccaggcaaaaacttcact

SEQ ID NO: 153322 - DNA, 370 bp, Arabidopsis thaliana columbia
ggaaggataaagagagacgccatgggaagaagacctgcgaggtgttaccgtcagatcaagggtaagccatacccaaagtctcgctactgtcgtggtgtgccagatccaaaaatcaggatctacgatgttggtatgaagaggaagggtgttgatgagtttccattctgtgtccatttggtgtcatgggagaaggagaatgtgtcaagtgaagcacttgaagctgtccggatttgttgcaacaagtacatggtgaaagtctgctggaaaagatgcttttcatttgaggattagggttcatccttttcatgttctcaggaataacaagatgctttcgtgggctggagctgataggcgttagactgggatgaga

SEQ ID NO: 153323 - DNA, 448 bp, Arabidopsis thaliana columbia
ttcagttctagggttttaatttgatacgaggtcagcgaatccggcgacgaatatccgccactagtaactctagctcaggtaaggatttgtgtccatggcagctttgcaaacgcttcgtgaatggatcggtatccagcagttcccacctgctactcaatctaaattgctcgagatccttgggaagtataaagaagaggatgtgagctcgctaacggtccttgtaatggggaaaggtggtgttggaaagtcatcaactgtgaattcagttataggcgagaaagctgctgcagttagtactttccagtctgaaggactgaggcctaccttggtctctcgcacaagatcgggatttacattgaatatcatcgacactcctggtcttattgagggaggatatgtgaatgatcaagccatcaacattataaaacgatttctcctcaacatgact

SEQ ID NO: 153324 - DNA, 352 bp, Arabidopsis thaliana columbia
attagagcagaaatggatggtggaaatttgcgagaggatgctccagaaacatttgacaacagggacagtataagagcttccattccaagctttgaggacgcatatctaaaagtccctaaaatactaaacaaagagtgactttttcagcttcttggaattgtttggctgaagagattcattctcagatccggttcttgttccagcatctctatgttttctaaaattggttagcagaaaacaaaattgcctcaaaattgttaagtctcacgtaggctattattctacaacattttgttcacaactcaccacaaccttgtgtgcatatgaaactaaactcaaaccaattttgaat

SEQ ID NO: 153325 - DNA, 218 bp, Arabidopsis thaliana columbia
aaaaaaatggcgaatacccaactcaaatccgttgcattcatggacatgatgaaggaacatctttccaccgtcgccgggaaagaggtcacagagaagatcggtcttgtttatcagatcaacattgctccaaagaaattagggtttgaagagggtacctacattggtggtccggagaaagggcgaagcacccaaggggaattttgagggggggaaggggg

SEQ ID NO: 153326 - DNA, 428 bp, Arabidopsis thaliana columbia
ctactctctttaaaagaaattcgtaagtactatcaagaagcagaagatggcccaaaaggtggaagcacaaggagggaaaggagccaacctatgggacgatggatcgacacatgacgccgtgaccaagattcagctcgcagcaggcatagacggaattcaatatgttcagtttgattatgtcaagaacggacaacccgaacaagctcctcttcgtggtaccaaaggccgtgttctcccagctgatccgtttgtgattaaccatccagacgaacatctagtttctgtagaaggttggtatagccctgaaggtatcattcaaggaattaagttcatctccaacaagaagacttctgatgtcattggatccgatgagggtactcacttcactctacaagttaaagacaagaagatcattggctttcatgggt

SEQ ID NO: 153327 - DNA, 429 bp, Arabidopsis thaliana columbia
ggttacactgagtttagaccaagtgagaaattcagtttccaggagaacaatcttaacttcaacatgttgaatttggatggtaaatttggtgaaagcatcatggggaagacttcgatgcagagcaatgtttataatatgaatactgttttccagaagaatgactttaagagtggaggcaacatgaaagttaacaagtataatggtaatgttgttgctaacaaggagatgagcaacaacaaacataacaacaactgcaatgataatgggaatatgaatttggctgttgacaagaggtttaaaaccttgcctgcttcggagactcttccgaggaatgaagttcttggtggttacatctttgtttgcaacaatgatactatgcaggaggatatgaaacgtcacctctttggtttacctccaagatacagagac

SEQ ID NO: 153328 - DNA, 618 bp, Arabidopsis thaliana columbia
gctgtttctgccgtcgatcaaccgttgaaaatcatcaccggagctgatgactttggagcgagcctcaaggacgcgatggtaacacacctccgctctctcggcatagacgtggaggataccggagtgtcctcttactactctgctggatctgaagtcggtcgccgcgtctccgcttcatcgtcttccgaagttcgcggcttagtctgctgcggcaccggcgtcggagttgcgatgttcgccaacaagttcccgggcgtctacgcagccacttgtctctccgtcgaagacgccgtcaacgctcgatcaataagcaattgcaatgtcctcgcattctccggcatcaaaacattcccggaaaccgccttggaaatcttcgacgcttggatcaaaacttcttttaaatctccttgtcctgcgtccggatccgaaccatggagctcagttatctcttccttcctcgacaattctctctccgagatgtctcagattggaaagtcaaccgccggcgattcaacaaccaagaagatcgatgaaaccaaccgcgttttgcgtaatttcggtgcttggcgaaaaacagagagttcacttcagtggacattatgcccgggaggctcggtg

SEQ ID NO: 153329 - DNA, 403 bp, Arabidopsis thaliana columbia
ctaaaaacacttatcgtttcgtctcttctctgatccattgttgaagatgtcgaagagaaaaactaaggagccaaaggttgagactgtgactcttggaccttctgttcgtgaaggagagcaagtttttggtgttgttcacatctttgcatctttcaatgacactttcattcatgtgactgatctctccggtcgagaaactctcgtccgcatcaccggtggcatgaaggtgaaggctgaccgtgatgagtcctttccttatgctgctatgcttgcagctcaagatgttgttcaaagatgcatggagtttgttatcactgccatgcacgtgaagcttcgtgctactggtggaaacaaaatcaagactccagatcctggtgctcagtctgctcttagagcccttgct

SEQ ID NO: 153330 - DNA, 562 bp, Arabidopsis thaliana columbia
ctcaacatttcattctctctctctctctcaacaattagatctgtttcgataatcacgaggtttccctcacttcctttccattgctaaaccaggatttgcctcctgcatttggaaatggacgcttctatgattaccaattccaaatccattacttctccaccctctttagccttagggaagtcaggaggaggaggagttatcagaagttcactatgtaacttaatgatgccaagcaaagttaacttccctagacaaagaactcaaactctaaaggttagccagaagaaactcaagagagctactagtggtggtcttggtgttacatgcagtggtggtgataagattctcgtagcgaatcgaggtgaaattgcagttcgtgttatcagaactgctcatgaaatggggattccttgtgttgctgtgtattctactatagataaagatgctcttcatgttaaattagctgatgaagctgtttgtattggtgaagctcctagtaaccagttcgtattggtgattccgaatgttctgtctgcggctattagccgtggatggacaatgc

SEQ ID NO: 153331 - DNA, 563 bp, Arabidopsis thaliana columbia
ccgaaaacctcaaaccatggccgagggactcgtattgaagggcattatgcgcgcccacaccgacattgtcacggccatcgctacgccgatcgacaattccgacatcatcgtcacagcgtcgcgtgacaaatccatcatcctctggaaactcacaaaggacgataagtcttacggtgttgctcagcgtaggctcacaggtcactctcacttcgtggaagatgttgttctctcatcggacggtcagtttgcactctccggaagctgggacggtgagctccgtctctgggatcttgccacgggagaaacaactcgtcgattcgttggtcatacgaaagatgtgctctctgttgcattctctactgataaccggcagatcgtgtctgcttctcgtgatcgtacgattaagctttggaacacacttggtgagtgtaagtataccatctctgaaggtgatggtcacaaggaatgggttagttgtgttaggtttagtcctaatactcttgtaccaactattgtatctgcttcttgggataaaactgtgaaagtttggaatcttcagaact

SEQ ID NO: 153332 - DNA, 556 bp, Arabidopsis thaliana columbia
tcggttctctctgactatgtctttctcttgcacgaagaacgatagagagataacaaaaccccccaaaagaaaacaacaaaaaaaaaagaagggaaaggaagaagaagaagaagaagacaaccttgtctgtttttttttcgaaaggcaaaatgtttgatgggctgttcaaacccaagttttatacgaaatgcaagtcgttggtcaagataacgaagacaagagtagacacggtgaagaggaagaaaaactcggtttgcaaatatctcaagaacgacattgtcgatcttctcaagaacagcctcgattacaatgcatatggcagggcagaagggcttatagaggagaaaaggaggctggcttgttatgagtttttggagcaattctgcaactgtgttgcatccaatgtctctctattacagaaatccatccggtgccctgatgagtgccgcgaggccatttcctcccttgtatatgcagccgctagagtctctgaagtccctgagctacgcgacctcagatctttaatttgctgggagatacggaaacacacttggat

SEQ ID NO: 153333 - DNA, 485 bp, Arabidopsis thaliana columbia
cttgaataaaatcagaattacaaacaaaaatggttttgcaaaagcttcctctcattgcgctgcttttgctcctgaccatcggcgcctctccagcaaatgcagacggacctgtttgcccgccgtcgaacaaactaagccgggcaagtttccctgaaggttttttatttgtcacgcgtactgcgggataccaggtcgaaggtgcgattaatgaaacttgtcgtggaccagccttatgggacatctactgtagaagatatccagagaggtgcactaacgataacggggatgtggccgtcgatttcattcacagggacaaggaagatatccaactaatgaagaatttaaacacagacccctttagaatgtctatcgcatggccaagaatatttgctcatgggagaaaggagaaaggcgtgagtcaagctggtgtgcaattataccccgacctcatcgaccagctcataaaaaatggtataactccattc

SEQ ID NO: 153334 - DNA, 567 bp, Arabidopsis thaliana columbia
cggacgcgtgggctccgatcaaccatgagcaaaggtccaggactcttcaccgatatcggcaagaaagccaaagatctgttgacgagagactacaattccgatcagaagttcagtatctccacttacagtgcctccggcgtggcccttacgtctactgctctgaagaaaggaggagttcatgctgctgatgttgccacccaatacaagtacaagaatgctttgtttgatgttaaaatcgacactgattctagtgttttgacaacagtcacacttaccgagatcctcccatcaacaaaagccattgcctccttcaaagtccctgattataattccgccaagctcgaggtgcaatacttccacgaccacgcaacagttaccgctgctgcagctttgaaacaaaacccactaattgacataacagctactcttggttcgccagtcatctcatttggtgctgaagctggatatgacacaacctccaaaactttcaccaagtacaatgccgggatcagtgtgacaaaaccagatgcttgcctctccataatattgggagacaaaggagactca

SEQ ID NO: 153335 - DNA, 572 bp, Arabidopsis thaliana columbia
cgtgaaatgtgcagctccggaaataaataatcactaaaataaccagatccgatctactgccccggtttctcgccggaatctccattctgtaaccggcgatcctctttctgctcagttatggaagacgtgaaagggaaggagattattgatgatgctcctattgacaacaaggtttcagatgaaatggagagtgaggaaaatgcgatcaagaaaaagtatggaggattgttgcctaagaagattcctttgatatctaaggaccatgaacgtgcgttttttgactcagctgattgggctttaggcaagcaaaaaggacagaagccgaaagggcctttggaagctctccgcccaaaactgcagccaaccccgcaccagcaaccaagagcaagacgaatggcttattcttcaggcgaaactgaagacactgagattgataacatcgaagctccggatgaccaagcctgctcatcagctgtggatagtaccaatttaaaggaccgtggaggcgcaaaagacaacatcaaatcatgaacaacatatatagatcttttgaggagcgcatccatccacct

SEQ ID NO: 153336 - DNA, 513 bp, Arabidopsis thaliana columbia
caagggttcagtcttcttccaaccgcaatgtgcagtattcacttcaccggcgttattaacttctatgcttgatgtcgcaacggtgagactacacctctttcgatactgattcggattcccttatatcagacaggcagtggacttatacaaggcccgatggtccttccactgaggcgaagtatttagaagctttagcctctgagacacttctcacaagcgatgaagcagtagttgtagcagcagcagctgaagcagtcgcccttgcaagagctgctgtcaaagttgccaaagatgcaacattatttaagaacagtaacaacacgaacctattaacttcgtcaacggccgacaaacgctccaagtgggaccagtttactgagaaggaacgtgctggcatattggggcatctagcggtttcggacaatggaattgtgagtgataaaatcactgcatctgcctctaacaaagagtctattggtgattttagaatcagaaaaacaagaagaagttgag

SEQ ID NO: 153337 - DNA, 546 bp, Arabidopsis thaliana columbia
attttcttcaaaacgattcgggtcaaggttattgactttctcattcagtgaagcttgaatcatggcctcgagaattgctaaagatgtgactgaattgattgggaacactccattggtgtatttgaacaatgttgctgaaggatgtgttggtcgtgttgctgctaagcttgagatgatggaaccgtgctctagcgtcaaagacaggattggttttagcaattaaacttgcacagaggccagaaaacgctgggaagctatttgtggcgatattcccgagtttcggggagaggtatctatcaacggtacttttcgatgcgacaaggaaagaagcggaagccatgaccttcgaggcttgaacattctccatttcttcttaagagacgccaaaataaaagagatgttcagtttctcctatagagactcttcatctttagttacattgcgtctttgcttccatctgtatcttctcttgtgtgccaataaaagtcaaactagattttctctgtttcttttgtgaaccacttgcttgttaatgaagattaaaat

SEQ ID NO: 153338 - DNA, 536 bp, Arabidopsis thaliana columbia
taaagatgaacatgaagctcaggtgcaatttgctcttgagaggggcattcccgccatttctgcaggtatgggcacgacaaggctacctttccctggcagagtttttgacatagttcattgtgctcgctgtagagtgccatggcacattgaaggtggtaaacttctcctggagcttaaccgtgtattgagacccggtgggttctttgtgtggtctgctactcctgtttatcagaagaagaccgaagatgttgaaatttggaaagctatgagtgaactcattaagaagatgtgttgggaactcgtatccattaacaaggacactatcaatggagtaggtgttgctacttacagaaagccaacttcaaatgagtgctacaaaaacagatcagaaccggtgcctccaatttgtgcagactctgatgatccaaatgcatcttggaaagtgccgctttaagcatgcatgcacaccgcgccagaagacaaaacgcaacgtggatctcagtggcccgaacaatggccagcgagattagagaaag

SEQ ID NO: 153339 - DNA, 475 bp, Arabidopsis thaliana columbia
cttcgataaggattttactctccagagaaagaaaaaaataacctcctctgcttttgtgatcctttaaggaaaaagacgaaatggcaacggaatcgtacgaagccgccattaaaggactcaatgatcttctcagtacgaaagcggatctcggaaacgtcgccgccgcgaagatcaaagcgttgacggcggagctaaaggagcttgactcaagcaattcagacgcaattgaacgaatcaagaccggttttactcaattcaaaaccgagaaatatttgaagaatagtactttgttcaatcatcttgccaagactcagaccccaaagtttctggtgtttgcttgctctgattctcgagtttgtccatctcacatcttgaatttccaacctggtgaggcttttgttgtcagaaacatagccaatatggtatcaccttttgaccagaagagacactttggagttggcgccgccgttgaata

SEQ ID NO: 153340 - DNA, 443 bp, Arabidopsis thaliana columbia
cattaactaaagagccttttacttgcgccacactctcaccgcaatggccgcctcgacaatggctctctcctctcctgctttgaccggaaaggccgttaagctatccccggcggcctccgaagtatttggaaccggccgaatcaccatgcgcaaagcctccaagcccaccggtccatccggcagcccatggtacggatccgaccgagtcaagtacttgggtccattctccggtgagcctccgagctacctcactggagagttccccggtgattacgggtgggacactgccggtctatccgccgatcccgagaccttcgctaggaaccgtgagctagaagttatccacagcagatgggccatgctcggagccctaagctgccgtttccctgagctattgggtaggaacggagtgaagtttggagaagcggtttggttcaaggctg

SEQ ID NO: 153341 - DNA, 275 bp, Arabidopsis thaliana columbia; identical to SEQ ID NO: 130964
  unsure (1)..(275): unsure at all n locations

SEQ ID NO: 153342 - DNA, 349 bp, Arabidopsis thaliana columbia
ccaaaacacacccacacgtacgcacacacacaaagacattgtctcctttcaaaatattcttcttcacgactcttctcgtggcggcggtttcagtgtcggctgctgatttcaacactgacgtcaacgtagcttggggaaatggccgtgggaagatactcaacaacggccagcttcttactctctccttagacaaatcctctggttccggttttcaatccaaaacagagtatttgtttggaaagatcgatatgcagattaagcttgttcttggtaactttgcaggaacagtcacaactttttacctaaaatccgaaggatccacttgggatgagattgattctgggtcctt

SEQ ID NO: 153343 - DNA, 533 bp, Arabidopsis thaliana columbia
ggctactagagtgttaactgcagcgacggccgtgacccaaaccacctcctgtttcctcgccaagcaagctttcactcttccggcgaagaaatcctgcggcggatttggtggtctctgcttcagcagaagagctttggtgttgaaatctaagagacctttctcctgcagtgccatttacaatcctcaggttaaggttcaagaagaaggtccggccgaatccctagattatcgagttttcttcctcgatggttctggaaagaaggtttctccatggcatgatataccattgaccttaggcgatggagttttcaactttatagttgaaatacctaaagagtcaaaagcaaaaatggaggttgctactgatgaagatttcactcctattaagcaggatactaagaaggggaagctcagatattatccgtataacattaactggaactatgggttgcttcctcaaacatgggaagatccatctcatgcaaattctgaaagtgaaggatgttttggggataatgatccaactgatgttg

SEQ ID NO: 153344 - DNA, 662 bp, Arabidopsis thaliana columbia
gagctctcgtaagcctctgaattcgatttgacctgacaaccatacaaaaaattctcccgagaaaatctctctctcaacgaacgaattgcgaatcaccaagaagaaattctgagatttgtttgcgtttcatcggaataatggaagtgaaagtagcaacaacgacgtcgtttcattggtcaggacgacacacagcgattcctcaatgtccgtcattttcgcaaaccctaacttcatctaaacgccgtcgttctcgtggaatagccggtgatgtttccgtcggaggaggatctttgagattaaaaccttcgacgtttctcggaacacaatctgggaaacttcaccgatctaaatcatgtgagctttggcaattttctaattccaccacgaagaagattagaactgatgtgaagaagaaacataatcctttgagaagagtttgtagtgcgagctccggtttcttctcctccgacgaagcattctctgtgaaaatgcacgaattagcttcacaattcagaaacgcaggcgatgaagaagaagaagagaacaaacagaaatcagaagcagtagataaccgatacgatagcaataatcatagatttggttctttgaagctattacaagagtctgttccacgtttagcttctttggaagcttcatgggca

SEQ ID NO: 153345 - DNA, 158 bp, Arabidopsis thaliana columbia
attggggggggagttacaagaaaaattatccggaaactggttaattgaaacccataataaaaagtctgagagttatccaaaagggagggggggggaatgtcacagaaataaagggaaaaaggaaaagggttcaaacgccctcaaagttttaagaacct

SEQ ID NO: 153346 - DNA, 541 bp, Arabidopsis thaliana columbia
accaactcactcacaaaatctgtagaatcatctttcaacaatggcttccactgctctctccagcgcaatcgtaagcacctctttcctgcgccgtcaacagacaccaatcagcctcagatccctcccgtttgccaacacacaatctctcttcggcctcaaatcttccaccgctcgcggcggccgcgtcacggccatggctacctacaaggtcaagttcatcacacctgagggagaacaagaggtcgaatgcgaagaagatgtctacgtcctcgacgctgctgaggaagccggactcgacttgccctactcatgccgtgccggttcttgctcaagttgcgccgggaaagtcgtctctggttctattgaccagtcggaccagagcttgttagacgatgaacagatgagtgagggctatgtcttgacctgtgtggcttatccgacttctgatgtcgtcatcgaaacccacaaagaagaagccattatggaaaattgtaaagctttttgatgaatttcattaaaagagaaattactcgatggttaa

SEQ ID NO: 153347 - DNA, 401 bp, Arabidopsis thaliana columbia
gggaaactcaagggataatcgtaaatcaccatcaatgcttcattccgcgctacagtatctcttgtcgtgttcttggctttttcgatctttctaaactgaaaccactttccctttcaagttcgaatcaattcagatgattctggaattttgattaaaagacttaaatctttgagaattttgtcggctcttctcttctgggtttggttctgatcatagaaaaggatacgatggagtcttctttaattcatcatatcatcattgtgttgctgttactctggttcatctctttcttgaatcgatcccacgcctttttctatttcctcgctctcaattatctctacctggttcacgaacggtatgtgatgagattgaagagaaaattgcagttcgaagagaggaag

SEQ ID NO: 153348 - DNA, 262 bp, Arabidopsis thaliana columbia
gaagaagaagacgatacagatccacaacgccatgggtttaggcatcttagcttctcgaacaattcgagcagcttcacgtcttcgtcaagctcaaacctccaatttcttcctccgcacaatcgtctcaaaaccagagctccaatctcctgaatccgctgctgtctctgagcctgagccgccgacacagattctccctcctagaaaccctgtaggtggagcacgcgttcacttttcgaatcctgaagatgcgatcgaggtcttt

SEQ ID NO: 153349 - DNA, 220 bp, Arabidopsis thaliana columbia
tgcacgatactgatgccggcggcgtatattgcggcggatttggaatcctcggtatcgcttgggcctgttggtggtatgatcttcatccgcgtctactgcaccgccggtatctctggtggtcacattaacccagcggtgacatttgggctattcttggcacgtaaagggtcgttacctagggccctattgtacataatcgctcagtggttgggtgcgcttt

SEQ ID NO: 153350 - DNA, 648 bp, Arabidopsis thaliana columbia
gcctctcgttgctagaggaatcaaacaatggtgtttgtgaagtccaccaagtcgaatgcttacttcaagaggtaccaagtgaagttcaggagaagaagagatggaaagactgactacagggcaaggatccgtcttatcaaccaagacaagaacaagtacaatactcctaagtatcgttttgttgtccggtttaccaacaaagacatagtggcacagattgtatctgcaagcattgctggtgacattgttaaagcttctgcttacgcacatgaactgcctcagtatggtctcactgttggtcttacaaactatgctgcagcttactgtactggccttcttttggctcgccgtgttttaaagatgttggaaatggatgacgagtatgagggaaacgttgaggccactggagaagacttttccgttgagccaactgattcaaggagacctttccgtgctcttcttgatgttggacttatcaggaccacaacaggaaaccgtgtgttcggtgctcttaagggtgctttggatggtggtcttgatatccctcacagtgacaagagatttgctgggttccacaaggagaacaagcaacttgatgctgaaatccacaggaactacatttatggtggccatgttctaaactacatg

SEQ ID NO: 153351 - DNA, 446 bp, Arabidopsis thaliana columbia
cgaagttccgtgcgactctctgctcgagcaagatctcctaccgatacaatgattatctcagaggctaaccgcaaagaaatctgcaggtacctcttcaaagaaggagtttgctttgcgaagaaggatttcaatcttgctaagcatccgttgatcgatgtccccaacctacaagtgattaagcttatgcagagtttcaaatccaaggagtatgttagggagacatttgcctggatgcattactattggtttttgaccaatgaagggatcgagttcttgagaacttatcttaatcttccatctgatgttgttcctgctactttgaagaagtcagctaagcctggtggtcgtccatttggtggcccacctggtgatcgctcaagaggacctcgccatgaaggaggagaccgtcccaggtttgtggaccgtaatgggtcccggccaggtcc

SEQ ID NO: 153352 - DNA, 468 bp, Arabidopsis thaliana columbia
gttgttccctgtgaccatggctactccactctcaatcttatcaaatcctctcacctcccgccattgttaccgtctccacttatctgtgtacttcattcaagggaaatgtaagtgttttgggggcaaacccaagtcagattctatctctgaaactcaaccaaacccttaaaacgagaaaccaacagcaatttgcgagaccccttgttgtggttagccaaacggcggctacgtcgtcggcagttgtagctccggagagattcccgttggataatcttggaccacagccaggttcgaggaagaagcagaagagaaaaggtagaggtatctctgcaggacaaggagcaagttgtggttttggtatgagaggtcagaaatcaagatcgcgtcctgggattatgagaggctttgaaggtggtcaaaactgctctttatcgtcgcgcttcccaaacttagaggaatcccttcagg

SEQ ID NO: 153353 - DNA, 328 bp, Arabidopsis thaliana columbia
acggaacctgtcttcttgtcttgtccaaaatcggatttttaagagtacaagtgagtttattttgggggccgaaatctgtcctggaggagacagaagcaagatgaagttaatagatcgaagaatgaggttaacggagctgctcttacggtgctccatcagtgtcttcgctctcctcgcgcttattctagttgtgacagacactgaggtcaagcttatcttcactatcaagaagacggccaagtacacggacatgaaggcggttgtgttcttggtggtggctaatgggatagctgcggtttattctttgctgcaatcagttcgatgcgtg

SEQ ID NO: 153354 - DNA, 514 bp, Arabidopsis thaliana columbia
atcgaagaaggagagaagaacagagaaaaagagttgaattataatatggctgggagagctacgatccgtgctcgcaactctggccctcatgcgcaatgatcgccgatgaggacactgttgttggatttttgatggctggagttggtaatgttgacataaggaggaagacaaattacttaatgggggattaaagacaactgtgagacaaattggggatgctttcaagggatttttagcaagggatggatatcgttttctttttttaaagccaatatatcgccaatatgaccgggtcttggtggattggttcaacaaggcaggttctggaattttggagattcctttcaaggaccaatcctatgatcctgctcatgattcaattcttttttgcgtcaagggcctcttttttgcagaatctgtgtcacagagcttaacatatgcattttgcaagcttttggagcctatatcattttgttgttttcgaagtactttactttctccttccgaccccgat

SEQ ID NO: 153355 - DNA, 357 bp, Arabidopsis thaliana columbia
ggaaacttgtaccttaccagattgtgaacaaggatggtttgccatacattcaagtcaagatcaaggatggtgagactaaggtgttcagtcctgaggagatcagtgccatgattctgactaagatgaaggagacagccgaagcctaccttggaaagaaaatcaaggacgctgttgtcactgttccagcttacttcaatgatgctcaaaggcaagctaccaaggatgccggtgttattgctgggctcaatgttgctagaatcatcaacgaacctactgctgctgctattgcctccggtcttgataagaagggtggtgagaagaacatccttgtatttgcccttgggggtggtccttttg

SEQ ID NO: 153356 - DNA, 188 bp, Arabidopsis thaliana columbia
ctgcagcaccgtccgaattccggtcgaccacgcctccgccgtaaaattacccttgaaccaataccttggttgttccataaccaagccggggattaccagccaggccttacaatggcgaggacatggattacggttcaccctgttgaaggaccgtttgtctgaaatttcgccaacacacgccatttttt

SEQ ID NO: 153357 - DNA, 493 bp, Arabidopsis thaliana columbia
cacaaacaaaccatttacataaaacaaaaacaatttaatacttcttagtgtgtaaatgtgtgattctttcatcaataacaaaatgacatcgatattattcatgctcgtgagtctaacaattctttccatgaatctaaaagtctctcaagccacatctcgtgtcaccttccacgagccgatcgttgctgaacaccatcagcaatggatgactcggttctctcgagtttacagtgacgagctcgagaaacaaatgagattcgatgtgttcaagaaaaacttgaagttcattgagaaatttaataagaaaggggatagaacctacaagcttggtgtcaacgagtttgcggattggaccagagaggaattcattgccactcacaccggcctcaagggggttaacgggattccatcctctgaatttgtccgatgaaatgataccttcttggaattggaatgtcagtgatgtcgctggccgtgagacccaagattggag

SEQ ID NO: 153358 - DNA, 219 bp, Arabidopsis thaliana columbia
cccacgcgtccggtcggtggatccacacgtattcctgctgttcaggaactcgtgaggaaggtgactgggaaagaacctaatgttacagtaaatcctgacgaggttgtagcgttaggtgctgcagtccaggctggtgttcttgctggagatgtgagtgacattgtgctttttgatgggacttcgtttacgagtgacagacactcccttaaagcttatctg

SEQ ID NO: 153359 - DNA, 497 bp, Arabidopsis thaliana columbia
ccgacgcttataccacatatgaaggcttaaattgaatgatatatccagaagatattcggttgttgaatagttttcgcatcagctcgttgtgcgattgtctcttaacccaattctatcactcagaattattcgttttgtaactaatcgtgagaagaaactttagggtttcactggttcagagatttgactggcgaattataaaagatgcagcagtcttctccgttgctgccgtgggctcttccttcattgccgcccaccaataatatcaccaccgcacagatccaaaagtcttttgatgagaacaagaagctgataatggcgatcttggtaaatcagaacctggcgagacttgcagaatgtgctcagtatcaagctcttattcagaagaatttgatgtatctggctgcaattgcggatgctcaacctttttcaccagcagatacacttacatcaggagccaggagcccatatgcattggctgctgatccgattttagt

SEQ ID NO: 153360 - DNA, 374 bp, Arabidopsis thaliana columbia
cggggttcgacactttggctcaccagaaatggtccggtgctaattactatgatcggtatcttaagaccgtccaaggtggaatgtcctccactgcagccatgggaaagggtgtaactgaaaacaagttcagggagagttgaccagggccggaggttgttgaatgggttgagggacttggcttgggggtggccagggaagaatggtagacataatgttcattccggcggcgcggccaaagcggggcggattttttgcaggaaggtttggaacccacactttttttcaatatatatctttggacaccccggtaaaagaaaaaaaaagacagaaccagatcataaatgtatctttgttattgcatctctcttcttcaa

SEQ ID NO: 153361 - DNA, 214 bp, Arabidopsis thaliana columbia
ctcctctccttctctctattttgccggaatacatatgatcgagtgaaacggcggacaaagctgtcgtgttgagtactaattcgccgtcgtttttctcagtgaaggagtggtgagagatgtcgagtctcgaagatatcaagaacgagactgttgatctggaaaaaattccgattgaggaagtttctcagcaactaaaatgctcaagggaaggatt

SEQ ID NO: 153362 - DNA, 470 bp, Arabidopsis thaliana columbia
aaaatctatagagcgctcactcactagcaatggcgtctcttctcgtatgttctcctctgtctatgccgacctggcctcgaatttctgctccttgctaaacatcttcaatgtcccatctctgcttcggaccagagaaactttctggaagaatccaattcaatccaaagaagaacagatctcgttaccatgtctctgttatgaatgtcgctacagagatcaactctgttgaacaagcaaagaagattgattcaaaggaaagtgcaagacctgtttatccgtttgctgctatagttggacaagatgagatgaagctatgccttttgttaaatgtgattgacccgaagataggtggtgtgatgataatgggagatagaggaactggtaaatcaacaactgctagatctttagttgatttgcttcctgagatcactgttgtttctggtgatcccgataactcagacccgagagat

SEQ ID NO: 153363 - DNA, 386 bp, Arabidopsis thaliana columbia
ttgacacaaatgagaacaagctcttattacatataatattcgaactacaaatacaccccttaagcaaatctaatgaaagaaggggtaattaaacaataacaaaacaaaatacacgaaactgatattaaaggtgattatctaatgacgaatcacaatcattctcttcaggttttcttgtttggcccgtatgcatacttaatcagagactccttgatagagagtagctcagggaactctttcttgagcttggaagcatccatctcgttgttgcttcttggagccacaatgactttagcttgctcctctaatgtgaagtttgcccatttgaattcagggttgatgtagtctctatacatccctaggatctcgttgaagctcaacgcacc

SEQ ID NO: 153364 - DNA, 353 bp, Arabidopsis thaliana columbia
gatctccggcgacaatcattgagatctgaatatcttacgttaaggagagaaagatgtacggattcgaggcgcttaccttcaacatccatggcggatatttggaggcgatcgttagaggccaccgtgctgggcttctcaccaccgccgattacaataatctatgtcagtgtgagaacctagacgatatcaagatgcatctctctgccaccaaatacggctcttatctccaaaacgaaccgtcacctctgcataccaccaccattgtggagaagtgtactcttaagctcgttgatgactacaagcatatgctttgccaagctactgagccaatgtctacctttttagagtacatt

SEQ ID NO: 153365 - DNA, 473 bp, Arabidopsis thaliana columbia
caagaaaccaaaagagtaaaacaaacacagagaagctttttcttaaacgatgccgtactataccagagatgacaacgacgtcgacgatttcgatgagtttgatccaacgccgtacagtggtggttacgacatcacggtgatctacggccgtccgattccaccttccgatgagacttgttatcctctctcatctggtgtcgatgatgatttcgaatacgagagacctgaatttactcagatccatgagccttctgcttacggtgatgaagctcttaacacagagtacagtagctattctcgacccaagccacgacccgcatttcgacccgattcaggtggtggtggtcatgttcaaggtgaaagaccaaatcctggttatggatctgaatccggttatgggaggaaaccggaatctgagtacggatctggctattgtggacaaaccgaggtggtagttggtcggagacctgagc

SEQ ID NO: 153366 - DNA, 256 bp, Arabidopsis thaliana columbia
tcgaaaaaaaaaaaaacacaaaaagttgcaagggccgctttttatgggttttttcttcccttgcttgggccgaaagggttgggacctttgccccccggcatttgaaggtcttggaaggggccgtgtgacaatgagagaagactgtggtcaaaccaaaggggccataagggagaccatgggacggatccgaccgagtcacaagtacttgggtccattctttggagagacaccgagctcccttaccggagagttcccc

SEQ ID NO: 153367 - DNA, 410 bp, Arabidopsis thaliana columbia
gtctctgcaagtctcatcagaagaggaagagaatcaatggcgagttgcttcagctacgtgtcttctcgtaacaaatgttaccaatacagcttctctcgtgctggtctccgatcatctacctccgatcttggcgacggcaccgtcttccactgttggatcccacttactcacatccacaccaagcccacgctcctcctccttcacgggatcggagctaacgctatgtggcagtgggaccgcttcatcgaccgttttatcccccgcttcaacgtctacgtaccggacctcatcttctttggcgactcctacaccactcgtcccgaccgctcagagtctttccaggcgacttgtgtcatgaaggcgatggatgcttacggtgttaggaccatgaccgtctctagcctcatcta

SEQ ID NO: 153368 - DNA, 253 bp, Arabidopsis thaliana columbia
attcctagtaatcttggaaatctgacaaacttagtgagtttggatctttacttaaacagcttctccggtcctattccggaatcattgggaaagctttcaaagctgagatttcttcggcttaacaacaacagtctcactgggtcaattcctatgtcactgaccaatattactacccttcaagtgttagatctatcaaataacagactctctggttcagttcctgacaatggcttcttctcactcttcacaccca

SEQ ID NO: 153369 - DNA, 198 bp, Arabidopsis thaliana columbia
aactttgcttgagagtataatattagggctaatcacagtatggatacgcttttcgttattgggttgggtataggacgggcatggcgacgacgatgagtttgatccaacaccatacaacgggggatactacattacggtgatctacgaccgttcgattccaccttacgatgagacttgttatcctctctcatctgatgt

SEQ ID NO: 153370 - DNA, 385 bp, Arabidopsis thaliana columbia
gtcttcttcgttctctagttttttcctcagtctctgttcttagatcccttgtagtttccagaatcttccgataaaaatgtcgggtaaaggagaaggaccagctatcggtatcgatcttggtaccacttactcttgcgtcggagtatggcaacacgaccgtgttgagatcattgctaatgatcaaggaaacagaaccacgccattttacgttgctttcaccgactccgagaggttgatcggtgacgcagctaagaatcaggtcgccatgaaccccgttaacaccgttttcgacgctaagaggttgatcggtcgttgtttctttgacagctttgtttagagtgacatgaaattgtggccattcaagaattaagccgtacctgtcgat

SEQ ID NO: 153371 - DNA, 627 bp, Arabidopsis thaliana columbia
ctttcgattctctcaaaaaatcccataactttcccaacgaaaaatgttccgatcaatgattgttcgatctgcttccccagtgaagcagggtcttctccgcagaggattcgcctctgaatctgttcccgatcgcaaagtcgtcatcctcggtgccgccggtgggatcggccagccactttctcttctcatgaagcttaaccctctcgtctcttctctctccctctatgatatcgccaacactcccggcgttgctgctgacgtcggtcacatcaacacccgatctcaggtttctgggtacatgggtgatgatgatttggggaaagctctagaaggcgctgacctcgtcattattccagctggtgtcccaaggaagcctggcatgacccgtgatgatcttttcaacatcaatgctggcattgtcaagaacctcagcatcgccatcgccaagtattgcccacaagcacttgtcaacatgatcagcaaccctgtgaactccactgttccaattgcagctgagatttttaagaaggctggtacctatgatgagaagaaattattcggtgtcaccactcttgatgttgtcagggctaggactttctatgctggaaaatcggttgtcaatgttgc

SEQ ID NO: 153372 - DNA, 431 bp, Arabidopsis thaliana columbia
agagatcaaaccaaagagacacagagagagtatccactttatggaatccgcagcaacggctggtggacctccggcagccgccggcaccaccgccaccgccaccgatgataatctccaatcaagcgactcatcatctcccgccgacgccgttaaccgattgatccacgccttttcgcagcgacaacaacatcttcttgacaaaacggttcctcacgttctctatcgatggatcgcatgtctctgtgttgtattgatctacatcgctcgcgtttactttgtggaaggcttttacattattacttacgccatcgggatctaccctttgaaactcatcattgcttttttatctcctcaagaagagcccgaagcttttctcactttcggcggtgtttttcctactctgagatcccctgagtatcgtcctttttttc

SEQ ID NO: 153373 - DNA, 479 bp, Arabidopsis thaliana columbia
cttttaagcccaacaaaaatgggttatgctaaatcagtcatgctgatcttcttactagcattgggcatcgcatcttgtgccacgggcatggacatgtccgttgtttcctccaacgataaccaccacgtgaccgccggtcccggccgccgtcagggtattttcgacgctgaagccaccttgatgttcgagtcatggatggtcaaacatgggaaagtgtacgactccgttgccgagaaggaacggcgtttaactatttttgaggacaacctccgttttatcactaaccggaacgctgagaatctcagttaccggcttggtttgaatcggtttgcggatttatctctccatgaatacggagaaatttgccatggggctgatccaagacctcctaggaaccacgtgttcatgactagcagcaaccgatacaagactagtgatggtgatgttcttcctaagtcccgtgactggagaaacgaagg

SEQ ID NO: 153374 - DNA, 148 bp, Arabidopsis thaliana columbia
tcgagaaaacaagtagaaactttaaaacgagagagagagaatgtataatggcgacatcgggaacgtacgtgacggatgttccgttgaaaggatcggcggaataacactaatattagctgtctatttagtgataatcccatttttatta

SEQ ID NO: 153375 - DNA, 402 bp, Arabidopsis thaliana columbia
agcgttcgaccgaatcaggtgctcaaaaattggaagcacaaggcaatagttcacgaggtacattatgggacgatggatccgattacgagggcggggccaagatatacgcaagctacggtggggaaggtattcaatacgtcaagttcgactatgtgaaaggtggagtaacaaaacaaggagttctacacggtaaacaacaaagtagacaaaatccaagagagtttgtgattaaccatcccgatgagtatcttgtttctgttgagggttgggatgaaaccgttatgctaggaatccagttcaaaaccgaacttgtacacttatgaggtgagtatgtattctttcgaacctagtactgatactaaatttactcttcaaagtccagactagaagatcatttgattt

SEQ ID NO: 153376 - DNA, 521 bp, Arabidopsis thaliana columbia
aagaaacaagaaaacgaaaggaaaaaatacagaaatgggtggtttgaagtttcatgtacttatgtatccatggttcgcaacaggccatatgaccccgttcctttttcttgccaacaaattggctgagaaaggtcatacggtcacttttttgattcccaagaaagctctgaaacagttggaaaatctcaatctgtttccacacaacattgtctttcgctctgtcaccgtccctcatgtggatggtctccccgttggcacagagacagtctctgagatccccgtgacatcagctgatctcttgatgtctgctatggatctcacacgtgatcaagttgaaggtgtggtccgagccgtggaaccggacctgatcttctttgacttcgctcattggattccagaggtagctagagactttggccttaagactgtaaagtacgtcgtggtatttgcatcgactatagctagtatgcttgttccaggtggtgagttaggtgttccttcgcccgaatatccttcatcga

SEQ ID NO: 153377 - DNA, 429 bp, Arabidopsis thaliana columbia
tgcagatcttcgtgaaaaccttgaccggcaagaccatcactctcgaggtcgagagcagcgacaccatcgacaatgtcaaggccaagatccaagacaaagaaggaatccctccggatcagcagagattgatcttcgccggaaagcagctcgaagatggccgtactttggctgactacaacatccagaaagaatctacacttcatcttgtgttgaggcttagaggaggtattattgagccttccttgatgatgcttgctcgtaagtacaatcaggataagatgatttgccgcaagtgctatgctcgtcttcacccaagagctgtcaacttgatgaagaagaagtgtggtcacagcaaccagtttaggcctaataagaagatccacgttccgagacttttatcaagaattccaactgttgcttgcctttttt

SEQ ID NO: 153378 - DNA, 368 bp, Arabidopsis thaliana columbia
gaaaaggcgtaaagagctcagtgaggctttacataaccatccacagcgatcatgacggtggaaatggtagcgctgacagcggggacctggaaacactacaagagctggaagagcgagaaccatgtcttcgctgacgccattggccaccacatccaaaatgtcgttgttcacgaaggcgaacatgactctcacgggtctatcaggagttgggactacacatatgatggaaagaaggagatgttcaaagagaagagagagatagatgatgagaataaaacattgaccaaaagaggactggatggtcacgtgatggagcatctcaaagtatttgatatcatctacgaatttattcccaaatctgaggatag

SEQ ID NO: 153379 - DNA, 220 bp, Arabidopsis thaliana columbia
accggttcaggtgctcagaaattggaagcacaaggcatttgtacaggaggtacatcatggaacgggggatccgattacgagggcgggaccaaaatatacccaggttacggggggaaaggtattaaatacgtaaagttcgactatgtaaaggggggattaccaaaacagggagttttacacggtaaacaccaaagtaaacaaattccaagagggtttggga

SEQ ID NO: 153380 - DNA, 326 bp, Arabidopsis thaliana columbia
cttcactctctctaatcaaaaagcttttaacctcagccgttaaatatttctccgatcatgccgaccagaaacatcgccattggtggagtccaagaagaggtctatcaccccaacgcacttagggcggcgctcgctgagtttatctcgactttgatcttcgtcttcgccggctcaggctccggaattgctttcaacaagatcactgacaatggagcaaccactccttccggcctcgtcgccgctgccttagctcatgctttcggtctctttgtcgctgtctttgttggcgctaacatttccggtggccacgttaaccctgccgttac

SEQ ID NO: 153381 - DNA, 424 bp, Arabidopsis thaliana columbia
ggggttggcttatccgcatcagcctcattgcttagctttcggagacgttcttgtgtcttgtctgggagacgaagatggaaacgcagaaggcagtgggtttctcttacttgattccgagtttaacatcaaaggaaggtgggagaaggatggaaacagtcctttgtatgggtatgatttctggtaccaacctcggcataagacgatgatcagtacctcatggggagccccggccgcgtttaccaaaggatttgacctcaaagacgtctctgatggcttatatggaaagcatctacatgtctatagctggccccaaggagaattgaaacagattcttgaccttggtgataccggacttttacccttagaggtaagattcttgcatgagccgtataaagctactggatttgcagggtgtgcgttgtcg

SEQ ID NO: 153382 - DNA, 332 bp, Arabidopsis thaliana columbia
gctcctaacaaagcaatatcatttccaatttataaaagttaaagccatggctgcatctttctctgtcccctctatgataatggaagaagaagggagattcgaagcggaggttgcggaagtgcagacttggtggagctcagagaggttcaagctaacaaggcgcccttacactgcccgtgacgtggtggctctacgtggccatctcaagcaaggctatgcttcgaacgagatggctaagaagctgtggagaacgctcaaaagccatcaagccaacggtacggcctttcgcaccttcgaagcgttggacccttgttaggtgcccatgatgccta

SEQ ID NO: 153383 - DNA, 202 bp, Arabidopsis thaliana columbia
gcagcgaaagctcaaccaacaagacgatgattatctcatagaacaatcgcagagagatctgcagataccttttcaaagagggagtgtgctttgctaagaaggatttcaatctcccaaagcatccgttgattgatgtaccaaacctgcaagtgattaagctcatgcaaagtttaaagtccaaggagtacgttagggagacatt

SEQ ID NO: 153384 - DNA, 390 bp, Arabidopsis thaliana columbia
gcgaatttccgcggttgagcaccacacccttccgacagttctactacttttgtaggaacagacttattcttcttattattcttcgattggatctggaactgaacttaaattgggaagaattgggacatgctagacgaccgagtagttagatcaaggatgatgcaactcaattgataggtaacaccctaatggtatatctgaacaacattgtggatggttgtgtagatcgtattgcagctaagcttgaaatgatggagccttgctctagtgtcaaggagcgaattgcttatggtatgattaaagatgcagaagacaagggattgattactcctgggaagagcacactgattgaggctacctctggtaacaccggaattggtttagtcttca

SEQ ID NO: 153385 - DNA, 499 bp, Arabidopsis thaliana columbia
cgcaatttgagctcttctctttgctctctctctctcaacgcggttcagatccgagtttgggagattgaagctccctgaaaaaagccctggactctcgcttaccaactttgctccagcatggcaggatctgcaccagaaggcacacagtttgatgcacgtcagtttgaccagaaactcaatgaagtacttgagggacaagatgagttcttcacatcctatgatgatgttcatgagagctttgatgccatgggtcttcaagagaaccttctcaggggtatttatgcttatggttttgagaagccttctgctattcagcaaagaggaatcgtccccttctgtaagggtcttgatgtgattcaacaggctcagtctggtactgggaaaacagcaactttctgctctggtgtcttgcagcagctggacttctcccttattcagggtcaggctttggttctagctccaactagagagcttgctcagcaaattgagaaggtcatga

SEQ ID NO: 153386 - DNA, 466 bp, Arabidopsis thaliana columbia
tctctcttcctctgtttcttcgccattctctcagcttttctccttcttcttcgtctttgtcaggtaaagagatacgatgagcatatcccacatacctctctcctcttctcatctttttagtttctcgaaagtttgcatgcgccgactttgttataggttataaactttagttttaagcctattttcgtatgtttatggttgttgtaatagttgagaattcagagtatgtcaagtgaaacttaaaaagaattctatatgtatgtgtgtatgtgttaaagagtgaatggagctgtggacagaagctagagccttaaaggcaagtctaagaggagaatctactatatctctcaaacatcaccaagtgattgtgtcggacgatttaagccgaacttcttccttgccggaagatttcttcgttgagtgtttcctcgatttctcagaaggtccaaaagaagaagaagacgaa

SEQ ID NO: 153387 - DNA, 399 bp, Arabidopsis thaliana columbia
aaaaaaaatattcttgtttcaaacttcaatggcgtactcgtgttccatcttctctgttactcagtggtcttcttcgttagctgcgcgggcttcttctgcaatcagtaggcagactcgttttcccgctcaaattgcttctccagatctatcgcctgctttgttcgatgatcgtcggaggttcgtcggaggtgtaatgtctctcttgacgaagagtattaaaaaccgtgtttatgcttcgattaacagcattgattcggccgctactccatcgtatccgaaatcggaagacgatgacgacgttgttccaatgccaatggttatgatagaccaggatgctgaccctgaagctactattgtacaactcagttttggaaatcgccttggggctcttattgacac

SEQ ID NO: 153388 - DNA, 501 bp, Arabidopsis thaliana columbia
gtcatcttgtaaaacttgtgacgatgggtgacgtatggaactccaaatattgacatcgaggaaggggatataaccataacccgcaacggtagaactgacactttgccataccccaagcaagctagctccttttatcatcttagcaaagttcatgattcgcacaacattgcttttacttgcaaggcttggggtattagagccactgatctcaaccaaggagttgtttatggagtgaagactgatgagacagagatgcatgaggaactccgtaaccgactggattacgatgctgtgtttggtacagcacttaaccggttctgtgtgcaagctgctgttggtcacccacttacagtttatggtaaaggagctcagacgagaggctactctcttataggagacaccgttcaatgtgttgagatcgctattgcaaatccggccaaagctggtgagatccggttcttcaactcaattacagaacctctttcagttcgaggaaccggc

SEQ ID NO: 153389 - DNA, 512 bp, Arabidopsis thaliana columbia
cagatttcgattcccgaggctcgagagaaaaccgtaaatctcttctccgttcactcaatcaaccaaagatgcgtgagattcttcacatgcagggtggtcaatgcggtaaccagatcggagccaagttctgggaagtggtttgcgccgagcacggcatcgatccaaccggaaggtacaccggagactcagatctgcaacttgagcgcatcaacgtttactacaatgaagcgagttgcggtagattcgttcctcgtgcagtgctcatggatttggagcctgggactatggatagtctcagatctggaccgtacggtcagacctttcgacctgataacttcgtctttggtcaatccggtgcgggtaacaactgggccaagggacactacactgaaggagctgaactaatcgattccggtctcgatgttgttcgtaaggaagctgagaactgtgactggcttcaagggtttcaggtttggcacttattgggaggaggaactggatctggtatggga

SEQ ID NO: 153390 - DNA, 521 bp, Arabidopsis thaliana columbia
atctactctctttaaaagaaattcgtaagtactatcaagaagcagaagatggcccaaaaggtggaagcacaaggagggaaaggagccgacctatgggacgatggatcgacacatgacgccgtgaccaagattcagctcgcagcaggcatagacggaattcaatatgttcagtttgattatgtcaagaacggacaacccgaacaagctcctcttcgtggtaccaaaggccgtgttctcccagctgatccgtttgtgattaaccatccagacgaacatctagtttctgtagaaggttggtatagccctgaaggtatcatttaaggaattaagtttatcttcaacaagaagacttctgatgtcattggatccgaagagggtactcacttcactctaccagttaaagacacgaagaacattggctttcatggtctgccgggggccaacctaattctttggggcttactttggtccgtgacttctacaaccttcgtgacctccgccaagcaactaacggcattttg

SEQ ID NO: 153391 - DNA, 486 bp, Arabidopsis thaliana columbia
ggaaacaatgctattatcaggttgattgctggtactatattcatgcatgaggaagactataatgaggctctgaagcacactgattctggaggaaccatggatctgcatgctttgaatgtccagatattcataaagatgcacagatcagattttgcggagaaacaactgagagtgatgcaacagattgatgaagaccacacactcactcagctcgcgagcgcgtggttgaatctggcagtaggtggttccaagatacaggaagcttatctaatcttccaggatttctctgagaagtacccaatgacaagcttgatcttgaacggcaaagcagtttgctgcatgcatatgggtaattttgaagaagctgagactctactacttgaagcactcaacaaggatgctaaagacccagaaactcttgcaaacctcggtgtatgcagtcttcacgtcgggaaatcatcttgggggggcctaaaccagctgaaa

SEQ ID NO: 153392 - DNA, 477 bp, Arabidopsis thaliana columbia
cgctcaaaacgctatactctccggttgttcagctggagtcattggctgcgattctacattgcgacgagttcaagtccactctcggtaaggcggctaaggtcaaatgtgtttctgacgctggttacttcatccacggtaaggatatcactggaggatcttacatccaatcctactacgccaaagtcgtagcgacccacggatctgcaaagagtctacctgcttcttgcacctcaagtatgaagcctgatttgtgtttcttccctcaatacgttgctaagaccttacaaacaccgcttttcgtcatcaatgccgccttcgattcttggcagatcaagaatgtattggcaccaacctctgttgataaaagcaaagcatggaagacttgtaagcttgatcttaagaagtgtacggccgctcagcttcaaacccttcaaggatatagagaccacagtgtggctgcgttggcgcctgttcgat

SEQ ID NO: 153393 - DNA, 235 bp, Arabidopsis thaliana columbia
aaagggatgcagttctggcccaagaagaatctagtggctgggttcatacatatttataggtttgtggaggatgggaaatctctggagcttcttcataagacgcaagtagaaggtgttcctcttgctctgtgccagttccaaggaagactgctggcagggatcggacctgtcctcagattgtatgatttggggaaaaagagactgcttaggaaagtgaaaacaagcttttttcaaa

SEQ ID NO: 153394 - DNA, 683 bp, Arabidopsis thaliana columbia
  unsure (1)..(683): unsure at all n locations
tttgggattttttttttacagagaagcgaagcagcgtctccgttcaagacgaggtacagagaaaacgaagaagaagaagatatgacgattaaaccggcggttcgtatttccgacgggaatctaatcatcaaaaaccggacgattctaaccggtgtaccagataatgtcatcacgacgtcagcatcggaagctggaccggtagaaggagtcttcgtcggagctgtatttaacaaggaagagagtaaacacatcgtaccgatcggtacgcttcgcaattcccggtttatgtcttgtttccggtttaagctctggtggatggcccagagaatgggagaaatgggccgagatattccctacgagacgcagttcttattggtcgagagcaacgatgggtcccaccttgagtctgacggagctaacggcgtcgagtgtaaccagaaagtttacaccgttttcttgccgttaatcgaaggatctttccgttcgtgtctccaaggaaacgttaacgatgaggttgagctctgtttggagagtggtgacgtggacactaaacggtcgcncgttactcactctctgtatattcacgccggtaccagaccgtttcagacaataacggacgctattcgcaccgttaagttccttctgaatagtttccggcactgcaccaaaagaagcttccaagg

SEQ ID NO: 153395 - DNA, 264 bp, Arabidopsis thaliana columbia
caacactcttggtggaggagctaacaccgtagctgacggttacagcaaaggaactgctctcggagctgggattattggaacttggggcgcgtgttacaccgttttctctgcaactgaccctaagagaagcgctcgtgactctcacatccccgttttggcttcactttcaattggatttgctgtgttcaaggtgcatttggctactattcccattactgggactggtatcaacccagctagaagctttggtgctgctgttatcta

SEQ ID NO: 153396 - DNA, 351 bp, Arabidopsis thaliana columbia
ggaaaagtacgtgtacaaatcacctcctccccctaaggtttattacaaatctccaccaccaccatgcggctatagttcaccacgcacgcagggtactactcaccttcccctaaggttgactacaaatcttctccaccaccatactactcacctttccctaagggtgactacaaatctcctccaccaccatatgtctacagttcttcaccaccaccatcatactcacctttttcaaaaactgagtactaagctttacattcaccttcgtattacttgaaagtgtaatgagaatcttatataaactaccaaattttaattcatttcaatctttgcttttgttccttatgatat

SEQ ID NO: 153397 - DNA, 216 bp, Arabidopsis thaliana columbia
cttcgattttcgtttattcgcatccatcggagagagaattcaatcaataagcgaccatgttggtgggccaagatcttctcaccggtggtgagcttctgtctgactctttcccttacaaggagattgagaatggaatcctctgggaagtagaaggaaagtgggttactgtgggagctgtagatgttaacattggtgccaatccatcttgttgaagaa

SEQ ID NO: 153398 - DNA, 389 bp, Arabidopsis thaliana columbia
aaagcaatagaacacttgaacgttttctagatagagatttaagggaaagaagaggatgttcgagtgggagctaacaagttcccggagaggcaaccgataggtacatcggctcagacggacaaagactacaaggagccaccaccagctccatttttcgagccaggcgagctgagttcgtggtccttctacagagccggaatcgccgagttcatagccaccttcctgtttctatacataacagtattgacagtgatgggagtgaagagagcaccaaacatgtgtgcctttgttggaatccaaggcattgcttgggctttcggcggcatgatctttgcccttgtctactgtactgctggaatctctggtgggcacataaacccagcgatcac

SEQ ID NO: 153399 - DNA, 567 bp, Arabidopsis thaliana columbia
agatgatatgcgcacgaatccgaccgctaatttcgtcaccactagctttcactatctcaacaaccagagcactccagaatcaatctccgattactccctcgccgctccttctccgtcatgtcttcttcaaccccacagagtcagatcatagaacacatcgtcttattcaaaaccaaagacgacgctgactccaccaaaatcacctccatgatcaacaacctcaacgctcttgcatatctcgatcaagtgcttcacatctccacctctcctctccaccgtatctcctccgctaccgccttcactcacgtactccatagccgttacgaatctaaagaagatctagcctcctacgctgcacatccagatcacgttcgtgttgttaaggaatctgtgttaccgatctgtgatgatatcatggctgttgattggatcgctgatcgaatccccggaaccgtagcgccgcttcctggttcggttgctaaactcacattgctcaaattgaaagaggatgtagcagatgaggcgaaatcggagattacgggagtgattaagggactaagtgagaaa

SEQ ID NO: 153400 - DNA, 316 bp, Arabidopsis thaliana columbia
  unsure (1)..(316): unsure at all n locations
ttcgagattgatctgatttgctttgttcttttctttctgttacaagaagataaaacatggcatcgcgcattgcagcacgctggtntgcggctccgctacagctagagcttcgtctctccgatctccgccgacaacgcttgcccgcctacgtccttcccaatcctctttgccccgcccgcgatttgcctctttcactaatcccaagaatttgggagagctaggatgcacagagtcattcttgcctttgtacaatgttggggctgcagcgagactcacatttcaccttaatgttaatctgcgagctttctgcgaactc

SEQ ID NO: 153401 - DNA, 192 bp, Arabidopsis thaliana columbia
ttatatggatctacacctctcctcagtctcatactcaaatcaataatccaaaccccaaaaaaaagaggaccagagaagagagtgtgaagaatgagaggttcttgcaaagtctctatagttcttcttctggttttaatcaatggtgtgcttggagataacccttatagattcttcacctggaaaattacttat

SEQ ID NO: 153402 - DNA, 395 bp, Arabidopsis thaliana columbia
ggaaggataaagagagacgccatgggaagaagacctgcgtggtgttaccgtcagatcaagggtagcgcatacccaaagtctgggtactgtcgtggtgtgccagatccaaaaatcaggatctacgatgttggtatgaagaggaagggtgttgatgagtttccattctgtgtccatttggtgtcatgggagacggagaatgtgtcaagtgaagcacttgaagctgcccgtattgcttgcaacaagtacatggtgaagtctgctggaaaagatgctttctatttgaggattagggctcatcctttacatgttttcaggagtaacacgatgctttagagtgctggagctgataggtttcagactggattgcgaggtgcttttgataaagctttgggtac

SEQ ID NO: 153403 - DNA, 327 bp, Arabidopsis thaliana columbia
ttcagttctagggttttaatttgatacgaggtcagcgaattcggcgacgaatatccgccactagtagctctagctcaggtaaggatgggtgtccatggcagctttgcaaacgcttcgtgaatggatcggtatccagcagttcccaacttgttactaattttaaatggctcaaaatcctgggaagtttaaagaagaggatgtgagctcgctaacggtccttgtaatggggaaaggtggtgttggaaagtcatcaacggggaattcagttatggccaagaaagctgttgcagttagtacttttccagtttgaaggacgggggcctacct

SEQ ID NO: 153404 - DNA, 355 bp, Arabidopsis thaliana columbia
tcgattagagcagaaatggatggtggaaattgcgagaagatttttcaaaaacaatttgacaacaggggcgctttaatagcttccatgccgagctttgaggacacatatctaaaagtccctaaaatactaaacaaagagtgactttttcagcttcttggaattgtttggctgaagagattcattctcagatccggatcttgttccagcatctttatgttttctaaaattggttagcagaaaacaaaattgcctcaaaattgttaagtctcacgtaggctattattctacaacattttgttcacaactcaccacaaccttgtgtgcatatgaaactaaactcaaaccaattttgaat

SEQ ID NO: 153405 - DNA, 291 bp, Arabidopsis thaliana columbia
  unsure (1)..(291): unsure at all n locations
gacccgcgcgtgcgaaaaaaatggcgaatacccaactcaaatccgatgcaatcattgacatgatgaaggaacatctttccagcgacttctttaaagaggtacggagaagatcggtttgtttatcanatcaacattgctccaaagaaattagggtttgaagaggttacttacatcgttgatctcaacaaaggccaagtcaccaaacggaaatatgaaagacggaaagtggatgctacgttctcctttaaggatgatgattttgccaaagttgccactggaaagatgaatccc

SEQ ID NO: 153406 - DNA, 569 bp, Arabidopsis thaliana columbia
ctactctctttaaaagaaattcgtaagtactatcaagatgcagaagatggcccaaaaggtggaaggacaaggagggaaaggagccagcctatgggacgatggatcgacacatgacgccgtgaccaagattcagctcgcagcaggcatagacggaattcaatatgttcagtttgattatgtcaagaacggacaacccgaacaagctcctcttcgtggtaccaaaggccgtgttctcccagctgatccgtttgtgattaaccatccagacgaacatctagtttctgtagaaggttggtatagccctgaaggtatcattcaaggaattaagttcatctccaacaagaagacttctgatgtcattggatccgatgagggtactcacttcactctacaagttaaagacaagaagatcattggctttcatgggtctgccgggggcaatcttaattctcttggggcttactttgctccgttgactactacaactccgttgactcctgccaagcagctaacggcatttggtagtgatgacggaactgtatgggatgatggtgcttacgttggggtta

SEQ ID NO: 153407 - DNA, 361 bp, Arabidopsis thaliana columbia
ggttacactgagtttagaccaagtgagaaattcagttttcaggagaacaatcttaacttcaacatgttgaatttggatgggaggtgtggtgaaagcatcatggggaagacttcgatgcagagcaatgtttataatatgaatactgttttccagacgaatgactttaaaagtggaggcaacatgaaagttaacaggtataatggtaatgttgcggctaacagggagatgggcaccaccaaacatagcaccaccttgaatgataatgggaatatgaatttggctgttgccaagaggtttaaaaccttgcctgtttgggagacctttccatggaatgaagttcttggtggttccatcttttgtt

SEQ ID NO: 153408 - DNA, 264 bp, Arabidopsis thaliana columbia
gctgtttctgccgtcgatcaaccgttgaaaatcatcaccggagctgatgactttggagcgagcctcaaggacgcgatggtaacacacctgcgctctctcggcatagacgtggaggataccggagtgtcctcttactactctgctggatctgaagtcggtcgccgcgtctccgcttcatcgtcttccgaagttcgcggcttagtctgctgcggcaccggcgtcggaggtgcgaatgttggcaacaaggttcccgggcgtttacgc

SEQ ID NO: 153409 - DNA, 297 bp, Arabidopsis thaliana columbia
  unsure (1)..(297): unsure at all n locations
ctcaacatttcattctctctctctctctcaacaattagatctgtttcgataatcacgaggtttccctcacttcctttccattgctaaaccaggatttgcctactgcatttggaaatggacgcttctatgattaccaattccaaatccattacttctccaccctctntagccttagggaagtcaggaggaggaggagttatcagaagttcactatgtaacttaatgatgccaggcaaagttaacttccctagacanagaactcaaactctaaaggttagccagaagaaacttaagaga

SEQ ID NO: 153410 - DNA, 419 bp, Arabidopsis thaliana columbia
ccgaaaacctcaaaccatggccgagggactcgtattgaagggcattatgcgcgcccacaccgacattgtcacggccatcgctacgccgatcgacaattccgacatcatcgtcacagcgtcgcgtgacaaatccatcatcctctggaaactcacaaaggacgataagtcttacggtgttgctcagcgtaggctcacaggtcactctcacttcgtggaagatgttgttctctcatcggacggtcagtttgcactctccggaagctgggacggtgagctccgtctctgggatcttgccacgggagaaacaactcgtcgattcgttggtcatacgaaagatgtgctctctggtgcattctctactgataaccggcagatcgtgtctgcttctcgtgatcgtacgattaagctttggaacacac

SEQ ID NO: 153411 - DNA, 285 bp, Arabidopsis thaliana columbia
cttgaataaaatcagaattacaaacaaaaatggttttgcaaaagcttcctctcattgggctggttttgctcctgaccatcggcggctctccagcaaatgcagatggacctgtttgcccgccgtcgaacaaactaagccgggcaagtttccctgaaggttttttatttggcacggctactgcggcataccaggtcgaaggcgcgattaatgaaacttgtcgtggtccagccttatgacccatttactgtagaagatatccagagaggggcaatacctataacggcg

SEQ ID NO: 153412 - DNA, 156 bp, Arabidopsis thaliana columbia
  unsure (1)..(156): unsure at all n locations
cggacgcgtgggctccgatcaaccatgagcaaaggtccagggacttttcaccgatatcggcaagaaagccaaagatcttgtgacgagagactacaattncgatcagaagtcagtatcttcacttacagtgcctncggcggggcccttacggctact

SEQ ID NO: 153413 - DNA, 316 bp, Arabidopsis thaliana columbia
cgtgaaatgtgcagctccggaaataaataatcactaaaataaccagatccgatctactgccccggtttctcgccggaatctccattctgtaaccggcgatcctctttctgctcagttatggaagacgtgaaagggaaggagattattgatgatgctcctattgacaacaaggtttcagatgaaatggagagtgaggaaaatgcgatcaagaaaaagtatggaggattgttgcctaagaagattcctttgatatgtaaggaccatgaacgtgcgttttttgactcaactgattgggctttaggcaagcaaaaaggac

SEQ ID NO: 153414 - DNA, 240 bp, Arabidopsis thaliana columbia
caagggttcagtcttcttccaaccgcaatgtgcagtatccacttcaccggcgttattaacttctatgcttgatgtcgcaaagcttagactaccctctttcgatactgattcggattcccttatatcagacaggcagtggacttatacaaggcccgatggtccttccactgaggcgaagtatttagaagctgtagcctctgagacacttctcacaagcgatgaagcaagagttgtagcaac

SEQ ID NO: 153415 - DNA, 393 bp, Arabidopsis thaliana columbia
attttcttcaaaacgattcgggtcaaggttattgactttctcattcagtgaagcttgaatcatggcctcgagaattgctaaagatgtgactgaattgattgggaacactccattggtgtatttgaacaatgttgctgaaggatgtgttggtcgtgttgctgctaagcttgagatgatggaaccgtgctctagcgtcaaagacaggattggttttagcaattaaacttgcacagaggccagaaaacgctgggaagctatttgtggcgatattcccgagtttcgtggagaggtatctatcaacggtactgttcgatgcgacaaggaaagaagcggaagcaatgacctttgaggcttgaacattctgcattttttttaaggagacgccgaaattaa

SEQ ID NO: 153416 - DNA, 232 bp, Arabidopsis thaliana columbia
taaagatgaacatgaagctcatgtgcaatttgctcttgagaggggcattcccgccatttctgcagttatgggcacgacaaggctacctttccctggcagagtttttgacatagttcattgtgctcgctgtagagtgccatggcacattgaaggtggtaaacttctcctggagcttaaccgtgtattgagacccggtgggttctttgtgtggtctgctactcctgtttatcag

SEQ ID NO: 153417 - DNA, 355 bp, Arabidopsis thaliana columbia
cttcgataaggattttactcttcagagaaaggaaaaaaaaaacctcctctgcttttgtgatccttaagggaaaaaaccaaatggcaacggaatcgtacgaagcccgcattaaaggactcaatgatcttctcaatacgaaagcggatctcggaaacgtcgccgccgcgaagatcaaaacgttgacggcggaactaaaagagctcgactcaagcaaattagacgcaattgaaccgaataaggaccggtttactcaattcaaaaccgagaaatatttgaagaatagaactttgttaaatcatcttgccaagactaaaaccccaaagtttctggggttggcttgctctaattttcgagt

SEQ ID NO: 153418 - DNA, 305 bp, Arabidopsis thaliana columbia
attaactaaagagccttttacttgcgccacactctcaccgcaatggccgcctcgacaatggctctctcctctcctgctttgaccggaaaggccgttaagctatccccggcggccttcgaaggatttggaaaccggccgaataacaatgcgcaaggcttcaaagccaaccgtccatccggcagcccatggtacggatccgaccgagtcaagtacttgggtccattctccggtgagcctccgagctacctcactggagagttccccggtgattacgggtgggacactgccggtctatccgccgatcc

SEQ ID NO: 153419 - DNA, 248 bp, Arabidopsis thaliana columbia
ggaacaatgaatggtgctctcttctcttcccgtcaatctcaataacttacaattcatatgctttctgcttttccttttcttctgcatcgggatttgttggacccgcaatcgttaggatatggggaggggaacataagcttttgtaggcaatgaattactctagtcaaatgttcttattatcaacatatttgatgactcattgcatacgtgcatttgatttgaatgaagttatcgactttgtttggatc

SEQ ID NO: 153420 - DNA, 266 bp, Arabidopsis thaliana columbia
ccaaaacacacccacacgtacgcacacacacaaagacattgtctcctttcaaaatattcttcttcacgactcttctcgtggcggcgtttgcagtgtcggctgctgatttcaacactgacgtcaacgtagcttggggaaatggccgtgggaagatactcaacaacggccagcttcttactctctccttagacaaatcctctggttccgggtttcaatccaaaacagagtatttgtttggaaagattgatattcagattaagcttggt

SEQ ID NO: 153421 - DNA, 252 bp, Arabidopsis thaliana columbia
ggctactagagtgttaactgcagcgacggccgtgacccaaaccacctcctgtttcctcgccaagcaagctttcactcttccggcgaagaaatcctgcggcggatttggtggtctctgcttcagcagaagagctttggtgttgaaatctaagagacctttctcctgcagtgccatttacaatcctcaggttaaggttcaagaagaaggtccggccgaatccctagattatcgagttttcttcctcgatggttc

SEQ ID NO: 153422 - DNA, 569 bp, Arabidopsis thaliana columbia
gagctctcgtaagcctctgaattcgatttgacctgacaaccatacaaaaaattctcccgagaaaatctctctctcaacgaacgaatttcgaatcaccaagaagaaattctgagattggttggcgtttcatcggaatattggaggggaaggtagcaccaccgacgtcgtttaattggtcaggacgacacacagcgattcctcaatgtccgtcattttcgcaaaccctaacttcatctaaacgccgtcgttctcgtggaatagccggtgatgtttccgtcggaggaggatctttgagattaaaaccttcgacgtttctcggaacacaatctgggaaacttcaccgatctaaatcatgtgagctttgggcaatttctaattccaccacgaagaagattagaactgatgtgaagaagaaacataatcctttgagaagagtttgtagtgcgagctccggtttcttctcctccgacgaagcattctctgtgaaaatgcatgaattagcttcacaattcagaaacgcatgcgatgaagaagaagatgagaacaaacagaaatcagaagcaggagat

SEQ ID NO: 153423 - DNA, 181 bp, Arabidopsis thaliana columbia
  unsure (1)..(181): unsure at all n locations
accaactcactcacaaaatctgtagaatcatctttcaacaatggcttccactgctctctccagcgcaatcgtaagcacctctntcctgcgccgtcaacagacaccaatcagcctcagatccctcccggttgccaacacacaatctctcttcggcctcaaatctttcaccgctcgcgggggg

SEQ ID NO: 153424 - DNA, 261 bp, Arabidopsis thaliana columbia
gaagaagaagacgatacagatccacaacgccatgggtttaggcatcttagcttctcgaacaattcgaccggcttcacgtcttcttcaatgtgaaacctgcaatttcttccttcggacaatcgtctcaaaaccagagcttcaatcttctgaattcgctggtgtgtctgagcctgagccgccgacacagattcttccttctagaaaccctgtaggtggagcacgcgtccacttctcgaattctgtagatgcgatcgaggtctt

SEQ ID NO: 153425 - DNA, 209 bp, Arabidopsis thaliana columbia
acgtaaagatgaacatgaagctcaggtgcaatttgctcttgtaaggggcatatccgccatttatgcaggtatgggcacgacaaggctacctttccctggcagagattttgacataaatcattgtgctcgctgtagagagccatggcacattgaacgtggtaaacttcttctggagcttaaccgtgtattgagacccggcgggttctttg

SEQ ID NO: 153426 - DNA, 184 bp, Arabidopsis thaliana columbia
gtccgatactgatgccggtggcgtagattgcggcggagttggaatcctcggtatcgcttgggcctttggtggtatgatcttcatcctcgtctactgcaccgacggtatttttggtggtgaaattaacccagcggtgacatccgccctatccttggcacggaaaggggtggtacctaagggccta

SEQ ID NO: 153427 - DNA, 622 bp, Arabidopsis thaliana columbia
  unsure (1)..(622): unsure at all n locations
gcctctcgttgctagaggaatcaaacaatggtgtttgtgaagtccaccaagtcgaatgcttacttcaagaggtaccaagtgaagttcaggagaagaagagatggaaagactgactacagggcaaggatccgtcttatcaaccaagacaagaacaagtacaatactcctaagtatcgttttgttgtccggtttaccaacaaagacatagtggcacagattgtatctgcaagcattgctggtgacattgttaaagcttctgcttacgcacatgaactgcctcagtatggtctcactgttggtcttacaaactatgctgcagcttactgtactggccttcttttggctcgccgtgttttaaagatgttggaaatggatgacgagtatgagggaaacgttgaggccactggagaagacttttccgttgagccaactgattcaaggagacctttccgtgctcttcttgatcgtggacttatcaggaccacaacaggaaaccgtgtgttcggtgctcttaaaggtgctttggatggggtcttgatatccctcacagtgacaagagatttgcttgggtccacacggagaacaagcaacttgatgctgaaantcaaaggaactacatcta

SEQ ID NO: 153428 - DNA, 291 bp, Arabidopsis thaliana columbia
cgaagttccgtgcgactctctgctcgagcaagatctcctaccgatacaatgattatctcagaggctaaccgcaaagaaatctgcaagtacctcttcaaagaaggagtttgctttgcgaagaaggatttcaatcttgctaagcatccgttgatcgatgtccccaacctacaagtgattaagcttatgcagagtttcaaatccaaggagtatgttagggagacatttgcctggatgcattactattggtttttgaccaatgaaaggatcgagttcttgagaacttatcttaat

SEQ ID NO: 153429 - DNA, 323 bp, Arabidopsis thaliana columbia
gttgttccctgtgaccatggctactccactctcaatctcatcaaatcctctcacctcccgccattgttaccgtctccacttatcttctacttcattcaagggaaatgtaagtgttttgggggcaaacccaagtcagattctatctctgaaactcaaccaaacccttaaaacgagaaaccaacagcaatttgcgagaccccttgttgtggttagccaaacggcggctacgtcgtcggcagttgtagctccggagagattccgtttggataatcttggaccacagccaggttcgaggaagaagcagaagagaaaaggtagaggta

SEQ ID NO: 153430 - DNA, 354 bp, Arabidopsis thaliana columbia
acggaacctgtcttcttgtcttgtccaaaatcggatttttaagagtacaagtgagtttattttgggggccgaaatctgtcctggaggatacagaagcaagatgaagttaatagatcgaagaatgaggttaacggagctgctcttacggtgctccatcagtgtcttcgctctcctcgcgcttattctagttgtgacagacactgaggtcaagcttatcttcactatcaagaagacggccaagtacacggacatgaaggcggttgtgttcttggtggtggctaatgtgaaagctgcgggttattctttgttgcaatcagttcgctgcgttgtgggtaccgatgaaaggaaaggttt

SEQ ID NO: 153431 - DNA, 464 bp, Arabidopsis thaliana columbia
  unsure (1)..(464): unsure at all n locations
atcgaagaaggagagaagaacagagaaaaagagttgaatcaaatatggctgggagagctacgatccctgctcgcaactctgccctcatcgcaatgatcgccgatgaggacactgttgttggatttttgatggctggagttggtaatgttgacataaggaggaagacaaattacctcatcgtggattcaaagacaactgtgagacaaattgaggatgctttcaaggaattctcagcaagggatgatatcgctatcattcttttaagccaatatatcgccaatatgatccggttcttggtggatagctacaacaagccagttcctgcaatcttggagatcccttccaaggaccatgcctatgatcctgctcatgattcagttctctctcgtgtcaagtacctctnttcttgagaatctgtgtcacagtgttaaacatatgcattttgcaagctctgggaacctata

SEQ ID NO: 153432 - DNA, 161 bp, Arabidopsis thaliana columbia
gcgtcacactgaccctggaaccattaccttgctgctacatgaccaagtcggtggattacaagccacacgtgacaatggcaagacatggattacggttcagcctgttgaaggagcgtttgtcgtcaatcttggcgaccacggccattttttgagcaatggga

SEQ ID NO: 153433 - DNA, 293 bp, Arabidopsis thaliana columbia
cacaaacaaaccatttacataaaacaaaaacaatttaatacttcttagtgtgtaaatgtgtgattctttcatcaataacaaaatgacatcgatattattcatgctcgtgagtctaacaattctttccatgaatctaaaagtctctcaagccacatctcgtgtcaccttccacgagccgatcgttgctgaacaccatcagcagtggatgactcggttctctcgagtttacagcgacgagctcgagaaacaaatgagattcgatgtgttcaaaaaaattgtggggttttttggaa

SEQ ID NO: 153434 - DNA, 139 bp, Arabidopsis thaliana columbia
cccacgcgtccggtcggtggatccacacgtattcctgttgttcaggaactcgtgaggaaggtgactgggaaagaacctaatgttgcagtaaatcctgacgaggttgtagcgttaggtgcttcattttaatcttgttttt

SEQ ID NO: 153435 - DNA, 217 bp, Arabidopsis thaliana columbia
gcgacactgaaacacatgaaaagtcttaaatttgatgattatgcaaaatattcgtttgttgagtatttttgcatcagtttgttttgcattgggctcttaaaccaattctatcactcagaattattgttttgtaataatcgtgagaagaaactttagggtttcactgtttcagagttctgactggtgaattataaatgatgcatgaatttccacacat

SEQ ID NO: 153436 - DNA, 148 bp, Arabidopsis thaliana columbia
attctcatgagcatggaaagggtactgagaacagtcaggagagttgacaagccggagctgatggaatgggtgaagggactagccttgtggtcgccaagtcaagaatgtaagacatatgttcattacggcggtgcggccaaagcggggc

SEQ ID NO: 153437 - DNA, 118 bp, Arabidopsis thaliana columbia
ctcctctccttctctctattttgccggaatacatatgatcgagtgaaacggcggacaaagctgtcgtgttgagtactaattcgccgtcgttttctcagggaggagtgtggagagatgt

SEQ ID NO: 153438 - DNA, 407 bp, Arabidopsis thaliana columbia
aaaatctatagagagctcactcactagcaatggcgtctcttctcggaagatctccttcttcaatcttgacctgccctcgtatttcttctccttcctcaacatcttcaatgtcccatctctgcttcggaccagagaaactttctggaagaatccaattcaatccaaagaagaacagatctcgttaccatgtctctgttatgaatgtcgctacagagatcaactctgttgaacaagcaaagaagattgattcaaaggaaagtgcaagacctgtttatccgtttgctgctatagttggacaagatgagatgaagctatgccttttgttaaatgtgattgacccgaagataggtggtgtgatgataatgggagatagaggaacttggtaatcaacaacctgtagatcttta

SEQ ID NO: 153439 - DNA, 355 bp, Arabidopsis thaliana columbia
ttgacacaaatgagaacaagctcttattacatataatattcgaactacaaatacaccccttaagcaaatctaatgaaagaaggggtaattaaacaataacaaaacaaaatacacgaaactgatattaaaggtgattatctaatgacgaatcacaatcattctcttcaggttttcttgtttggcccgtatgcatacttaataagagactccttgatagagagtagctcatggaactctttcttgagcttggaagcatccatctcgttggtgcttcttggacccacaatgactttagcttgctcctttaatgtgaagtttgcccatttgaattcaagcttgatggtatctctataca

SEQ ID NO: 153440 - DNA, 419 bp, Arabidopsis thaliana columbia
caagaaaccaaaagagtaaaacaaacacagagaagcttcttcttaaacgatgccgtactataccagagatgacaacgacgtcgacgatttcgatgagtttgatccaacgccgtacagtggtggttacgacatcacggtgatctacggccgtacgattccaccttccgatgagacttgttatcctctctcatctggtgtcgatgatgatttcgaatacgagagacctgaatttactcagatccatgagccttctgcttacggtgatgaagcttttaacacagagtacagtagctattgttgacccaagccacgacccgcatttcgacccgattcaggtggtggtggacatgttcaaggggaaagaccaaatcctggttatggatctgaatccgcctatggtagggaaaccggaatcttga

SEQ ID NO: 153441 - DNA, 264 bp, Arabidopsis thaliana columbia
  unsure (1)..(264): unsure at all n locations
aaaaaaaaaaaacacanaagtttcaatggccgcctccacattggctctctcctcccctgccttcgccggaaaggctgtgaacctttcccccgcggcatctgaagtcctcggaagcggccgtgtgacaatgaggaagactgttgccaagccaaagggtccatcaggcagcccatggtacggatccgaccgagtcaagtacttgggtccattctctggcgagtcaccgagctacctacccggagagttccccggagactacggatg

SEQ ID NO: 153442 - DNA, 393 bp, Arabidopsis thaliana columbia
gtctctgcaagtctcatcagaagaggaagagaatcaatggttagttgcttcagctacgtgtcttctcgtaacaaatgttaccaatacagcttctctcgtgctggtctccgatcatctacctccgatcttggcgacggcaccgtcttccactgttggatcccacttactcacatccacaccaagcccacgctcctcctccttcacgggatcggagctaacgctatgtggcagtgggaccgcttcatcgaccgttttatcccccgcttcaacgtctacgtaccggacctcatcttctttggcgactcctacaccactcgtgccgaccgctcagagtctttccaggcgacttgtgtcatgaaggcgatggatgcttacggtgttaggaccatgacc

SEQ ID NO: 153443 - DNA, 63 bp, Arabidopsis thaliana columbia
acgggctttgcttgagagtataatattagggctaatcacattatggttagcttttgttattgg

SEQ ID NO: 153444 - DNA, 308 bp, Arabidopsis thaliana columbia
gtcttcttcgttctctagttttttcctcagtctctgttcttagatccctggaagtttccaatgtttcgataaaaatgtcgggtaaaggagaaggaccagctatcggtatcgatcttggtaccacttactcttgcgtcggagtatggcaacacgaccgtgttgagatcattgctaatgatcaaggaaacagaaccacgccatcttacgttgctttcaccgactccgagaggttgatcggtgacgcaactaaaaatcaagtcggcatgaaccccgttaacaccgttttcgacgctaagaggttgatcggt

SEQ ID NO: 153445 - DNA, 312 bp, Arabidopsis thaliana columbia
ctttcgattctctcaaaaaatcccataactttcccaacgaaaaatgttccgatcaatgattgttcgatctgcttccccagtgaagcagggtcttctccgcagaggattcgcctctgaatctgttcccgatcgcaaagtcgtcatcctcggtgccgccggtgggatcggccagccactttctcttctcatgaagcttaaccctctcgtctcttctctctccctctatgatatcgccaacactcccggcgttgctgctgacgtcggtcacatcaacacccgatctcaggtttctgggtacatgggtgatgatga

SEQ ID NO: 153446 - DNA, 360 bp, Arabidopsis thaliana columbia
agagatcaaaccaaagagacacagagagagtatccaccgatggaatccgcagcaacggctgttgtacctccggcagccgccgccaccaccgccaccgccaccgatgataatctccaatcaagcgactcatcatctcccgccgacgccgttaaccgattgatccacgccttttcgcagcgacaacaacatcttctcgacaaaacggttcctcacgttctctatcgatggatcgcatgtctctgtgttgtattgatctacatcgttcgtgtttactttgtggaaggcttctacatcatcacttacgccatcggcatctaccttttgaatctcatcattgcttgtctatctcctcaagaagat

SEQ ID NO: 153447 - DNA, 341 bp, Arabidopsis thaliana columbia
cttttaagcccaacaaaaatgggttatgctaaatcagccatgctgatcttcttactagcattggtcatcgcatcttgtgccacggccatggacatgtccgttgtttcctccaacgataaccaccacgtgaccgccggtcccggccgccgtcagggtattttcgacgctgaagccaccttgatgttcgagtcatggatggtcaaacatgggaaagtgtacgactccgttgccgagaaggaacggcgtttaactatttttgaggacaacctccgttttatcactaaccggaccgttgagaatttcagttaccgccttgttttgaatcggtttgcggatttatc

SEQ ID NO: 153448 - DNA, 502 bp, Arabidopsis thaliana columbia
agaaaacaagtagaaactttaaaacgagagagagagaatgaaatggcgacatcgggaacgtacgtgacggaggttccgttgaaaggatcggcggagaaacactacaagagctggaagagcgagaaccatgtcttcgctgacgccattggccaccacatccaaaatgtcgttgttcacgaaggcgaacatgactctcacgggtctatcaggaagttggactacacatatgatggaaagaaggagatgttcaaagagatgagagagatagatgatgagaataaaacattgacgaaaagaggactggatggtcacgtgatggagcatctcaaagtatttgatatcatctacgaatttattcccaaatctgaggatagctgcgtctgcaaaatcactatgatatgggagaagcgcaacgatgactttcccgaaccaagcggctacatgaaatttggcaagcaaatggttgttgacttttcccgcaaggtaaacaaagcttaaccac

SEQ ID NO: 153449 - DNA, 169 bp, Arabidopsis thaliana columbia
accggttcaggtgctcagaaattggaagcacaaggcaacattacaggaggtacatcatgggacgatggatccgattacgatggcgtgacgcaagatatacgcaagctacggtggggaaggtattcaatacgttaagtttgactatgtgaaacgtggagtaacaaaacaa

SEQ ID NO: 153450 - DNA, 311 bp, Arabidopsis thaliana columbia
aagaaacaagaaaacgaaaggaaaaaatacagaaatgggtggtttgaagtttcatgtacttatgtatccatggttcgcaacaggccatatgaccccgttcctttttcttgccaacaaattggctgagaaaggtcatacggtcacttttttgattcccaagaaagctctgaaacagttggaaaatctcaatctgtttccacacaacattgtctttcgctctgtcaccgtccctcatgtggatggtctccccgatggcacagaaacagtctttgagatccccgtgccatcagctgacctcttgatgtctgcta

SEQ ID NO: 153451 - DNA, 258 bp, Arabidopsis thaliana columbia
tgcagatcttcgtgaaaaccttgaccggcaagaccatcactctcgaggtcgagagcagcgacaccatcgacaatgtcaaggccaagatccaagacaaagaaggaatccctccggatcagcagagattgatcttcgccggaaagcagctcgaagatggccgtactttggctgactacaacatccagaaagaatctacacttcatcttgtgttgaggcttaaaggaggtattattgagccttccttgatgatgcttgctc

SEQ ID NO: 153452 - DNA, 238 bp, Arabidopsis thaliana columbia
tgatgatgaaaaggtgaaagagctcatgaggctttacatcaccatccacagtgatcatgaaggtggaaatgttagtgctcacactggtcacctggttggtagtgcactttcagacccatatctgtcatttgcagctgcattaaatggtttagctgggccactccatggtttggctaatcaggaagttttgctttggatcaaatcagtcgtagaggaatgtggagaagatatctcaaaa

SEQ ID NO: 153453 - DNA, 258 bp, Arabidopsis thaliana columbia
acgcttcactctctctaatcaaaaagcttttaacctcattcgttaaatctttctccgatcatgccgaccagaaacatcgccattggtggagtccaagaagaggtctatcaccccaacgcacttagggcggcgctcgctgagtttatctcgactttgatcttcgtcttcgccggctcacgcttcggaattgctttcaactagatcactgacaatggaacaaccactccttccggcctcgtcaccgttgccttaactcat

SEQ ID NO: 153454 - DNA, 219 bp, Arabidopsis thaliana columbia
aaaaaaaatattcttggttcaaacttcaatggcgttctcgagttccatcttctctgatactcagttttcttcttcgatagcttcgcgtccttcttctgcaatcagtaggcagactcgttttcccgctcaaattgcttctccagatctatcgcctgctttgttcgatgatcgccggacgttcgtcggaggtgtaatgtctttcttgacgaaaagtattaa

SEQ ID NO: 153455 - DNA, 219 bp, Arabidopsis thaliana columbia
  unsure (1)..(219): unsure at all n locations
gnggttggcttatccgcatcagcctcattgcttagctttcggagacgttcttgtgtcttgtcttggagacgaagatggaaacgcagaaggcagtgggtttcttttacttgattccgagtttaacatcaaaggaaggtgggagaaggatggacacagtcctttgtatgggtatgatttctgtgaccaaccttggcataagacgattatcagtacctgatg

SEQ ID NO: 153456 - DNA, 327 bp, Arabidopsis thaliana columbia
gctcctaacaaagcaatatcatttccaatttataaaagttaaagccatggctgcatctttctctgtcccctctatgataatggaagaagaagggagattcgaagcggaggttgcggaagtgcagacttggtggagctcagagaggttcaagctaacaaggcgcccttacactgcccgtgacgtggtggctctacgtggccatctcaagcaaggctatgcttcgaacgagatggctaagaagctgtggagaacgctcaaaagccatcaagccaacggtacggcctctcgcaccttcggagcgttggaccctgttcaggtgaccatgat

SEQ ID NO: 153457 - DNA, 221 bp, Arabidopsis thaliana columbia
gcagcgaaagctcaaccaacaagacgatgattatctcatagaacaatcgcagagagatctgcaaataccttttcaaagagggagtatgctttgctaaaaaggatttcaatctcccaaagcatccgttgattgatgtaccaaacctgcaagtgattaagctcatgcagagtttcaagttcaaggaggacggtagggagacatttgcgtggatgcattattat

SEQ ID NO: 153458 - DNA, 195 bp, Arabidopsis thaliana columbia
gccgtcggcacatgaagaagaagaagaagaatgtctcacatgaaggttgagcacccaagacatggttctcttggtttccttccaaggaagagagctaaccgtcacagaagaaaggtgaaggcgttccctaaggatgaccaaaccaagccttgcaagttcacagctttcatgggttacaaagctggtatgactcac

SEQ ID NO: 153459 - DNA, 414 bp, Arabidopsis thaliana columbia
cgcaatcttcgctcttctctttgctctctctctctcaacgcggttcagatccgagtttgggagattcaagctccctgaaaaaagccctttactctcgcttaccaactttgctccagcatggcaggatctgcaccagaaggcacacagtttgatgcacgtcagtttgaccagaaactcaatgaagtacttgagggacaagatgagttcttcacatcctatgatgatgttcatgagagctttgatgccatgggtcttcaagagaaccttctcaggggtatttatgcttatggttttgagaagccttctgctattcagcaaagaggaatcgtccccttctgtaagggtcttgatgtgattcaacaggctcagtctggtactggggaaacagcaactttctgctcttgtgtcttgcaa

SEQ ID NO: 153460 - DNA, 264 bp, Arabidopsis thaliana columbia
tctctcttcctctgtttcttcgccattctctcagcttttctccttcttcttcgtctttgtcaggtaaagagatacgatgagcatatcccacatacctctctcctcttctcatctttttagtttctcgaaagtttgcatgcgccgactttgttataggttataaactttagttttaagcctattttcgtatgtttatggttgttgcaatagctgagaattcacagtatgtcaagtgaaacttaaaaagaatcctatatgtattgt

SEQ ID NO: 153461 - DNA, 261 bp, Arabidopsis thaliana columbia
acagttctctctttttgtcgacagtcttcttcttcttcttcttcttcgattggatctggaactgaactcaaattgggaagaattttgacatggaggaggaccggtgttcgatcaaggatgatgcaactcaattgataggtaacaccccaatggtatatctgaacaacattgtggatggttgtgtagctcgtattgcaactaaacttgaaatgatggatccttgctttaatgtcaaggatcaaatttgtttattagatgatt

SEQ ID NO: 153462 - DNA, 205 bp, Arabidopsis thaliana columbia
ggatttgatcacgaaacgttttacatggatggaagcttatcttctcttatcaacccggatcagtaccgtcgtgactgctttgcgcagttcaaagatatgaaagcaatggatcctatggagttgctagggatcttaccaacttggcattttggtaaatttttgtcagagaaatacctttttatcacttacccaaaaatggaacaac

SEQ ID NO: 153463 - DNA, 246 bp, Arabidopsis thaliana columbia
atctactctctttaaaagaaattcgtaagtactatcaagaagcagaagatggcccaaaaggtggaagcacaaggagggaaaggagccaacctatgggacgatggatcgacacatgacgccgtgaccaagattcagctcgcagcaagcatagacggaattcaatatgttcagtttgattatgtcaagaacggacaacccgaacaagctcctcttcgtggtaccaaaggccgtgttctcccagctgat

SEQ ID NO: 153464 - DNA, 361 bp, Arabidopsis thaliana columbia
ggaaacaatgctattatcaggttgattgctggtactatattcatgcatgaggaagactataatgaggctctgaagcacactcattctggaggaaccatggatctgcatgctttgaatgtccagatattcataaagatgcacagatcagattttgcggagaaacaactgagagtgatgcaacagattgatgaagaccacacactcactcagctcgcgagcgcgtggttgaatctggcagtaggtggttccaagatacaggaagcttatctaatcttccaggatttctctgagaagtacccaatgacaagcttgatcttgaacggcaaagcagtttgctgcatgcatatgggtaattttgaag

SEQ ID NO: 153465 - DNA, 495 bp, Arabidopsis thaliana columbia
  unsure (1)..(495): unsure at all n locations
cgctcaaaacgctatactctacggntgttcagctggagcattggctgcgattctacattgcgaccagttcaagtccactctccctaaaacggctaaggtcaaatgtgtttctgacgctggttacttcatccacggtaaggatatcactggaggatcttacatccaatcctactacgccaaagtcgtagcgacccacggatctgcaaagagtctacctgcttcttgcacctcaagtatgaagcctgatttgtgtttcttccctcaatacgttgctaagaccttacaaacaccgcttttcgtcatcaatgccgccttcgattcttggcagatcaagaatgtattggcaccaacctctgttgataaaagcaaagcatggaagacttgtaagcttgatcttaagaagtgtacggacgctcagcttcaaaccgttcaaggatatagagaccaagtgttggctgcgttggccgctgttcgatccgggacgacgaacggatt

SEQ ID NO: 153466 - DNA, 251 bp, Arabidopsis thaliana columbia
aaagggatgcagttctggcccaagaagaatctagtggctgtggttcatacatatttataggtttgtggaggatgggaaatctcttgagcttcttcataagacgcaagtagaaggtgttcctcttgctctgtgccagttccaaggaagactgctggcagggatcggacctgtcctcagattgtatgatttggggaaaaagagactgcttaggaaatgtgaaaacaagctctttgcaaacaccattatctcta

SEQ ID NO: 153467 - DNA, 205 bp, Arabidopsis thaliana columbia
accggtttctctgcaactgaccctaaagaagcgctcggctctacattcccgtttggctccactttcaattggatttgctgtgttcatggtgcatttggctactatccccattactggaactgggatcaacccaactagaagctttggtgctgctgttatctacaacaacgagaaggcgtgggatgaccaatggatcttttgggtt

SEQ ID NO: 153468 - DNA, 327 bp, Arabidopsis thaliana columbia
  unsure (1)..(327): unsure at all n locations
ngaaaagtacgtgtacaaatcacctnctcccnctaaggttgttttacaaatctccaccaccaccatacgtgtatagttcaccaccaccaccatactactcaccttcccctaaggttgactacaaatcttctccaccaccatactactcaccttgccctaaggttgactacaaatctcctccaccaccatatgtctacagttctccaccaccaccatcatactcaccttcttcaaaaactgagtactaagcttcacattcaccttcgtattacttgaaattgtaatgagattcttatataagctaccaaggtttatttcatttcatct

SEQ ID NO: 153469 - DNA, 205 bp, Arabidopsis thaliana columbia
cttcgattttcgtttattcgcatccatcggagagagattacaatcaataagcgaccatgttggtgtaccaagatcttctcaccggtgatgagcttttgtctgactctttcccttacacggagattgagaatggaatcctctgggaagtagaaggaaagtgcgttactgtgggagcctgagatgttaacattggcgccaatccatc

SEQ ID NO: 153470 - DNA, 241 bp, Arabidopsis thaliana columbia
  unsure (1)..(241): unsure at all n locations
acggaacaatggcttnctctatgctctcttacgctactatggttgcctctccggctcaagccactatggtcgctcctttcaacggacttaagtcctacgctgcctttccagccacccgcaaggctaacaacgacattacttgcatcacaagcaacggcggaagagttaactgcatgcaagtgtggcctccgattggaaagaagaagtttgagactctctcttaccttcctgaccttaccga

SEQ ID NO: 153471 - DNA, 237 bp, Arabidopsis thaliana columbia
aaagcaaaagaacacttgaacgttttctaaatagaaatggagggaaaggagaggatgttcgagtgggaggctaacaggttcccggagaggcaaccgataggtacatcggttaagacggacaaagactacaaggagccaccaccagctccatttttcgagccaggcgagctgagttcgtggtccttctacagagccggaatcgccgagttcatagccactttcctgtttctatacata

SEQ ID NO: 153472 - DNA, 245 bp, Arabidopsis thaliana columbia
  unsure (1)..(245): unsure at all n locations
agatgatatgcgcaagaatccgaccggctaattcgtcaccactagctntcactatctcaacaaccaaacactgcagaatcaatctccgattactccctcgccgctccttctccgtcatgtcttcttcaaccccacagagtcagatcatagaacacatcgtcttattcaaaaccaaagacgacgctgactccaccaaaatcacctgcatgatcaacaacctcaacgctcttgcatatctcgatcaa

SEQ ID NO: 153473 - DNA, 351 bp, Arabidopsis thaliana columbia
acgttcgagaatgatccgaattggtttggtggaatactttctgctacaagaagataaaaaatggcatggcgcagtgcagcacgctctttcgtctccgctacagctagagctccgtctctccgatctccggcgccaacgcttacccgcctccgaccttaccaatcctctttgccccgccgccgatttgcctctttcactaatcccaggaatttgggagagctaggatgcacagagtcattcttgcctctgtacaatgttgtggctgcagcgagactcacatattaacctaatgttaatctgcgagctttctgcgaactctctaacggtacttgaatgcacaaagtggatgca

SEQ ID NO: 153474 - DNA, 148 bp, Arabidopsis thaliana columbia
ggaaggataaagagagacgccatgggaagaagacctgcgaggtgttaccgtcagatcaagggtaagccatacccaaagtctcgctactgtcgtggtgtgccagatccaaaaatcaggatctacgatgttggtatgaagaggaagggtg

SEQ ID NO: 153475 - DNA, 265 bp, Arabidopsis thaliana columbia
ttcagttctagggttttaatttgatacgaggtcagcgaattcggcgacgaatatccgccactagtaactctagctcaggtaaggatttgtgtccatggcagctttgcaaacgcttcgtgaatggatcggtatccagcagttcccacctgctactcaatctaaattgctcgagatccttgggaagtataaagaagaggatgtgagctcgctaacggtccttgtaatggggaaaggtggtgttggaaagtcatcaactgtgaattca

SEQ ID NO: 153476 - DNA, 353 bp, Arabidopsis thaliana columbia
attagagcagaaatggatggtggaaatttgcgagaggatgctccagaaacatttgacaacagggacagtataagagcttccattccaagctttgaggacgcatatctaaaagtccctaaaatactaaacaaagagtgactttttcagcttcttggaattgtttggctgaagagattcattctcagatccggttcttgttccagcatctctatgttttctaaaattggttagcagaaaacaaaattgcctcaaaattgttaagtctcacgtaggctattattctacaacattttgttcacaactcaccacaaccttgtgtgcatatgaaactaaactcaaaccaattttgaatt

SEQ ID NO: 153477 - DNA, 250 bp, Arabidopsis thaliana columbia
  unsure (1)..(250): unsure at all n locations
aaaaaaatggcgaatacccaactcanatccgatgcaatcatgtgcatgatgaaggaacatctttccaccgacgccgggaaagaggtcacagagaagatcggtcttgtttatcagatcaacattgctccaaagaaattagggtttgaagaggttacttacatcgttgatctgaagaaaggcgaagtcaccaaagggaaatatgaaggaagggaaagtggatgctacgttctccttcaaggatgatgatttt

SEQ ID NO: 153478 - DNA, 541 bp, Arabidopsis thaliana columbia
  unsure (1)..(541): unsure at all n locations
ctactctctttaaaagaaattcgtaagtactatcaagatgtagaagatggcccaaaaggtggaagcacaaggagggaaaggagccaacctatgggacgatggatcgacacatgacgccgtgaccaagattcagctcgcagcaggcatagacggaattcaatatgttcagtttgattatgtcaagaacggacaacccgaacaagctcctcttcgtggtaccaaaggccgtgttctcccagctgatccgtttgtgattaaccatccagacgaacatctagtttctgtagaaggttggtatagccctgaaggtatcattcaaggaattaagttcatctgcaacacgaagacttctgatgtcattggatccgatgagggtactcacttcactctacaagttaaagacaagacgatcattggctttcatgggtctgccgggggcaatcttaattctcttggggcttactttgctccgttgactactacaactncgttgactcctgccaagcagctaaccgcatttggtagtgatgacggaactgta

SEQ ID NO: 153479 - DNA, 274 bp, Arabidopsis thaliana columbia
gttacactgagtttagaccaagtgagaaattcagtttccaggagaacaatcttaacttcaacatgttgaatttggatggtaaatttggtgaaagcatcatggggaagacttcgatgcagagcaatgtttataatatgaatactgttttccagaagaatgactttaagagtggaggcaacatgaaagttaacaagtataatggtaatgttgctgctaacaaggagatgagcaacaacaaacataacaacaactgcaatgataatgggaatattga

SEQ ID NO: 153480 - DNA, 558 bp, Arabidopsis thaliana columbia
gctgtttctgccgtcgatcaaccgttgaaaatcatcaccggagctgatgactttggagcgagcctcaaggacgcgatggtaacacacctccgctctctcggcatagacgtggaggataccggagtgtcctcttactactctgctggatctgaagtcggtcgccgcgtctccgcttcatcgtcttccgaagttcgcggcttagtctgctgcggcaccggcgtcggagttgcgatgttcgccaacaagttcccgggcgtctacgcagccacttgtctctccgtcgaagacgccgtcaacgctcgatcaataagcaattgcaatgtcctcgcattctccggcatcaaaacattcccggaaaccgccttggaaatcttcgacgcttggatcaaaactcctttcaaatcttcttgtcctgcgtccggatccgaaccatggagctcagttatctctttcttcctcgacaattctctctgcgagatgtctcaaaatggaaagtcaacccgccggcgatttaacaaccaagaagatcgatgaaacaaccgccgtttgcgtaatttg

SEQ ID NO: 153481 - DNA, 179 bp, Arabidopsis thaliana columbia
ctaaaaacacttatcgtttcgtctcttctctgatccattgttgaagatgtcgaagagaaaaactaaggagccaaaggttgagactgtgactcttggaccttctgttcgtgaaggagagcaagtttttggtgttgttcacatctttgcatcttttaatgtcactttcattcatgtgactg

SEQ ID NO: 153482 - DNA, 586 bp, Arabidopsis thaliana columbia
ctcaacatttcattctctctctctctctcaacaattagatctgtttcgataatcacgaggtttccctcacttcctttccattgctaaaccaggatttgcctcctgcatttggaaatggacgcttctatgattaccaattccaaatccattacttctccaccctctttagccttagggaagtcaggaggaggaggagttatcagaagttcactatgtaacttaatgatgccaagcaaagttaacttccctagacaaagaactcaaactctaaaggttagccagaagaaactcaagagagctactagtggtggtcttggtgttacatgcagtggtggtgataagattctcgtagcgaatcgaggtgaaattgcagttcgtgttatcagaactgctcatgaaatggggattccttgtgttgctgtgtattctactatagataaagatgctcttcatgttaaattagctgatgaagctgtttgtattggtgaagctcctagtaaccaggcgtatttggtgattccgaatgttctgtctgcggctattaaccgtggatgtacaatgcttcatcctggatatggttttcttt

SEQ ID NO: 153483 - DNA, 628 bp, Arabidopsis thaliana columbia
ccgaaaacctcaaaccatggccgagggactcgtattgaagggcattatgcgcgcccacaccgacattgtcacggccatcgctacgccgatcgacaattccgacatcatcgtcacagcgtcgcgtgacaaatccatcatcctctggaaactcacaaaggacgataagtcttacggtgttgctcagcgtaggctcacaggtcactctcacttcgtggaagatgttgttctctcatcggacggtcagtttgcactctccggaagctgggacggtgagctccgtctctgggatcttgccacgggagaaacaactcgtcgattcgttggtcatacgaaagatgtgctctctgttgcattctctactgataaccggcagatcgtgtctgcttctcgtgatcgtacgattaagctttggaacacacttggtgagtgtaagtataccatctctgaaggtgatggtcacaaggaatgggttagttgtgttaggtttagtcctaatactcttgtaccaactattgtatctgcttcttgggataaaactgtgaaaagttggaatctccagaactgtaagctgaggaactctcttgttggtcactctggttacctcaacactgttgctgtctcgcctgat

SEQ ID NO: 153484 - DNA, 469 bp, Arabidopsis thaliana columbia
cttctatctgtctctctctttctcttgcacgaagtatgagagagagataacaaaaccccccaaaaaaaaacatcacaaaaaaaggggacataacgatgaagaagaagaagaagacaaccttgtctgtttttttttcgaaaggcaaaatgtttgatgggctgttcaaacccaagttttatacgaaatgcaagtcgttggtcaagataacgaagacaagagtagacacggtgaagaggaagaaaaactcggtttgcaaatatctcaagaacgacattgtcgatcttttcaagaacagcctcgattacaatgcatatggcagggcagaagggcttatagaggagaaaaggaggctggcttgttatgagattttggagcaattctgcaactgcgttgcatccaatgtctctctattacagaaatccatccggtgccctgatgagtgccgcgaggccatctcctcccttgtata

SEQ ID NO: 153485 - DNA, 361 bp, Arabidopsis thaliana columbia
cttgaataaaatcagaattacaaacaaaaatggttttgcaaaagcttcctctcattgggctgcttttgctcctgaccatcgtcgcctctccagcaaatgcagatggacctgtttgcccgccgtcgaacaaactaagccgggcaagtttccctgaaggttttttatttggcacggctactgcggcataccaggtcgaaggtgcgattaatgaaacttgtcgtggaccagccttatgggacatctactgtagaagatatccagagaggtgcaataacgataacggcgatgtggccgttgatttctttcatcgctataaggaagatatccaactaatgaagaatctaaacacagacccctttag

SEQ ID NO: 153486 - DNA, 608 bp, Arabidopsis thaliana columbia
  unsure (1)..(608): unsure at all n locations
cggacgcgtgggctccgatcaaccatgagcaaaggtccaggactcttcaccgatatcggcaagaaagccaaagatctgttgacgagagactacaattccgatcagaagttcagtatctccacttacagtgcctccggcgtggcccttacgtctactgctctgaagaaaggaggagttcatgctgctgatgttgccacccaatacaagtacaagaatgctttgtttgatgttaaaatcgacactgattctagtgttttgacaacagtcacacttaccgagatcctcccatcaacaaaagccattgcctccttcaaagtccctgattataattccgccaagctcgaggtgcaatacttccacgaccacgcaacagttaccgctgctgcagctttgaaacaaaacccactaattgacataacagctactcttggttcgccagtcatctcatttggtgctgaagctggatatgacacaacctccaaaactttcaccaagtacaatgccgggatcagtgtgacaaaaccagatgcttgcctctccataatattgngagacaaaggagactcactcaaagcatcatacctttatcactttgatgaatttaagag

SEQ ID NO: 153487 - DNA, 577 bp, Arabidopsis thaliana columbia
cgtgaaatgtgcagctccggaaataaataatcactaaaataaccagatccgatctactgccccggtttctcgccggaatctccattctgtaaccggcgatcctctttctgctcagttatggaagacgtgaaagggaaggagattattgatgatgctcctattgacaacaaggtttcagatgaaatggagagtgaggaaaatgcgatcaagaaaaagtatggaggattgttgcctaagaagattcctttgatatctaaggaccatgaacgtgcgttttttgactcagctgattgggctttaggcaagcaaaaaggacagaagccgaaagggcctttggaagctctccgcccaaaactgcagccaaccccgcaacagcaaccaagagcaagacgaatggcttattctttaggcgaaactgaagacactgagattgataacaacgaagctccggatgaccaagcctgcgcatcagctgtggatagtaccaatttaaaggacgatggaggcgcaaaagacaacatcaaatcatgaacaacatatagagatcttttgggagcgcaaacaacaacatacaagt

SEQ ID NO: 153488 - DNA, 529 bp, Arabidopsis thaliana columbia
caagggttcagtcttcttccaaccgcaatgtgcagtatccacttcaccggcgttattaacttctatgcttgatgtcgcaaagcttagactaccctctttcgatactgattcggattcccttatatcagacaggcagtggacttatacaaggcccgatggtccttccactgaggcgaagtatttagaagctttagcctctgagacacttctcacaagcgatgaagcagtagttgtagcagcagcagctgaagcagtcgcccttgcaagagctgctgtcaaagttgccaaagatgcaacattatttaagaacagtaacaacacgaacctattaacttcgtcaacggccgacaaacgctccaagtgggaccagtttactgagaaggaacgtgctggcatattggggcatctagcggtttcggacaatggaattgtgagtgataaaatcactgcatctgcctgtaacaaagagtctattggtgaattagaattagaaaaacaagaagaaagttgagcttcttgaggaacaacc

SEQ ID NO: 153489 - DNA, 393 bp, Arabidopsis thaliana columbia
attttcttcaaaacgattcgggtcaaggttattgactttctcattcagtgaagcttgaatcatggcctcgagaattgctaaagatgtgactgaattgattgggaacactccattggtgtatttgaacaatgttgctgaaggatgtgttggtcgtgttgctgctaagcttgagatgatggaaccgtgctctagcgtcaaagacaggattggttttagcaattaaacttgcacagaggccagaaaacgctgggaagctatttgtggcgatattccctagttttggggagaggtatctatcaacggtacttttcgatgcgacaaggtaagaagcgggagccatgaccttttaggcttgaacatttttgatttttttttaaaagacgccaaaataaa

SEQ ID NO: 153490 - DNA, 498 bp, Arabidopsis thaliana columbia
taaagatgaacatgaagctcaggtgcaatttgctcttgagaggggcattcccgccatttctgcagttatgggcacgacaaggctacctttccctggcagagtttttgacatagttcattgtgctcgctgtagagtgccatggcacattgaaggtggtaaacttctcctggagcttaaccgtgtattgagacccggtgggttctttgtgtggtctgctactcctgtttatcagaagaagaccgaagatgttgaaatttggaaagctatgagtgaactcattaagaagatgtgttgggaactcgtatccattaacaaggacactatcaatggagtaggtgttgctacttacagaaagccaacttcaaatgagtgctacaaaaacagatcagaaccggtgcctccaatttgtgcagactctgatgatccaaatgcatcttggaaagtgccgctttaagcatgcatgcacaccgcgccagaagacaaaacgcaaccgggatc

SEQ ID NO: 153491 - DNA, 475 bp, Arabidopsis thaliana columbia
cttcgataaggattttactctccagagaaagaaaaaaaaaacctcctctgcttttgtgatcctttaaggaaaaagacgaaatggcaacggaatcgtacgaagccgccattaaaggactcaatgatcttctcagtacgaaagcggatctcggaaacgtcgccgccgcgaagatcaaagcgttgacggcggagctaaaggagcttgactcaagcaattcagacgcaattgaacgaatcaagaccggttttactcaattcaaaaccgagaaatatttgaagaatagtactttgttcaatcatcttgccaagactcagaccccaaagtttctggtgtttgcttgctctgattctcgagtttgtccatctcacatcttgaatttccaacctggtgaggcttttgttgtcagaaacatagccaatatggttccaccttttgaccagaagagacactctggagttggcgccgcccttgaata

SEQ ID NO: 153492 - DNA, 606 bp, Arabidopsis thaliana columbia
  unsure (1)..(606): unsure at all n locations
attaactaaagagccttttacttgcgccacactctcaccgcaatggccgcctcgacaatggctctctcctctcctgctttgaccggaaaggccgttaagctatccccggcggcctccgaagtatttggaaccggccgaatcaccatgcgcaaagcctccaagcccaccggtccatccggcagcccatggtacggatccgaccgagtcaagtacttgggtccattctccggtgagcctccgagctacctcactggagagttccccggtgattacgggtgggacactgccggtctatccgccgatcccgagaccttcgctaggaaccgtgagctagaagttatccacagcagatgggccatgctcggagccctaggctgcgttttccctgagctattggctaggaacggagtgaagttcggagaagcggtttggttcaaggctggttcacagatcttcagcgacggaggattggactacttgggcaacccgagcttggtccacgctcagagcatcttagccatttgggctacttaagttatcctcatgggagctgntgagggctacagagtccncggagatggtccattgggagaagcagaggacttg

SEQ ID NO: 153493 - DNA, 395 bp, Arabidopsis thaliana columbia
ccaaaacacacccacacgtacgcacacacacaatagacaatgtctcctttcaaaatattcttcttcacgactcttctcgtggcggcgttttcagtgtcggctgctgatttcaacactgacgtcaacgtagcttggggaaatggccgtgggaagatactcaacaacggccagcttcttactctctccttagacaaatcctctggttccggttttcaatccaaaacagagtatttgtttggaaagattgatatgcagattaagcttgttcctggtaactctgcaggaacagtcacaactttttacctaaaatccgaaggatccacttgggatgagattgattttgagttcttgggtaatatgagtggagatccttatactttacacactcatgttta

SEQ ID NO: 153494 - DNA, 610 bp, Arabidopsis thaliana columbia
ggctactagagtgttaactgcagcgacggccgtgacccaaaccacctcctgtttcctcgccaagcaagctttcactcttccggcgaagaaatcctgcggcggatttggtggtctctgcttcagcagaagagctttggtgttgaaatctaagagacctttctcctgcagtgccatttacaatcctcaggttaaggttcaagaagaaggtccggccgaatccctagattatcgagttttcttcctcgatggttctggaaagaaggtttctccatggcatgatataccattgaccttaggcgatggagttttcaactttatagttgaaatacctaaagagtcaaaagcaaaaatggaggttgctactgatgaagatttcactcctattaagcaggatactaagaaggggaagctcagatattatccgtataacattaactggaactatgggttgcttcctcaaacatgggaagatccatctcatgcaaattctgaagttgaaggatgttttggggataatgatccagttgatgttgttgagattggtgaaacacaaaggaagataggcgatattctaaagataaagcctttagcttgcttagctatgattgat

SEQ ID NO: 153495 - DNA, 593 bp, Arabidopsis thaliana columbia
gagctctcgtaagcctctgaattcgatttgacctgacaaccatacaaaaaattctcccgagaaaatctctctctcaacgaacgaatttcgaatcaccaagaagaaattctgagatttgtttgcgtttcatcggaataatggaagtgaaagtagcaacaacgacgtcgtttcattggtcaggacgacacacagcgattcctcaatgtccgtcattttcgcaaaccctaacttcatctaaacgccgtcgttctcgtggaatagccggtgatgtttccgtcggaggaggatctttgagattaaaaccttcgacgtttctcggaacacaatctgggaaacttcaccgatctaaatcatgtgagctttggcaattttctaattccaccacgaagaagattagaactgatgtgaagaagaaacataatcctttgagaagagtttgtagtgcgagctccggtttcttctcctccgacgaagcattctctgtgaaaatgcacgaattagcttcacaattcagaaacgcacgcgatgaagaagaagaagagaacaaacagaaatcagaagcagtagataacgataacgatagccataatcat

SEQ ID NO: 153496 - DNA, 214 bp, Arabidopsis thaliana columbia
gggggttccagtttaaagcaaaattatccggaaactgcataattgaaaaccataataaaaagtttaagagatttccaaaagggggggggggggaacgtcacaaaattaaagggaaaaaagaaaagggctcaaaccccatcaaagttttaagaaccaaaaaaactccattagagagtcgatcataaccaaagtctcattatttggaacccttttt

SEQ ID NO: 153497 - DNA, 626 bp, Arabidopsis thaliana columbia
accaactcactcacaaaatctgtagaatcatctttcaacaatggcttccactgctctctccagcgcaatcgtaagcacctctttcctccgccgtcaacagacaccaatcagcctcagatccctcccgtttgccaacacacaatctctcttcggcctcaaatcttccaccgctcgcggcggccgcgtcacggccatggctacctacaaggtcaagttcatcacacctgagggagaacaagaggtcgaatgcgaagaagatgtctacgtcctcgacgctgctgaggaagccggactcgacttgccctactcatgccgtgccggttcttgctcaagttgcgccgggaaagtcgtctctggttctattgaccagtcggaccagagcttcttagacgatgaacagatgagtgagggctatgtcttgacctgtgtggcttatccgacttctgatgtcgtcatcgaaacccacaaagaagaagccattatgtaaaattttaaagctttttgatgaatttcatcaaaagagaaattacctgatggttaagtcatctctcttgttacttccctaatgttgccctaatttggctcatcctttttataagatcaatcaataataacacatttcaatg

SEQ ID NO: 153498 - DNA, 567 bp, Arabidopsis thaliana columbia
gggaaactcaagggataatcgtaaatcaccatcaatgcttcattccgcgctacagtatctcttgtcgtgttcttggctttttcgatctttctaaactgaaaccactttccctttcaagttcgaatcaattcagatgattctggaattttgattaaaagacttaaatctttgagaattttgtcggctcttctcttctgggtttggttctgatcatagaaaaggatacgatggagtcttctttaattcatcatatcatcattgtgttgctgttactctggttcatctcttccttgaatcgatcccacgcctttttctatttcctcgctctcatttatctctacctggttcacgaacggtatgtgatgagattgaagagaaaattgcagttcgaagagaggaagcaagcaaatcagagaagggttctatctgattctgaatctgtgagatggatgaattatgctgtggagaagatatggccaatatgcatggaacagatagcgtctcaaaagattctgggtccaatcataccttggttcttggaaaaatatagaccttggacagggaaaa

SEQ ID NO: 153499 - DNA, 408 bp, Arabidopsis thaliana columbia
gaagaagaagacgatacagatccacaacgccatgggtttaggcatcttagcttctcgaacaattcgaccagcttcacgtcttcttcaatctcaaacctccaatttcttcctccgcacaatcgtctcaaaaccagagctccaatctcctgaatccgctgctgtctctgagcctgagccgccgacacagattctccctcctagaaaccctgtaggtggagcacgcgtccacttctcgaatcctgaagatgcgatcgaggtctttgtcgatggttacgcggtcaaagtccctaaaggattcactgttcttcaggcttgtgaggtcgctggagttgatatcccgaggttttgttatcattctcgtttatctattgctggaaattgcacgatgcgtcttgctgaggctgagaa

SEQ ID NO: 153500 - DNA, 355 bp, Arabidopsis thaliana columbia
taaagatgaacatgaagctcaggtgcaatttgttcttgagaggggcattcccgccatttctgcagttatgggcacgacacgggtacctttccctggcagagtttttgacatagttcattgtgctcgatgtagagtgccatggcacattgaaggtggtaaacttctcctggagcttaacacgtgcattgagacccgctgcgaagttagtgtcttctgttccttctgtttataacactcagacctcctatgttgagagatgcacggttattactggtctgacacagcacttttattcggcaaatcccgataccttctctagaaaccaaatgcttaaaattttccacaccaaaatggc

SEQ ID NO: 153501 - DNA, 285 bp, Arabidopsis thaliana columbia
gtccgatactgatgccggtggcgtagattgcggcggagttggaatcctcggtatcgcttgggcctttggtggtatgatcttcatcctcgtctactgcaccgccggtatctctggtggtcacattaacccagcggtgacatttgggctattcttggcacgtaaagtgtcgttacctagggccctattgtacataatcgctcagtgtttgggtgcgatttgtggagttggttttgtcacaccctttctaagctcatactacacccatttctccggtggagacaactc

SEQ ID NO: 153502 - DNA, 618 bp, Arabidopsis thaliana columbia
gcctctcgttgctagaggaatcaaacaatggtgtttgtgaagtccaccaagtcgaatgcttacttcaagaggtaccaagtgaagttcaggagaagaagagatggaaagactgactacagggcaaggatccgtcttatcaaccaagacaagaacaagtacaatactcctaagtatcgttttgttgtccggtttaccaacaaagacatagtggcacagattgtatctgcaagcattgctggtgacattgttaaagcttctgcttacgcacatgaactgcctcagtatggtctcactgttggtcttacaaactatgctgcagcttactgtactggccttcttttggctcgccgtgttttaaagatgttggaaatggatgacgagtatgagggaaacgttgaggccactggagaagacttttccgttgagccaactgattcaaggagacctttccgtgctcttcttgatgttggacttatcaggaccacaacaggaaaccgtgtgttcggtgctcttaagggtgctttggatggtggtcttgatatccctcacagtgacaagagatttgctgggttccacaaggagaacaagcaacttgatgctgaaatccacaagaactac

SEQ ID NO: 153503 - DNA, 406 bp, Arabidopsis thaliana columbia
cgaagttccgtgcgactctctgctcgagcaagatctcctaccgatacaatgattatctcagaggctaaccgcaaagaaatctgcaagtacctcttcaaagaaggagtttgctttgcgaagaaggatttcaatcttgctaagcatccgttgatcgatgtccccaacctacaagtgattaagcttatgcagagtttcaaatccaaggagtatgttagggagacatttgcctggatgcattactattggtttttgaccaatgaagggatcgagttcttgagaacttatcttaatcttccatctgatgttgttcctgctactttgaagaagtcagctaagcctggtggtcgtccatttggtggcccacctggtgatcgctcaagaggacctcgccatgaaggaggagacc

SEQ ID NO: 153504 - DNA, 507 bp, Arabidopsis thaliana columbia
gttgttccctgtgaccatggctactccactctcaatctcatcaaatcctctcacctcccgccattgttaccgtctccacttatcttctacttcattcaagggaaatgtaagtgttttgggggcaaacccaagtcagattctatctctgaaactcaaccaaacccttaaaacgagaaaccaacagcaatttgcgagaccccttgttgtggttagccaaacggcggctacgtcgtcggcagttgtagctccggagagattccgtttggataatcttggaccacagccaggttcgaggaagaagcagaagagaaaaggtagaggtatctctgcaggacaaggagcaagttgtggttttggtatgagaggtcagaaatcaagatcgggtcctgggattatgagaggctttgaaggtggtcaaactgctctttatcgtcatcttcccaaacttaaaggaatcactggaggtattcattcaggattacctaaatacttaccggttaatatcaa

SEQ ID NO: 153505 - DNA, 473 bp, Arabidopsis thaliana columbia
cggacgcgtgggtaagagtagagactctctcaatcccggcggcgaagatgaagtacaacccaagagtgacctcttctcgcagaaagaacaggaaggctcatttcacagcttcctccagcgagaggcgtgtgataatgagctctcctctctccaccgatcttcgtcagaagtacaatgtcagatccatgccgatccgtaaagacgacgaggttcagatcgttcgtggtacttacaagggacgtgaaggcaaagttgttcaggtttaccgtcgcaaatgggtgattcacatcgagagaatcacgagggagaaggtgaatggaacaaccgtgaacgttgggattcagccgtcgaaagttgtgataacgaagcttcgtcttgataaagataggaaatcgcttttggagaggaaggctaagggacgtgctgctgctgataaggagaagggtactaaagttacctctgaggatgttatt

SEQ ID NO: 153506 - DNA, 384 bp, Arabidopsis thaliana columbia
acggaacctgtcttcttgtcttgtccaaaatcggatttttaagagtacaagtgagtttattttgggggccgaaatctgtcctggaggatacagaagcaagatgaagttaatagatcgaagaatgaggttaacggagctgctcttacggtgctccatcagtgtcttcgctctcctcgcgcttattctagttgtgacagacactgaggtcaagcttatcttcactatcaagaagacggccaagtacacggacatgaaggcggttgtgttcttggtggtggctaatgggatagctgcggtttattctttgttgcaatcagttcgttgcgtggtgggtacgatgaaaggaaaggttttgttaaataaccctcttcctttacccttttt

SEQ ID NO: 153507 - DNA, 550 bp, Arabidopsis thaliana columbia
atcgaagaaggagagaagaacagagaaaaagagttgaatcaaatatggctgggagagctacgatccctgctcgcaactctgccctcatcgcaatgatcgccgatgaggacactgttgttggatttttgatggctggagttggtaatgttgacataaggaggaagacaaattacctcatcgtggattcaaagacaactgtgagacaaattgaggatgctttcaaggaattctcagcaagggatgatatcgctatcattcttttaagccaatatatcgccaatatgatccggttcttggtggatagctacaacaagccagttcctgcaatcttggagatcccttccaaggaccatccctatgatcctgctcatgattcacttctctctcgtgtcaagtacctcttttctgcataatctgtgtcacagcgttaaacatatgcattttgcaagctctcgaagcctatatcatttgtttgattttaaaattcttacctgtctccttgcaaacccgaaacatctacaataatatataacctctaatttttatttaa

SEQ ID NO: 153508 - DNA, 386 bp, Arabidopsis thaliana columbia
ggaaacttgtaccttaccagattgtgaacaaggatggtaagccatacattcaagtcaagatcaaggatggtgagactaaggttttcagtcctgaggagatcagtgccatgattctgactaagatgaaggagacagccgaagcctaccttggaaagaaaatcaaggacgctgttgtcactgttccagcttacttcaatgatgctcaaaggcaagctaccaaggatgccggtgttattgctgggctcaatgttgctagaatcatcaacgaacctactgctgctgctattgcctacggtcttgataagaagggtggtgagaagaacatccttgtatttgaccttggtggtggtacttttgatgtcagcgtcttgaccatcgataacgga

SEQ ID NO: 153509 - DNA, 356 bp, Arabidopsis thaliana columbia
gcgtcacactgaccctggaaccattaccttgcttctacaagaccaagtcggtggattacaagccacacgtgacaatggcaagacatggattacggttcagcctgttgaaggagcgtttgtcgtcaatctcggcgaccacggccattttttgagcaatgggaggttcaagaatgctgatcatcaggccgtggtgaactctaactcgagccgattatccatagccacgttccagaaccccgcgccggatgccacagtgtatccactgaaagttagagaaggaccacaaggcggtattgggggagaccatcacgtttgccgtggtggattctttacagatcacgagacgatgttgaggt

SEQ ID NO: 153510 - DNA, 442 bp, Arabidopsis thaliana columbia
cacaaacaaaccatttacataaaacaaaaacaatttaatacttcttagtgtgtaaatgtgtgattctttcatcaataacaaaatgacatcgatattattcatgctcgtgagtctaacaattctttccatgaatctaaaagtctctcaagccacatctcgtgtcaccttccacgagccgatcgttgctgaacaccatcagcaatggatgactcggttctctcgagtttacagtgaccagctcgagaaacaaatgagattcgatgtgttcaaaaaaaacttgaagttcattgagaaatttaataagaaaggggatagaacctacaagcttggtgtcaacaagtttgcggattggaccacagaggaattcattgccactcacaccaacctcaaagggattaacagaattccatcctctgaatttatcaatgaaataataccttct

SEQ ID NO: 153511 - DNA, 144 bp, Arabidopsis thaliana columbia
cccacgcgtccggtcggtggatccacacgtatttctgctgttcaggaactcgtgaggaaggtgactgggaaagaacctaatgttacagtaaatcctgacgaggttgtagcgttaggtgctgcagttcaggctgttgttcttgct

SEQ ID NO: 153512 - DNA, 287 bp, Arabidopsis thaliana columbia
gcgacaactaaacacagcaaaagtgcttaaattgataggataatccaaaatattcgtttgttgaatatttttgcatcagtttggtgtgcattgggctcttaaaccaattctatcactcagaattattgttttgtaataatcgtgagaagaaactttagggtttcactgtttcatagttttgattgctgaattataaaagatgcaccattctccacacatgattcccatacctccatcctttatttccctccaccaataatattaccacccacccaatccttcaattt

SEQ ID NO: 153513 - DNA, 458 bp, Arabidopsis thaliana columbia
ggggttgacactttggctcaccagaaatggtccggtgctaattactatgatcgttatcttaagaccgtccaaggtggaatctcctccactgcagccatgggaaaaggtgtcactgaagaacagttcaaggagagttggacaaggccgggagctgatggaatgggtgaagggactagccttgtggtcgccaagtcaagaatgtaagacatatgttcattacggcggtgcggccaaagcggtgcggcatcttcgtaggaaagcttggaaaccacactatcttcaatatatatctttggacacccgagtaaaagaaaaaaaaagacagaaacagataataaatgtatctttgttattgtatttctcttcttcaacgtaataattgggttaaaaggtttggggcaatattttatggagtttacttctttatatagatatttcaaatttaagattattaacct

SEQ ID NO: 153514 - DNA, 277 bp, Arabidopsis thaliana columbia
ctcctctccttctctctattttgccggaatacatatgatcgagtgaaacggcggacaaagctgtcgtgttgagtactaattcgccgtcgtttttctcagtgaaggagtggtgagagatgtcgagtctcgaagatatcaagaacgagactgttgatctggaaaaaattccgattgaggaaggtttccagcagctaaaatgttcaagggaaggattgacaactcaggaaggggaggacaggattcagatctttacccccaacaagcttctaacagaaaa

SEQ ID NO: 153515 - DNA, 455 bp, Arabidopsis thaliana columbia
aaaatctatagagagctcactcactagcaatggcgtctcttctcggaagatctccttcttcaatcttgacctgccctcgtatttcttctccttcctcaacatcttcaatgtcccatctctgcttcggaccagagaaactttctggaagaatccaattcaatccaaagaagaacagatctcgttaccatgtctctgttatgaatgtcgctacagagatcaactctgttgaacaagcaaagaagattgattcaaaggaaagtgcaagacctgtttatccgtttgctgctatagttggacaagatgagatgaagctatgccttttgttaaatgtgattgacccgaagataggtggtgtgatgataatgggagatagaggaactggtaaatcaacaactcgtagaactttagttgatttgcttcctgagatcactgttgtttctggtgatccgtataac

SEQ ID NO: 153516 - DNA, 414 bp, Arabidopsis thaliana columbia
ttgacacaaatgagaacaagctcttattacatataatattcgaactacaaatacaccccttaagcaaatctaatgaaagaaggggtaattaaacaataacaaaacaaaatacacgaaactgatattaaaggtgattatctaatgacgaatcacaatcattctcttcaggttttcttgtttggcccgtatgcatacttaatcagagactccttgatagagagtagctcagggaactctttcttgagcttggaagcatccatctcgttgttgcttcttggagccacaatgactttagcttgctcctctaatgtgaagtttgcccatttgaattcagggttgatgtaatctctgtacatctgtaggatctctttgtggcttaccacacctggatttagtaagttccaaattcctttt

SEQ ID NO: 153517 - DNA, 570 bp, Arabidopsis thaliana columbia
gatctccggcgacaatcattgagatctgaatatcttacgttaaggagagaaagatgtacggattcgaggcgcttaccttcaacatccatggcggatatttggaggcgatcgttagaggccaccgtgctgggcttctcaccaccgccgattacaataatctatgtcagtgtgagaacctagacgatatcaagatgcatctctctgccaccaaatacggctcttatctccaaaacgaaccgtcacctctgcataccaccaccattgtggagaagtgtactcttaagcttgttgatgactacaagcatatgctttgccaagctactgagccaatgtctacctttttagagtacatcagatatggccacatgattgacaatgtcgtgctcattgttactggaaccctgcatgagagagatgttcaagagttgattgagaaatgtcaccctttaggcatgtttgacagtattgctacactagcagttgctcagaacatgcgggaactctaccggttggtgcttgtggatactcctttggctccatacttttctgaatgcttaacgtcagaggatc

SEQ ID NO: 153518 - DNA, 454 bp, Arabidopsis thaliana columbia
caagaaaccaaaagagtaaaacaaacacagagaagcttcttcttaaacgatgccgtactataccagagatgacaacgacgtcgacgatttcgatgagtttgatccaacgccgtacagtggtggttacgacatcacggtgatctacggccgtccgattccaccttccgatgagacttgttatcctctctcatctggtgtcgatgatgatttcgaatacgagagacctgaatttactcagatccatgagccttctgcttacggtgatgaagctcttaacacagagtacagtagctattctcgacccaagccacgacccgcatttcgacccgattcaggtggtggtggtcatgttcaaggtgaaagaccaaatcctggttatggatctgaatccggttatgggaggaaaccggaatctgagtaccgatctggctatggtggacaaaccgaggtggag

SEQ ID NO: 153519 - DNA, 395 bp, Arabidopsis thaliana columbia
gaaataaaagagtgtgatgagatcctcaagaactatgggattaatgaattgcatggtttatgttgcggtcctaagtgctattgcggctacagtgacattatacccttactcatctcctcataccccagcttacgattctcccagctatgaacacaaaggcccaaagtacgcaccacattcgaaaccatatgtttacagtcctccaccaccaccatactatactccatcaccaaaggtaaactataaatctccaccaccaccatacgtctataatattccaccttcaccgtactactcttccttttcaaagttttactacaagtccccacctccaccatactgttacaactcgccaccaccaccatactactctccttgtcctaaaatatactaca

SEQ ID NO: 153520 - DNA, 382 bp, Arabidopsis thaliana columbia
aaaaaaaaaaaaacacaaaaagtttcaatggccgtctccacaatggctctctcctcccctgccttcgccggaaaggctgtgaacctttcccccgcggcatctgaagtcctcggaagcggccgtgtgacaatgaggaagactgttgccaagccaaagggtccatcaggcagcccatggtacggatccgaccgagtcaagtacttgggtccattctctggcgagtcaccgagctaccttaccggagagttccccggagactacggatgggacaccgctggactttcagctgatcccgagacattcgcaaggaaccgtgagctagaagttatccacagcaggtgggctatgctcggagccctaagctgcgtcttccctgaacttt

SEQ ID NO: 153521 - DNA, 434 bp, Arabidopsis thaliana columbia
gtctctgcaagtctcatcagaagaggaagagaattatatggcgagttgcttcagctacgtgtcttctcgtaacaaatgttaccaatacagcttctctcgtgctggtctccgatcatctacctccgatcttggcgacggcaccgtcttccactgttggatcccacttactcacatccacaccaagcccacgctcctcctccttcacgggatcggagctaacgctatgtggcagtgggaccgcttcatcgaccgttttatcccccgcttcaacgtctacgtaccggacctcatcttctttggcgactcctacaccactcgtcccgaccgctcagagtctttccaggcgacttgtgtcatgaaagcgatggatgcttacggtgttaggaccatgaccgtcgctggcctcagctacggtggttttgtggcctactgct

SEQ ID NO: 153522 - DNA, 368 bp, Arabidopsis thaliana columbia
attcctagtaatcttggaaatctgacaaacttagtgagtttggatctttacttaaacaggtgtgtccggtcctattccggagtgcattgggaaagctttcaaagctgagatttctccggcttaacaacaacagtctcactgggtcaattcctatgtcactgaccaatattactacccttcaagtgttagatctatcaaataacagactctctggttcagttcctgacaatggctccttctcactcttcacacccatcagttttgctaataacttagacctatgtggacctgttacaagtcacccatgttctgtatctcccccattttctcctccaccaccttttattcaacctcccccaatttccacc

SEQ ID NO: 153523 - DNA, 546 bp, Arabidopsis thaliana columbia
gtcttcttcgttctctagttttttcctcagtctctgttcttagatcccttgtagtttccaaatcttccgataaaaatgtcgggtaaaggagaaggaccagctatcggtatcgatcttggtaccacttactcttgcgtcggagtatggcaacacgaccgtgttgagatcattgctaatgatcaaggaaacagaaccacgccatcttacgttgctttcaccgactccgagaggttgatcggtgacgcagctaagaatcaggtcgccatgaaccccgttaacaccgttttcgacgctaagaggttgatcggtcgtcgtttctctgacagctctgttcagagtgacatgaaattgtggccattcaagattcaagccggacctgccgataagccaatgatctacgtccaatacaagggtgaagagaaagagttcccacctgaagagatttcttccatggttcttattaaaaatcataaaattgctaaagcttacctttatataacaatcaaaaactcccttttttaccagtccaacttacttcaacaactc

SEQ ID NO: 153524 - DNA, 578 bp, Arabidopsis thaliana columbia
  unsure (1)..(578): unsure at all n locations
ctttcgattctctcaaaaaatcccataactttcccaacgaaaaatgttccgatcaatgattgttcgatctgcttccccagtgaagcagggtcttctccgcagaggattcgcctctgaatctgttcccgatcgcaaagtcgtcatcctcggtgccgccggtgggatcggccagccactttctcttctcatgaagcttaaccctctcgtctcttctctctccctctatgatatcgccaacactcccggcgttgctgctgacgtcggtcacatcaacacccgatctcaggtttctgggtacatgggtgatgatgatttggggaaagctctagaaggcgctgacctcgtcattattccagctggtgtcccaaggaagcctggcatgacccgtgatgatcttttcaacatcaatgctggcattgtcaagaacctcagcatcgccatcgccaagtattgcccacaagcacttgtcaacatgatcagcaaccctgtgaactccactgttccaatngcagctgagatttttaagaaggctggtacctatgatgagaagaaattattccgtgtcaccactcttgatg

SEQ ID NO: 153525 - DNA, 533 bp, Arabidopsis thaliana columbia
agagatcaaaccaaagagacacagagagagtatccaccgatggaatccgcagcaacggctgttgtacctccggcagccgccgccaccaccgccaccgccaccgatgataatctccaatcaagcgactcatcatctcccgccgacgccgttaaccgattgatccacgccttttcgcagcgacaacaacatcttctcgacaaaacggttcctcacgttctctatcgatggatcgcatgtctctgtgttgtattgatctacatcgttcgtgtttactttgtggaaggcttctacatcatcacttacgccatcggcatctaccttttgaatctcatcattgcttttctatctcctcaagaagatcccgaagcttctctcacttccggtggttctcttcctactcggagatccgatgagtatcgtcctttcgttcgccgtctccctgagttcaaattctggttatcgatcataacggctttcatcatcggattatgatgaccttcttccaggtcgttgatttacctatattctggcca

SEQ ID NO: 153526 - DNA, 490 bp, Arabidopsis thaliana columbia
agcagacgaaaaaaatggcgactctgtcttcctatctgttatcttctcctcctctatgcaaatcccgattctcggcaacaagtctcgtctcaggaattgatttcatctctttctctcctcgaacaactctctcctcgtcatccactgtcttgccggcgattctttctctttccgttaaacataatcgccggagaaactcgcttcaagtgaaatcagtagctagcccaacggagacgatttcagaattcgatgagatggtctccggcacgaaacgaaagtattacatgctcggtgggaaaggaggagtgggcaaaactagttgtgctgcttctttagctgtgagattcgccaacaatggacacccaactctggttgtatctacagatccagcacattccttgagcgattcttttgctcaggacttgactggaggaatgcttgtccctgcaaaaggaccccaagctcctttatttgctctagaaataaaccc

SEQ ID NO: 153527 - DNA, 466 bp, Arabidopsis thaliana columbia
cttttaagcccaacaaaaatgggttatgctaaatcagccatgctgatcttcttactagcattggtcatcgcatcttgtgccacggccatggacatgtccgttgtttcctccaacgataaccaccacgtgaccgccggtcccggccgccgtcagggtattttcgacgctgaagccaccttgatgttcgagtcatggatggtcaaacatgggaaagtgtacgactccgttgccgagaaggaacggcgtttaactatttttgaggacaacctccgttttatcactaaccggaacgctgagaatctcagttaccggcttggtttgaatcggtttgcggatttatctctccatgaataccgagaaatttgccatggggctgatccaagacctcctaggaaccacgtcttcatgactagcagcaaccgatacaagactagtgatggtgatgttcttcctaagtccactgact

SEQ ID NO: 153528 - DNA, 596 bp, Arabidopsis thaliana columbia
  unsure (1)..(596): unsure at all n locations
agaaaacaagtagaaactttaaaacgagagagagagaaagaaatggcgacatcgggaacgtacgtgacggaggttccgttgaaaggatcggcggagaaacactacaagagctggaagagcgagaaccatgtcttcgctgacgccattggccaccacatccaaaatgtcgttgttcacgaaggcgaacatgactctcacgggtctatcaggagttgggactacacatatgatggaaagaaggagatgttcaaagagaagagagagatagatgatgagaataaaacattgacgaaaagaggactggatggtcacgtgatggagcatctcaaagtatttgatatcatctacgaatttattcccaaatctgaggatagctgcgtctgcaaaatcactatgatatgggagaagcgcaacgatgactttcccgaaccaagcggctacatgaaattcgtcaagcaaatggttgttgacattgaaggccacgtcaacaaagcttaaccacaaccatcaccgtcatcactatctcgatcgatattgtattattatggngtcttttcgataatcaatataataaaaggggtcttgtggagtttcta

SEQ ID NO: 153529 - DNA, 251 bp, Arabidopsis thaliana columbia
accggttcaggtgctcagaaattggaagcacatggcaacagtacaggaggtacatcatgggacgatggatccgattacgatggcgtgaccaagatatacgcaagctacggtggggaaggtattcaatacgtcaagttcgactatgtgaaaggtggagtaacaaaacaaggagttctacacggtaaacaacaaagtatacaaaatccaaaaaagtttgtgattaaccatccaaataaatatcttttttctat

SEQ ID NO: 153530 - DNA, 438 bp, Arabidopsis thaliana columbia
aagaaacaagaaaacgaaaggaaaaaatacagaaatgggtggtttgaagtttcatgtacttatgtatccatggttcgcaacaggccatatgaccccgttcctttttcttgccaacaaattggctgagaaaggtcatacggtcacttttttgattcccaagaaagctctgaaacagttggaaaatctcaatctgtttccacacaacattgtctttcgctctgtcaccgtccctcatgtggatggtctccccgttggcacagagacagtctctgagatccccgtgacatcagctgatctcttgatgtctgctatggatctcacacgtgatcaagttgaaggtgtggtccgagccgtggaaccggacctgatcttctttgacttcgctcattggattccagaggtagctagaaactttgaccttaagactgtaaagtacgt

SEQ ID NO: 153531 - DNA, 316 bp, Arabidopsis thaliana columbia
gtagttatcgtcgcaggaagaacattcgccggttttttctcagcggaggagaatccatttactccaaaagcatctctagttcggtactggaacaaagagattcgtggccaatctcccagatcggagtttttaatctcaaaagcttcaccactcaacgccgtagactcagcaactttctcaaaactcgccgccgcgaactcgctgtcgactcgttttcccgatttctgctcccgacgagcatcttttctgttttactgacttaggagcgagtctagagaaacacgacaaacgacttttagatttaggtttattacca

SEQ ID NO: 153532 - DNA, 417 bp, Arabidopsis thaliana columbia
tgcagatcttcgtgaaaaccttgaccggcaagaccatcactctcgaggtcgagagcagcgacaccatcgacaatgtcaaggccaagatccaagacaaagaaggaatccctccggatcagcagagattgatcttcgccggaaagcagctcgaagatggccgtactttggctgactacaacatccagaaagaatctacacttcatcttgtgttgaggcttagaggaggtattattgagccttccttgatgatgcttgctcgtaagtacaatcaggataagatgatttgccgcaagtgctatgctcgtcttcacccaagagctgtcaactgcaggaagaagaagtgtggtcacagcaaccagttgaggcctaacaagaagatcaagtatagagactcttatcaagaatcccatctcttac

SEQ ID NO: 153533 - DNA, 303 bp, Arabidopsis thaliana columbia
tgatgatgaaaaggtgaaagagctcatgaggctttacatcaccatccacagtgatcatgaaggtggaaatgttagtgctcacactggtcacctggttggtagtgcactttcagacccatatctgtcatttgcagctgcattaaatggtttagctgggccactccatggtttggctaatcaggaagttttgctttggatcaaatcagtcgtagaggaatgtggagaagatatatcaaaagaacagttgaaagaatatgtttgtaaaacattaaacagttgcaaggttattccctgatatcgtca

SEQ ID NO: 153534 - DNA, 340 bp, Arabidopsis thaliana columbia
cttcactctctctaatcaaaaagcttttaacctcagccgttaaatctttctccgatcatgccgaccagaaacatcgccattggtggagtccaagaagaggtctatcaccccaacgcacttagggcggcgctcgctgagtttatctcgactttgatcttcgtcttcgccggctcaggctccggaattgctttcaacaagatcactgacaatggagcaaccactccttccggcctcgtcaccgctgccttagctcatgctttcaatctctttatcactagctctaataacactaacatttccacaaccactttaaccctccctttacccttcatattttacc

SEQ ID NO: 153535 - DNA, 288 bp, Arabidopsis thaliana columbia
aaaaaaaatattcttgtttcaaacttcaatggcgttctcgagttccatcttctctgttactcagttttcttcttcgttagcttcgcgtccttcttctgcaatcagtaggcagactcgttttcccgctcaaattgcttctccagatctatcgcctgctttgttcgatgatcgccggaagttcgtcggaggtgtaatgtctctcttgacgaagagtattaaaaaccgcgtatatgcttcgattaacagcattgattcgaccgctactccatcatatcctaaatcggaaga

SEQ ID NO: 153536 - DNA, 457 bp, Arabidopsis thaliana columbia
ggggttggcttatccgcatcagcctcattgcttagcttccggagacgttcttgtgtcttgtcttggagacgaagatggaaacgcagaaggcagtgggtttctcttacttgattccgagtttaacatcaaaggaaggtgggagaaggatggaaacagtcctttgtatgggtatgatttctggtaccaacctcggcataagacgatgatcagtacctcatggggagccccggccgcgtttaccaaaggatttgacctcaaagacgtctctgatggcttatatggaaagcatctacatgtctatagctggccccaaggagaattgaaacagattcttgaccttggtgatacccgacttttacccttaaaggtaaaattcttgcatgaaccggattaaactacagaatttacatagtgtgcgttttcgaatactgcaataaaatttttcaagaaccattat

SEQ ID NO: 153537 - DNA, 458 bp, Arabidopsis thaliana columbia
gctcctaacaaagcaatatcatttccaatttataaaagttaaagccatggctgcatctttctctgtcccctctatgataatggaagaagaagggagattcgaagcggaggttgcggaagtgcagacttggtggagctcagagaggttcaagctaacaaggcgcccttacactgcccgtgacgtggtggctctacgtggccatctcaagcaaggctatgcttcgaacgagatggctaagaagctgtggagaacgctcaaaagccatcaagccaacggtacggcctctcgcaccttcggagcgttggaccctgttcaggtgaccatgatggctaaacatttggacaccatctatgtctctggttggcagtgctcatccactcacacatccactaatgagcctggtcctgatcttgctgattatccataccacacccatcctaacaaggttgaacacctct

SEQ ID NO: 153538 - DNA, 373 bp, Arabidopsis thaliana columbia
gcagcgaaagctcaaccaacaagacgatgattatctcagagaacaatcgcagagagatctgcaaataccttttcaaagagggagtatgctttgctaagaaggatttcaatctcccaaagcatccgttgattgatgtaccaaacctgcaagtgattaagctcatgcagagtttcaagtccaaggagtacgttagggagacatttgcgtggatgcattattattggtttctgactaatgaaggaattgagttcttgagaacttatcttaaccttccttccgatgttgtccctgctactttgaagaagtctgctaagcccggtggtcatcccttaactaacccacctaatgatctccgaagatgaccacctcgctc

SEQ ID NO: 153539 - DNA, 431 bp, Arabidopsis thaliana columbia
  unsure (1)..(431): unsure at all n locations
gccgtcggcacaagaagaagaagaagaagaatgtctcacaggaagtttgagcacccaagacatggttctcttggtttccttccaaggaagagagctaaccgtcacagaggaaaggtgaaggcgttccctaaggatgaccaaaccaagccttgcaagttcacagctttcatgggttacaaagctggtatgactcacattgtcagagaagtggagaaacctggatccaagcttcacaagaaggagacatgtgaggctgttaccatcattgagacacctgctatggtggttgttggagttgntgcctatgtgaagactcctacaggttttaggccttttaacactatcttgtcacaccatttcactaataaagtcaaagataataatctacctataactactccttaatttgtacaaataaaaatcttttccta

SEQ ID NO: 153540 - DNA, 574 bp, Arabidopsis thaliana columbia
cgcaatcttcgctcttctctttgctctctctctctcaacgcggttcagatccgagtttgggagattcaagctccctgaaaaaagccctttactctcgcttaccaactttgctccagcatggcaggatctgcaccagaaggcacacagtttgatgcacgtcagtttgaccagaaactcaatgaagtacttgagggacaagatgagttcttcacatcctatgatgatgttcatgagagctttgatgccatgggtcttcaagagaaccttctcaggggtatttatgcttatggttttgagaagccttctgctattcagcaaagaggaatcgtccccttctgtaagggtcttgatgtgattcaacaggctcagtctggtactgggaaaacagcaactttctgctctggtgtcttgcagcagctggacttctcccttatccagtgtcaggctttggttctagctccaactagagagcttgctcagcaaattgagaaggtcatgagggcccttggtgattaccttggtgtcaaggttcacgcctgtgttggtggaaccagtgtccgtgaggatcagcgca

SEQ ID NO: 153541 - DNA, 309 bp, Arabidopsis thaliana columbia
cttcctctgtttcttcgccattctctcagcttttctccttcttcttcgtctttgtcaggtaaagagatacgatgagcatatcccacatacctctctcctcttctcatctttttagtttctcgaaagtttgcatgcgccgactttgttataggttataaactttagttttaagcctattttcgtatgtttatggttgttgtaatagttgagaattcagagtatgtcaagtgaaacttaaaaagaattctatatgtatgtgtgtatgcgttaaagagtgaatggagctgtggacagaatctagagccttaa

SEQ ID NO: 153542 - DNA, 331 bp, Arabidopsis thaliana columbia
acagttctctctttttgtcgacagtcttcttcttcttcttcttcttcgattggatctggaactgaactcaaattgggaagaattttgacatggaggaggaccggtgttcgatcaaggatgatgcaactcaattgataggtaacaccccaatggtatatctgaacaacattgtggatggttgtgtagctcgtattgcaactaagcttgaaatgatggagccttgctctagtgtcaaggagcgaattgcttatggtatgattaaagatgcataatacaaggtattgattactcctgtgaagaacacactaattgaggctaccttctataacac

SEQ ID NO: 153543 - DNA, 226 bp, Arabidopsis thaliana columbia
ggatttgatcacgaaacgttttacatggatggaagcttatcttctcttatcaacccggatcagtaccgtcgtgactgctttgcgcagttcaaagatatgaaagcaatggatcctatggagttgctagggatcttaccaacttgccattttggtaaattctgctcgaagaagtacctttcgatcattcaccaaaaaatggaagagtcgttgttcggcgactcggaac

SEQ ID NO: 153544 - DNA, 431 bp, Arabidopsis thaliana columbia
gtcatcttgtaaaacttgggacgatgggtgtgtatggaactccaaatattgacatcgaggaaggttatataaccataacccacaacggtagaactgacactttgccataccccaagcaagctagctccttttatcatcttagcaaagttcatgattcgcacaacattgcttttacttgcaaggcttggggtattagagccactgatctcaaccaaggagttgtttatggagtgaagactgatgagacagagatgcatgaggaactccgtaaccgactggattacgatgctgtgtttggtacagcacttaaccggttctgtgtgcaagctgctgttggtcacccacttacagtttatggtaaaggtggtcagaccagaggctacctcaatatataaaacacagttcaatgtgttaagatcactataccaaac

SEQ ID NO: 153545 - DNA, 452 bp, Arabidopsis thaliana columbia
cagatttcgattcccgaggctcgagagaaaaccgtaaatctcttctccgttcactcaatcaaccaaagatgcgtgagattcttcacatccagggtggtcaatgcggtaaccagatcggagccaagttctgggaagtggtttgcgccgagcacggcatcgatccaaccggaaggtacaccggagactcagatctgcaacttgagcgcatcaacgtttactacaatgaagcgagttgcggtagattcgttcctcgtgcagtgctcatggatttggagcctgggactatggatagtctcagatctggaccgtacggtcagacctttcgacctgataacttcgtctttggtcaatccggtgcgggtaacaactgggccaagggacactacactgaatgagctgaactaatcgattccgttctcgatgctattcctaaggaaactcataactgttac

SEQ ID NO: 153546 - DNA, 572 bp, Arabidopsis thaliana columbia
atctactctctttaaaagaaattcgtaagtactatcaagaagcagaagatggcccaaaaggtggaagcacaaggagggaaaggagccaacctatgggacgatggatcgacacatgacgccgtgaccaagattcagctcgcagcaggcatagacggaattcaatatgttcagtttgattatgtcaagaacggacaacccgaacaagctcctcttcgtggtaccaaaggccgtgttctcccagctgatccgtttgtgattaaccatccagacgaacatctagtttctgtagaaggttggtatagccctgaaggtatcattcaaggaattaagttcatctccaacaagaagacttctgatgtcattggatccgatgagggtactcacttcactctacaagttaaagacaagaagatcattggctttcatgggtctgccgggggcaatcttaattctcttggggcttactttgctccgttgactactacaactccgttgactcctgccaagcagctaacggcatttggtagtgatgacggaactgtatgggatgatggtgcttacgttggggttaa

SEQ ID NO: 153547 - DNA, 516 bp, Arabidopsis thaliana columbia
ggaaacaatgctattatcaggttgattgctggtactatattcatgcatgaggaagactataatgaggctctgaagcacactcattctggaggaaccatggatctgcatgctttgaatgtccagatattcataaagatgcacagatcagattttgcggagaaacaactgagagtgatgcaacagattgatgaagaccacacactcactcagctcgcgagcgcgtggttgaatctggcagtaggtggttccaagatacaggaagcttatctaatcttccaggatttctctgagaagtacccaatgacaagcttgatcttgaacggcaaagcagtttgctgcatgcatatgggtaattttgaagaagctgagactctactacttgaagcactcaacaaggatgctaaagacccagaaactcttgcaaacctcgttgtatgcagtcttcacgtcgggaaatcatcttctcgctacctaaaccagctgaaactttcacatccagaacacctccttgtgaag

SEQ ID NO: 153548 - DNA, 538 bp, Arabidopsis thaliana columbia
cgctcaaaacgctatactctccggttgttcagctggagcattggctgcgattctacattgcgaccagttcaagtccactctccctaaaacggctaaggtcaaatgtgtttctgacgctggttacttcatccacggtaaggatatcactggaggatcttacatccaatcctactacgccaaagtcgtagcgacccacggatctgcaaagagtctacctgcttcttgcacctcaagtatgaagcctgatttgtgtttcttccctcaatacgttgctaagaccttacaaacaccgcttttcgtcatcaatgccgccttcgattcttggcagatcaagaatgtattggcaccaacctctgttgataaaagcaaagcatggaagacttgtaagcttgatcttaagaagtgtacggccgctcagcttcaaaccgttcaaggatatagagaccaagtgttggctgcgttggcgcctgttcgatccgcgacgacgaacggattgttcttggactcgtgccatgctcattgccaaggtggaagcgct

SEQ ID NO: 153549 - DNA, 457 bp, Arabidopsis thaliana columbia
aaagggatgcagttctggcccaagaagaatctagtggctgggttcatacatatttataggtttgtggaggatgggaaatctcttgagcttcttcataagacgcaagtagaaggtgttcctcttgctctgtgccagttccaaggaagactgctggcagggatcggacctgtcctcagattgtatgatttggggaaaaagagactgcttaggaaatgtgaaaacaagctctttccaaacaccattatctctatccaaacttaccgtgaccgtatatacgttggtgacattcaggagtctttccattactgcaagtacaggcgcgacgagaatcagctgtacatatttgcggatgactgcgtgccgaggtggctgacagcatcgcaccatgtggatttcgataccatggcaagtgcagataagttttgggaatgtgtattttgtgcacctgcctcaaaat

SEQ ID NO: 153550 - DNA, 532 bp, Arabidopsis thaliana columbia
tttgggattttttttttacagagaagcgaagcagcgtcgccgttcaagacgaggtacagagaaaacgaagaagaagaagatatgacgattaaaccggcggttcgtatttccgacgggaatctaatcatcaaaaaccggacgattctaaccggtgtaccagataatgtcatcacgacgtcagcatcggaagctggaccggtagaaggagtcttcgtcggagctgtatttaacaaggaagagagtaaacacatcgtaccgatcggtacgcttcgcaattcccggtttatgtcttgtttccggtttaagctctggtggatggcccagagaatgggagaaatgggccgagatattccctacgagacgcagttcttattggtcgagagcaacgatgggtcccaccttgagtctgacggagctaacggcgtcgagtgtaaccagaaagtttacaccgttttcttgccgttaatcgaaggatctttccgttcgtgtcttcaaggaaacgttaacgatgaggttgagctctgtttggaga

SEQ ID NO: 153551 - DNA, 567 bp, Arabidopsis thaliana columbia
caacactcttggtggaggagctaacaccgtagctgacggttacagcaaaggaactgctctcggagctgagattattggaactttcgtccttgtttacaccgttttctctgcaactgaccctaagagaagcgctcgtgactctcacatccccgttttggctccacttccaattggatttgctgtgttcatggtgcatttggctactatccccattactggaactggtatcaacccagctagaagctttggtgctgctgttatctacaacaacgagaaggcgtgggatgaccaatggatcttttgggttggtccgttcttgggagcactagctgcagcagcttaccaccaatacatattgagagcttcagcaattaaggccttgggctcgttccgaagcaacgcaaccaattaatgaaggctttttttaagataatgtcaagaaacaactttaagatttatatgctttaattattatttgttgttcttttgcgtgtaatgagagagatggtggaatgatgttcattattaaatgcctgcactactcctatttcaaaaaaaaaaagaaaa

SEQ ID NO: 153552 - DNA, 384 bp, Arabidopsis thaliana columbia
ggaaaagtacgtgtacaaatcacctactccctcttatgagattacaaatctccaccaccaccatgacgtctatagttcaccaccaccaccatactactcaccttcccctaaggttgactacaaatctcctccaccaccatactactcaccttcccctaaggttgactacaaatctcctccaccaccatatgtctacagttctccaccaccaccatcatactcaccttctccaaaaactgagtactaagcttcacattcaccttcgtattacttgaaattgtaatgagattcttatataagctaccaagttttatttcatttcatctttgcttttgttcttcatgatattcatatctaataaattttaattctgcctaaaaacaa

SEQ ID NO: 153553 - DNA, 210 bp, Arabidopsis thaliana columbia
cttcgattttcgtttattcgcatccatcggagagtgaaaacaatcaataagcgaccatgttggtgtaccaagatcttctcaccggtgatgagcttctgtctgactctttcccttacaaggagattgagaatggaatcctctgggaagtagaaggaaagtgggttactgtgggagctgtagatgttaacattggggccaatccatctactg

SEQ ID NO: 153554 - DNA, 561 bp, Arabidopsis thaliana columbia
gaacaatggcttcctctatgctctcttccgctactatggttgcctctccggctcaggccactatggtcgctcctttcaacggacttaagtcctccgctgccttcccagccacccgcaaggctaacaacgacattacttccatcacaagcaacggcggaagagttaactgcatgcaggtgtggcctccgattggaaagaagaagtttgagactctctcttaccttcctgaccttaccgattccgaattggctaaggaagttgactaccttatccgcaacaagtggattccttgtgttgaattcgagttggagcacggatttgtgtaccgtgagcacggtaactcacccggatactatgatggacggtactggacaatgtggaagcttcccttgttcggttgcaccgactccgctcaagtgttgaaggaagtggaagagtgcaagacagaataccccaataccttcattaagatcatgctattcgacaacacccatcaaagtcaagtcatgaactgcattaccttcaagccaccaaactgtacccgtaatttccgtttacttt

SEQ ID NO: 153555 - DNA, 438 bp, Arabidopsis thaliana columbia
aaagcaaagaacacttgaacgttttctagatagagatggaagggaaagaagaggatgttcgagtgggagctaacaagttcccggagaggcaaccgataggtacatcggctcagacggacaaagactacaaggagccaccaccagctccatttttcgagccaggcgagctgagttcgtggtccttctacagagccggaatcgccgagttcatagccaccttcctgtttctatacataacagtattgacagtgatgggagtgaagagagcaccaaacatgtgtgcctctgttggaatccaaggcattgcttgggctttcggtggcatgatctttgcccttgtctactgtactgctggaatctctggtgggcacataaacccagcggtgacatttggcctgtttttggcttataagctgttattgaccagagctttttttt

SEQ ID NO: 153556 - DNA, 625 bp, Arabidopsis thaliana columbia
agatgatatgcgcaagaatccgaccgctaatttcgtcaccactagctttcactatctcaacaaccaaacactccagaatcaatctccgattactccctcgccgctccttctccgtcatgtcttcttcaaccccacagagtcagatcatagaacacatcgtcttattcaaaaccaaagacgacgctgactccaccaaaatcacctccatgatcaacaacctcaacgctcttgcatatctcgatcaagtgcttcacatctccacctctcctctccaccgtatctcctccgctaccgccttcactcacgtactccatagccgttacgaatctaaagaagatctagcctcctacgctgcacatccagatcacgttcgtgttgttaaggaatctgtgttaccgatctgtgatgatatcatggctgttgattggatcgctgatcgaatccccggaaccgtagcgccgcttcctggttcggttgctaaactcacattgctcaaattgaaagaggatgtagcagatgaggcgaaatcggagattacgggagtgattaagggactaagtgagaaattttcagcgattgatcagattactgttggagaaaaactttctcctgctagagctaaagg

SEQ ID NO: 153557 - DNA, 642 bp, Arabidopsis thaliana columbia
  unsure (1)..(642): unsure at all n locations
ttcgagattgatctgatttgctttgttgttttctttctgctacaagtagataaaaaatggcatggcgcagtgcagcacgctctttcgtctccgctacagctagagctccgtctctccgatctccgccgccaacgcttccccgcctccgtccttcccaatcctctttgccccgccgccgatttgcctctttcactaatcccaggaatttgggagagctaggatgcacagagtcattcttgcctctgtacaatgttgtggctgcagcgagactcacatctcaccttaatgttaatctgcgagctttctgcgaactctctaacggtacttgaatgcacaaagtggatgcatcagttatcttgaagcagttggagacttgagaaaaggggtgtaccaagaagaactcattggttgttttgtgttccattaggaaccaaaaactatatacattattatcgatcttccttcgcttttgtcaatttccagttttagaatatcactggatttctcttcatatttcttgttggttagcccaatggctntaaatacttgagggtagattcagcaaattcttgaagaaccattgtttcatcggtgtatttataatgttaagaaactccttccgggttcctgaaaggaatttaa

SEQ ID NO: 153558 - DNA, 657 bp, Arabidopsis thaliana columbia
  unsure (1)..(657): unsure at all n locations
gtatatggatctacacctctcctcagtctcatactcaaatcaataatccaaaccccaaaaaaaagaaaaccagagaagagagtttaaaaaatgagaggttcttgcaaagtctctatagttcttcttctggttttaatcaatggtgtgcttggagataacccttatagattcttcacctggaaaattacttatggcgacatttatccccttggtgttaaacaacagggaatattgataaatgggcagtttcctggacctcacattgacgcaatcacaaatgataatatcattatcagtgttttcaattacttgaaagagccttttctcatttcttggaacggagtgcaacagaggaagaactcatggcaagatggagtcgtagggacaacatgtccgattccaccaggcaaaaacttcacttatgtaattcaagtcaaagatcaaattggtagcttctactatttcccttctcttgccttccacanagccgctggtgcatttggagccatccgtgtctggagtcgtcctcgcatccctgtcccgttctctccccctgacggtgatttctggcttctcgccggagatgggtacaaaaccaatcactatgttttgagacgtctactaaaagccggaaggaatctaccgaatcctgatgga

SEQ ID NO: 153559 - DNA, 332 bp, Arabidopsis thaliana columbia
ggaaggataaagagagacgccatgggaagaagacctgcgaggtgttaccgtcagatcaagggtaagccatacccaaagtctcgctactgtcgtggtgtgccagatccaaaaatcaggatctacgatgttggtatgaagaggaagggtgttgatgcgtttccattctgtgtccatttggcgtcatgggagaaggagaatgtgtcaagtgaagcacttgaagctgcccttattgatttcaacatgtacatgttgaaatctgctcctaaagattctatcgatttgaggattatacctcattctctcacttgcttcataatcaacacgaatctttc

SEQ ID NO: 153560 - DNA, 581 bp, Arabidopsis thaliana columbia
ttcagttctagggttttaatttgatacgaggtcagcgaatccggcgacgaatatccgccactagtaactctagctcaggtaaggatttgtgtccatggcagctttgcaaacgcttcgtgaatggatcggtatccagcagttcccacctgctactcaatctaaattgctcgagatccttgggaagtataaagaagaggatgtgagctcgctaacggtccttgtaatggggaaaggtggtgttggaaagtcatcaactgtgaattcagttataggcgagaaagctgctgcagttagtactttccagtctgaaggactgaggcctaccttggtctctcgcacaagatcgggatttacattgaatatcatcgacactcctggtcttattgagggaggatatgtgaatgatcaagccatcaacattataaaacgatttctcctcaacatgactatagatgtgctactatacgtagaccgtttggatgtgtaccgggtggatgaccttgataggcaagttgtcggtgctataactgatgcatttggtaaagagaaatggaagaagtctgctcttgttctcacccatg

SEQ ID NO: 153561 - DNA, 314 bp, Arabidopsis thaliana columbia
aaaaaaatggcgaatacccaactcaaatccgatgcaatcatggacatgatgaaggaacatcttttcaccgacgccgggaaagaggtcacagagaagatcggtcttgtttatcagatcaacattgctccaaagaaattagggtttgaagaggttacttacatcggtgatctgaagaaaggcgaagtcaccaaagggaaatatgaaggagggaaagtggatgctacggtctacttcaaggatgatgattgtgcaaaagtgggcactgggacggtgaatcctctgatgcgctatgattaggggcgcgatgactatca

SEQ ID NO: 153562 - DNA, 587 bp, Arabidopsis thaliana columbia
ctactctctttaaaagaaattcgtaagtactatcaagaagcagaagatggcccaaaaggtggaagcacaaggagggaaaggagccaacctatgggacgatggatcgacacatgacgccgtgaccaagattcagctcgcagcaggcatagacggaattcaatatgttcagtttgattatgtcaagaacggacaacccgaacaagctcctcttcgtggtaccaaaggccgtgttctcccagctgatccgtttgtgattaaccatccagacgaacatctagtttctgtagaaggttggtatagccctgaaggtatcattcaaggaattaagttcatctccaacaagaagacttctgatgtcattggatccgatgagggtactcacttcactctacaagttaaagacaagaagatcattggctttcatgggtctgccgggggcaatcttaattctcttggggcttactttgctccgttgactactacaactccgttgactcctgccaagcagctaacggcatttggtagtgatgacggaactgtatgggatgatggtgcttacgttggggttaaagaggtgtacgttggac

SEQ ID NO: 153563 - DNA, 467 bp, Arabidopsis thaliana columbia
ggttacactgagtttagaccaagtgagaaattcagtttccaggagaacaatcttaacttcaacatgttgaatttggatggtaaatttggtgaaagcatcatggggaagacttcgatgcagagcaatgtttataatatgaatactgttttccagaagaatgactttaagagtggaggcaacatgaaagttaacaagtataatggtaatgttgttgctaacaaggagatgagcaacaacaaacataacaacaactgcaatgataatgggaatatgaatttggctgttgacaagaggtttaaaaccttgcctgcttcggagactcttccgaggaatgaagttcttggtggttacatctttgtttgcaacaatgatactatgcaggaggatatgaaacgccaccctcttggtttaccttccaaatacagagactctgtttgagctataacaccttgattgcctctgttttt

SEQ ID NO: 153564 - DNA, 173 bp, Arabidopsis thaliana columbia
gggaatttcacatatcgttcgatgttcgagctggcatcgtcatatctctcgcatcccttttcgacacggacgtgaacaaataccggcaagtcctatataaaggtcacttatcggaaatgttcataccttacatggacccaagtgatgattggtatttcattaccttatcttgg

SEQ ID NO: 153565 - DNA, 441 bp, Arabidopsis thaliana columbia
aatctttctctgatttcataaaacagaatagagatttataaaacttcttgcttttaaagatggcgattagattgtcgcgtgtgatcaactctaaacagtcccaaaaacagcaatctcgagtcccgaaaggacatgttgcggtttatgtcggagaagagatggagagcaagaagagattcgtggttccgatttcgtatttgaaccatccttcatttcaaggtttgcttagtagagcagaggaagagtttggtttcaatcatccaatcggtggattaacgattccatgcagagaagaaacatttgttggtcttttgaattcttatggttgtattgtttcaacttgagacaacttttttgggaaagcccaaaacttttttttttctttctatagaattaccttttttgttgttgttccctttgtttatttctgcaaaggagaac

SEQ ID NO: 153566 - DNA, 384 bp, Arabidopsis thaliana columbia
gaagagaacaagagtgtgatggttgttgttttaggacttgagatgcttgttggaaaggattgtaacatgtcctggaagatgggtatcaattaatttacatgtgagagttggtataactattgaggaggagaatgagattatttaaaaaaaaagggtaatgttttgttcttctccatttcggattataagaaagaaaaaaagaattagaggtttggttttagattgtgtctctgtctttttattaaaagatgctttagtctgaataaaatttgaagcagtagaagtgttacttcaatggcttatttacttctttgtttttaatttttttataattaataattaagggcggctcgttctagagggatcaaagcttacttctgcgtg

SEQ ID NO: 153567 - DNA, 400 bp, Arabidopsis thaliana columbia
agtaatcctaactatacaaaacacataacattatggctccttcaacaaaagttctctctttacttctcttatatgtcgtcgtgtcattagcctccggtgatgagtccatcatcaacgaccatctccaacttccatcggacggcaagtggagaaccgatgaagaagtgaggtccatctacttacaatggtccgcagaacacgggaaaactaacaacaacaacaacggtatcatcaacgaccaagacaaaagattcaatattttcaaagacaacttaagattcatcgatctacacaacgaaaacaacaagaacgctacttacaagcttggtctcaccaaatttaccgatctcactaacgatgagtaccgcaagttgtacctcggggcaagaacttgagcccg

SEQ ID NO: 153568 - DNA, 432 bp, Arabidopsis thaliana columbia
atgacgatgaactcgcttccgaggagatttgggaagaatcatggctatttggatcgagattatcgaaacggaagacgatctggttcagattccgatgaagaattgaagggattgagtcacgaagagtataggaggcagaaacggcttaagatgaggaaatcagccaagttctgcttttgggagaacacaccgagtccacctagagatcagaacgaggattccgatgagaacgccgacgagattcaggacaagaacggcggcgaaagagatgataattcgaaagggaaagaaaggaaaggtaaatctgactcggaatctgaatctgatggtttgagatctaggaagaggaagagtaagagctcgaggtctaagcgcaggagaaagagatcttatgacagcgatagtgaatccgaagggagtgagagtgattcg

SEQ ID NO: 153569 - DNA, 411 bp, Arabidopsis thaliana columbia
atcggaataccacacaataaggggatggcataagctgcctctcattgggctgcttttgctcctgaccatggtcgtctctacagcaaatgcagatggacctgtttgcccgacgtcgaacaaactaagccgggcaagtgctgcctgaaggttgtttatttggcacggctactgcagcataccaggtcgaaggtgcgattaatgaaactaggcgtggaccaggctcatgggacatctactgcagatgatatcctgagaggtgctctcacgataacggcgatgtggccgatgatttgttccatcgctatacggcagatatccaactagtgtagaatctaaacgcatacgcctgtagaatgtctatcgcatggccaagaatatctcctcatgggagaaaggagacaggagtgagtg

SEQ ID NO: 153570 - DNA, 308 bp, Arabidopsis thaliana columbia
ggacacatctcattgaccatcaatgtcatcctcatgttcacatcaggagtcttcatcattggaccatttgctctcatcacaacagctgtctcagctgatctcggaacccacaaatctctcaaaggcaatgcaagggctttggctacagtctcagctatcatagacggcacaggatccgtcggtgctgcgattggaccagtcctcactggttacatctctgccataagctgggacgcagtgttttacattgtgatgactgcagcattgatctctgggatggtgctcactaaactaatcatagcagaagt

SEQ ID NO: 153571 - DNA, 334 bp, Arabidopsis thaliana columbia
cgaaaaagagagcgaagcttgaaatctccgattaagccatgaatgctcccgaacgatatgagcgattcgtcgtccctgaaggcaccaagaaggtttcttatgatagggatacgaagatcatcaatgctgcttccttcacgggtgagagagaagaccatacgattggaaacattgtccgcatgcaacttcatcgcgacgagaatgtcttgtttgctggataccaacttcctcatcctcttaagtacaaaatcatagtgaggattcacacaacaagccagtcttgcccaatgcaagcatacaaccaggccatcaatgacttggacaaggagcttga

SEQ ID NO: 153572 - DNA, 349 bp, Arabidopsis thaliana columbia
gccgcatcatccttctcccttgtgcgatatcgtttgcgtgagatttgtctgaaaagtagctaaccatgggtaaagagaagtttcacatcaacattgtggtcattggccacgtcgattctggaaagtcgacaaccactggacacttgatctacaagttgggtggtattgacaagcgtgtgatcgagaggttcgagaaggaggctgctgagatgaacaagaagtccttcaagtacgcatgggtgttggacaaacttaaggctgagcgtgagcgtggtatcaccattgacattgctctctggaagttcgagaccaccaagtactactgcactgtcattgatgctcctggtca

SEQ ID NO: 153573 - DNA, 424 bp, Arabidopsis thaliana columbia
  unsure (1)..(424): unsure at all n locations
gcctgaaaaaaatttgagataatggccagaaagttcttcgtcggaggcaactggaaatgtaacggaactgctgaggaggtgaagaagattgtgaacactcttaatgaagctcaggttccttcacaggatgttgtagaggttgtggttagccctccatatgtttttcttcccctggttaagagcacattgaggtctgacttttttgttgcggcacaaaactgttgggttaagaaaggaggtgctttcactggtgaagtgagtgcggagatgcttgtgaacttggatattccatgggttatccttggtcactctgaaaggagggcaatccttaatgaatcaagcgagttcgtcggagacaaggttgcctatgcacttgcttaaggttngaaagtgattgcttgggttggtgagactcttgaggagc

SEQ ID NO: 153574 - DNA, 356 bp, Arabidopsis thaliana columbia
aaagaggaaggccacaagatcgttggtttccatggaagagccgatgttctgctccacaaaattggagtccatgttcgtcctttatccaactgatgatggagctctttatccttgattccatgcatctaataagttatcaaatctatcttctaaatttctcatatgaggtctcttcatgcctctggtgaatggtgatctttgataagtgttttacgcgttgtctcttgcgatgttgatttttctttggtctttttgtgctctattttaataaaggaaagttgttccaatctgatctttagtttccctatatgttctataatacttacttttgccaaaaaaaaaaaaacatctttttt

SEQ ID NO: 153575 - DNA, 428 bp, Arabidopsis thaliana columbia
tccaaatcgaaagcaatttctctcgacgaagaaaagagaagcaatcggagtctgtggaggtaaagaagtacacgatcaaatttcaagtcagagtttcggggaaaaaaaaggaatgggggatcatctggtgagagctgaggaattcgagaagaaagctgagaaaaagctcaatggatggggaatattcggatctaagtacgaggatgctgctgatctgctcgaaaaagcagctaattcctataagctcgccaaatcatgggatcaagctggaaaagcttatctaaaacttgccgactgtcacttaaagtcagatagcaaacatgatgctgctaacgcctatgctgaggctgctaaatgctacaagaaagttgacactaatgaggctgcgtcttgcctaaagcgagcggtgaatatattttgtgagatag

SEQ ID NO: 153576 - DNA, 236 bp, Arabidopsis thaliana columbia
cttttgtctccgtctctctgtctcttttgtctactcttcctctcccgactcaaacgggtacaatctctctccctaagcgcttatctctccaattccttctccttcccactccgtaacgcaacactctcaacaacaacaaaccgccggaactttctcaccaccggaaggatcatagctcgggcatataaagtggtggcagagcacgacggattgacgtctgatttggaagactatcc

SEQ ID NO: 153577 - DNA, 439 bp, Arabidopsis thaliana columbia
atagctcctaacaaagcaatatcatttccaatttataaaagttaaagccatggctgcatctttctctgtcccctctatgataatggaagaagaagggagattcgaagcggaggttgcggaagtgcagacttggtggagctcagagaggttcaagctaacaaggcgcccttacactgcccgtgacgtggtggctctacgtggccatctcaagcaaggctatgcttcgaacgagatggctaagaagctgtggagaacgctcaaaagccatcaagccaacggtacggcctctcgcaccttcggagcgttggaccctgttcaggtgaccatgatggctaaacatttggacaccatctatgtctctggttggcagtgctcgtccactcacacatccactaatgagcctggtcctgatcttgctgattatccgtacgacaccgtt

SEQ ID NO: 153578 - DNA, 420 bp, Arabidopsis thaliana columbia
gccaagtagccatcaaggttcagggtcaggcagggcacgaagagattctgcagctcgtgctatgcaaggttggcatgcgcagcgccttgttggatctggagaggttactgcgcctgctgttaaggataagggcttaatttccaccccaaagcacaagaaactcaaaagcattgggctgcaaaaacacaaacaacaaactagcatggaccatgttgttacaaatgaagctgacaaacagttggctgctgaggttgttgatgttggacccgttgctgactgggtgaagataaatgtcaaagaatctaaggattccttcgagatatttgccttggtacctggacttcttcgcaaagaggttcgaattcaatcagatcctgcgggaaaggtggttataacaggccagccagagcagcttgacaa

SEQ ID NO: 153579 - DNA, 413 bp, Arabidopsis thaliana columbia
  unsure (1)..(413): unsure at all n locations
cgcgccttctcagtcaaccgggaagcccggaggaatgcgttcgagtaaaatcatagccattactgcagctgtgattggcggggtctctctcatgctgattgctctcattgtctacctcatgagacgcccagtgagaacagtcgcttcttctgctcaagatggccaaccatcggaaatgtctttggacatatacttccctccaaaggaaggattcacgttccaagatttagttgcagccactgataatttcgacgagagctttgtagttgggagaggagcttgtggaaccgtctacaaagcggttcttccagccgggtacactctagctgtcaagaagctggcatcaaaccatgaaggcggcaacaacaacaatgtggataatagctntagagcagagattctaactcttggga

SEQ ID NO: 153580 - DNA, 400 bp, Arabidopsis thaliana columbia
atgaatacaaaataagatttatggctacacaaactgttgaagatagttctagatctggtccaagaagcactactgtagggaagttattgaaaccattgaattccgaatatggtaaagtagctcccggatggggaacgacccctttgatgggtgttgcaatggctctatttgcggtattcctatctattattttggagatttataattcttctgttctactggatggaatttcagtgaattagactgagaagaatcttgaagttctagcttttagctcgatacaaaaaagtaaagtatgcaggtctaacaattttagcctattctcctttggtagttcgaccgcgaaatttttttctgcattgtatatttccggaatatgagtaaagtttatgattggttc

SEQ ID NO: 153581 - DNA, 318 bp, Arabidopsis thaliana columbia
tggagatccatcgaagaccattgctgtccttgaagggttcgatcacgaactctacaaggggcgccatctaccgcgtccgggggcctaaagctttctgcatttccttcaagagactctgcttgtcgttgcttcggctacatggtctccaagaagaagtacatcttcactattgatgacgactgcttctttgctaatgatccatctggaaaagctgtgaacgctcttgatcaacacatcaagaaccttctctgtccatcaactacattttttttcaacaccctcttcgacccacacctgcaaggaggtgacttccttcgt

SEQ ID NO: 153582 - DNA, 312 bp, Arabidopsis thaliana columbia
gtgaagctcacaatggcgaggattaaggttcacgaattgagggagaagtcgaagagcgatcttcaaaaccagctgaaggaactcaaagctgagctcgctctcctccgtgtcgctaaagtcaccggaggtgctccaaacatgctctctaaaatcaaggtcgtgcgtaaatccatagctcaggttttgacagtgtcttctcagaagcagaagtctgctcttagagaagcatacaagaacaagaagttgctttcttttgatctccgtcccaagaagacccgtgctattcgtagacgcctcaccaaacaccaggcc

SEQ ID NO: 153583 - DNA, 413 bp, Arabidopsis thaliana columbia
gtcgcacacaccacatgctctctctctctctctctctctctctctctttcttctcctttctctttgtatctcttctctcttatgctaagccaaaaatggaagctttactctattgaagacgagatccttctctaatttacaggtacccatcttttatttctgaataatagattttggttcttgcaaatcttatagcttaaagttgagatttttggtatttacttagcaacaaaaaaagtttgtgataatattaccataaatggtgagacatccatttgcggctgagattttgctactttactcttttctctctctctatttccatttgtattgtcactcactcacatacaaaaataacatcataatcagagataatgagtaaaagtgaaagaaaccctaataccaacttactc

SEQ ID NO: 153584 - DNA, 413 bp, Arabidopsis thaliana columbia
aaaaaaagagagaagaaaaatggtgttgacaatctatgctcctttattcgcttcttcaaagagagctgttgtgacattggtggagaagggagtatcattcgaaactgtcaatgtcgatctcatgaaaggagaacagagacagcctgagtatctcgcgattcagcctttcggtaaaatcccagtcctcgtcgacggagactacaaaatcttcgagtcgcgtgcgatcatgaggtatatagcagagaagtatagatcacaaggacctgatcttttggggaagactattgaagagagaggacaagtagagcaatggttagacgttgaggctacaagttaccatccaccactattggctttaacgctcaacattgtctttgcaccacttatgggtttcctgctgatgagaaagtttt

SEQ ID NO: 153585 - DNA, 394 bp, Arabidopsis thaliana columbia
ctcagccgtctgtcttacctccagaagtcgacgacaacaatggcaccgaagaagggagttaaagtggcttcaaagaagaagccggagaaagttaccaacccattgtttgagagacgcccaaagcaattcggtattggtggcgctttgcctcctaagaaggatctttctcgttacatcaaatggcctaagtcaatccgtcttcaaaggcagaagcgtatccttaagcagaggttgaaggttcctccagctcttaaccagttcaccaagacccttgataagaatctcgccaccagcctcttcaagattcttctgaagtataggccagaggacaaagccgcaaagaaggaacgccttttgaacaaggctcaagctgaggcagaaggaaagcctgctg

SEQ ID NO: 153586 - DNA, 401 bp, Arabidopsis thaliana columbia
ctcatttactgttctgtttcactttctctctctctgtatactctctaaatgatggcaaaaaactgtaatttagtcagtgttctatgtgtatttttggtattgaccctctttaacaaacccatcaccgtcgccgggcagaatattccggcggtgggcttgttcacctttggtgactccaacttcgacgccggaaacaaacagactctcaccaaaaccttactccctcaaactttctggccgtatggaaaatcccgagatgatcccaacggcaaattctccgacggcctcatcgctccagacttcctcgctaaattcatgaggattccgatcgtgatcccgccggcccttcaaccgaacgtcaatgtctcacgtggagctaagttcgccgtcgctgatgcttc

SEQ ID NO: 153587 - DNA, 398 bp, Arabidopsis thaliana columbia
aaaaaagaacgatagagatatttagtgataattttgttgggtcaacgtaatcaacggtcagaaatagatcacggtgcgttcgtctggcggcttcatttggcacaaggagtttactagtctggacaatatgtccttaattgctcttatcggagaaggcttactctgtttttcaggcgaactctgtttatcttctccgagctcgtacgagaatattcgtaaaggtttcttgtgagcttaaacgatgagtacccttgagaccacaagagctgagcttggtctggtagttgtgtatttgaataaagcggaggcgagagacaagatttgtcgagctattcaatatggttccaagttcttgagtgatggccaacctggcactgctcaaaatgtcgacaagaaca

SEQ ID NO: 153588 - DNA, 434 bp, Arabidopsis thaliana columbia
  unsure (1)..(434): unsure at all n locations
agatgacaacaccagtaggaaaacaagtcagtaagtaaacgagcaaaagaagaagagaaacaacaagaagtagtaatggcttcctctatgctctcctccgccgctgtggttacatccccggctcaggccaccatggtcgctccattcaccggcttgaagtcatccgctgcattcccggtcacccgcaagaccaacaaggacatcacttccatcgcaagcaacgggggaagagttagctgcatgaaggtgtggccaccaattggaaagaagaagtttgagactctatcttacctccctgaccttagtgacgtcgaattggctaaggaagttgactaccttctccgcaacaagtggattccttgtgttgaattcgagttagagcacggatntgtgtaccgtgagcacggaaacactcccggatactacgatggacg

SEQ ID NO: 153589 - DNA, 430 bp, Arabidopsis thaliana columbia
ggcgcccttacactgcccgtgacgtggtggctctacgtggccatctcaagcaaggctatgcttcgaacgagatggctaagaagctgtggagaacgctcaaaagccatcaagccaacggtacggcctctcgcaccttcggagcgttggaccctgttcaggtgaccatgatggctaaacatttggacaccatctatgtctctggttggcagtgctcgtccactcacacatccactaatgagcctggtcctgatcttgctgattatccgtacgacaccgttcctaacaaggttgaacacctcttcttcgctcagcagtaccatgacagaaagcagagggaggcaagaatgagcatgagcagagaagagaggacaaaaactccgttcgtggactacctaaagcccatcatcgccgacggagacaccggctttgg

SEQ ID NO: 153590 - DNA, 416 bp, Arabidopsis thaliana columbia
gttcaaagatcaagatctgcagacatggcggacgaagcaaccagagctgcttttatggagattcaagctagcatgattgaactcactgggaagctcaaacaggtgcagaatcagatgcgcaacaaagagggagatagaaagcgagctttcttaaccttggaggagctgaggccattgcctgaagagacaaacacctacaagtcaataggaagaacgtttgttctagagcccaagacagtgctggagggtgaacaagagcaaaaactcaaggacagtgaagctgccgttgcttctctacagacatccaaggaatacttggagaagcaggtagcagaggttgagaacaacttgagggagctgttgcagcaagaaccgggcattgctcaacagattatgttcatgtctatgtaactttt

SEQ ID NO: 153591 - DNA, 398 bp, Arabidopsis thaliana columbia
aacttctgaagatttttcttactcagaggttaaatgcctacacggaattccaaaatgcaaattcgggatttctgcaaagctatggactttccaatgaagattgtgttacgaagatgaggttgttgtcactagtggatttggcctcagatgaatctggcaaaataccttacacctcgattaaagacactcttcaggtaaatgaacaggatgtcgagttatggatcgtgaaggcaataactgcaaaactgattgagtgtaagatggatcagatgaaccaagttttaattgtcagccgctcttccgaacgtgaatttgggacaaagcaatggcaatctctccgaacaaagcttgcgacttggaaggacaacatttcaagtatcataactaccatcgaatcg

SEQ ID NO: 153592 - DNA, 438 bp, Arabidopsis thaliana columbia
ctcaattctcgagtgagaatgctcagagaagagttacagctccttcaagaacctgggtcctatgtgggagaagtggtaaaagttatgggaaagaacaaggtcttggttaaggttcatccagaggggaagtatgttgttgatattgacaaaagtatagacattacgaaaatcactccatcaacgagagttgctcttcgtaatgatagctatgttctccacctggttctgccaagtaaagtagatcccttggttaaccttatgaaagttgagaaggttccagactccacctatgacatgattggtggtcttgaccagcagattaaggaaataaaggaggtcattgagctgccaatcaagcatcctgaattgtttgagtcttttggaattgcgcagccaaaaggtgtgttgttatacgtccacctggaactgggaagacac

SEQ ID NO: 153593 - DNA, 410 bp, Arabidopsis thaliana columbia
caaaaagcttttaacctcagccgttaaatctttctccgatcatgccgaccagaaacatcgccattggtggagtccaagaagaggtctatcaccccaacgcacttagggcggcgctcgctgagtttatctcgactttgatcttcgtcttcgccggctcaggctccggaattgctttcaacaagatcactgacaatggagcaaccactccttccggcctcgtcgccgctgccttagctcatgctttcggtctctttgtcgctgtctctgttggcgctaacatttccggtggccacgttaaccctgccgttaccttcggtgtcttactcggtggtaacatcactctcctccgtggtattctctactggattgctcagcttcttggctccgtcgccgcttgtttcctccttagc

SEQ ID NO: 153594 - DNA, 430 bp, Arabidopsis thaliana columbia
ctcggttatctagaattggaaaacaagactatgagacagtaaagcagggaacatctgttggctcgtcggaggtgcatctttcagcgagaatgcaggtcacaggggaagcggaatatactgatgatactccagtacctcctaataccttacatgctgcctttgtgctaagcaaagtgccacatgcccgcatcctttcaatcgatgattcggcagccaaatcttcatctggttttgttggtctgtttcttgccaaagatattcctggggataatatgattggaccaattgttcccgacgaagaattatttgctacagatgtggtcacgtgtgtgggacaagtcattggtgtggtcgtcgcggatcacatgtaaatgcaaaaactgcagcaggaaaagttgacgttaggtatgaggaactaccagcaatatta

SEQ ID NO: 153595 - DNA, 433 bp, Arabidopsis thaliana columbia
gggatcaagaatagctgccatggatgagttcattatcaaactccagtctgagaagaagcaaaaagaaaaagaaaggaatgaggcacaaaagcagctgaagaagaaggaagaggaagttgctgctttaagatctcttttaacacagagggaagcttgtgctaccaatgaagaggagataaaagagaaagtaaacgagagaacccagcttttgaagtcggaactagataagaaacttgaagaatgccgaagaatggctgaggaatttgttgagatggagagaaggagaatggaggaaaggatagttcagcagcaagaggaactggagatgatgaggagacggttagaggaaatcgaggttgagttccgccgctcaaatggaggaagtgttgatgaaactagtgggttttgccaaaagactcaggaatctttactc

SEQ ID NO: 153596 - DNA, 404 bp, Arabidopsis thaliana columbia
aacaggaaggctcatttcacagcttcctccagcgagaggcgtgtgataatgagctctcctctctccaccgatcttcgtcagaagtacaatgtcagatccatgccgatccgtaaagacgacgaggttcagatcgttcgtggtacttacaagggacgtgaaggcaaagttgttcaggtttaccgtcgcaaatgggtgattcacatcgagagaatcacgagggagaaggtgaatggaacaaccgtgaacgttgggattcagccgtcgaaagttgtgataacgaagcttcgtcttgataaagataggaaatcgcttttggagaggaaggctaagggacgtgctgctgctgataaggagaagggtactaagtttacgtctgaggatgttatgcagaacgttgattaagt

SEQ ID NO: 153597 - DNA, 375 bp, Arabidopsis thaliana columbia
attttctcaaactctaaaatcaatctctcaaatctctcaaccgtgatcaagatgcagatcttcgttaagactctcaccggaaagactatcaccctcgaggtggaaagctctgacaccatcgacaacgttaaggccaagatccaggataaggaaggtattcctccggatcagcagaggcttatcttcgccggaaagcagttggaggatggccgcacgttggcggattacaatatccagaaggaatccaccctccacttggttctcaggctccgtggtggtatgcagattttcgttaaaaccctaacgggaaagacgattactcttgaggtggagagctctgacaccattgacaacgtcaaggccaagatccaagat

SEQ ID NO: 153598 - DNA, 428 bp, Arabidopsis thaliana columbia
tgcatctttctctgtcccctctatgataatggaagaagaagggagattcgaagcggaggttgcggaagtgcagacttggtggagctcagagaggttcaagctaacaaggcgcccttacactgcccgtgacgtggtggctctacgtggccatctcaagcaaggctatgcttcgaacgagatggctaagaagctgtggagaacgctcaaaagccatcaagccaacggtacggcctctcgcaccttcggagcgttggaccctgttcaggtgaccatgatggctaaacatttggacaccatctatgtctctggttggcagtgctcgtccactcacacatccactaatgagcctggtcctgatcttgctgattatccgtacgacaccgttcctaacaaggttgaacacctcttcttcgctcagcagtaccatg

SEQ ID NO: 153599 - DNA, 409 bp, Arabidopsis thaliana columbia
gatctctcgcaaatggactcatcacataacaacattgttgttctttggttttgggctatggtctttgtgggacggtttcaaagaaggaggagggggttcggaagaattggctgaagtcgaagcagaactggatgctgatttgaaggctaatggtaaatctccaaaagacagtagtaagagagaagatgaaaacaaaaagcagaatagggcgttcctcacgcaatttttctctccaatttttctcaaggctttttcgattaatttctttggagaatggggtgacaagagtcagcttgctacaattggtttagctgcagatgaaaatccatttggggtggtccttggtggagttgtggcacagtttttgtgcaccactgctgctgtaattggaggaaagagcttagcgtct

SEQ ID NO: 153600 - DNA, 419 bp, Arabidopsis thaliana columbia
atcggcgatcatccaaagttatcatctttctcataaacccaatttttttcccagtcttccttaatcccaacaacttcttaacaattcaagattcatggctactacacccatctttaatgcttcttgcagctttccttcgactagaggaatcgattgcaaaagctatattggtctgagatcgaatgtgagtaaagtgagtgttgcttcttctcgcattgcaactagtcaacgtcgtaatcttgtcgtaagagctagtgaatccggcaatggacatgctaagaagcttggaatgagtgatgctgagtgtgaagctgccgttgctgctggaaatgttcctgaagctcctccggttccacctaaaccggctgctccggttgggacaccgataattagcctcttaatctaagccgacgcccacg

SEQ ID NO: 153601 - DNA, 426 bp, Arabidopsis thaliana columbia
  unsure (1)..(426): unsure at all n locations
gaaagataccagacaaggagattcttgagattgtgaaggagagttttgatttcaggccaggtatgatctccattaacttggatctgaagagaggaggtaatggtaggttcttgaagactgctgcctatggtcactttggaagggacgatgctgatttcacctgggaggtagtcaagccactcaagtctaacaaggtccaagcttgaaacctgtcagcctctgtttcacttctgtccagaatcagtcttgttctctgtattttaggctctttctgcctctttagtttcaactctgagatgggtttattcattttgttttcaactttgaagaaaaaagctaagcagctgggaatttatataattatttatatgggattctngtgctaaggaaagtaaattcataatatgtatttcttacttattttga

SEQ ID NO: 153602 - DNA, 412 bp, Arabidopsis thaliana columbia
aaacgagcaaaagaagaagagaaacaacaagaagtagtaatggcttcctctatgctctcctccgccgctgtggttacatccccggctcaggccaccatggtcgctccattcaccggcttgaagtcatccgctgcattcccggtcacccgcaagaccaacaaggacatcacttccatcgcaagcaacgggggaagagttagctgcatgaaggtgtggccaccaattggaaagaagaagtttgagactctatcttacctccctgaccttagtgacgtcgaattggctaaggaagttgactaccttctccgcaacaagtggattccttgtgttgaattcgagttagagcacggatttgtgtaccgtgagcacggaaacactcccggatactacgatggacggtactggacaatgt

SEQ ID NO: 153603 - DNA, 397 bp, Arabidopsis thaliana columbia
gcatgtgaataaaaagcgtgaagctttttgatatctctttctcttcctcttcctttctcctccgatagatttcgccggcgatggcggtggactccttagaaacggagattgacacggcggtgcgtgttgtccacctcgcttcttctctctgtgttaaagttcaagagaagcttcatcttcctaacggtggtcacgttaagtctaaagacgatgattcccctgtcaccgtcgctgattttggtgtacaagcaattgtgagctgggttttagctgaagtgtttggtgatcaaaacctttcaattgttgctgaagaagacactgagacactctctgaggctgattctttaggtcttttaggagctgtgtcgaatgcggttaatgaagcattgtccgaagc

SEQ ID NO: 153604 - DNA, 423 bp, Arabidopsis thaliana columbia
ggtgataaagatggtctcagtaatgcccggaagctgtatgattctgctgttgcaagttacggtcaagacgtggagctgtggaagaattactactcattggagacaaagctgggaacatcagagacagccaatggagtgtattggcgtgcgagaaagactctgatgttcccagtcttgttctatacaaaggttgcattgaaatagagaccaacctcatatcagtaggtgataaagatggtctcagtaatgcccggaagctgtatgattctgctgttgcaagttacggtcaagacgtggagctgtggaagaattactactcattggagacaaagctgggaacatcagagacagccaatggagtgtattggcgtgcgagatagactctgaatgaatccgcggatttcataagttgatctctgattt

SEQ ID NO: 153605 - DNA, 432 bp, Arabidopsis thaliana columbia
ggttttggaagccagatccggctcacggcggagcaaacagctgctttagcggcggcgttggagaaaagcagtgtgcgtttcatatgggcggtgagagacgcagctaagaaggtgaactccagcgataactccgttgaggaagatgtgatcccggcgggatttgaagagagagtgaaggagaaaggactcgtgataagaggatgggccccacaaactatgattcttgagcatcgagccgttggatcttacctaactcatttgggttggggttcggttctggaaggaatggtcggaggagttatgttgctagcgtggccgatgcaagcagaccatttctttaacacgacgctcatcgttgataaactaaaagccgcagtgcgagttggagagaacagagactcggtttctgactcggacagctcgctaggattt

SEQ ID NO: 153606 - DNA, 425 bp, Arabidopsis thaliana columbia
cattgcttcctcaatctaaggatttccatgaacaaggaactaaaatgagatctcttctctttgtactatcactcatttgcttttgctctcaaacagcactttcatggaagaaggaagagtttcgcagctgtgaccaaactccattttgtaaacgcgctcgatctcgtactcccggcgcgtgttctctaattgtcggcgatgtttccatcactgatggagatctcgtagcgaagcttctaccgaaagcgcctaatcaaggcgatggggatcagatcaagccgttgattctttctctctcagtttacaaggatgggatcgtgcggcttaaaatcgatgaggaccattcgttgaacccgccgaagaagaggttccaagttcctgatgtggtagtgtctgagtttgaggagaagaagatctggctgcag

SEQ ID NO: 153607 - DNA, 431 bp, Arabidopsis thaliana columbia
gcaagtccaggcaacattcagggatgtgatctgcacgaaggcgactggggcacagtcggctctatcgtcttctggaattacgtacatgatggggaggcaaaggtggcgaaggagaggatcgaggcggtggagccagataagaacttgatcacgtttagggttatagaaggtgatctgatgaaagagtacaagagcttcttgctcaccatccaggtgacccctaagcctggaggccctggaagtattgtgcactggcaccttgagtatgagaaaattagcgaggaggtagctcacccggaaactctcctccagttctgtgtcgaggtctccaaagagatcgacgaacatctcttggccgaggaagaggaggtgaagacaccagaaacgcctagtttggtgggaaagctagagacagacgtggagatcaaagc

SEQ ID NO: 153608 - DNA, 422 bp, Arabidopsis thaliana columbia
cgagagatcgctaaacgttacttgtcctcacatttcataattgacattcttgctgttcttccgcttccgcagatggtgattttgataatcattccacatatgagaggttcatcgtctttgtacacgaagaatatgttgaagtttattgttttcttccaatatataccgaggtttataagaatatatccgctctacaaggaagttacaagaacttcaggcatactcactgagacagcttgggctggagctgctttcaatctcttcctctacatgcttgctagtcatgtgtttggtgctttctggtatttgttctcaatcgaacgcgaaacggtgtgctggaaacaagcttgtgagaggaataaccctccgtgcatttcgaagttgttgtactgtgaccctgaaactgcaggaggcaatgcttt

SEQ ID NO: 153609 - DNA, 433 bp, Arabidopsis thaliana columbia
gggtcttctgttttgtctatttttgtttggtgcattagctccaattgtgaacgttaattatggaggaattagtggtgctttttatgggaactatagatctaattatattactgaccagatttacagtcagcatagggatagagttttggatacatctcgtagtggtgctggtactggggtttctaatagtaatgggatgcatcgtgggagagattctgatcgaggagctaggaaaaatatatctgcaacagagagttctgtcactcctggaaatggtagtgagcctctagttgcatcactctttgttccgaggaatgacaagcttgtgaagatagatgggaatttgattatcaattctatattggcgagtgagaaagccgtggcttcgagaaaggcttttgaatcaaaggagaggaaagctgacttgatgatc

SEQ ID NO: 153610 - DNA, 432 bp, Arabidopsis thaliana columbia
gatcgctttctctaaccctaaaatacgtagagagatcagatacctgaaaacaaccaatcaatcatggagtacgctgctcggagaaatcagaaaggcgctttcgaaggcttttacaaacttatcatgcgccgtaattccgtctacgtcactttcatcatcgccggcgcatttttcggtgaacgggctgtggattacggtgttcataagctctgggaacgcaacaatgttgggaaacgatatgaagacatctctgtgttgggtcaaaggccagtagaggaatgagctttcttctttttgaattctcttcagaccaaaagcaagaattggaaatttccatgttgttttgcattccaacgtctctctttctttgttgaataaatataaaatcatggggatgattcatatttcacctaaagctatctggttctgatt

SEQ ID NO: 153611 - DNA, 430 bp, Arabidopsis thaliana columbia
atcttcttcatcgatttctctcttccaaatctcccaaaagatgtcgaaccctagagttttcttcgacatgagtctcagcggtactcccatcggacggatcgagatggagcttttcgctgatacaaccccaaacacggcggagaatttccgtgctctctgtaccggcgagaaaggaatgggaaagctaggtaagccacttcacttcaaaggatcgatcttccaccgtgtgattcccggattcatgtgtcaaggaggtgatttcaccgccaagaacggaaccggtggtgaatcgatctacggtgctaagttcaaggacgagaactttatcaagaagcatacaggagctgggattctctcaatggctaactctggtcctaacactaacggatctcaggtcttcatctgtaccgataagacgtcgtggttagat

SEQ ID NO: 153612 - DNA, 429 bp, Arabidopsis thaliana columbia
aaacggtatctccagcttctctccacaacccacttccgattcctcaaaatcaccaaaagggtttcacccaaaacccgaatccttaaaattcccatctcccaaatccctaaatccaacgagaccgatcttcaaactcagagccgatgttggaatcgattctcgtcccatcggagcttctgaatcatcatcatcaggtacatcaaccgttagctcaactgataaacttcaacagtatttccaaaatctcgattacgataagaagtacggattcgttgaagatatcgattccttcacaatccctaaaggtttatctgaagagacgattcgtttgatttcgaaattgaaagaggaaccagattggatgcttgagtttaggttcaaaagctatgctaagtttctgaaactagaagaaacctaatggtcagataa

SEQ ID NO: 153613 - DNA, 413 bp, Arabidopsis thaliana columbia
gtttgccaccacaacattgtcttttcggggttagtcatacttaatggcttccaattcggagaaaaatcctcttctttcagatgagaaacccaaatcgacggaggagaataagagttctaagccggaatcagcttctgggagttcaacttcatcagctatgcctggcttgaatttcaatgcttttgatttctctaatatggctagtattctcaacgatcctagcatcagagaaatggctgagcaaatagctaaagatcctgcgtttaaccaattggctgagcagcttcagagatctattcctaacgctggccaggaaggtggtttccctaactttgatcctcaacagtatgtcaatacaatgcaacaggttatgcataaccctgagtttaagacaatggccgagaaacttggta

SEQ ID NO: 153614 - DNA, 354 bp, Arabidopsis thaliana columbia
gaaacactgtaagctaaaaatctgaaagcataaagattaactgacataagttatgttctttgcgaaaataaaagttattccacaaacgcattcgataaaacattcaaaaccttcttcagagtctaatccgtgaactgatgatcgatatagcttcacactatatatcctcttcacttcttagacttcttcttcggtacagctgcagttggagcaggtgtagcagcaggtgctggagcagctacaggcgcaacatctccaccgggacccttagctaaacgctcctctctcctagcatgcttcctttctcggctagccttgttcttcgccctcttagcctcaaactgatcagacaga

SEQ ID NO: 153615 - DNA, 413 bp, Arabidopsis thaliana columbia
gctttaccttcgtgcttaaagactggagctttaatgtctccggccactggatttaatttttccggcagtcttatgaagtcagacagcggcttcgccgttccgacaaagttacagagtactcgaaaaggtgatcgagagagattgagagtccaagctattttcagtttccctcctgcgtttctgacaagaaacggtcgagctgagaaacagaaacagctcaaacaagaacttcttgaagccattgagcctcttgaacgtggtgctacggcctcgcctgatgaccagcttcggattgatcagttagcgcgtaaagtggaagcagttaatcccaccaaggagcctttgaagtctgatttggtcaatggaaaatgggagctcattatacaacctttggttcgattttgcaggcaaag

SEQ ID NO: 153616 - DNA, 426 bp, Arabidopsis thaliana columbia
atataggttgctggcacagaggatggtatcaaggagccaacagcaacattctcagcttgctttggtgcagctttcataatgttgcatcccacaaagtatgcagctatgttagctgagaagatgaagtcacaaggtgctactggttggctcgtcaacactggttggtctggtggcaggtatatatgtccttctatggaaatcgatacaacaaaacgctgccttgtaacacatgtttgtaggctattaacatgatctgtaatgttttatttcctgcagttatggtgttggaaacagaatcaagctggcatacactagaaagatcatcgatgcaatccattcgggcagtctcttgaaggcaaactacaagaaaaccgaaatctttggatttgaaatcccaactgagatcgaaggataccttcagagatc

SEQ ID NO: 153617 - DNA, 389 bp, Arabidopsis thaliana columbia
  unsure (1)..(389): unsure at all n locations
taaaaatcgaaaatggattataaggtgaccttcgtctttggttgaccatcaaaaactacaacgctctttctccgtaggaaaggggaagcaaataaattatcgaagcccactggtttcggagctgatcggtctctatttctctcttcatacatatctcaagcagataaagttgatcggatactagaatgggaggaggatttagagttttgcatttggtgaggccattcttggcttttctgcctgaggttcaaagtgctgataggaaggttccattcagagagaaggttatctacactgtcatctctctcttcatctttcttgtctgcagtcagcttnctctttatggaatccattccaccaccggtgcggatccattctattggatgcgt

SEQ ID NO: 153618 - DNA, 382 bp, Arabidopsis thaliana columbia
gattacgccgctcatttttagggtttcagatataggcagattctcacatttgcaaacatgacgactcagatcagcaagaagagaaagtttgtagcggacggtgtgttctacgctgaattgaatgaggttcttacaagagagctagcagaggatggttactctggtgttgaggttagggttactcctatgaggactgagattatcatcagagctacacgtactcagaatgttctcggtgagaaggggaggagaattagggaattgacttcccttgttcagaagagattcaagtttccagttgacagtgttgagctttatgccgagaaggttaacaacagaggtctctgtgccatcgctcaggctgagtctttacgttacaagc

SEQ ID NO: 153619 - DNA, 408 bp, Arabidopsis thaliana columbia
cgaagagtcctctgttactcatttttacattgtaaaaaaaaacttcttatcttctctacgtgaataagaatctgaagagtcattttctcaagaatgacgtggctaaaacaaatgtggtcaagcattttagtgctagccgtggtggtgatcggagccagagctgtgcccatcacgtatcttgaatctgcagtggctaaaggagctgtgtgtttggatggtagcgcgccagcataccatttcgataagggatcgggctcaggagtgaacaattggatcgttcatatggaaggaggaggatggtgcactgatatagctacatgcgttcaacgtaaaagtacaatgaagggttcttctaagcttatgaacaaagactttggtttcttcggtatcttgggtggcaagcaaagc

SEQ ID NO: 153620 - DNA, 402 bp, Arabidopsis thaliana columbia
gcaggaggaagaagacgaagaagaagaggagcagctactaccatggttctcaagacggagctttgtcgtttcagtggacagaagatttacccaggaagaggaattaggtttatccgatctgattctcaggttttcttgtttcttaactcaaaatgtaagaggtacttccataacaagttgaagccatccaagcttgcatggactgccatgtacagaaagcaacacaagaaggatgcagcacaagaggctgtgaagagaaggagacgtgccaccaagaagccatactcaaggtccattgttggtgctaccttggaagtaattcagaagaagagagctgagaagcctgaaagtcgtgatgcagccagggaagctgctctgcgtgagatcaagggaaggatcaaa

SEQ ID NO: 153621 - DNA, 394 bp, Arabidopsis thaliana columbia
agatgatgaagctcaaagtgtatgcagatcgaatgtcacagccatcacgtgctgttatcatattctgcaaggttaatggaatccaattcgatgaggtcttgatttccttggcgaagcgtcaacaattatctcctgaattcaaagatattaacccattggggaaagttccagctattgttgatggcaggcttaagctctttgagagtcacgcaatcctgatatatctatcctcggcgtttccaagtgttgctgatcattggtatccaaatgatctatccaaaagagccaagattcactcaggtttggattggcatcacaaccaattacgtcgtggtgcagctggatatgttctgaatagtgtactaagtccagctcttcgtctttctctgaatcc

SEQ ID NO: 153622 - DNA, 435 bp, Arabidopsis thaliana columbia
ctgagaactgcgattgccttcaagggtttcaggtgtgccattcgttgggaggaggcacaggttcaggaatgggaacactattgatatcgaagatccgagaggagtatccagacagaatgatgctcactttctctgttttcccatctcctaaagtctctgacacagtcgttgagccttacaatgcaactctctctgtccatcagcttgtagagaacgctgatgaatgcatggtcctcgacaatgaagctctctacgatatctgcttccgtaccctcaaactcagcactcctagctttggagacttgaaccatttgatctccgcaacaatgagcggtgtgacttgctccttaaggttccccggacaactaaactctgacctcaggaaactcgcggtgaacctaatcccattccctcgtcttcatttcttcatggtgg

SEQ ID NO: 153623 - DNA, 335 bp, Arabidopsis thaliana columbia
acagccattcaatctcataagacatattgccggagaaactctctcggggggtcgcttcttctgcattttctgcttcccaatggcttccagaattgctgattctctcttcgccttcacgggcccacagcaatgtcttcctagggttcctaagcttgctgcttcttctgctcgtgtttctcctggtgtatatgctgtgaagccgattgatcttctgttaaaaggacgaactcatcgaagtagaagatgtgtagctcctgtgaaaaggagaattggatgtatcaaagcggtggctgctccagttgcaccgccttcagctgacagtgcagaagacaggg

SEQ ID NO: 153624 - DNA, 325 bp, Arabidopsis thaliana columbia
caaacctcagtagccatggaaggcgaagagaagaatgattatagaaacgaggaagaagatttcaagacaccacaacaactacggaggaagcaaaggaaagggaaaaaaatagcaacggaaacagaggatgaaaacgaagaagacaagagagttactctcaaagtcacgcaagtcgccgagagacccgatagaatctgtacgatcgttgcctatttctctacaggatacgatccttgtaaagtagatccaaaaacaggcaagagagttcatgaaactcccaaggttactgtttacaagcataaggatgattctaagaagaggattc

SEQ ID NO: 153625 - DNA, 424 bp, Arabidopsis thaliana columbia
aaaaaaagaaaacacaaaaacaaagattataatggcttcctcaaccatggctttgtcctcccctgccttcgccggaaaggctgtgaagcctgccgcatcagatgtcctcggaagcggccgtgtgaccatgaggaagactgtcgccaagccaaagggtccatcaggcagcccatggtacggatctgaccgagtcaagtacttgggtccattctccggcgagcccccgagctaccttaccggtgagttccccggtgactacggatgggacaccgctggtctatccgccgacccagagaccttcgccaggaaccgtgagctagaagttatccacagcagatgggccatgctcggagccctaggctgcgttttccctgagctattggctaggaacggaagtgagttcggagaagcggtttggttcaag

SEQ ID NO: 153626 - DNA, 384 bp, Arabidopsis thaliana columbia
agcagccatagcctaacaaaaccttcaacaatggcttcaatggctgccgtcttaagcaaaactccattcctctctcaaccactaaccaaatcatctccaaactccgatctccccttcgccgcggtttccttcccttccaaatccctacgccgccgcgtaggatcaatccgagccggattaatcgctcccgacggtggtaagcttgtagagctcatcgtggaagagccaaagcggcgagagaagaaacacgaggcggcggatttgccacgtgttgagctgacggcgattgacttgcaatggatgcatgtattaagcgaaggctgggcaagtccactcggaggtttcatgagagaatccgagttcctccaaactcttcattttaac

SEQ ID NO: 153627 - DNA, 418 bp, Arabidopsis thaliana columbia
ctgacatacagagaagtgatttcgatcttgatgcaaaggcatattcaggttgatgggaaagtgaggactgacaagacttaccctgctggtttcatggatgttgtgtctatccccaaaacaaatgagaacttccgtcttttgtatgacaccaagggacgtttccgtctccactccatcaaggatgaggaggctaagttcaagctttgcaaagtgagatcgatccaatttggtcagaagggtattccctacttgaacacatatgatggtcgcaccatccgttatcctgacccgctcatcaagcctaacgacaccatcaagctcgaccttgaggagaacaagattgtggagttcattaaagttgatgtgggcaacgtagttatggtcactggagggagatacagagggcgtgttggtgtga

SEQ ID NO: 153628 - DNA, 432 bp, Arabidopsis thaliana columbia
aaaatgggtgctttcaggtttcaccagtaccaggttgtgggaagagctctcccgacagagaaggatgtgcagcctaagatttacaggatgaagctctgggctacgaacgaggttcgtgccaagtccaagttctggtatttcttgaggaagctcaagaaggtgaagaagagtaatggacagatgctcgccatcaacgagatctatgagaagaacccaacaacgatcaagaacttcggtatttggttgaggtaccagagtagaactgggtaccacaacatgtacaaggagtaccgtgacaccactcttaacggagctgttgagcagatgtacactgagatggcatcccgtcaccgtgtcagattcccttgcattcagatcatcaagacagccactgtcccagccaagctgtgcaagagagagagcacttaacag

SEQ ID NO: 153629 - DNA, 382 bp, Arabidopsis thaliana columbia
tgaaggggaggtgcttacaatgtacgagcaatggcttgtagagaatgggaagaactataacggtcttggagagaaggagagacggttcaagatcttcaaagacaacttgaagcgcatcgaagaacacaattcagatccaaaccggagttatgaacgcgggttgaacaagttttcggatctaacggctgatgagtttcaagctagttacttaggtgggaagatggaaaagaaaagcctatcagatgtagcggagaggtatcagtacaaagaaggagatgttttacctgatgaagttgattggagggagagaggagcagttgttccaagagtcaaaagacaaggagagtgtggaagttgttgggcgtttgccgcgactggagcg

SEQ ID NO: 153630 - DNA, 402 bp, Arabidopsis thaliana columbia
ataaattttgtggagagcaaagttctcagcaaaatcaaagaagaaccgaacgagagagagaaacgaattcttctcaggtgttaaagaatgtctcggagatatgatagccgtaccacaatcttctcgccagaaggtcgtctttaccaggtagagtatgctatggaggccattggaaacgccggttctgcgattggaatcttatccaaagacggtgttgtgttgatcggtgagaagaaagtcacctcaaagcttcttcaaacctcaacctctgctgagaaaatgtacaagattgatgaccatgttgcctgtgctgttgctggtataatgtctgatgctaacatacttatcaacacggctcgagttcaagctcaacgttacaccttcatgtaccaagagcccatg

SEQ ID NO: 153631 - DNA, 348 bp, Arabidopsis thaliana columbia
cttcgctcttctctttgctctctctctctcaacgcggttcagatccgagtttgggagattcaagctccctgaaaaaagccctttactctcgcttaccaactttgctccagcatggcaggatctgcaccagaaggcacacagtttgatgcacgtcagtttgaccagaaactcaatgaagtacttgagggacaagatgagttcttcacatcctatgatgatgttcatgagagctttgatgccatgggtcttcaagagaaccttctcaggggtatttatgcttatgggtttgagaagccttctgctattcagcaaagaggaatccgccccttctgaagggtcttgatgtga

SEQ ID NO: 153632 - DNA, 432 bp, Arabidopsis thaliana columbia
gcggaacaacaaaagaaaccctagcttccctttgtacctctctctgttccaaaccatgtcgaagagaaagaccaaagagccaaaggttgagaatgtgactcttggaccagctgttcgtgaaggagagcaagtctttggagttgttcacgtctttgcttcattcaacgacactttcattcacgtgactgatttgtctggacgggaaacacttgttcgcatcactggtggaatgaaggtgaaagccgacagagatgagtcctcaccttatgctgctatgcttgcggcacaagatgttgctcagcgatgcaaggaacttggaatcactgccatacatgtgaaactccgtgccactggtggtaacaagacctagacccctggacctggtgctcagtctgctctaagagcccctgcccgttctggcttgaaaattgg

SEQ ID NO: 153633 - DNA, 396 bp, Arabidopsis thaliana columbia
ttaaccctaatttttgccgaactcgtcttctgctgaaaaccctagatctacagatctcccgaatctcccagggagataatttgaagatggtgtctgacgctagcaagaagaaggcagctcagaagaaagctgctgccgccgctaaaagaggtggtaaagctgctgctccatccaaatccgccgctacttcttccaacggtgttgatagcttgtcaagcggtgtcgatgctcttcaaatttctgatcggacttgtaccggagttctctgttctcatcctcaatctagagatatccgaatagaatttctgtctgtgacgtttcatggttatgaccttattgttgattcaatgttggagcttaactatggaaggcgttatggtcttcctgggttgaatg

SEQ ID NO: 153634 - DNA, 419 bp, Arabidopsis thaliana columbia
ttcaattactctcgccgacgattttctcaccggaaaaaaacaatatcattgcggatacacaaactataatggacctcctcttgctggagaagtctttaatcgccgtcttcgtggcggtgattctcgccacggtgatttcaaagctccgcggcaagaaattgaagctacctccaggtcctataccaattccgatcttcggaaactggcttcaagtcggagatgatctcaaccaccgtaatctcgtcgattacgctaagaaattcggcgatctcttcctcctccgtatgggtcagcgaaacctagtcgtcgtctcctcaccggatctaacaaaggaagtgctcctcactcaaggcgttgagtttggatccagaacgagaaacgtcgtgttcgacattttcaccgggaaaggtcaagatatg

SEQ ID NO: 153635 - DNA, 429 bp, Arabidopsis thaliana columbia
  unsure (1)..(429): unsure at all n locations
ctgttttagggttttgccttgttcttgtggcgggaataacaaagacatcgccgatatggggaaagacgaagaggaaatgcgaggtgagatcgaggagcgactaatcaatgaagagtacaagatctggaagaagaacactcctttcctctacgatctcgttattactcacgctctcgagtggccttcacttactgttgaatggcttcctgaccgtgaagaaccttccggtaaagactactccgttcagaagatgattctcggtacccataccttcgagagcgagcccaattacttgatgctagcccaagttcagctttctcttgacgataccgagagtgaagctcgtcagtacgatgatgaccgctctgaatttgggggctttgctgtgcaactggtaaggtcaaattatncagcagataaatcatgatg

SEQ ID NO: 153636 - DNA, 350 bp, Arabidopsis thaliana columbia
gaaaaacattggaaaaaccctaattcctagtgttgcgaatcacttttcattgcagctttgaacttcagtctgtgaatttccaacagcaatgacaactccagcaaaaaagagactgatgtgggatttcaagagactgcagaaagatcctcctgtgggaataagtggagctccacaagataacaatatcatgcattggaatgctctcatctttggacctgaggacactccatgggatggaggtactttcaagttgactcttcacttcaccgaggattatccgaacaaacccccgattgttcggtttggttcacggatgtttcatccaaacatttatgctgatggaagcattt

SEQ ID NO: 153637 - DNA, 399 bp, Arabidopsis thaliana columbia
  unsure (1)..(399): unsure at all n locations
caacttcggagcgaatctattcttcttcttcttcttcttcttcttcttcttcttcctccgtttttttcatcttcttctctgtttcgagagatccactagtgaaagagtcagcaccatggccatggtcaaagagaaagaacaaaacactaaagacaaaaaactcctcgtcggcgtcatttggaacttctccgccgagctcaagctcactttcatggcgttacttgttctctgcactttagctactctcttacctttcataccttcttcattctctctctccacttccgatttccgcttctgcatctcacgcttntnctncgncgtccctcttaacaccaccaccaccgtagaagaatcatcatcctcaccgtcaccggagaagaacctagatcgagtttt

SEQ ID NO: 153638 - DNA, 288 bp, Arabidopsis thaliana columbia
atcattcctgtgatgcgatataatattccgattgtgattagaaatattttcaatctctctgcaccgggaacaataatctgtcaacctcctgaagatgattatgaccttaaactgacaactcctgtcaaagggtttgcaactattgacaatttggccctcataaatgttgaaggtactggaatggctggtgtacccggtactgcaagtgacatttttggctgtgtaaaagatgttggagctaatgtgattatgatatcacaggctagcagtgagcattctgtgtgcttt

SEQ ID NO: 153639 - DNA, 272 bp, Arabidopsis thaliana columbia
attggctctgtctcaaaaaatgaaattctcaatttaccaccaccatcctttaaagcctctttggttacccatctcttgaaccctggtaggttctatgagtatgtcgcagtctcgagctgtgcaaagatcgtgttcaccttatgaggatagaggtgagaatcagttagtggtttatgacttgaaaggaaatgatgatactgaagaagaagttctaccggttcaatctcagcctttgtcatctagaacacagtgtccctctattcgggcattta

SEQ ID NO: 153640 - DNA, 349 bp, Arabidopsis thaliana columbia
  unsure (1)..(349): unsure at all n locations
attattatcaaagcctaaacctctcttttcttcttctctttacctttttnattncaaaatcgggtctctctctctctctttctctggctcgggaagaagatgtcacgtagttgctcacagtgtggaaacaacggccacaactctcgcacatgtccgacggacataactaccaccggtgacaacaacgacaaaggcggcggggagaaagccatcatgctttttggcgtccgcgtcacggaagcttcatcatcttgttttagaaaaagtgttagtatgaacaatctctctcaattcgatcaaacttctgatcccaacccaaccgatgacggtggttacgcttcagacgacg

SEQ ID NO: 153641 - DNA, 368 bp, Arabidopsis thaliana columbia
atttctcacattttcgtagccgcaagactcctttcagattcttacttgcagctatgggtaaagagaagtttcacattaacattgtggtcattggtcatgttgattctggaaaatcgaccacaactggtcacttgatctataagcttggtggtattgacaagcgtgtcatcgagaggttcgagaaggaggctgctgagatgaacaagaggtccttcaagtacgcatgggtgttggacaaacttaaggccgagcgtgagcgtggtattaccatcgatattgctctatggaagttcgagaccaccaagtactactgcacagtcattgatgccccaggacatcgtgatttcatcaagaacatgattactggt

SEQ ID NO: 153642 - DNA, 379 bp, Arabidopsis thaliana columbia
gttactgaatcatggggcaagtatggaatcatcagagaaactgatatgtggaataaacgtccagagttcacagcatggttgcttgaagtaaagaaggttaatttggaaagcttgccaccttgggaagagaagaaaatgtttaaagattttatggaggatcataatactggtacatttacctcgaaaaaatactatgacattgatggttactatagacttaagttggaaaaagagatgaaaaagggtttgaagaaagctggattagtgaacgtactgtgttcaatgatgaggaacaacgccgactggagatgcaggaattacgtgaaaggcagaaggaagaagaagtgttagctttaaagcgatcaatggaaggtggaat

SEQ ID NO: 153643 - DNA, 437 bp, Arabidopsis thaliana columbia
gtggaaggatactacgaaaaaaactttggagttgatactgtagtgacaacgctgattttcaagactagcaagaacaaaacagctggaccgtttgggattgtatctggcacaaagtttgaattcaagaaggaaggttacaagatcactgggttccacggacgagctggtgagtatgttaatgctattggagcttatttagctccatcaggcaccacccctttgactcctgcaacacaatcccaaaagctagaaggagctggtagtgaggcaggaactttatgggatgatggtgctttcgacggtgtaaggaaagtgtctgtaggacaagcccaagatggtattggagcggtctcgtttgtgtacgacatagcaggtcaggttgtagaaggaaaagaacatggaaaacccacattgcttggatttgaagagtttgagct

SEQ ID NO: 153644 - DNA, 582 bp, Arabidopsis thaliana columbia; identical to SEQ ID NO: 130965

SEQ ID NO: 153645 - DNA, 603 bp, Arabidopsis thaliana columbia
ttcaattctctgtttcctccaaaatggctacaccaaacgaagtatcagctcttttcctcatcaagaagtatctcctcgacgaattgtctccgttgcctactactgccaccaccaatcgatggatgaacgatttcacgtcatttgatcaaaccggtttcgagttttctgaatttgaaaccaaaccggaaataatcgatctcgtcactcccaaaccggagatttttgatttcgatgtgaaatctgaaattccatctgaatcgaacgattccttcacgttccaatcgaatcctcctcgcgttactgttcaatccaatcgaaaaccgccgttgaagatcgcaccaccgaaccgaaccaagtggattcaattcgcaaccggaaatcctaaaccggaacttcccgtaccggttgtagcagcagaggagaagaggcattacagaggagtgaggatgaggccgtgggggaaattcgcggcggagattcgagacccgactcgtcgtggaactcgtgtttggctcgggacgtttgagacggcgatcgaagcggctagagcttacgacaaagaaacgtgtagacttcgaggatcaaaggcgattctgaattttc

SEQ ID NO: 153646 - DNA, 450 bp, Arabidopsis thaliana columbia
aatctttctctgatttcataaaacagaatagagatttataaaacttcttgcttttaaagatggcgattagattgtcgcgtgtgatcaactctaaacagtcccaaaaacagcaatctcgagtcccgaaaggacatgttgcggtttatgtcggagaagagatggagagcaagaagagattcgtggttccgatttcgtatttgaaccatccttcatttcaaggtttgcttagtagagcagaggaagagtttggtttcaatcatccaatcggtggattaacgattccatgcagagaagaaacatttgttggtcttttgaattcttatggttgtattgtttcaacttgagacaacttttttgggaaagcccaaaacttttttttttctttctatagaattactttttttgccgctgttacctttggttatttttgcaaatgagacacatattgat

SEQ ID NO: 153647 - DNA, 331 bp, Arabidopsis thaliana columbia
gaagagaacatgagtgtgatggttgaggttagaggatttgagatgcttgttggaaaggattttagcatgtcctgaaaaatgggtatgaattaatttacatgtgagagcagataaactattgaggaggagaatgagattatttaaaaaaaaaggggaatgtgctgttcttgctccatttcctaatcattaataaagaaaaaaagaattagaggtttggttttagattgtgtctctgtctttttattaaaagatgctttagtctgaataaaatttgaagcagaagaagtgttacttcattggcttatttacttctttggtttccacatgcaag

SEQ ID NO: 153648 - DNA, 567 bp, Arabidopsis thaliana columbia
agtaatcctaactatacaaaacacataacaatatggctccttcaacaaaagttctctctttacttctcttatatgtcgccgtgtcattagcctccggtgatgagtccatcatcaacgaccatctccaacttccatcggacggcaagtggagaaccgatgaagaagtgaggtccatctacttacaatggtccgcagaacacgggaaaactaacaacaacaacaacggtatcatcaacgaccaagacaaaagattcaatattttcaaagacaacttaagattcatcgatctacacaacgaaaacaacaagaacgctacttacaagcttggtctcaccaaatttaccgatctcactaacgatgagtaccgcaagttgtacctcggggcaagaactgagcccgcccgccgcatcgctaaggccaagaatgtcaaccagaaatactcagccgctgtaaacggcaaggaggttccagagacggttgattggagacagaaaggagccgttaaccccatcaaagaccaaggaacttgcggaagttgttgggcgttttcgactactgcagcagtag

SEQ ID NO: 153649 - DNA, 421 bp, Arabidopsis thaliana columbia
ataacgatgaactcgcttccgaggagatttgggaagaatcatggctatttggatcgagattatcgaaacggaagacgatctggttcagattccgatgaagaattgaagggattgagtcacgaagagtataggaggcagaaacggcttaagatgaggaaatcagccaagttctgcttttgggagaacacaccgagtccacctagagatcagaacgaggattccgatgagaacgccgacgagattcaggacaagaacggcggcgaaagagatgataattcgaatgggaaagaacggaaaggtaaatctgactcggaatctgaatctgatggtttgagatctaggaagaggaagtgtcagagctcgcggtatgatggacctagaaagaagtcctatgaccgccctagcgattgctaagggcgtg

SEQ ID NO: 153650 - DNA, 626 bp, Arabidopsis thaliana columbia
atcggaattacacacaaataatgggattgcaaaagctgtctgtcattgggctgcttttgctcctgacgcatcgtcgtctctacagcaaatgcagatggacctgtttgcccgccgacgaacaaactaagccgggcacggttccctgaaggttttttatttggcacggctactgcggcataccaggtagaaggtgcgattaatgaaacttgtcgtggaccagccttatgggacatctactgtagatgatatccagagaggtgcaataacgataacggcgatgtggccgttgatttcttccatcgctataaggaagatatccaactaatgaagaatctaaacacagacgcctttagaatgtctatcgcatggccaagaatatttcctcatgggagaaaggagaaaggagtgagtcaagctggtgtgcaattctaccacgacctgatcgacgagctcataaaaaatggtataactccattcgttactgtttttcactgggacactccacaagatttagaagatgaatatggcggctttttaagcgaaaggattgtgaaggattttcgagagtatgcagatttttgtttccaagaataccggggaaaagtgaaacattgatcacttttaat

SEQ ID NO: 153651 - DNA, 500 bp, Arabidopsis thaliana columbia
ggacacatctcattgaccatcaatgtcatcctcatgttcacatcaggagtcttcatcattggaccatttgctctcatcacaacagctgtctcagctgatctcggaacccacaaatctctcaaaggcaatgcaagggctttggctacagtctcagctatcatagacggcacaggatccgtcggtgctgcgattggaccagtcctcactggttacatctctgccataagctgggacgcagtgttttacatgttgatgactgcagcattgatctctggattgttgctcactaaactaatcatagcagaagtcaaagcgttattgtttggatcagaagatgaagtagctgcatcatcatgatcaccaccagcatccagacctcccattgatgtcctcgcttgagttttttccttcattatttatcagatgctctgacaattgcacactttttttatccttttaaagttcgttcctttttcccaaaaaaggtggaatccccaatt

SEQ ID NO: 153652 - DNA, 518 bp, Arabidopsis thaliana columbia
cgaaaaagagagcgaagcttgaaatctccgattaagccatgaatgctcccgaacgatatgagcgattcgtcgtccctgaaggcaccaagaaggtttcttatgatagggatacgaagatcatcaatgctgcttccttcacgggtggaagagaaaaccatacgattggaaacattgtccgcatgcaacttcatcgcgacgagaatgtcttgtttgctggataccaacttcctcatcctcttaagtacaaaatcatagggaggattcacacaacaagccagtcttccccaatgcaagcatacaaccaggccatcaatgacttggacaaggagctcgactacttgaagaaccagtttgaggcagaggtggccaagttttcgaatcagttttaaggaacttggagttctccatcagcacatcggggaaaacgttttacattgtcttttgctaagcaccaatcaaggactaataatgagcttgggaaaatttccctagatatgctttgtataaatcaaaaacaa

SEQ ID NO: 153653 - DNA, 513 bp, Arabidopsis thaliana columbia
  unsure (1)..(513): unsure at all n locations
gccgcatcatccttctcccttgtgcgatatcgtttgcgtgagatttgtctgaaaagtagctaaccatgggtaaagagaagtttcacatcaacattgtggtcattggccacgtcgattctggaaagtcgacaaccactggacacttgatctacaagttgggtggtattgacaagcgtgtgatcgagaggttcgagaaggaggctgctgagatgaacaagaggtccttcaagtacgcatgggtgttggacaaacttaaggctgagcgtgagcgtggtatcaccattgacattgctctctggaagttcgagaccaccaagtactactgcactgtcattgatgctcctggtcatcgtgatttcatcaagaacatgatcactggtaccttccaggctgattgtgctgtccttatcattgactccaccactggtggttntgaggctggtatcttcaaagatggtcagacccgtgagcacgctctccttgctttcacccttggtgtcaagcagatgatct

SEQ ID NO: 153654 - DNA, 349 bp, Arabidopsis thaliana columbia
gcctgaaaaaaatttgagataatggccagaaagttcttcgtcggaggcaactggaaatgtaacggaactgctgaggaggtgaagaagattgtgaacactcttaatgaagctcaggttccttcacaggatgttgtagaggttgcggttagccctccatatgtttttcttcccctggttaagagcacattgaggtctgacttttttgttgcggcacaaaactgttgggttaagaaaggaggtgctttcactggtgaagtgagtgcggagatgcttgtgaacttggatattccatgggttatacttggtcactctgaaaggagggctatccttaatgaatcaagcgagttcg

SEQ ID NO: 153655 - DNA, 345 bp, Arabidopsis thaliana columbia
aaagaggaaggccacaagatcgttggtttccatggaagagccgatgttctgctccacaaaattggagtccatgttcgtcctttatccaactgatgatggagctctttatccttgattccatgcatctaataagttatcaaatctatcttctaaatttctcatatgaggtctcttcatgcctctggtgaatggtgatctttgataagtggtttacgcgttggctcttgcgatggtggtttttctttggtcttcttgggctctattttaataaaggaaggttggtccaatctgatctttaagttccctatatggtctataatacttacttttggcaaaaaaaaaaga

SEQ ID NO: 153656 - DNA, 664 bp, Arabidopsis thaliana columbia
tccaaatcgaaagcaatttctctcgacgaagaaaagagaagcaatcggagtctgtggaggtaaagaagtacacgatcaaatttcaagtcagagtttcggggaaaaaaaaggaatgggggatcatctggtgagagctgaggaattcgagaagaaagctgagaaaaagctcaatggatggggaatattcggatctaagtacgaggatgctgctgatctgctcgaaaaagcagctaattcctataagctcgccaaatcatgggatcaagctggaaaagcttatctaaaacttgccgactgtcacttaaagtcagatagcaaacatgatgctgctaacgcctatgctgaggctgctaaatgctacaagaaagttgacactaatgaggctgcgtcttgcctagagcgagcggtgaatatattttgtgagataggaaggctcaacatggctgcaagatattacaaggaaattgctgagtattatgaatctgatcagaagttcgagcaggctattgcttactttgaaaaggcagctgaattctttcagaatgaagaagtgaccacttctgcaaaccagtgcaatctaaaggttgcgcaatatgccgcccagcttgagcagtatgagaaggcaatcaagatttatgaagacatagcacgccattcactcaac

SEQ ID NO: 153657 - DNA, 472 bp, Arabidopsis thaliana columbia
cttttgtctccgtctctctgtctctcatggcgactcttcctctcccgactcaaacttctacaatctctctccctaaaccttatctctccaattccttctccttcccactccgtaacgcaacactctcaacaacaacaaaccgccggaactttctcaccaccggaaggatcatagctcgggcatataaagtggtggtagagcacgacggaaagacgactgaattggaagtcgaaccagacgagacgattctatctaaggctcttgactctggccttgacgttccctacgactgcaatctcggtgtttgtatgacttgtccagcgaaactcgtgaccggaacggtggatcaaagtggtgggatgctaagtgatgatgtggttgaacgtggctacacgcttctatgtgcttcgtatccaacttctgattgacaacataagatgatccctggggatgaactttagtcttttcagct

SEQ ID NO: 153658 - DNA, 569 bp, Arabidopsis thaliana columbia
atagctcctaacaaagcaatatcatttccaatttataaaagttaaagccatggctgcatctttctctgtcccctctatgataatggaagaagaagggagattcgaagcggaggttgcggaagtgcagacttggtggagctcagagaggttcaagctaacaaggcgcccttacactgcccgtgacgtggtggctctacgtggccatctcaagcaaggctatgcttcgaacgagatggctaagaagctgtggagaacgctcaaaagccatcaagccaacggtacggcctctcgcaccttcggagcgttggaccctgttcaggtgaccatgatggctaaacatttggacaccatctatgtctctggttggcagtgctcgtccactcacacatccactaatgagcctggtcctgatcttgctgattatccgtacgacaccgttcctaacaaggttgaacacctcttcttcgctcagcagtaccatgacagaaagcagagggaggcaagaatgagcatgagcagagaagagaggacaaaaactccgttcgtggactaactaaagcccatcatcg

SEQ ID NO: 153659 - DNA, 561 bp, Arabidopsis thaliana columbia; identical to SEQ ID NO: 130970

SEQ ID NO: 153660 - DNA, 418 bp, Arabidopsis thaliana columbia
cgcgccttctcagtcaaccgggaagcccggaggaatgcgttcgagtaaaatcatagccattactgcagctgtgattggcggggtctctctcatgctgattgctctcattgtctacctcatgagacgcccagtgagaacagtcgcttcttctgctcaagatggccaaccatcggaaatgtctttggacatatacttccctccaaaggaaggattcacgttccaagatttagttgcagccactgataatttcgacgagagctttgtagttgggagaggagcttgtggaaccgtctacaaagcgggtcttccagccgggtacactctagctgtcaagaagctggcatcaaaccatgaaggcggcaacaacaacaatgtggataatagctttagagcagaaattctaactcttgggaatatc

SEQ ID NO: 153661 - DNA, 610 bp, Arabidopsis thaliana columbia
atgaatacaaaataagatttatggctacacaaactgttgaagatagttctagatctggtccaagaagcactactgtagggaagttattgaaaccattgaattccgaatatggtaaagtagctcccggatggggaacgacccctttgatgggtgttgcaatggctctatttgcggtattcctatctattattttggagatttataattcttctgttctactggatggaatttcagtgaattagactgagaagaatcttgaagttctagcttttagctcgatacaaaaaagtaaagtatgcaggtctaacaattttagcctattctcctttggtagttcgaccgcgaaatttttttctgcattgtatatttccggaatatgagtaaagtttatgattggttcgaagaacgtcttgagattcaggcgattgcagatgatataactagtaaatatgttcctccgcatgtcaacatattttattgtctaggcggaattacccttacttgttttttagtacaagtagctacgggatttgctatgactttttattaccgtccaaccggtacttgaacttttgcttctgttcaatatataatgactgaagctaacttt

SEQ ID NO: 153662 - DNA, 659 bp, Arabidopsis thaliana columbia
tggagatccatcgaagaccattgctgtccctgaagggttcgattacgaactctacaacaggaacgacatcaaccgtatccttggtcctaaagcttcctgcatttccttcaaggactctgcttgtcgttgcttcggctacatggtctccaagaagaagtacatcttcactattgatgacgattgcttcgttgctaaggatccatctggaaaagctgtgaacgctcttgagcaacacatcaagaaccttctctgcccatcaactccatttttcttcaacaccttgtacgacccataccgtgaaggtgctgacttcgtccgtggataccctttcagtctccgtgagggtgtttccaccgctgtttcccacggtctgtggctcaacatccctgattacgatgcccctacccaacttgtgaagcctaaggaaaggaacacaaggtatgtggatgctgtcatgaccatcccaaagggaactcttttccctatgtgtggtatgaacttggcctttgaccgtgagctcattggtccggctatgtactttggtctcatgggtgatggtcaggctattggtcgctacgacgatatgtgggctggatggtgtatcaaggtgatctgtgacccattgggattgggagtgaagacaggtttggcctacattt

SEQ ID NO: 153663 - DNA, 511 bp, Arabidopsis thaliana columbia
gtgaagctcacaatggcgaggattaaggttcacgaatttagggagaagtcgaagagcgatcttcgaaaccagcttaaagaacttaaaggttaactcgctctcctccgtgtcgctaaagtcaccggaggtgctccaaacaagctctctaaaatcaaggtcgtgcgtaaatccatagctcacgttttgacagggtcttctcagaagcagaagtctgctctaagagaagcatacaagaacaagaagttgctttctcttgatctccgtcccaagaagacccgtgctattcgtagacgcctcaccaaacaccaggcctcgttgaagacagagcgtgagaagaagaaggagatgtatttcccaataaggaagtacgctatcaaagtttaagttttagctgctagaaacactggttcaactttttggtttgatggaaactctgtcttggtcttcaactgtgggtaaggtcgtaaacagtttcaaatactttggatttttggcttttccgtgtgcacac

SEQ ID NO: 153664 - DNA, 571 bp, Arabidopsis thaliana columbia; identical to SEQ ID NO: 130972

SEQ ID NO: 153665 - DNA, 519 bp, Arabidopsis thaliana columbia
aaaaaaagagagaagaaaaatggtgttgacaatctatgctcctttattcgcttcttcaaagagagctgttgtgacattggtggagaagggagtatcattcgaaactgtcaatgtcgatctcatgaaaggagaacagagacagcctgagtatctcgcgattcagcctttcggtaaaatcccagtcctcgtcgacggagactacaaaatcttcgagtcgcgtgcgatcatgaggtatatagcagagaagtatagatcacaaggacctgatcttttggggaagactattgaagagagaggacaagtagagcaatggttagacgttgaggctacaagttaccatccaccactattggctttaacgctcaacattgtctttgcaccacttatgggtttccctgctgatgagaaagttattaacgagagtgaagagaagcttgcagaagtgcttgatgtctatgaagctcagctttctaagaacgaatacttggctggtgattttgtgagtctagctgatttggc

SEQ ID NO: 153666 - DNA, 499 bp, Arabidopsis thaliana columbia
ctcagccgtctgtcttacctccagaagtcgacgacaacattggcaccgaagaagggagttaaagtggcttcaaagaagaagccggagaaagttaccaacccattgtttgagagacgcccaaagcaattcggtattggtggcgctttgcctcctaagaaggatctttctcgttacatcaaatggcctaagtcaatccgtcttcaaaggcagaagcgtatccttaagcagaggttgaaggttcctccagctcttaaccagttcaccaagacccttgataagaatctcgccaccagcctcttcaagattcttctgaagtataggccagaggacaaagccgcaaagaaggaacgccttttgaacaaggctcaagctgaggcagaaggaaagcctgctgaatccaagaagcccattgttgttaagtatggtctcaaccatgtgacttacctcatcgagcagaacaaggcacagcttgtggtcattgcacacgatgttgacccta

SEQ ID NO: 153667 - DNA, 564 bp, Arabidopsis thaliana columbia
ctcatttactgttctgtttcactttctctctctctgtatactctctaaatgatggcaaaaaactgtaatttagtcagtgttctatgtgtatttttggtattgaccctctttaacaaacccatcaccgtcgccgggcagaatattccggcggtgggcttgttcacctttggtgactccaacttcgacgccggaaacaaacagactctcaccaaaaccttactccctcaaactttctggccgtatggaaaatcccgagatgatcccaacggcaaattctccgacggcctcatcgctccagacttcctcgctaaattcatgaggattccgatcgtgatcccgccggcccttcaaccgaacgtcaatgtctcacgtggagctagtttcgccgtcgctgatgctactctactcggagctccggtggaatctttgactctgaatcaacaagtgagaaagttcaatcaaatgaaagcagcaaattggaatgatgatttcgtgaagaagtagtgtttatgatatacattggtgcaaacgattacttgaatttcaccaaaaacaaccctaacg

SEQ ID NO: 153668 - DNA, 579 bp, Arabidopsis thaliana columbia
aaaaaagaacgatagagatatttagtgataattttgttgggtcaacgtaatcaacggtcagaaatagatcacggtgcgttcgtctggcggcttcatttggcacaaggagtttactagtctggacaatatgtccttaattgctcttatcggagaaggcttactctgtttttcaggcgaactctgtttatcttctccgagctcgtacgagaatattcgtaaaggtttcttgtgagcttaaacgatgagtacccttgagaccacaagagctgagcttggtctggtagttgtgtatttgaataaagcggaggcgagagacaagatttgtcgagctattcaatatggttccaagttcttgagtgatggccaacctggcactgctcaaaatgtcgacaagaacaccagcttggctaggaaagttttccgtctcttcaagtttgtaaatgatcttcatgctctcattagccctgttcccaaagggactccactcccgcttgttctgctcggaaagtctaaaaacgcgttgctgtcaacgttcttgttcctagatcaaattgtgtggcttggcaggactgggattta

SEQ ID NO: 153669 - DNA, 625 bp, Arabidopsis thaliana columbia
agatgacaacaccagtaggaaaacaagtcagtaagtaaacgagcaaaagaagaagagaaacaacaagaagtagtaatggcttcctctatgctctcctccgccgctgtggttacatccccggctcaggccaccatggtcgctccattcaccggcttgaagtcatccgctgcattcccggtcacccgcaagaccaacaaggacatcacttccatcgcaagcaacgggggaagagttagctgcatgaaggtgtggccaccaattggaaagaagaagtttgagactctatcttacctccctgaccttagtgacgtcgaattggctaaggaagttgactaccttctccgcaacaagtggattccttgtgttgaattcgagttagagcacggatttgtgtaccgtgagcacggaaacactcccggatactacgatggacggtactggacaatgtggaagcttccattgttcggatgcaccgactccgctcaagtgttgaaggaagttgaagaatgcaagaaggagtacccgggcgccttcattaggatcatcggattcgacaacacccgtcaagtccaatgcatcagtttcattgcctacaagcccccaagcttcaccgaaacttaatttc

SEQ ID NO: 153670 - DNA, 392 bp, Arabidopsis thaliana columbia
ggcgcccttacactgcccgtgacgtggtggctctacgtgtccatctcaagcaaggctatgcttcgaacgagatggctaagaagctgtggagaacgctcaaaagccatcaagccaacggtacggcctctcgcaccttcggagcgttggaccctgttcaggtgaccatgatggctaaacatttggacaccatctatgtctctggttggcagtgctcgtccactcacacatccactaatgagcctggtcctgatcttgctgattatccggacgacacctgtcctaacaaggtggaacacctgttcttttgttagcagcaccatggcagaaaggcaggggacgcaagaatgatcatgagcagaaaagttcggacaaaaactccgatactggactac

SEQ ID NO: 153671 - DNA, 422 bp, Arabidopsis thaliana columbia
gttcaaagatcaagatctgcagacatggcggacgaagcaaccagagctgcttttatggagattcaagctagcattaatggacctacttggaaacttaaacaggtgcagaatcagatgcgcaacaaagagggagatagaaagcgagctttcttaaccttggaggagctgaggccattgcctgaagagacaaacacctacaagtcaataggaagaacgtttgttctagagcccaagacagtgctggagggtgaacaagagcaaaaactcaaggacagtgaagctgccgttgcttctctacagacatccaaggaatacttggagaagcaggtagcagaggttgagaacaacttgagggagctgttgcagcaagaaccgggcattgctcaacagattatgtccatgtctatgtaacttttgtatta

SEQ ID NO: 153672 - DNA, 565 bp, Arabidopsis thaliana columbia
aacttctgaagatttttcttactcagaggttaaatgcctacacggaattccaaaatgcaaattcgggatttctgcaaagctatggactttccaatgaagattgtgttacgaagatgaggttgttgtcactagtggatttggcctcagatgaatctggcaaaataccttacacctcgattaaagacactcttcaggtaaatgaacaggatgtcgagttatggatcgtgaaggcaataactgcaaaactgattgagtgtaagatggatcagatgaaccaagttttaattgtcagccgctcttccgaacgtgaatttgggacaaagcaatggcaatatgttcgaacaaagcttgcgacttggaaggacaacattccaagcatcataactaccatcgaatccaataatgtaactcaggaaggttttcacgcatcatcatcatttgctgcagctattcaaggcttgagtgttcgttgccaaagctatgaagaaaaactctttcattccccgagaagctaaattgtattacgaacctttcgtcttcctttaagctttatctctgcgttttt

SEQ ID NO: 153673 - DNA, 344 bp, Arabidopsis thaliana columbia
ctcaattctcgagtgagaatgctcagagaagagttacatctccttcaagaacctgggtcctatgtgggagaagtggtaaaagttatgggaaagaacaaggtcttggttaaggttcatccagaggggaagtatgttgttgatattgacaaaagtatagacattacgaaaatcactccatcaacgagagttgctcttcgtaatgatagctatgttctccacctggttctgccaagtaaagtagatcccttggttaaccttatgaaagttgagaaggttccagactccacctatgacatgattggtggtcttgaccagcagattaaggaaataaaggaggtcattga

SEQ ID NO: 153674 - DNA, 567 bp, Arabidopsis thaliana columbia
gcttatctcaagctttctacttgtcttatactccaccaccatcattgttgcttcatcagaatctcgatgtaggcgttttaaatcgatcatcagctttggtgattccatcgcagacaccggaaattatctccatctctctgatgtcaatcaccttcctcaatccgcctttcttccttatggcgaaagcttcttccatcctccctccggtcgtgcctctaatggccgtctcatcatcgacttcattgccgaattcttgggactaccatacgtaccgccttactttggatccaaaaacgttagcttcgaacaggggatcaattttgcggtgtatggagcaaccgcattggaccgagcgtttcttttgggaaaaggaatggaatctgatttcaccaatgttagtttaagtgttcagcttgacaccttcaagcagattttgcctaacttatgcgcctcgtctactcgtgattgcaaagagatgcttggagactcgctgatactcatgggagagattggaggaaacgacttttaatacccatgtttgaaggaaaaagtttcaatgaaatcaaa

SEQ ID NO: 153675 - DNA, 507 bp, Arabidopsis thaliana columbia
caaaaagcttttaacctcagccgttaaatctttctccgatcatgccgaccagaaacatcgccattggtggagtccaagaagaggtctatcaccccaacgcacttagggcggcgctcgctgagtttatctcgactttgatcttcgtcttcgccggctcaggctccggaattgctttcaacaagatcactgacaatggagcaaccactccttccggcctcgtcgccgctgccttagctcatgctttcggtctctttgtcgctgtctctgttggcgctaacatttccggtggccacgttaaccctgccgttaccttcggtgtcttactcggtggtaacatcactctcctccgtggtattctctactggattgctcagcttcttggctccgtcgccgcttgtttcctccttagctttgccaccggtggcgagccaattccagcgttcggtctttctgccggagttggatcattaaacgctctcgtcttccagatcgcgatgacctttgggc

SEQ ID NO: 153676 - DNA, 398 bp, Arabidopsis thaliana columbia
ctcggttatctagaattggaaaacaagactatgagacagtaaagcagggaacatctgttggctcgtcggaggtgcatctttcagcgagaatgcaggtcacaggggaagcggaatatactgatgatactccagtacctcctaataccttacatgctgcctttgtgctaagcaaagtgccacatgcccgcatcctttcaatcgatgattcggcagccaaatcttcatctggttttgttggtctgtttcttgccaaagatattcctggggataatatgattggaccaattgttcccgacgaagaattatttgctacagatgtggtcacgtgtgtgggacaagtcattggtgtggtcggcgcggatacacatgaaaatgcaaaaactggaacaaggaaaggt

SEQ ID NO: 153677 - DNA, 563 bp, Arabidopsis thaliana columbia
gggatcaagaatagctgccatggatgagttcattatcaaactccagtctgagaagaagcaaaaagaaaaagaaaggaatgaggcacaaaagcagctgaagaagaaggaagaggaagttgctgctttaagatctcttttaacacagagggaagcttgtgctaccaatgaagaggagataaaagagaaagtaaacgagagaacccagcttttgaagtcggaactagataagaaacttgaagaatgccgaagaatggctgaggaatttgttgagatggagagaaggagaatggaggaaaggatagttcagcagcaagaggaactggagatgatgaggagacggttagaggaaatcgaggttgagttccgccgctcaaatggaggaagtgttgatgaaactagtgggtttgccaaaagactcacgagtctttactctgatgatgatcctggtatggtgaagtcaatggaccttgacatgggtgatccagaacctgtcaagcaagtgtggggagctgtttcacaccaatcaagcaacactattagtagcaacttcactaaccttttgc

SEQ ID NO: 153678 - DNA, 575 bp, Arabidopsis thaliana columbia
aacaggaaggctcatttcacagcttcctccagcgagaggcgtgtgataatgagctctcctctctccaccgatcttcgtcagaagtacaatgtcagatccatgccgatccgtaaagacgacgaggttcagatcgttcgtggtacttacaagggacgtgaaggcaaagttgttcaggtttaccgtcgcaaatgggtgattcacatcgagagaatcacgagggagaaggtgaatggaacaaccgtgaacgttgggattcagccgtcgaaagttgtgataacgaagcttcgtcttgataaagataggaaatcgcttttggagaggaaggctaagggacgtgctgctgctgataaggagaagggtactaagtttacgtctgaggatgttatgcagaacgttgattaagtaagaaggaagaagaaatcttcttgaaaggttttatcttttagagttatcttcaatcgctttttaattttcaagttttggatattttggaatgttgtcagtggatctttatggtgctagacatgagaacttatgttttgattttgagtatttgaagtttggttatggaagtt

SEQ ID NO: 153679 - DNA, 511 bp, Arabidopsis thaliana columbia
attttctcaaactctaaaatcaatctctcaaatctctcaaccgtgatcaagatgcagatcttcgttaagactctcaccggaaagactatcaccctcgaggtggaaagctctgacaccatcgacaacgttaaggccaagatccaggataaggaaggtattcctccggatcagcagaggcttatcttcgccggaaagcagttggaggatggccgcacgttggcggattacaatatccagaaggaatccaccctccacttggttctcaggctccgtggtggtatgcagattttcgttaaaaccctaacgggaaagacgattactcttgaggtggagagctctgacaccattgacaacgtcaaggccaagatccaagataaggagggtattcctccggaccagcagaggttgatcttcgccggaaagcaacttgaggacggcagaactttggcggattacaacatccaaaaggagtctacgcttcatttggtcttgcgtctgcgtggaggtatgc

SEQ ID NO: 153680 - DNA, 417 bp, Arabidopsis thaliana columbia
agcatctttctctgtcccctctatgataatggaagattatgggagattagaagcgagggttgcggccaaacccactaggcggagagtatccatctccaagataactaaattcaacgagaccgaacttgaaactcagagacgatgttggaatcgattctcggtccatcggagcttctgaatcattatgatcaggtgcatcaaccggtagctcaactgataaacttcaacagtatttccaaaatctcgattacgataagaagtacggattccttgaagatattgattacttcacaatacctaaaggtttatatgaagagacgattcgtttgatttcgaaattgaaagaggaaccagattggatgcttgagtttaggttcaaagcttatgctaagtttctgaaactagaagaacctaaat

SEQ ID NO: 153681 - DNA, 561 bp, Arabidopsis thaliana columbia
gatctctcgcaaatggactcatcacataacaacattgttgttctttggttttgggctatggtctttgtgggacggtttcaaagaaggaggagggggttcggaagaattggctgaagtcgaagcagaactggatgctgatttgaaggctaatggtaaatctccaaaagacagtagtaagagagaagatgaaaacaaaaagcagaatagggcgttcctcacgcaatttttctctccaatttttctcaaggctttttcgattaatttctttggagaatggggtgacaagagtcagcttgctacaattggtttagctgcagatgaaaatccatttggggtggtccttggtggagttgtggcacagtttttgtgcaccactgctgctgtaattggaggaaagagcttagcgtctcaaatttccgaaagaatagtggctctttctggtggaatgcttttcatcatttttggcatccaatcgtatcttacttctgttgaggcttaatgctttcttatggtttgtagggagactgatgaaaaggaagaacggtactatccatagtttat

SEQ ID NO: 153682 - DNA, 451 bp, Arabidopsis thaliana columbia
atcggcgatcatccaaagttatcatctttctcataaacttaatttttttcccagtcttccttaatcccaacaacttcttaacaattcaagattcatggctactacacccatctttaatgcttcttgcagctttccttcgactagaggaatcgattgcaaaagctatattggtctgagatcgaatgtgagtaaagtgagtgttgcttcttctcgcattgcaactagtcaacgtcgtaatcttgtcgtaagagctagtgaatccggcaatggacatgctaagaagcttggaatgagtgatgctgagtgtgaagctgccgttgctgctggaaatgttcctgaagctcctccggttccacctaaaccggctgcttccgttgggacaccgataattaagccttttaatctaagccgacgcccacctcgtaaccgcgctttccctgttactagagct

SEQ ID NO: 153683 - DNA, 489 bp, Arabidopsis thaliana columbia
gaaagataccagacaaggagattcttgagattgtgaaggagagttttgatttcaggccaggtatgatctccattaacttggatctgaagagaggaggtaatggtaggttcttgaagactgctgcctatggtcactttggaagggacgatgctgatttcacctgggaggtagtcaagccactcaagtctaacaaggtccaagcttgaaacctgtcagcctctgtttcacttctgtccagaatcagtcttgttctctgtattttaggctctttctgcctctttagtttcaactctgagatgggtttattcattttgttttcaactttgaagaaaaaagctaagcagctgggaatttatataattatttatatggtattcttgtgctaagaaagttaaattcataatatgtatttcttacttattttgagaagaaaatcatataagagaataatattcgacattagtctcctttgtttgcattatcaatatc

SEQ ID NO: 153684 - DNA, 473 bp, Arabidopsis thaliana columbia
aaacgagcaaaagaagaagagaaacaacaagaagtagtattggcttcctctatgctctcctccgccgctgtggttacatccccggctcaggccaccatggtcgctccattcaccggcttgaagtcatccgctgcattcccggtcacccgcaagaccaacaaggacatcacttccatcgcaagcaacgggggaagagttagctgcatgaaggtgtggccaccaattggaaagaagaagtttgagactctatcttacctccctgaccttagtgacgtcgaattggctaaggaagttgactaccttctccgcaacaagtggattccttgtgttgaattcgagttagagcacggatttgtgtaccgtgagcacggaaacactcccggatactacgatggacggtactggacaatgtggaagcttccattgttcggatgcaccgactccgctcaagtgttgaaggaagttgaagaatg

SEQ ID NO: 153685 - DNA, 241 bp, Arabidopsis thaliana columbia
gcatgtgaataaaaagcgtgaagctttttgatatctttttctcttcctcttcctttctcctccgatagatttcgccggcgatggcggtggactccttagaaacggagattgacacggcggtgcgtgttgtccacctcgcttcttctctctgtgttaaagttcaagagaagcttcatcttcctaacggtggtcacgttaagtctaaagacgatgattcccctgtcaccgtcgctgattttgg

SEQ ID NO: 153686 - DNA, 482 bp, Arabidopsis thaliana columbia
ggtgataaagatggtctcagtaatgcccggaagctgttttattctgctgttgcaagttacggtcaagacgtggagctgtggaagaattactactcattggagacaaagctgggaacatcagagacagccaatggagtgtattggcgtgcgagaaagactctgatgttcccagtcttgttctatacaaaggttgcattgaaatagagaccaacctcatatcagtaggtgataaagatggtctcagtaatgcccggaagctgtatgattctgctgttgcaagttacggtcaagacgtggagctgtggaagaattactactcattggagacaaagctgggaacatcagagacagccaatggagtgtattggcgtgcgagaaagactctgaatgaatccgcggatttcatagtttgatctctgatttataggtagtctaatatgtatgatgaaggaaacactatgtttgcctcgtatttggggatg

SEQ ID NO: 153687 - DNA, 438 bp, Arabidopsis thaliana columbia
  unsure (1)..(438): unsure at all n locations
ggttttggaagccagatccggctcacggcggagcaatttgctgctttagcggcggcgttggagaaaagcagtgtgcgtttcatatgggcggtgagagacgcagctaagaaggtgaactccagcgataactccgttgaggaagatgtgatcccggcgggatttgaagagagagtgaaggagaaaggactcgtgataagaggatgggccccacaaactatgattcttgagcatcgagccgttggatcttacctaactcatttgggttggggttcggttctggaaggaatggtcggaggagttatgttgctagcgtggccgatgcaagcagaccatttctttaacacgacgctcatcgttgataaactaagagccgcagtgcgagttggatagaacagagactcggntcctgactcggacaagctcgctcggaatttggct

SEQ ID NO: 153688 - DNA, 500 bp, Arabidopsis thaliana columbia
cattgcttcctcaatctaaggatttccatgaacaaggatctaaaatgagatctcttctctttgtactatcactcatttgcttttgctctcaaacagcactttcatggaagaaggaagagtttcgcagctgtgaccaaactccattttgtaaacgcgctcgatctcgtactcccggcgcgtgttctctaattgtcggcgatgtttccatcactgatggagatctcgtagcgaagcttctaccgaaagcgcctaatcaaggcgatggggatcagatcaagccgttgattctttctctctcagtttacaaggatgggatcgtgcggcttaaaatcgatgaggaccattcgttgaacccgccgaagaagaggttccaagttcctgatgtggtagtgtctgagtttgaggagaagaagatctggctgcagaaagtagcgacggagacgatctctggagacactagtccgtcttcacgtggttatgtatccgatggttacgaggcg

SEQ ID NO: 153689 - DNA, 576 bp, Arabidopsis thaliana columbia
  unsure (1)..(576): unsure at all n locations
gcaagtccaggcaacattcagggatgtgatctgcacgaaggcgactggggcacagtcggctctatcgtcttctggaattacgtacatgatggggaggcaaaggtggcgaaggagaggatcgaggcggtggagccagataagaacttgatcacgtttagggttatagaaggtgatctgatgaaagagtacaagagcttcttgctcaccatccaggtgacccctaagcctggaggccctggaagtattgtgcactggcaccttgagtatgagaaaattagcgaggaggtagctcacccggaaactctcctccagttctgtgtcgaggtctccaaagagatcgacgaacatctcttggccgaggaagaggaggtgaagacaccagagacgcctagtttggtgggaaagctagagacagacgtggagatcaaagcttccgctgagaagttccatcacatgttcgccgggaaaccacaccatgtctctaaagcatctccaggaaacattcaaggttgggatcttcacgaaagcgactggngtcaagtcgggtctatcgtgttctggaactacgttcatgat

SEQ ID NO: 153690 - DNA, 607 bp, Arabidopsis thaliana columbia
cgagagatcgctaaacgttacttgtcctcacatttcataattgacattcttgctgttcttccgcttccgcagatggtgattttgataatcattccacatatgagaggttcatcgtctttgtacacgaagaatatgttgaagtttattgttttcttccaatatataccgaggtttataagaatatatccgctctacaaggaagttacaagaacttcaggcatactcactgagacagcttgggctggagctgctttcaatctcttactctacatgcttgctagtcatgtgtttggtgctttctggtatttgttctcaatcgaacgcgaaacggtgtgctggaaacaagcttgtgagaggaataaccctccgtgcatttcgaagttgttgtactgtgaccctgaaactgcaggaggcaatgctttcctcaatgagtcttgtccgattcagacaccaaacacaacactcttcgactttgggatattccttgacgcacttcaatccggtgtagtggaatctcaagatttccctcaaaagtttttttactgtttctggtggggtctgcagaacctcagttcgctcggtcagaaccttaaaacaagtacatata

SEQ ID NO: 153691 - DNA, 342 bp, Arabidopsis thaliana columbia
gggtcttctgttttgtctatttttgtttggcgcattatctccaattgtgaacgttaattatggaggaattagtggtgctttttatgggaactatacatctaattatattactgaccagatttacagtcagcatagggatagagatttggatacatctcgcagtggtgctggtactgaggttatttatagtaatggaatgcattgcaggaaagactgtgatactcactgtagcagatagatatgtggctcagatagttctgtcactcttcataatggctaggagtctgtagggggatcactcttagttgcgaggaatgacacgcttgacaggatagatgggac

SEQ ID NO: 153692 - DNA, 480 bp, Arabidopsis thaliana columbia
gatcgctttctctaaccctaaaatacgtagagagatcagatacctgaaaacaaccaatcaatcatggagtacgctgctcggagaaatcagaaaggcgctttcgaaggcttttacaaacttatcatgcgccgtaattccgtctacgtcactttcatcatcgccggcgcatttttcggtgaacgggctgtggattacggtgttcataagctctgggaacgcaacaatgttgggaaacgatatgaagacatctctgtgttgggtcaaaggccagtagaggaatgagctttcttctttttgaattctcttcagaccaaaagcaagaattggaaatttccatgttgttttgcattccaacgtctctctttctttgttgaataaatataaaatcattgggatgattcatatttcacctaaagctatctggttctgcttcaaaaaaaaaaaaaacaacacaaaaaaaccacaaaacaaacaacaaaa

SEQ ID NO: 153693 - DNA, 595 bp, Arabidopsis thaliana columbia
atcttcttcatcgatttctctcttccaaatctcccaaatgatgtcgaaccctagagttttcttcgacatgagtctcagcggtactcccatcggacggatcgagatggagcttttcgctgatacaaccccaaacacggcggagaatttccgtgctctctgtaccggcgagaaaggaatgggaaagctaggtaagccacttcacttcaaaggatcgatcttccaccgtgtgattcccggattcatgtgtcaaggaggtgatttcaccgccaagaacggaaccggtggtgaatcgatctacggtgctaagttcaaggacgagaactttatcaagaagcatacaggagctgggattctctcaatggctaactctggtcctaacactaacggatctcagttcttcatctgtaccgataagacgtcgtggttagatggtaagcacgttgtgtttggacaagttgttaaaggcttggacgtcgtgaaggcgattgagaaagttggatctgattctggaaagactttcaaagtcgttaccatcactgattgtggtcagctttcttagatctgagtgagaaaatgagagactttgatctttatg

SEQ ID NO: 153694 - DNA, 484 bp, Arabidopsis thaliana columbia
aaacggtatctccagcttctctccacaacccacttccgattcctcaaaatcaccaaaagggtttcacccaaaacccgaatccttaaaattcccatctcccaaatccctaaatccaacgagaccgatcttcaaactcagagccgatgttggaatcgattctcgtcccatcggagcttctgaatcatcatcatcaggtacatcaaccgttagctcaactgataaacttcaacagtatttccaaaatctcgattacgataagaagtacggattcgttgaagatatcgattccttcacaatccctaaaggtttatctgaagagacgattcgtttgatttcgaaattgaaagaggaaccagattggatgcttgagtttaggttcaaagcttatgctaagtttctgaaactagaagaacctaaatggtcagataatagatatccttcgattaatttccaggatatggtgtattactctgctcctaaaaag

SEQ ID NO: 153695 - DNA, 260 bp, Arabidopsis thaliana columbia
gttctccctcttagatctattcctgaaggagctgttgtttgcaacgtcgagcatcacgtcggtgatcgtggtgtcctcgctagagcttctggtgattacgccattgttatcgctcacaaccctgacagcgacactactaggattaagttgccatcgggttcgaagaagattgctccaagtggatgcagggctatgattggacaagttgctggaggtggaagaactgacaagccgatgctcaaggcaggaaacgcgaccac

SEQ ID NO: 153696 - DNA, 627 bp, Arabidopsis thaliana columbia
gtttgccaccacaacattgtcttttcggggttagtcatacttaatggcttccaattcggagaaaaatcctcttctttcagatgagaaacccaaatcgacggaggagaataagagttctaagccggaatcagcttctgggagttcaacttcatcagctatgcctggcttgaatttcaatgcttttgatttctctaatatggctagtattctcaacgatcctagcatcagagaaatggctgagcaaatagctaaagatcctgcgtttaaccaattggctgagcagcttcagagatctattcctaacgctggccaggaaggtggtttccctaactttgatcctcaacagtatgtcaatacaatgcaacaggttatgcataaccctgagtttaagacaatggccgagaaacttggtaccgccttagttcaggatccacaaatgtctccttttttggatgctttctcgaatcctgaaacagcagaacactttactgagcgtatggcgcggatgaaagaagatccagagttgaaacctatactagatgagattgatgctggtggtccttcttgcatgatgaagtactggaatgatccagaagtgctgaaaaagctgggtgaagcaatgggtat

SEQ ID NO: 153697 - DNA, 558 bp, Arabidopsis thaliana columbia
gaaacactgtaagctaaaaatctgaaagcataaagattaactgacataagttatgttctttgcgaaaataaaagttattccacaaacgcattcgataaaacattcaaaaccttcttcagagtctaatccgtgaactgatgatcgatatagcttcacactatatatcctcttcacttcttagacttcttcttcggtacagctgcagttggagcaggtgtagcagcaggtgctggagcagctacaggcgcaacatctccaccgggacccttagctaaacgctcctctctcctagcatgcttcctttctcggctagccttgttcttcgccctcttagcctcaaactgatcagacagagtcttctccctagccttctcagcctttgacttgtggatactctccatcaagacacgcttgttcttgaacacattacccttaacacgcatgtacatgtcatggtacatgtgcttgtcaatcttcttcggctctctgtatttcttcaacagacgcctaaaaacacgcatcctacgcattcacaggacctttggtgggaacctaact

SEQ ID NO: 153698 - DNA, 324 bp, Arabidopsis thaliana columbia
gctttaccttcgtgcttaaagactggagctttaatggttccggccactggatttaatttttccggcagtcttatgaagtcagacaggggcttcgccgttccgacaaagttacagagtactcgaaaaggtgatcgagagagattgagagttcaagctattttcagctatcattctgtgatccagacatgtacacatctgatctttcaatcgatctcagatccaccgtgttggaaacgatatcaagacatctctgtgttgggtcacaggccattagaagaatcagctttcttctttttcaatgctctttaaaccaaaagccataat

SEQ ID NO: 153699 - DNA, 558 bp, Arabidopsis thaliana columbia; identical to SEQ ID NO: 120009

SEQ ID NO: 153700 - DNA, 600 bp, Arabidopsis thaliana columbia
taaaaatcgaaaatggattataaggtgaccttcgtctttggttgaccatcaaaaactacaacgctctttctccgtaggaaaggggaagcaaataaattatcgaagcccactggtttcggagctgatcggtctctatttctctcttcatacatatctcaagcagataaagttgatcggatactagaatgggaggaggatttagagttttgcatttggtgaggccattcttggcttttctgcctgaggttcagagtgctgataggaaggttccattcagagagaaggttatctacactgtcatctctctcttcatctttcttgtctgcagtcagcttcctctttatggaatccattccaccaccggtgcggatccattctattggatgcgtgtcattcttgcgtccaaccgtggaactgtcatggagctcggtattactcctattgttacatctggacttgtgatgcaactcttggctggttccaaagattatgaggttgacaacaatgttcgtgaggatcgtgccctcttgaatggtgctcaaaagcttctaggtattctgattgccattggtggagctgttgcatatgttctttctggaa

SEQ ID NO: 153701 - DNA, 231 bp, Arabidopsis thaliana columbia
  unsure (1)..(231): unsure at all n locations
tcgcgagactaacacattttatttctatcttaatgcanttgcttattgagagcaatggaaaagtggggactgacaagaattacgctggtgattacatggatgtagactctatccacaaaacaaatgagaacttccgtatttagaatgacaacaagggacgattacgactccactccataaaagatgaggacgctaagttaaagctttcgcaaagtaatatcgatacatttt

SEQ ID NO: 153702 - DNA, 518 bp, Arabidopsis thaliana columbia
gattacgccgctcatttttagggtttcagatataggcatattctcacatttgcaaacatgacgactcagatcagcaagaagagaaagtttgtagcggacggtgtgttctacgctgaattgaatgaggttcttacaagagagctagcagaggatggttactctggtgttgaggttagggttactcctatgaggactgagattatcatcagagctacacgtactcagaatgttctcggtgagaaggggaggagaattagggaattgacttcccttgttcagaagagattcaagtttccagttgacagtgttgagctttatgccgagaaggttaacaacagaggtctctgtgccatcgctcacgctgagtctttacgttacaagcttcttggtggtctcgctgttcgtagggcttgctatggtgtgttgaggtttgttatggagagtggagcttagggatgccaggttattgtgaggggaaagctttatgcttgctcgacccaaatttatgaatttcaaag

SEQ ID NO: 153703 - DNA, 471 bp, Arabidopsis thaliana columbia
cgaagagtcctctgttactcatttttacattgtaaaaaaaaacttcttatcttctctacgtgaataagaatctgaagagtcattttctcaagaatgacgtggctaaaacaaatgtggtcaagcattttagtgctagccgtggtggtgatcggagccagagctgtgcccatcacgtatcttgaatctgcagtggctaaaggagctgtgtgtttggatggtagcgcgccagcataccatttcgataagggatcgggctcaggagtgaacaattggatcgttcatatggaaggaggaggatggtgcactgatatagctacatgcgttcaacgtaaaagtacaatgaagggttcttctaagcttatgaacaaagactttggtttctccggtatcttgggtggcaagcaaagcaccaatccagacttttacaattggaataaaatcaaagttcggtatttgcgatggttcatcttt

SEQ ID NO: 153704 - DNA, 419 bp, Arabidopsis thaliana columbia
  unsure (1)..(419): unsure at all n locations
gcaggaggaagaagacgaagaagaagaggagcagctactaccatggttctcaagacggagctttgtcgtttcagtggacagaagatttacccaggaagaggaattaggtttatccgatctgattctcaggttttcttgtttcttaactcaaaatgtaagaggtacttccataacaagttgaagccatccaagcttgcatggactgccatgtacagaaagcaacacangaaggatgcagcacaagaggctgtgaagagaaagagacgtgccaccaagaaagcatactcaaggtccattggtggtgctaccttggaaggaattcaaaaaaagaaagcttggaagcctgaagttcgtgatgcagccagggaagctgctctgcgtgagatcaaggaaagaatcaaaaagaccaaagatgaaaa

SEQ ID NO: 153705 - DNA, 364 bp, Arabidopsis thaliana columbia
agatgatgaagctcaaagtgtatgcagatcgaatgtcacatccatcacgtgctgttatcatattctgcaaggttaatggaatccaattcgatgaggtcttgatttccttggcgaagcgtcaacaattatctcctgaattcaaagatattaacccattggggaaagttccagctattgttgatggcaggcttaagctctttgagagtcacgcaatcctgatatatctatcctcggcgtttccaagtgttgctgatcattggtatccaaatgatctatccaaaagagccaagattcactcagttttggattggcatcacaccaatttacgtcgtggtgcaactggatatgttctgaatagtgtact

SEQ ID NO: 153706 - DNA, 529 bp, Arabidopsis thaliana columbia
ctgagaactgcgattgccttcaagggtttcaggtgtgccattcgttgggaggaggcacaggttcaggaatgggaacactattgatatcgaagatccgagaggagtatccagacagaatgatgctcactttctctgttttcccatctcctaaagtctctgacacagtcgttgagccttacaatgcaactctctctgtccatcagcttgtagagaacgctgatgaatgcatggtcctcgacaatgaagctctctacgatatctgcttccgtaccctcaaactcagcactcctagctttggagacttgaaccatttgatctccgcaacaatgagcggtgtgacttgctccttaaggttccccggacaactaaactctgacctcaggaaactcgcggtgaacctaatcccattccctcgtctccatttcttcatggtgggttttgcgcccctcacttcccgtggctcgcaacaatacatctcactcaccgttcctgagctgactcaacaaatgtgggactccaaaaacatgat

SEQ ID NO: 153707 - DNA, 477 bp, Arabidopsis thaliana columbia
acagccattcaatctcataagacatattgccggagaaactctctcggggggtcgcttcttctgcattttctgcttcccaatggcttccagaattgctgattctctcttcgccttcacgggcccacagcaatgtcttcctagggttcctaagcttgctgcttcttctgctcgtgtttctcctggtgtatatgctgtgaagccgattgatcttctgttaaaaggacgaactcatcgaagtagaagatgtgtagctcctgtgaaaaggagaattggatgtatcaaagcggtggctgctccagttgcaccgccttcagctgacagtgcagaagacagggaacagttagcagaaagctatggattcagacaaattggagaagatcttcctgagaatgtcaccttaaaagatatcatggataccacttccaaagaggtgtttgagattgatgatctgaaagctttgaagtctgggttgatatc

SEQ ID NO: 153708 - DNA, 320 bp, Arabidopsis thaliana columbia
caaacctcagtagccatggaaggcgaagagaagaatgtttatagaaacgaggaagaagatttcaatgcaccacaacaactacaaaagaggcaaaggaaagggaaaaaaatagcaacggaaacagaggatgaaaacgaagaagacaagagagttactgtcaaagttacgcatgtcgccgagagacccgatagaatctctccgatcgtcgcctatttctctacaggatacgatccttgtaaagtagatccaaatacaggctagagagttgatgaaactcccaaggtaactgtttacaagcataaggatgattctaagaagag

SEQ ID NO: 153709 - DNA, 525 bp, Arabidopsis thaliana columbia
aaaaaaagaaaacacaaaaacaaagattataatggctttctcaaccatggctttgtcctcccctgccttcgccggaaaggctgtgaagcctgccgcatcagatgtcctcggaagcggccgtgtgaccatgaggaagactgtcgccaagccaaagggtccatcaggcagcccatggtacggatctgaccgagtcaagtacttgggtccattctccggcgagcccccgagctaccttaccggtgagttccccggtgactacggatgggacaccgctggtctatccgccgacccagagaccttcgccaggaaccgtgagctagaagttatccacagcagatgggccatgctcggagccctaggctgcgttttccctgagctattggctaggaacggagtgaagttcggagaagcggtttggttcaaggccggttcacagatcttcagcgacggaggattggactacttgggcaacccgagcttggtccacgctcaaagcatcttaaccatttgggctactcaagttat

SEQ ID NO: 153710 - DNA, 387 bp, Arabidopsis thaliana columbia
agcagccatagcctaacaaaaccttcaacaatggctttatatggctgccgtcttaagcaaaactccattcctctctcaaccactaaccaaatcatctccaaactccgatctccccttcgccgcggtttccttcccttccaaatccctacgccgccgcgtaggatcaatccgagccggattaatcgctcccgacggtggtaagcttgtagagctcatcgtggaagagccaaagcggcgagagaagaaacacgaggcggcggatttgccacgtgttgagctgacggcgattgacttgcaatggatgcatgtattaagcgaaagctgggcaagtccactcggaggtttcatgagagaatccgagttcctccaaactcttcattttaactc

SEQ ID NO: 153711 - DNA, 508 bp, Arabidopsis thaliana columbia
ctgacatacagagaagtgatttcgatcttgatgcaaattcatattcaggttgatgggaaagtgaggactgacaagacttaccctgctggtttcatggatgttgtgtctatccccaaaacaaatgagaacttccgtcttttgtatgacaccaagggacgtttccgtctccactccatcaaggatgaggaggctaagttcaagctttgcaaagtgagatcgatccaatttggtcagaagggtattccctacttgaacacatatgatggtcgcaccatccgttatcctgacccgctcatcaagcctaacgacaccatcaagctcgaccttgaggagaacaagattgtggagttcattaagtttgatgtgggcaacgtagttatggtcactggaggaagaaacagaaggcgtgttggtgtgattaagaaccgtgagaaacacaagggtagctttgaaaccatgcacattcaagacttaacacgacatgagtttgcaacaggttgggaaatgt

SEQ ID NO: 153712 - DNA, 578 bp, Arabidopsis thaliana columbia
aaaatgggtgctttcaggtttcaccagtaccaggttgtgggaagagctctcccgacagagaaggatgtgcagcctaagatttacaggatgaagctctgggctacgaacgaggttcgtgccaagtccaagttctggtatttcttgaggaagctcaagaaggtgaagaagagtaatggacagatgctcgccatcaacgagatctatgagaagaacccaacaacgatcaagaacttcggtatttggttgaggtaccagagtagaactgggtaccacaacatgtacaaggagtaccgtgacaccactcttaacggagctgttgagcagatgtacactgagatggcatcccgtcaccgtgtcagattcccttgcattcagatcatcaagacagccactgtcccagccaagctgtgcaagagagagagcactaaacagttccacaacagcaagatcaagttcccattggtgttccgcaaggttagaccaccaagcaggaagctgaagacgacttacaaggccaacaagcccaacttgttcatgtaaaacgtctctgattgactctttttttgggtggaatcgat

SEQ ID NO: 153713 - DNA, 359 bp, Arabidopsis thaliana columbia
tgaaggggaggtgcttacaatgtacgagcaatggcttgtagagaatgggaagaactataacggtcttggagagaaggagagacggttcaagatcttcaaagacaacttgaagcgcatcgaagaacacaattcagatccaaaccggagttatgaacgcgggttgaacaagttttcggatctaacggctgatgagtttcaagctagttacttaggtgggaagatggaaaagaaaagcctatcagatgtagcggagaggtatcagtacaaagaaggagatgttttacctgatgaagttgattggagggagagaggagcagttgttccaagagtcaaaagacaaggagagtgtggaagttgct

SEQ ID NO: 153714 - DNA, 546 bp, Arabidopsis thaliana columbia
ataaattttgtggagagcaaagttctcagcaaaatcaaataagaaccgaacgagagagagaaacgaattcttctcaggtgttaaagaatgtctcggagatatgatagccgtaccacaatcttctcgccagaaggtcgtctttaccaggtagagtatgctatggaggccattggaaacgccggttctgcgattggaatcttatccaaagacggtgttgtgttgatcggtgagaagaaagtcacctcaaagcttcttcaaacctcaacctctgctgagaaaatgtacaagattgatgaccatgttgcctgtgctgttgctggtataatgtctgatgctaacatacttatcaacacggctcgagttcaagctcaacgttacaccttcatgtaccaagagcccatgccggttgagcagctggttcaatctctttgtgacacaaaacaaggatacacacagtttggtggtcttcgcccgtttggtgtctcctttctctttgcaagatgggacaagcaccatggtttccagctttatatgagtgacccgagt

SEQ ID NO: 153715 - DNA, 532 bp, Arabidopsis thaliana columbia
cttcgctcttctctttgctctctctctctcaacgcggttcagatccgagtttgggagattcaagctccctgaaaaaagccctttactctcgcttaccaactttgctccagcatggcaggatctgcaccagaaggcacacagtttgatgcacgtcagtttgaccagaaactcaatgaagtacttgagggacaagatgagttcttcacatcctatgatgatgttcatgagagctttgatgccatgggtcttcaagagaaccttctcaggggtatttatgcttatggttttgagaagccttctgctattcagcaaagaggaatcgtccccttctgtaagggtcttgatgtgattcaacaggctcagtctggtactgggaaaacagcaactttctgctctggtgtcttgcagcagctggacttctcccttatccagtgtcaggctttggttctagctccaactagagagcttgctcaacaaattgagaaagtcatgagggcccttggtgattaccttggtgtcaaggttcacgcct

SEQ ID NO: 153716 - DNA, 485 bp, Arabidopsis thaliana columbia
gcggaacaacaaaagaaaccctagcttccctttgtacttctctctgttccaaaccatgtcgaagagaaagaccaaagagccaaaggttgagaatgtgactcttggaccagctgttcgtgaaggagagcaagtctttggagttgttcacgtctttgcttcattcaacgacactttcattcacgtgactgatttgtctggacgggaaacacttgttcgcatcactggtggaatgaaggtgaaagccgacagagatgagtcctcaccttatgctgctatgcttgcggcacaagatgttgctcagcgatgcaaggaacttggaatcactgccatacatgtgaaactccgtgccactggtggtaacaagaccaagacccctggacctggtgctcagtctgctctaagagcccttgcccgttctggcatgaaaattggtcgcattgaggatgtgactacaattgcaaccgacagtaccttcagaaagggtt

SEQ ID NO: 153717 - DNA, 409 bp, Arabidopsis thaliana columbia
  unsure (1)..(409): unsure at all n locations
ttaaccctaatttttgccgaactcgtcttctgctgaattccctagatctacagatctcccgaatctcccagggagataatttgaagatggtgtctgacgctagcaagaagaaggcagctcagaagaaagctgctgccgccgctaaaagaggtggtaaagctgctgctccatccaaatccgccgctacttcttccaacggtgttgatagcttgtcaagcggtgtcgatgctcttcaaatttctgatcggacttgtaccggagttctctgatctcatactcaatctagagatatccgaatagaatttctgaacgggacgttctatctttccgacctcatcgnctattacttgacaggatctgatcggtgttgggtacgtatgacttaggccttttcctctgcctcactttc

SEQ ID NO: 153718 - DNA, 602 bp, Arabidopsis thaliana columbia
ttcaattactctcgccgacgattttctcaccggaaaataacaatatcattgcggatacacaaactataatggacctcctcttgctggagaagtctttaatcgccgtcttcgtggcggtgattctcgccacggtgatttcaaagctccgcggcaagaaattgaagctacctccaggtcctataccaattccgatcttcggaaactggcttcaagtcggagatgatctcaaccaccgtaatctcgtcgattacgctaagaaattcggcgatctcttcctcctccgtatgggtcagcgaaacctagtcgtcgtctcctcaccggatctaacaaaggaagtgctcctcactcaaggcgttgagtttggatccagaacgagaaacgtcgtgttcgacattttcaccgggaaaggtcaagatatggtgttcactgtttacggcgagcattggaggaagatgagaagaatcatgacggttcctttcttcaccaacaaagttgttcaacagaatcgtgaaggttgggagtttgaagcagctagtgttgttgaagatgttaagaagaattcagattttgctacgaaaggaatctggttgaggaaacctttg

SEQ ID NO: 153719 - DNA, 683 bp, Arabidopsis thaliana columbia
  unsure (1)..(683): unsure at all n locations
ctgttttagggttttgccttgttcttgtggcgggaataacaaagacatcgccgatatggggaaagacgaagaggaaatgcgaggtgagatcgaggagcgactaatcaatgaagagtacaagatctggaagaagaacactcctttcctctacgatctcgttattactcacgctctcgagtggccttcacttactgttgaatggcttcctgaccgtgaagaaccttccggtaaagactactccgttcagaagatgattctcggtacccatacctccgagagcgagcccaattacttgatgctagcccaagttcagcttcctcttgacgataccgagagtgaagctcgtcagtacgatgatgaccgctctgaatttggtggctttggctgtgcaactggaaaggtacaaattatccagcagataaatcatgatggtgaggttaatcgagctcgctatatgcctcaaaaccctttcataattgctaccaagacagttaatgcggaggtctatgttttcgattacagtaagcatncatctaagcctnctcttgatggggcttgtaatcctgatttaaagcttagaggtcacagctcttgaggatatggtctctcttggagaagttcaagcgggtcatttgcttagtggctctgatgatgctcagaactgcttgtgggatattaacgct

SEQ ID NO: 153720 - DNA, 416 bp, Arabidopsis thaliana columbia
gaaaaacattggaaaaaccctaattcctagtgttgcgaatcacttttcattgcagctttgaacttcagtctgtgaatttccaacagcaatgacaactccagcaaaaaagagactgatgtgggatttcaagagactgcagaaagatcctcctgtgggaataagtggagctccacaagataacaatatcatgcattggaatgctctcatctttggacctgaggacactccatgggatggaggtactttcaagttgactcttcacttcaccgaggattatccgaacaaacccccgattgttcggtttgtttcacggatgtttcatccaaacatttatgctgatggaagcatttgcttggatatcttgcaaaaccagtggagccccatctacgacgttgcttgaggtctcacatcaattc

SEQ ID NO: 153721 - DNA, 646 bp, Arabidopsis thaliana columbia
caacttcggagcgaatctattcttcttcttcttcttcttcttcttcttcttcttcctccgtttttttcatcttcttctctgtttcgagagatccactagtgaaagagtcagcaccatggccatggtcaaagagaaagaacaaaacactaaagacaaaaaactcctcgtcggcgtcatttggaacttctccgccgagctcaagctcactttcatggcgttacttgttctctgcactttagctactctcttacctttcataccttcttcattctctctctccacttccgatttccgcttctgcatctcacgcttctcctccgccgtccctctcaacaccaccaccaccgtagaagaatcatcatcctcaccgtcaccggagaagaacctagatcgagttttggataacggagttattaaacggacgtttactggctacggctcagcagcttataacttcgtctcaatgagtgcttacagaggcggcgttaactcattcgccgttatcggattatcatcaaaaccattacacgtgtacggtcatccttcgtatagatgcgaatgggtctcattagacccgactcaagatccgatttcaacaaccgggtttaaaatcttaaccgattggggttacggacggatctacaca

SEQ ID NO: 153722 - DNA, 532 bp, Arabidopsis thaliana columbia
atcattcctgtgatgcgatataatattccgattgtgattagaaatattttcaatctctctgcaccgggaacaataatctgtcaacctgctgaagatgattatgaccttaaactgacaactcctgtcaaagggtttgcaactattgacaatttggccctcataaatgttgaaggtactggaatggctggtgtacccggtactgcaagtgacatttttggctgtgtaaaagatgttggagctaatgtgattatgatatcacaggctagcagtgagcattctgtgtgctttgctgtgcctgagaaggaagtaaacgcagtctctgaggcattgcggtcgagatttagtgaagctttacaagcgggacgtctttctcagattgaggtgataccaaactgtagcatcttagctgcagtcggccagaaaatggctagtacacctggagttagttgtacacttttcagtgctttggcgaacgctaatattaatgtccgagctatatctcaaggttgttctgagtacaatgttactgtcg

SEQ ID NO: 153723 - DNA, 458 bp, Arabidopsis thaliana columbia
attggctctgtctcaaaaaatgaaattctcaaattaaccacaacgatctttagagccttcttcgctcaccgatctctgaaaccctggtagtttctatgagtatgtcgcagtctcgagctgtccaaagatcgtcttcacctaatgaggatagaggtgagaatcagttagtggtttatgacttgaaaggaaatgatgatactgaagaagaagttctaccggttcaatctcagcctttgtcatctagaacacagtgtccctctatcggggcatttacggttcagtgtgcaagttgtttcaaatggagactcatgccttcaatgcagaagtatgaagagattagggaacagcttcttgaaaacccgtttttctgcgatacagcgcgtgagtggaagccggatatttcttgtgatgttcctgctgatatctatcaagatggaactcgtctttgggctattgat

SEQ ID NO: 153724 - DNA, 482 bp, Arabidopsis thaliana columbia
attcccatttataacaaacctaaacctctcttttcttcttctctttacctttttcattccaaaatctctctctctctctctctttctctggctcgggaagaagatgtcacgtagttgctcacagtgtggaaacaacggccacaactctcgcacatgtccgacggacataactaccaccggtgacaacaacgacaaaggcggcggggagaaagccatcatgctttttggcgtccgcgtcacggaagcttcatcatcttgttttagaaaaagtgttagtatgaacaatctctctcaattcgatcaaactcctgatcccaacccaaccgatgacggtggttacgcttcagacgacgtcgttcacgcctccggtagaaaccgtgaacgcaaacgaggttaataaaataacctttcttctctctttcccaaatctcatctctggttttggttcttggttttgaaactttcttgcaaatttggaattt

SEQ ID NO: 153725 - DNA, 566 bp, Arabidopsis thaliana columbia
atttctcacattttcgtagccgcaagactcctttcagattcttacttgcagctatgggtaaagagaagtttcacattaacattgtggtcattggtcatgttgattctggaaaatcgaccacaactggtcacttgatctataagcttggtggtattgacaagcgtgtcatcgagaggttcgagaaggaggctgctgagatgaacaagaggtccttcaagtacgcatgggtgttggacaaacttaaggccgagcgtgagcgtggtattaccatcgatattgctctatggaagttcgagaccaccaagtactactgcacagtcattgatgccccaggacatcgtgatttcatcaagaacatgattactggtacctcccaggctgattgtgctgttcttatcattgactccaccactggaggttttgaggctggtatctctaaggatggtcagacccgtgagcacgctcttcttgctttcacccttggtgtcaagcagatgatttgctgttgtaacaagatggatgccaccacccccaaatactccaaggctaggtacgatgaaatcatc

SEQ ID NO: 153726 - DNA, 598 bp, Arabidopsis thaliana columbia
gttactgaatcatggggcaagtatggaatcatcagagaaactgatatgtggaataaacgtccagagttcacagcatggttgcttgaagtaaagaaggttaatttggaaagcttgccaccttgggaagagaagaaaatgtttaaagattttatggaggatcataatactggtacatttacctcgaaaaaatactatgacattgatggttactatagacttaagttggaaaaagagatgaaaaagggtttgaagaaagctggattagtgaacgtactgtgttcaatgatgaggaacaacgccgactggagatgcaggaattacgtgaaaggcagaaggaagaagaagtgttagctctaaagcgatcaatggaaggtggaatggcgcaagctatgaaagagcaagctcggctaaaggaagaaatggtgtacttatacaagattggggacatggagggtgcagctgctatacagagaaggttggatccggatgttcccatgtgatgtgtagctttttgttaagctacaatatcttctcgattgtgttccaagaatcgaacttttgtaacattaggataagagaaaccaaaattgtatgtcct

SEQ ID NO: 153727 - DNA, 552 bp, Arabidopsis thaliana columbia
gtggaaggatactacgaaaaaaactttggagttgatactgtagtgacaacgctgattttcaagactagcaagaacaaaacagctggaccgtttgggattgtatctggcacaaagtttgaattcaagaaggaaggttacaagatcactgggttccacggacgagctggtgagtatgttaatgctattggagcttatttagctccatcaggcaccacccctttgactcctgcaacacaatcccaaaagctagaaggagctggtagtgaggcaggaactttatgggatgatggtgctttcgacggtgtaaggaaagtgtctgtaggacaagcccaagatggtattggagcggtctcgtttgtgtacgacaaaacaggtcaggttgtagaaggaaaagaacatggaaaacccacattgcttggatttgaagagtttgagcttgactatccaagtgaatacatcacggcatgtgatggcacctacgatgcaatctttgggaatgaaccaatccgaaatatgcttagggtcacgactaataagcgagtatctattcct

SEQ ID NO: 153728 - DNA, 449 bp, Arabidopsis thaliana columbia
ttcaattctctgtttcctccaaaatggctacaccaaacgaagtatcagctcttttcctcatcaagaagtatctcctcgacgaattgtctccgttgcctactactgccaccaccaatcgatggatgaacgatttcacgtcatttgatcaaaccggtttcgagttttctgaatttgaaaccaaaccggaaataatcgatctcgtcactcccaaaccggagatttttgatttcgatgtgaaatctgaaattccatctgaatcgaacgattccttcacgttccaatcgaatcctcctcgcgttactgttcaatccaatcgaaaaccgccgttgaagatcgcaccaccgaaccgaaccaagtggattcaattcgcaaccggaaatcctaaaccggaactttccgtaccggttgtagcagcagaggagaagaggcattacagaagagtgaggatg

SEQ ID NO: 153729 - DNA, 385 bp, Arabidopsis thaliana columbia
aatctttctctgatttcataaaacagaatatagatttataaaacttcttgcttttaaagatggcgattagattgtcgcgtgtgatcaactctaaacagtcccaaaaacagcaatctcgagtcccgaaaggacatgttgcggtttatgtcggagaagagatggagagcaagaagagattcgtggttccgatttcgtatttgaaccatccttcatttcaaggtttgcttagtagagcagaggaagagtttggtttcaatcatccaatcggtggattaacgattccatgctgagaagaaacatttgttggtcttttgaattcttatggttgtattgatacaacttgagacaacttttttggtaatgctcatacactcttttttttttt

SEQ ID NO: 153730 - DNA, 424 bp, Arabidopsis thaliana columbia
gaagagaacaagagtgtgatggatgttgtttttggacttgagatgcttgttggaaaggattttaacatgtcctggaaaatgggtatcaattaatttacatgtgagagttggtaaactattgaggaggagaatgagattatttaaaaaaaaagggtaatgttttgttcttctccatttcggattataagaaagaaaataagaattagaggtttggctttagaatgtgtctctgtctttttattaaaagatgctttagtctgaataaaatttgaagcagaagaagtgttactttattggcttatttacttctttgttttaaaaatattaataaataaatataaagggcggcctgtttagaggattcaagcttactaacctcgtgtttgcgacgtcattactcttttatagtgttacctaaaattaa

SEQ ID NO: 153731 - DNA, 337 bp, Arabidopsis thaliana columbia
acgcgcccgcggaacgctaactatacaaaacacataacagtttggattcttcaacaaaaggtctctctttacttatcttatatgaccgccgtggcagttagcctccaggagatgagttcatcatcaacgaccatctacaacttccatcggacggcaagtggagaaccgatgaaaaagtgaggttcatctacttacaatgcaccgcggaccacgggagaactgacagcggcatcaacggtgtcatccacgaccgaatcagaagagtcaatattttcaaagacaacttatgattcattgatctacacagcgaggacaacaagaacgctacttacaagct

SEQ ID NO: 153732 - DNA, 442 bp, Arabidopsis thaliana columbia
atgacgatgaactcgcttccgaggagatttgtgaagaatcatggctatttggatcgagattatcgaaacggaagacgatctggttcagattccgatgaagaattgaagggattgagtcacgaagagtataggaggcagaaacggcttaagatgaggaaatcagccaagttctgcttttgggagaacacaccgagtccacctagagatcagaacgaggattccgatgagaacgccgacgagattcaggacaagaacggctgcgaaagagatgataattctgaagggaaaggaaggaaagggaaatctgactcggaatctgaatctgatggtttgcgatctaggaagaggaagagtaagagctcgaggtctaagcgcaggagaaagagatcttatgacagcgattgtgaattccgagggagtgagagtgattccgaagaggaag

SEQ ID NO: 153733 - DNA, 441 bp, Arabidopsis thaliana columbia
atcagaattacacacaaataatgggattgcataggcttgctgtcattgggctgctttggctgctgaccatcgtcgcctctacagcaaatgcagatggacctgtttgcccgccgacgaacaaactaagccgggcaaggttgcctgaaggaggtttatttggcacggctactgcggcataccagggagaaggtgcgattaatgaaacttgtcgtggaccagccttatgggacatctactgtagaagatatgcagagaggtgcaataacgataacggcgatgtggccggtgatttcttccatcgctatacggcagatatccaactagtgaagaatctaaacgcagacgcctgtaggatgtctatcgcatggccaagaatattttctcatgggagaaaggagaaaggagtgagtcaagctggtgtgcaattttaccacgacctca

SEQ ID NO: 153734 - DNA, 401 bp, Arabidopsis thaliana columbia
ggacacatctcattgaccatcaatgtcatcctcatgttcaaatcaggagtcttcatcattggaccatttgctctcatcacaacagctgtctcagctgatctcggaacccacaaatctctcaaaggcaatgcaagggctttggctacagtctcagctatcatagacggcacaggatccgtcggtgctgcgattggaccagtcctcactggttacatctctgccataagctgggacgcagagttttacatgtttgatgactgcagcattgatctctggattggtgctcactaaactaaacatagcagaagtcaaagcgttattgtttggaccagaagacgaagtacctgacttattatgctcaccaactgcaagcatgcctctcatagatgggctcgcttgag

SEQ ID NO: 153735 - DNA, 354 bp, Arabidopsis thaliana columbia
cgaaaaagagagcgaagcttgaaatctccgattaagccatgaatgctcccgaacgatatgagcgattcgtcgtccctgaaggcaccaagaaggtttcttatgatagggatacgaagatcatcaatgctgcttccttcacggttgagagagaagaccatacgattggaaacattgtccgcatgcaacttcatcgcgacgagaatgtcttgtttgctggataccaacttcctcatcctcttaagtacaaaatcatagtgaggattcacacaacaagccagtcttccccaatgcaagcatacaaccaggccatcaatgacttggacaaggagctcggctaccttgaaaaaccagttt

SEQ ID NO: 153736 - DNA, 392 bp, Arabidopsis thaliana columbia
gccgcatcatccttctcccttgtgcgatatcgtttgcgtgagatttgtctgaaaagtagctaaccatgggtaaagagaagtttcacatcaacattgtggtcattggccacgtcgattctggaaagtcgacaaccactggacacttgatctacaagttgggtggtattgacaagcgtgtgatcgagaggttcgagaaggaggctgctgagatgaacaagaggtccttcaagtacgcatgggtgttggacaaacttaaggctgagcgtgagcgtggtatcaccattgacattgctctctggaagttcgagaccaccaagtactactgcactgtcattgatgctcctggtcatcgtgatttcatcaagaacatgatcactggtacctcccaggct

SEQ ID NO: 153737 - DNA, 460 bp, Arabidopsis thaliana columbia
ttcaattctctgtttcctccaaaatggctacaccaaacgaagtatcagctcttttcctcatcaagaagtatctcctcgacgaattgtctccgttgcctactactgccaccaccaatcgatggatgaacgatttcacgtcatttgatcaaaccggtttcgagttttctgaatttgaaaccaaaccggaaataatcgatctcgtcactcccaaaccggagatttttgatttcgatgtgaaatctgaaattccatctgaatcgaacgattccttcacgttccaatcgaatcctcctcgcgttactgttcaatccaatcgaaaaccgccgttgaagatcgcaccaccgaaccgaaccaagtggtttcaatccgcacccggaaatcctaaaccgaacttcccgtaccggttgtagcagcagaggagaagaggcattacagaggagtgaggatgaggccgtggggg

SEQ ID NO: 153738 - DNA, 364 bp, Arabidopsis thaliana columbia
aacgaggaaggccacaagatcgttggtttccatggaagagccggtgttctgctccacaaaattggaggccatgttcgccctttatccaactgatgatggagctctttatccttgattccatgcatctaataagttatcaaatctatcttctaaatttctcatatgaggtctcttcatgcctctggcgaatggtgatctttgataagcgttttacgcgccgtctcttgcgatgtacggttttctttggtcttcttgagctctattttaataaaggaaggttgttccaatctgatctttagtttccctatatgttctataatacttacttttgccaaggactaaaatacaatgcggttctaattca

SEQ ID NO: 153739 - DNA, 273 bp, Arabidopsis thaliana columbia
tggaggtaaagaagtacacgatcaaatttcaagtcagagtttcggggaaaaaaaaggaatgggggatcatcttgtgagagctgaggaattcgagaagaaagctgagaaaaagctcaatggatggggaatattcggatctaagtacgaggatgctgctgatctgctcgaaaaagcagctaattcctataagctcgccaaatcatgggatcaagctggaaaagcttatctaaaacttgccgacttgcacttaaagtcagatagcaaacatgatgc

SEQ ID NO: 153740 - DNA, 452 bp, Arabidopsis thaliana columbia
cttttgtctccgtctctctgtctctcatggttactcttcctctcccgactcaaacttctacggtctctctccctaaaccgtggctctccaattccttctccttcccactccgtaacgcaacactctcaacaacaacaaaccgccggaactttctcaccaccggaaggatcatagctcgggcatataaagaggtggtagagcacgacggaaagacgactgaattggaagtcgtaccagacgagacgattctatctaaggctcttgactctggccttgacgttccctacgactgtaatctcgttgtttgtatgacttgtacagcgaaacctgtgaccgtttcgttggattattgtttttttacgctcttctttgtttttgttgatctgttttatttattattatatttttttatattttttttttaatttctattttcttttttttacattttt

SEQ ID NO: 153741 - DNA, 456 bp, Arabidopsis thaliana columbia
atagctcctaacaaagcaatatcatttccaatttataaaagttaaagccatggctgcatctttctctgtcccctctatgataatggaagaagaagggagattcgaagcggaggttgcggaagtgcagacttggtggagctcagagaggttcaagctaacaaggcgcccttacactgcccgtgacgtggtggctctacgtggccatctcaagcaaggctatgcttcgaacgagatggctaagaagctgtggagaacgctcaaaagccatcaagccaacggtacggcctctcgcaccttcggagcgttggaccctgttcaggtgaccatgatggctaaacatttggacaccatctatgtctctggttggcagtgctcgtccactcacacatccactaatgagcctggtcctgatcttgctgattatccggacgacaccgttcctaacaaggttgaaca

SEQ ID NO: 153742 - DNA, 273 bp, Arabidopsis thaliana columbia
gccaagtagccatcaaggttcagggtcaggcagggcacgaagagattctgcagctcgtgctatgcaaggttggcatgcgcagcgccttgttggatctggagaggttactgcgcctgctgttaaggataagggcttaatttccaccccaaagcacaagaaactcaaaagcattgggctgcaaaaacacaaacaacaaactagcatggaccatgttgttacaaatgaagctgacaaacagttggctgcttgggttgttgatgttggaccccgtgc

SEQ ID NO: 153743 - DNA, 418 bp, Arabidopsis thaliana columbia; identical to SEQ ID NO: 130971

SEQ ID NO: 153744 - DNA, 465 bp, Arabidopsis thaliana columbia
atgaatacaaaataagatttatggctacacaaactgttgaagatagttctagatctggtccaagaagcactactgtagggaagttattgaaaccattgaattccgaatatggtaaagtagctcccggatggggaacgacccctttgatgggtgttgcaatggctctatttgcggtattcctatctattattttggagatttataattcttctgttctactggatggaatttcagtgaattagactgagaagaatcttgaagttctagcttttagctcgatacaaaaaagtaaagtatgcaggtctaacaattttagcctattctcctttggtagttcgaccgcgaaatttttttctgcattgtatatttccggaatatgagtaaagtttatgattggttcgaagaacgtcttgagattcaagcgattgcagatgatataactagtaaatatgttcctccgcatgt

SEQ ID NO: 153745 - DNA, 455 bp, Arabidopsis thaliana columbia
tggagatccatcgaagaccattgctgtccctgaagggttcgattacgaactctacaacaggaacgagatcaaccgtatccttgggcctaaagcttcctgcatttccttcaaggactctgcttgtcgttgcttcggctacatggtctccaagaagaagtacatcttcactattgatgacgattgcttcgttgctaaggatccatctggaaaagctgtgaacgctcttgagcaacacatcaagaaccttctctgcccatcaactccatttttcttcaacaccttgtacgacccataccgtgaaggtgctgacttcgtccgtggataccccttcagtctccgtgagggtgttttcaccgctgtttcccacggtctgtggctcaacatccctgattacgatgcccctacccaacttgtgaagcctaaggataggaacacaaggtatgtggatgctggca

SEQ ID NO: 153746 - DNA, 460 bp, Arabidopsis thaliana columbia
gtcgcacacaccacatgctctctctctctctctctctctctctctctttcttctcctttctctttgtatctcttctctcttatgctaagccaaaaatggaagctttactctattgaagacgagatccttctctaatttacaggtacccatcttttatttctgaataatagattttggttcttgcaaatcttatagcttaaagttgagatttttggtatttacttagcaacaaaaaaagtttgtgataatattaccataaatggtgagacatccatttgcggctgagattttgctactttactcttttctctctctctatttccatttgtattgtcactcactcacatacaaaaataacatcataatcagagataatgagtaaaagtgaaagaaaccctaataccaacttactctacaaggttaaaacaaatgttgctctttttcaattagcctatggatc

SEQ ID NO: 153747 - DNA, 464 bp, Arabidopsis thaliana columbia
tccaaatcgaaagcaatttctctcgacgaagaaaagagaagcaatcggagtctgtggaggtaaagaagtacacgatcaaatttcaagtcagagtttcggggaaaaaaaaggaatgggggatcatctggtgagagctgaggaattcgagaagaaagctgagaaaaagctcaatggatggggaatattcggatctaagtacgaggatgctgctgatctgctcgaaaaagcagctaattcctataagctcgccaaatcatgggatcaagctggaaaagcttatctaaaacttgccgactgtcacttaaagtcagatagcaaacatgatgctgctaacgcctatgctgaggctgctaaatgctacaagaaagttgacactaatgaggctgcgtcttgcctagagcgagcggtgaatatattttgtgagataggaaggctcaacatggctgcaagatattacaaggaaa

SEQ ID NO: 153748 - DNA, 466 bp, Arabidopsis thaliana columbia
ctcagccgtctgtcttacctccagaagtcgacgacaacaatggcaccgaagaagggagttaaagtggcttcaaagaagaagccggagaaagttaccaacccattgtttgagagacgcccaaagcaattcggtattggtggcgctttgcctcctaagaaggatctttctcgttacatcaaatggcctaagtcaatccgtcttcaaaggcagaagcgtatccttaagcagaggttgaaggttcctccagctcttaaccagttcaccaagacccttgataagaatctcgccaccagcctcttcaagattcttctgaagtataggccagaggacaaagccgcaaagaaggaacgccttttgaacaaggctcaagctgaggcagaaggaaagcctgctgaatccaagaagcccattgttgttaagtatggtctcaaccatgtgacttacctcatcgagcagaacaaggcac

SEQ ID NO: 153749 - DNA, 178 bp, Arabidopsis thaliana columbia
tcattactggtctggttcactttctctctctttggatactctctaaatgaaggcgaaaaaccggaatttaggcaggggtctatggggatttttgggattggccctttttaacaaaaccaataacggtggcgggccgaatatttcgggggggggcttggttaaccttggggacttcaac

SEQ ID NO: 153750 - DNA, 458 bp, Arabidopsis thaliana columbia
aaaaaagaacgatagagatatttagtgataattttgttgggtcaacgtaatcaacggtcagaaatagatcacggtgcgttcgtctggcggcttcatttggcacaaggagtttactagtctggacaatatgtccttaattgctcttatcggagaaggcttactctgtttttcaggcgaactctgtttatcttctccgagctcgtacgagaatattcgtaaaggtttcttgtgagcttaaacgatgagtacccttgagaccacaagagctgagcttggtctggtagttgtgtatttgaataaagcggaggcgagagacaagatttgtcgagctattcaatatggttccaagttcttgagtgatggccaacctggcactgctcaaaatgtcgacaagaacaccagcttggctaggaaagttttccgtctcttcaagtttgtaaatgatcttcatgctctca

SEQ ID NO: 153751 - DNA, 450 bp, Arabidopsis thaliana columbia
agatgacaacaccagtaggaaaacaagtcagtaagtaaacgagcaaaagaagaagagaaacaacaagaagtagtaatggcttcctctatgctctcctccgccgctgtggttacatccccggctcaggccaccatggtcgctccattcaccggcttgaagtcatccgctgcattcccggtcacccgcaagaccaacaaggacatcacttccatcgcaagcaacgggggaagagttagctgcatgaaggtgtggccaccaattggaaagaagaagtttgagactctatcttacctccctgaccttagtgacgtcgaattggctaaggaagttgactaccttctccgcaacaagtggattccttgtgttgaattcgagttagagcacggatttgtgtaccgtgagcacggaaacactcccggatactacgatggacggtactggacaatgtgg

SEQ ID NO: 153752 - DNA, 422 bp, Arabidopsis thaliana columbia
ggcgcccttacactgcccgtgacgtggtggctctacgtggccatctcaagcaaggctatgcttcgaacgagatggctaagaagctgtggagaacgctcaaaagccatcaagccaacggtacggcctctcgcaccttcggagcgttggaccctgttcaggtgaccatgatggctaaacatttggacaccatctatgtctctggttggcagtgctcgtccactcacacatccactaatgagcctggtcctgatcttgctgattatccgtacgacaccgttcctaacaaggttgaacacctcttcttcgctcagtagtaccatgacagaaagcagagggaggcaagaatgagcatgagcagagatgagaggacaaaaacttctgtcgtggacttcctaaagtccattattgtcgtcggagacacc

SEQ ID NO: 153753 - DNA, 469 bp, Arabidopsis thaliana columbia
gttcagagatcaagatctgcagacatggcggtcgaagcaaccagagctgcttttatggagattcaagctagcatgattgaactcactgggaagctcaaacaggtgcagaatcagatgcgcaacaaagagggagatagaaagcgagctttcttaaccttggaggagctgaggccattgcctgaagagacaaacacctacaagtcaataggaagaacgtttgttctagagcccaagacagtgctggagggtgaacaagagcaaaaactcaaggacagtgaagctgccgttgcttctctacagacatccaaggaatacttggagaagcaggtagcagaggttgagaacaacttgagggagctgttgcagcaagaaccgggcattgctcaacagattatgtccatgtctatgtaacttttgtattatcccaaacctttgagtttggagagcttttgggattgaaaccataaca

SEQ ID NO: 153754 - DNA, 374 bp, Arabidopsis thaliana columbia
aacttctgaagatttttcttactcagaggttaaatgcctacacggaattccaaaatgcaaattcgggatttctgcaaagctatggactttccaatgaagattgtgttacgaagatgaggttgctgtcactagtggatttggcctcagatgaatctggcaaaataccttacacctcgattaaagacactcttcaggtaaatgaacaggatgtcgagttatggatcgtgaaggcaataactgctaaactgattgagtgtaagatggatcagatgaaccaagctttaattgtcagccgctcttccgaacgtgaatttgtggcaaagcaatggctatctctccgaacaaagcttgcgacttggaaggacaacatttca

SEQ ID NO: 153755 - DNA, 427 bp, Arabidopsis thaliana columbia
gcttatctcaagctttctacttgtctaatactccaccaccatcattgttgcttcatcagaatctcgatgtaggcgttttaaatcgatcatcagctttggtgattccatcgcagacaccggaaattatctccatctctctgatgtcaatcaccttcctcaatccgcctttcttccttatggcgaaagcttcttccatcctccctccggtcgtgcctctaatggccgcctcatcatcgacttcattgccgaattcttgggactaccatacgtaccgccttactttggatcccaaaacgttagcttcgaacaagggatcaattttgcggtgtatggagcaaccgcattggaccgagcgtttcttttggtaaaaggaattgattctgattttactcaatgttaggttaagtgttcagcttgacacctttaa

SEQ ID NO: 153756 - DNA, 254 bp, Arabidopsis thaliana columbia
caaaaagcttttaacctcagccgttataatctttctccgatcatgccgaccagaaacatcggcattggtggagtccaagaagaggtctatcaccccaacgcacttagggcggcgctcgctgagtttatctcgactttgatcttcgtcttcgccggctcatgctccggaattgctttcaacaagatcactgacaatggagcagccactccttacgtcctcgtcggcgctgacttagctcatgcttttggtctctt

SEQ ID NO: 153757 - DNA, 442 bp, Arabidopsis thaliana columbia
ctcggttatctagaattggaaaacatgactatgagacagtaaagcagggaacatctgttggctcgtcggaggtgcatctttcagcgagaatgcaggtcacaggggaagcggaatatactgatgatactccagtacctcctaataccttacatgctgcctttgtgctaagcaaagtgccacatgcccgcatcctttcaatcgatgattcggcagccaaatcttcatctggttttgttggtctgtttcttgccaaagatattcctggggataatatgattggaccaattgttcccgacgaagatatatttgctacagatgtggtcacgtgtgtgggacaagacattggtgtggtcgtcgcggatacacatgaatatgcaaacactgtagcaggtaaagttgacgtttggtatgaggtactaccagccattttatcaatcaaggt

SEQ ID NO: 153758 - DNA, 401 bp, Arabidopsis thaliana columbia
ctcatttactgttctgtttcactttctctctctctgtatactctctaaatgatggcaaaaaactgtaatttagtcagtgttctatgtgtatttttggtattgaccctctttaacaaacccatcaccgtcgccgggcagaatattccggcggtgggcttgttcacctttggtgactccaacttcgacgccggaaacaaacagactctcaccaaaaccttactccctcaaactttctggccgtatggaaaatcccgagatgatcccaacggcaaattctccgacggcctcatcgctccagacttcctcgctaaattcatgaggattccgatcgtgatcccgccggcccttcaaccgaacgtcaatgtctcacgtggagctagtttcgccggcgctgatgctac

SEQ ID NO: 153759 - DNA, 369 bp, Arabidopsis thaliana columbia
accctcccgaccaggagggttaatttaaaagtttcttccaccggggggggtgggataatgagctttcttttttcaaccgatcttggtcggaggtccaatgtcaaatccatgccgatccgtaaagacaacaagggttcaaaatcggttcgtgggtactaacaagggacgtgaaggcaaagttgttcaggtttaccgtcgcaaatgggtgattcacatcgagagaatcacgagggagaaagggaatggaacaaccgtgaacgttgggattcagccgtcgaaagttgggataacgaaagcttcgtctttgataaaaataggaaatcgctttttggagagggaaggctaaggggacgtgcctgctgcttgata

SEQ ID NO: 153760 - DNA, 460 bp, Arabidopsis thaliana columbia
attttctcaaactctaaaatcaatctctcaaatctctcaaccgtgatcaagatgcagatcttcgttaagactctcaccggaaagactatcaccctcgaggtggaaagctctgacaccatcgacaacgttaaggccaagatccaggataaggaaggtattcctccggatcagcagaggcttatcttcgccggaaagcagttggaggatggccgcacgttggcggattacaatatccagaaggaatccaccctccacttggttctcaggctccgtggtggtatgcagattttcgttaaaaccctaacgggaaagacgattactcttgaggtggagagctctgacaccattgacaacgtcaaggccaagatccaagataaggagggtattcctccggaccagcagaggttgatcttcgccggaaagcaacttgaggacggcagaactttggcggattacaaca

SEQ ID NO: 153761 - DNA, 410 bp, Arabidopsis thaliana columbia
tgcatctttctctgtcccctctatgataatgtaagaagaagggagattcgaagcggaggttgcggaagtgcagacttggtggagctcatagaggttcaagctaacaaggcgcccttacactgcccgtgacgtggtggctctacgtggccatctcaagcaaggctatgcttcgaacgagatggctaagaagctgtggagaacgctcaaaagccatcaagccaacggtacggcctctcgcacctttggagcgttggaccctgttcaggtgaccatgatggctaaacatttggacaccatctatgtctctggttggcagtgctcgaccacttacacatacacttatgagcctggtccagatcttgctgattatccgtacgacaccgttcctaacaaggctgaacacctttttt

SEQ ID NO: 153762 - DNA, 459 bp, Arabidopsis thaliana columbia
gatctctcgcaaatggactcatcacataacaacattgttgttctttggttttgggctatggtctttgtgggacggtttcaaagaaggaggagggggttcggaagaattggctgaagtcgaagcagaactggatgctgatttgaaggctaatggtaaatctccaaaagacagtagtaagagagaagatgaaaacaaaaagcagaatagggcgttcctcacgcaatttttctctccaatttttctcaaggctttttcgattaatttctttggagaatggggtgacaagagtcagcttgctacaattggtttagctgcagatgaaaatccatttggggtggtccttgggtggagtgtggcacagtttttgtgcaccactgctgctgtaattggaggaaagagcttagcgtctcaaatttccgaaagaatagtggctctttctggtggaatgcttttcatcat

SEQ ID NO: 153763 - DNA, 461 bp, Arabidopsis thaliana columbia
  unsure (1)..(461): unsure at all n locations
gaaagataccagacaaggagattcttgagattgtgaaggagagttttgatttcaggccaggtatgatctccattaacttggatctgaagagaggaggtaatggtaggttcttgaagactgctgcctatggtcactttggaagggacgatgctgatttcacctgggaggtagtcaagccactcaagtctaacaaggtccaagcttgaaacctgtcagcctctgtttcacttctgtccagaatcagtcttgttctctgtattttaggctctttctgcctctttagtttcaactctgagatgggtttattcattttgttttcaactttgaagaaaaaagctaagcagctgggaanttatataattatttatatggtattcttgtgctaagaaagttaaattcataatatgtatttcttacttattttgagaggaaaatcatataagagaataatattcgacatt

SEQ ID NO: 153764 - DNA, 385 bp, Arabidopsis thaliana columbia
  unsure (1)..(385): unsure at all n locations
aaacgagcaaaagaagaagagaaacaacatgaagtagtaatggcttcctctatgctctcctccgccgctgtggttacatccccggctcaggccaccatggtcgctccattcaccggcttgaagtcatccgctgcattcccggtcacccgcaagaccaacaaggacatcactttcatcgcaagcaacgggggaagagttagctgcatgaaggtgtggccaccaattggaaagaagaagnttgagactctatcttacctccctgaccttagtgacgtcgaattggctaaggaagttgactaccttcttcgcaacaagtggattccttgtgttgaatctcggttagagcacggatttgtgtaccgtgagcacggaaaccactccggat

SEQ ID NO: 153765 - DNA, 380 bp, Arabidopsis thaliana columbia
ggtgataaagatggtctcagtaatgcccggttgctgtatgattctgctgttgcaagttacggtcaagacgtggagctgtggaagaattactactcattggagacaaagctgggaacatcagagacagccaatggagtgtattggcgtgcgagaaagactctgatgttcccagtcttgttctatacaaaggttgcattgaaatagagaccaacctcatatcagtaggtgataaagatggtctcagtaatgcccggaagctgtatgattctgctgttgcaagttacggtcaagacgtggagctgtggaagaattactactcattggagacaaagctgggaacatcagagacagccaatggagtgtattggcgtgcgagaaag

SEQ ID NO: 153766 - DNA, 462 bp, Arabidopsis thaliana columbia
aacaggaaggctcatttcacagcttcctccagcgagaggcgtgtgataatgagctctcctctctccaccgatcttcgtcagaagtacaatgtcagatccatgccgatccgtaaagacgacgaggttcagatcgttcgtggtacttacaagggacgtgaaggcaaagttgttcaggtttaccgtcgcaaatgggtgattcacatcgagagaatcacgagggagaaggtgaatggaacaaccgtgaacgttgggattcagccgtcgaaagttgtgataacgaagcttcgtcttgataaagataggaaatcgcttttggagaggaaggctaagggacgtgctgctgctgataaggagaagggtactaagtttacgtctgaggatgttatgcagaacgttgattaagtaagaaggaagaagaaatctttcttgaaggttttatcttttagagttatcttcaatcgc

SEQ ID NO: 153767 - DNA, 164 bp, Arabidopsis thaliana columbia
cattgctttctcaatctaagggtttccatgaacaagggactaaaatgagagctcttctctttggactatcactcaattgcttttggtctcaaacagcacttttatggaagaagggagaggttcgcaactgtgaccaaactccattttgtaaacgcgctcgatct

SEQ ID NO: 153768 - DNA, 457 bp, Arabidopsis thaliana columbia
  unsure (1)..(457): unsure at all n locations
cgagagatcgctaaacgttacttgtcctcacatttcataattgacattcttgctgttcttccgcttccgcagatggtgattttgataatcattccacatatgagaggttcatcgtctttgtacacgaagaatatgttgaagtttattgttttcttccaatatataccgaggtttataagaatatatccgctctacaaggaagttacaagaacttcaggcatactcactgagacagcttgggctggagctgctttcaatctcttcctctacatgcttgctagtcatgtgtttggtgctttctggtatttgttctcaatcgaacgcgaaacggtgtgctggaaacaagcttgtgagaggaataaccctccgtgcatnttcgagttgttgtactgtgacccttgaactgcaggaggcaatgctttcctcaatgagtcttgtccgattcagacaccaaaca

SEQ ID NO: 153769 - DNA, 457 bp, Arabidopsis thaliana columbia
gggtcttctgttttgtctatttttgtttggtgcattagctccaattgtgaacgttaattatggaggaattagtggtgctttttatgggaactatagatctaattatattactgaccagatttacagtcagcatagggatagagttttggatacatctcgtagtggtgctggtactggggtttctaatagtaatgggatgcatcgtgggagagattctgatcgaggagctaggaaaaatatatctgcaacagagagttctgtcactcctggaaatggtagtgagcctctagttgcatcactctttgttccgaggaatgacaagcttgtgaagatagatgggaatatgattatcaattctatattggcgagtgagacagccgtggcttcgagaaaggcttttgtattaaaggagaggaaagctgacttgtgatctttaaagattattacccctgcactg

SEQ ID NO: 153770 - DNA, 422 bp, Arabidopsis thaliana columbia
gatcgctttctctaaccctaaaatacgtagagagatcagatacctgaaaacaaccaatcaatcatggagtacgctgctcggagaaatcagaaaggcgctttcgaaggcttttacaaacttatcatgcgccgtaattccgtctacgtcactttcatcatcgccggcgcatttttcggtgaacgggctgtggattacggtgttcataagctctgggaacgcaacaatgttgggaaacgatatgaagacatctctgtgttgggtcaaaggccagtagaggaatgagctttcttctttttgaattctcttcagaccaaaagcaagaattggaaatttccatgttgttttgcattccaacgtctctctttctttgttgaataaatataaaatcattgggatgattcataatttacctaaagctatct

SEQ ID NO: 153771 - DNA, 449 bp, Arabidopsis thaliana columbia
atcttcttcatcgatttctctcttccaaatctcccaaaagatgtcgaaccctagagttttcttcgacatgagtctcagcggtactcccatcggacggatcgagatggagcttttcgctgatacaaccccaaacacggcggagaatttccgtgctctctgtaccggcgagaaaggaatgggaaagctaggtaagccacttcacttcaaaggatcgatcttccaccgtgtgattcccggattcatgtgtcaaggaggtgatttcaccgccaagaacggaaccggtggtgaatcgatctacggtgctaagttcaaggacgagaactttatcaagaagcatacaggagctgggattctctcaatggctaactctggtcctaacactaacggatctcagttcttcatctgtaccgataagacgtcgtggttagatggtaagcacgttgtgtttg

SEQ ID NO: 153772 - DNA, 459 bp, Arabidopsis thaliana columbia
aaacggtatctccagcttctctccacaacccacttccgattcctcaaaatcaccaaaagggtttcacccaaaacccgaatccttaaaattcccatctcccaaatccctaaatccaacgagaccgatcttcaaactcagagccgatgttggaatcgattctcgtcccatcggagcttctgaatcatcatcatcaggtacatcaaccgttagctcaactgataaacttcaacagtatttccaaaatctcgattacgataagaagtacggattcgttgaagatatcgattccttcacaatccctaaaggtttatctgaagagacgattcgtttgatttcgaaattgaaagaggaaccagattggatgcttgagtttaggttcaaagcttatgctaagtttctgaaactagaagaacctaaatggtcagataatagatatccttcgaataatttccaggatat

SEQ ID NO: 153773 - DNA, 263 bp, Arabidopsis thaliana columbia
gttctccctcttagatctattcctgaaggagctgttgtctgcaacgtcgagcatcacgtcggtgatcgtggtgtcctcgctagagcttctggtgattacgccattgttatcgctcacaaccctgacagcgacactactaggattaagttgccatcgggttcgaagaagattgtcccaagtggatgcagggctatgattggacaagttgctggaggtggaagaactgagaagccgttgctcaaggcaggaaacgcgtaccacac

SEQ ID NO: 153774 - DNA, 464 bp, Arabidopsis thaliana columbia
gtttgccaccacaacattgtcttttcggggttagtcatacttaatggcttccaattcggagaaaaatcctcttctttcagatgagaaacccaaatcgacggaggagaataagagttctaagccggaatcagcttctgggagttcaacttcatcagctatgcctggcttgaatttcaatgcttttgatttctctaatatggctagtattctcaacgatcctagcatcagagaaatggctgagcaaatagctaaagatcctgcgtttaaccaattggctgagcagcttcagagatctattcctaacgctggccaggaaggtggtttccctaactttgatcctcaacagtatgtcaatacaatgcaacaggttatgcataaccctgagtttaagacaatggccgagaaacttggtaccgccttagttcaggatccacaaatgtctcctttttggatgctttctcgaa

SEQ ID NO: 153775 - DNA, 394 bp, Arabidopsis thaliana columbia
gcaagtccaggcaacattcagggatgtgatctgcacgaaggcgactggggcacagtcggctctatcgtcttctggaattacgtacatgatggggaggcaaaggtggcgaaggagaggatcgaggcggtggagccagataagaacttgatcacgtttagggttatagaaggtgatctgatgaaagagtacaagagcttcttgctcaccatccaggtgacccctaagcctggaggccctggaagtattgtgcactggcaccttgagtatgagaaaattagcgaggaggtagctcacccggaaactctcctccagttctgtgtcgaggtctccaaagagatcgacgaacatcttttggccgaggaagaggaggtgaagacaccagagacccctagtt

SEQ ID NO: 153776 - DNA, 318 bp, Arabidopsis thaliana columbia
taaaaatcgaaaatggattataaggtgaccttcgtctttggttgaccatcaaaaactacaacgctctttctccgtaggaaaggggaagcaaataaattatcgaagcccactggtttcggagctgatcggtctctatttctctcttcatacatatctcaagcagataaagttgatcggatactagaatgggaggaggatttagagttttgcatttggtgaggccattcttggcttttctgcctgagggtcagagtgctgataggaaggttccattcagagagaagggtatctacactggcatctctctcttcatctttc

SEQ ID NO: 153777 - DNA, 438 bp, Arabidopsis thaliana columbia
gattacgccgctcatttttagggtttcagatataggcagattctcacatttgcaaacatgacgactcagatcagcaagaagagaaagtttgtagcggacggtgtgttctacgctgaattgaatgaggttcttacaagagagctagcagaggatggttactctggtgttgaggttagggttactcctatgaggactgagattatcatcagagctacacgtactcagaatgttctcggtgagaaggggaggagaattagggaattgacttcccttgttcagaagagattcaagtttccagttgacagtgttgagctttatgccgagaaggttaacaacagaggtctctgtgccatcgctcaggctgagtctttacgttacaagcttcttggtggtctcgctgttcgtagggcttgctatggtgtggtgagggttgttatg

SEQ ID NO: 153778 - DNA, 459 bp, Arabidopsis thaliana columbia
cgaagagtcctctgttactcatttttacattgtaaaaaaaaacttcttatcttctctacgtgaataagaatctgaagagtcattttctcaagaatgacgtggctaaaacaaatgtggtcaagcattttagtgctagccgtggtggtgatcggagccagagctgtgcccatcacgtatcttgaatctgcagtggctaaaggagctgtgtgtttggatggtagcgcgccagcataccatttcgataagggatcgggctcaggagtgaacaattggatcgttcatatggaaggaggaggatggtgcactgatatagctacatgcgttcaacgtaaaagtacaatgaagggttcttctaagcttatgaacaaagactttggtttctccggtatcttgggtggcaagcaaagcaccaatccagacttttacaattggaatagaaacaaagttcggtattgcgat

SEQ ID NO: 153779 - DNA, 457 bp, Arabidopsis thaliana columbia
gcaggaggaagaagacgaagaagaagaggagcagctactaccatggttctcaagacggagctttgtcgtttcagtggacagaagatttacccaggaagaggaattaggtttatccgatctgattctcaggttttcttgtttcttaactcaaaatgtaagaggtacttccataacaagttgaagccatccaagcttgcatggactgccatgtacagaaagcaacacaagaaggatgcagcacaagaggctgtgaagagaaggagacgtgccaccaagaagccatactcaaggtccattgttggtgctaccttggaagtaattcagaagaagagagctgagaagcctgaagttcgtgatgcagccagggaagctgctctgcgtgagatcaaggaaagaatcaaaaagaccaaagatgaaaagaaggctaagaaggtggaatttgcttctaagcaacaga

SEQ ID NO: 153780 - DNA, 459 bp, Arabidopsis thaliana columbia
agatgatgaagctcaaagtgtatgcagatcgaatgtcacagccatcacgtgctgttatcatattctgcaaggttaatggaatccaattcgatgaggtcttgatttccttggcgaagcgtcaacaattatctcctgaattcaaagatattaacccattggggaaagttccagctattgttgatggcaggcttaagctctttgagagtcacgcaatcctgatatatctatcctcggcgtttccaagtgttgctgatcattggtatccaaatgatctatccaaaagagccaagattcactcagttttggattggcatcacaccaatatacgtcgtggtgcagctggatatgttctgaatagtgtactaggtccagctctcggtctttctctgaatccgaaagcagctgctgaagcttagcagttactaacaaaggctctgtccactctagagactttttggc

SEQ ID NO: 153781 - DNA, 465 bp, Arabidopsis thaliana columbia
ctgagaactgcgattgccttcaagggtttcaggtgtgccattcgttgggaggaggcacaggttcaggaatgggaacactattgatatcgaagatccgagaggagtatccagacagaatgatgctcactttctctgttttcccatctcctaaagtctctgacacagtcgttgagccttacaatgcaactctctctgtccatcagcttgtagagaacgctgatgaatgcatggtcctcgacaatgaagctctctacgatatctgcttccgtaccctcaaactcagcactcctagctttggagacttgaaccatttgatctccgcaacaatgagcggtgtgacttgctccttaaggttccccggacaactaaactctgacctcaggaaactcgcggtgaacctaatcccattccctcgtctccatttcttcatgggggggtttgcgcccctcactttccgtggctcgc

SEQ ID NO: 153782 - DNA, 463 bp, Arabidopsis thaliana columbia
  unsure (1)..(463): unsure at all n locations
acagccattcaatctcataagacatattgccggagaaactctctcggngggtcgcttcttctgcattttctgcttcccaatggcttccagaattgctgattctctcttcgccttcacgggcccacagcaatgtcttcctagggttcctaagcttgctgcttcttctgctcgtgtttctcctggtgtatatgctgtgaagccgattgatcttctgttaaaaggacgaactcatcgaagtagaagatgtgtagctcctgtgaaaaggagaattggatgtatcaaagcggtggctgctccagttgcaccgccttcagctgacagtgcagaagacagggaacagttagcagaaagctatggattcagacaaattggagaagatctttctgagaatgtcaccttaaaagatatcatggatacacttcccaaagaggtgtttgagattgatgatctgaaagccttgaag

SEQ ID NO: 153783 - DNA, 415 bp, Arabidopsis thaliana columbia
caaacctcagtagccatggaaggcgaagagattaatgattatagaaacgaggaagatgatttcaatacaccacaacaactacgggtgaggcaaatgaaagggaaaaaaatagcaacggaaacagaggatgaaaacgaagaaaacatgagagttactcttaaagttacgcatgtcgtcgagagacccgatagaaattttatgatcgttggctattttcttacaggatacgatccttgtaatgtagatacaaaaacagtgatgtgagatgatgaatctcccaagttaactgtttacaagcataaggatgattctatgaagaggattaagtatgttatatgtaacaatgtatcattgagctgtgtatattattctatatattatactattcttatatagaatatgttcttaataatat

SEQ ID NO: 153784 - DNA, 448 bp, Arabidopsis thaliana columbia
aaaaaaagaaaacacaaaaacaaagattataatggcttcctcaaccatggctttgtcctcccctgccttcgccggaaaggctgtgaagcctgccgcatcagatgtcctcggaagcggccgtgtgaccatgaggaagactgtcgccaagccaaagggtccatcaggcagcccatggtacggatctgaccgagtcaagtacttgggtccattctccggcgagcccccgagctaccttaccggtgagttccccggtgactacggatgggacaccgctggtctatccgccgacccagagaccttcgccaggaaccgtgagctagaagttatccacagcagatgggccatgctcggagccctaggctgcgttttccctgagctattggctaggaacggagtgaagttcggagaaacgggttggttcaaggccggttcacagatctttagcgac

SEQ ID NO: 153785 - DNA, 382 bp, Arabidopsis thaliana columbia
agcagccatagcctaacaaaaccttcaacaatggcttcaatggctgccgtcttaagcaaaactccattcctctctcaaccactaaccaaatcatctccaaactccgatctccccttcgccgcggtttccttcccttccaaatccctacgccgccgcgtaggatcaatccgagccggattaatcgctcccgacggtggtaagcttgtagagctcatcgtggaagagccaaagcggcgagagaagaaacacgaggcggcggatttgccacgtgttgagctgacggcgattgacttgcaatggatgcatgtattaagcgaaggctgggcaagtccactcggaggtttcatgagagaattcgagttccttcaaactcttcatttta

SEQ ID NO: 153786 - DNA, 450 bp, Arabidopsis thaliana columbia
aaaatgggtgctttcaggtttcaccagtaccaggttgtgggaagagctctcccgacagagaaggatgtgcagcctaagatttacaggatgaagctctgggctacgaacgaggttcgtgccaagtccaagttctggtatttcttgaggaagctcaagaaggtgaagaagagtaatggacagatgctcgccatcaacgagatctatgagaagaacccaacaacgatcaagaacttcggtatttggttgaggtaccagagtagaactgggtaccacaacatgtacaaggagtaccgtgacaccactcttaacggagctgttgagcagatgtacactgagatggcatcccgtcaccgtgtcagattcccttgcattcagatcatcaagacagccactgtcccagccaagctgtgcaagagagagagcactaaacagttccacaacagcaagatc

SEQ ID NO: 153787 - DNA, 381 bp, Arabidopsis thaliana columbia
tgaaggggaggtgcttacaatgtacgagcaatggcttgtagagaatgggaagaactataacggtcttggagagaaggagagacggttcaagatcttcaaagacaacttgaagcgcatcgaagaacacaattcagatccaaaccggagttatgaacgcgggttgaacaagttttcggatctaacggctgatgagtttcaagctagttacttaggtgggaagaaggaaaagaaaagcctatcagatgtagcggagaggtatcagtacaaagaaggagatgttttacctgatgaagatgattggagggagagaggagcagttgttccaagagtaaaaagacacggtgagttgtgaaggttgtgggcgtttgccgcgactggtgc

SEQ ID NO: 153788 - DNA, 438 bp, Arabidopsis thaliana columbia
ataaattttgtggagagcaaagttctcagcataatcaaagaagaaccgaacgagagagagaaacgaattcttctcaggtgttaaagaatgtctcggagatatgatagccgtaccacaatcttctcgccagaaggtcgtctttaccaggtagagtatgctatggaggccattggaaacgccggttctgcgattggaatcttatccaaagacggtgttgtgttgatcggtgagaagaaagtcacctcaaagcttcttcaaacctcaacctctgctgagaaaatgtacaagattgatgaccatgttgcctgtgctgttgctggtataatgtctgatgctaacatacttatcaacacggctcgagttcaagctcaacgttacaccttcatgtaccaagagcccatgccgggttgagcagctggttcaatctctttgtgacac

SEQ ID NO: 153789 - DNA, 465 bp, Arabidopsis thaliana columbia
cttcgctcttctctttgctctctctctctcaacgcggttcagatccgagtttgggagattcaagctccctgaaaaaagccctttactctcgcttaccaactttgctccagcatggcaggatctgcaccagaaggcacacagtttgatgcacgtcagtttgaccagaaactcaatgaagtacttgagggacaagatgagttcttcacatcctatgatgatgttcatgagagctttgatgccatgggtcttcaagagaaccttctcaggggtatttatgcttatggttttgagaagccttctgctattcagcaaagaggaatcgtccccttctgtaagggtcttgatgtgattcaacaggctcagtctggtactgggaaaacagcaactttctgctctggtgtcttgcagcagctggacttctcccttatccagtgtcaggctttggttctagctccaactagagag

SEQ ID NO: 153790 - DNA, 344 bp, Arabidopsis thaliana columbia
gcggaacaacaaaagaaaccctagcttccctttgtacctctctctgttccaaaccatgtcgaagagaaagaccaaagagccaaaggttgagaatgtgactcttggaccagctgttcgtgaaggagagcaagtctttggagttgttcacgtctttgcttcattcaacgacactttcattcacgtgactgatttgtctggacgggaaacacttgttcgcatcactggtggaatgaaggtgaaagccgacagagatgagtccttaccttatgctgctttgcttgcggcacaagatgttgcttagcgatgcatggaacttggatatactgccatacatgtgaaacttc

SEQ ID NO: 153791 - DNA, 289 bp, Arabidopsis thaliana columbia
ttaaccctaatttttgccgaactcgtcttctgctgaaaaccctagatctacagatctcccgaatctcccagggagataatttgaagatggtgtctgacgctagcaagaagaaggcagctcagaagaaagctgctgccgccgctaaaagaggtggtaaagctgctgctccatccaaattcgccgctacttcttccaacggtgttgatagcttgtcaagcggtgtcgatgctctttaaatttctgatcggacttgtaccggagttctttgttctcatcctcaatctagaga

SEQ ID NO: 153792 - DNA, 335 bp, Arabidopsis thaliana columbia
ctgttttagggttttgccttgttcttgtggcgggaataacaaagacatcgccgatatggggaaagacgaagaggaaatgcgaggtgagatcgaggagcgactaatcaatgaagagtacaagatctggaagaagaacactcctttcctctacgagctcggtattactcacgctctcgagtggccttcacttactgttgaatggctttctgaccgtgaagaaccttccggtaaagactactccgttcagaagaagattctcggtacccataccttcgagagcgagcccaattacttgaggcttgcccaaggtcagcttcctcttgacgataccgaga

SEQ ID NO: 153793 - DNA, 367 bp, Arabidopsis thaliana columbia
gaaaaacattggaaaaaccctaatttctagtgttgcgaatcacttttcattgcagctttgaacttcagtctgtgaatttgcaacagcaatgacaacttcagcaaaaaagagactgatgtgggatttcaagagactgcagaaagatcctcctgtgggaataagtggagctccacacgataacaatatcatgcattggaatgctctcatttttggaccttgggacactccatgggatggaggtactttcaagttgactcttcacttaaccgaggattatccgaacaaacccccgattgttcggtttgtttaacgggtgtttcattcaaacattaatgcttgtggacgcatttgcttggatatctggcaa

SEQ ID NO: 153794 - DNA, 467 bp, Arabidopsis thaliana columbia
  unsure (1)..(467): unsure at all n locations
caacttcggagcgaatctattcttcttcttcttcttcttcttcttcttcttcttcctccgtttttttcatcttcttctctgtttcgagagatccactagtgaaagagtcagcaccatggccatggtcaaagagaaagaacaaaacactaaagacaaaaaactcctcgtcggcgtcatttggaacttctccgccgagctcaagctcactttcatggcgttacttgttctctgcactttagctactctcttacctttcataccttcttcattctctctctccacttccgatttccgcttctgcatctcacgcttntnctccgccgtccctctcaacaccaccaccaccgtagaagaatcatcatcctcaccgtcaccggagaaagacctagatcgagttttggataacggagttattaaaccggacgttactggctacggctcagcagcttataacttcgtctcaatga

SEQ ID NO: 153795 - DNA, 301 bp, Arabidopsis thaliana columbia
atcattcctgtgatgcgatataatattccgattgtgattagaaatattttcaatctctctgcaccgggaacaataatctgtcaacctcctgaagaagattatgaccttaaactgacaactcctgtcaaagggtttgcaactattgacaatttggccctcataaaagttgaaagtactggaatggctggtgtacccggtactgcaagagacatttttggctgtgtaaaaaatgttggagctaatgtgattatgatatcacaggctagcagtgagcattctgtgtgctttgctgtgcctgaga

SEQ ID NO: 153796 - DNA, 464 bp, Arabidopsis thaliana columbia
attggctctgtctcaaaaaatgaaattctcaaattaaccacaacgatctttagagccttcttcgctcaccgatctctgaaaccctggtagtttctatgagtatgtcgcagtctcgagctgtccaaagatcgtcttcacctaatgaggatagaggtgagaatcagttagtggtttatgacttgaaaggaaatgatgatactgaagaagaagttctaccggttcaatctcagcctttgtcatctagaacacagtgtccctctatcggggcatttacggttcagtgtgcaagttgtttcaaatggagactcatgccttcaatgcagaagtatgaagagattagggaacagcttcttgaaaacccgtttttctgcgatacagcgcgtgagtggaagccggatatttcttgtgatgttcctgctgatatctatcaagatggaactcgtctttgggctattgataaaccg

SEQ ID NO: 153797 - DNA, 306 bp, Arabidopsis thaliana columbia
  unsure (1)..(306): unsure at all n locations
attcccatttataacaaacctaaacctctcttttcttcttctctttacctttttcattccaaaatctctctctctctctctctttctctggctcgggaagaagatgtcacgtagttgctcacagtgtggaaacaacggccacaactctcgcacatgtccgacggacataactaccaccggtgacaacaacgacaaaggcggcggngagaaagccatcatgctttttggcgtccgcgtcacggaagcttcatcatcttgttttagaaaaagtgtagtatgaacaatcttctcaatcgatcaaactct

SEQ ID NO: 153798 - DNA, 459 bp, Arabidopsis thaliana columbia
  unsure (1)..(459): unsure at all n locations
atttctcacattttcgtagccgcaagactcctttcagattcttacttgcagctatgggtaaagagaagtttcacattaacattgtggtcattggtcatgttgattctggaaaatcgaccacaactggtcacttgatctataagcttggtggtattgacaagcgtgtcatcgagaggttcgagaaggaggctgctgagatgaacaagaggtccttcaagtacgcatgggtgttggacaaacttaaggccgagcgtgagcgtggtattaccatcgatattgctctatggaagttcgagaccaccaagtactactgcacagtcattgatgccccaggacatcgtgatttcataagaacatgattactggtaccttccaggctgattgtgctgntcttatcattgactccaccactggaggttttgaggctggtatctcttaggatggtcagacccgtgagca

SEQ ID NO: 153799 - DNA, 457 bp, Arabidopsis thaliana columbia
gttactgaatcatggggcaagtatggaatcatcagagaaactgatatgtggaataaacgtccagagttcacagcatggttgcttgaagtaaagaaggttaatttggaaagcttgccaccttgggaagagaagaaaatgtttaaagattttatggaggatcataatactggtacatttacctcgaaaaaatactatgacattgatggttactatagacttaagttggaaaaagagatgaaaaagggtttgaagaaagctggattagtgaacgtactgtgttcaatgatgaggaacaacgccgactggagatgcaggaattacgtgaaaggcagaaggaagaagaagtgttagctctaaagcgatcaatggaaggtggaatggcgcaagctatgaaagagcaagctccgcttaaggaagaaatggtgtacttatacaagattggggacatggagggtgc

SEQ ID NO: 153800 - DNA, 360 bp, Arabidopsis thaliana columbia
gaaaaacattggaaaaaccctaattcctagtgttgcgaatcacttttcattgcagctttgaacttcagtctgtgaatttccaacagcaatgacaactccagcaaaaaagagactgatgtgggatttcaagagactgcagaaagatcctcctgtgggaataagtggagctccacaagataacaatatcatgcattggaatgctctcatctttggacctgaggacactccatgggatggaggtactttcaagttgactcttcacttcaccgaggattatccgaacaaacccccgattgttcggtttgtttcacgggtggtttatccaaacatttatgctgatggaagcatttgcttggatat

SEQ ID NO: 153801 - DNA, 446 bp, Arabidopsis thaliana columbia
tgcctatgcacttgctcaaggtttgaaagtgattgcttgtgttggtgagactcttgaggagcgggaagctggatcgaccatggatgtggtggctgcccagaccaaggctattgccgatcgggtgacaaactggtcaaatgttgtcatagcctatgaaccagtgtgggccattggaaccggaaaggtcgctagcccagcccaagctcaagaagtacacgatgagctgaggaaatggctggccaagaacgtgagtgctgatgtcgctgctacaacccgcatcatttatggaggatccgtcaatggtggtaactgcaaggagctaggtggacaggccgatgttgatggtttcttggtcggcggtgcttctctaacgcctgagtttatcgacatcattaaggccgcagaggtgaagaaaagtgcctaatgagctcattaagcaatttaaa

SEQ ID NO: 153802 - DNA, 392 bp, Arabidopsis thaliana columbia
ttcagattcttacttgcagctatgggtaaagagaagtttcacattaacattgtggtcattggtcatgttgattctggaaaatcgaccacaactggtcacttgatctataagcttggtggtattgacaagcgtgtcatcgagaggttcgagaaggaggctgctgagatgaacaagaggtccttcaagtacgcatgggtgttggacaaacttaaggccgagcgtgagcgtggtattaccatcgatattgctctatggaagttcgagaccaccaagtactactgcacaatcattgattccccaggacatcgtgatttcatcaagaacatgattactggtacctcccaggctgattgtgctgttcttatcattgactccaccactggaggttttga

SEQ ID NO: 153803 - DNA, 414 bp, Arabidopsis thaliana columbia
  unsure (1)..(414): unsure at all n locations
ggagcttagaagccgtcggcacaagaagaagatttagaagaatgtctcacaggaagtttgagcacgcaanacatggttctcttggttgccttccaaggaagagagctaaccgtcacagaggaaaggtgaaggcgttccctaaggatgaccaaaccaagccttgcaagttcacagctttcatgggttacaaagctggtatgactcacattgtcagagaagtggagaaacctggatccaagcttcacaagaaggagacatgtgaggctgttaccatcattgagacacctgctatggtggttgttggagttgttgcctatgtgaagactcctagaggtttgaggtctttgaacactgtctgggcacagcatttgagtgaggaggtcatgagaaggttctacaagaactgggctaagt

SEQ ID NO: 153804 - DNA, 382 bp, Arabidopsis thaliana columbia
gcgaaacttacagagagagaaaggcctgaagatgcaatcgaaaggtttaatcagaaagaaacagaatctagtgacttggttgaaaagttaaaaacacatgaaaaccaaatcgaggagtacaaaaagctggctcatgaagcatcaggagttgcggacactagaaaagttgagcttgaagacgcgctatcaaagttgaagaatcttgaatctactattgaagagctcggggccaaatgccaggggctggagaaagaaagtggggatttggccgaggtgaatttgaagttgaatctggaactagccaatcatggatctgaggccaacgagttgcacacaaagctccttgccttggaggccgagaaggagcaaacagccaatgagc

SEQ ID NO: 153805 - DNA, 355 bp, Arabidopsis thaliana columbia
gcatattctcagacagcaagtttctccaagctgagtctctgcagcagcttgttaacctctcttataagagcatccgggaaagatgaagctagttcggtcttttgcctggagcttctgattgcggtaacgctgaacaaccgagacagaatcctactgatttggccaacagtttatgagcatatcttgggtatagttcaattaacattaacaccatgcacgcttgttgaaaaggctgtttttggtgtactgaagatttgccagagattattaccatacaaggaaaacctaacagatgaacttctgaaatcactccaactggttctcaagctgaaagcaaaagtggctgatgcatact

SEQ ID NO: 153806 - DNA, 481 bp, Arabidopsis thaliana columbia
ctctcagcagccaacgacagttatcaaagcttaagccgttttagggttttatccttttgctgagatccaatcatggcggatgttgaaccagaggttgctgctgctggagttcccaagaagaggacgtttaagaagtttgccttcaaaggagttgatctcgatgctcttctcgatatgtctactgatgatcttgtcaagctcttctcttctcgtattcgtagaaggttctctagaggtttgacaaggaagccaatggctctgattaagaagctgaggaaagcgaaaagggaggcaccacatggtgagaagccagaaccagtgagaacccacttgaggaacatgatcatcgtccctgaaatgattggaagcatcattggagtgtacaacggaaagactttcaaccaggttgagatcaagcctgagatgattggtcactacctggctgagttctttatctcatacaagccggtcaaagcacgtt

SEQ ID NO: 153807 - DNA, 481 bp, Arabidopsis thaliana columbia
agggaaagcttatagtaacagttgtgaaagcaactaacttgaagaataaggaattgattggaaaatctgacccttatgctaccatctacattcgtcctgtattcaagtataaaacaaaggcaatcgagaacaatctgaatcctgtctgggatcaaacattcgaattgattgcagaggacaaagaaacccagtcgctcactgtagaggtatttgataaagacgtaggtcaagatgagcgccttggacttgtgaaacttcccttaagcagtttggaagccggagttacaaaagaactggagctaaatctgttgtcttcacttgatactttgaaagtaaaagataagaaagatagaggaagcataactcttaaggtacattatcatgagttcaacaaagaggagcaaatggctgcgttggaagacgagaagaagatcatggaagaaaggaagagactgaaagaagcaggagtgataggtagcac

SEQ ID NO: 153808 - DNA, 386 bp, Arabidopsis thaliana columbia
gatcttccagagagagaaatccctgatttcatggctctgtatttcgatgaaccggacatacaaggccatgagtacggccctgatgatcctcgcgtcacggaagccgtctcaaaggtcgataaaatgatcggtaggatcatcatgggattggagaagaggaaggtttttagtgatgttcatgtgatattgcttggtgatcacggaatggttactaactgtgacaagaaagtgatttacattgatgatttagccgatgggatcaagatacccgcggttggtatccaagattatagtccggtgctagcgatgaatccgcgctggggcaaagatgtcaagaatccagtacagaagaatgcagaactcgtaaggaagatgaacgaaagctt

SEQ ID NO: 153809 - DNA, 380 bp, Arabidopsis thaliana columbia
tcgattcgaaatctacaaagaacccgacaaagcgccatgtcgctcactatcccggcgaatctcggtctcaacccgagatctaacaaatctctcactcaatccgtacctaaatcctccgcaagattcgtctgctccgatgacaaatcctcctcctccacacctcaatccatgaaagctttctccgccgccgtcgccctctcttccatcctcctctctgctcctatgccagctgtcgctgatatctcaggtttgactccttgcaaggactcaaaacagttcgctaaaggagagaagcaccagaccaggaggctggaatcttctcttaagctctacgctcctgaatctgcccgtgctcttgctctcaatgctcagatcgagaa

SEQ ID NO: 153810 - DNA, 245 bp, Arabidopsis thaliana columbia
atcattagcagagaattctcatctgattcagtccatggctgccacggctcttttccgatcgattcgccgacgcgacgtcgtctccgcgcctctttccgtttacaaatcccttgctggtaatgctcaaccttcctggggtagttcatacattggtcagaactatgcaagtttctccagagctttcgggtcaaaacctgttgtgaatgacattcttggtactggtttgggcactaacaatgccatta

SEQ ID NO: 153811 - DNA, 459 bp, Arabidopsis thaliana columbia
atttgtaacagttctatacttaggcggttggaatatttctattccgtatatatctattctggagctatttcaaagggatcaaatttttggaacaacaattggtatctttattacattagctaaaacttatttgtttttgttcgtttctatcgcaacaagatggactttacctaggctaagaatggatcaactattaaatcttggatggaaatttcttttacctatttcccttggtaatctattattaaccacttctttccaactcttttcactctaaatttaaaatgaatctaatatattcattatttgttttaaacaagagacagaaacaaagataaaattattcagagataattacaatatgcttcctatgataaccgggttcatgaattatggtcaacataccctacgagctgcaaggtatattggtcaaggtttcatgattaccttatcccacac

SEQ ID NO: 153812 - DNA, 476 bp, Arabidopsis thaliana columbia
ctgatctgagaaaaaaaatggttatggtttgttaatagagtggatctcgacgggaaaccgatacaaccgttgacagtatggatgatcggcgccggaggtttcatcggttcacatctttgtgaaaagctcttgaccgtgacgccacataaggtgcttgcgctcgatgtttacaacgataagatcaaacacttgctttagcctgataccgttgaatggagtggttctatccagttttatcttattaatattttatcttgatttcgtgacttgaaggttttgttaagtaggtgtgattctattattaatatttttcttagtttctgtactaatgttttatttcaatttaatgctacttatagatacttttcttttgtattgttttttgtttctatttttcatgttttattaatgctttttttttatgtactttttacgtcttaaatatttttttttatattctctatattgtgtgtatt

SEQ ID NO: 153813 - DNA, 451 bp, Arabidopsis thaliana columbia
gcaatatcatttccaatttataaaagttattgctcttggctgcatctttctctgtcccctctatgataatggaagaagaagggagattcgaagcggaggttgcggaagtgcagacttggtggagctcatagaggttcaagctaacaaggcgcccttacactgcccgtgacgtggtggctctacgtggccatctcaagcaaggctatgcttcgaacgagatggctaagaagctgtggagaacgctcaaaagccattaagccaacggtacggtctctcgcacctttagagcgttggaccctgttcaggtgaccatgatggctaaacatttggacaccatctatgtctctggttggcagtgctcgtccactcacacatccactaatgagcctggtcctgatcttgctgattatccgtacgacaaccgttctaacaaggttgaacaccttttttt

SEQ ID NO: 153814 - DNA, 474 bp, Arabidopsis thaliana columbia
  unsure (1)..(474): unsure at all n locations
gttttcgtttagagagattttgcagagatgtcgttacgagcaatggtgataaagatgccaatactgatgatactgatttcatcaatggtgatgacnatggtcgagtcttcgagatcagttaataatggtcatgacgattctgagatcttacgaagacacttgctcactaatggcctcggagtcactcctcccatggggtggaatagctggaaccattttagctgcaacatagatgaaaaaatgatcaaagaaactgctgatgctttggttaccactggcctctctaagcttggctacaactatgttaacatcgatgattgctgggctgaaatttctcgtgacagcaagggaagtctggtgccaaagaagtcaactttcccttctggaattaaagcggttgcggattatgttcacagtaaaggccttaagcttgnngattactcagatgccgggtatttcacttgcagtaaaacc

SEQ ID NO: 153815 - DNA, 431 bp, Arabidopsis thaliana columbia
cgcagttgttacaaacacttggggagcggttaatctgcggttaaagaatcaacgaagctccaaccacaaacaattatattctgcagcttggtacccgattcgaagcgattatggtgtgggagtgaacaatataatattgatgtcagagctaaaagatgcatcaaaagggtatatggtgaatgatgccattatctttgaagctgaaatggttaaggtctctgtgacaaacatagtctccgtttaaatatcactacttctttttcaacaacaaccttacgaataaagtggactttgatgagtttaatttgttatacgacaacgttgttgatgcttgtgatgtaatcgttgtttctgctctccgagttttcgttttactttttttttcatgttttgctatcaatgaaataaaggtataaaactctcttggtttt

SEQ ID NO: 153816 - DNA, 463 bp, Arabidopsis thaliana columbia
  unsure (1)..(463): unsure at all n locations
aaagactcataaatctagggctttcttctagagatcgaagaagaagagttcacatagagagattttgttcgtttcgagattttcttcagtcccaatggcgtcaaacaccagcaacgacaatttccagcatagaccacggcaaagaaacggaccacctcctccgcggcgacagggaagaaatccgccgcctccgtcttcgtcaacgcgaacttctcagaatcagccaccacagcatacgccgcaggagaagaagaaaccggtgtttgtcaaagtggatcagcttaaacctggaacgagcggccacactttgactgttaaagtcgtcgatcagaattccgtacctcagaaaccgggagctgcttcttcttctcatctccgacctgctaggatctctgagtgtcttggtggagatgagactgcttgcatnctcttcactgctcgcaacgatcaagtggaattgatg

SEQ ID NO: 153817 - DNA, 315 bp, Arabidopsis thaliana columbia
agataattctgcgactcttgagaaaggaagacgttcgtttgagaatagtagacagaagaagaaagggagagtcttgtgatatctacgtagaaggaagatggccttatctcaagtgtctgcgtctctcgccttttctcttcccaattctggttccctaaagctagccacaatcacaaacccaacttctacatgtcgggttcatgttccgcaacttgctggaattcgatccaccttcgcttctggttctcctctcttgccattgaagttgagtttgacccgtataggaggaaacagtacagcattagtttccatttg

SEQ ID NO: 153818 - DNA, 188 bp, Arabidopsis thaliana columbia
aggttaaaaccaaactttgatgaaaagatttgtttggttcaaaaattaaaggccaaccacaaagccggatttttaaattggggagaaataaatactccatttgacttaaacttaaaaatgggcaaaaagagagagattttttcctagctgggagaggggggggggaaccaccacttagaaaattttag

SEQ ID NO: 153819 - DNA, 473 bp, Arabidopsis thaliana columbia
aaaaggtcttgaagaactaaggcattctacctcaagcacagatgatgaagcacaatctgcagagagacagaatatgctagatgagatcgaacgggagtttgaagctgctacaagtggtcttaaagagctaaagattaatgctcacactgtcaaagatgatgttgatgataaagaacaagatgccaaaagacaaagtatgctagatgcaattgaacgtgagtttgaagccgttaccgagagttttaaacaacttgaagatatcgccgataacaaagctgaaggagacgacgaatctgcaaagaggcaaagtatgttggatgagattgaacgtgaatttgaagctgctacaaatagtcttaagcaactaaaccttgacgatttcagtgaaggagatgacagtgcagaatctgcaaggagaaatagtatgcttgaagctatcgaacgcgagtttgaagctgctacaaaaggtcttg

SEQ ID NO: 153820 - DNA, 460 bp, Arabidopsis thaliana columbia
cacaaacaacaacaaaagaaacacaatgcttattcacaaactctgttttcttgctctgttcgtagctaatgcaacttttgccggcaaattcaacttcgattccttcgatggcagcaacttgttattccttggagacgctgagcttggtccttcctctgatggcgtaagccgatccggagctctttccatgacccgagacgaaaccccattctctcatggtcagggtctttacatcaatccaatccaattcaaatcttcaaacacttcttctccttttgattttaaaacttctttcactttctccatcactcctcgcaccaaacctaattctggtcaaggccttgccttcgtcattgtcccagccgctgataactccggcgcttccggcggaggatatttcggaatcctcaacaaaaccaacgatggaaagtcagaatacaacctcatatttatcgaattc

SEQ ID NO: 153821 - DNA, 426 bp, Arabidopsis thaliana columbia
atctctcataataaaaccatggatccttacaggtttcgtccagctagttcttacaactctcccgggttgacctccaactatggtgctgctgtgtgtaacatcaactacttcatgaccgttagacccagaggtcctatccttcttaaggattaccatctcgtttagaagctggtcattttcaacagggaacacgattccacagcgtttgactcatgccagatgaaccagtgctaaagactcatttgtggccactcattatatctttcacctaacctgcactgactttatgcaagctgcctgattacacactcctgatattgtccgggactccacccttatccatgttcgtgtatatccactgacctttaaagacccatttggttgtagatgctagttctacaccataaatgggaactttcatcttgt

SEQ ID NO: 153822 - DNA, 465 bp, Arabidopsis thaliana columbia
acttgtttgacataaatacaggcaacaaagaacgaatctgggagagcgacaaggaaaagtatttcgagacagttgttgccttgatgtctgaccaaaaagaaggggatttaaaaatggaggagctgaaaattctgacatcaaaggagtctaaaacagaaaacacccaatattctctccaactttggcctgataggaaagtgcaacagattacaaactttcctcatccgtatccgcaattggcttcgttacagaaagagatgatcaggtatcaacggaaagacggggttcaacttactgcaacactatacctaccaccaggctatgatccatcaaaagacggtcctcttccttgtctgttttggtcttatcctggtgaattcaagagtaaagatgctgctggtcaagtccgtggctcgccaaatgaatttgcaggcattggatcaacttctgcccttctttggcttt

SEQ ID NO: 153823 - DNA, 432 bp, Arabidopsis thaliana columbia
gtcttctttctccttcaatctctctcgttcgtattatctgctctgcgatttcaatggcgagccgggggttgagacctgaggtgtatgctttgttcactgctaccggagttgccgttgggatctgcgcgttttccttgatcagaaacatcaccggtaaccctgaagtcagatgcaccatggagaacagggctgctggaattttggataaccatgcacagggagagaagtataaggaaaattttctgaggaagtttgatcgcaacaagaaacctgaaatcatgcctggactcaacaagttcttcactgatcctacatactgaaaccatctttgcacaccgctttgtcgtattgtttctggaattgaatctcttcgtgatataaaaccgcatttgtcaatttcacattgatgatgtatcctccagctgaagacac

SEQ ID NO: 153824 - DNA, 433 bp, Arabidopsis thaliana columbia
ctcacttcgccggccgacgttcttccttccgccgtcggtatctatatttacgatccacgatctctcttgctgtttctgtcttcatcgtgacgaaaatggctgctcgtatcgggatcttctccgtcttcgtagctgtattgttatctatttctgcattttcctcagctcaggatctccagatcgtaaatgccgagcgaaggattgatttaagctcacatatcgtgaaggccttcttgactctcaaggttgaaaatattgggaaagatcctgctgcagaaatgcttcttgctttcccacctacccagatcaagaatttggctatggtacaagccctggcaactactggcaagaagaagaagaaaacttatttgccattagatgtaaaaccaactgaacaacctgatgcaccaaatgacactggatactaccgtgt

SEQ ID NO: 153825 - DNA, 419 bp, Arabidopsis thaliana columbia
cagaaaggtaagagggaacggcatagacatacacttttttatccaaggtccctccgatggacctatagggggtcctcctccatggttgggcgtgtgctttggtactcatggctccaccagatccctggacttgtcgctcgtggctaccgtgccgtcgctcctgacctacgtggtttcggtgactccgatgctcccgctgtgatctcttcctacacatgcttgaacattggtggtgacttaatcgtcgtcatatccgtcttaaccgtctcagagtgatgagaaggtctttgaggttggacatgataggggagctctaaccgcttgtgatttatgtctctttccaccagatagagtttaagctctggtcaaccttatagttccgtttcttttgcggtcaaccgtaccatcggtgaatcccg

SEQ ID NO: 153826 - DNA, 331 bp, Arabidopsis thaliana columbia
caaaattaaacctccaaatcgtccaagatatttcttttctaggtctttaatgacctttcttgagggggaacacaattattacggaatgctaaatctccaacttggtatcaggtatactgtaggaaaaattacaccatttccgatgctagaagtgcgtgcttctgacttttgtaagaacgctagaacaaagatgttcttccctatagacttttccaattttacccctctcacacaaatctgtcgacttcttctggaaagactattgttccatggttttcatgaatttaaggcaaatgttcaagttagatgctgcagagtacatgttgtctat

SEQ ID NO: 153827 - DNA, 479 bp, Arabidopsis thaliana columbia
  unsure (1)..(479): unsure at all n locations
tccgggtcgggaaggcgtccgagacacattgttactctaaccgtcactctcgctttcggcgatccacctaaaaatatctcnatgggtcttgataccggaagcgagcggtcatggcttcactgcaagaaatctccaaacttaggatccgtttttaacccggtttcatcctctacgtactcccctgtgccttgctcctcaccaatttgcaggacccgtacccgggatttacccatacccgcttcatgcgatccgaagacccatctctgccacgtggctatctcctacgctgacgctacatcaatcgaaggcaacttggctcatgagacgttcgtaatcgggtctgtgacccgacccggtactttattcgggtgtatggactcaggtntaagctccaattcggaggaagatgctaaatcgaccggtttaatgggaatgaacccgggatctttatcttttgttaaccagctgggtttctcaaa

SEQ ID NO: 153828 - DNA, 402 bp, Arabidopsis thaliana columbia
ttactgagctaacatcatcgggaggggaacaatataataaggggagggaattaatcttaattgttttataaagcaaatagtacaaagctgtaagtctctctttcaccatctaaacattctacaatttacttatttcattcatagggctttagtgagagattgttgatatattaaaagattaatagaatgtcccattttaatcagcccctttaacatttctagtaaagattaatacatatagatttttgctgccttatatactaatgcttccaacattcagcttctttgttattaccctttattaatatctttgttttatacattttttattcatcatattcttttactaacctttattaattttatatagttcaatattccaatttgttttttttttttatt

SEQ ID NO: 153829 - DNA, 404 bp, Arabidopsis thaliana columbia
actggacgtgattagtacgagaatgcaaatggtcggatggaaagatgcttacgctattgtaacaggcgaagggagaagcacagctccacttgaatacactggtatggccgatgcatttagaaaaacagttcgtcatgaaggctttggagcattgtacaagggtttggttcgcaattcactgaatgtcataccatcgattgcgattgcattcatgacatatgagatcgtgacagacgtttttggaatcgagattaagatactcagactgggtcatttgatatctcaatgcgcgacatgaaagcgcacttctatttctggagccagaagagaatgtcaacacagttagtgcggctttatgtatctactttcaacatccggtgggaaggataaatggctataggggc

SEQ ID NO: 153830 - DNA, 417 bp, Arabidopsis thaliana columbia
gccattttctttggacgaccatcggcgttaaggagagagcttagatctcgtgccgtcgtgcgacgttgttttccggcttgatcaaaatggggttgtcattcggaaagttgttcagcaggctctttgcgaagaaagagatgcgtattctgatggttggtctcgatgctgctggtaagacgactatcctctacaagctcaaacttggagagatcgtcaccactattccaaccattgggttcaacgttgagactgttgaatacaagaacatcagcttcaccgtgtgggatgttgggggtcaagacaagatccgtccattgtggagacattacttccagaacacacagggacttatctttgttgtggacagcaatgatcgtgaccgtgttgttgaagccagggacgagcttcacaggatgc

SEQ ID NO: 153831 - DNA, 277 bp, Arabidopsis thaliana columbia
gcgcgtcaagcgcggcggctttatgtacttcaccgtttccgtatgaaggacaggtggaagttgatttcattgacgagccgccccagcaaggcacggaggctaatcttattctgatgagagatgctgatgaagagaagcgcgtggacgcaatcgccatgggcttggggatgaggagggtcggtttcttttttaaccagaccgtggtgcaggacaagactgtatacactctgtccaacgccgatgtactacaggcgtcggagctttatgcctattgcta

SEQ ID NO: 153832 - DNA, 407 bp, Arabidopsis thaliana columbia
  unsure (1)..(407): unsure at all n locations
aggcgtccgatcacatttctncctcttttctctctttnntctttttcttcaaagagtttcttagtaacccaaaggatggcaggtatcaaagttttgggacacccatctnnnnnngccaccaggagagtcctcatcgccctccacgagaaaaacctcgactttgagctcgttcatgtcgaactcaaagacggtgagcacaagaaggagcctttcctctcccgcaacccttttggtcaggttccagcctttgaagatggagacctcaagctcttcgaatcaagagcgattactcagtacatagctcaccgatatgaaaaccaaggaaccaaccttttccaaaccgactccaagaacatatctcagtacgcaatcattgccattggaatgcaagtagaatatcaccagtt

SEQ ID NO: 153833 - DNA, 412 bp, Arabidopsis thaliana columbia
  unsure (1)..(412): unsure at all n locations
cgcgttcaaccctaccccttattctcttctttttctcttttttttcctcagtctctttcttgatcccttgtgtttccaaagggccntaaaaagtcggtaaaggagaagaccagctatcggtatcgatcttggtaccacttactcttgcgtcggagtatggcaacacgaccgtgttgagatcattgctaatgatcaaggaaacagaaccacgccatcttacgttgctttcaccgactccgagaggttgatcggtgacgcagctaataatcaggtcgccatgaaccccgttaacaccgttttcgacgctaagaggttgatcggtcgtcgtttctctgacagctctgttcagagtgacatgaaattgtggccattcaagattcaagccggacctgccgataagccaatgatctac

SEQ ID NO: 153834 - DNA, 452 bp, Arabidopsis thaliana columbia
cagctatggttaacgtcagatttttctttaactatgggaaaacattcaataaggcacggggtccttatgagaaagagcgtgttgatgctgagctaaagcttgttggagaatacggtcttcgttgtaagagagagctttggagagttcaatatacacttagcagaatccgtaatgctgcaagagaactcttaactcttgatgagaagaatcctcgtcgtatctttgaaggtgaagctcttcttaggagaatgaatcgatatggtcttcttgatgaaacccataacaagcttgattatgtttcttgctttgactgttgagtatttccttgaacgtcggctccaaactattgcctttaagtctgttatggttaagtacaattaccatgctcgtgttcttatccgacaaaggcttattagggttgtgaggcaacttgtgaactttccattagttta

SEQ ID NO: 153835 - DNA, 375 bp, Arabidopsis thaliana columbia
ggctcactttgttttagctttctcctctacttctataatgccgtttgctccttccttgttgtcggggtcttcctcagtctctcaatttcttcccagattccccaacgcgactagattcaatgtaactccacggagcagagccgccaccgtcgtcgcggcatccgtcaccgacctagccggggtcgacagtacaacaatcgccgtactcggtggaggatccgtagcagcactcgcggcgatggtttccttaacggatccggagaggaggcggaaattgcaggcggaggtagttggcggaggcgataaggaggttgggagggaagtattcaatagcacggggttgagaggtggtggagatctacggtgagactgatt

SEQ ID NO: 153836 - DNA, 414 bp, Arabidopsis thaliana columbia
gtaaatttgtgatccaaaccctagctccattgggttgcttacccatcgtcagacaagagttcaacaccgggatggatcaatgctatgagaaactcaacgatttggctaaacaacacaacgaaaaaattggaccgatgttgaacgaattggctagaacagctcctgcatcagctcctttccaattcaccgtctttgatttctacaacgcgattcttactaggacgcagaggaaccaaaacttccgatttttcgttacgaacgcatcgtgctgcggagttgggacacatgatgcttatggttgcggttttcctaacgtacattcgaggctatgcgagtaccaacggtcttacctattcttcgacggacgtcacaacactgagaaagcgcaagagatgtttggtcatcttctttttg

SEQ ID NO: 153837 - DNA, 310 bp, Arabidopsis thaliana columbia
gacatgagttcttatgcagatgctctttttttgtgtttctgctgctcgagaagaatttcctggagggcgtgtatatccggggggtaggtatacatatcttgcaactatttatgaacgcgcgggacgtattgaaggaagaaagggttccattacccaaattcctatcctgactatgcccaatgacgatatcactcaccctactccggatcttactggttacattactgatggtcagatatatattgataggcaacttcacaacagacagatttacccacccattaacgtgcttccatcactttctctgctg

SEQ ID NO: 153838 - DNA, 329 bp, Arabidopsis thaliana columbia
accacgcgtacgatttccttgattctgaacgccatcactttttgctcctaatcgtctacatatgggggttgactcactccaactacgaagagtctgatttactatgtcatatcccgtctgcatcaggataccagccaactgtgactcatgatctaggtgcttttgaagagcgacttactaccaccaagagagggtacatcaccttagttcaagccatctatgtaacctgtcgatgattcgactgatcctgctgctgatacaactcctgctcacttcgactccactactgcactctcaagacagatttcttagcaatggatctaccctgc

SEQ ID NO: 153839 - DNA, 470 bp, Arabidopsis thaliana columbia
  unsure (1)..(470): unsure at all n locations
aagagaagggattgtgtctccttctcgacttcttcttcttcttctcatttctcaatctcaacttttctcttctcttctcttcttcgctaacggcaggagagagagagacccagaaatccgatccctcctctccttggattatcggagtcagcgattcatcgtcgctgataaagcttctacctttctcttcgatttttgttgtgagattcgattcgatcttaaggcggattagatcgaggtatgcagcaaggcgatcaaacggttctgagcttgagacctggtggcggtcgaggaaacagactatttggttcctcttcttcttcttcgtctctctcttttggctctctttcatcttcggatctacctctccttcgtcctcatggtggtgctcctgcttcctctnttcccttcaagggtggagactcgaggttcgatggccgtgaacgtgtgaagtacacccgtgagcagct

SEQ ID NO: 153840 - DNA, 335 bp, Arabidopsis thaliana columbia
gagaaaacttcgtctctcttctctgcttcgccctctcatttcctgtgagataaaggcggagtctctctccagttattttgctcatccatcgattcttagagttcaaaatggttgatcaagttcagcaccccactattgcgcagaaagctgccgggcagttcatgcgttcaagtgtttccaaggacgttcaagtgggttaccagaggccttctatgtatcaaagacatgcaacctacggaaactactccaatgctgcatttcaatttcctccgacatcccggatgttggcaacaactgcttcttccgtgtttgtccaaaccccaggagagaagggg

SEQ ID NO: 153841 - DNA, 351 bp, Arabidopsis thaliana columbia
gacaccaacaaatttgcaggattcggtcctgcttttcttttttccgaaaagcttcaaaaagacatatttgcgcagtccaattctatgcatgtgcaggccaatgtggagtcaaagagtacagcagctttttttggatctcctggcctgcataacgcaattttgcagtcaccgcaaaatacgtcatctcagccatggtcaagtgggaaaagcgtctcacctccagattttgtatctggtccctttccttctatgagagatactcagcataagcaatctgttcagtcttgtactggatatgttaacccctctatgagcatcaaagataaatctgtacaagttattgagactggt

SEQ ID NO: 153842 - DNA, 230 bp, Arabidopsis thaliana columbia
ctgaaagccttggctgaagactgtaaccagccttattatttcaagctagagaaggctctctgcgctgagcacgaattcaggtcgctcacagatccaagtaccaaaacccggggcgactgggctagcacctgaatgatggactctgagggtactgccaggaaaggcgttgaaggctcatgtatggctgtcaaggactttaccagaggggacaacatgcctcaaagacatgc

SEQ ID NO: 153843 - DNA, 468 bp, Arabidopsis thaliana columbia
tgaaaatcagtcatgggttctggaaaagagcgtttcactttcgtctacctcgctaagctctgtgagcaagctgagcgttatgaagaaatggtggaatcaatgaaaagtgttgcgaaattgaatgttgatctgacggtggaagagaggaacttactctctgtgggttacaagaacgtgattggttcaaggagagcttcgtggaggatcttctcgtcgattgaacaaaaggaagcagtgaaagggaatgatgttaatgtaaagaggatcaaagagtatatggagaaggttgagttagagctttctaacatatgcattgatattatgtctgtcttagatgagcatctcattccttcggcttccgagggtgaatctactgtcttcttcaacaagatgaaaggtgactattaccgctatcttgctgagttcaaatcagggaacgagaggaaagaggctgctgatcagtctttg

SEQ ID NO: 153844 - DNA, 372 bp, Arabidopsis thaliana columbia
atcaaattcattcatatcaaagagatagagtagaaattgtccggtgtggctattcatgcgagggcatggggcgcggctctggtgagaatctccccgtacactttctccgccatcggaatcgccatctccatcggcgtctctgttcttggtgctgcctggggaatttacattaccggaagtagtttgatcggtgccgccattgaagctcctcgaatcacttccaagaatctcatcagtgtaatcttctgtgaagccgtggctatatacggtgttattgtggcaatcatattacaaacgaagttggagagtgtaccatcatcaaagatgtatgatgctgagtctctaagagctggatatgcaatctttgcttct

SEQ ID NO: 153845 - DNA, 392 bp, Arabidopsis thaliana columbia
gaatatttgagaaacttcgagccgccatgttttttagttttgttcaagaatacgtttagaaggagggaaaaacacacgatggaatggatttgaccagagttacaacaaaggatctgattgcgaaatatggtctagatggcaacactattgactttattggtcacgcagtggcacttcacacgtatgaccaacatcttgaccaacctgacttagatactgtatatgagaatgaagctatatgcggaatctcttgcacgtttccaaggaacatctccatatatttatcctctctatgggttgagagaactaccccaggcatttgcacgacttagtgctgtctatggtggcacatatatgttgtacaaacctgagtgcaatggtagagtttgacg

SEQ ID NO: 153846 - DNA, 381 bp, Arabidopsis thaliana columbia
ggtcaaacaagactccgggtaacaactctttctagaagatgggtaatgggaactgaaagcttacaggagttgagcaatggttttgaccaagaagcagctgctgtagtaatggcacgacttatttcctccaaaatggagactcagcctgagtttaatccccaaaggtgggtcgataaagcgttgataaatctatgcacctggtttggagattaccagaaaggcaatccttcttcctttagcttatcttctcagttatcaattttcccgcagtttgtgtttcacttgcgccgatctcagtttgtccaggtctttaacaacagcccagacgagacagcatattttcgaatgatattgtacagagagaacggttctaattcagtc

SEQ ID NO: 153847 - DNA, 389 bp, Arabidopsis thaliana columbia
caccattttcacaacatcgtacttatcgtcttcctctctctctcaatacctctctcaatttctggatccaccatgcaagctcttcaatcttcatctctccgtgcttctcctccaaacccacttcgcttaccatcaaatcgtcaatcacatcagctaattaccaatgcgagacctttgcgaagacaacaacgttccttcatctccgcatcagcatccactgtctccgctcctaaacgcgaaacagatccgaagaaacgagttgtcattactggtatgggtctcgtctctgtgtttggtaacgatgttgatgcttactacgagaaattgttgtctggggagagtggtattcagtttgattgatcgtttcgattcttccaagttacctactc

SEQ ID NO: 153848 - DNA, 368 bp, Arabidopsis thaliana columbia
acaaacagaggcagagatcttaagagtttatgtctaatcccaacaatggcgtctctcaaagtcccaagcaatgttcctcttcccgaagatgacgccgagcaactccacaaggctttttcaggatggggtaccaacgagaagctgatcatatcaatactagctcacaggaacgcagcacaacgcagcttgatccgcagcgtttatgcagctacctacaatgaggatcttctcaaagcattagacaaagagctttctagcgactttgagagagctgtgatgttgtggactcttgatccaccatagagagatgcttatttggctaaagtatccaccaagatgttcaccatgaacaattgggttcttgttga

SEQ ID NO: 153849 - DNA, 324 bp, Arabidopsis thaliana columbia
tagagaagcgtttgtggagatgtgtaatgatgagtatgttcagaagatgacattcgatagctatgggtacaagcgggttgcgccgggtagtcctttggaggatatcaagttggctgtgaacaccattggaagtttggttagggctaatgctctaaggagagagattgagaagcttagtgtttaagaaacaaataatgaggtctatctcctttcttcatctctatctctctttttttgtctgttagtaatctatctacactaatgttgttactcttcaatgtattcagtatcatttaaaaaaaaaaaaaaaaaaaaagggagggg

SEQ ID NO: 153850 - DNA, 457 bp, Arabidopsis thaliana columbia
cgcaggctgttgtagcagcagtgtctatcggagacgatgaagttcaacgtcgccaatccgaccaccgggtgtcaaaagaaactcgagatcgatgacgatcaaaaactccgcgcctttttcgacaagaggctctctcaggaagttagcggagatgctctaggcgaggaattcaagggatacgtattcaagatcatgggaggatgtgacaagcaaggtttcccaatgaaacaaggagttctcactccagggcgtgtccgtcttttgcttcaccgaggtactccttgttttagaggacacggaaggaggactggagagaggagacgaaagtctgtccgtggttgcattgtgagccctgacctgtctgttcttaacttggtcattgtgaagaagggtgtaagtgatcttcccgggcttaccgacactgagaagccaagaatgagaggtcccaagagggcat

SEQ ID NO: 153851 - DNA, 444 bp, Arabidopsis thaliana columbia
ctctgctctctaaagaaaattttgctctctttatttctcgatttgattcataaaccctagctcttagattttttttccgatcaacgagaatggcggacgcagaaacctttgctttccaagctgagatcaaccagttgctctccctcatcatcaataccttttactctaacaaggagatcttccttcgtgaactcatcagtaactcttctgatgctttggacaagattaggtttgagtccttgacagacaagagcaagctcgatggtcagccagagctcttcattcacatcattcccgacaagactaacaacaccttgacgattatcgatagtggtattgggatgaccaaggctgatctggtgaacaaccttggaacaattgcaagatctggtaccaaagtattcatggaggcgttggctgctggagctgatgttagcatgattg

SEQ ID NO: 153852 - DNA, 364 bp, Arabidopsis thaliana columbia
cggacgcgtggggagagaacggatcgagtcagggacgttcgagactcagcaaggttatactatcccagaggtacccgccgttcgatcagctccgttgaataacttcaccggtgaaaagaatgaccttggaccgaagaagaagaaacagaagaaaaatgtgtcaggtctcaagcgaagcaatcaatttggtccgtcggatccggagtcggagaaattattggccggtatgttgaatacctgtagtcagatcttggtgaagctaatgaagcataaatgggcgtgggtgttcaacactcctgttgatgtggttggtttagggcttcatgattatcatcaggttgtgaagaaacctatggatctgggt

SEQ ID NO: 153853 - DNA, 342 bp, Arabidopsis thaliana columbia
tatcgatctaatcttttcagctctctccatcgttgtcgtatctgtgactctcgtgatcatcgcctgaaaaaaatttgagataatggccagaaagttcttcgtcggaggcaactggaaatgtaacggaactgctgaggaggtgaagaagattgtgaacactcttaatgaagctcaggttccttcacaggatgttgtagaggttgtggttagccctccatatgtttttcttcccctggttaagagcacattgaggtctgacttttttgttgcggcacaaaactgtttggttaagaaaggaggtgctttcactggtgaagtgggtgcggtaatgcttgtttactt

SEQ ID NO: 153854 - DNA, 433 bp, Arabidopsis thaliana columbia
cggacgcgtgggcgacaatggcgatagctatggctgttgtttctttcccatctctgctcaagagagcaaccttatcctcttcacgtcttcactcccactttcctcccggcgaaatcctcttcacttctcatcaaatcatcaccaaaaaccagattcgtggtttcatcatccatggaagctggaatcggagtaatggggttaaaactcgggatgatgagtttcttcgaagaagacggcacagtagttccagtaacagtcgtcggattccgcgaaggtaacatcgtaacccaaatcaaaaccctagccacagacggttacgacgcggttcaaatcggttaccgtcgtgttcgcgacaaaaagctaactaaaccggaaaccggtcatctccaaaaagccggtacaatccccatgagacatctccaagagttcagat

SEQ ID NO: 153855 - DNA, 220 bp, Arabidopsis thaliana columbia
ttttaagaaaagaaggctttcattttatttatttgtatagccatgataacacacattcgtggaggaatgaaaaaaaggaattcgaaaaaaagaagcgttctatgggtttggcaccaaattaagattttgcaaaatacaaataattacaacatagagaaatctctcccaaaataggttaataacctaacgcttaccggtttgaatattctcttttttcttt

SEQ ID NO: 153856 - DNA, 454 bp, Arabidopsis thaliana columbia
atcggagcttcagagagatccaaagagagagatttaggatgtctcacagtcacgggaacgcggggggggtgaacgatccacggggggcttcggcggcaaagccttacattccacggcctgtagcgccggaggatcttcccgttgactactccggattcatcgccgttatcctcggcgtctccggcgttatgttcaggtacaagatatgctcgtggcttgcaattatattctgtgcacaatctctggccaacatgaggaacttggaaaatgatttaaagcagatctccatggctatgatgtttgctataatgggattggttacaaactacttagggcctaacagacccgcgacaaagaaataatcctcatgtcttaagagtagtatgcttttttttgataaaccttgtatggctcttgtttccgcaccagagattgctagtggtttggctttgtg

SEQ ID NO: 153857 - DNA, 457 bp, Arabidopsis thaliana columbia
cgtccgatcggttccaaaatcaatagaaccggaatatctttcatttatgacactaccgatttcaaaacctgggagaaacacgaaaccttgttgcgccaagtccccaacaccggaatgtgggagtgcgttgatttttacccggtgtcgaagactcagctcaatgggctcgatacttcggtcaacggaccagatgtcaagcatgtcatcaaggctagcatggacgatactagaattgaccattatgccattgggacgtacgatgattcaaacgctacatgggtccccgataatccttctatcgatgtcggaatcagtaccggtttgagatacgattacgggaaatattatgcgtcaaagacgttttacgatcaaaataagggacgaagaatcttatggggttggatcggtgaatctgacagtgaagctgctgatgtacaaaagggttggtcttctgttc

SEQ ID NO: 153858 - DNA, 310 bp, Arabidopsis thaliana columbia
atctagtggagctattgggtcaccacagttgcttatgttaagtgggattggacctaagaaggagcttcagaggctgaagattcctgtggttttagagaatgagcatgtaggaaaaggaatggctgataatcccatgaacacgatcttggtgccttcaaaggcgcctatagagcagtcacttattcagactgttggaattacaaagatgggtgtgtatgttgaagccagtactggctttgggcaatctcctgagagtattcatactcactatgggattatgtcgaacaagaatgaattgttttccaccatt

SEQ ID NO: 153859 - DNA, 350 bp, Arabidopsis thaliana columbia
cgaagggagattaagaacggttcttgatgtctgatgctgagttgcgagttttggagcttaccttctcgcgtctgatataatgacaatgtcactagcccctaatgatgttcatcagaaccaaatccagtttgcgttagaaagaggaatccctgcttatcttggtgttttaggtaccaaaaggcttccttacccgagcagatcattcgagtttgctcattgttctcgatgtaggattgattggcttcaaagagacggacttcttttttcttgagctcgatcgggtactaagaccgggaggttattttgcgtattctgtcttctgaagcttacccacaaaatgtaaagtattt

SEQ ID NO: 153860 - DNA, 415 bp, Arabidopsis thaliana columbia
  unsure (1)..(415): unsure at all n locations
aaaaaaaacccttcaaaacatttccttattctttcttcttcatctacaacaatggctggagttggctttggttcctttgatgattcattcancttggcttctctaagagcttacctcgctgagttcatctccactttactctttgttttcgctggtgttggctctgccattgcctacgcaaagctgacgtcggacgctgctcttgatacaccgggactagtggccatcgcggtttgtcatggttttgctctcttcgtggccgttgcaatcggagccaacatcttcggtggccatgtgaacccaagccgcacttttggtcttgctgtcggtggtcaaatcacagtcattaccggagttttctactgtatcgctcagctttttggattcaaccgccgtttgttttctacttaaatac

SEQ ID NO: 153861 - DNA, 464 bp, Arabidopsis thaliana columbia
gaattacaaacaaaaatggttttgcaaaagcttcctctcattgggctgcttttgctcctgaccatgggcgcctctccagcaaatgcagatggacctgtttgcccgccgtcgaacaaactaagccgggcaagtttccctgaaggttttttatttggcacggctactgcggcataccaggtcgaaggtgcgattaatgaaacttgtcgtggaccagccttatgggacatctactgtagaagatatccagagaggtgcaataacgataacggcgatgtggccgttgatttcttccatcgttataaggaagatatccaactaatgaagaatctaaacacagacgcctttagaatgtctatcgcatggccaagaatatttcctcatgggagaaaggagaaaggagtgagtcaagctggtgtgcaattctaccacgacctcatcgacgagctcataaaaaatggtataac

SEQ ID NO: 153862 - DNA, 310 bp, Arabidopsis thaliana columbia
ggcgaaccaagtttagaaaggctatgaacaaagctgattttgatgctagcacaagggccattgattctctgataaattatgagactggcaaatattttaacaatgaaggttatgaggctgaaaagtatgaccagttcctgaaaaaatatgaagatgctgccctgcaaactcaaagaagtcttgctttcttaaactttggacaaagtatcatatttagtacagctttatcaacagcaatggtgttgtgctctcagggtatcatgaatggccagatgacagtcggggatttggttattgtgaaatggacttt

SEQ ID NO: 153863 - DNA, 281 bp, Arabidopsis thaliana columbia
  unsure (1)..(281): unsure at all n locations
aaattccccggcgacccacgcatcctttcattaacttttctaataaannttgaatgttcttactctcttaaacaattcnttactatcgagatcttatttaattgccttaggtcaacaccatttttacttcttatnaattctttctttctacaattccttaatcttcttactcaccttcaaaaatttccctacctcctattcctttattaatttcctcatcttctaccatttcttcaaatccctattattatttatcaccatcttctccaccatttattcta

SEQ ID NO: 153864 - DNA, 452 bp, Arabidopsis thaliana columbia
ctaactttctcattcggcgctcaagtttctctccaccccttcgagatttggtgcgatgatgttgcgtgctgtttttaggagagcttccattagaggctcttcttctgcttcgggattgggaaaatcattgcaatcctctcgtgttgcagtgtctgctcaatttcattctgtttcagcaacagagacgttggtgcctcgtggaaaccatgctcatagcttccatcaccgttcttgtccagggtgtccagactgttcaaggactattatcaacggttaccaaggcacagccctgcaaagatgggtcaggcccttttcatctgatagtggggatgtcgtggaagctgttgtgccacacatgggtgaatcaatcactgatggcaccctagccgcctttctgaagaaacctggcgatagagtagaagctgatgaggctattgcacaaattgatactg

SEQ ID NO: 153865 - DNA, 390 bp, Arabidopsis thaliana columbia
gctcacaccaatcggtccgttcccatactctcctttaatggcttctgagagatatttaagtttagcaaaaaaatcctaagcttctacaatggcgaatcttcccaccgttctcgtcaccggcgctagtggcagaacaggccagattgtgtataagaagctgaaggaggggtcagacaagtttgtagcaaagggtttagttagaagtgctcaaggaaaagagaaaattggaggagaagctgatgttttcattggggatataacagatgctgatagcattaaccctgcgtttcaaggaatcgatgcgcttgtgattctcactagtgctgtgcctaaaatgaaacctggttttgatcccactaaaggtggaagacctgagttcattttcgaaga

SEQ ID NO: 153866 - DNA, 364 bp, Arabidopsis thaliana columbia
cacgcgtccgggcatttcaaagagacaatatttcaggtgatgattctgcccctgttgttgttcctcccggggttggtgagccagcgggcatgggagaggacatggacttaatgactgcattggagttgactcttaggaaagctcgtgcttatggtggtgttgttcgtggtctccatgagtgtgctaagcttattgagaagcgtgtggctcaactcgttgtcttggctgaagactgcaaccagcctgattatgtcaagcttgtgaaggctctctgtgctgatcacgaagtcaggttgctaacagtttcaagtgccaagacccttgccgaatgggcttgtctctgaaagattgattctgaggtatg

SEQ ID NO: 153867 - DNA, 400 bp, Arabidopsis thaliana columbia
  unsure (1)..(400): unsure at all n locations
tttcaagtaggcaanncaacntcnttggtaaccttataaacatggccaagacaaccccagaccgtcagcaagcttgccgttgccttcaatctgccgctaaagccgttggtcccggtctcaacactgcccgtgcagctggactttctagcgcatgcaaagtcaatattccttacaaaatcagcgccagcaccaactgcaacaccgtgaggtgatgagcgacggtcaaatgaagctactagcggatgtttcgaatattatataatcgatgagataatattaaataaagatgttcgaatggctgtactcttttcaatttccttgtcttttttatcgtggcgtttctattatattgatcgtcttgtactatgtttctcatacaacttttttttaaatttttata

SEQ ID NO: 153868 - DNA, 421 bp, Arabidopsis thaliana columbia
aagaaaatgagggagaggagagttgtcgatcatttatgttagaagagggagatgctacttctgatatttgacaaaacaaagcagagacaggtgaggaacatctgaaaaagatagatgaaacaagagagaaagagagagaaagaaagcaagagagagttatggtagaaagagctattcgtgaagcccgcgaaagggcatttgctgatgctatggaaagagcaggaaaaactgcaatggagaaggcaaaggcagtagcccaccgtagagaggttccaaggaaatcagaaaagggatctgttgaggtaaacgataagttatcatcagctgagaaggcttcaatgcaagccaaactcagagctgagcgtgctgctgtagaacgagcaatcactgaggtcagagaacgtgccatggaaaaagcatt

SEQ ID NO: 153869 - DNA, 433 bp, Arabidopsis thaliana columbia
cgcagttgattttatggacggctaaggctgatgttgacttgacacaaaactccgatcgtgttcgattacgggtttagatttttctgagaacgcttataattgtttcaacttttggatcttcacacgcataaattttcgcttcgtctttcatcatctgttctcaagtttagagtctatagtcaggaaacttggaactttaggatttgattgaaaaagcaatcttgcgatggcgaataatgcggctgcttgtgctgagagggctacaaacgatatgctgatcggtccagattgggctatcaacattgaactgtgtgacattatcaacatggaaccaagtcaagcaaaagaagcagtgaaggtgctcaagaaacggttaggaagtaaaaattctaaagtccagattcttgcttcttatgctttggaaactttgagt

SEQ ID NO: 153870 - DNA, 314 bp, Arabidopsis thaliana columbia
  unsure (1)..(314): unsure at all n locations
gacgaccacgcgtccgcggacgcgtgggctcgaagttccgtgcgactctctgctttagcaagatctcctaccgatacaatggttatgtcagaggctaaccgcggagaaatctgcaagtacctcttcaaagaaggagtttgctttgcgaagaaggatttcaatcttgctaagcatccgttgatcgatgtccccaacctacaagtgattaagcttatgcagagtttcaaatccaaggagtatgttagggagacatttgcctggatgcattactatnggttttttgaccaatgaaggggatcgagttcttgagaact

SEQ ID NO: 153871 - DNA, 395 bp, Arabidopsis thaliana columbia
aggcgtacgcgtaaaggtgctcgtggcagtcatcgaacacatctaccgtcttgtcgcggctcggctccagttcggcgtgatgggtacagagaccgtgcttgttgctagaacagatgcggtcgcagctactctgatccagtcgaacattgacgcgagggaccaccagttcatcctcggtgccactaacccgagccttagaggcaagagtttgtcctcgcttctggctgagggaatgactgtaggcaagaatggtccggcgttgcaatccattgaagatcagtggcttggctcggccggtcttatgactttctccgaagctgtcgtgcaggccatcaagcgcatgaacctcaacgaggacgagaagaatcagggactgagcgagtgggtaacccatt

SEQ ID NO: 153872 - DNA, 379 bp, Arabidopsis thaliana columbia
acttcttcttcctcgcaactctttcactctgttttacactcacattctcacatatatataacacagactagctctaatcaccaaatgagaaaccaaagcttctaaattcagtttcaatggcgatcattaaaccaaaccgagatctcaaaccggacggtgtcacagtcgtgactcgtgaagtctgggcggagaatctcgaatcagaatttgaactaatcagcgaaatcatcgacgattatccatttatctcaatggacacagaatttcccggcgtgattttcaaatccgatctccggtttacgaatcccgacgatccttatactcttcttaaagctaacgtcgaccctctcagcttaatccaagtcggtcttcactcttc

SEQ ID NO: 153873 - DNA, 416 bp, Arabidopsis thaliana columbia
ctcacattttcgtagccgcaagactcctttcagattcttacttgcagctatgggtaaagagaagtttcacattaacattgtggtcattggtcatgttgattctggaaaatcgaccacaactggtcacttgatctataagcttggtggtattgacaagcgtgtcatcgagaggttcgagaaggaggctgctgagatgaacaagaggtccttcaagtacgcatgggtgttggacaaacttaaggccgagcgtgagcgtggtattaccatcgatattgctctatggaagttcgagaccaccaagtactactgcacagtcattgatgccccaggacatcgtgatttcatcaagaacatgattactggtacctcccaggctgattgtgctgttcttatcattgactccaccactggaggtt

SEQ ID NO: 153874 - DNA, 438 bp, Arabidopsis thaliana columbia
gggttttcgtttttatcttttcctccgatgaataatataagaggttgaagaagaagaagatgccagttccatttattgaggaagtgggtgatgaggctcttatggatgccattaaagagcagatgaagctccagaaggagaacgatgttgttgttgaggatgtgaaagatggatactaatacgatgatgatgttgatgacgactacgatgagattgctgatggagctggtgagaatgaggctttcaagcaaagttgaagcgagaagaaaagccgaaaggcgatgcttaaactcggaatgaaacctgttactgatgttagcagagtgactatcaagagatcaaagaatgtgttgtttgtcattttgaagccggatgtgttcaagaattcgaactttgagacctatgtgatatttggtgaggctaatattgatgacatga

SEQ ID NO: 153875 - DNA, 453 bp, Arabidopsis thaliana columbia
ctctcactcttagtacaaatattttcaagaatggtttctccttctttttcaaccaagcttgtcttctttgcttgctttgttctgttcacattctcacacaaactcgtgacaggagaatccgacaaagttgagctcaatctttactacgaatcactttgtcccggttgtcagagtttcatcgtcgatgaactagtcaaagtctttgactccgatctcgatacaatcaccgatgtcaagctcgttccattcggttacgccaaagtctccaataatctgaccgtcatttgccagcatggtgaagaggaatgcaaactcaacgctcttgaagcttgcgtcattaacactttgcctaacccgaaatcgcagtacaagttcatacgatgcgttgaaaacaatacggataactgggaatcatcatgtttaaagggctatggaaatgagaaagccatcaat

SEQ ID NO: 153876 - DNA, 392 bp, Arabidopsis thaliana columbia
gaagaacaatggcttcctctatgctctcttccgctactatggttgcctctccggctcaggccactatggtcgctcctttcaacggacttaagtcctccgctgccttcccagccacccgcaaggctaacaacgacattacttccatcacaagcaacggcggaagagttaactgcatgcaggtgtggcctccgattggaaagaagaagtttgagactctctcttaccttcctgaccttaccgattccgaattggctaaggaagttgactaccttatccgcaacaagtggattccttgtgttgaattcgagttggagcacggatttgtgtaccgtgagcacggtaactcacccggatactatgatggacggtactggacaatgtggaagcttccc

SEQ ID NO: 153877 - DNA, 495 bp, Arabidopsis thaliana columbia
cccgtccgggatcgcagggtccgggccagacctacgctttctgagccatgtgctacaaacaccaaactctcctgattcatcagttttaagtcttcttcaagtcccagggatcatcaatccaatggctcagatcttagcagcttctccaacatgtcagatgagagtgcctaaacactcatcagtcattgcatcatcatccaagttatggagctctgttgtgttgaaacagaagaagcagagcaacaacaaagtcagaggctttagagttcttgctctccaatctgataacagtactgtcaatagagttgagactcttctcaatttagacaccaaaccttactctgacaggatcattgctgaatacatttggatcggaggatctggaattgaccttagaagcaagtcaaggactatcgaaaagccggtggaggatccttctgagctacctaagtggaactatgatggttcgagtaccggtcaagcacctggtgaaga

SEQ ID NO: 153878 - DNA, 461 bp, Arabidopsis thaliana columbia
gcagaaaccatttggagttggagctttggacgacgacaatggccccgaagaaaggagtgaaggtagctgctaagaagaagaccgcggagaaagtttcaaaccctctattcgagaggaggcctaagcaattcggtattggtggagctttacctcctaagaaggatctctctcgctacatcaaatggcccaaatccatccgtcttcaaaggcaaaagaggatcctgaagcagaggttgaaggtccctccagctcttaaccaattcaccaagactcttgacaagaatcttgctaccagcctcttcaaggtccttctgaagtacaggccagaagacaaagctgccaagaaggagcgtcttgtaaagaaggcccaagctgaagctgagggaaagccttctgagtctaagaagcccattgtagtcaaatacggcctcaaccatgtgacctacctcattgagcagaac

SEQ ID NO: 153879 - DNA, 458 bp, Arabidopsis thaliana columbia
gaaaacgttttgatcgatctggacaatcaaagtgcaaatggagaacccattgtgaagctttgtgattttgatagagctgttccgcttaggtctcacttgcacgggtgctgtattgcccatgtgggaatacctcctcctaatatctgtgtcggcacaccacgttggatgtcccctgaagtcttcagagcaatgcacgaacaaaacttttatggacttgaagtggatatctggtcatttggttgcttaatcttcgagttgttgacactacaaaatccttattttgatttatctgagcttcagattcatgaatcgctacagaatggcaaaagaccaaagctaccaaagaaactagagacactgatctctgaaacagaggaagaagaatcaacgaacaagctctctgaagtgtttgatctaaccgaatctgacttagacacaatgagatttctgattgacgt

SEQ ID NO: 153880 - DNA, 442 bp, Arabidopsis thaliana columbia
gagcagcacaagtctgcgagatttggattagatctgattcaggttggattgatcatcgttcggagctccgggaaacatggcggcgacgagacaattacgaactctccaatctcagcctgaaaacaaggtatgtgtcgattgcgctcagaagaatcctcaatgggcgtcggtttcgtacggaatcttcatgtgtttggaatgctccgggaaacaccgaggcttaggcgttcacatatccttcgtcagatccgtaaccatggattcatggtctgcgatccagattaagaaaatggaagctggtggtaacgaacggctcaacaaattcttcgcgcaatacggaatcgctaaggagacagatattatctccaagtacaattcgaacgctgcttctgtgtatcgtgaccggatccaagctttagctgaaggtagaccatggaatgat

SEQ ID NO: 153881 - DNA, 360 bp, Arabidopsis thaliana columbia
gataaaggagctctcgtcgagttttacgctccctggtgtggtcactgcaagaaacttgctccagagtatgaaaagctaggggcaagcttcaagaaggctaagtctgtgttgattgcaaaggttgattgtgatgagcaaaagagtgtctgtactaaatatggtgttagtggatacccaaccattcagtggtttcctaaaggatctcttgaacctcaaaagtatgagggtccacgcaatgctgaagctttggctgaatacgtgaacaaggaaagaggcaccaacgtaaaattagctgcagttccacaaaacgtggttgttttgacaccttacaatttcgatgagattgttctggatcaaaac

SEQ ID NO: 153882 - DNA, 433 bp, Arabidopsis thaliana columbia
gggattttggaagtcaacagcggaacgccatgttttgtgggagagtggttgtcctgtctgtcctatctctgctgctgtatccatttctgtgggcttggactgtaattggtacacaatggtttacaaagtctaaaacttgtttacctgaagaaggccagaaatggggctttcttatttggttgatgtttagctactgtggcctcctctgcattgctttcatctgtgtcggaaagtggttgacacgaagacaggtacacttattacgtgctcagcaaggaatttcgattaagagttcgggatttaagtgacatgattagggtacctgactggcatttcaaacctgatgccaagaaagagaggcataagtcaagatgctggtacatattattccggactttacttgatccaagccaggtaagttggtcatttattt

SEQ ID NO: 153883 - DNA, 419 bp, Arabidopsis thaliana columbia
gtatgactgccattgaagagatggcaggaatggatgtcctgtgcagtgacaaaaccgggacactaaccctcaacaaattgagtgtggacaaaaacttggtcgaggttttctgcaagggtgtggagaaagatcaagtcctattatttgcagctatggcttccagggttgagaaccaggatgccattgatgcagccatggttgggatgcttgctgatccaaaggaggctagagctggaatcagggaagttcacttccttccattcaaccctgtggataagagaactgctttgacttacattgacggcagtggtaactggcacagagtcagtaaaggtgctcctgagcagatcctcgaacttgccaaagccagcaatgatcttagcaagaaagtgctctccattattgacaagtatgctgag

SEQ ID NO: 153884 - DNA, 362 bp, Arabidopsis thaliana columbia
attaatgttcctctgcccattttcaagaaattagaattcatttttctctaagttcttgatcgtcgccatgaacgatcttatctcaagctcattcaagagatacacagacttaaaccaccaggtccaactcgatgacatcgagtctcaaaatgtttctcttgattcaggcaacctcgatgagttctttggatatgtcgagagtgttaaagaagacatgaaagctgtcgacgagattcataagcgtctccaagatgctaatgaagagtccaagaccgtacatgattccaaggccgtgaagaagcttcggctcgtatggatgcgagtgtacagaggccttgaaacgtgtcaagatgataaagact

SEQ ID NO: 153885 - DNA, 441 bp, Arabidopsis thaliana columbia
  unsure (1)..(441): unsure at all n locations
ctctcttagccgtatccgtaatgctgctagagatcttttgactcttgatgagaagagtccaagaaggatctttgaaggtgaggctttgctccgtaggatgaaccgttacgggcttcttgatgagagccagaacaagctcgattacgtcttggctttgactgttgagaactttcttgagcgtcgtcttcagactattgtgttcaagtctggtatggctaagtctatccatcactctcgtgtcctcatcaggcagaggcatatcagggttggaaagcaattggtgaacattccatcattcatggtgagacttgattcacagaagcacattgactttgccctcaccagtcccttcggtggtggccgtccaggaagagtgaaaaaaaagaacgagaagtctgccttcaagaaagcctcangtggcggggatgcatacggtgatga

SEQ ID NO: 153886 - DNA, 357 bp, Arabidopsis thaliana columbia
ctcactctggctattacgtatgcatttttgttcttggtcgtcgctcttcttacatcgatgggaaatgccaagacgggcggtcgggatactactcttaccttgtcactcacaatctccttatctctcacgcatacacacttgaagcttaccggaaatgctaaaattgtaaatgttttaagatcggaattgcacatattcctgctaagttcgaatcacatgaccttgcttattcacaagacgttgcgttcatctaccgtgctcttaactttatattgtcatggcatctatacacaactacatttgtagatcatccacagttcatgaaagacattcttgtacatacattgccttaattta

SEQ ID NO: 153887 - DNA, 462 bp, Arabidopsis thaliana columbia
aaaagccacataagaagttgatgcagaagcaataataacaaaacaaaaaaacattaaaaaaaaaagctcttcagttttggtttctgcagtctccaatggctctcaagctctttctctttgctcttcttctctgtctcccgacttctctctcctccactgcctctaaaggtaaagagaagaagtcgaagtttaatccatacagatacacattcatcgataaagcaagcacattctcatcatcttcctcatcttcattttcatccaacggtcaagattcgtcctacgactacatagtcatcggaggtggaacccgcaggtgtcctctcgccccaacgttgtcgcagaatttcagcgttcttgttttagagagaggtggcgttccgtttacaaacgcaaacgtttctttcctcaggaattttcacatcggacttgctgacatttcagctttctccgcgtctcaag

SEQ ID NO: 153888 - DNA, 216 bp, Arabidopsis thaliana columbia
  unsure (1)..(216): unsure at all n locations
caggagaatgcgagaaagcgtttattccatcgtagtggaacgatctgatattggggaaacgatagagaagatcgagaagagaggctcaagggttactttgatcaaagctgttaatgctntctcctaatgagtgtatgtgtgttgggatcatatgcacgtttcatgtgcgaggcagaggatgatgatgatgatgatgaagacgaagaagaagaagaa

SEQ ID NO: 153889 - DNA, 420 bp, Arabidopsis thaliana columbia
  unsure (1)..(420): unsure at all n locations
caaaatctcaagatccaaaactcttctttcaaacatgtaccgaaccatgtttctttccctgacaatagcctcactcttggtcggagtcgtctcagctggtgactggaacatcttgaaccaactcagaggactcggctcatcgtcaagccaaaatggtatcgtttctaaaggtatcaagacggacctgaaaggatactgtgaaagctggaggatcaacgtggaagttcacaacatcagaaagttcgatgtggtgcctcaagagtgtgtatcgcacattaaggattacatgacgtcatcgcagtacaaggatgacgtggcgagaaccgttgatgaggtcattcttcatttcgggagcatgtgctgtagcaagtctaagtgtgacggcatggacgctnggatctttgatatcgatgacacgct

SEQ ID NO: 153890 - DNA, 447 bp, Arabidopsis thaliana columbia
ctcattcactgagaaaaatggagacccttctctcccctcgtgcgctctctcctcctctcaatcccaaacctttgtccctgcacgagaccaaacccacttcacattcattgtctctctcaaaacccaccaccttctccggtcctaaacacctctccacccggttcactaaaccggaatcaagaaactggttaatagatgcaaagcaaggactagctgctttagctttatctctaactctcactttctcacctgttggcactgctttagcctctgagttcaatatcctcaacgatggtccacctaaagaaacttacgtagtcgatgacgctggtgttcttagtcgagtgacgaagtcagatcttaagaagcttttgtctgatcttgaatacagaaagaaactgagactcaatttcatcactgtccgaaagctcaccagtaaagcagatg

SEQ ID NO: 153891 - DNA, 431 bp, Arabidopsis thaliana columbia
tcgtctcctacctcctttgcctacaagctttcacgcgggagctcaacatcagccatggcggagcagactgagaaagcttttcttaagcagcctaaggtcttccttagctcgaagaaatctggaaagggaaagagacctggaaaaggtggaaaccgtttctggaagaacattggtttgggcttcaagactcctcgtgaagccattgatggagcttacgttgacaagaaatgccccttcactggaactgtttccattagaggtcgtatcttagctggtacttgccacagtgcgaaaatgcagaggaccattatcgtgcgaagggattaccttcactttgtgaagaagtatcagaggtatgagaagaggcattcaaacattccggctcatgtctcaccatgcttccgtgttaaggaaggagaccatatcatcat

SEQ ID NO: 153892 - DNA, 446 bp, Arabidopsis thaliana columbia
ggggaatgcgtagactggcttacaaaatacagaaggcagagaatgcgcactatatactgatgaactttgagatagaggcaaagtacttgaacgaattcaagggattgttagatagtgatgagagggtgattaggcatcttgtgatgaaacgtgatgaggccataaccgaagactgtcctccacctcctgagtttcactctgtccgcgcaggtgatgaatattatgacgatgatgaagaggaagagattgaagaagatgaagatgaaggtgagggtgaagatgaagaagatgctgataatatagagtacgaagtagatgatgatggtaatgtcgttatggtgttgtacggagatgaagaagaaggagaagaagaagaagatggagctagtgaacaagaagaaggacaggacaagtcaactaatggtagaagagaaacccggagaaca

SEQ ID NO: 153893 - DNA, 455 bp, Arabidopsis thaliana columbia
aaaaaaaacagattcctgatattttctgcttcgcttcgctttgctttggcctttgggtttgctttgccttttatctccacaataataatattcgttaacctctcctcgttctcgtcgctgtttcttcccgatctttgctatagttctggattcaaaatctttcttccccaatagatgtttgtctcttaatttttgatttttctgcaaaatcaaatttttaagagctatggaggaagagaatgttactagttcaccttcaacaccggtacataggcttaggcatcgaagacgttctaatgaggttgttacggatggggataaagtgaatgcaagtcctttgttggttaatgatcggaataagtacaaatctttcatggtccggacctactctacgttatggatgattggtgggtttgttttggttgtctacatgggtcatctttatatcacagcta

SEQ ID NO: 153894 - DNA, 457 bp, Arabidopsis thaliana columbia
ctctctcagtacacttcttttcatacctcatgagactaaaactagtttgaggagatgtagaggagtgtttggttcttgggataacaatatcccaaactgaaaatggctaagtcatatggagctatcttcctcttgaccctcattgtcctcttcatgcttcaaaccatggttatggcctcaagtggatctaatgtgaagtggagccagaaacgttatggaccaggaagcctgaaacgtacccaatgcccatcggaatgtgataggaggtgtaaaaagacacagtaccacaaggcttgcattacgttctgcaacaaatgctgcaagaagtgtctctgtgtgcctccgggttactatgggaacaaacaagtttgctcctgctacaacaactggaaaactcaagagggtggaccaaaatgcccttgaaaaaatctcccttcgttccctttttataataaaa

SEQ ID NO: 153895 - DNA, 389 bp, Arabidopsis thaliana columbia
gaaacagagagagatagagagatagagttatggctttggcgatgatgatccgaaacgcagcttcgaagcgaggaatgactccgatctccggtcatttcgggggtttgagatctatgtcttcatggtggaagagcgttgagcctgctcctaaagatccgatcctcggagttcccgaagcttttctcgctgatcctagtcctgaaaaagttaatgttggtgtgggagcatatcgtgatgataatgggaagcctgttgtcttggaatgtgtcagagaagctgagaaaaggcttgctgggagcactttcatggagtacctttctatgggaggaagtgccaaaatggtggacctaacattgaagcttgcctatggggacaatagtgaatttatc

SEQ ID NO: 153896 - DNA, 448 bp, Arabidopsis thaliana columbia
ctctctctctctctttcatcttcaaactctacaaacccagaaaccaccacacagtaattaatgtctctttctttcttcccatgtgatctttaacagacttttcttcttattctccatctctgaagttgtggggattcatcaagacttccttatctgtttcttttataaaacaagagagagataccacttttggtgttctttatttgcaactctttcaggttaaagaaatcgataggctctgttcttgattgtggtggaagagacatgatgatgtttaacgagatgggaatgtatggaaacatggatttcttctcttcctccacatctctcgatgtgtgtccattaccacaagctgaacaagaacctgtagttgaagatgtcgactacaccgatgatgagatggatgtgggtgagcttgagaagaggatgtggagagacaaaatgcgtt

SEQ ID NO: 153897 - DNA, 457 bp, Arabidopsis thaliana columbia
ctgagttacagagagagtttcgtggccatgtgaagtatgccatggagtgccggagagaggcaagacggcgttataactccggtgccgttcctgggtttgatccttccactaagttcatcagagacggtgattggagctgtgcctccgtccctcctgccgttgctgaccggagagttgagatcaccggtccggtcgagaggaagatgatcatcaacgctcttaactccggagctaaagtctttatggctgatttcgaggacgctttgtctccaagctgggagaatctgatgagagggcatgtgaacctgaaagatgcagtggatggatccattacgttccacgacaagtcaaggaacagagtttacaagctcaacgaccaaaccgctaagctttttgtacggccaagaggttggcatctcccgaggctcacattctcatcgacggtgaacccgccact

SEQ ID NO: 153898 - DNA, 458 bp, Arabidopsis thaliana columbia
gcacctgcttcgcttctcctctctcgctctctactcaggactcgtttactctttcaaagctaagctttcaagatgcagaacgaagagggtcaggtcactgagctttacattcctaggaaatgttctgctactaaccggttgatcacatccaaggatcatgcctctgttcagctcaacattggtcatttagatgctaatggcttgtacaccggacagttcacaacctttgctctctgcggttttgtccgtgctcagggagacgctgacagtggtgtcgacaggttgtggcagaagaagaaggttgaagccaaacaaaactaagagcttaatctgtcttgttttttgtcgaatcttgtttttttttttccgaaagattgcctcatactgaagtaatgattttggctttgggtcgtggaacttaacttaaatgcttttgggcaccaagtcttctaaatttt

SEQ ID NO: 153899 - DNA, 475 bp, Arabidopsis thaliana columbia
  unsure (1)..(475): unsure at all n locations
cgtgcccatttctaatctctactttgtgtcaattccctatancctttcactctctgtccacattatattacatctctggtgccattagaaaaccatcggtctggttgtcanccgttgattttattttggtcaaagatcattcnttcttcttgcgtgaatgaatcgttgatttcaccttcttcttctggtcttaaaaaaattcaagatctatacgagaaaacacaaaacaagtaaaactttttcaaccgtttttcctgtcggtaaagtttggattcttcttagtaaattttggtcttattgtcgaccaaaagaagaagatggtcgttcagaatgttcaagatttggatgttcttccgaaacatagctcggattcattcgatgatgatggtcgtcccaagcgaaccgggacggtgtggacagcaagtgcacacataataacagccgtaattgggtcaggagtggtggtcattggcat

SEQ ID NO: 153900 - DNA, 395 bp, Arabidopsis thaliana columbia
ggcgatttcttcttcttcctcctctatatgtttcaaccccactcgatttcacacagctcgacatatttcatctccgtcgcgtgtcttcccagtcaccagcttctcccctcgctctctccgtttctccgacagacgatctctcctatcttcctccgcctctcgcctccgtctttctcctctatgcgttcgtgattctcgagcagctgaagttacacaacgatcatgggaagactcagttctaaaaagcgaaaccccggtgttagtagaattctacacgagttggtgcggtccatgtcggatggtccacaggataatagacgaaatagcaggggactatgctggaaaactaaactgctatctccttaatgcagacaatgacttgccggtggctgaag

SEQ ID NO: 153901 - DNA, 444 bp, Arabidopsis thaliana columbia
aatctctaagggtaggaagggaggaaagaagaaggctgttgatcctttctccaagaaagattggtatgatgttaaggctccttcaatcttcactcacaggaatgttggaaagacacttgtttccagaactcagggtaccaaaattgcctcagaaggcttgaaacacagagtttttgaggtttctcttgctgatcttcaaggtgatgaggataacgcttacaggaagatccgtctcagagctgaagatgtccagggcaggaacgttctgtgccaattctggggcatggacttcaccaccgataaacttaggtcattggttaagaagtggcagactctgattgaggctcatgttgatgttaaaaccaccgacagttacactctcaggctattctgtatcgccttcaccaagagacgtgctaaccaggtcaagaggacttgctacgc

SEQ ID NO: 153902 - DNA, 465 bp, Arabidopsis thaliana columbia
  unsure (1)..(465): unsure at all n locations
gatcgcttctctccccgttgccgtccgtccccaccgctgagtgatagatcgaaacagagaaacacacacggcgaagaagatttcaccatattttgtctaagtggattctgttgagagagagagatggctatgtctcaggtggtgaacacgtacccgctttcgaactacagcttcggaactaaggaacccaagctggaaaaggacacctccgtcgccgaccggctcgctcgtatgaaaatcaactatatgaaagagggcatgaggactagcgttgaagggattctactggtgcaagaacacaaccatcctcatatacttctgctacaaattggtaacacattctgcaaacttccaggtggacgcctgaagcctggtgaaaatgaagctgatggtctgaaaagaaagctgaccagtaaacttggaggcaantcggctgctcttgtacctgactggacggtaggagaa

SEQ ID NO: 153903 - DNA, 483 bp, Arabidopsis thaliana columbia
  unsure (1)..(483): unsure at all n locations
aattccccgggtgcgagcccacgccgnntccgttacatgatannctttagacgnnattcgtttatgtatgctanntgattatnnnttctcagaacctttgtggagtcaggnnagttgctgatcgttggtggannaggggtctctttaagctgagccagttanagtaaactttgctcgggagaaccaataccgcttgtaaaanccgtagaagcagatcgtttgcacactatgtttcttgcaatggcagacgccagagctgttcttataaagttagctgatcggttacacaacatgatgactctatatgctttgccaccagtgaagcggcaaaggtttgccaaagaaactctagagatatttgcgcctttggctaatcgtttgggaatttctagctggaaagttaagcttgaaaatctgtgttttaagcatctccatcctgatcagcaccatgagatgtccgatatgcttgagggatcattcgat

SEQ ID NO: 153904 - DNA, 446 bp, Arabidopsis thaliana columbia
  unsure (1)..(446): unsure at all n locations
aagaaataaaagagtgtgatgagatcctcaagaacaatgggattaatgaattgcatggtttatgttgtggtcctaagtgctattgcggctacagtgacatcatacccttactcatctcctcataccccagcttacgattctcccagctatgaacacanaggcccaaagtacgcaccacatccgaaaccatatgtttacagttctccaccaccaccatactatactccatcaccaaaggtaaactataaatctccaccaccaccatacgtctataattctccacctccaccgtactactctccttctccaaaggtttactacaagtccccacctccaccatacgtttacagctccccaccaccaccgtactactctccttctcctaaggtatactacaagtcctcaccaccaccgtacgtctacaggttcccaccaccactggacta

SEQ ID NO: 153905 - DNA, 359 bp, Arabidopsis thaliana columbia
tgcagtttcatcccttgatcatatccttagtcaagatgctacacgaatgcagaaagagcttgtgaatgtcttagtcaggtccaacagaggtgaagcttggagatggcaacttatgtccaagcatttctaccctgaatctgtttacggtgatgaaggagacaaacctcaaatgcgttggcgtagacgaaccactttcactgaaattgcctcttcttatgatgatgtcaatgcaaccaaatctcagagaaaccccaatggcttaccaaacccttctcatcgaagaatttccggtggatctgatgcttcaaagactaaacagacgctccaaaatagctctggaaactcggatggcgaaatgg

SEQ ID NO: 153906 - DNA, 462 bp, Arabidopsis thaliana columbia
caaatttctcaaactctgaaatcgttctttcaaatctctcaatcgggatcaagatgcagatctttgttaagactctcaccggaaagactatcaccctcgaggtggaaagctctgacaccatcgacaacgttaaggccaagatccaggataagtaaggcattcctccggatcagcagaggcttattttcgccggaaaacagctagaggatggccgtacgttggctgattacaatatccagaaggaatccaccctccacttggttctcaggctccgtggtggtatgcagattttcgtcaagaccttaacgggaaagacgattactcttgaggtggagagttctgacaccatcgacaacgtcaaggccaagatccaagacaaggagggtattccttcggaccagcagaggttgatcttcgctggaaagcaattggaggatggcagaactcttgctgactacaaca

SEQ ID NO: 153907 - DNA, 453 bp, Arabidopsis thaliana columbia
ggaaaattaggcgcgcgtcatctccctcgcgacacatatatcataagacagagagcagggaacgaatctcaagacgttacgtattagcttatagccattagttttgtctcttcttcttcttctcgttggtcggcttcttcgtcttactaattccatgattcttcttcttccttctgcttcactttctcgatgatcctctgcaccagccgcgatcatgacgttgaatcctcctccgtcgcagcaaacgtctcactcgccgcgtcggattcccaatcgccgcgttctcatcgtcggaaattattgccacgacgttttaatccaaaacggatccgtcgtagctgaaactctcggcggcgccgcctctttcatatctaatgtcttagattcttcctctgtctcctgcgatttggtctccaaagtaggacacgacttcagatacgaggtcacccactc

SEQ ID NO: 153908 - DNA, 460 bp, Arabidopsis thaliana columbia
cgcttctggagaagtgtgatattcttcttcttggtggtggaatgatcttcacattctacaaggcacagggtctttcagttggttcgtcccttgttgaagaagacaagcttgaattggctacagaactccttgccaaagctaaggccaaaggagtctctcttttgttgccaacagatgttgtagttgctgacaagtttgctcctgatgccaacagcaagattgtgcctgcatcaggcattgaggacggatggatgggactggacattggtccagactctatcaaaactttcaacgaagctctggacacaacacaaacagtcatttggaatggacctatgggagttttcgagatggaaaagtttgcggctggaacagaagcgatagcgaataaactagcagagctaagtgaaaaaggagtgacaacgataataggaggaggagactcagtggctgcagtgga

SEQ ID NO: 153909 - DNA, 414 bp, Arabidopsis thaliana columbia
caaaaaaatggaagctttgaggatttatctatggagtctctgtctctctctgtgtttgattatctatggagcaaactcagatccattagaagacaaacgcgcattgcttgagtttcttaccattatgcaaccaactcgttcactcaactggaacgagacttctcaagtctgcaacatctggaccggagttacttgtaatcaagacggatctcgaatcatagccgttagattaccaggcgttggactcaatggtcagattcctccaaacactataagcagactctcagctctcagagttcttagtctcagatccaatctaatctccggcgagtttcctaaagattttgttgagttgaaagatttggcctttctttatcttcaggataacaacttgtctggtcctttgccattgga

SEQ ID NO: 153910 - DNA, 467 bp, Arabidopsis thaliana columbia
  unsure (1)..(467): unsure at all n locations
aaaaagatttgttataaacctaaaatgtttggttggtgaagaagaagaagaagaaacgatgatacgaaatttccggttcaaagctccgacgaatcaccctggttccaccatccaaactgatagccgccggttaatccagtttccgacaagatgttgtttatcaccagatcttagccattacacggttcttggcttgactcctctcgcttcccaaaccgaagtcaaacgtgcctttaaacgtctcgctctaaagtatcatccagatgttcacaagggtcaggacaaagatttcaaggagatcaaatccgcttacgagtgtttgatgcaaaagtttaagaaagaagaagaagaaatggagattacagaaatgggtgaaatcgatgagtgggaggaatggatgggattcgaaggagggataccatcaggtatttcttactagatatatatcnattgctacaatggatagg

SEQ ID NO: 153911 - DNA, 452 bp, Arabidopsis thaliana columbia
caaacacaagagcgcgttttcttcacgccggcgaacaacgtcagagtcatggccaccggagatgggaaatcggtgatggtcgtcggagttgacgacagcgagcagagcacttacgccttggagtggacgctcgatcgtttcttcgctccttacgctcccaattatccttttaagctcttcatcgtccacgccaaacctaacgccgtctccgccgttggtctcgctggtcccggaactgcggaggttgtaccttatgttgatgctgatctgaagcataccgctgctaaggttgtcgagaaagccaaagcaatttgtcagagcagatcggttcatggcgcggtgatcgaagttttcgaaggtgatgcaaggaatatcctatgtgaagttgtagataagcatcatgcttctattcttgttgtgggaagccatggatatggagctatcaagagggc

SEQ ID NO: 153912 - DNA, 451 bp, Arabidopsis thaliana columbia
gagagaaagaaagaaaaagataaagatggatcacgcagcagatgctcaccgtacggatttgatgaccattacaagattcgtgttgaatgaacaatcaaagtatccagaatctcgtggtgatttcaccattttgcttagtcacatcgttttgggttgcaaattcgtttgcagtgctgttaataaggctggtttggctaagttaattggacttgcaggggaaacaaacattcagggtgaagagcaaaagaaacttgatgtgctctctaatgatgtctttgtcaacgctttggttagcagtggtagaacttctgttcttgtctcggaggaagatgaggaagctacgtttgtggagccatccaagcgtggaaagtactgtgttgtttttgatccgcttgatggatcttcaaacattgactgtggtgtttccattggcacaatttttggaattaca

SEQ ID NO: 153913 - DNA, 458 bp, Arabidopsis thaliana columbia
aaagactcgagttgatatgtctagtactaattatatgtcaactgtccaaaacgcaactcctgttaacggcgttgccccggcgggcaccgtgcgagttacaatcgtccaatcctccaccgtctataacgatactcctgccactatagacaaagcggagaagtatattgtggaggcggcaagcaagggagcagagctagtgttgttcccggaggggtttatcggtggctatcctcgaggttttaggttcggtttagcggttggcgttcataacgaagaagggcgtgatgagtttcggaagtaccatgcttctgctattcatgttcctggccctgaagtagcaagattggctgacgtggctaggaaaaaccatgtgtacttggtaatgggagccatagagaaggaagggtataccctctattgcacaggtcttttctttagtccacaagggcaagttcttg

SEQ ID NO: 153914 - DNA, 456 bp, Arabidopsis thaliana columbia
aggaaaaatgccagcgggtcatggagttcgggcgagaacgagggatctgttcgcgaggccattcaggaagaagggttacattccactctcgacttacctgagaaccttcaaggtcggcgattacgtcgatgtgaaggtgaatggtgcgatccacaagggtatgcctcacaagttctaccacggtcgtactggtcgtatctggaacgtcactaaacgcgccgtcggtgttgaagtcaacaaacagattggcaacaggatcataaggaagaggattcatgtgcgtgtggagcatgtgcagcaatcaagatgtgctgaggagttcaagctgaggaagaagaagaatgatgagctcaaggctgcagccaaagccaatggtgagaccatcagcaccaagagacagcctaaaggacccaaaccaggattcatggtcgaaggaatgaccttggagactgtcac

SEQ ID NO: 153915 - DNA, 459 bp, Arabidopsis thaliana columbia
cttaaaatagaaccaaagagtaaacacttaagcaaaacaattttgtcctactcttaggttatctccaatgaagaacttaaagatggttttcttcaagatcctctttatctctttaatggcaggattagccatgaaaggatctaagatcaacgtagaagatctccaaaagttctccctccaccatacacagaacaacctccaaaccataagccttctattgtttcttgtcgtttttgtgtggatcctctacatgttaacccgacctaaacccgtttaccttgttgatttctcctgctaccttccaccgtcgcatctcaaggtcagtatccaaaccctaatgggacacgcaagacgtgcaagagaagcaggcatgtgttggaagaacaaagagagcgaccatttagttgacttccaggagaagattcttgaacgttccggtcttggtcaagaaacctacat

SEQ ID NO: 153916 - DNA, 407 bp, Arabidopsis thaliana columbia
ggcgaattcgaatcgagaagatggtgtctgggtcagggatatgttcaaagcgtgtcgttgttgacgcacgtcaccatatgtgtgggcgtcttgcttcgatcatagctaaagagttgctcaatggacagagtgttgttgttgtccgatgtgaggagatttgtttgtctggtggtttggttcgtcagaagatgaagtacatgaggtttcttaggaaacgcatgaacactaaaccttctcatggtcctattcatttccgtgctccgtctaagatcttctggcgtaccgttcgtgggatgattccacacaagaccaagcgtggtgctgctgctcttgcacgtttgaaggtgtttgagggagtaccacctccttatgacatggtcaagagaatggtcattcctgatgctctc

SEQ ID NO: 153917 - DNA, 447 bp, Arabidopsis thaliana columbia
gagaaaacgaaaaccctagtttcagaggcatctccagacaccgaaaatggcggaaggactcgttttgaagggcaccatgcgtgcacacactgacatggtgacggcaatcgccaccccaatcgataacgcagacatcatcgtctcagcttcccgcgacaaatccatcattttgtggaaactcaccaaggacgacaaagcctacggtgtagctcagaggcgtctcactggtcactctcacttcgttgaggatgttgttctctcctccgatggacaattcgcgctttccggcagctgggacggcgagctccgtctttgggatcttgctgctggtgtctccactcgtagattcgttggacacaccaaggacgtgctctccgtcgccttctcactcgacaaccgtcagatcgtctctgcatctcgtgaccgtacgatcaagctgtggaacac

SEQ ID NO: 153918 - DNA, 457 bp, Arabidopsis thaliana columbia
attctcttctctctatctctctcgcgtacgccgcaccgtagcgaccaattgaatccacgaggaaatctcagtaaatactatggcgaccaacgaacccgagcacgagcacagagacgaggaagaggccggagctaacgaggatgaggacaccggagctcaggtcgctccgatcgttaggcttgaggaggttgccgtcactaccggcgaggaagacgaagatgccgtccttgatctgaaatcgaagctttatcgattcgataaggatgcgaatcagtggaaggagagaggagctggtactgtgaagttcttaaagcataagaacactgggaagattcgtctcgttatgaggcaatctaaaactttgaagatctgtgctaatcacttcgttaaatcgggcatgagtgttcaggaacacgttgggaatgaaaagtcatgtgtgtggcacgctcgtgacttt

SEQ ID NO: 153919 - DNA, 457 bp, Arabidopsis thaliana columbia
gtttgagactctctcttaccttcctgaccttaccgattccgaattggctaaggaagttgactaccttatccgcaacaagtggattccttgtgttgaattcgagttggagcacggatttgtgtaccgtgagcacggtaactcacccggatactatgatggacggtactggacaatgtggaagcttcccttgttcggttgcaccgactccgctcaagtgttgaaggaagtggaagagtgcaagaaggagtaccccaatgccttcattaggatcatcggattcgacaacacccgtcaagtccagtgcatcagtttcattgcctacaagccaccaagcttcaccggttaatttccctttgcttttgtgtaaacctcaaaactttatcccccatctttgattttatcccttgtttttctgcttttttcttctttcttgggttttaatttccggacttaacgt

SEQ ID NO: 153920 - DNA, 461 bp, Arabidopsis thaliana columbia
gaaaagaaacgatgaggaagagatgaaacgcggtggaacaagacggaagcggttgttcgggaagacgattctcttatcatctgtggttttcttcatcggttttggtttgttgttgctcacgctccgttccgtagatcctaattcgtctttcatcgacgacgacgatgacgagtccgaatccgaggaggcttcgagatggagcaactcttcttcgattggagaggctatggtcgatggagctaaactctgcgcgacggtagaagaaatgggaagcgaattcgatggtggtttcgtagatcaaagtctcagagttcgagatgttatccatcgccattttcaaatcaatggagcttcagcgatccgtgagctgcctccggagcaattttgtagacatggttatgttctagggaaaacagcagaagctggatttggaaacgaaatgtataagatcttaacatcag

SEQ ID NO: 153921 - DNA, 453 bp, Arabidopsis thaliana columbia
atcagatctagatctaaaagaagagcgtcttcataaacgcccttcttcttcttcgtcttcttccctgcaaatctagtttctagatcttttctttcttccgcgaaacgaaaatgagagagtgcatttcgatccacattggtcaggccggtatccaggtcggaaatgcttgctgggagctttactgtcttgaacatggcattcagcctgatggccagatgccgagtgacaagactgttggcggaggtgacgatgctttcaacaccttcttcagtgagaccggtgcagggaagcacgtcccacgtgctgtctttgttgatcttgagccaactgtgatcgatgaggtcaggactggtacttaccgtcagcttttccaccctgagcaactcatcagcggtaaagaagacgcagctaacaatttcgcccgtgggcattacaccattgggaaagagattg

SEQ ID NO: 153922 - DNA, 458 bp, Arabidopsis thaliana columbia
gaagattactactaaacagagtcttttttgacttgccaaaaacacatctgtctctctctctctctttgcggatctgaaatggcgattcctgttatcgatttctccaaactcaatggtgaagaaagagagaagacactgtctgaaatcgctagagcttgcgaagagtggggattttttcagctggtgaaccatggtattccattggagcttctaaataaggtgaagaagctgagctcagattgctacaaaacagagagagaagaagcattcaagacttctaatcccgtgaagttgctcaacgaattggttcaaaagaactctggcgagaagctagaaaacgtggactgggaagatgtcttcactctcttggaccataaccaaaacgaatggccatccaacattaaagagactatgggagaatacagagaagaagtgaggaagctagcgagcaagatgat

SEQ ID NO: 153923 - DNA, 440 bp, Arabidopsis thaliana columbia
  unsure (1)..(440): unsure at all n locations
tttccccacgtgtgtggcctacaatctctatcgattccacagcacaaaaatcttttgcgcttttgagatttttccagaattcaatctttcgagtgttgttgaattcagaaatggaggtttcgtcttcactcaagctctcatcgtcgttatctccttccatcatcaaacttcagggttcttcatcaagtattgatataaaattctctaagtacacttcacttnctaaaccgtttcttcaacttgatgataaaagccgacgtcttcgtgaccaacaagtttcacattctctcgagctaaggtcttacagaaaacgggtcactgcgaaatcaggttctcaaggttgggactttggtagattcgtcaaaacattgtactttttcaatggaccaccatctcctctaaagttgtttcatcggtgtttgagaaacttactaacggag

SEQ ID NO: 153924 - DNA, 456 bp, Arabidopsis thaliana columbia
caaagtttgaaccttttcttcatccatctctctccgtcgcttcttcctaacgattccttcactcgaatcaggtttgtgaaggttttttctagggtttcgaaaagatgccggcgacagcaggaagagtgcgtatgcccgcaaacaatcgggtgcatagtagtgcagcgcttcagactcatggaatatggcagagtgcgattggttatgatccttatgcaccaactagtaaagaagagcctaagacgacacaacagaaaaccgaagatcccgagaactcgtacgcgagttttcagggacttttggctcttgctaggattacgggttcgaataacgatgaggctcgtggttcttgtaagaagtgtggccgtgttgggcatttgacgtttcagtgtaagaatttcttgagtactaaggaggataaggggaaagatcctggtgcgattgaaaccgcggttt

SEQ ID NO: 153925 - DNA, 455 bp, Arabidopsis thaliana columbia
  unsure (1)..(455): unsure at all n locations
ggagttctctctctagatgggctcttgaagcttacttaaaaggtgatgtgggtaaggctttgattttgtactcaaggagggcaganatggattatgaagtggcacaaagtaatgctgcctggatcctcgataaatacggcgaaagaagcatgtgcatgggagtatctggattttgcacagacaaagagagacatgagcgggcacattctttgtgtggcgggcctctgaacaaggcaatgaacatgctgctctgcttattggagatgcatattactatggccggggaactgagagagattttgtgcgtgcggcagaagcatacatgcatgctaaatcacagtccaatgcgcaagcaatgttcaacctcgggtacatgcatgaacatggacaaggacttgcctttgatctccatttagcaaaaccgtactatgatgaatcccttcagagcgatgcaa

SEQ ID NO: 153926 - DNA, 407 bp, Arabidopsis thaliana columbia
gctgatgctacagatgctgctcgtggtgcttcagatatcgtgctcactgagcctggactcagcgttattatcagtgctgttctcaccagcagagctattttccagagaatgaagaactatactatctatgcagtctcaatcaccatccgtattgtgtttggtttcatgcttattgctttgatatgggaatttgacttctcagccttcatggttctgatcattgccattcttaacgacggtaccatcatgacaatctcaaaggacagagttaagccatctcccacacctgatagctggaaacttaaagaaatttttgctactggagtcgttctaggaggctaccaggccatcatgactgttattttcttctgggcggcgcacaagactgactttttctcggacacatt

SEQ ID NO: 153927 - DNA, 423 bp, Arabidopsis thaliana columbia
ggaagatcagctctgattcacttgcttcgcttccaatcccgacgtctctcttcctccaccttcacttcaggatatcatcaccggtcaatagcaggatcatggtcatcatcagtgaacccgaaggtcagattccaggttccatcccttagccagagaagctgggcatcatttggagcaaagactagagaggacgatgatgagcacaagatcagcatcggaccccaagagaagaaagaagagaaggatggaggtgtggtttactatggaccaatctcatcaaccataaagaaagtgaaactcctctcactctccacttgctgtctatcagtctctcttggcccggtcatcactttcatgacttccccgggactgaatgtgatcatgaaaggtgctgttgcctctactgtgatcttccttagcgca

SEQ ID NO: 153928 - DNA, 505 bp, Arabidopsis thaliana columbia
  unsure (1)..(505): unsure at all n locations
cacgccgtcncnngctaaattnngtcgaaaatgcctggctttaggctcgtctgtcgatagcgtnncttctcgaggatcccccgtcaagtgtttcgcgtcaaccannacctctcagggtgagctcgnntagcttatcgaccggcctnntaaactaccatctgnngattctcctgataaccacaacccgnnatcttccatggganngttttcagaggcctataccaatctaaggttaaggggagattctctcttacctatccatccaattacanagcagtccgcagnttattcctctcctagatcttgcacaacagcagaatggaggctggctccctgtttcagcaatgaatgcggttgctaaagttatagaagttgcccctatccgtgtttatgaggttgcaacattttactcaatgttcaacagagcaaaggttggaaagtatcaccttctagtttgtggcacaacaccttgcatgatccgtggttcacgagacatcgaatcagc

SEQ ID NO: 153929 - DNA, 427 bp, Arabidopsis thaliana columbia
ctagtgtttccgggagcagcctgagcaggagtaagaagacgaagaagaagaggagcagctactaccatggttctcaagacggagctttgtcgtttcagtggacagaagatttacccaggaagaggaattaggtttatccgatctgattctcaggttttcttgtttcttaactcaaaatgtaagaggtacttccataacaagttgaagccatccaagcttgcatggactgccatgtacagaaagcaacacaagaaggatgcagcacaagaggctgtgaagagaaggagacgtgccaccaagaagccatactcaaggtccattgttggtgctaccttggaagtaattcagaagaagagagctgagaagcctgaagttcgtgatgcagccagggaagctgctctgcgtgagatcaaggaaagaatcaaaa

SEQ ID NO: 153930 - DNA, 460 bp, Arabidopsis thaliana columbia
ctcctctctgtctatcatcgaacgccgtcgctctcgccgttgacttctaccagtgaccccaacgccttcaatttccgcctcgtcggataatttcatcggagaagacaatggtgatggaagttacagagactgagcgatggtgcgttgtaactggtggtagaggattcgctgcaagacatcttgtagaaatgctcgtacgttaccaaatgttccacgttcgtatcgccgatttagctcctgcgatagtgctcaatcctcacgaggaaactggaattctcggtgaagcaattagatccggtagagttcaatacgtctccgctgatcttcggaacaaaactcaagttgtcaaaggttttcaaggagcagaagtggtgtttcatatggcagctccagattcatcgattaacaatcaccagcttcagtactcagttaatgttcaagggacaacaaatgtaattgg

SEQ ID NO: 153931 - DNA, 447 bp, Arabidopsis thaliana columbia
cggacgcgtgggtcctcctcccttcttcttcttcccctctttcattttccagccactacaaacttttctatctctactttttttcctctcgatttcaggtagaagaaaatggctgatggtgaagacattcaacctcttgtttgcgacaatggaactggaatggttaaggctggttttgctggggatgatgcacctagagctgtgtttcctagtattgtgggtcgtcctcgtcacaccggtgtgatggttgggatggggcaaaaggatgcttatgttggcgatgaagctcaatccaaacgaggtattttaactctcaagtaccctattgagcatggaattgtcaacaattgggatgacatggagaagatttggcatcacactttctacaatgagctccgtgttgctcctgaggaacatcctattctacttaccgaggcaccgcttaac

SEQ ID NO: 153932 - DNA, 457 bp, Arabidopsis thaliana columbia
gatctggaccttcaaagtccactgctgtagatgattctgcgtccaagacaagcgaaaacacccttctaacatgtggaagggcatgggcgatttctttgacgagcaaaagtacaataagcgaggagattttgagctcatgttttcccggcaatagcggtgaaccaaatgaacatcttctataccgctcatattatcacgggaaaggcatgaatcgactgtggtccaacgttgaagggtatcatgctcctatactagtgataatttctgcaagttgtaaagtcgaacatgaggctacttcaagcgagaggaagtgggtcattggtgcaatcttgcagcaaggttttgagaacagagatgcattttatggaagctctgggaacttgttctccataagttcagtctttcacgcattctcattttcttgtaaggagaaaaactttcgtataggcatttgcac

SEQ ID NO: 153933 - DNA, 352 bp, Arabidopsis thaliana columbia
  unsure (1)..(352): unsure at all n locations
caaatttgtttccgtcttctgctaacatatcctctttttcatctgggaaccctaatttctggactaacttagggttttatttatccatttgagatactctgtaattgaaaggttgaattnttagaagagacatgggaggttcgtcggagacaaagatcttacaagaactcatactntacgcggcgagcgctgctttcagctgcttggttctctttgcgggtcttcgtcatctcgatcctaatcgtgaggcttctaaaaaagctctcgagcataagaaggaaatctctaaacgtttgggtcgtcctcttgttcagaccaatccatacgaggatgtaattgcatgtgatgtgat

SEQ ID NO: 153934 - DNA, 152 bp, Arabidopsis thaliana columbia
caactcaaacatgggttccttcgacttgcctcacagttcatcggtcaagggagaaagggaaaatattttttcggaaggggtccaaaaatatattgaaaacctccctaaggaagaacccgccggcgaagacaatatgggaactggttcagtcg

SEQ ID NO: 153935 - DNA, 459 bp, Arabidopsis thaliana columbia
  unsure (1)..(459): unsure at all n locations
cagactctcaccaaaaccttactccctcaaactttctggccgtatggaaaatcccgagatgatcccaacggcaaatgggccgacggcctcatcgctccagacttcctcgctaaattcatgaggattccgatcgtgatcccgccggcccttcaaccgaacgtcaatgtctcacgtggagctagtttcgccgtcgctgatgctactctactcggagctccggtggaatctttgactctgaatcaacaagtgagaaagttcaatcaaatgaaagcagcaaattggaatgatgatttcgtgaagaagtcagtgtttatgatatacattggtgcaaacgattacttgaatttcaccaagaacaaccctaacgccgatgcatctactcaacaagcttttgtcacttccgtgaccaacaagttaaagaacgatatcagcttgttgtatcatcangagcgagtaaat

SEQ ID NO: 153936 - DNA, 454 bp, Arabidopsis thaliana columbia
aatcagaattacaaacaaaaatggttttgcaaaagcttcctctcattgggctgcttttgctcctgaccatcgtcgcctgtccagcaaatgcagatggacctgtttgcccgccgtcgaacaaactaagccgggcaagtttccctgaaggttttttatttggcacggctactgcggcataccaggtcgaaggtgcgattaatgaaacttgtcgtggaccagccttatgggacatctactgtagaagatatccagagaggtgcaataacgataacggcgatgtggcccgtgatttcttccatcgttataaggaagatatccaactaatgaagaatctaaacacagacgcctttagaatgtctatcgcatggccaagaatattttctcatgggagaaaggagaaaggagtgagtcaagctggtgtgcaattctaccacgaccttatcgacgagctcat

SEQ ID NO: 153937 - DNA, 428 bp, Arabidopsis thaliana columbia
ctttctatacaacatggtggtttattcactttgtcgatggattcttctctccaatatatgcactacttggaatcaacatatttgggttcggttttttgacttccattgcattcatcttcttggttggggtgttcatgtcttcgtggttgggggcatcggttctgaacttgggagagtggtttatcaagcggatgccatttgttcgtcacatctacaacgcctccaagcaaatcagcactgccatatcgcctgatcaaaatacacaagctttcaaggaagttgcaatcatcaggcatccccgtgtaggtgaatatgcatttggcttcattacatcaactgttgttctccagaactacccaaccgaggaggaactttgctgtgtatacgttcccacgaaccacctttacattggagatatactacttgtc

SEQ ID NO: 153938 - DNA, 450 bp, Arabidopsis thaliana columbia
cttcttctctgtttttgtctctttggctatatatattcaaacattgtgtgaacagaacacaaatcaacacaacacacacaactttgtgttctttaagttttgtttcagagatcaatggccgggactggattgtttgctgagattcttgatggagaagtatacaaatactacgctgatggtgagtggaaaacttcttcctcaggtaagagtgttgccatcatgaacccggccacgaggaagacacagtacaaggttcaagcatgcacgcaagaagaagtgaacgcggtgatggaactggcgaaatcagctcagaaatcgtgggcgaaaactcctctttggaaaagagctgagcttcttcacaaggctgcagcaatccttaaggacaacaaagctcccatggctgagtctcttgttaaagaaatcgctaaacccgccaaagattctgttact

SEQ ID NO: 153939 - DNA, 449 bp, Arabidopsis thaliana columbia
gatactgctcataactttggctttggggactcattttccgccgttgccaatcctgatcctgcttctcagaatgtgcaacctgcatcgaactcaccaggttttcctcaagagcaatttgctacatctcagagtggtattgatatcctcgctggcattctcccaccatctggacctccagtacaatcgggtccctcaataccaacatctcaatttcctcccagtggaaacaacatgtacgagggatttcattctcagccgccggtatctacagctccaaacctgcctggacaaactccatttggacaagctgttcaaccatataacatggttcctcattctcaaaatatgactggagccatgccatttaatagtggaggcttcatgcaccagccgggctcacaaactccttactctaccccaagtggaccagctggtcagttcatggcaca

SEQ ID NO: 153940 - DNA, 224 bp, Arabidopsis thaliana columbia
  unsure (1)..(224): unsure at all n locations
actaaaagactttttatagggtttattgtccaaatttgattcgggtaagagccttanaancaacacatacatacaaattacaagaaactagctacaacgtgatgatgataatgggactgaacatcacaatgagttttcttggttttcaaattcttaacccgacttgaagagcagcacagctttctggtcggggtagaagctatcgaaatcgccatcttcacgtt

SEQ ID NO: 153941 - DNA, 459 bp, Arabidopsis thaliana columbia
actggttctggaaaaactttcactatatatgggcatgagagcaatcctggactcacacctcgagctacaaaggaactgttcaacatattaaagcgagatagcaagagattttcattttctctaaaggcatatatggtggaactttatcaagacacacttgtagaccttttgttaccaaaaagtgcaagacgcttgaaactagagattaaaaaagattcaaagggaatggtctttgtagagaatgtgacaactattcctatatcaactttggaggaactgcgaatgattcttgaacggggatcggaacgacgacatgtttctggaacaaatatgaatgaagaaagctcaagatctcacctcatattatcagttgttattgaaagtattgatcttcaaacccagtctgctgcgaggggcaagctgagttttgtggatcttgctggttctgagagagtaaaa

SEQ ID NO: 153942 - DNA, 230 bp, Arabidopsis thaliana columbia
gagcaaaagtactttcattcagacttcagtttaagctatggcggcgaacgattcttcaaatgctattgacatcgacgggaatgtcgactccgattcgaatcttaacactgacggtgacgaagcgaccgataatgattcctcgaaggcattggttactatccctgctccagccgtttgtcttttccggttcgccggagatgctgctggtggcgccgttatgggcctctatc

SEQ ID NO: 153943 - DNA, 450 bp, Arabidopsis thaliana columbia
  unsure (1)..(450): unsure at all n locations
ttccgatctacttctccggcttatcaccgatttagatctaagcctgaggtttccttttgcattttagagattccgaggatgagacaacggcaactattttccgtgtttttgcttctcttagctttcgtttcgttccagaagctttgctactgtgacgatcaaacggttctgtatgaatcgttcgatgagccttttgatggccgctggatcgtttcgaagaatagtgattacgaaggtgtatggaagcatgcaaagagtgaaggacatgaggattatggacttctcgtgagtgagaaggctaggaagtatggaattgtgaaagagcttgacgagcctctaaacctcaaggaaggaactgttgttcttcagtacgaggttcgtttccaggaaggacttgagtgtggtggtgcttactttgagtacctncgtcctcaggaagctggatggaca

SEQ ID NO: 153944 - DNA, 420 bp, Arabidopsis thaliana columbia
atttcagattcaatagtgcggtattgagagggaagaactgggagctcccactgccaccattggggaagggctggtttgagaatgtgtatatggacggtgagatcagagtggccaaggacatcagaggagactacttaattgttgatcgtgctccttataactggactgaatcatttgtataatttgtgatgctttttgcttcttgtataagttatacaccatttctgtctctctcctttataattgggcctcaaatagatgatgcaggaatatagggaggaggaggaagaggaatttgaaggatcattcaaagtgtcatccttgagtttatttagggtttttgtctgtgtttgttacaaacacaccacccacattttctatgcccttttttaatgttattttcacaatccatgacttaaa

SEQ ID NO: 153945 - DNA, 370 bp, Arabidopsis thaliana columbia
agaaaacgaaaaccctagtttcagaggcatctccagacaccgaaaatggcggaaggactcgttttgaagggcaccatgcgtgcacacactgacatggtgacggcaatcgccaccccaatcgataacgcagacatcatcgtctcagcttcccgcgacaaatccatcattttgtggaaactcaccaaggacgacaaagcctacggtgtagctcagaggcgtctcactggtcactctcacttcgttgaggatgttgttctctcctccgatggacaattcgcgctttccggcagctgggacggcgagctccgtctttgggatcttgctgctggtgtctccactcgtagattcgttggacacaccaaggacgtgc

SEQ ID NO: 153946 - DNA, 244 bp, Arabidopsis thaliana columbia
gtgaaccgcttgttagcgaagaagaagaagaagaagctactgaagttttactagtggagaagacgaagttgtgtaagagacgaggagacgaagaaaaaacggaagagagaagagacgatttgttgttactagctttaacgccgatggtacgatcgaaatctcaaggaactactcggcgcgtcacttccacgccaccttctgttgacgtggagaaaccggtaccaaacggagatctctacatggg

SEQ ID NO: 153947 - DNA, 465 bp, Arabidopsis thaliana columbia
aactccatcagtactttaaccatcacttcaaagttcaaactctttttttttttttttttgtttgatccaaattttaacaaaatgatggatcgcaatttcctcctaacagttacattgatctgcattgtcgtcgccggtgtcggtggccaatctcctatctcttctccgaccaaatctcccaccactccttctgctccaactacttcccctactaaatcccccgccgttacttctcccactacggctccggcgaaaactccaactgcttcggcttcttcaccggttgagtcaccaaaatctccggctcctgttagcgagtcgtctccaccaccgacacctgttccagagagctctcctccggttcctgcaccaatggtttcttctccagtgagctctccaccggttccagcaccagtagctgattctcctccagctccggtagccgctccggttgctgatgtaccg

SEQ ID NO: 153948 - DNA, 374 bp, Arabidopsis thaliana columbia
aagatagacaacaactttaaataacacatattctcaattctgtaaagtcattctaatgaaacaaatgaacaacacagccaaaaaggcgctaagtggtaaagcctctggcaaacattttctcgattctcttcctcctaaaacccctaccggtttgagaagatcagtcacgttccttagtttgtctccatatctccagaatggtacttatcaagatccgcatcaagatcttccgcagaaatcttctctgcagggcccttaccaggacgcctaccacgaccaccaccacctcggccaccgccttctcgtccaccacctcgttgttgacctcctctcccttgtcctcctctccatggagcaccattggagtttccatt

SEQ ID NO: 153949 - DNA, 559 bp, Arabidopsis thaliana columbia
  unsure (1)..(559): unsure at all n locations
aattcccgggntcgagcccaacgcccgtccgggcaagaaagcttccaaattggcananntgagaagaaagtctctgtatgtaatnncgactanttcatcntnnccaaaatgggagagagtnnactaacantnnatcgcggacgctgnnngaacggctttaaatacnnncctcgagaaacccnnaaggtnnatggacccagccanngaaannggcagccnnngcatcaaccagcaannnaataatnngcaacttgngnnattcaagggtggcnnagcaatanntgggttctcaatggtnngtaaacgatgcagttattcggnnggccggacagtttcaaattatggacaaccttacanagttctcgggtgggatggtcagcccgtccttcagtcttccggttttacaccgcctctgctttacactgctacccaaacggcttatatgacttcaccagctcatgtctataacatgcagtctcctgctgtttattctcctcagtatggttatggaccatacaccaacatgatccctcagtttatgcctggatacccttcccat

SEQ ID NO: 153950 - DNA, 437 bp, Arabidopsis thaliana columbia
ctcgagactgtagagtgaagtttgatttatttagagagataagttaaaaaaaaaatggtcggtatggatttgttcaaatgtgtaatgatgataatggtgttggttgtctcttgtggtgaagctgtttctggagctaagttcgatgagctttatcggtcaagctgggctatggatcattgtgtcaacgaaggcgaagtcacaaaactcaagcttgacaattactctggagctgggtttgaatcaagaagcaaatacttgtttggtaaagtctctatccagattaagcttgttgagggtgattcagcaggaacagtcactgctttctacatgtcttcagatggtccgaaccacaacgaattcgattttgagttcttagggaacactaccggcgagccttacatagtccagaccaatatctacgtgaacggagttggaaa

SEQ ID NO: 153951 - DNA, 426 bp, Arabidopsis thaliana columbia
  unsure (1)..(426): unsure at all n locations
attctcttctctctcgatatcatctaaatctctctcgatctcaatttcgcaaaatggctgacaagaagatcagaatcggaatcaacggtttcggaagaatcggtcgtttggttgctagagttgttcttcagagggatgatgttgagctcgtcgctgttaacgatcctttcatcaccaccgagtacatgacatacatgtttaagtatgacagtgttcacggtcagtggaagcaccatgagcttaaggtgaaggatgacaaaactcttctcttcggtgagaagccagtcactgttttcggcatcaggaaccctgaggacatcccatggngtgaggctggagctgactttgttgttgagtctactggtgtcttcactgacaaagacaaggcttgtgctcacttgaagggtggtgctaaaaggttgcatc

SEQ ID NO: 153952 - DNA, 395 bp, Arabidopsis thaliana columbia
aaaaatgccggcgggacacggagtgagggcgagaacaagagatctgttcgcgagaccattcaggaagaagggttatattccactctccacttacctcagaaccttcaaggtcggcgattacgtcgatgtcaaggttaatggagctatccacaagggtatgcctcataagttctaccatggtcgtactggtcgcatctggaatgtcactaaacgtgccgttggtgttgaagtcaacaaacagattgggaacagaatcataaggaagaggatacatgtgcgtgtggagcatgtgcaacagtcaaggtgtgctgaggagtttaaactcagaaagaaacagaacgatgtgcttaaggctgatgctaaagccagaggtgagactatcagcaccaagagac

SEQ ID NO: 153953 - DNA, 427 bp, Arabidopsis thaliana columbia
  unsure (1)..(427): unsure at all n locations
tggagctcgtgacctcagtttaacgaccaacctgcgttctnntatganncnccgganggnggggaggttctaggacggnacgaccaaatcttctccaagattttgacgagagaagctcttagctttgtggctgagttacagagagagtttcgtggccatgtgaagtatgccatggagtgccggagagaggcaagacggcgttataactccggtgccgttcctgggtttgatccttccactaagttcatcagagacggtgattggagctgtgcctccgtccctcctgccgttgctgaccggagagttgagatcaccggtccggtcgagaggaagatgatcatcaacgctcttaactccggagctaaaagtcttatggctgatttcgaggacgctttgtctcaaactgggagaatctgatgagagggca

SEQ ID NO: 153954 - DNA, 425 bp, Arabidopsis thaliana columbia
  unsure (1)..(425): unsure at all n locations
taaaatagaattacaaacaaaaaggtttcgtccatgtttcctcncanngggcngctggggcgcctgaccatcggcgcctctccagccaatgcagatggacctgtttgcccgccgtcgaacaaactaagccgggcaagtttccctgaaggttttttatttggcacggctactgcggcataccaggtcgaaggtgcgattaatgaaacttgtcgtggaccagccttatgggacatctactgtagaagatatccagagaggtgcaataacgataacggcgatgtggccgttgatttcttccatcgctataaggaagatttccaactaatgaagaatctaaacacagacgcctttagaatgtctttcgatggccaagaatattccctcatgggagaaaggaaaaaggagcgagtcaagcttgattgcat

SEQ ID NO: 153955 - DNA, 358 bp, Arabidopsis thaliana columbia
  unsure (1)..(358): unsure at all n locations
aaggacgggccagagcgacccgtacacacatatggaacaacaaaccacgagactgacctcccttcacgaagangaaggnagaaggcgcgtactngctcgcggnnnngagcgccaaacccncaccaaccagngccganancaagactatccttggatcagttggtgctgagacagaggattctcagattgagcttttgttgaaggaagtgaaaggaaaagatttggctgagttgattgctgctggaagggagaagttagcttcagtgccgtctggtggcggaggtggtgttgcggttgcttctgctacatctggaggtggaggaggtggtggtgcctctgctgctgagtccaagaaaga

SEQ ID NO: 153956 - DNA, 446 bp, Arabidopsis thaliana columbia
  unsure (1)..(446): unsure at all n locations
catctacaacaagaagactncngangncattttcnctggtgttttttctcactncactctacgagtgggagacttgaagatcattggcttccatgggtctgccgggggcaatcttaattctcttggggcttactttgctccgttgactactacaactccgttgactcctgccaagcagctaacggcatttggtagtgatgacggaactgtatgggatgatggtgcttacgttggggttaagaaggtgtacgttggacaagcccaagatggaatctcagctgttaagtttgtgtacgacaaaagccctgaggaggtcacaggagaagaacatggaaagagtactctactcggattcgaagagttcgtacttgactatccaagtgaatacatcaccgcagtcgatggcacttatgataaaatctttgggagtgatggctcagtcataa

SEQ ID NO: 153957 - DNA, 187 bp, Arabidopsis thaliana columbia
  unsure (1)..(187): unsure at all n locations
ccctcccctttanncggngacnnacaaagggcggctttttggagatcnctgagcctctccaccaaggttttcaattatgcagtttccggataattttgcttgaaacttatttaggagttgcgtttcatataaaaaattttaaaaaaaaaacttttaaaaaatgaatatgaaaaaaacattgaagatt

SEQ ID NO: 153958 - DNA, 161 bp, Arabidopsis thaliana columbia
  unsure (1)..(161): unsure at all n locations
aaaagagcaagccccncnnccaanncaaccgcaaccanncgagacgaanancaccagaaancgaagngcccancaaccccacaacaangcaccaaanngcccacnncgcnanccgacgcagngggncacnangncaccncagagaccacaccacaacaaac

SEQ ID NO: 153959 - DNA, 344 bp, Arabidopsis thaliana columbia
  unsure (1)..(344): unsure at all n locations
aaaccgaagccccaaaacacaanaaananaaacccgcaccgancatgagcctagncccaagaaccctctacgaccaaatcttcatccacaaggacaacaacgcatgccctgcaaaaggtttctacccctatgaagctttcgtggaggctacaagatccttcccgaagttcgggagcgtaggaaacttttggacaaggcgacgcgaagtggctgcgtttttggcgcagatatctcacgagacaacaggtggttgggccacggcaccagacggaccatatgcgtggggattgtgttttaaagaggaagtgagtccacagagtaattattgtgatgcttctaataag

SEQ ID NO: 153960 - DNA, 166 bp, Arabidopsis thaliana columbia
gaccttcaagggaccacctcctccttacgagaaggagcgtcttgattctgaattgaagctggttggtgagtatggtctgcgtaacaagcgtgagctctggagagtgcagtactctcttagccgtatccgtaatgctgctagagatcttgtgactcttgatgagaag

SEQ ID NO: 153961 - DNA, 417 bp, Arabidopsis thaliana columbia
  unsure (1)..(417): unsure at all n locations
agaagagtcatgacggttcctttcnncaccactcgctcngtttttcngaancgngaaggnngggagggggaatctgctagngnngncgaacatgtcaagaagaatccagattctgctacgaaaggaatcgtgttgaggaaacgtttgcaattgatgatgtataacaatatgttccgtatcatgttcgatagaagatttgagagtgaggatgatcctcttttccttaggcttaaggctttgaatggtgagagaagtcgattagctcagagctttgagtataactatggagatttcattcctatccttagaccattcctcagaggctatttgaagatttgtcaagatgtgaaagatcgaagaatcgctcttttcaagaagtactttgttgatgagaggaagcaaattgcgagttctaag

SEQ ID NO: 153962 - DNA, 329 bp, Arabidopsis thaliana columbia
ctgattatcttgctaaatccaccccacttcctaaaatctctccgattctcctaaccacggcggatttttctcacggagctaatttcgccatcgccgacgctaccgttcttggctctcctccggagacgatgactttgtcacaacaagtgaagaaattctcggaaaacaagaataagtggacaaatcaaacacgttctgaagctatctacttgatctacattggttctgatgattacttgagctatgctaagagtaatccaagtccatcagatactcagaaacaagcttttgttgatcaagtcaccactaccataaaagcagaaataaag

SEQ ID NO: 153963 - DNA, 328 bp, Arabidopsis thaliana columbia
  unsure (1)..(328): unsure at all n locations
cgacaaggcaggaacagagnnacatgtcgcgtcatttttccgcnaagcnnnnagccggcgagaggttggcagcncccggaggcccacacccncancgacggngaacccgccacnggangncnngncgannnaggccnnnacnncnnccacaacnacgccaaannnagacagacncaaggnnccggnnncggnccanncnncnancnccccaaaanggaacanncnagggaagcaaagananggaacagngnnnnngagcgcgccgagaaganggcngggaaagagagaggaagcannagagcaaccgngcccancgagacccncccgg

SEQ ID NO: 153964 - DNA, 276 bp, Arabidopsis thaliana columbia
cctaataccatctcaaagaagagatcaagatttgaaatcaagaagacaccattactcagatcaacatgcttgccgttcaccgtccttcttccgccgtatcagacggagattccggtcagattccgatgatgatcgcgtcgtttcaaaaacgtatgccttctctctcacgcgactccacggccgctcgttttcacacacacgaggtttggcctaatcaatgttgctccgacgatattcaagagaactccggtccaatcttcaccgattgggccggcg

SEQ ID NO: 153965 - DNA, 428 bp, Arabidopsis thaliana columbia
  unsure (1)..(428): unsure at all n locations
gctggaccaaacggaagcgtcagggaannngtcctgcagttcggancaaggcncagctagaagctgcatgcccttccacagnctcatgtgctgacatcgtcacattggccacacgtgactcggtggccttagccggaggcccaagctacagcatccccacgggaaggcgtgacggtagggtctcaaacaatcttgatgtaaccttaccgggtccaacgatctccgtctctggagccgtgagtttattcacgaacaaagggatgaacacgttcgatgcagtagctcttttgggtgcacacactgttggtcaaggaaattgtggtctctttagtgacagaatcactagcttccaaggaactggacgaccggacccgtccatggaccccgctttggttaccagcctaaggaacacatgcagaaatagcgcg

SEQ ID NO: 153966 - DNA, 350 bp, Arabidopsis thaliana columbia
  unsure (1)..(350): unsure at all n locations
agaagatcaaggggaccaaccccggagtttcctcggtttgagacgaaangacncnagnggggtgggaatttatgaaagacaagcgcgaccctcccttccctggagctggatatcaaatactttgatcttggactgcctaaccgcgatttcactgatgataaggtgactatagagactgctgaagctactttaaagtataatggggctattaagtgtgcgacgattactccggatgaagctcgtcgtagggagctcggcttaaagaaaatgcggaggagtcctaatggaactatgaggaacactacaaacggcacagttttcacggaacctatcatttgcagaaacattcc

SEQ ID NO: 153967 - DNA, 339 bp, Arabidopsis thaliana columbia
  unsure (1)..(339): unsure at all n locations
nctgagaggnggncgaaagatccaagagttgctgatttttctctcnnagancgnnagagcggagcctatctaagaagaagatgggaaccttattcacgcggatgttctcttccgtctttggtaacaaagaagctcgaatcctcgtcctcggtctcgacaatgctggaaaaaccacaatcctctatcggcttcagatgggggaaggtgtctctacgattccgactattggatttaacgttgagactgtgcagtacaacaatatcaaagttcaggtctgggatttaggtggacaaacaagcatcaggccatactggcgattctatttcccgaatacacaag

SEQ ID NO: 153968 - DNA, 435 bp, Arabidopsis thaliana columbia
  unsure (1)..(435): unsure at all n locations
agagaaacgaatctttcagngnaaagattcctcgttttatganagccgnaccacaaggggcgggccagaagggcgncnntaccagccagagcatgccanggaggccannggaaacgccggnncngcgangggaancnnanccaaagacggngnngngnngancggngagaagaaaggcaccncaaagcttcttcaaacctcaacctctgctgagaaaatgtacaagattgatgaccatgttgcctgtgctgttgctggtataatgtctgatgctaacatacttatcaacacggctcgagttcaagctcaacgttacaccttcatgtaccaagagcccatgccggttgagcagctggttcaatctctttgtgacacaaaacaaggatacacacagtttggtggtcttcgcccgtttggtgtctcctttctttttgc

SEQ ID NO: 153969 - DNA, 363 bp, Arabidopsis thaliana columbia
  unsure (1)..(363): unsure at all n locations
ctncnctgcgtctncttcnncnncagcnnngctccttctctatcnncaaaganggccaccgaggagccttctcaaactcgctggagcttcctgtttgggaggaagaagctgcctgaagaagatgtatcaaacaaggaccaaccagaagatggatcatccaacggtaataacggtgatgtcaacaacaactcttccccagtcaccaatcaggatggtaacacagccttggccaatggcaatgtgattcgcgagaagccgaaaaagtccatgtttcccccgtttgagtctgcggaaactcgtactctcgctgagagtttgagtagggatatcattcgtgggaatccaaatatcaagtgggaaagc

SEQ ID NO: 153970 - DNA, 336 bp, Arabidopsis thaliana columbia
  unsure (1)..(336): unsure at all n locations
caacggcaaatggaccctcgcctacacatcgntcgtgaatttgttcccgttgctatcacgaggaatcgtaccgttaataaaagtcgatgagatctctcaaaccattgattcagataacttcaccgtccagaactctgttcgtttcgctggtcctttaggtacaaactcgattagcaccaacgctaaattcgaaatccgaagccctaaacgcgtccagattaagtttgagcaaggcgtaattgggacgcctcagctaacggattctattgagataccggaatatgtagagggtcttgcgcaaaagattgatcttaacccgatcagaaggttacttac

SEQ ID NO: 153971 - DNA, 158 bp, Arabidopsis thaliana columbia
  unsure (1)..(158): unsure at all n locations
gaaaccctaatcggcgacaatgggcatcccctcccgtctctatccacaagaggcngaccaggagangcatgcagaagcaanggaggaccaaccaaaagnangagangggaaggcagccagccaacaccaagctctcaagcaacaagacgggcagaaga

SEQ ID NO: 153972 - DNA, 400 bp, Arabidopsis thaliana columbia
  unsure (1)..(400): unsure at all n locations
gtttttctccggtcttctctggctctctgtctttctccgtttctaagaagannnnnnaagggctgggcaagaaatnatggaatctgcagggatccagcaactgcttgctgctgaacgtgaagctcagcaaattgtcaatgccgctaggaccgcaaaaatgactagactgaagcaagccaaggaagaagctgaaacagaggttgctgagcacaaaaccagtacagagcaggggttccagaggaaactcgaagcgacaagtggagattcaggtgcaaacgtgaagaggcttgagcaagagactgatgccaaaatcgagcaattgaagaacgaagctacgagaatttccaaagatgttgtggatatgcttctgaaaaatgtgaccacagtgaacaactgagta

SEQ ID NO: 153973 - DNA, 309 bp, Arabidopsis thaliana columbia
  unsure (1)..(309): unsure at all n locations
ctcttcttgattatcgtccagggatcgcaaccgctcgcatttttcgangccggcgaaacagagggcggctaatttcaacaggaaccctgatctgacacaggggagttggtaaatactcaaggtctcagatgtaccataagagaggtttgtgggcaatcaaggccaaaaatggaggcgttttcccccgccacgacgctaaatctaagggtgatgctccggaggagaagccaccgatgttttattcagctgaagacgtgaataaaccttttcccaacatgtgcacggcaaaaccagccatgctcagagtta

SEQ ID NO: 153974 - DNA, 452 bp, Arabidopsis thaliana columbia
  unsure (1)..(452): unsure at all n locations
cacgcgtccggattctctaatngacganggcgcnnnggcctctctccttggactanccgnanagcggcgacgctccggcgtgtagctcgacctttcgctactgacgcggtggttgagtcggattacaagcgtggtgagatcggtaaggtctccggaatcccagaggagcatctttctcgcaaggtgataatatactcacctgctagaacagctacccagtcaggatctggaaaactcggaaaatggaagattaacttcgtctccaccttaaagtgggagaatccgttgatgggatggacttctacaggtgacccctatgctaatgttggtgactctgctcttgcntttgattctgaagaagctgctaagtcttttgctgagcgtcatggttgggattataaggccaagaagcccaacacacccatattgaaggtcaaggtctactcggacaa

SEQ ID NO: 153975 - DNA, 423 bp, Arabidopsis thaliana columbia
  unsure (1)..(423): unsure at all n locations
gagtgtttctctctacagnttttagagggaaccgtcgnttcacacagnacacgctncagtgggagtggttgggtgatcggtccgaggcgacatacaagatgaccggaaactcttttaactcgatgaaagatttcctgaagcagacaggcggctatgcggtaatagacggagggcttgcaacggagttcgagagacatggagcagatctcaacgatcctctctggagcgccaaatgccttgtcacctctcctcacctcattcacaccgtgcatctcgattaccttgaagctggtgctgatatcatctccagcgcttcttatcaagccacgattcaggggtttgaagcatagggattttctagagaagagagcgaatctttgcttaaaaagagcgtagaaatagcgactgaagcttggaactcgt

SEQ ID NO: 153976 - DNA, 400 bp, Arabidopsis thaliana columbia
  unsure (1)..(400): unsure at all n locations
gncgnggatagttcaatccnnnnccncncttttcctctttttatagaaaagncactnatggcggatggctcgggaaacggctatggcaaccccagagaagaagtagtaatggtgaatctcaaggatgaagtcgaacatcaacaagaaatggaagacattcataacccaagacccttgaagaaacaagactctctactctcagtctctgtccctttcttacaaaagttgatcgcggagtttcttggaacctactttttggtattcaccggttgtgcatcggtggttgtaaacatgcaaaacgacaatgtcgtgactcttccagggatcgctatcgtttggggactcaccattatggtccttatttactctcttggtcacatctctggtgctcaatataatc

SEQ ID NO: 153977 - DNA, 239 bp, Arabidopsis thaliana columbia
  unsure (1)..(239): unsure at all n locations
gtcttgaagatctgaggatccatacaaagaaccctcgcctttcttaagangnggancncgaaaggatgtctaagtacacacacggttacgtccgtgctgatcttgcagctttgtgcacagaggccgtcctgcaatgcatcagggagaagatggatgtgattgatctggaagatgtctccatagacgcttaaatcctcaattgccatggcagtcacttatgtaacattttcacacttttt

SEQ ID NO: 153978 - DNA, 348 bp, Arabidopsis thaliana columbia
  unsure (1)..(348): unsure at all n locations
cttcttcgtacttgcagatttcgcctccngtgcatnttctttctgngaagangnnctccgctgggaacatgatcaagaaggacaagcctgctgagccaacagaatgcgaggagcaagttgctcaggctttgtttgatttggagaacactaaccaggagttgaaaagcgagttgaaagatctctacatcaaccaagctgttcacatggatatctctggaaaccgcaaagctgttgtgatttacgttccattcagattgaggaaagctttccgcaagattcatccccgtctcgtcagagagcttgagaagaagttcaggggaaaggatgttatctttggtaccacaagaa

SEQ ID NO: 153979 - DNA, 437 bp, Arabidopsis thaliana columbia
  unsure (1)..(437): unsure at all n locations
ctcataattagctcatcaagcnccnctccctccctcttattcgnacnaganntctcttttgcctttttatttggtagagctctgctggttcatggatattgagccctgcttgaagttttggggggtgtttttttcttctttataattgcatggcaactacaattgatcaaaccagcatcaagtcattgcatttccatcaagtcatccgtttgatcatcacaatcatcttcttagctttcttatttctcattggccctacaagttccatgaatcatcaccttcatgaatcctcatctaagaacactatggctccttccaagaggttccttctacaacctttcactccatcttcatctactatgaaaatgcgtgcaacagctcaccctagacgcagtggcacttctttcttttcggcgaggaaaaaggagagagagttc

SEQ ID NO: 153980 - DNA, 428 bp, Arabidopsis thaliana columbia
  unsure (1)..(428): unsure at all n locations
actncggctctcttctctgcttcgcccactcacctcccgttttataaaggcggagnctctctgcaggtattttgctcatccatcgattctcagagttcaaaatggttgatcaagttcagcaccccactattgcgcagaaagctgccgggcagttcatgcgttcaagtgtttccaaggacgttcaagtgggttaccagaggccttctatgtatcaaagacatgcaacctacggaaactactccaatgctgcatttcaatttcctccgacatcccggatgttggcaacaactgcttctcccgtgtttgtccaaaccccaggagagaaggggttcactaactttgcccttgaacttctgatgggtggtgtttctgctgccgtctccaagactgctgctgctcctattgaacgtgttaagcttttgatccag

SEQ ID NO: 153981 - DNA, 353 bp, Arabidopsis thaliana columbia
  unsure (1)..(353): unsure at all n locations
ctcgctcaccgttctcatnnccacaatgcnctgcccttctaagaagcgaancgcncgaaattagggtttctactgagagaagatgccacaaatcataagcattcacatcggacaagctgggatccaggtcggaaattcgtgttgggagctttactgtctcgaacatggaatccagccggacggaatgatgccgagtgatactacagttggtgttgcacacgatgcgttcaatactttctttagcgagactggtgctgggaagcatgtccctagggctggcttcgttgatctcgagcctaccgttatcgacgaagttcgtactgatacttaccgtcaactttttccatccagag

SEQ ID NO: 153982 - DNA, 387 bp, Arabidopsis thaliana columbia
  unsure (1)..(387): unsure at all n locations
cttagagtatgcagaggtaactcatactcccctccctcttggaaancngaagnngntgatctatctgaatttacatatctcattatcatcaagatccaactttgtgcccaatgtcttgatggggatgcaagaactgagataccttgcgttaccaagccttatcgagaggaagacaaaactagaattgagtaatctagtaaaattggagactttagagaatttctcaacaaagaatagcagcttggaggatcttcgtggtatggtcaggctgagaacgctcaccatcgaattaattgaggagacgagtttagaaactctagctgcatctataggtggattgaaatacctggaaataacttgaatagatgatctcggttctaagatgag

SEQ ID NO: 153983 - DNA, 452 bp, Arabidopsis thaliana columbia
  unsure (1)..(452): unsure at all n locations
cacgcgtccggccaagcaaagggggtnnnagggnnnnngacttcgttcctgatcncnnncnnnngnnnctccggctggcgtttttatggccttctcttctctcctcagatctgccgcctcctacacggttgccgctcctcgccctgactttttctcgtcgccggcgtctgatcattctaaggtgttgtcaagtcttggatttagtcgcaacctgaagccatcaagattttcttctgggatatcttcatctctacaaaatggcaatgcaagaagtgtgcaacccatcaaggccacggctacagaagtgccatctgcagttcgaaggtcaagtagcagtggaaagacaaaggttgggatcaacggttttggtcggattggaaggttggtccttcccattgcaacatcaagggatgattttggggttggtgcagtgtttgccccattcttgttgc
